United States Patent Application Publication US 2005/0244851 A1 - sequence listing, part 93

SEQ ID NO: 3623974 - DNA, 25 bp, Homo sapien
gctagtcgccagataaatacagcag

SEQ ID NO: 3623975 - DNA, 25 bp, Homo sapien
tgccgcgcttcaagtgaataaatcc

SEQ ID NO: 3623976 - DNA, 25 bp, Homo sapien
ccaaggatttagtgccgcgcttcaa

SEQ ID NO: 3623977 - DNA, 25 bp, Homo sapien
caagtgaataaatccctccagtgtc

SEQ ID NO: 3623978 - DNA, 25 bp, Homo sapien
agtgcccgccaaggatttagtgccg

SEQ ID NO: 3623979 - DNA, 25 bp, Homo sapien
ttcccttttgacactcttgtctgca

SEQ ID NO: 3623980 - DNA, 25 bp, Homo sapien
tcgttggtggctcccgtcgcctttc

SEQ ID NO: 3623981 - DNA, 25 bp, Homo sapien
ttagtcctcgttggtggctcccgtc

SEQ ID NO: 3623982 - DNA, 25 bp, Homo sapien
tttcccttttgacactcttgtctgc

SEQ ID NO: 3623983 - DNA, 25 bp, Homo sapien
gcaacagggaagctccgggaacgcg

SEQ ID NO: 3623984 - DNA, 25 bp, Homo sapien
gcctgtgagccgtgataacttccca

SEQ ID NO: 3623985 - DNA, 25 bp, Homo sapien
gaaccgagatcatccagcaacaggg

SEQ ID NO: 3623986 - DNA, 25 bp, Homo sapien
agtgtcagggtcagatgctccttct

SEQ ID NO: 3623987 - DNA, 25 bp, Homo sapien
tgtttttggccctgtcatatttctc

SEQ ID NO: 3623988 - DNA, 25 bp, Homo sapien
tttttggccctgtcatatttctcca

SEQ ID NO: 3623989 - DNA, 25 bp, Homo sapien
ttgtttttggccctgtcatatttct

SEQ ID NO: 3623990 - DNA, 25 bp, Homo sapien
gtttttggccctgtcatatttctcc

SEQ ID NO: 3623991 - DNA, 25 bp, Homo sapien
tgattccccagtagtagaaggagat

SEQ ID NO: 3623992 - DNA, 25 bp, Homo sapien
cccagtagtagaaggagatttagaa

SEQ ID NO: 3623993 - DNA, 25 bp, Homo sapien
tccccagtagtagaaggagatttag

SEQ ID NO: 3623994 - DNA, 25 bp, Homo sapien
catctgattccccagtagtagaagg

SEQ ID NO: 3623995 - DNA, 25 bp, Homo sapien
ggcttggctggaatctgagcagtga

SEQ ID NO: 3623996 - DNA, 25 bp, Homo sapien
cagggcttggctggaatctgagcag

SEQ ID NO: 3623997 - DNA, 25 bp, Homo sapien
agggcttggctggaatctgagcagt

SEQ ID NO: 3623998 - DNA, 25 bp, Homo sapien
cttggctggaatctgagcagtgatt

SEQ ID NO: 3623999 - DNA, 25 bp, Homo sapien
ctgtgagcttgttcctgacatctgg

SEQ ID NO: 3624000 - DNA, 25 bp, Homo sapien
gtgagcttgttcctgacatctggaa

SEQ ID NO: 3624001 - DNA, 25 bp, Homo sapien
tgtgagcttgttcctgacatctgga

SEQ ID NO: 3624002 - DNA, 25 bp, Homo sapien
gagcttgttcctgacatctggaatg

SEQ ID NO: 3624003 - DNA, 25 bp, Homo sapien
acagcgactaagaggcccagactca

SEQ ID NO: 3624004 - DNA, 25 bp, Homo sapien
atgaccacagcgactaagaggccca

SEQ ID NO: 3624005 - DNA, 25 bp, Homo sapien
catgaccacagcgactaagaggccc

SEQ ID NO: 3624006 - DNA, 25 bp, Homo sapien
ccacagcgactaagaggcccagact

SEQ ID NO: 3624007 - DNA, 25 bp, Homo sapien
cgagaggcggagcagctttgtggct

SEQ ID NO: 3624008 - DNA, 25 bp, Homo sapien
agttcctgtccttgcgagaggcgga

SEQ ID NO: 3624009 - DNA, 25 bp, Homo sapien
tccctcttggagccgccccgaaagc

SEQ ID NO: 3624010 - DNA, 25 bp, Homo sapien
tggagccgccccgaaagcctgcctg

SEQ ID NO: 3624011 - DNA, 25 bp, Homo sapien
ctggttgacaggaatgacagctcag

SEQ ID NO: 3624012 - DNA, 25 bp, Homo sapien
gttgacaggaatgacagctcagagt

SEQ ID NO: 3624013 - DNA, 25 bp, Homo sapien
ggaatgacagctcagagttgtgctc

SEQ ID NO: 3624014 - DNA, 25 bp, Homo sapien
aggaatgacagctcagagttgtgct

SEQ ID NO: 3624015 - DNA, 25 bp, Homo sapien
tgtatggaacgcttccccctttcaa

SEQ ID NO: 3624016 - DNA, 25 bp, Homo sapien
accatcacagcctgcgaactcgaca

SEQ ID NO: 3624017 - DNA, 25 bp, Homo sapien
atcaccatcacagcctgcgaactcg

SEQ ID NO: 3624018 - DNA, 25 bp, Homo sapien
tgaagatgtatggaacgcttccccc

SEQ ID NO: 3624019 - DNA, 25 bp, Homo sapien
ccttggagcctctggtgacagcttt

SEQ ID NO: 3624020 - DNA, 25 bp, Homo sapien
cagctttagctcatttgctttggtc

SEQ ID NO: 3624021 - DNA, 25 bp, Homo sapien
caatgggcttggctactccctggaa

SEQ ID NO: 3624022 - DNA, 25 bp, Homo sapien
aaatcctgaggcatggcttgtgtcc

SEQ ID NO: 3624023 - DNA, 25 bp, Homo sapien
ctcaggtgctgcccatagccagggc

SEQ ID NO: 3624024 - DNA, 25 bp, Homo sapien
cacatctctatggacctgtgctggc

SEQ ID NO: 3624025 - DNA, 25 bp, Homo sapien
tctctatggacctgtgctggcactg

SEQ ID NO: 3624026 - DNA, 25 bp, Homo sapien
ctgtgctggcactgcaacagtgaag

SEQ ID NO: 3624027 - DNA, 25 bp, Homo sapien
tatggacctgtgctggcactgcaac

SEQ ID NO: 3624028 - DNA, 25 bp, Homo sapien
cgatgaagctgcctgtgactctccg

SEQ ID NO: 3624029 - DNA, 25 bp, Homo sapien
tgcgtggctaatcccaagggcttca

SEQ ID NO: 3624030 - DNA, 25 bp, Homo sapien
caaccactaaggaagcgatgaagct

SEQ ID NO: 3624031 - DNA, 25 bp, Homo sapien
acgcagcagcagtatgggtgctgct

SEQ ID NO: 3624032 - DNA, 25 bp, Homo sapien
ccgcagcagctgagaccagagcctc

SEQ ID NO: 3624033 - DNA, 25 bp, Homo sapien
agggatccacagaacccacggccat

SEQ ID NO: 3624034 - DNA, 25 bp, Homo sapien
acggccatgcctaccccgaagctga

SEQ ID NO: 3624035 - DNA, 25 bp, Homo sapien
accccgaagctgactggcagggcct

SEQ ID NO: 3624036 - DNA, 25 bp, Homo sapien
tgcccagctttgacccggtgcatgc

SEQ ID NO: 3624037 - DNA, 25 bp, Homo sapien
gctttgacccggtgcatgctgatga

SEQ ID NO: 3624038 - DNA, 25 bp, Homo sapien
gctgatgagtctgttccaatcactg

SEQ ID NO: 3624039 - DNA, 25 bp, Homo sapien
tgcatgctgatgagtctgttccaat

SEQ ID NO: 3624040 - DNA, 25 bp, Homo sapien
taatccaggggattaagccaatgcg

SEQ ID NO: 3624041 - DNA, 25 bp, Homo sapien
tttgattaatccaggggattaagcc

SEQ ID NO: 3624042 - DNA, 25 bp, Homo sapien
aggggattaagccaatgcgcagaag

SEQ ID NO: 3624043 - DNA, 25 bp, Homo sapien
tccaggggattaagccaatgcgcag

SEQ ID NO: 3624044 - DNA, 25 bp, Homo sapien
tctcccccttgaagtgcttctccct

SEQ ID NO: 3624045 - DNA, 25 bp, Homo sapien
ggagtgtttaagcatttctctctcc

SEQ ID NO: 3624046 - DNA, 25 bp, Homo sapien
tgtggcaggaggagtgtttaagcat

SEQ ID NO: 3624047 - DNA, 25 bp, Homo sapien
ctttgatgtggcaggaggagtgttt

SEQ ID NO: 3624048 - DNA, 25 bp, Homo sapien
acacgcaggtgagagagagcatgtg

SEQ ID NO: 3624049 - DNA, 25 bp, Homo sapien
gggcacacgcaggtgagagagagca

SEQ ID NO: 3624050 - DNA, 25 bp, Homo sapien
gagaggcagggcacacgcaggtgag

SEQ ID NO: 3624051 - DNA, 25 bp, Homo sapien
gcagggcacacgcaggtgagagaga

SEQ ID NO: 3624052 - DNA, 25 bp, Homo sapien
acaccgatttttgggtctccgcttg

SEQ ID NO: 3624053 - DNA, 25 bp, Homo sapien
tcaatgcacaccgatttttgggtct

SEQ ID NO: 3624054 - DNA, 25 bp, Homo sapien
tttgggtctccgcttgggttgtgca

SEQ ID NO: 3624055 - DNA, 25 bp, Homo sapien
tctccgcttgggttgtgcatgtact

SEQ ID NO: 3624056 - DNA, 25 bp, Homo sapien
cacggtgggcttagcgttcagtggg

SEQ ID NO: 3624057 - DNA, 25 bp, Homo sapien
gggccaggccatgatgtgtcagcgc

SEQ ID NO: 3624058 - DNA, 25 bp, Homo sapien
tgggccaggccatgatgtgtcagcg

SEQ ID NO: 3624059 - DNA, 25 bp, Homo sapien
ggcttagcgttcagtgggccaggct

SEQ ID NO: 3624060 - DNA, 25 bp, Homo sapien
cttttgtgggcgcatagctccgagc

SEQ ID NO: 3624061 - DNA, 25 bp, Homo sapien
ggcagcaggcaaatattcatccgct

SEQ ID NO: 3624062 - DNA, 25 bp, Homo sapien
gaaacggaggctgcacagacgattg

SEQ ID NO: 3624063 - DNA, 25 bp, Homo sapien
tcagcactggcgtcgcttctgagca

SEQ ID NO: 3624064 - DNA, 25 bp, Homo sapien
taggtgctgtataattgtggaccca

SEQ ID NO: 3624065 - DNA, 25 bp, Homo sapien
gtcttcctggttggctatttgtctc

SEQ ID NO: 3624066 - DNA, 25 bp, Homo sapien
tgactgacatcagtagcaggttctt

SEQ ID NO: 3624067 - DNA, 25 bp, Homo sapien
tgtggacccactatctgactgacat

SEQ ID NO: 3624068 - DNA, 25 bp, Homo sapien
tgagttgtgtcagcgtgcatagcag

SEQ ID NO: 3624069 - DNA, 25 bp, Homo sapien
taacaactgtggattatgaagggtg

SEQ ID NO: 3624070 - DNA, 25 bp, Homo sapien
tgcccgtggacctcactttcagtga

SEQ ID NO: 3624071 - DNA, 25 bp, Homo sapien
gaaggttcggaattctgttcagctg

SEQ ID NO: 3624072 - DNA, 25 bp, Homo sapien
ttctcagagcactgttcctcaacat

SEQ ID NO: 3624073 - DNA, 25 bp, Homo sapien
tctcagagcactgttcctcaacatg

SEQ ID NO: 3624074 - DNA, 25 bp, Homo sapien
cctcaacatgtctggttatctgcag

SEQ ID NO: 3624075 - DNA, 25 bp, Homo sapien
tcctcaacatgtctggttatctgca

SEQ ID NO: 3624076 - DNA, 25 bp, Homo sapien
tttctccagagcacatatcagacac

SEQ ID NO: 3624077 - DNA, 25 bp, Homo sapien
acatatcagacacggctgaatccag

SEQ ID NO: 3624078 - DNA, 25 bp, Homo sapien
ccagagcacatatcagacacggctg

SEQ ID NO: 3624079 - DNA, 25 bp, Homo sapien
gagcacatatcagacacggctgaat

SEQ ID NO: 3624080 - DNA, 25 bp, Homo sapien
gttggaatcgactgttattgatggg

SEQ ID NO: 3624081 - DNA, 25 bp, Homo sapien
tggaatcgactgttattgatgggag

SEQ ID NO: 3624082 - DNA, 25 bp, Homo sapien
gggttggaatcgactgttattgatg

SEQ ID NO: 3624083 - DNA, 25 bp, Homo sapien
ggttggaatcgactgttattgatgg

SEQ ID NO: 3624084 - DNA, 25 bp, Homo sapien
gctttcggcagaagcagtgatgctg

SEQ ID NO: 3624085 - DNA, 25 bp, Homo sapien
cttggctttcggcagaagcagtgat

SEQ ID NO: 3624086 - DNA, 25 bp, Homo sapien
tttcggcagaagcagtgatgctgtc

SEQ ID NO: 3624087 - DNA, 25 bp, Homo sapien
agtccttggctttcggcagaagcag

SEQ ID NO: 3624088 - DNA, 25 bp, Homo sapien
agttgtacgccctaaactggctaat

SEQ ID NO: 3624089 - DNA, 25 bp, Homo sapien
cttgcagttgtacgccctaaactgg

SEQ ID NO: 3624090 - DNA, 25 bp, Homo sapien
gcccttgcagttgtacgccctaaac

SEQ ID NO: 3624091 - DNA, 25 bp, Homo sapien
caagcccttgcagttgtacgcccta

SEQ ID NO: 3624092 - DNA, 25 bp, Homo sapien
ggcatcttgatagttgtaggtgatt

SEQ ID NO: 3624093 - DNA, 25 bp, Homo sapien
tcttgatagttgtaggtgattttct

SEQ ID NO: 3624094 - DNA, 25 bp, Homo sapien
ctctggcatcttgatagttgtaggt

SEQ ID NO: 3624095 - DNA, 25 bp, Homo sapien
tagttgtaggtgattttcttatgaa

SEQ ID NO: 3624096 - DNA, 25 bp, Homo sapien
agggccactgcgtttcaggactcca

SEQ ID NO: 3624097 - DNA, 25 bp, Homo sapien
gactccagggagtgccgttcccgtc

SEQ ID NO: 3624098 - DNA, 25 bp, Homo sapien
cccgtcgcgtacactgggaaggtgc

SEQ ID NO: 3624099 - DNA, 25 bp, Homo sapien
tggagccccagctgtgcgtagtcag

SEQ ID NO: 3624100 - DNA, 25 bp, Homo sapien
ctaaagtcggcacaaagtggcggcc

SEQ ID NO: 3624101 - DNA, 25 bp, Homo sapien
aagtcggcacaaagtggcggccccg

SEQ ID NO: 3624102 - DNA, 25 bp, Homo sapien
tcggcacaaagtggcggccccgagt

SEQ ID NO: 3624103 - DNA, 25 bp, Homo sapien
agtggcggccccgagtgtagctcat

SEQ ID NO: 3624104 - DNA, 25 bp, Homo sapien
gaaataagtggcctgggactggctt

SEQ ID NO: 3624105 - DNA, 25 bp, Homo sapien
tttgaattgcaatgtggtgtatcca

SEQ ID NO: 3624106 - DNA, 25 bp, Homo sapien
ggtgtatccaatccatagagtaaag

SEQ ID NO: 3624107 - DNA, 25 bp, Homo sapien
gcttccacggtgataaaagattcat

SEQ ID NO: 3624108 - DNA, 25 bp, Homo sapien
ggtctggagccccgtcccacagcat

SEQ ID NO: 3624109 - DNA, 25 bp, Homo sapien
agaagcaaggtctggagccccgtcc

SEQ ID NO: 3624110 - DNA, 25 bp, Homo sapien
ggagaagcaaggtctggagccccgt

SEQ ID NO: 3624111 - DNA, 25 bp, Homo sapien
aagcaaggtctggagccccgtccca

SEQ ID NO: 3624112 - DNA, 25 bp, Homo sapien
ctagacagatgggcccaggggcagc

SEQ ID NO: 3624113 - DNA, 25 bp, Homo sapien
tagacagatgggcccaggggcagct

SEQ ID NO: 3624114 - DNA, 25 bp, Homo sapien
aaaagagcaactgggaggtcctgag

SEQ ID NO: 3624115 - DNA, 25 bp, Homo sapien
atggtccagtgccaaaagagcaact

SEQ ID NO: 3624116 - DNA, 25 bp, Homo sapien
cagtgccaaaagagcaactgggagg

SEQ ID NO: 3624117 - DNA, 25 bp, Homo sapien
acagcatacaggcagcatggtccag

SEQ ID NO: 3624118 - DNA, 25 bp, Homo sapien
agagtaggtagaactggagtagcct

SEQ ID NO: 3624119 - DNA, 25 bp, Homo sapien
taagggatgagagagtaggtagaac

SEQ ID NO: 3624120 - DNA, 25 bp, Homo sapien
gatgagagagtaggtagaactggag

SEQ ID NO: 3624121 - DNA, 25 bp, Homo sapien
ctaagggatgagagagtaggtagaa

SEQ ID NO: 3624122 - DNA, 25 bp, Homo sapien
gctgatggttgaactcggttctccc

SEQ ID NO: 3624123 - DNA, 25 bp, Homo sapien
ctgatggttgaactcggttctcccc

SEQ ID NO: 3624124 - DNA, 25 bp, Homo sapien
aggctgatggttgaactcggttctc

SEQ ID NO: 3624125 - DNA, 25 bp, Homo sapien
gaaggctgatggttgaactcggttc

SEQ ID NO: 3624126 - DNA, 25 bp, Homo sapien
ccagcaaagggttttgccttgccct

SEQ ID NO: 3624127 - DNA, 25 bp, Homo sapien
ccttgccctgtttagtgagcccgtt

SEQ ID NO: 3624128 - DNA, 25 bp, Homo sapien
agcaaagggttttgccttgccctgt

SEQ ID NO: 3624129 - DNA, 25 bp, Homo sapien
tagtgagcccgttgagggagtttct

SEQ ID NO: 3624130 - DNA, 25 bp, Homo sapien
tctatatactctggagctgggtagc

SEQ ID NO: 3624131 - DNA, 25 bp, Homo sapien
ctgtcgctcaagactgctcacagct

SEQ ID NO: 3624132 - DNA, 25 bp, Homo sapien
ctatatactctggagctgggtagca

SEQ ID NO: 3624133 - DNA, 25 bp, Homo sapien
tcgctcaagactgctcacagctggg

SEQ ID NO: 3624134 - DNA, 25 bp, Homo sapien
attgtggctccgtaatggtttcctt

SEQ ID NO: 3624135 - DNA, 25 bp, Homo sapien
ttcagtaaattgtggctccgtaatg

SEQ ID NO: 3624136 - DNA, 25 bp, Homo sapien
agtaaattgtggctccgtaatggtt

SEQ ID NO: 3624137 - DNA, 25 bp, Homo sapien
taaattgtggctccgtaatggtttc

SEQ ID NO: 3624138 - DNA, 25 bp, Homo sapien
gttggaagcacagtgatctgctgcc

SEQ ID NO: 3624139 - DNA, 25 bp, Homo sapien
caaatctgtactagtctctgaggaa

SEQ ID NO: 3624140 - DNA, 25 bp, Homo sapien
ggtgtggagctcctaattgaactac

SEQ ID NO: 3624141 - DNA, 25 bp, Homo sapien
gtccagggattgattcaaagccacg

SEQ ID NO: 3624142 - DNA, 25 bp, Homo sapien
caaagccacgtagtatctgagagga

SEQ ID NO: 3624143 - DNA, 25 bp, Homo sapien
tagtgagcctgctccagtacaatgc

SEQ ID NO: 3624144 - DNA, 25 bp, Homo sapien
caaagctgtcggttagtgagcctgc

SEQ ID NO: 3624145 - DNA, 25 bp, Homo sapien
tacaatgccaaacgcaatgcccaag

SEQ ID NO: 3624146 - DNA, 25 bp, Homo sapien
acgcaatgcccaagcataataatca

SEQ ID NO: 3624147 - DNA, 25 bp, Homo sapien
caccttgaggccgatccattcacat

SEQ ID NO: 3624148 - DNA, 25 bp, Homo sapien
ccttcgagtcccagatgaaatgcca

SEQ ID NO: 3624149 - DNA, 25 bp, Homo sapien
gaccacacttcacttctttatgttc

SEQ ID NO: 3624150 - DNA, 25 bp, Homo sapien
attcctgtcctagaaactcagcctg

SEQ ID NO: 3624151 - DNA, 25 bp, Homo sapien
tacacaagatcattaggaacggcag

SEQ ID NO: 3624152 - DNA, 25 bp, Homo sapien
gaacggcagctgctttagctttgcg

SEQ ID NO: 3624153 - DNA, 25 bp, Homo sapien
cataattgagtggtagctggcatgc

SEQ ID NO: 3624154 - DNA, 25 bp, Homo sapien
ggcatgctgcggaattcagccaaca

SEQ ID NO: 3624155 - DNA, 25 bp, Homo sapien
gaaccactgagccagtgacagtctg

SEQ ID NO: 3624156 - DNA, 25 bp, Homo sapien
ggcaatgttctcatttagccactga

SEQ ID NO: 3624157 - DNA, 25 bp, Homo sapien
caaagggaattgcagcaacactggc

SEQ ID NO: 3624158 - DNA, 25 bp, Homo sapien
ctatggatgtaatgtctggagaacc

SEQ ID NO: 3624159 - DNA, 25 bp, Homo sapien
tattgtagcaggcacaaacagtgtc

SEQ ID NO: 3624160 - DNA, 25 bp, Homo sapien
taggtgccgcacttttgcagtgaca

SEQ ID NO: 3624161 - DNA, 25 bp, Homo sapien
atttccttgccccatgtaggtgccg

SEQ ID NO: 3624162 - DNA, 25 bp, Homo sapien
caggaagttgtgaattgagggcccc

SEQ ID NO: 3624163 - DNA, 25 bp, Homo sapien
cagtggcccatgatctttatcatcg

SEQ ID NO: 3624164 - DNA, 25 bp, Homo sapien
agtggcccatgatctttatcatcgt

SEQ ID NO: 3624165 - DNA, 25 bp, Homo sapien
gtggcccatgatctttatcatcgtt

SEQ ID NO: 3624166 - DNA, 25 bp, Homo sapien
cccctattgcattgacccagtggga

SEQ ID NO: 3624167 - DNA, 25 bp, Homo sapien
gaagtctgccagctatctcttatca

SEQ ID NO: 3624168 - DNA, 25 bp, Homo sapien
aggtcttgcctgcaataatccaccc

SEQ ID NO: 3624169 - DNA, 25 bp, Homo sapien
aacttgcagaattactgaggcagcc

SEQ ID NO: 3624170 - DNA, 25 bp, Homo sapien
ttcttttaacaccttcagatttgct

SEQ ID NO: 3624171 - DNA, 25 bp, Homo sapien
ttttaacaccttcagatttgcttgg

SEQ ID NO: 3624172 - DNA, 25 bp, Homo sapien
cttttaacaccttcagatttgcttg

SEQ ID NO: 3624173 - DNA, 25 bp, Homo sapien
actgagagcctctgaaaggaatggc

SEQ ID NO: 3624174 - DNA, 25 bp, Homo sapien
ctctcctcacatcccgcatccgctt

SEQ ID NO: 3624175 - DNA, 25 bp, Homo sapien
cacatcccgcatccgcttagcagct

SEQ ID NO: 3624176 - DNA, 25 bp, Homo sapien
atcccgcatccgcttagcagctagc

SEQ ID NO: 3624177 - DNA, 25 bp, Homo sapien
cctcacatcccgcatccgcttagca

SEQ ID NO: 3624178 - DNA, 25 bp, Homo sapien
gccctggccggcaggtctcgctgca

SEQ ID NO: 3624179 - DNA, 25 bp, Homo sapien
aatggggatggccgtctgagcattc

SEQ ID NO: 3624180 - DNA, 25 bp, Homo sapien
agcattcgctcaagcgtgcctggag

SEQ ID NO: 3624181 - DNA, 25 bp, Homo sapien
cctggccggcaggtctcgctgcatg

SEQ ID NO: 3624182 - DNA, 25 bp, Homo sapien
ggagcgactcccctgggtgttgtaa

SEQ ID NO: 3624183 - DNA, 25 bp, Homo sapien
cattaatgcttgtaacactccaaac

SEQ ID NO: 3624184 - DNA, 25 bp, Homo sapien
catgtggtgctaagtggaactccat

SEQ ID NO: 3624185 - DNA, 25 bp, Homo sapien
tgtaacactccaaacatgtggtgct

SEQ ID NO: 3624186 - DNA, 25 bp, Homo sapien
aggagctgctctctaacgggaatgt

SEQ ID NO: 3624187 - DNA, 25 bp, Homo sapien
ctgctctctaacgggaatgttcttc

SEQ ID NO: 3624188 - DNA, 25 bp, Homo sapien
gctgctctctaacgggaatgttctt

SEQ ID NO: 3624189 - DNA, 25 bp, Homo sapien
gtggaaatagcctgatcagaatcag

SEQ ID NO: 3624190 - DNA, 25 bp, Homo sapien
gaaatagcctgatcagaatcagtgt

SEQ ID NO: 3624191 - DNA, 25 bp, Homo sapien
tacttagtggaaatagcctgatcag

SEQ ID NO: 3624192 - DNA, 25 bp, Homo sapien
tattaggtacttagtggaaatagcc

SEQ ID NO: 3624193 - DNA, 25 bp, Homo sapien
tacacaggattgaggtcggggtgga

SEQ ID NO: 3624194 - DNA, 25 bp, Homo sapien
gaaggacttgctccaactcgatggg

SEQ ID NO: 3624195 - DNA, 25 bp, Homo sapien
ctacacaggattgaggtcggggtgg

SEQ ID NO: 3624196 - DNA, 25 bp, Homo sapien
ctccccacacatgggctccttcatg

SEQ ID NO: 3624197 - DNA, 25 bp, Homo sapien
tgggctccttcatgtcaaattgtgc

SEQ ID NO: 3624198 - DNA, 25 bp, Homo sapien
catgggctccttcatgtcaaattgt

SEQ ID NO: 3624199 - DNA, 25 bp, Homo sapien
gctccttcatgtcaaattgtgctct

SEQ ID NO: 3624200 - DNA, 25 bp, Homo sapien
cgctttttaataggcggctctggca

SEQ ID NO: 3624201 - DNA, 25 bp, Homo sapien
gcaggccaggaattgatgtattctc

SEQ ID NO: 3624202 - DNA, 25 bp, Homo sapien
gtattgcaactaataggatatgaag

SEQ ID NO: 3624203 - DNA, 25 bp, Homo sapien
tgaagaaaattgtaccggagaagca

SEQ ID NO: 3624204 - DNA, 25 bp, Homo sapien
ccccagttcttacagggacagccat

SEQ ID NO: 3624205 - DNA, 25 bp, Homo sapien
ccagttcttacagggacagccatac

SEQ ID NO: 3624206 - DNA, 25 bp, Homo sapien
gtccccagttcttacagggacagcc

SEQ ID NO: 3624207 - DNA, 25 bp, Homo sapien
agttcttacagggacagccatactc

SEQ ID NO: 3624208 - DNA, 25 bp, Homo sapien
ggagcattcgggagtgaatggagtc

SEQ ID NO: 3624209 - DNA, 25 bp, Homo sapien
gcagcaggtccgggactgccacttc

SEQ ID NO: 3624210 - DNA, 25 bp, Homo sapien
cccatgatgagtgctgctgtgtgca

SEQ ID NO: 3624211 - DNA, 25 bp, Homo sapien
tttctcccatgatgagtgctgctgt

SEQ ID NO: 3624212 - DNA, 25 bp, Homo sapien
ctaagaagatttccaatcccgcctg

SEQ ID NO: 3624213 - DNA, 25 bp, Homo sapien
taagaagatttccaatcccgcctgc

SEQ ID NO: 3624214 - DNA, 25 bp, Homo sapien
agaagatttccaatcccgcctgcac

SEQ ID NO: 3624215 - DNA, 25 bp, Homo sapien
aagatttccaatcccgcctgcacat

SEQ ID NO: 3624216 - DNA, 25 bp, Homo sapien
gaccatgagcgctttctgatgtcaa

SEQ ID NO: 3624217 - DNA, 25 bp, Homo sapien
caaagtcgactaaagggcttggtgc

SEQ ID NO: 3624218 - DNA, 25 bp, Homo sapien
tcagaatccgcaaaagaggcaggct

SEQ ID NO: 3624219 - DNA, 25 bp, Homo sapien
cagtcgtgaaaaagctagcagcccc

SEQ ID NO: 3624220 - DNA, 25 bp, Homo sapien
tatgctgtggagaattcctctgcta

SEQ ID NO: 3624221 - DNA, 25 bp, Homo sapien
ccgaggaaccctgcttttagctcaa

SEQ ID NO: 3624222 - DNA, 25 bp, Homo sapien
caaaggagccccgtatgctgtggag

SEQ ID NO: 3624223 - DNA, 25 bp, Homo sapien
cgaggaaccctgcttttagctcaaa

SEQ ID NO: 3624224 - DNA, 25 bp, Homo sapien
ggtctgcgaaatcagatctaatctc

SEQ ID NO: 3624225 - DNA, 25 bp, Homo sapien
taaaggtctgcgaaatcagatctaa

SEQ ID NO: 3624226 - DNA, 25 bp, Homo sapien
tttgctaaaggtctgcgaaatcaga

SEQ ID NO: 3624227 - DNA, 25 bp, Homo sapien
taaatttgctaaaggtctgcgaaat

SEQ ID NO: 3624228 - DNA, 25 bp, Homo sapien
agagctgagttatcgattgctgcat

SEQ ID NO: 3624229 - DNA, 25 bp, Homo sapien
aaagagctgagttatcgattgctgc

SEQ ID NO: 3624230 - DNA, 25 bp, Homo sapien
aagagctgagttatcgattgctgca

SEQ ID NO: 3624231 - DNA, 25 bp, Homo sapien
gcagagactctcgtgctcatgagcc

SEQ ID NO: 3624232 - DNA, 25 bp, Homo sapien
cagcagagactctcgtgctcatgag

SEQ ID NO: 3624233 - DNA, 25 bp, Homo sapien
gggcagcagagactctcgtgctcat

SEQ ID NO: 3624234 - DNA, 25 bp, Homo sapien
agagactctcgtgctcatgagccat

SEQ ID NO: 3624235 - DNA, 25 bp, Homo sapien
cccccgtgtggctggcccaacatca

SEQ ID NO: 3624236 - DNA, 25 bp, Homo sapien
cagcccccgtgtggctggcccaaca

SEQ ID NO: 3624237 - DNA, 25 bp, Homo sapien
agcccccgtgtggctggcccaacat

SEQ ID NO: 3624238 - DNA, 25 bp, Homo sapien
gcccccgtgtggctggcccaacatc

SEQ ID NO: 3624239 - DNA, 25 bp, Homo sapien
tgccacaaagacgagatgatggata

SEQ ID NO: 3624240 - DNA, 25 bp, Homo sapien
gagattttgcatctccatttgggcc

SEQ ID NO: 3624241 - DNA, 25 bp, Homo sapien
cacgctgcattctgattgcatccca

SEQ ID NO: 3624242 - DNA, 25 bp, Homo sapien
catcatgcaccgcagatgagggctc

SEQ ID NO: 3624243 - DNA, 25 bp, Homo sapien
gcgtcttgggcagtcggatttcaca

SEQ ID NO: 3624244 - DNA, 25 bp, Homo sapien
atttcacatccatttctggtgaacg

SEQ ID NO: 3624245 - DNA, 25 bp, Homo sapien
acttcctcgccttgtacttctgcgt

SEQ ID NO: 3624246 - DNA, 25 bp, Homo sapien
gccttgtacttctgcgtcttgggca

SEQ ID NO: 3624247 - DNA, 25 bp, Homo sapien
tgatgttggtgacccggaagtcacg

SEQ ID NO: 3624248 - DNA, 25 bp, Homo sapien
tcacgacaagcctgctgcattccag

SEQ ID NO: 3624249 - DNA, 25 bp, Homo sapien
ccagtggctttcgacttcagctgga

SEQ ID NO: 3624250 - DNA, 25 bp, Homo sapien
cattccagtggctttcgacttcagc

SEQ ID NO: 3624251 - DNA, 25 bp, Homo sapien
cacggacaccgtggctggtaatgga

SEQ ID NO: 3624252 - DNA, 25 bp, Homo sapien
gtaactcatgcatgagattagcaac

SEQ ID NO: 3624253 - DNA, 25 bp, Homo sapien
cttctcatcagcacggacaccgtgg

SEQ ID NO: 3624254 - DNA, 25 bp, Homo sapien
tggagctgccgtgcagtaactcatg

SEQ ID NO: 3624255 - DNA, 25 bp, Homo sapien
tccacttgttcgttccaggcaatgt

SEQ ID NO: 3624256 - DNA, 25 bp, Homo sapien
cacttgttcgttccaggcaatgtcc

SEQ ID NO: 3624257 - DNA, 25 bp, Homo sapien
ttgttcgttccaggcaatgtcccca

SEQ ID NO: 3624258 - DNA, 25 bp, Homo sapien
cttgttcgttccaggcaatgtcccc

SEQ ID NO: 3624259 - DNA, 25 bp, Homo sapien
aagctgggctgaacctgtctcccgt

SEQ ID NO: 3624260 - DNA, 25 bp, Homo sapien
tgtctcccgtgcaaccttccagcat

SEQ ID NO: 3624261 - DNA, 25 bp, Homo sapien
catctgggaccttctcatcaaacat

SEQ ID NO: 3624262 - DNA, 25 bp, Homo sapien
gctgggaagtgcaagctgggctgaa

SEQ ID NO: 3624263 - DNA, 25 bp, Homo sapien
cagctgggccagtaaaagcatcagg

SEQ ID NO: 3624264 - DNA, 25 bp, Homo sapien
gaggctcagcaagacttaaaatctg

SEQ ID NO: 3624265 - DNA, 25 bp, Homo sapien
tcaggtgctgtcaatgggtgactca

SEQ ID NO: 3624266 - DNA, 25 bp, Homo sapien
gggtgactcagtaatcgacctgaaa

SEQ ID NO: 3624267 - DNA, 25 bp, Homo sapien
gcttgtcatctgtaccttgctgtgt

SEQ ID NO: 3624268 - DNA, 25 bp, Homo sapien
gcacagctgagccaaacgcttgact

SEQ ID NO: 3624269 - DNA, 25 bp, Homo sapien
ctgagaggtgcagcttgtcatctgt

SEQ ID NO: 3624270 - DNA, 25 bp, Homo sapien
aaacgcttgactgccattttcacag

SEQ ID NO: 3624271 - DNA, 25 bp, Homo sapien
cttggggattagcatatcagccagg

SEQ ID NO: 3624272 - DNA, 25 bp, Homo sapien
ttggggattagcatatcagccaggc

SEQ ID NO: 3624273 - DNA, 25 bp, Homo sapien
ggggattagcatatcagccaggcac

SEQ ID NO: 3624274 - DNA, 25 bp, Homo sapien
tggggattagcatatcagccaggca

SEQ ID NO: 3624275 - DNA, 25 bp, Homo sapien
tacttgctaatgaccaccagatggc

SEQ ID NO: 3624276 - DNA, 25 bp, Homo sapien
tattgaattccacagcgaacagtct

SEQ ID NO: 3624277 - DNA, 25 bp, Homo sapien
cattcccaaagctcggttctgcagg

SEQ ID NO: 3624278 - DNA, 25 bp, Homo sapien
gccattgttagcacagacagacagg

SEQ ID NO: 3624279 - DNA, 25 bp, Homo sapien
actggcacacgttgctactgtcttg

SEQ ID NO: 3624280 - DNA, 25 bp, Homo sapien
tgagagagtaattaatcttgtctcc

SEQ ID NO: 3624281 - DNA, 25 bp, Homo sapien
gagagtaattaatcttgtctcctct

SEQ ID NO: 3624282 - DNA, 25 bp, Homo sapien
ctcacactggcacacgttgctactg

SEQ ID NO: 3624283 - DNA, 25 bp, Homo sapien
ggcacatgagcaggtcagaccgtga

SEQ ID NO: 3624284 - DNA, 25 bp, Homo sapien
cacctggacatgctctcttggctca

SEQ ID NO: 3624285 - DNA, 25 bp, Homo sapien
gcatgcagtgggactatcaaaggtc

SEQ ID NO: 3624286 - DNA, 25 bp, Homo sapien
tacttcgaggctctcctctgggagc

SEQ ID NO: 3624287 - DNA, 25 bp, Homo sapien
ttgacaactgctccaagagggtttc

SEQ ID NO: 3624288 - DNA, 25 bp, Homo sapien
cacaaatctcccatgctttgacaac

SEQ ID NO: 3624289 - DNA, 25 bp, Homo sapien
atgtccaaacacaaatctcccatgc

SEQ ID NO: 3624290 - DNA, 25 bp, Homo sapien
gctttgacaactgctccaagagggt

SEQ ID NO: 3624291 - DNA, 25 bp, Homo sapien
cttgtgtacaacttccctaaatgcc

SEQ ID NO: 3624292 - DNA, 25 bp, Homo sapien
aagtgtggaaattggtttctaagct

SEQ ID NO: 3624293 - DNA, 25 bp, Homo sapien
agtgtggaaattggtttctaagctc

SEQ ID NO: 3624294 - DNA, 25 bp, Homo sapien
gcagcttgtgtacaacttccctaaa

SEQ ID NO: 3624295 - DNA, 25 bp, Homo sapien
ggctgaacacaaacatctcaatagc

SEQ ID NO: 3624296 - DNA, 25 bp, Homo sapien
gctgaacacaaacatctcaatagcc

SEQ ID NO: 3624297 - DNA, 25 bp, Homo sapien
tggctgaacacaaacatctcaatag

SEQ ID NO: 3624298 - DNA, 25 bp, Homo sapien
tgaacacaaacatctcaatagccat

SEQ ID NO: 3624299 - DNA, 25 bp, Homo sapien
aagagaaggaggatattggtcttca

SEQ ID NO: 3624300 - DNA, 25 bp, Homo sapien
agtgttgaatgcagcctcaaggaca

SEQ ID NO: 3624301 - DNA, 25 bp, Homo sapien
gtgttgaatgcagcctcaaggacat

SEQ ID NO: 3624302 - DNA, 25 bp, Homo sapien
agagaaggaggatattggtcttcat

SEQ ID NO: 3624303 - DNA, 25 bp, Homo sapien
gaggaaatttggatggttcattgac

SEQ ID NO: 3624304 - DNA, 25 bp, Homo sapien
ggaaatttggatggttcattgacta

SEQ ID NO: 3624305 - DNA, 25 bp, Homo sapien
ttggaggaaatttggatggttcatt

SEQ ID NO: 3624306 - DNA, 25 bp, Homo sapien
gaaatttggatggttcattgactat

SEQ ID NO: 3624307 - DNA, 25 bp, Homo sapien
aaaaggtccaccctttgtgatagca

SEQ ID NO: 3624308 - DNA, 25 bp, Homo sapien
tgatggagatcaaatcctcactgga

SEQ ID NO: 3624309 - DNA, 25 bp, Homo sapien
gagagacctgagatcaaccttggct

SEQ ID NO: 3624310 - DNA, 25 bp, Homo sapien
gcccggcacatcagagctgtgtaac

SEQ ID NO: 3624311 - DNA, 25 bp, Homo sapien
tatccatggcgagatgtgattccct

SEQ ID NO: 3624312 - DNA, 25 bp, Homo sapien
gccgtgggaagagctccctctgcag

SEQ ID NO: 3624313 - DNA, 25 bp, Homo sapien
cctggcttgggtgggtctgcacggc

SEQ ID NO: 3624314 - DNA, 25 bp, Homo sapien
ccagttggagtccaccgggtctgtg

SEQ ID NO: 3624315 - DNA, 25 bp, Homo sapien
tgctggtgcagagctcggccttctg

SEQ ID NO: 3624316 - DNA, 25 bp, Homo sapien
gacactgcatcctcctcacattctc

SEQ ID NO: 3624317 - DNA, 25 bp, Homo sapien
gtccctgagcttcacaaccttcact

SEQ ID NO: 3624318 - DNA, 25 bp, Homo sapien
ttgttttgctccgtgactggatcat

SEQ ID NO: 3624319 - DNA, 25 bp, Homo sapien
ttcactgtgtgaacgcgtaagctgt

SEQ ID NO: 3624320 - DNA, 25 bp, Homo sapien
gtgctggtgtaaggggctctctttc

SEQ ID NO: 3624321 - DNA, 25 bp, Homo sapien
cagcatacttctgtggtgtccagga

SEQ ID NO: 3624322 - DNA, 25 bp, Homo sapien
gggcggcattacaccaagaagttca

SEQ ID NO: 3624323 - DNA, 25 bp, Homo sapien
tgtgtcttatgacagctgccagtca

SEQ ID NO: 3624324 - DNA, 25 bp, Homo sapien
cattgttggcatgaaatggattcct

SEQ ID NO: 3624325 - DNA, 25 bp, Homo sapien
aattgacttaagtagaggcagctct

SEQ ID NO: 3624326 - DNA, 25 bp, Homo sapien
taaggtaggttgtcgaaatgtcagc

SEQ ID NO: 3624327 - DNA, 25 bp, Homo sapien
taatctgagctgttttcgagcagtg

SEQ ID NO: 3624328 - DNA, 25 bp, Homo sapien
ctctaatccttgtgtgcacaggagc

SEQ ID NO: 3624329 - DNA, 25 bp, Homo sapien
caccgcttgggataatgactgacac

SEQ ID NO: 3624330 - DNA, 25 bp, Homo sapien
tttgctctgcaaccaccactgaagg

SEQ ID NO: 3624331 - DNA, 25 bp, Homo sapien
ttgatgactggcgtggactcggccc

SEQ ID NO: 3624332 - DNA, 25 bp, Homo sapien
tattttcaatggaaggagccgctcc

SEQ ID NO: 3624333 - DNA, 25 bp, Homo sapien
tacagttaagacccataaacccatc

SEQ ID NO: 3624334 - DNA, 25 bp, Homo sapien
ctaggacaacgctaaatagtgagac

SEQ ID NO: 3624335 - DNA, 25 bp, Homo sapien
tagtgagacagaggcacacgtctgg

SEQ ID NO: 3624336 - DNA, 25 bp, Homo sapien
gattctacttgaggaaacatgatgt

SEQ ID NO: 3624337 - DNA, 25 bp, Homo sapien
gagttaagaaggtgatcatccgtga

SEQ ID NO: 3624338 - DNA, 25 bp, Homo sapien
tgcctctcttgctgagtgactcata

SEQ ID NO: 3624339 - DNA, 25 bp, Homo sapien
ctgagtgactcatagtaggcattca

SEQ ID NO: 3624340 - DNA, 25 bp, Homo sapien
cagaccttgagggagctgggtgcct

SEQ ID NO: 3624341 - DNA, 25 bp, Homo sapien
tgcagaccttgagggagctgggtgc

SEQ ID NO: 3624342 - DNA, 25 bp, Homo sapien
ggccgggaggaattcatgcagcaca

SEQ ID NO: 3624343 - DNA, 25 bp, Homo sapien
taatgggagtcagatgcaatcctcg

SEQ ID NO: 3624344 - DNA, 25 bp, Homo sapien
tgaaaaccagctacctgtcccttgg

SEQ ID NO: 3624345 - DNA, 25 bp, Homo sapien
cacacaagagggataagcacattca

SEQ ID NO: 3624346 - DNA, 25 bp, Homo sapien
tatggtactgtgcaagacgctatcc

SEQ ID NO: 3624347 - DNA, 25 bp, Homo sapien
aatagtgcctcattttacacgcgag

SEQ ID NO: 3624348 - DNA, 25 bp, Homo sapien
tacacgcgagaaaatcacggacagg

SEQ ID NO: 3624349 - DNA, 25 bp, Homo sapien
tggcagccctgagactagcattggt

SEQ ID NO: 3624350 - DNA, 25 bp, Homo sapien
gcagagatgacgttctacaatgttg

SEQ ID NO: 3624351 - DNA, 25 bp, Homo sapien
gccaaaaagccaatccatcaaggag

SEQ ID NO: 3624352 - DNA, 25 bp, Homo sapien
ccaatccatcaaggagccaggaagg

SEQ ID NO: 3624353 - DNA, 25 bp, Homo sapien
gacgttctacaatgttgctcaggtt

SEQ ID NO: 3624354 - DNA, 25 bp, Homo sapien
tccatgggaccatttgaggtaagac

SEQ ID NO: 3624355 - DNA, 25 bp, Homo sapien
acacagatagtgccgtgatggccag

SEQ ID NO: 3624356 - DNA, 25 bp, Homo sapien
gagagcctaattccatgggaccatt

SEQ ID NO: 3624357 - DNA, 25 bp, Homo sapien
agatagtgccgtgatggccagggcc

SEQ ID NO: 3624358 - DNA, 25 bp, Homo sapien
ctatggagagggtagtaggtcaatt

SEQ ID NO: 3624359 - DNA, 25 bp, Homo sapien
tcctcttgtgcagcatagtttggaa

SEQ ID NO: 3624360 - DNA, 25 bp, Homo sapien
aaaaaagatcttctccgtccagatg

SEQ ID NO: 3624361 - DNA, 25 bp, Homo sapien
tgggcattcctttggctatggagag

SEQ ID NO: 3624362 - DNA, 25 bp, Homo sapien
tctagcttctcattaggaagcggtg

SEQ ID NO: 3624363 - DNA, 25 bp, Homo sapien
attttctagcttctcattaggaagc

SEQ ID NO: 3624364 - DNA, 25 bp, Homo sapien
tttctagcttctcattaggaagcgg

SEQ ID NO: 3624365 - DNA, 25 bp, Homo sapien
ctctagaattgcattttctagcttc

SEQ ID NO: 3624366 - DNA, 25 bp, Homo sapien
tagtggcacgagaggaaattgcatt

SEQ ID NO: 3624367 - DNA, 25 bp, Homo sapien
ttctgtagttcgttagtggcacgag

SEQ ID NO: 3624368 - DNA, 25 bp, Homo sapien
gattacaattattgatggcagctga

SEQ ID NO: 3624369 - DNA, 25 bp, Homo sapien
tataattgcctctaattgcaccaga

SEQ ID NO: 3624370 - DNA, 25 bp, Homo sapien
atgtaatgcctcatcccgaacccag

SEQ ID NO: 3624371 - DNA, 25 bp, Homo sapien
ctttccactaaatggcaggctgcct

SEQ ID NO: 3624372 - DNA, 25 bp, Homo sapien
gtcctgcctcgaaacaaacacctga

SEQ ID NO: 3624373 - DNA, 25 bp, Homo sapien
cagcactaactgatgaaattacgga

SEQ ID NO: 3624374 - DNA, 25 bp, Homo sapien
gatggttgtgcagtaagaaccttca

SEQ ID NO: 3624375 - DNA, 25 bp, Homo sapien
agcacaggttcgagcgctctccctt

SEQ ID NO: 3624376 - DNA, 25 bp, Homo sapien
catcctggtaacagttggtaaacga

SEQ ID NO: 3624377 - DNA, 25 bp, Homo sapien
tggtaaacgagtcccagtctagccg

SEQ ID NO: 3624378 - DNA, 25 bp, Homo sapien
agcagtgagagagacccagcagcct

SEQ ID NO: 3624379 - DNA, 25 bp, Homo sapien
cacataaacgaggagtgacaagcac

SEQ ID NO: 3624380 - DNA, 25 bp, Homo sapien
catttgacttcaccttgttcccgag

SEQ ID NO: 3624381 - DNA, 25 bp, Homo sapien
tccactggtgcaccaagctgtcctg

SEQ ID NO: 3624382 - DNA, 25 bp, Homo sapien
tcctagttctgtgttgcaaaagtca

SEQ ID NO: 3624383 - DNA, 25 bp, Homo sapien
cagtgtccaccttcctagttctgtg

SEQ ID NO: 3624384 - DNA, 25 bp, Homo sapien
tgtgttgcaaaagtcagaagtggct

SEQ ID NO: 3624385 - DNA, 25 bp, Homo sapien
gaaaagccagtgtccaccttcctag

SEQ ID NO: 3624386 - DNA, 25 bp, Homo sapien
cagcagcatttggcgcttccattca

SEQ ID NO: 3624387 - DNA, 25 bp, Homo sapien
gcagcagcatttggcgcttccattc

SEQ ID NO: 3624388 - DNA, 25 bp, Homo sapien
agcagcatttggcgcttccattcac

SEQ ID NO: 3624389 - DNA, 25 bp, Homo sapien
catcgcagatgcttgcggtacctcc

SEQ ID NO: 3624390 - DNA, 25 bp, Homo sapien
gacaggacgacatactccttctttg

SEQ ID NO: 3624391 - DNA, 25 bp, Homo sapien
ctacaccgccatgcggtatgggaca

SEQ ID NO: 3624392 - DNA, 25 bp, Homo sapien
ttctttggtccttctcacatcgcag

SEQ ID NO: 3624393 - DNA, 25 bp, Homo sapien
gagctgcagacaccctggcgcgcat

SEQ ID NO: 3624394 - DNA, 25 bp, Homo sapien
catgagaagaacagcacttctgagg

SEQ ID NO: 3624395 - DNA, 25 bp, Homo sapien
tgcatgagaagaacagcacttctga

SEQ ID NO: 3624396 - DNA, 25 bp, Homo sapien
ctgagggagctgcagacaccctggc

SEQ ID NO: 3624397 - DNA, 25 bp, Homo sapien
tcggttgctggcattctccatgctg

SEQ ID NO: 3624398 - DNA, 25 bp, Homo sapien
agctcggttgctggcattctccatg

SEQ ID NO: 3624399 - DNA, 25 bp, Homo sapien
cagctcggttgctggcattctccat

SEQ ID NO: 3624400 - DNA, 25 bp, Homo sapien
gttgctggcattctccatgctgggc

SEQ ID NO: 3624401 - DNA, 25 bp, Homo sapien
gaaggcaccttgcacctcttagcca

SEQ ID NO: 3624402 - DNA, 25 bp, Homo sapien
ccaaatgcggcacaactttaaaccg

SEQ ID NO: 3624403 - DNA, 25 bp, Homo sapien
tctgttaattgagccacccgtgcca

SEQ ID NO: 3624404 - DNA, 25 bp, Homo sapien
agtgtgagtctcgagccttccaagg

SEQ ID NO: 3624405 - DNA, 25 bp, Homo sapien
ttagaagtgaaagcagttcctcaga

SEQ ID NO: 3624406 - DNA, 25 bp, Homo sapien
gagatgggcacgtttggaagctccc

SEQ ID NO: 3624407 - DNA, 25 bp, Homo sapien
tatttcacctaaggaacatgtcttt

SEQ ID NO: 3624408 - DNA, 25 bp, Homo sapien
ccctcaaggtggtcagagctaggat

SEQ ID NO: 3624409 - DNA, 25 bp, Homo sapien
cggccagttgagtatggagcaccag

SEQ ID NO: 3624410 - DNA, 25 bp, Homo sapien
gcaccagcacgcattcaaagtcagc

SEQ ID NO: 3624411 - DNA, 25 bp, Homo sapien
accacggccagttgagtatggagca

SEQ ID NO: 3624412 - DNA, 25 bp, Homo sapien
tatggagcaccagcacgcattcaaa

SEQ ID NO: 3624413 - DNA, 25 bp, Homo sapien
tggtgggtcagtgtgtagccgggtg

SEQ ID NO: 3624414 - DNA, 25 bp, Homo sapien
gtgtagccgggtgccctctcgcatg

SEQ ID NO: 3624415 - DNA, 25 bp, Homo sapien
catgcagagaaggacataggcacac

SEQ ID NO: 3624416 - DNA, 25 bp, Homo sapien
tgcagagaaggacataggcacacac

SEQ ID NO: 3624417 - DNA, 25 bp, Homo sapien
ctgctgcccggagcccatgtcatct

SEQ ID NO: 3624418 - DNA, 25 bp, Homo sapien
gagcccatgtcatcttctatcattc

SEQ ID NO: 3624419 - DNA, 25 bp, Homo sapien
ggagcccatgtcatcttctatcatt

SEQ ID NO: 3624420 - DNA, 25 bp, Homo sapien
ctgcccggagcccatgtcatcttct

SEQ ID NO: 3624421 - DNA, 25 bp, Homo sapien
ctcgtcttctgaaacagttccccct

SEQ ID NO: 3624422 - DNA, 25 bp, Homo sapien
acatcccgctcctccaaggcctcgt

SEQ ID NO: 3624423 - DNA, 25 bp, Homo sapien
cccctcctatgattgccggggagaa

SEQ ID NO: 3624424 - DNA, 25 bp, Homo sapien
ccctcctatgattgccggggagaag

SEQ ID NO: 3624425 - DNA, 25 bp, Homo sapien
ggcagctatagatcatgctagagac

SEQ ID NO: 3624426 - DNA, 25 bp, Homo sapien
gccctctgagggcagctatagatca

SEQ ID NO: 3624427 - DNA, 25 bp, Homo sapien
tagatcatgctagagacacaggaaa

SEQ ID NO: 3624428 - DNA, 25 bp, Homo sapien
cctctgagggcagctatagatcatg

SEQ ID NO: 3624429 - DNA, 25 bp, Homo sapien
ttggcaaagaatagggaacgatggt

SEQ ID NO: 3624430 - DNA, 25 bp, Homo sapien
tgccaggatccgcttggcaaagaat

SEQ ID NO: 3624431 - DNA, 25 bp, Homo sapien
tcaggccattgaagaagcgcagctg

SEQ ID NO: 3624432 - DNA, 25 bp, Homo sapien
tccgcttggcaaagaatagggaacg

SEQ ID NO: 3624433 - DNA, 25 bp, Homo sapien
ttgccatcttggtaacttgagtcta

SEQ ID NO: 3624434 - DNA, 25 bp, Homo sapien
cagtgatagccagagggatttgcca

SEQ ID NO: 3624435 - DNA, 25 bp, Homo sapien
tgccatcttggtaacttgagtctac

SEQ ID NO: 3624436 - DNA, 25 bp, Homo sapien
atagccagagggatttgccatcttg

SEQ ID NO: 3624437 - DNA, 25 bp, Homo sapien
taatacagagtggagggctcgatcc

SEQ ID NO: 3624438 - DNA, 25 bp, Homo sapien
ccccatataagtagtacatttcaga

SEQ ID NO: 3624439 - DNA, 25 bp, Homo sapien
ggctcgatccccatataagtagtac

SEQ ID NO: 3624440 - DNA, 25 bp, Homo sapien
gaggtgtgaggcttatatcaggtaa

SEQ ID NO: 3624441 - DNA, 25 bp, Homo sapien
ctcccctgtccacttcagattccgc

SEQ ID NO: 3624442 - DNA, 25 bp, Homo sapien
tcccctgtccacttcagattccgca

SEQ ID NO: 3624443 - DNA, 25 bp, Homo sapien
cccctgtccacttcagattccgcat

SEQ ID NO: 3624444 - DNA, 25 bp, Homo sapien
tgtgcagcaggtttcacaagcattt

SEQ ID NO: 3624445 - DNA, 25 bp, Homo sapien
ttaagtggatactagcatgacattt

SEQ ID NO: 3624446 - DNA, 25 bp, Homo sapien
gctgctttgtgcagcaggtttcaca

SEQ ID NO: 3624447 - DNA, 25 bp, Homo sapien
aagtggatactagcatgacatttgg

SEQ ID NO: 3624448 - DNA, 25 bp, Homo sapien
tactgtaggctactaatacgttttg

SEQ ID NO: 3624449 - DNA, 25 bp, Homo sapien
tatgtctgcctttatgtcaaaaccc

SEQ ID NO: 3624450 - DNA, 25 bp, Homo sapien
tcaaaactattgtgtctattgtggg

SEQ ID NO: 3624451 - DNA, 25 bp, Homo sapien
atgtcaaaacccacactgttttgat

SEQ ID NO: 3624452 - DNA, 25 bp, Homo sapien
tcctctgtgtggaatcagattgctc

SEQ ID NO: 3624453 - DNA, 25 bp, Homo sapien
tctgtgtggaatcagattgctctgg

SEQ ID NO: 3624454 - DNA, 25 bp, Homo sapien
gctgcatatgaacatgaatgtggta

SEQ ID NO: 3624455 - DNA, 25 bp, Homo sapien
gaacatgaatgtggtaattacagga

SEQ ID NO: 3624456 - DNA, 25 bp, Homo sapien
gggcgtagcctagagtccttcccag

SEQ ID NO: 3624457 - DNA, 25 bp, Homo sapien
tcccagagccgaatgtaagaagcaa

SEQ ID NO: 3624458 - DNA, 25 bp, Homo sapien
taagaagcaaggctaagcgtggctg

SEQ ID NO: 3624459 - DNA, 25 bp, Homo sapien
cagtgaacacggcaggacctctgct

SEQ ID NO: 3624460 - DNA, 25 bp, Homo sapien
tggttgccttccgtccaggtgctct

SEQ ID NO: 3624461 - DNA, 25 bp, Homo sapien
tggtacactagacttcaaattggcg

SEQ ID NO: 3624462 - DNA, 25 bp, Homo sapien
ggtgctctcattggtacactagact

SEQ ID NO: 3624463 - DNA, 25 bp, Homo sapien
cactagacttcaaattggcgttctc

SEQ ID NO: 3624464 - DNA, 25 bp, Homo sapien
cttattctgtttatctgtcactgag

SEQ ID NO: 3624465 - DNA, 25 bp, Homo sapien
cagggctgtggagtacaggcggaga

SEQ ID NO: 3624466 - DNA, 25 bp, Homo sapien
ctgtggagtacaggcggagagtgtg

SEQ ID NO: 3624467 - DNA, 25 bp, Homo sapien
agagccagggctgtggagtacaggc

SEQ ID NO: 3624468 - DNA, 25 bp, Homo sapien
gccagggctgtggagtacaggcgga

SEQ ID NO: 3624469 - DNA, 25 bp, Homo sapien
aaagcattgggtaatatgttatgag

SEQ ID NO: 3624470 - DNA, 25 bp, Homo sapien
catctatgattgaatgcgtcgaaaa

SEQ ID NO: 3624471 - DNA, 25 bp, Homo sapien
gcaacatagattcttaatcacggag

SEQ ID NO: 3624472 - DNA, 25 bp, Homo sapien
tgattgcattgttgcaaagtgggaa

SEQ ID NO: 3624473 - DNA, 25 bp, Homo sapien
tgtggggctgattagttgttgccat

SEQ ID NO: 3624474 - DNA, 25 bp, Homo sapien
ttgtggggctgattagttgttgcca

SEQ ID NO: 3624475 - DNA, 25 bp, Homo sapien
acaaattggatttgctgttaagtta

SEQ ID NO: 3624476 - DNA, 25 bp, Homo sapien
aattaatggaggacaaattggattt

SEQ ID NO: 3624477 - DNA, 25 bp, Homo sapien
ttacagccaccccgctatttgacga

SEQ ID NO: 3624478 - DNA, 25 bp, Homo sapien
caccccgctatttgacgagctgctg

SEQ ID NO: 3624479 - DNA, 25 bp, Homo sapien
tgacgagctgctgcaatttctccca

SEQ ID NO: 3624480 - DNA, 25 bp, Homo sapien
gagctgctgcaatttctcccaggga

SEQ ID NO: 3624481 - DNA, 25 bp, Homo sapien
tcctttttggcaacacctcagagaa

SEQ ID NO: 3624482 - DNA, 25 bp, Homo sapien
ctttttggcaacacctcagagaaaa

SEQ ID NO: 3624483 - DNA, 25 bp, Homo sapien
ttttggcaacacctcagagaaaaac

SEQ ID NO: 3624484 - DNA, 25 bp, Homo sapien
tggcaacacctcagagaaaaacagg

SEQ ID NO: 3624485 - DNA, 25 bp, Homo sapien
ggcaaggtcagcaacaacctccagg

SEQ ID NO: 3624486 - DNA, 25 bp, Homo sapien
ctgctgatgggttttccggttctgg

SEQ ID NO: 3624487 - DNA, 25 bp, Homo sapien
tgctgatgggttttccggttctggt

SEQ ID NO: 3624488 - DNA, 25 bp, Homo sapien
gatgcagacgaggacggcatgcctt

SEQ ID NO: 3624489 - DNA, 25 bp, Homo sapien
catggacacgtcactatgctgatgc

SEQ ID NO: 3624490 - DNA, 25 bp, Homo sapien
cgtggtgcagctcttacattcgtga

SEQ ID NO: 3624491 - DNA, 25 bp, Homo sapien
tcctggtctgcggagaaacttgccc

SEQ ID NO: 3624492 - DNA, 25 bp, Homo sapien
aaagtagtcatccttctgaagtacg

SEQ ID NO: 3624493 - DNA, 25 bp, Homo sapien
tctgagtcaaataccgttaggaaaa

SEQ ID NO: 3624494 - DNA, 25 bp, Homo sapien
catcgacttcaaggtcctctggcca

SEQ ID NO: 3624495 - DNA, 25 bp, Homo sapien
gtggccgggccatcgacttcaaggt

SEQ ID NO: 3624496 - DNA, 25 bp, Homo sapien
gaaccctctccaagtctttaacata

SEQ ID NO: 3624497 - DNA, 25 bp, Homo sapien
tcgaaccctctccaagtctttaaca

SEQ ID NO: 3624498 - DNA, 25 bp, Homo sapien
cgaaccctctccaagtctttaacat

SEQ ID NO: 3624499 - DNA, 25 bp, Homo sapien
tgatcgggatgcaatatttgaccgt

SEQ ID NO: 3624500 - DNA, 25 bp, Homo sapien
tgtgatcgggatgcaatatttgacc

SEQ ID NO: 3624501 - DNA, 25 bp, Homo sapien
atgtgatcgggatgcaatatttgac

SEQ ID NO: 3624502 - DNA, 25 bp, Homo sapien
caatgtgatcgggatgcaatatttg

SEQ ID NO: 3624503 - DNA, 25 bp, Homo sapien
ttctggcagagcatcttggttggaa

SEQ ID NO: 3624504 - DNA, 25 bp, Homo sapien
tctggcagagcatcttggttggaaa

SEQ ID NO: 3624505 - DNA, 25 bp, Homo sapien
ggcagagcatcttggttggaaatct

SEQ ID NO: 3624506 - DNA, 25 bp, Homo sapien
tggcagagcatcttggttggaaatc

SEQ ID NO: 3624507 - DNA, 25 bp, Homo sapien
tatgtgagcacgtgaaggatccgct

SEQ ID NO: 3624508 - DNA, 25 bp, Homo sapien
ttacagccgacagaaccgaatcagt

SEQ ID NO: 3624509 - DNA, 25 bp, Homo sapien
gaatcagtcggccacaaggagcttg

SEQ ID NO: 3624510 - DNA, 25 bp, Homo sapien
caaagtgtcccgtaggactcgggtg

SEQ ID NO: 3624511 - DNA, 25 bp, Homo sapien
ggaagactcagagcagagtcatttg

SEQ ID NO: 3624512 - DNA, 25 bp, Homo sapien
caccaggtggaaaatcaccctgcag

SEQ ID NO: 3624513 - DNA, 25 bp, Homo sapien
aggttttctgtagaagcaggtctga

SEQ ID NO: 3624514 - DNA, 25 bp, Homo sapien
agggtgctgcaataatgaggttttc

SEQ ID NO: 3624515 - DNA, 25 bp, Homo sapien
tacattgctgtgagtagggcctaga

SEQ ID NO: 3624516 - DNA, 25 bp, Homo sapien
gaaaatcacgaagggagactgggcc

SEQ ID NO: 3624517 - DNA, 25 bp, Homo sapien
tacagtttcaaagtcggaagctggc

SEQ ID NO: 3624518 - DNA, 25 bp, Homo sapien
atgatgccatgtccccgtcctgtgg

SEQ ID NO: 3624519 - DNA, 25 bp, Homo sapien
ctgggaattcttcttggtatttgtc

SEQ ID NO: 3624520 - DNA, 25 bp, Homo sapien
cattgcatggatgaaaagagacggc

SEQ ID NO: 3624521 - DNA, 25 bp, Homo sapien
gaaaattaagctgccacgtatctgg

SEQ ID NO: 3624522 - DNA, 25 bp, Homo sapien
gaagaagggctgcaacataatcgct

SEQ ID NO: 3624523 - DNA, 25 bp, Homo sapien
taataagaaggtgggttctcagcca

SEQ ID NO: 3624524 - DNA, 25 bp, Homo sapien
attcatattcctacatgcatactca

SEQ ID NO: 3624525 - DNA, 25 bp, Homo sapien
cacattcatattcctacatgcatac

SEQ ID NO: 3624526 - DNA, 25 bp, Homo sapien
cattcatattcctacatgcatactc

SEQ ID NO: 3624527 - DNA, 25 bp, Homo sapien
ttcatattcctacatgcatactcac

SEQ ID NO: 3624528 - DNA, 25 bp, Homo sapien
ggccccgtcgctgtgtttaacttca

SEQ ID NO: 3624529 - DNA, 25 bp, Homo sapien
ttggctgccgaatgcgccaggctct

SEQ ID NO: 3624530 - DNA, 25 bp, Homo sapien
caggttggcacgttaatcatcttgg

SEQ ID NO: 3624531 - DNA, 25 bp, Homo sapien
tgcttggaatccatcgatctgacca

SEQ ID NO: 3624532 - DNA, 25 bp, Homo sapien
agaacccgcggaactgcttcctgca

SEQ ID NO: 3624533 - DNA, 25 bp, Homo sapien
catcctcgtgtgtggctgactttga

SEQ ID NO: 3624534 - DNA, 25 bp, Homo sapien
cggatgggtacccaccaagccttag

SEQ ID NO: 3624535 - DNA, 25 bp, Homo sapien
caagccttagggagaaccgtgctct

SEQ ID NO: 3624536 - DNA, 25 bp, Homo sapien
agaaaggacagcacccgcgtggcca

SEQ ID NO: 3624537 - DNA, 25 bp, Homo sapien
ggagaaaggacagcacccgcgtggc

SEQ ID NO: 3624538 - DNA, 25 bp, Homo sapien
cgtggccaccgaaacaagctctcct

SEQ ID NO: 3624539 - DNA, 25 bp, Homo sapien
ctgcttgtagctttgagtggagaaa

SEQ ID NO: 3624540 - DNA, 25 bp, Homo sapien
acagttcctcaagggcattgctctt

SEQ ID NO: 3624541 - DNA, 25 bp, Homo sapien
agttcctcaagggcattgctctttt

SEQ ID NO: 3624542 - DNA, 25 bp, Homo sapien
tcacagttcctcaagggcattgctc

SEQ ID NO: 3624543 - DNA, 25 bp, Homo sapien
cacagttcctcaagggcattgctct

SEQ ID NO: 3624544 - DNA, 25 bp, Homo sapien
ttactgcaccctgagcgcatctctg

SEQ ID NO: 3624545 - DNA, 25 bp, Homo sapien
cggccttaaaccctgcaaagtagag

SEQ ID NO: 3624546 - DNA, 25 bp, Homo sapien
gagagcgggtccttccttgttactg

SEQ ID NO: 3624547 - DNA, 25 bp, Homo sapien
tctcagcgcctccactgaaagttgc

SEQ ID NO: 3624548 - DNA, 25 bp, Homo sapien
tctgacagccatatccgaaatcagc

SEQ ID NO: 3624549 - DNA, 25 bp, Homo sapien
gccatatccgaaatcagctccctct

SEQ ID NO: 3624550 - DNA, 25 bp, Homo sapien
tgacagccatatccgaaatcagctc

SEQ ID NO: 3624551 - DNA, 25 bp, Homo sapien
gttctgacagccatatccgaaatca

SEQ ID NO: 3624552 - DNA, 25 bp, Homo sapien
tatcacgcaagcacgtgcaaggacg

SEQ ID NO: 3624553 - DNA, 25 bp, Homo sapien
gaaaaggcaggtagatgtcgtacac

SEQ ID NO: 3624554 - DNA, 25 bp, Homo sapien
tgcaaggacgcaggcccataccact

SEQ ID NO: 3624555 - DNA, 25 bp, Homo sapien
actgagatgtgaaatgggatgagct

SEQ ID NO: 3624556 - DNA, 25 bp, Homo sapien
ctttgtgaggcgctgatctgctgga

SEQ ID NO: 3624557 - DNA, 25 bp, Homo sapien
gagctgatggcgtcctaggctgact

SEQ ID NO: 3624558 - DNA, 25 bp, Homo sapien
tgatgcagggcgatgccaaagagca

SEQ ID NO: 3624559 - DNA, 25 bp, Homo sapien
gatgtacttgcacttagaaagggcg

SEQ ID NO: 3624560 - DNA, 25 bp, Homo sapien
ccgtcacgcgtggtgtcagctggtt

SEQ ID NO: 3624561 - DNA, 25 bp, Homo sapien
gacaacaccgtcacgcgtggtgtca

SEQ ID NO: 3624562 - DNA, 25 bp, Homo sapien
tgaaacgtgacaacaccgtcacgcg

SEQ ID NO: 3624563 - DNA, 25 bp, Homo sapien
ctgcatgaaacgtgacaacaccgtc

SEQ ID NO: 3624564 - DNA, 25 bp, Homo sapien
acttgaattagtgccgcccaagtgc

SEQ ID NO: 3624565 - DNA, 25 bp, Homo sapien
gggcagccacaagttacttgaatta

SEQ ID NO: 3624566 - DNA, 25 bp, Homo sapien
aaatatgaatgtccaaggtttgtgc

SEQ ID NO: 3624567 - DNA, 25 bp, Homo sapien
tgctgcaagggacgcaccgaaatat

SEQ ID NO: 3624568 - DNA, 25 bp, Homo sapien
gccttgtacggaaatacagaacaca

SEQ ID NO: 3624569 - DNA, 25 bp, Homo sapien
tctgccctcagaaacatacaccgtg

SEQ ID NO: 3624570 - DNA, 25 bp, Homo sapien
tggacgctgccttgtacggaaatac

SEQ ID NO: 3624571 - DNA, 25 bp, Homo sapien
catacaccgtggacgctgccttgta

SEQ ID NO: 3624572 - DNA, 25 bp, Homo sapien
acgtcacgaggagctccgggtccag

SEQ ID NO: 3624573 - DNA, 25 bp, Homo sapien
gtgcgcccagggagtccacgtcacg

SEQ ID NO: 3624574 - DNA, 25 bp, Homo sapien
agttcagatcctcaggcccagcaag

SEQ ID NO: 3624575 - DNA, 25 bp, Homo sapien
gctgcccggatgataaggcagcttc

SEQ ID NO: 3624576 - DNA, 25 bp, Homo sapien
gctgacaatgtaggaatctggaact

SEQ ID NO: 3624577 - DNA, 25 bp, Homo sapien
tcagctgacaatgtaggaatctgga

SEQ ID NO: 3624578 - DNA, 25 bp, Homo sapien
ggaactcgcagagaaactgcctgcc

SEQ ID NO: 3624579 - DNA, 25 bp, Homo sapien
aggaatctggaactcgcagagaaac

SEQ ID NO: 3624580 - DNA, 25 bp, Homo sapien
agcgccctcgcagccggaatggggc

SEQ ID NO: 3624581 - DNA, 25 bp, Homo sapien
cagtctcctttgtcctttgaagtgg

SEQ ID NO: 3624582 - DNA, 25 bp, Homo sapien
gtgtcaaatctgtgaatagagcatg

SEQ ID NO: 3624583 - DNA, 25 bp, Homo sapien
agagcatgtttaggagcaacttcac

SEQ ID NO: 3624584 - DNA, 25 bp, Homo sapien
ttaggagcaacttcaccggcatgcc

SEQ ID NO: 3624585 - DNA, 25 bp, Homo sapien
ccacacttggaactcctgatctatc

SEQ ID NO: 3624586 - DNA, 25 bp, Homo sapien
acttggaactcctgatctatcaggg

SEQ ID NO: 3624587 - DNA, 25 bp, Homo sapien
ttcaccagggatcggcccacacttg

SEQ ID NO: 3624588 - DNA, 25 bp, Homo sapien
tttcaccagggatcggcccacactt

SEQ ID NO: 3624589 - DNA, 25 bp, Homo sapien
gaagtgcagtgagctacaaagagca

SEQ ID NO: 3624590 - DNA, 25 bp, Homo sapien
tagaaatggagatctacaaacttcc

SEQ ID NO: 3624591 - DNA, 25 bp, Homo sapien
gactgaactgaaaagttccatagag

SEQ ID NO: 3624592 - DNA, 25 bp, Homo sapien
gaaatccggagatgaagaacatact

SEQ ID NO: 3624593 - DNA, 25 bp, Homo sapien
gatacgtagctggaggcttctctct

SEQ ID NO: 3624594 - DNA, 25 bp, Homo sapien
cttgtctgatacgtagctggaggct

SEQ ID NO: 3624595 - DNA, 25 bp, Homo sapien
cttctctgcttgtctgatacgtagc

SEQ ID NO: 3624596 - DNA, 25 bp, Homo sapien
tctgcttgtctgatacgtagctgga

SEQ ID NO: 3624597 - DNA, 25 bp, Homo sapien
cgcagcccctccgatggtgctaagg

SEQ ID NO: 3624598 - DNA, 25 bp, Homo sapien
cgatggtgctaaggcctgtgcccca

SEQ ID NO: 3624599 - DNA, 25 bp, Homo sapien
agcccctccgatggtgctaaggcct

SEQ ID NO: 3624600 - DNA, 25 bp, Homo sapien
cctccgatggtgctaaggcctgtgc

SEQ ID NO: 3624601 - DNA, 25 bp, Homo sapien
ctcaggtccagggacaacaagttca

SEQ ID NO: 3624602 - DNA, 25 bp, Homo sapien
gggaactcaggtccagggacaacaa

SEQ ID NO: 3624603 - DNA, 25 bp, Homo sapien
gtccagggacaacaagttcaggcct

SEQ ID NO: 3624604 - DNA, 25 bp, Homo sapien
agggacaacaagttcaggcctatga

SEQ ID NO: 3624605 - DNA, 25 bp, Homo sapien
tgaattctcatcgtgatgcaaggca

SEQ ID NO: 3624606 - DNA, 25 bp, Homo sapien
ctgaattctcatcgtgatgcaaggc

SEQ ID NO: 3624607 - DNA, 25 bp, Homo sapien
cctgaattctcatcgtgatgcaagg

SEQ ID NO: 3624608 - DNA, 25 bp, Homo sapien
cttgtgaacttgtgagagccgcttc

SEQ ID NO: 3624609 - DNA, 25 bp, Homo sapien
gacagctacaaatttggctttccct

SEQ ID NO: 3624610 - DNA, 25 bp, Homo sapien
gctgctgggacagctacaaatttgg

SEQ ID NO: 3624611 - DNA, 25 bp, Homo sapien
caattaaaagggagcctgcttgtga

SEQ ID NO: 3624612 - DNA, 25 bp, Homo sapien
gatctaacatatgtaggtcagctcc

SEQ ID NO: 3624613 - DNA, 25 bp, Homo sapien
ctaacatatgtaggtcagctcccat

SEQ ID NO: 3624614 - DNA, 25 bp, Homo sapien
ttagatctaacatatgtaggtcagc

SEQ ID NO: 3624615 - DNA, 25 bp, Homo sapien
tttctttagatctaacatatgtagg

SEQ ID NO: 3624616 - DNA, 25 bp, Homo sapien
tctgtggttttgttgggtgcttcca

SEQ ID NO: 3624617 - DNA, 25 bp, Homo sapien
caaagatcgatgtgtccaggcccac

SEQ ID NO: 3624618 - DNA, 25 bp, Homo sapien
gatagatgctaaaccgccacctgtg

SEQ ID NO: 3624619 - DNA, 25 bp, Homo sapien
agctcagtcgctctttccatggttc

SEQ ID NO: 3624620 - DNA, 25 bp, Homo sapien
ggttttgcaatgtccgtgctctctg

SEQ ID NO: 3624621 - DNA, 25 bp, Homo sapien
gatgaatagatctgggttttgcaat

SEQ ID NO: 3624622 - DNA, 25 bp, Homo sapien
gcaatgtccgtgctctctgctccgt

SEQ ID NO: 3624623 - DNA, 25 bp, Homo sapien
ttctctctttcgccttctttatgtg

SEQ ID NO: 3624624 - DNA, 25 bp, Homo sapien
tcttccgcttggaatccgactcttg

SEQ ID NO: 3624625 - DNA, 25 bp, Homo sapien
cttgcctctgcaaatatcttccgct

SEQ ID NO: 3624626 - DNA, 25 bp, Homo sapien
cctctgcaaatatcttccgcttgga

SEQ ID NO: 3624627 - DNA, 25 bp, Homo sapien
gcttggaatccgactcttgatttct

SEQ ID NO: 3624628 - DNA, 25 bp, Homo sapien
ccgccgttggcatacctatgtgcat

SEQ ID NO: 3624629 - DNA, 25 bp, Homo sapien
acactggccgccgttggcataccta

SEQ ID NO: 3624630 - DNA, 25 bp, Homo sapien
ggccgccgttggcatacctatgtgc

SEQ ID NO: 3624631 - DNA, 25 bp, Homo sapien
actggccgccgttggcatacctatg

SEQ ID NO: 3624632 - DNA, 25 bp, Homo sapien
tgagcacgagggatgctgatcccca

SEQ ID NO: 3624633 - DNA, 25 bp, Homo sapien
ctgagtgcctgagcacgagggatgc

SEQ ID NO: 3624634 - DNA, 25 bp, Homo sapien
tgcctgagcacgagggatgctgatc

SEQ ID NO: 3624635 - DNA, 25 bp, Homo sapien
ggagccttcatcactgggggtctga

SEQ ID NO: 3624636 - DNA, 25 bp, Homo sapien
tataattttccagatcaagataagc

SEQ ID NO: 3624637 - DNA, 25 bp, Homo sapien
taattttccagatcaagataagcat

SEQ ID NO: 3624638 - DNA, 25 bp, Homo sapien
ggtataattttccagatcaagataa

SEQ ID NO: 3624639 - DNA, 25 bp, Homo sapien
aattttccagatcaagataagcatt

SEQ ID NO: 3624640 - DNA, 25 bp, Homo sapien
gagcttgattcccatgtaggccagt

SEQ ID NO: 3624641 - DNA, 25 bp, Homo sapien
cagagtcatgggagacccttgtagg

SEQ ID NO: 3624642 - DNA, 25 bp, Homo sapien
tattcgtctgtctcatagccagaca

SEQ ID NO: 3624643 - DNA, 25 bp, Homo sapien
gatgtttgcataacgggagtccccg

SEQ ID NO: 3624644 - DNA, 25 bp, Homo sapien
taactgaaggtttgccgtagcgtgg

SEQ ID NO: 3624645 - DNA, 25 bp, Homo sapien
cgtagccgagaactggcacagtgct

SEQ ID NO: 3624646 - DNA, 25 bp, Homo sapien
cattgttatcatggacgtagccgag

SEQ ID NO: 3624647 - DNA, 25 bp, Homo sapien
gatctccatcttgttgtgtgtgggt

SEQ ID NO: 3624648 - DNA, 25 bp, Homo sapien
tgggtagaatgctatttgtccttct

SEQ ID NO: 3624649 - DNA, 25 bp, Homo sapien
cacagcagatatgggtagaatgcta

SEQ ID NO: 3624650 - DNA, 25 bp, Homo sapien
ccttctgaagtgtagggcagctcac

SEQ ID NO: 3624651 - DNA, 25 bp, Homo sapien
gtccttctgaagtgtagggcagctc

SEQ ID NO: 3624652 - DNA, 25 bp, Homo sapien
agttgccatactgggtggccagcag

SEQ ID NO: 3624653 - DNA, 25 bp, Homo sapien
gagttgccatactgggtggccagca

SEQ ID NO: 3624654 - DNA, 25 bp, Homo sapien
caccctccatttccagacacttcac

SEQ ID NO: 3624655 - DNA, 25 bp, Homo sapien
ctccatttccagacacttcacagag

SEQ ID NO: 3624656 - DNA, 25 bp, Homo sapien
ctggcaccctccatttccagacact

SEQ ID NO: 3624657 - DNA, 25 bp, Homo sapien
ccctccatttccagacacttcacag

SEQ ID NO: 3624658 - DNA, 25 bp, Homo sapien
gaacatccacactcagtgagacctc

SEQ ID NO: 3624659 - DNA, 25 bp, Homo sapien
agtgagacctctggatttgatcctg

SEQ ID NO: 3624660 - DNA, 25 bp, Homo sapien
aagggcaagagtagtttcctgaaca

SEQ ID NO: 3624661 - DNA, 25 bp, Homo sapien
tgccataaagggcaagagtagtttc

SEQ ID NO: 3624662 - DNA, 25 bp, Homo sapien
tgcttacccgacacagtctttatca

SEQ ID NO: 3624663 - DNA, 25 bp, Homo sapien
ccttgcttacccgacacagtcttta

SEQ ID NO: 3624664 - DNA, 25 bp, Homo sapien
cacctccttgcttacccgacacagt

SEQ ID NO: 3624665 - DNA, 25 bp, Homo sapien
gcttacccgacacagtctttatcat

SEQ ID NO: 3624666 - DNA, 25 bp, Homo sapien
tgtcccaagggatttgctggcatca

SEQ ID NO: 3624667 - DNA, 25 bp, Homo sapien
cttttcaagtcatagagctgctgct

SEQ ID NO: 3624668 - DNA, 25 bp, Homo sapien
atcactgctgtggccccggtgaggc

SEQ ID NO: 3624669 - DNA, 25 bp, Homo sapien
ggccatgcctcatggagcagctgat

SEQ ID NO: 3624670 - DNA, 25 bp, Homo sapien
cgtcttctcgagaaagagggttcat

SEQ ID NO: 3624671 - DNA, 25 bp, Homo sapien
ctcataatctctacagctgcccatt

SEQ ID NO: 3624672 - DNA, 25 bp, Homo sapien
gacacagatttatcgatctgcaata

SEQ ID NO: 3624673 - DNA, 25 bp, Homo sapien
tcgatctgcaataaaacctcactca

SEQ ID NO: 3624674 - DNA, 25 bp, Homo sapien
cagagagcttaatagagcgctccac

SEQ ID NO: 3624675 - DNA, 25 bp, Homo sapien
ctcttcagaaagaatgtgctcccat

SEQ ID NO: 3624676 - DNA, 25 bp, Homo sapien
gcattgactgaaccacaacctagtg

SEQ ID NO: 3624677 - DNA, 25 bp, Homo sapien
caacctagtgactttatagagctaa

SEQ ID NO: 3624678 - DNA, 25 bp, Homo sapien
aaatggttctgatcacactcaagtg

SEQ ID NO: 3624679 - DNA, 25 bp, Homo sapien
ccagctggtcctttgccgaaccaga

SEQ ID NO: 3624680 - DNA, 25 bp, Homo sapien
gaacctttccatacggtttcagatg

SEQ ID NO: 3624681 - DNA, 25 bp, Homo sapien
caaataggtgcctccccagctggtc

SEQ ID NO: 3624682 - DNA, 25 bp, Homo sapien
gagctgacacattgtccagcaccgt

SEQ ID NO: 3624683 - DNA, 25 bp, Homo sapien
cagcaccgtgaagttggcaacacat

SEQ ID NO: 3624684 - DNA, 25 bp, Homo sapien
ggcaacacatcccaattaacaataa

SEQ ID NO: 3624685 - DNA, 25 bp, Homo sapien
aacaataattgccagcccttgcggg

SEQ ID NO: 3624686 - DNA, 25 bp, Homo sapien
tgttccatttttgagtgacaaagcc

SEQ ID NO: 3624687 - DNA, 25 bp, Homo sapien
taattgatttcggtctgttccctga

SEQ ID NO: 3624688 - DNA, 25 bp, Homo sapien
gacaaagcctttacatgccagccaa

SEQ ID NO: 3624689 - DNA, 25 bp, Homo sapien
gacactcgccttcgtggcacagggt

SEQ ID NO: 3624690 - DNA, 25 bp, Homo sapien
attctaattctgttgaactagttcg

SEQ ID NO: 3624691 - DNA, 25 bp, Homo sapien
gttgaactagttcgagagcttctcc

SEQ ID NO: 3624692 - DNA, 25 bp, Homo sapien
attctgttgaactagttcgagagct

SEQ ID NO: 3624693 - DNA, 25 bp, Homo sapien
aattctaattctgttgaactagttc

SEQ ID NO: 3624694 - DNA, 25 bp, Homo sapien
caggaactggactgtttagcaaaac

SEQ ID NO: 3624695 - DNA, 25 bp, Homo sapien
ggtaatatcaatggtaatatagcat

SEQ ID NO: 3624696 - DNA, 25 bp, Homo sapien
cttcctgatgatgtggtaatatcaa

SEQ ID NO: 3624697 - DNA, 25 bp, Homo sapien
ggtaatatagcattcagctgcctgc

SEQ ID NO: 3624698 - DNA, 25 bp, Homo sapien
tcatctacatgaaagtcgccttcct

SEQ ID NO: 3624699 - DNA, 25 bp, Homo sapien
ccctgcaaatgaggcaatagcagcc

SEQ ID NO: 3624700 - DNA, 25 bp, Homo sapien
ctaagtgaatataaaatcggatggt

SEQ ID NO: 3624701 - DNA, 25 bp, Homo sapien
tcggatggtaagttaagtgagaaga

SEQ ID NO: 3624702 - DNA, 25 bp, Homo sapien
gcagccgcaggtgctttgttctcac

SEQ ID NO: 3624703 - DNA, 25 bp, Homo sapien
gcggacaccgagctcactggctttg

SEQ ID NO: 3624704 - DNA, 25 bp, Homo sapien
ggctttgctgaagcagctctgcagc

SEQ ID NO: 3624705 - DNA, 25 bp, Homo sapien
ggacaccgagctcactggctttgct

SEQ ID NO: 3624706 - DNA, 25 bp, Homo sapien
taagcggacaccgagctcactggct

SEQ ID NO: 3624707 - DNA, 25 bp, Homo sapien
catatctaagtccctagtttcaaaa

SEQ ID NO: 3624708 - DNA, 25 bp, Homo sapien
atgtatggtgttttggaaggtggaa

SEQ ID NO: 3624709 - DNA, 25 bp, Homo sapien
tgtatggtgttttggaaggtggaac

SEQ ID NO: 3624710 - DNA, 25 bp, Homo sapien
tatggtgttttggaaggtggaacca

SEQ ID NO: 3624711 - DNA, 25 bp, Homo sapien
cctggtgtctccatgtcctttttct

SEQ ID NO: 3624712 - DNA, 25 bp, Homo sapien
gctgtctctggcaccctgatggtgc

SEQ ID NO: 3624713 - DNA, 25 bp, Homo sapien
ggcaccctgatggtgctcctcaaag

SEQ ID NO: 3624714 - DNA, 25 bp, Homo sapien
tctctggcaccctgatggtgctcct

SEQ ID NO: 3624715 - DNA, 25 bp, Homo sapien
cccactggacggtgttctcacgaca

SEQ ID NO: 3624716 - DNA, 25 bp, Homo sapien
agggctggcctcgtcccactggacg

SEQ ID NO: 3624717 - DNA, 25 bp, Homo sapien
gtgttctcacgacacctgcgatggg

SEQ ID NO: 3624718 - DNA, 25 bp, Homo sapien
tggcctcgtcccactggacggtgtt

SEQ ID NO: 3624719 - DNA, 25 bp, Homo sapien
gtagatgaattcctttggtccttga

SEQ ID NO: 3624720 - DNA, 25 bp, Homo sapien
ttgtagatgaattcctttggtcctt

SEQ ID NO: 3624721 - DNA, 25 bp, Homo sapien
tgtagatgaattcctttggtccttg

SEQ ID NO: 3624722 - DNA, 25 bp, Homo sapien
ttccatgctggaaattccatatttg

SEQ ID NO: 3624723 - DNA, 25 bp, Homo sapien
gtcctgagttgagtcacttttgctc

SEQ ID NO: 3624724 - DNA, 25 bp, Homo sapien
ctggggatgcaatggttttgctggg

SEQ ID NO: 3624725 - DNA, 25 bp, Homo sapien
ccagtcctgagttgagtcacttttg

SEQ ID NO: 3624726 - DNA, 25 bp, Homo sapien
cctgagttgagtcacttttgctcat

SEQ ID NO: 3624727 - DNA, 25 bp, Homo sapien
cttccttgtcgcagatgtaaaatcc

SEQ ID NO: 3624728 - DNA, 25 bp, Homo sapien
ccacttccttgtcgcagatgtaaaa

SEQ ID NO: 3624729 - DNA, 25 bp, Homo sapien
ttccttgtcgcagatgtaaaatcct

SEQ ID NO: 3624730 - DNA, 25 bp, Homo sapien
ccttccacttccttgtcgcagatgt

SEQ ID NO: 3624731 - DNA, 25 bp, Homo sapien
ttaaagacgctgctgcctccaagct

SEQ ID NO: 3624732 - DNA, 25 bp, Homo sapien
ttgactgcattgtcggcatggtgcg

SEQ ID NO: 3624733 - DNA, 25 bp, Homo sapien
cttgttaacagacttgagggtggag

SEQ ID NO: 3624734 - DNA, 25 bp, Homo sapien
gcccccagtgcctctaatgagcatt

SEQ ID NO: 3624735 - DNA, 25 bp, Homo sapien
gtcaaggagcaggtgacactgtgga

SEQ ID NO: 3624736 - DNA, 25 bp, Homo sapien
ctgtcaaggagcaggtgacactgtg

SEQ ID NO: 3624737 - DNA, 25 bp, Homo sapien
tgtcaaggagcaggtgacactgtgg

SEQ ID NO: 3624738 - DNA, 25 bp, Homo sapien
gatgaggaggaatatctagtccttc

SEQ ID NO: 3624739 - DNA, 25 bp, Homo sapien
ggaagagggcgcatgtttctttttg

SEQ ID NO: 3624740 - DNA, 25 bp, Homo sapien
tcaaagatagtaatcaagtgggcct

SEQ ID NO: 3624741 - DNA, 25 bp, Homo sapien
tctactgtgtaaagtgacctgcata

SEQ ID NO: 3624742 - DNA, 25 bp, Homo sapien
aacaatggacttctggataacaatc

SEQ ID NO: 3624743 - DNA, 25 bp, Homo sapien
caatctggtgtttgttgggaaatac

SEQ ID NO: 3624744 - DNA, 25 bp, Homo sapien
tgtgcggcttctcttcaaccgccag

SEQ ID NO: 3624745 - DNA, 25 bp, Homo sapien
ttgggaaatactctgtgagcactgg

SEQ ID NO: 3624746 - DNA, 25 bp, Homo sapien
ttgcacccttcgcttccaaacagag

SEQ ID NO: 3624747 - DNA, 25 bp, Homo sapien
tttgttcagtgaccaactggctgtc

SEQ ID NO: 3624748 - DNA, 25 bp, Homo sapien
tccatctgcttgcacccttcgcttc

SEQ ID NO: 3624749 - DNA, 25 bp, Homo sapien
agttgtgtttgttcagtgaccaact

SEQ ID NO: 3624750 - DNA, 25 bp, Homo sapien
ccctatcaaaccagagcagcccagg

SEQ ID NO: 3624751 - DNA, 25 bp, Homo sapien
cctccagattgcaaaccaccagcag

SEQ ID NO: 3624752 - DNA, 25 bp, Homo sapien
ccgggctcctccctatcaaaccaga

SEQ ID NO: 3624753 - DNA, 25 bp, Homo sapien
tcctccctatcaaaccagagcagcc

SEQ ID NO: 3624754 - DNA, 25 bp, Homo sapien
gccttgcttcacacaatcctaagac

SEQ ID NO: 3624755 - DNA, 25 bp, Homo sapien
atgtcattttggtgacagatactag

SEQ ID NO: 3624756 - DNA, 25 bp, Homo sapien
cagatactagtatgattggtgtcag

SEQ ID NO: 3624757 - DNA, 25 bp, Homo sapien
tgttctgttgaaaggccacttccat

SEQ ID NO: 3624758 - DNA, 25 bp, Homo sapien
ggcctaggcttagatttttgaaaga

SEQ ID NO: 3624759 - DNA, 25 bp, Homo sapien
cgcccggcctaggcttagatttttg

SEQ ID NO: 3624760 - DNA, 25 bp, Homo sapien
cggcctaggcttagatttttgaaag

SEQ ID NO: 3624761 - DNA, 25 bp, Homo sapien
gcccggcctaggcttagatttttga

SEQ ID NO: 3624762 - DNA, 25 bp, Homo sapien
gagtcaataagtttgtcagagtcaa

SEQ ID NO: 3624763 - DNA, 25 bp, Homo sapien
ttcaagccttccacaaacaaacagt

SEQ ID NO: 3624764 - DNA, 25 bp, Homo sapien
cttctagggcagtacaaattcaagc

SEQ ID NO: 3624765 - DNA, 25 bp, Homo sapien
agagtgaacgattttagtctcatcc

SEQ ID NO: 3624766 - DNA, 25 bp, Homo sapien
tgtatctagatagccatgtcccagc

SEQ ID NO: 3624767 - DNA, 25 bp, Homo sapien
ggaattatttcacggcacttagcct

SEQ ID NO: 3624768 - DNA, 25 bp, Homo sapien
ggctggatgcctagcatagactgta

SEQ ID NO: 3624769 - DNA, 25 bp, Homo sapien
tgtgcaaccagtccaatagatctct

SEQ ID NO: 3624770 - DNA, 25 bp, Homo sapien
tcccaggctggtactgaaagagaaa

SEQ ID NO: 3624771 - DNA, 25 bp, Homo sapien
tttgcaagcacaggctgtttcccac

SEQ ID NO: 3624772 - DNA, 25 bp, Homo sapien
tctgttgtactttcaaagtttccca

SEQ ID NO: 3624773 - DNA, 25 bp, Homo sapien
tgaaagagaaagctgcctcctcttt

SEQ ID NO: 3624774 - DNA, 25 bp, Homo sapien
ctgcctttcgctgcgtcggcacttt

SEQ ID NO: 3624775 - DNA, 25 bp, Homo sapien
ctttcgctgcgtcggcactttgatt

SEQ ID NO: 3624776 - DNA, 25 bp, Homo sapien
gcctttcgctgcgtcggcactttga

SEQ ID NO: 3624777 - DNA, 25 bp, Homo sapien
tcgctgcgtcggcactttgattttg

SEQ ID NO: 3624778 - DNA, 25 bp, Homo sapien
ttctgtctacctccgattgttctat

SEQ ID NO: 3624779 - DNA, 25 bp, Homo sapien
tgtctacctccgattgttctatcca

SEQ ID NO: 3624780 - DNA, 25 bp, Homo sapien
cttttctgtctacctccgattgttc

SEQ ID NO: 3624781 - DNA, 25 bp, Homo sapien
tacctccgattgttctatccaccat

SEQ ID NO: 3624782 - DNA, 25 bp, Homo sapien
ttaggaatcggctttcaaggaggca

SEQ ID NO: 3624783 - DNA, 25 bp, Homo sapien
gaaattgctttgaatgtcatccctt

SEQ ID NO: 3624784 - DNA, 25 bp, Homo sapien
gctttgaatgtcatcccttttcatt

SEQ ID NO: 3624785 - DNA, 25 bp, Homo sapien
atcccttttcattaactcggatatg

SEQ ID NO: 3624786 - DNA, 25 bp, Homo sapien
tgctgccatgacaaccccggcggtc

SEQ ID NO: 3624787 - DNA, 25 bp, Homo sapien
tccgaggctggcaaaagccgaggct

SEQ ID NO: 3624788 - DNA, 25 bp, Homo sapien
tccaaagtgccgtgtctgaactgcc

SEQ ID NO: 3624789 - DNA, 25 bp, Homo sapien
ttcgaactgagggactgcagaccgc

SEQ ID NO: 3624790 - DNA, 25 bp, Homo sapien
tccgattgttttccggtggcgagcc

SEQ ID NO: 3624791 - DNA, 25 bp, Homo sapien
gctgctgttccttgtacccacagga

SEQ ID NO: 3624792 - DNA, 25 bp, Homo sapien
ggaagttgtggctgtcgagaatggg

SEQ ID NO: 3624793 - DNA, 25 bp, Homo sapien
tgcccgtgcgcagcggagatgccac

SEQ ID NO: 3624794 - DNA, 25 bp, Homo sapien
aagtgcctcgtggtcgtgtctctca

SEQ ID NO: 3624795 - DNA, 25 bp, Homo sapien
ctatggacaacgtgacggtccggca

SEQ ID NO: 3624796 - DNA, 25 bp, Homo sapien
tatggacaacgtgacggtccggcag

SEQ ID NO: 3624797 - DNA, 25 bp, Homo sapien
gctgtgtgaggctgctcctgtggag

SEQ ID NO: 3624798 - DNA, 25 bp, Homo sapien
ttacttcctcagtgtcatttctgac

SEQ ID NO: 3624799 - DNA, 25 bp, Homo sapien
gtcatttctgactgggcagctgtgt

SEQ ID NO: 3624800 - DNA, 25 bp, Homo sapien
cctcagtgtcatttctgactgggca

SEQ ID NO: 3624801 - DNA, 25 bp, Homo sapien
ggcttgccaggcatccggctggtgt

SEQ ID NO: 3624802 - DNA, 25 bp, Homo sapien
gcttgccaggcatccggctggtgtc

SEQ ID NO: 3624803 - DNA, 25 bp, Homo sapien
agcacattcagctgttgaggagcca

SEQ ID NO: 3624804 - DNA, 25 bp, Homo sapien
aggagcaggcacagatgggaccaag

SEQ ID NO: 3624805 - DNA, 25 bp, Homo sapien
gaagcacattcagctgttgaggagc

SEQ ID NO: 3624806 - DNA, 25 bp, Homo sapien
tcctggaagcacattcagctgttga

SEQ ID NO: 3624807 - DNA, 25 bp, Homo sapien
taccatgaacatttccacgtacttc

SEQ ID NO: 3624808 - DNA, 25 bp, Homo sapien
accatgaacatttccacgtacttct

SEQ ID NO: 3624809 - DNA, 25 bp, Homo sapien
ctggagttagtaataccatgaacat

SEQ ID NO: 3624810 - DNA, 25 bp, Homo sapien
ggagttagtaataccatgaacattt

SEQ ID NO: 3624811 - DNA, 25 bp, Homo sapien
caagattcaggtgcctcgattccac

SEQ ID NO: 3624812 - DNA, 25 bp, Homo sapien
tactgtacatctcctatgagccagg

SEQ ID NO: 3624813 - DNA, 25 bp, Homo sapien
gacgtacaaggaatggaggcaatgc

SEQ ID NO: 3624814 - DNA, 25 bp, Homo sapien
tgctttggtatgctgcacagtgcct

SEQ ID NO: 3624815 - DNA, 25 bp, Homo sapien
tcagcaaagggatctggggggtcct

SEQ ID NO: 3624816 - DNA, 25 bp, Homo sapien
tcctcggtgtctgtaagtgctcttt

SEQ ID NO: 3624817 - DNA, 25 bp, Homo sapien
gcagtcagcaaagggatctgggggg

SEQ ID NO: 3624818 - DNA, 25 bp, Homo sapien
ctcggtgtctgtaagtgctctttcc

SEQ ID NO: 3624819 - DNA, 25 bp, Homo sapien
cctgcgatggctgaaatccgtgaaa

SEQ ID NO: 3624820 - DNA, 25 bp, Homo sapien
tgggtgaataaacaccaggccgctc

SEQ ID NO: 3624821 - DNA, 25 bp, Homo sapien
tgatcaaaggctcagctacctcgtg

SEQ ID NO: 3624822 - DNA, 25 bp, Homo sapien
tgaaattccacgaagtccgcttgct

SEQ ID NO: 3624823 - DNA, 25 bp, Homo sapien
cgtgggctacttcattacccttaag

SEQ ID NO: 3624824 - DNA, 25 bp, Homo sapien
tgtagtgcggagaaccaaaacactg

SEQ ID NO: 3624825 - DNA, 25 bp, Homo sapien
gggtgtcgtggaaatgtatcatgcc

SEQ ID NO: 3624826 - DNA, 25 bp, Homo sapien
catgccacggcatcaccattttgac

SEQ ID NO: 3624827 - DNA, 25 bp, Homo sapien
tatatgcctgatcacactcaaaggg

SEQ ID NO: 3624828 - DNA, 25 bp, Homo sapien
ttcactgggtccacattaggccgac

SEQ ID NO: 3624829 - DNA, 25 bp, Homo sapien
cagggctcccgatgatacagcagga

SEQ ID NO: 3624830 - DNA, 25 bp, Homo sapien
ccacattaggccgacaagtcaggtt

SEQ ID NO: 3624831 - DNA, 25 bp, Homo sapien
gtcaggttcctcagggctcccgatg

SEQ ID NO: 3624832 - DNA, 25 bp, Homo sapien
tcacatctgctccccattccttcct

SEQ ID NO: 3624833 - DNA, 25 bp, Homo sapien
acatctgctccccattccttcctag

SEQ ID NO: 3624834 - DNA, 25 bp, Homo sapien
atctgctccccattccttcctagga

SEQ ID NO: 3624835 - DNA, 25 bp, Homo sapien
tctgctccccattccttcctaggac

SEQ ID NO: 3624836 - DNA, 25 bp, Homo sapien
gggactactgttttcatatgttggg

SEQ ID NO: 3624837 - DNA, 25 bp, Homo sapien
ccattgctttgagggactactgttt

SEQ ID NO: 3624838 - DNA, 25 bp, Homo sapien
tctgtcattcccattgctttgaggg

SEQ ID NO: 3624839 - DNA, 25 bp, Homo sapien
tcatatgttgggttcctgtatttac

SEQ ID NO: 3624840 - DNA, 25 bp, Homo sapien
ctgtgctgatggaacccccgcataa

SEQ ID NO: 3624841 - DNA, 25 bp, Homo sapien
gtgctgatggaacccccgcataatg

SEQ ID NO: 3624842 - DNA, 25 bp, Homo sapien
tgtgctgatggaacccccgcataat

SEQ ID NO: 3624843 - DNA, 25 bp, Homo sapien
gctgatggaacccccgcataatgtg

SEQ ID NO: 3624844 - DNA, 25 bp, Homo sapien
ggagcacaggtacatttaatttctc

SEQ ID NO: 3624845 - DNA, 25 bp, Homo sapien
atgataacacagccctcatttccat

SEQ ID NO: 3624846 - DNA, 25 bp, Homo sapien
ctccggagcacaggtacatttaatt

SEQ ID NO: 3624847 - DNA, 25 bp, Homo sapien
ccggagcacaggtacatttaatttc

SEQ ID NO: 3624848 - DNA, 25 bp, Homo sapien
tgtcagcaccatccattggaagctt

SEQ ID NO: 3624849 - DNA, 25 bp, Homo sapien
tatttggcttatcacacactgagga

SEQ ID NO: 3624850 - DNA, 25 bp, Homo sapien
tgcatacatgcatattggaaatcaa

SEQ ID NO: 3624851 - DNA, 25 bp, Homo sapien
agccccaccagtcctagatgctgaa

SEQ ID NO: 3624852 - DNA, 25 bp, Homo sapien
tacctgaattttgcagtgttgtaca

SEQ ID NO: 3624853 - DNA, 25 bp, Homo sapien
aacaagtgagagtctaccccactaa

SEQ ID NO: 3624854 - DNA, 25 bp, Homo sapien
tcaaaaacaagtgagagtctacccc

SEQ ID NO: 3624855 - DNA, 25 bp, Homo sapien
catagaaatagagtgagttttcacc

SEQ ID NO: 3624856 - DNA, 25 bp, Homo sapien
tggcccttaagatgctcagtgtggt

SEQ ID NO: 3624857 - DNA, 25 bp, Homo sapien
gaaaaagctttgatgtggcccttaa

SEQ ID NO: 3624858 - DNA, 25 bp, Homo sapien
caaataagtacaatccggagtgacc

SEQ ID NO: 3624859 - DNA, 25 bp, Homo sapien
taactttgtgagtagcccctgcctg

SEQ ID NO: 3624860 - DNA, 25 bp, Homo sapien
tggtatttactcctttttcttcatg

SEQ ID NO: 3624861 - DNA, 25 bp, Homo sapien
tttactcctttttcttcatgatcag

SEQ ID NO: 3624862 - DNA, 25 bp, Homo sapien
ctcctttttcttcatgatcagccat

SEQ ID NO: 3624863 - DNA, 25 bp, Homo sapien
tactcctttttcttcatgatcagcc

SEQ ID NO: 3624864 - DNA, 25 bp, Homo sapien
atagttcttctttgttcagcatcct

SEQ ID NO: 3624865 - DNA, 25 bp, Homo sapien
gatagttcttctttgttcagcatcc

SEQ ID NO: 3624866 - DNA, 25 bp, Homo sapien
ggatagttcttctttgttcagcatc

SEQ ID NO: 3624867 - DNA, 25 bp, Homo sapien
tagttctgattctgttgatgtaaac

SEQ ID NO: 3624868 - DNA, 25 bp, Homo sapien
ttagttctgattctgttgatgtaaa

SEQ ID NO: 3624869 - DNA, 25 bp, Homo sapien
ctttcttgtccctgccataaccatg

SEQ ID NO: 3624870 - DNA, 25 bp, Homo sapien
gtccctgccataaccatgcatctct

SEQ ID NO: 3624871 - DNA, 25 bp, Homo sapien
gcattgcatagttgagaacagcagt

SEQ ID NO: 3624872 - DNA, 25 bp, Homo sapien
agattgagttactgtagtccacttt

SEQ ID NO: 3624873 - DNA, 25 bp, Homo sapien
tttctttgatattctctgaggtcta

SEQ ID NO: 3624874 - DNA, 25 bp, Homo sapien
gacagccagagtggctttgcagaaa

SEQ ID NO: 3624875 - DNA, 25 bp, Homo sapien
aagtcagcatacatcacttctcctg

SEQ ID NO: 3624876 - DNA, 25 bp, Homo sapien
ggcttgacagccagagtggctttgc

SEQ ID NO: 3624877 - DNA, 25 bp, Homo sapien
tcctgacaggagtcataaaagcctc

SEQ ID NO: 3624878 - DNA, 25 bp, Homo sapien
taaaagctgcgtggagtgagcccac

SEQ ID NO: 3624879 - DNA, 25 bp, Homo sapien
aaagcctccaattgcactgcagaaa

SEQ ID NO: 3624880 - DNA, 25 bp, Homo sapien
ataaatcagtatccggcatgtggca

SEQ ID NO: 3624881 - DNA, 25 bp, Homo sapien
tactgttgccttggtatatctgtta

SEQ ID NO: 3624882 - DNA, 25 bp, Homo sapien
ctttctactgttgccttggtatatc

SEQ ID NO: 3624883 - DNA, 25 bp, Homo sapien
tctactgttgccttggtatatctgt

SEQ ID NO: 3624884 - DNA, 25 bp, Homo sapien
gttgccttggtatatctgttatacc

SEQ ID NO: 3624885 - DNA, 25 bp, Homo sapien
tcaactttttaggagcttgtggctc

SEQ ID NO: 3624886 - DNA, 25 bp, Homo sapien
gcggatttccaagacactgattgga

SEQ ID NO: 3624887 - DNA, 25 bp, Homo sapien
tcaaatatatcaccagtctggcgga

SEQ ID NO: 3624888 - DNA, 25 bp, Homo sapien
cagcgtgggtattatgggagactgc

SEQ ID NO: 3624889 - DNA, 25 bp, Homo sapien
cagcaggacaccaaggcagaaatcc

SEQ ID NO: 3624890 - DNA, 25 bp, Homo sapien
aggacaccaaggcagaaatccacat

SEQ ID NO: 3624891 - DNA, 25 bp, Homo sapien
ggacaccaaggcagaaatccacatc

SEQ ID NO: 3624892 - DNA, 25 bp, Homo sapien
gcaggacaccaaggcagaaatccac

SEQ ID NO: 3624893 - DNA, 25 bp, Homo sapien
catgagacgtgatgggttattacat

SEQ ID NO: 3624894 - DNA, 25 bp, Homo sapien
tgcttttattaaactcctagaccaa

SEQ ID NO: 3624895 - DNA, 25 bp, Homo sapien
taagactgcttccaaggaaagcgtg

SEQ ID NO: 3624896 - DNA, 25 bp, Homo sapien
tggaagatggcattataagactgct

SEQ ID NO: 3624897 - DNA, 25 bp, Homo sapien
tagttgctagacatttaaatagctt

SEQ ID NO: 3624898 - DNA, 25 bp, Homo sapien
aattcactagttgctagacatttaa

SEQ ID NO: 3624899 - DNA, 25 bp, Homo sapien
ctccatttctaaccccagccttagg

SEQ ID NO: 3624900 - DNA, 25 bp, Homo sapien
tgtttattaattcactagttgctag

SEQ ID NO: 3624901 - DNA, 25 bp, Homo sapien
gcaaaggtgttgaccctggctgcag

SEQ ID NO: 3624902 - DNA, 25 bp, Homo sapien
gaagtgaacagcgttattgcaagca

SEQ ID NO: 3624903 - DNA, 25 bp, Homo sapien
agtttgcgcccgctccagtgtctag

SEQ ID NO: 3624904 - DNA, 25 bp, Homo sapien
aagagcacccctctgtccgatagga

SEQ ID NO: 3624905 - DNA, 25 bp, Homo sapien
cactgggataggtatattccggact

SEQ ID NO: 3624906 - DNA, 25 bp, Homo sapien
tcagatgcgcagatacagtctggct

SEQ ID NO: 3624907 - DNA, 25 bp, Homo sapien
tccggactttccctgaagttgtcaa

SEQ ID NO: 3624908 - DNA, 25 bp, Homo sapien
gactcagtcacattcttgacctctg

SEQ ID NO: 3624909 - DNA, 25 bp, Homo sapien
gacaagctagccactcatgcacatt

SEQ ID NO: 3624910 - DNA, 25 bp, Homo sapien
ccagacctggttgatggaacaccag

SEQ ID NO: 3624911 - DNA, 25 bp, Homo sapien
tgcacattgcaagcctcaatcctgt

SEQ ID NO: 3624912 - DNA, 25 bp, Homo sapien
gatggaacaccagggcgcaaaatga

SEQ ID NO: 3624913 - DNA, 25 bp, Homo sapien
tatacacagataatgagagcacgct

SEQ ID NO: 3624914 - DNA, 25 bp, Homo sapien
gattcatagtaatgttgatccatgc

SEQ ID NO: 3624915 - DNA, 25 bp, Homo sapien
tgttgatccatgcaaaagctttttc

SEQ ID NO: 3624916 - DNA, 25 bp, Homo sapien
ctttgtgcccactatacacagataa

SEQ ID NO: 3624917 - DNA, 25 bp, Homo sapien
cacgatttgcttcacccgtctcagg

SEQ ID NO: 3624918 - DNA, 25 bp, Homo sapien
gcacctcttagtgaaggacatttgc

SEQ ID NO: 3624919 - DNA, 25 bp, Homo sapien
cagtgtgacaaacttcaggatgtat

SEQ ID NO: 3624920 - DNA, 25 bp, Homo sapien
gatgtatgttaagtgcatctgtgca

SEQ ID NO: 3624921 - DNA, 25 bp, Homo sapien
caattggcctggtgataataacagc

SEQ ID NO: 3624922 - DNA, 25 bp, Homo sapien
tttgttctcctcaattggcctggtg

SEQ ID NO: 3624923 - DNA, 25 bp, Homo sapien
tcccctaggctccaagttcacattt

SEQ ID NO: 3624924 - DNA, 25 bp, Homo sapien
ccctaggctccaagttcacattttc

SEQ ID NO: 3624925 - DNA, 25 bp, Homo sapien
cctgctggtcaatcagatctttgta

SEQ ID NO: 3624926 - DNA, 25 bp, Homo sapien
cagatctttgtatgggctccagatg

SEQ ID NO: 3624927 - DNA, 25 bp, Homo sapien
ttatacttcctgctggtcaatcaga

SEQ ID NO: 3624928 - DNA, 25 bp, Homo sapien
caatcagatctttgtatgggctcca

SEQ ID NO: 3624929 - DNA, 25 bp, Homo sapien
tgctgggattttccacagcatcact

SEQ ID NO: 3624930 - DNA, 25 bp, Homo sapien
tccagtgaaaaggctctcgctgttg

SEQ ID NO: 3624931 - DNA, 25 bp, Homo sapien
gcatcactcttttcaatgagtgcct

SEQ ID NO: 3624932 - DNA, 25 bp, Homo sapien
gagtgcctttaatgctatgctgaaa

SEQ ID NO: 3624933 - DNA, 25 bp, Homo sapien
attgtcgagtagtatcaggtggtgt

SEQ ID NO: 3624934 - DNA, 25 bp, Homo sapien
cattgtcgagtagtatcaggtggtg

SEQ ID NO: 3624935 - DNA, 25 bp, Homo sapien
cctgggcagcatgtaggatggatac

SEQ ID NO: 3624936 - DNA, 25 bp, Homo sapien
tttccgggaacatgctgagtacaga

SEQ ID NO: 3624937 - DNA, 25 bp, Homo sapien
gataatagatcattcccaggcgaca

SEQ ID NO: 3624938 - DNA, 25 bp, Homo sapien
ggacaacaggtttccgggaacatgc

SEQ ID NO: 3624939 - DNA, 25 bp, Homo sapien
tataattggagggagatgtagcctc

SEQ ID NO: 3624940 - DNA, 25 bp, Homo sapien
ttcagatatgaccaggtcataggaa

SEQ ID NO: 3624941 - DNA, 25 bp, Homo sapien
gtcataggaaatgcaattgaaggga

SEQ ID NO: 3624942 - DNA, 25 bp, Homo sapien
aggacttctgcattgctgctcagga

SEQ ID NO: 3624943 - DNA, 25 bp, Homo sapien
gccttgtaataggaacttgataaag

SEQ ID NO: 3624944 - DNA, 25 bp, Homo sapien
ataaagaggacttgatgaaatctga

SEQ ID NO: 3624945 - DNA, 25 bp, Homo sapien
ttctgcataactatgcctgccttgt

SEQ ID NO: 3624946 - DNA, 25 bp, Homo sapien
aagaggacttgatgaaatctgagcc

SEQ ID NO: 3624947 - DNA, 25 bp, Homo sapien
actagagtagtatcactggacctta

SEQ ID NO: 3624948 - DNA, 25 bp, Homo sapien
caattctccactagagtagtatcac

SEQ ID NO: 3624949 - DNA, 25 bp, Homo sapien
gcagccaattctccactagagtagt

SEQ ID NO: 3624950 - DNA, 25 bp, Homo sapien
ttctccactagagtagtatcactgg

SEQ ID NO: 3624951 - DNA, 25 bp, Homo sapien
aatttctgaagaaaatgtgaaacag

SEQ ID NO: 3624952 - DNA, 25 bp, Homo sapien
atttctgaagaaaatgtgaaacagc

SEQ ID NO: 3624953 - DNA, 25 bp, Homo sapien
ctaaatttctgaagaaaatgtgaaa

SEQ ID NO: 3624954 - DNA, 25 bp, Homo sapien
taaatttctgaagaaaatgtgaaac

SEQ ID NO: 3624955 - DNA, 25 bp, Homo sapien
gacttacaatttggtcttgcatatt

SEQ ID NO: 3624956 - DNA, 25 bp, Homo sapien
ttggtgacacatgcgaaggcacagg

SEQ ID NO: 3624957 - DNA, 25 bp, Homo sapien
gccaaccctatggacttgttggtga

SEQ ID NO: 3624958 - DNA, 25 bp, Homo sapien
agtcattgccgccagccaaccctat

SEQ ID NO: 3624959 - DNA, 25 bp, Homo sapien
gagcatccgacctgattttgcagag

SEQ ID NO: 3624960 - DNA, 25 bp, Homo sapien
ttgcagagatgcacacttgaccctt

SEQ ID NO: 3624961 - DNA, 25 bp, Homo sapien
ttaaatgcagaacctcaagagcatc

SEQ ID NO: 3624962 - DNA, 25 bp, Homo sapien
cagagatgcacacttgacccttgca

SEQ ID NO: 3624963 - DNA, 25 bp, Homo sapien
atgctatccttgttccagtgatgga

SEQ ID NO: 3624964 - DNA, 25 bp, Homo sapien
tcgttgttaaggatgatgttgatgc

SEQ ID NO: 3624965 - DNA, 25 bp, Homo sapien
catcgttgttaaggatgatgttgat

SEQ ID NO: 3624966 - DNA, 25 bp, Homo sapien
atcgttgttaaggatgatgttgatg

SEQ ID NO: 3624967 - DNA, 25 bp, Homo sapien
tgggtttgagcatttgcacaaaatc

SEQ ID NO: 3624968 - DNA, 25 bp, Homo sapien
gacagggcttatcttagtaccaaaa

SEQ ID NO: 3624969 - DNA, 25 bp, Homo sapien
caaaactccatgccaaaaagatcat

SEQ ID NO: 3624970 - DNA, 25 bp, Homo sapien
cagccacgggtagacagctttgctt

SEQ ID NO: 3624971 - DNA, 25 bp, Homo sapien
tcttgagcaccgagagagttgcagg

SEQ ID NO: 3624972 - DNA, 25 bp, Homo sapien
acaggaaccctttcatccactgtct

SEQ ID NO: 3624973 - DNA, 25 bp, Homo sapien
caaggctctgcagggactggcggct

SEQ ID NO: 3624974 - DNA, 25 bp, Homo sapien
cctcttccgcatcatttgtggccag

SEQ ID NO: 3624975 - DNA, 25 bp, Homo sapien
cttaaccacagaaggcatagagaga

SEQ ID NO: 3624976 - DNA, 25 bp, Homo sapien
ccacagaaggcatagagagaaacag

SEQ ID NO: 3624977 - DNA, 25 bp, Homo sapien
atagagagaaacagacttgaaagcc

SEQ ID NO: 3624978 - DNA, 25 bp, Homo sapien
aggcatagagagaaacagacttgaa

SEQ ID NO: 3624979 - DNA, 25 bp, Homo sapien
gagcaatcaggctccgctcggccag

SEQ ID NO: 3624980 - DNA, 25 bp, Homo sapien
tcaaggagcaatcaggctccgctcg

SEQ ID NO: 3624981 - DNA, 25 bp, Homo sapien
ccatcaaggagcaatcaggctccgc

SEQ ID NO: 3624982 - DNA, 25 bp, Homo sapien
agaagcgctgatttcttcccccagt

SEQ ID NO: 3624983 - DNA, 25 bp, Homo sapien
atacgataaccaggcacaccgtctt

SEQ ID NO: 3624984 - DNA, 25 bp, Homo sapien
ttgaccttgtaacttgacctcttgg

SEQ ID NO: 3624985 - DNA, 25 bp, Homo sapien
aacttgacctcttggtaccagtgac

SEQ ID NO: 3624986 - DNA, 25 bp, Homo sapien
tcagctcctcaatacgataaccagg

SEQ ID NO: 3624987 - DNA, 25 bp, Homo sapien
ttccctgaagctgaaacaattgcca

SEQ ID NO: 3624988 - DNA, 25 bp, Homo sapien
tgttccctgaagctgaaacaattgc

SEQ ID NO: 3624989 - DNA, 25 bp, Homo sapien
tccctgaagctgaaacaattgccat

SEQ ID NO: 3624990 - DNA, 25 bp, Homo sapien
gttccctgaagctgaaacaattgcc

SEQ ID NO: 3624991 - DNA, 25 bp, Homo sapien
ctgattgctttgatcaggttaagga

SEQ ID NO: 3624992 - DNA, 25 bp, Homo sapien
ctttgatcaggttaaggatgggagc

SEQ ID NO: 3624993 - DNA, 25 bp, Homo sapien
tctacttgcgagtcttgtggcactt

SEQ ID NO: 3624994 - DNA, 25 bp, Homo sapien
tgggagcaggctctacttgcgagtc

SEQ ID NO: 3624995 - DNA, 25 bp, Homo sapien
agaactgtgagggatcagcatgagg

SEQ ID NO: 3624996 - DNA, 25 bp, Homo sapien
ggccacattgacaaggaaagctgtc

SEQ ID NO: 3624997 - DNA, 25 bp, Homo sapien
agcatgagggccacattgacaagga

SEQ ID NO: 3624998 - DNA, 25 bp, Homo sapien
tgtgagggatcagcatgagggccac

SEQ ID NO: 3624999 - DNA, 25 bp, Homo sapien
tgcccttcacgaaagtacttctctt

SEQ ID NO: 3625000 - DNA, 25 bp, Homo sapien
cacgaaagtacttctcttcacctgt

SEQ ID NO: 3625001 - DNA, 25 bp, Homo sapien
aaatgcccttcacgaaagtacttct

SEQ ID NO: 3625002 - DNA, 25 bp, Homo sapien
acataacttaaaatgcccttcacga

SEQ ID NO: 3625003 - DNA, 25 bp, Homo sapien
tgagtgaattagactaagtcaaacc

SEQ ID NO: 3625004 - DNA, 25 bp, Homo sapien
tgaattagactaagtcaaaccctcc

SEQ ID NO: 3625005 - DNA, 25 bp, Homo sapien
taaataatgtactggtgtgtgtttg

SEQ ID NO: 3625006 - DNA, 25 bp, Homo sapien
ttattgagtgaattagactaagtca

SEQ ID NO: 3625007 - DNA, 25 bp, Homo sapien
tgtgtgatgtgtctgtgatgcgtgt

SEQ ID NO: 3625008 - DNA, 25 bp, Homo sapien
tatgtggtgtgtggtgaggtatgag

SEQ ID NO: 3625009 - DNA, 25 bp, Homo sapien
gtatgtggtgtgtagtgtgtggtgt

SEQ ID NO: 3625010 - DNA, 25 bp, Homo sapien
tgtgtagtgtgtgctatgtgatgta

SEQ ID NO: 3625011 - DNA, 25 bp, Homo sapien
tataacacaggtcccctgtgacatc

SEQ ID NO: 3625012 - DNA, 25 bp, Homo sapien
ccaggcagtcttggcgatgctgacc

SEQ ID NO: 3625013 - DNA, 25 bp, Homo sapien
gcggtgagcgcatagagagggatct

SEQ ID NO: 3625014 - DNA, 25 bp, Homo sapien
agtcttggcgatgctgaccttctga

SEQ ID NO: 3625015 - DNA, 25 bp, Homo sapien
tacatttggcagaaggctgtctggg

SEQ ID NO: 3625016 - DNA, 25 bp, Homo sapien
ctgtctggggttgtagatgaagtct

SEQ ID NO: 3625017 - DNA, 25 bp, Homo sapien
cctgtgaccatcagtttacatttgg

SEQ ID NO: 3625018 - DNA, 25 bp, Homo sapien
catatttgggcactctcatccatat

SEQ ID NO: 3625019 - DNA, 25 bp, Homo sapien
agaatttgcataggaagtgaaggca

SEQ ID NO: 3625020 - DNA, 25 bp, Homo sapien
ctcaagaatttgcataggaagtgaa

SEQ ID NO: 3625021 - DNA, 25 bp, Homo sapien
gaatttgcataggaagtgaaggcat

SEQ ID NO: 3625022 - DNA, 25 bp, Homo sapien
ctctcaagaatttgcataggaagtg

SEQ ID NO: 3625023 - DNA, 25 bp, Homo sapien
tccgcactcagaaggtttgtaaaca

SEQ ID NO: 3625024 - DNA, 25 bp, Homo sapien
taatgttgaacatagtgatgtagcc

SEQ ID NO: 3625025 - DNA, 25 bp, Homo sapien
catagtgatgtagccatgtatttgg

SEQ ID NO: 3625026 - DNA, 25 bp, Homo sapien
aagggagggaacgatagcatccgca

SEQ ID NO: 3625027 - DNA, 25 bp, Homo sapien
tactgggttttgtgctgtcatggtg

SEQ ID NO: 3625028 - DNA, 25 bp, Homo sapien
tcttcttccatagtatagtaaggtg

SEQ ID NO: 3625029 - DNA, 25 bp, Homo sapien
tagtaaggtgcatctctttgtgtct

SEQ ID NO: 3625030 - DNA, 25 bp, Homo sapien
tgtgtcttagcaaatagagggtgtg

SEQ ID NO: 3625031 - DNA, 25 bp, Homo sapien
gctctcttgccaccatctcctgtgt

SEQ ID NO: 3625032 - DNA, 25 bp, Homo sapien
accatctcctgtgttctcacagttt

SEQ ID NO: 3625033 - DNA, 25 bp, Homo sapien
tgccaccatctcctgtgttctcaca

SEQ ID NO: 3625034 - DNA, 25 bp, Homo sapien
tgttctcacagttttgtttgggcat

SEQ ID NO: 3625035 - DNA, 25 bp, Homo sapien
tgattgagtcggtctggtagcacag

SEQ ID NO: 3625036 - DNA, 25 bp, Homo sapien
tgcaaaaaagcttcctgtgattgag

SEQ ID NO: 3625037 - DNA, 25 bp, Homo sapien
gtgacagctaatgcaccaggaagtg

SEQ ID NO: 3625038 - DNA, 25 bp, Homo sapien
tgcaccaggaagtgccctcaagggt

SEQ ID NO: 3625039 - DNA, 25 bp, Homo sapien
ccattggtttggctgaggtagaacc

SEQ ID NO: 3625040 - DNA, 25 bp, Homo sapien
cctcggtgacgatggctgatggaat

SEQ ID NO: 3625041 - DNA, 25 bp, Homo sapien
ctgatggaatgtctggccattggtt

SEQ ID NO: 3625042 - DNA, 25 bp, Homo sapien
gtttggctgaggtagaaccagcatc

SEQ ID NO: 3625043 - DNA, 25 bp, Homo sapien
tatttttgcttcctcgacggctggg

SEQ ID NO: 3625044 - DNA, 25 bp, Homo sapien
gctgtataattgatggcctctcggg

SEQ ID NO: 3625045 - DNA, 25 bp, Homo sapien
tgcatttaaaccacgatcgccttgg

SEQ ID NO: 3625046 - DNA, 25 bp, Homo sapien
tcgccttggattcaacgcctcagag

SEQ ID NO: 3625047 - DNA, 25 bp, Homo sapien
ggcatccttatgagggtatttgatc

SEQ ID NO: 3625048 - DNA, 25 bp, Homo sapien
tcttgaaattgtcgtatctaggctc

SEQ ID NO: 3625049 - DNA, 25 bp, Homo sapien
taatactgtactctgccacagcacg

SEQ ID NO: 3625050 - DNA, 25 bp, Homo sapien
ccacagcacgctggattattttgct

SEQ ID NO: 3625051 - DNA, 25 bp, Homo sapien
cattcatgcaccaggctgttctcat

SEQ ID NO: 3625052 - DNA, 25 bp, Homo sapien
gttctcataggccttagtgtctctg

SEQ ID NO: 3625053 - DNA, 25 bp, Homo sapien
tagtgtctctgcacgtggtctggaa

SEQ ID NO: 3625054 - DNA, 25 bp, Homo sapien
ttccaatctgggttggacattcatg

SEQ ID NO: 3625055 - DNA, 25 bp, Homo sapien
tctgattccaactgctaacataata

SEQ ID NO: 3625056 - DNA, 25 bp, Homo sapien
aacataatagtaatattcttcctgg

SEQ ID NO: 3625057 - DNA, 25 bp, Homo sapien
gattccaactgctaacataatagta

SEQ ID NO: 3625058 - DNA, 25 bp, Homo sapien
cataatagtaatattcttcctggat

SEQ ID NO: 3625059 - DNA, 25 bp, Homo sapien
taaaaacctcatctaggctacctag

SEQ ID NO: 3625060 - DNA, 25 bp, Homo sapien
taacacgttgtactgagatattggt

SEQ ID NO: 3625061 - DNA, 25 bp, Homo sapien
gagatattggtagggatattcagca

SEQ ID NO: 3625062 - DNA, 25 bp, Homo sapien
tctgtcatcaaacaagacactgaca

SEQ ID NO: 3625063 - DNA, 25 bp, Homo sapien
tgagtcggtcttcgctagtactgcc

SEQ ID NO: 3625064 - DNA, 25 bp, Homo sapien
tgtggcagcatctgagtcggtcttc

SEQ ID NO: 3625065 - DNA, 25 bp, Homo sapien
cttcgctagtactgccttagagagg

SEQ ID NO: 3625066 - DNA, 25 bp, Homo sapien
gcatctgagtcggtcttcgctagta

SEQ ID NO: 3625067 - DNA, 25 bp, Homo sapien
agcctgggctgggtttgcaccgctt

SEQ ID NO: 3625068 - DNA, 25 bp, Homo sapien
tcaggtgcccttaggcctgcgcagc

SEQ ID NO: 3625069 - DNA, 25 bp, Homo sapien
gggtttgcaccgctttcacacggcc

SEQ ID NO: 3625070 - DNA, 25 bp, Homo sapien
gggctgggtttgcaccgctttcaca

SEQ ID NO: 3625071 - DNA, 25 bp, Homo sapien
tctcagctggtgtaatctgcggctc

SEQ ID NO: 3625072 - DNA, 25 bp, Homo sapien
gaatgtgcgtccaattcgccgtgaa

SEQ ID NO: 3625073 - DNA, 25 bp, Homo sapien
ttcacaggttgtacgtttgcgcccg

SEQ ID NO: 3625074 - DNA, 25 bp, Homo sapien
ctggattaggcagagaggttccccg

SEQ ID NO: 3625075 - DNA, 25 bp, Homo sapien
ccttcattgtgagcagaagccttga

SEQ ID NO: 3625076 - DNA, 25 bp, Homo sapien
tatagctcgggaaggcatcgtctgt

SEQ ID NO: 3625077 - DNA, 25 bp, Homo sapien
cgtctgtttcgtatgtcggccgtcc

SEQ ID NO: 3625078 - DNA, 25 bp, Homo sapien
ttgagaacaaagctcagcatccagc

SEQ ID NO: 3625079 - DNA, 25 bp, Homo sapien
taatttagggtctggtaattctgta

SEQ ID NO: 3625080 - DNA, 25 bp, Homo sapien
cttccttatgcgatgatgagcctac

SEQ ID NO: 3625081 - DNA, 25 bp, Homo sapien
tgtttaaaccacatcgcacatctgc

SEQ ID NO: 3625082 - DNA, 25 bp, Homo sapien
gaataacctaatctgcagtacctgt

SEQ ID NO: 3625083 - DNA, 25 bp, Homo sapien
aagatgtaaactgtctcatccagtt

SEQ ID NO: 3625084 - DNA, 25 bp, Homo sapien
tctttttgtcctgatatatggctgg

SEQ ID NO: 3625085 - DNA, 25 bp, Homo sapien
gctgggtaatcagagcagccgtcca

SEQ ID NO: 3625086 - DNA, 25 bp, Homo sapien
atcagagcagccgtccatgtgcacc

SEQ ID NO: 3625087 - DNA, 25 bp, Homo sapien
tgatatatggctgggtaatcagagc

SEQ ID NO: 3625088 - DNA, 25 bp, Homo sapien
gaagtggctctgacggtgttccatc

SEQ ID NO: 3625089 - DNA, 25 bp, Homo sapien
gttgcagactgctaaaaacggctct

SEQ ID NO: 3625090 - DNA, 25 bp, Homo sapien
aagccctttaagtgattcctgcaga

SEQ ID NO: 3625091 - DNA, 25 bp, Homo sapien
tcggctgctcgagggaactctgctt

SEQ ID NO: 3625092 - DNA, 25 bp, Homo sapien
gtcctaatgcggctgccctcatctg

SEQ ID NO: 3625093 - DNA, 25 bp, Homo sapien
ggtaagccagcaaatagactcagtc

SEQ ID NO: 3625094 - DNA, 25 bp, Homo sapien
ccacagctgttaaattcgcaacagg

SEQ ID NO: 3625095 - DNA, 25 bp, Homo sapien
agtcctatttgctctgctttccatg

SEQ ID NO: 3625096 - DNA, 25 bp, Homo sapien
ttattgcatgaagcacgcttacaag

SEQ ID NO: 3625097 - DNA, 25 bp, Homo sapien
gcttacaagagagaaagcagcggct

SEQ ID NO: 3625098 - DNA, 25 bp, Homo sapien
tgcaaagcaactcgctggcaaaggc

SEQ ID NO: 3625099 - DNA, 25 bp, Homo sapien
aaattaaatcaaagcgcgctctggc

SEQ ID NO: 3625100 - DNA, 25 bp, Homo sapien
caaaaagtttaaagcgattgcttgc

SEQ ID NO: 3625101 - DNA, 25 bp, Homo sapien
tcatccaatttatgtgtggcagggc

SEQ ID NO: 3625102 - DNA, 25 bp, Homo sapien
tacacaccacttgctgggataactc

SEQ ID NO: 3625103 - DNA, 25 bp, Homo sapien
cagggccaggattcaaaactacatc

SEQ ID NO: 3625104 - DNA, 25 bp, Homo sapien
ttaggagtcgaaggatttgggcact

SEQ ID NO: 3625105 - DNA, 25 bp, Homo sapien
gggcactgttgctggttctcgtttt

SEQ ID NO: 3625106 - DNA, 25 bp, Homo sapien
ctgttgctggttctcgttttagctg

SEQ ID NO: 3625107 - DNA, 25 bp, Homo sapien
gtcgaaggatttgggcactgttgct

SEQ ID NO: 3625108 - DNA, 25 bp, Homo sapien
ctcagacttgggcataatcgaagga

SEQ ID NO: 3625109 - DNA, 25 bp, Homo sapien
atcgaaggatcatctggatctctgc

SEQ ID NO: 3625110 - DNA, 25 bp, Homo sapien
gggcataatcgaaggatcatctgga

SEQ ID NO: 3625111 - DNA, 25 bp, Homo sapien
cagtcatgattcctcagacttgggc

SEQ ID NO: 3625112 - DNA, 25 bp, Homo sapien
gcattcctggtagaaattccattga

SEQ ID NO: 3625113 - DNA, 25 bp, Homo sapien
gactttaccagtgatccatctatgc

SEQ ID NO: 3625114 - DNA, 25 bp, Homo sapien
tacaatgggttgagacgtatcctct

SEQ ID NO: 3625115 - DNA, 25 bp, Homo sapien
ggaattagggtaatactagctgcat

SEQ ID NO: 3625116 - DNA, 25 bp, Homo sapien
ccgctgcggatgcatgcgtgactta

SEQ ID NO: 3625117 - DNA, 25 bp, Homo sapien
cacagctccaagagaggtgggagct

SEQ ID NO: 3625118 - DNA, 25 bp, Homo sapien
gatgcccagcactgcgactgctgca

SEQ ID NO: 3625119 - DNA, 25 bp, Homo sapien
ggccggccagggtttctactcctgc

SEQ ID NO: 3625120 - DNA, 25 bp, Homo sapien
ctttttgttgttgttaattgtcatg

SEQ ID NO: 3625121 - DNA, 25 bp, Homo sapien
ttgttgttgttaattgtcatgcaca

SEQ ID NO: 3625122 - DNA, 25 bp, Homo sapien
tgttgttgttaattgtcatgcacat

SEQ ID NO: 3625123 - DNA, 25 bp, Homo sapien
ttttgttgttgttaattgtcatgca

SEQ ID NO: 3625124 - DNA, 25 bp, Homo sapien
tttcttggcagacatgtgagttgac

SEQ ID NO: 3625125 - DNA, 25 bp, Homo sapien
ccccgtggagtgatgttcttttgcc

SEQ ID NO: 3625126 - DNA, 25 bp, Homo sapien
catctacatttttgcgggctttttc

SEQ ID NO: 3625127 - DNA, 25 bp, Homo sapien
tcttttgcctatcatcatctacatt

SEQ ID NO: 3625128 - DNA, 25 bp, Homo sapien
attaggcaggcatggtgccgtgcac

SEQ ID NO: 3625129 - DNA, 25 bp, Homo sapien
atcccaattacttgggaagctgatg

SEQ ID NO: 3625130 - DNA, 25 bp, Homo sapien
taggcaggcatggtgccgtgcacct

SEQ ID NO: 3625131 - DNA, 25 bp, Homo sapien
cccaattacttgggaagctgatgca

SEQ ID NO: 3625132 - DNA, 25 bp, Homo sapien
gccaatggcgagtaaaaggatgaga

SEQ ID NO: 3625133 - DNA, 25 bp, Homo sapien
tatttccagtgtgctggcatgagac

SEQ ID NO: 3625134 - DNA, 25 bp, Homo sapien
tattccaattctttattggagaaaa

SEQ ID NO: 3625135 - DNA, 25 bp, Homo sapien
cctttccatttagtggtttagtcag

SEQ ID NO: 3625136 - DNA, 25 bp, Homo sapien
aatcaaagaaaagggtgacggatgg

SEQ ID NO: 3625137 - DNA, 25 bp, Homo sapien
cgcaccatgagattatatcccccag

SEQ ID NO: 3625138 - DNA, 25 bp, Homo sapien
catgagattatatcccccagctggc

SEQ ID NO: 3625139 - DNA, 25 bp, Homo sapien
ctaatcaaagaaaagggtgacggat

SEQ ID NO: 3625140 - DNA, 25 bp, Homo sapien
agatagaggcaataaaggcattcac

SEQ ID NO: 3625141 - DNA, 25 bp, Homo sapien
aattagtctctttaggcctccgcag

SEQ ID NO: 3625142 - DNA, 25 bp, Homo sapien
ctaactgtcctggtaattagtctct

SEQ ID NO: 3625143 - DNA, 25 bp, Homo sapien
aatgaagaatggaggcctcatctgc

SEQ ID NO: 3625144 - DNA, 25 bp, Homo sapien
catttgagagaatgcccctgcctcg

SEQ ID NO: 3625145 - DNA, 25 bp, Homo sapien
atttgagagaatgcccctgcctcgg

SEQ ID NO: 3625146 - DNA, 25 bp, Homo sapien
ttgagagaatgcccctgcctcgggg

SEQ ID NO: 3625147 - DNA, 25 bp, Homo sapien
tcatttgagagaatgcccctgcctc

SEQ ID NO: 3625148 - DNA, 25 bp, Homo sapien
tctgtccaacttggtccaggtctgg

SEQ ID NO: 3625149 - DNA, 25 bp, Homo sapien
tggatatggtcacatagtgccagcc

SEQ ID NO: 3625150 - DNA, 25 bp, Homo sapien
ggtggtgagcgcatgtacctgtggg

SEQ ID NO: 3625151 - DNA, 25 bp, Homo sapien
ggtgggctgcgcagactggatatgg

SEQ ID NO: 3625152 - DNA, 25 bp, Homo sapien
tctcctccctggaggcttccactgg

SEQ ID NO: 3625153 - DNA, 25 bp, Homo sapien
gaacacctggctgtggcattctcct

SEQ ID NO: 3625154 - DNA, 25 bp, Homo sapien
ctggaggcttccactggcaggtcag

SEQ ID NO: 3625155 - DNA, 25 bp, Homo sapien
tggtaactacgccaggcccctgctg

SEQ ID NO: 3625156 - DNA, 25 bp, Homo sapien
tgaggcaaaacattcgacctggctt

SEQ ID NO: 3625157 - DNA, 25 bp, Homo sapien
gaaccacccttgtcgtctcagagtc

SEQ ID NO: 3625158 - DNA, 25 bp, Homo sapien
ggactcagaaccacccttgtcgtct

SEQ ID NO: 3625159 - DNA, 25 bp, Homo sapien
agtcctcagcctcgggcacagacaa

SEQ ID NO: 3625160 - DNA, 25 bp, Homo sapien
agagcagagaaacatagtctctcac

SEQ ID NO: 3625161 - DNA, 25 bp, Homo sapien
cagagcagagaaacatagtctctca

SEQ ID NO: 3625162 - DNA, 25 bp, Homo sapien
gcagagcagagaaacatagtctctc

SEQ ID NO: 3625163 - DNA, 25 bp, Homo sapien
aggcatccggcggaggcttctctcc

SEQ ID NO: 3625164 - DNA, 25 bp, Homo sapien
gcatccggcggaggcttctctcctt

SEQ ID NO: 3625165 - DNA, 25 bp, Homo sapien
ccttgaaggcatccggcggaggctt

SEQ ID NO: 3625166 - DNA, 25 bp, Homo sapien
gaaggcatccggcggaggcttctct

SEQ ID NO: 3625167 - DNA, 25 bp, Homo sapien
tggcttcggccttgcaggcatgtga

SEQ ID NO: 3625168 - DNA, 25 bp, Homo sapien
ttcggccttgcaggcatgtgatcct

SEQ ID NO: 3625169 - DNA, 25 bp, Homo sapien
gtgggctggcttcggccttgcaggc

SEQ ID NO: 3625170 - DNA, 25 bp, Homo sapien
ggccttgcaggcatgtgatccttga

SEQ ID NO: 3625171 - DNA, 25 bp, Homo sapien
caatcagtccatagagacgaacaga

SEQ ID NO: 3625172 - DNA, 25 bp, Homo sapien
tttggtagactgtgccaccacggcg

SEQ ID NO: 3625173 - DNA, 25 bp, Homo sapien
gctgcatcgtgcaacctctttggtg

SEQ ID NO: 3625174 - DNA, 25 bp, Homo sapien
tttcccaaacgggaagaacacagca

SEQ ID NO: 3625175 - DNA, 25 bp, Homo sapien
tgaacaagcagtaccgtcagtaccc

SEQ ID NO: 3625176 - DNA, 25 bp, Homo sapien
tgtggcgttaacagacagcaagcag

SEQ ID NO: 3625177 - DNA, 25 bp, Homo sapien
tagccattttatttctccgcagggt

SEQ ID NO: 3625178 - DNA, 25 bp, Homo sapien
aaaacaactaataccgggcgcagca

SEQ ID NO: 3625179 - DNA, 25 bp, Homo sapien
agcctgatagctgtccaagagtgag

SEQ ID NO: 3625180 - DNA, 25 bp, Homo sapien
tagaggtcctgctcacagcatgtgg

SEQ ID NO: 3625181 - DNA, 25 bp, Homo sapien
caagtttgagccatgctgaggtaga

SEQ ID NO: 3625182 - DNA, 25 bp, Homo sapien
gacaacaactgtgggctttggacca

SEQ ID NO: 3625183 - DNA, 25 bp, Homo sapien
gaatggatcccgaactgtacacctg

SEQ ID NO: 3625184 - DNA, 25 bp, Homo sapien
cacagggcaccataaaacgtggaca

SEQ ID NO: 3625185 - DNA, 25 bp, Homo sapien
gtgaacacacaaacccgagaagtct

SEQ ID NO: 3625186 - DNA, 25 bp, Homo sapien
gaagtttgcatacccaatgaagcag

SEQ ID NO: 3625187 - DNA, 25 bp, Homo sapien
cccactggataagggagagacgccc

SEQ ID NO: 3625188 - DNA, 25 bp, Homo sapien
tgggcattggctacaagagctctcg

SEQ ID NO: 3625189 - DNA, 25 bp, Homo sapien
gatgcatgacagacccttgactcca

SEQ ID NO: 3625190 - DNA, 25 bp, Homo sapien
tggttcataagccaagccgacactg

SEQ ID NO: 3625191 - DNA, 25 bp, Homo sapien
aacaattatatctccccattgagaa

SEQ ID NO: 3625192 - DNA, 25 bp, Homo sapien
ctccccattgagaatgtgaaaaatg

SEQ ID NO: 3625193 - DNA, 25 bp, Homo sapien
acaagtgtaagccatgccacccggc

SEQ ID NO: 3625194 - DNA, 25 bp, Homo sapien
ttaaacaattatatctccccattga

SEQ ID NO: 3625195 - DNA, 25 bp, Homo sapien
gataaacgaaagctttcagcagctg

SEQ ID NO: 3625196 - DNA, 25 bp, Homo sapien
tgagaagaaccctggtcaataaaca

SEQ ID NO: 3625197 - DNA, 25 bp, Homo sapien
tggcatatgtgtttggaagacgtaa

SEQ ID NO: 3625198 - DNA, 25 bp, Homo sapien
caattcccgtgaagataatgtttta

SEQ ID NO: 3625199 - DNA, 25 bp, Homo sapien
ctctattaactgtataagaagggcc

SEQ ID NO: 3625200 - DNA, 25 bp, Homo sapien
gtcttcatcaaaaaggcccagttga

SEQ ID NO: 3625201 - DNA, 25 bp, Homo sapien
ctattaactgtataagaagggcctt

SEQ ID NO: 3625202 - DNA, 25 bp, Homo sapien
ttcagtagcaacagctggtcttgtt

SEQ ID NO: 3625203 - DNA, 25 bp, Homo sapien
cacatgtatcactattgtcctgagg

SEQ ID NO: 3625204 - DNA, 25 bp, Homo sapien
ctattgtcctgaggttgctgtacag

SEQ ID NO: 3625205 - DNA, 25 bp, Homo sapien
cactattgtcctgaggttgctgtac

SEQ ID NO: 3625206 - DNA, 25 bp, Homo sapien
tgtatcactattgtcctgaggttgc

SEQ ID NO: 3625207 - DNA, 25 bp, Homo sapien
ttcttcgcctgcatggtgcctttca

SEQ ID NO: 3625208 - DNA, 25 bp, Homo sapien
agactccccgtgcactacaacaaaa

SEQ ID NO: 3625209 - DNA, 25 bp, Homo sapien
tgcagactccccgtgcactacaaca

SEQ ID NO: 3625210 - DNA, 25 bp, Homo sapien
ggcagaattcttcgcctgcatggtg

SEQ ID NO: 3625211 - DNA, 25 bp, Homo sapien
atgcatttgtacctggttcgcttat

SEQ ID NO: 3625212 - DNA, 25 bp, Homo sapien
tttgtacctggttcgcttatgctca

SEQ ID NO: 3625213 - DNA, 25 bp, Homo sapien
acctggttcgcttatgctcaaatgg

SEQ ID NO: 3625214 - DNA, 25 bp, Homo sapien
tacctggttcgcttatgctcaaatg

SEQ ID NO: 3625215 - DNA, 25 bp, Homo sapien
tgtgtccgctaaaggctagctggag

SEQ ID NO: 3625216 - DNA, 25 bp, Homo sapien
tgaagtggattggtaaacaggtgtg

SEQ ID NO: 3625217 - DNA, 25 bp, Homo sapien
aacaggtgtgtccgctaaaggctag

SEQ ID NO: 3625218 - DNA, 25 bp, Homo sapien
aggtgtgtccgctaaaggctagctg

SEQ ID NO: 3625219 - DNA, 25 bp, Homo sapien
cagtggtgtggagcaactctgtgcc

SEQ ID NO: 3625220 - DNA, 25 bp, Homo sapien
cacctgaaggctaaattgaactggc

SEQ ID NO: 3625221 - DNA, 25 bp, Homo sapien
tcaaaaggatggtcgagggttcgca

SEQ ID NO: 3625222 - DNA, 25 bp, Homo sapien
tgtctgacacagctataacggcacc

SEQ ID NO: 3625223 - DNA, 25 bp, Homo sapien
ctgtgaagttttactcaagtgctca

SEQ ID NO: 3625224 - DNA, 25 bp, Homo sapien
gtgaagttttactcaagtgctcaaa

SEQ ID NO: 3625225 - DNA, 25 bp, Homo sapien
gttttactcaagtgctcaaacttat

SEQ ID NO: 3625226 - DNA, 25 bp, Homo sapien
gaagttttactcaagtgctcaaact

SEQ ID NO: 3625227 - DNA, 25 bp, Homo sapien
tgaaaattcaatgtacagccactcc

SEQ ID NO: 3625228 - DNA, 25 bp, Homo sapien
cagtatggaattgaggaaagatgcc

SEQ ID NO: 3625229 - DNA, 25 bp, Homo sapien
tgatgccgccacagggataagctct

SEQ ID NO: 3625230 - DNA, 25 bp, Homo sapien
gagtttccaagataaggtcacgtgc

SEQ ID NO: 3625231 - DNA, 25 bp, Homo sapien
tttcttctgtttcgtggagcacagt

SEQ ID NO: 3625232 - DNA, 25 bp, Homo sapien
cttttcttctgtttcgtggagcaca

SEQ ID NO: 3625233 - DNA, 25 bp, Homo sapien
tctgtttcgtggagcacagttgcag

SEQ ID NO: 3625234 - DNA, 25 bp, Homo sapien
tcttctgtttcgtggagcacagttg

SEQ ID NO: 3625235 - DNA, 25 bp, Homo sapien
gtacatgttttcacaaccacttctc

SEQ ID NO: 3625236 - DNA, 25 bp, Homo sapien
aagcctgtacatgttttcacaacca

SEQ ID NO: 3625237 - DNA, 25 bp, Homo sapien
ctgtacatgttttcacaaccacttc

SEQ ID NO: 3625238 - DNA, 25 bp, Homo sapien
gcctgtacatgttttcacaaccact

SEQ ID NO: 3625239 - DNA, 25 bp, Homo sapien
tctgatgatcttggccaaaggagca

SEQ ID NO: 3625240 - DNA, 25 bp, Homo sapien
tggcacatcagttacggttcccgaa

SEQ ID NO: 3625241 - DNA, 25 bp, Homo sapien
gaacagcagggttccatagtggccc

SEQ ID NO: 3625242 - DNA, 25 bp, Homo sapien
tgaaaaacaagcttggctgcagcct

SEQ ID NO: 3625243 - DNA, 25 bp, Homo sapien
ggatgagtccttctcgtcccaggag

SEQ ID NO: 3625244 - DNA, 25 bp, Homo sapien
tctcccttgggtggataggatacca

SEQ ID NO: 3625245 - DNA, 25 bp, Homo sapien
ggagcagaccccatttttggacaca

SEQ ID NO: 3625246 - DNA, 25 bp, Homo sapien
tcaagtgccctcagcttagaagagc

SEQ ID NO: 3625247 - DNA, 25 bp, Homo sapien
tctggaggccgagtttacaccatca

SEQ ID NO: 3625248 - DNA, 25 bp, Homo sapien
tgaagaagtgggctaagagggtccc

SEQ ID NO: 3625249 - DNA, 25 bp, Homo sapien
gaggccgagtttacaccatcaatga

SEQ ID NO: 3625250 - DNA, 25 bp, Homo sapien
taagagggtccctgatagccagaga

SEQ ID NO: 3625251 - DNA, 25 bp, Homo sapien
ttcaaatccgtcagctcatcacaaa

SEQ ID NO: 3625252 - DNA, 25 bp, Homo sapien
tcaaatccgtcagctcatcacaaac

SEQ ID NO: 3625253 - DNA, 25 bp, Homo sapien
aattcaaatccgtcagctcatcaca

SEQ ID NO: 3625254 - DNA, 25 bp, Homo sapien
ttaattcaaatccgtcagctcatca

SEQ ID NO: 3625255 - DNA, 25 bp, Homo sapien
ctggggataggtgtagttgtgaaga

SEQ ID NO: 3625256 - DNA, 25 bp, Homo sapien
ggataggtgtagttgtgaagacgcc

SEQ ID NO: 3625257 - DNA, 25 bp, Homo sapien
tggggataggtgtagttgtgaagac

SEQ ID NO: 3625258 - DNA, 25 bp, Homo sapien
gggataggtgtagttgtgaagacgc

SEQ ID NO: 3625259 - DNA, 25 bp, Homo sapien
tcttttcaaagatgaccaaatataa

SEQ ID NO: 3625260 - DNA, 25 bp, Homo sapien
tatctattaatccagttggtctctg

SEQ ID NO: 3625261 - DNA, 25 bp, Homo sapien
tcttggtgctgctgtgtacagaaat

SEQ ID NO: 3625262 - DNA, 25 bp, Homo sapien
tcatagtagggtgacgtccccactg

SEQ ID NO: 3625263 - DNA, 25 bp, Homo sapien
gcataggcattcaggcaggcagagg

SEQ ID NO: 3625264 - DNA, 25 bp, Homo sapien
gtaggaaggaacatgctgtacccac

SEQ ID NO: 3625265 - DNA, 25 bp, Homo sapien
ggtaggaaggaacatgctgtaccca

SEQ ID NO: 3625266 - DNA, 25 bp, Homo sapien
ataggcattcaggcaggcagaggta

SEQ ID NO: 3625267 - DNA, 25 bp, Homo sapien
gccactgctgatgaggggcttattt

SEQ ID NO: 3625268 - DNA, 25 bp, Homo sapien
ctgccactgctgatgaggggcttat

SEQ ID NO: 3625269 - DNA, 25 bp, Homo sapien
tgccactgctgatgaggggcttatt

SEQ ID NO: 3625270 - DNA, 25 bp, Homo sapien
aatcctcattccatccagaccagtg

SEQ ID NO: 3625271 - DNA, 25 bp, Homo sapien
tgctggcattggtgttcccaagctt

SEQ ID NO: 3625272 - DNA, 25 bp, Homo sapien
tcagagtggacatgcggcctttgtt

SEQ ID NO: 3625273 - DNA, 25 bp, Homo sapien
tcccaagcttgttcgtggccacaca

SEQ ID NO: 3625274 - DNA, 25 bp, Homo sapien
ttcttccttgaaccactggaattca

SEQ ID NO: 3625275 - DNA, 25 bp, Homo sapien
aggatgcccttctgaccgactgaaa

SEQ ID NO: 3625276 - DNA, 25 bp, Homo sapien
ccttctgaccgactgaaacaccagt

SEQ ID NO: 3625277 - DNA, 25 bp, Homo sapien
tccttgaaccactggaattcagcca

SEQ ID NO: 3625278 - DNA, 25 bp, Homo sapien
tccccagaaccccctggctgcaggt

SEQ ID NO: 3625279 - DNA, 25 bp, Homo sapien
accccctggctgcaggtccactcac

SEQ ID NO: 3625280 - DNA, 25 bp, Homo sapien
gaaccccctggctgcaggtccactc

SEQ ID NO: 3625281 - DNA, 25 bp, Homo sapien
tccctgtgccgtcttttccccagaa

SEQ ID NO: 3625282 - DNA, 25 bp, Homo sapien
gactggtctcgcttgatgtcagaga

SEQ ID NO: 3625283 - DNA, 25 bp, Homo sapien
gatttttactttccgcacatcgggc

SEQ ID NO: 3625284 - DNA, 25 bp, Homo sapien
tgcattcgtactccccggactggtc

SEQ ID NO: 3625285 - DNA, 25 bp, Homo sapien
acatcgggcgcagcgacatcgttca

SEQ ID NO: 3625286 - DNA, 25 bp, Homo sapien
tcatacactaactcttcaaggtgca

SEQ ID NO: 3625287 - DNA, 25 bp, Homo sapien
taccacagcagacataatgatccag

SEQ ID NO: 3625288 - DNA, 25 bp, Homo sapien
ccggcatttgctggatggtgctact

SEQ ID NO: 3625289 - DNA, 25 bp, Homo sapien
tactggatcaaaagcctctaccaca

SEQ ID NO: 3625290 - DNA, 25 bp, Homo sapien
ttcgcagagcataaaggtctgagct

SEQ ID NO: 3625291 - DNA, 25 bp, Homo sapien
cagagacatcctgcacacttcgcag

SEQ ID NO: 3625292 - DNA, 25 bp, Homo sapien
cccaggcagcacaattggcatgcaa

SEQ ID NO: 3625293 - DNA, 25 bp, Homo sapien
attggcatgcaagccacaaccagag

SEQ ID NO: 3625294 - DNA, 25 bp, Homo sapien
gaacattgctgatgactcttggcta

SEQ ID NO: 3625295 - DNA, 25 bp, Homo sapien
gacttcaaaggatgagagggtcacc

SEQ ID NO: 3625296 - DNA, 25 bp, Homo sapien
tctggctacaggcagtgctcaaaga

SEQ ID NO: 3625297 - DNA, 25 bp, Homo sapien
gagggtcacctttagctttcgttgc

SEQ ID NO: 3625298 - DNA, 25 bp, Homo sapien
ctttcagactcatgtggaatgtctc

SEQ ID NO: 3625299 - DNA, 25 bp, Homo sapien
cctccctttcagactcatgtggaat

SEQ ID NO: 3625300 - DNA, 25 bp, Homo sapien
ccctttcagactcatgtggaatgtc

SEQ ID NO: 3625301 - DNA, 25 bp, Homo sapien
tccctttcagactcatgtggaatgt

SEQ ID NO: 3625302 - DNA, 25 bp, Homo sapien
aagagcccatcccattcaatgagaa

SEQ ID NO: 3625303 - DNA, 25 bp, Homo sapien
cttgtagctcaagagcccatcccat

SEQ ID NO: 3625304 - DNA, 25 bp, Homo sapien
atcccattcaatgagaactccagcc

SEQ ID NO: 3625305 - DNA, 25 bp, Homo sapien
gctcaagagcccatcccattcaatg

SEQ ID NO: 3625306 - DNA, 25 bp, Homo sapien
aggctcattatgaaggacaatgttc

SEQ ID NO: 3625307 - DNA, 25 bp, Homo sapien
tttcctagcagcaaagacattctct

SEQ ID NO: 3625308 - DNA, 25 bp, Homo sapien
atttatatttcctagcagcaaagac

SEQ ID NO: 3625309 - DNA, 25 bp, Homo sapien
cattatgaaggacaatgttctgtaa

SEQ ID NO: 3625310 - DNA, 25 bp, Homo sapien
caaggaagccaagaatatacaagtt

SEQ ID NO: 3625311 - DNA, 25 bp, Homo sapien
cctggaacacgtagcaggaaggatg

SEQ ID NO: 3625312 - DNA, 25 bp, Homo sapien
catcagtgaacttgccaggcctcag

SEQ ID NO: 3625313 - DNA, 25 bp, Homo sapien
agccatccctggaacacgtagcagg

SEQ ID NO: 3625314 - DNA, 25 bp, Homo sapien
cctcaggtatgtagctgagccatcc

SEQ ID NO: 3625315 - DNA, 25 bp, Homo sapien
cagctgatggagaggagcctgctcg

SEQ ID NO: 3625316 - DNA, 25 bp, Homo sapien
agctgatggagaggagcctgctcgg

SEQ ID NO: 3625317 - DNA, 25 bp, Homo sapien
ctgatggagaggagcctgctcgggc

SEQ ID NO: 3625318 - DNA, 25 bp, Homo sapien
tcagctgatggagaggagcctgctc

SEQ ID NO: 3625319 - DNA, 25 bp, Homo sapien
ttttccccagttagcctgtgctgca

SEQ ID NO: 3625320 - DNA, 25 bp, Homo sapien
tcttttccccagttagcctgtgctg

SEQ ID NO: 3625321 - DNA, 25 bp, Homo sapien
attcttttccccagttagcctgtgc

SEQ ID NO: 3625322 - DNA, 25 bp, Homo sapien
tttccccagttagcctgtgctgcac

SEQ ID NO: 3625323 - DNA, 25 bp, Homo sapien
ctcctttcatctcagactgagacag

SEQ ID NO: 3625324 - DNA, 25 bp, Homo sapien
ttcctgcacagtggtacagacgtct

SEQ ID NO: 3625325 - DNA, 25 bp, Homo sapien
tcttcctgcacagtggtacagacgt

SEQ ID NO: 3625326 - DNA, 25 bp, Homo sapien
ctcttcctgcacagtggtacagacg

SEQ ID NO: 3625327 - DNA, 25 bp, Homo sapien
tacccatggttgcttcaagaggctg

SEQ ID NO: 3625328 - DNA, 25 bp, Homo sapien
tactgcttgagcctagtaaagttct

SEQ ID NO: 3625329 - DNA, 25 bp, Homo sapien
gaaaggctgcatccaccagtgaaga

SEQ ID NO: 3625330 - DNA, 25 bp, Homo sapien
ttacagttgcgcttattacccatgg

SEQ ID NO: 3625331 - DNA, 25 bp, Homo sapien
gcttttctcgtgatgcttcccttag

SEQ ID NO: 3625332 - DNA, 25 bp, Homo sapien
tgaatgacactttcccgttaggacc

SEQ ID NO: 3625333 - DNA, 25 bp, Homo sapien
gatgcttcccttagtagactctcct

SEQ ID NO: 3625334 - DNA, 25 bp, Homo sapien
aggaaatattccctgatcttattac

SEQ ID NO: 3625335 - DNA, 25 bp, Homo sapien
ccagaagaagtggtacgtgctacac

SEQ ID NO: 3625336 - DNA, 25 bp, Homo sapien
taggaacggcaccatgcaaagagca

SEQ ID NO: 3625337 - DNA, 25 bp, Homo sapien
gaattctgtgagtgtgcttccccgt

SEQ ID NO: 3625338 - DNA, 25 bp, Homo sapien
ccagaaagtagatccgggctagtca

SEQ ID NO: 3625339 - DNA, 25 bp, Homo sapien
ccttaatggcagtgtcttgtctcgg

SEQ ID NO: 3625340 - DNA, 25 bp, Homo sapien
ccagagggcattgaagcagttgtcc

SEQ ID NO: 3625341 - DNA, 25 bp, Homo sapien
catcctcagggaaactaagtcatca

SEQ ID NO: 3625342 - DNA, 25 bp, Homo sapien
caagccaacttccagtaggagccag

SEQ ID NO: 3625343 - DNA, 25 bp, Homo sapien
gtcttgatttgctgaacatttttgc

SEQ ID NO: 3625344 - DNA, 25 bp, Homo sapien
tccctttgggaactatcatttgcca

SEQ ID NO: 3625345 - DNA, 25 bp, Homo sapien
ttccagcctatatctgcccaaggag

SEQ ID NO: 3625346 - DNA, 25 bp, Homo sapien
gccagttggtcttgatttgctgaac

SEQ ID NO: 3625347 - DNA, 25 bp, Homo sapien
gttctgggaatcctggtacacttta

SEQ ID NO: 3625348 - DNA, 25 bp, Homo sapien
tgggaatcctggtacactttaagta

SEQ ID NO: 3625349 - DNA, 25 bp, Homo sapien
tctgggaatcctggtacactttaag

SEQ ID NO: 3625350 - DNA, 25 bp, Homo sapien
tcagaaaatgcccaggttctgggaa

SEQ ID NO: 3625351 - DNA, 25 bp, Homo sapien
ggaaaatcttaccagtgtaccatta

SEQ ID NO: 3625352 - DNA, 25 bp, Homo sapien
tgatttccaagcttagagaactgtg

SEQ ID NO: 3625353 - DNA, 25 bp, Homo sapien
tgagttttgcgatatcccttacata

SEQ ID NO: 3625354 - DNA, 25 bp, Homo sapien
attatcatggaacccatgtcttggg

SEQ ID NO: 3625355 - DNA, 25 bp, Homo sapien
tcaccaacactcgatattatcagcc

SEQ ID NO: 3625356 - DNA, 25 bp, Homo sapien
agtcttcctagggattatataacgg

SEQ ID NO: 3625357 - DNA, 25 bp, Homo sapien
gatgaagatgttagtcatatttttg

SEQ ID NO: 3625358 - DNA, 25 bp, Homo sapien
taacggtatctcatcttggtttgat

SEQ ID NO: 3625359 - DNA, 25 bp, Homo sapien
gagtgttagaattgtgttggaagaa

SEQ ID NO: 3625360 - DNA, 25 bp, Homo sapien
tcttcatatacactagatgtaaatt

SEQ ID NO: 3625361 - DNA, 25 bp, Homo sapien
tcagtttgaagtggagtgttagaat

SEQ ID NO: 3625362 - DNA, 25 bp, Homo sapien
aattcttcatatacactagatgtaa

SEQ ID NO: 3625363 - DNA, 25 bp, Homo sapien
taaatgtcctaaaagtgctgaagca

SEQ ID NO: 3625364 - DNA, 25 bp, Homo sapien
tcaagcaatgccagtgattaccagc

SEQ ID NO: 3625365 - DNA, 25 bp, Homo sapien
tactcctggacgcacaataatgcca

SEQ ID NO: 3625366 - DNA, 25 bp, Homo sapien
tgaatgctcagcacagtcatgccca

SEQ ID NO: 3625367 - DNA, 25 bp, Homo sapien
gccaatagcaagacacagcagggtc

SEQ ID NO: 3625368 - DNA, 25 bp, Homo sapien
catgtcacagttggctctggtctgc

SEQ ID NO: 3625369 - DNA, 25 bp, Homo sapien
ctctggtctgccaatagcaagacac

SEQ ID NO: 3625370 - DNA, 25 bp, Homo sapien
tctgccaatagcaagacacagcagg

SEQ ID NO: 3625371 - DNA, 25 bp, Homo sapien
aggaaacaggatagaagaaatacct

SEQ ID NO: 3625372 - DNA, 25 bp, Homo sapien
gcggaccacaacaggagaagcccat

SEQ ID NO: 3625373 - DNA, 25 bp, Homo sapien
gtcagcgccccttgcacactgcgga

SEQ ID NO: 3625374 - DNA, 25 bp, Homo sapien
cccattcaagtcagcgccccttgca

SEQ ID NO: 3625375 - DNA, 25 bp, Homo sapien
ttgcacactgcggaccacaacagga

SEQ ID NO: 3625376 - DNA, 25 bp, Homo sapien
gtccttgtttccccagggccatgca

SEQ ID NO: 3625377 - DNA, 25 bp, Homo sapien
tccttgtttccccagggccatgcat

SEQ ID NO: 3625378 - DNA, 25 bp, Homo sapien
cgtccttgtttccccagggccatgc

SEQ ID NO: 3625379 - DNA, 25 bp, Homo sapien
aaatctcactccaagtatagtggca

SEQ ID NO: 3625380 - DNA, 25 bp, Homo sapien
aaagtgcctgaagctgaattggatc

SEQ ID NO: 3625381 - DNA, 25 bp, Homo sapien
tctgataatgcggaatgaataatgc

SEQ ID NO: 3625382 - DNA, 25 bp, Homo sapien
tgcattcctgtacgttttccccgga

SEQ ID NO: 3625383 - DNA, 25 bp, Homo sapien
caaactctgccaatctgacttcaca

SEQ ID NO: 3625384 - DNA, 25 bp, Homo sapien
gacaacgatggcacaggagaacagg

SEQ ID NO: 3625385 - DNA, 25 bp, Homo sapien
gtggacaacgatggcacaggagaac

SEQ ID NO: 3625386 - DNA, 25 bp, Homo sapien
acaacgatggcacaggagaacaggc

SEQ ID NO: 3625387 - DNA, 25 bp, Homo sapien
ggacaacgatggcacaggagaacag

SEQ ID NO: 3625388 - DNA, 25 bp, Homo sapien
tcctttcagtgtccacatatcctct

SEQ ID NO: 3625389 - DNA, 25 bp, Homo sapien
tcagtgtccacatatcctctatgaa

SEQ ID NO: 3625390 - DNA, 25 bp, Homo sapien
tttcagtgtccacatatcctctatg

SEQ ID NO: 3625391 - DNA, 25 bp, Homo sapien
cctttcagtgtccacatatcctcta

SEQ ID NO: 3625392 - DNA, 25 bp, Homo sapien
caaagtgtgcatgttttgcgggtat

SEQ ID NO: 3625393 - DNA, 25 bp, Homo sapien
catgttttgcgggtatatcggcaca

SEQ ID NO: 3625394 - DNA, 25 bp, Homo sapien
gttttgcgggtatatcggcacaggc

SEQ ID NO: 3625395 - DNA, 25 bp, Homo sapien
tcaaagtgtgcatgttttgcgggta

SEQ ID NO: 3625396 - DNA, 25 bp, Homo sapien
accaaatgttttcggccagccttca

SEQ ID NO: 3625397 - DNA, 25 bp, Homo sapien
tcatctttgcaaagacgaagactct

SEQ ID NO: 3625398 - DNA, 25 bp, Homo sapien
ctctggaaatagtcttcacgtaggc

SEQ ID NO: 3625399 - DNA, 25 bp, Homo sapien
caaagacgaagactctgtaagtgac

SEQ ID NO: 3625400 - DNA, 25 bp, Homo sapien
taagaatgacaccacagctgggcac

SEQ ID NO: 3625401 - DNA, 25 bp, Homo sapien
ggttttaagaatgacaccacagctg

SEQ ID NO: 3625402 - DNA, 25 bp, Homo sapien
tgtttccatggttttaagaatgaca

SEQ ID NO: 3625403 - DNA, 25 bp, Homo sapien
tccatggttttaagaatgacaccac

SEQ ID NO: 3625404 - DNA, 25 bp, Homo sapien
aagcttcccatcttcgttgatgtca

SEQ ID NO: 3625405 - DNA, 25 bp, Homo sapien
gatgtcatcacttacgacaaaacac

SEQ ID NO: 3625406 - DNA, 25 bp, Homo sapien
ttcagcagcacaaacctaagcttcc

SEQ ID NO: 3625407 - DNA, 25 bp, Homo sapien
ctatcagtttgacccttcagcagca

SEQ ID NO: 3625408 - DNA, 25 bp, Homo sapien
tcaatccgctgcttgtgctgcccag

SEQ ID NO: 3625409 - DNA, 25 bp, Homo sapien
gtgctttggtacctgctggatttgg

SEQ ID NO: 3625410 - DNA, 25 bp, Homo sapien
gccctgtgctttggtacctgctgga

SEQ ID NO: 3625411 - DNA, 25 bp, Homo sapien
ccggttccggttcaatccgctgctt

SEQ ID NO: 3625412 - DNA, 25 bp, Homo sapien
cacgaatgagctgcttatgtaggac

SEQ ID NO: 3625413 - DNA, 25 bp, Homo sapien
tctccccacgaatgagctgcttatg

SEQ ID NO: 3625414 - DNA, 25 bp, Homo sapien
ggacaaggtctacccgaaatgtaga

SEQ ID NO: 3625415 - DNA, 25 bp, Homo sapien
gcttatgtaggacaaggtctacccg

SEQ ID NO: 3625416 - DNA, 25 bp, Homo sapien
gatcatagtttctagtcgtaactcc

SEQ ID NO: 3625417 - DNA, 25 bp, Homo sapien
tccatgttggtctcattgatcatag

SEQ ID NO: 3625418 - DNA, 25 bp, Homo sapien
tcataactccactcgttctacccat

SEQ ID NO: 3625419 - DNA, 25 bp, Homo sapien
ttctagtcgtaactccacagtctct

SEQ ID NO: 3625420 - DNA, 25 bp, Homo sapien
taaggacctattcacagaaggccac

SEQ ID NO: 3625421 - DNA, 25 bp, Homo sapien
tgtggcagccatgctgatcagggct

SEQ ID NO: 3625422 - DNA, 25 bp, Homo sapien
tcagctgggtaacgaaacacgtagc

SEQ ID NO: 3625423 - DNA, 25 bp, Homo sapien
tttctgcctgaaagagtccctcctg

SEQ ID NO: 3625424 - DNA, 25 bp, Homo sapien
tggagaaggacttaggaactaatat

SEQ ID NO: 3625425 - DNA, 25 bp, Homo sapien
aatgaagttggagaaggacttagga

SEQ ID NO: 3625426 - DNA, 25 bp, Homo sapien
ttggagaaggacttaggaactaata

SEQ ID NO: 3625427 - DNA, 25 bp, Homo sapien
tgaagttggagaaggacttaggaac

SEQ ID NO: 3625428 - DNA, 25 bp, Homo sapien
tcaaagagagctctacacccttgca

SEQ ID NO: 3625429 - DNA, 25 bp, Homo sapien
tgctttcttgtagccacgtgatgat

SEQ ID NO: 3625430 - DNA, 25 bp, Homo sapien
gtactgctttcttgtagccacgtga

SEQ ID NO: 3625431 - DNA, 25 bp, Homo sapien
agctctacacccttgcattcaaaag

SEQ ID NO: 3625432 - DNA, 25 bp, Homo sapien
ggcagagttgccctgccagcattcc

SEQ ID NO: 3625433 - DNA, 25 bp, Homo sapien
ctggcagagttgccctgccagcatt

SEQ ID NO: 3625434 - DNA, 25 bp, Homo sapien
gagttgccctgccagcattccacag

SEQ ID NO: 3625435 - DNA, 25 bp, Homo sapien
gcagagttgccctgccagcattcca

SEQ ID NO: 3625436 - DNA, 25 bp, Homo sapien
tacccggggagctgttatgttgtgt

SEQ ID NO: 3625437 - DNA, 25 bp, Homo sapien
ttacccggggagctgttatgttgtg

SEQ ID NO: 3625438 - DNA, 25 bp, Homo sapien
cgtgtatggagagtggaaacccgca

SEQ ID NO: 3625439 - DNA, 25 bp, Homo sapien
cagttgtcttgatctccagatggca

SEQ ID NO: 3625440 - DNA, 25 bp, Homo sapien
gaggagaagtatcagatgtgacagt

SEQ ID NO: 3625441 - DNA, 25 bp, Homo sapien
caagtgcctctgtcgtcctctgagg

SEQ ID NO: 3625442 - DNA, 25 bp, Homo sapien
caaagcttcaggcagcatggcagtg

SEQ ID NO: 3625443 - DNA, 25 bp, Homo sapien
ctgggcaggagcaaagcttcaggca

SEQ ID NO: 3625444 - DNA, 25 bp, Homo sapien
ctgaaagcacgcgaggaggggagca

SEQ ID NO: 3625445 - DNA, 25 bp, Homo sapien
gaaagcacgcgaggaggggagcagg

SEQ ID NO: 3625446 - DNA, 25 bp, Homo sapien
cattggcattattcgtcttttatca

SEQ ID NO: 3625447 - DNA, 25 bp, Homo sapien
tcattggcattattcgtcttttatc

SEQ ID NO: 3625448 - DNA, 25 bp, Homo sapien
ttggcattattcgtcttttatcatg

SEQ ID NO: 3625449 - DNA, 25 bp, Homo sapien
gcattattcgtcttttatcatgaaa

SEQ ID NO: 3625450 - DNA, 25 bp, Homo sapien
ccgggacgttttgggatgattgtct

SEQ ID NO: 3625451 - DNA, 25 bp, Homo sapien
tgcactattaggtgaacccgggacg

SEQ ID NO: 3625452 - DNA, 25 bp, Homo sapien
ttgggatgattgtctgtctgcacag

SEQ ID NO: 3625453 - DNA, 25 bp, Homo sapien
cttgcactattaggtgaacccggga

SEQ ID NO: 3625454 - DNA, 25 bp, Homo sapien
cacccgggttacccggtcatctatg

SEQ ID NO: 3625455 - DNA, 25 bp, Homo sapien
ggatgatcacacgagggtctatgga

SEQ ID NO: 3625456 - DNA, 25 bp, Homo sapien
gatcacacgagggtctatggaccac

SEQ ID NO: 3625457 - DNA, 25 bp, Homo sapien
tgtactgggttggtgtattgaccag

SEQ ID NO: 3625458 - DNA, 25 bp, Homo sapien
cttgtataggaccaaccacttcagg

SEQ ID NO: 3625459 - DNA, 25 bp, Homo sapien
cacaggcttgagtaagggtggactt

SEQ ID NO: 3625460 - DNA, 25 bp, Homo sapien
ggtgcatagaaccagtgcaagtggc

SEQ ID NO: 3625461 - DNA, 25 bp, Homo sapien
ccacttcaggttgagggtgcataga

SEQ ID NO: 3625462 - DNA, 25 bp, Homo sapien
aatcagccactggatgataatgtgc

SEQ ID NO: 3625463 - DNA, 25 bp, Homo sapien
atcagccactggatgataatgtgct

SEQ ID NO: 3625464 - DNA, 25 bp, Homo sapien
tcagccactggatgataatgtgctg

SEQ ID NO: 3625465 - DNA, 25 bp, Homo sapien
cagccactggatgataatgtgctgc

SEQ ID NO: 3625466 - DNA, 25 bp, Homo sapien
ccaagtgatactgaatccgttcgca

SEQ ID NO: 3625467 - DNA, 25 bp, Homo sapien
gaatccgttcgcatatccttttcca

SEQ ID NO: 3625468 - DNA, 25 bp, Homo sapien
ctaagagtgcatgtgagtttaacca

SEQ ID NO: 3625469 - DNA, 25 bp, Homo sapien
tcaagctctatgatctaagagtgca

SEQ ID NO: 3625470 - DNA, 25 bp, Homo sapien
gcactgaagtagttgtggatcttgg

SEQ ID NO: 3625471 - DNA, 25 bp, Homo sapien
ggaaagaagcggcttaaatcaaaca

SEQ ID NO: 3625472 - DNA, 25 bp, Homo sapien
gaagtagttgtggatcttggaaaga

SEQ ID NO: 3625473 - DNA, 25 bp, Homo sapien
agcggcttaaatcaaacacttccat

SEQ ID NO: 3625474 - DNA, 25 bp, Homo sapien
ttggctaaatccacgaaggtctgat

SEQ ID NO: 3625475 - DNA, 25 bp, Homo sapien
ggctaaatccacgaaggtctgatct

SEQ ID NO: 3625476 - DNA, 25 bp, Homo sapien
aattggctaaatccacgaaggtctg

SEQ ID NO: 3625477 - DNA, 25 bp, Homo sapien
tggctaaatccacgaaggtctgatc

SEQ ID NO: 3625478 - DNA, 25 bp, Homo sapien
taccctcctggttgcaacctagtgt

SEQ ID NO: 3625479 - DNA, 25 bp, Homo sapien
taagggacttgatatggcaaaatac

SEQ ID NO: 3625480 - DNA, 25 bp, Homo sapien
taagctccagttgacagtatcgaca

SEQ ID NO: 3625481 - DNA, 25 bp, Homo sapien
gaatcataagcttgcagaacacgtg

SEQ ID NO: 3625482 - DNA, 25 bp, Homo sapien
aacaactttgtgctacatgctgcca

SEQ ID NO: 3625483 - DNA, 25 bp, Homo sapien
tagactttcttgcagccagaggtga

SEQ ID NO: 3625484 - DNA, 25 bp, Homo sapien
ggagtttacagatacctatgctgca

SEQ ID NO: 3625485 - DNA, 25 bp, Homo sapien
gaggtgaccacgtgcctcaattctg

SEQ ID NO: 3625486 - DNA, 25 bp, Homo sapien
tatcagatgatagtcctgtttctga

SEQ ID NO: 3625487 - DNA, 25 bp, Homo sapien
agatgatagtcctgtttctgattta

SEQ ID NO: 3625488 - DNA, 25 bp, Homo sapien
tcagatgatagtcctgtttctgatt

SEQ ID NO: 3625489 - DNA, 25 bp, Homo sapien
attatcagatgatagtcctgtttct

SEQ ID NO: 3625490 - DNA, 25 bp, Homo sapien
cgctgacaagcgtggccttccaatt

SEQ ID NO: 3625491 - DNA, 25 bp, Homo sapien
taagaagacgcagtgccggctgtat

SEQ ID NO: 3625492 - DNA, 25 bp, Homo sapien
tccgcgccgcgtgtcaataaaactc

SEQ ID NO: 3625493 - DNA, 25 bp, Homo sapien
aatttcagctctcgcttctggcaag

SEQ ID NO: 3625494 - DNA, 25 bp, Homo sapien
catcacgtgctttatttgccgattc

SEQ ID NO: 3625495 - DNA, 25 bp, Homo sapien
gataatggcctctaatcctacaggt

SEQ ID NO: 3625496 - DNA, 25 bp, Homo sapien
acgacgcttcgtaattcatcacgtg

SEQ ID NO: 3625497 - DNA, 25 bp, Homo sapien
taatcctacaggtgcaacagttcat

SEQ ID NO: 3625498 - DNA, 25 bp, Homo sapien
ctgatttccaggaagggcttggtaa

SEQ ID NO: 3625499 - DNA, 25 bp, Homo sapien
caggaagggcttggtaaggaatcat

SEQ ID NO: 3625500 - DNA, 25 bp, Homo sapien
ccaggaagggcttggtaaggaatca

SEQ ID NO: 3625501 - DNA, 25 bp, Homo sapien
ctttcctgatttccaggaagggctt

SEQ ID NO: 3625502 - DNA, 25 bp, Homo sapien
tgtgctgcaaccacgagcagaccag

SEQ ID NO: 3625503 - DNA, 25 bp, Homo sapien
ggtttaaattaacaatgtggtcgca

SEQ ID NO: 3625504 - DNA, 25 bp, Homo sapien
tgcaaccacgagcagaccaggatgt

SEQ ID NO: 3625505 - DNA, 25 bp, Homo sapien
caatgtggtcgcaggcaggcctctg

SEQ ID NO: 3625506 - DNA, 25 bp, Homo sapien
aatcactgtgaaggcatcgtttggg

SEQ ID NO: 3625507 - DNA, 25 bp, Homo sapien
ggaatcactgtgaaggcatcgtttg

SEQ ID NO: 3625508 - DNA, 25 bp, Homo sapien
cctggaatcactgtgaaggcatcgt

SEQ ID NO: 3625509 - DNA, 25 bp, Homo sapien
cactgtgaaggcatcgtttgggtgt

SEQ ID NO: 3625510 - DNA, 25 bp, Homo sapien
ccttctacagtgtccatgtgaggaa

SEQ ID NO: 3625511 - DNA, 25 bp, Homo sapien
gactgctcagtttgggctgtgctcc

SEQ ID NO: 3625512 - DNA, 25 bp, Homo sapien
tccacaagcctgatggactgctcag

SEQ ID NO: 3625513 - DNA, 25 bp, Homo sapien
ggaacatatagcttgtcctccacaa

SEQ ID NO: 3625514 - DNA, 25 bp, Homo sapien
gagccttagctttgactctgaagaa

SEQ ID NO: 3625515 - DNA, 25 bp, Homo sapien
gccgtgactacaaaagagtgcccag

SEQ ID NO: 3625516 - DNA, 25 bp, Homo sapien
gatatgtatcgaatgcccgctttct

SEQ ID NO: 3625517 - DNA, 25 bp, Homo sapien
ctctgaagaagacggaaaggcattg

SEQ ID NO: 3625518 - DNA, 25 bp, Homo sapien
tcattttcttggcgatattcctcca

SEQ ID NO: 3625519 - DNA, 25 bp, Homo sapien
ttcattttcttggcgatattcctcc

SEQ ID NO: 3625520 - DNA, 25 bp, Homo sapien
cactggttcttaggtccaaaatgcc

SEQ ID NO: 3625521 - DNA, 25 bp, Homo sapien
attgtagggtaaatgccatcttctg

SEQ ID NO: 3625522 - DNA, 25 bp, Homo sapien
cagtattgggaaatgaaatactggg

SEQ ID NO: 3625523 - DNA, 25 bp, Homo sapien
gggaagataagatagtaagacaata

SEQ ID NO: 3625524 - DNA, 25 bp, Homo sapien
tcagctctcctctggtcgccgaata

SEQ ID NO: 3625525 - DNA, 25 bp, Homo sapien
cagctctcctctggtcgccgaatac

SEQ ID NO: 3625526 - DNA, 25 bp, Homo sapien
tacgaaatcagaattcgagccacag

SEQ ID NO: 3625527 - DNA, 25 bp, Homo sapien
gaaatcagaattcgagccacagaaa

SEQ ID NO: 3625528 - DNA, 25 bp, Homo sapien
gttgtcttcctctggtacgaaatca

SEQ ID NO: 3625529 - DNA, 25 bp, Homo sapien
tcctctggtacgaaatcagaattcg

SEQ ID NO: 3625530 - DNA, 25 bp, Homo sapien
cagactgtgcccatcaagacagcga

SEQ ID NO: 3625531 - DNA, 25 bp, Homo sapien
gactgccattttctgtgcctccagg

SEQ ID NO: 3625532 - DNA, 25 bp, Homo sapien
ctccagcagactgtgcccatcaaga

SEQ ID NO: 3625533 - DNA, 25 bp, Homo sapien
tcaagacagcgactgccattttctg

SEQ ID NO: 3625534 - DNA, 25 bp, Homo sapien
tgtgcatacagtaggtgattaatac

SEQ ID NO: 3625535 - DNA, 25 bp, Homo sapien
gcatacagtaggtgattaatacatt

SEQ ID NO: 3625536 - DNA, 25 bp, Homo sapien
tgcatacagtaggtgattaatacat

SEQ ID NO: 3625537 - DNA, 25 bp, Homo sapien
gtgcatacagtaggtgattaataca

SEQ ID NO: 3625538 - DNA, 25 bp, Homo sapien
ctcctccagtgacgcaatgatgtcc

SEQ ID NO: 3625539 - DNA, 25 bp, Homo sapien
tgcctgtcgattgccactgtggagc

SEQ ID NO: 3625540 - DNA, 25 bp, Homo sapien
gcaggctgcctgtcgattgccactg

SEQ ID NO: 3625541 - DNA, 25 bp, Homo sapien
gcaatgatgtcctcccactgaagtt

SEQ ID NO: 3625542 - DNA, 25 bp, Homo sapien
ccatggtggttttacagcatagcta

SEQ ID NO: 3625543 - DNA, 25 bp, Homo sapien
aggaacatcacccatggtggtttta

SEQ ID NO: 3625544 - DNA, 25 bp, Homo sapien
gctattaacttcatgctaatgcacc

SEQ ID NO: 3625545 - DNA, 25 bp, Homo sapien
tacagcatagctattaacttcatgc

SEQ ID NO: 3625546 - DNA, 25 bp, Homo sapien
tgcaagctttacatagtccccgtga

SEQ ID NO: 3625547 - DNA, 25 bp, Homo sapien
tacacttattgtaagcaaacctgcc

SEQ ID NO: 3625548 - DNA, 25 bp, Homo sapien
tatgcccatttagagctgaccagag

SEQ ID NO: 3625549 - DNA, 25 bp, Homo sapien
tctctgtggcccaaattcgctttgt

SEQ ID NO: 3625550 - DNA, 25 bp, Homo sapien
cgcggccctggtgagtgaagtggaa

SEQ ID NO: 3625551 - DNA, 25 bp, Homo sapien
tgagtgcaagggtggctcccgcagc

SEQ ID NO: 3625552 - DNA, 25 bp, Homo sapien
tcacattcagctgagtgcaagggtg

SEQ ID NO: 3625553 - DNA, 25 bp, Homo sapien
cttcctggagcgtcacattcagctg

SEQ ID NO: 3625554 - DNA, 25 bp, Homo sapien
tcagatcagggcgatacgggcagcg

SEQ ID NO: 3625555 - DNA, 25 bp, Homo sapien
gggacccccagtagatgagcctgtg

SEQ ID NO: 3625556 - DNA, 25 bp, Homo sapien
gcatgggacgaccaccgccttaaat

SEQ ID NO: 3625557 - DNA, 25 bp, Homo sapien
tccccactcctcctagacagatggg

SEQ ID NO: 3625558 - DNA, 25 bp, Homo sapien
catgcccgtggggtaaagacggcta

SEQ ID NO: 3625559 - DNA, 25 bp, Homo sapien
acccaaggtgctcaggcaccagttt

SEQ ID NO: 3625560 - DNA, 25 bp, Homo sapien
cctatgcagcgtccaggtggcatgg

SEQ ID NO: 3625561 - DNA, 25 bp, Homo sapien
tcctgcaacctatgcagcgtccagg

SEQ ID NO: 3625562 - DNA, 25 bp, Homo sapien
tgcctcggcctccctcctgagtagc

SEQ ID NO: 3625563 - DNA, 25 bp, Homo sapien
cctccctcctgagtagctgggacta

SEQ ID NO: 3625564 - DNA, 25 bp, Homo sapien
gagcaatctctatctatggcagcag

SEQ ID NO: 3625565 - DNA, 25 bp, Homo sapien
ttgccacattcatcagagcaatctc

SEQ ID NO: 3625566 - DNA, 25 bp, Homo sapien
tgggatctagcaaggcaaattattt

SEQ ID NO: 3625567 - DNA, 25 bp, Homo sapien
ccctcaagagttggaatagacttcc

SEQ ID NO: 3625568 - DNA, 25 bp, Homo sapien
tcaacttgtggtcaccagctgcatt

SEQ ID NO: 3625569 - DNA, 25 bp, Homo sapien
tcttccaatacaaagctttttcatc

SEQ ID NO: 3625570 - DNA, 25 bp, Homo sapien
agccgcctttaccagtgatcttagc

SEQ ID NO: 3625571 - DNA, 25 bp, Homo sapien
ttgaaaatctcttgttgagtgcagc

SEQ ID NO: 3625572 - DNA, 25 bp, Homo sapien
tctgaatagccttccagtgaccata

SEQ ID NO: 3625573 - DNA, 25 bp, Homo sapien
tgaatagccttccagtgaccatatc

SEQ ID NO: 3625574 - DNA, 25 bp, Homo sapien
ctctgaatagccttccagtgaccat

SEQ ID NO: 3625575 - DNA, 25 bp, Homo sapien
ctgaatagccttccagtgaccatat

SEQ ID NO: 3625576 - DNA, 25 bp, Homo sapien
tctttgtgtaggcagccatacctgc

SEQ ID NO: 3625577 - DNA, 25 bp, Homo sapien
ccacatctttgtgtaggcagccata

SEQ ID NO: 3625578 - DNA, 25 bp, Homo sapien
agggccacatctttgtgtaggcagc

SEQ ID NO: 3625579 - DNA, 25 bp, Homo sapien
acatctttgtgtaggcagccatacc

SEQ ID NO: 3625580 - DNA, 25 bp, Homo sapien
gcttcccccggtgtattgctctccc

SEQ ID NO: 3625581 - DNA, 25 bp, Homo sapien
tcagctgcttcccccggtgtattgc

SEQ ID NO: 3625582 - DNA, 25 bp, Homo sapien
gctgcttcccccggtgtattgctct

SEQ ID NO: 3625583 - DNA, 25 bp, Homo sapien
cccccggtgtattgctctcccccat

SEQ ID NO: 3625584 - DNA, 25 bp, Homo sapien
tcactgaagatagaagtaagcggca

SEQ ID NO: 3625585 - DNA, 25 bp, Homo sapien
ggattggaaagacagttacccctca

SEQ ID NO: 3625586 - DNA, 25 bp, Homo sapien
tgttgacttccagcctcactgaaga

SEQ ID NO: 3625587 - DNA, 25 bp, Homo sapien
gaaaggcgtttctgtgctactctcc

SEQ ID NO: 3625588 - DNA, 25 bp, Homo sapien
ggcttctctgccaaccttgtcttga

SEQ ID NO: 3625589 - DNA, 25 bp, Homo sapien
catggcttctctgccaaccttgtct

SEQ ID NO: 3625590 - DNA, 25 bp, Homo sapien
cttctctgccaaccttgtcttgact

SEQ ID NO: 3625591 - DNA, 25 bp, Homo sapien
tggcttctctgccaaccttgtcttg

SEQ ID NO: 3625592 - DNA, 25 bp, Homo sapien
gtgtccataagtagcctttaccagg

SEQ ID NO: 3625593 - DNA, 25 bp, Homo sapien
ttagtgtccataagtagcctttacc

SEQ ID NO: 3625594 - DNA, 25 bp, Homo sapien
tagcctttaccaggagccagggatc

SEQ ID NO: 3625595 - DNA, 25 bp, Homo sapien
cataagtagcctttaccaggagcca

SEQ ID NO: 3625596 - DNA, 25 bp, Homo sapien
cgtcatacactcagataatgaaggc

SEQ ID NO: 3625597 - DNA, 25 bp, Homo sapien
tttgctcactgactcgtatatccca

SEQ ID NO: 3625598 - DNA, 25 bp, Homo sapien
tacatgtacatgaaagcaattgggc

SEQ ID NO: 3625599 - DNA, 25 bp, Homo sapien
tcccagtatcataaacctgtctcag

SEQ ID NO: 3625600 - DNA, 25 bp, Homo sapien
tcagtcaaaggggaataatctacat

SEQ ID NO: 3625601 - DNA, 25 bp, Homo sapien
ataatctacattcataagcccacag

SEQ ID NO: 3625602 - DNA, 25 bp, Homo sapien
attcataagcccacaggtgatgagg

SEQ ID NO: 3625603 - DNA, 25 bp, Homo sapien
cataagcccacaggtgatgaggcac

SEQ ID NO: 3625604 - DNA, 25 bp, Homo sapien
tttgtaggtgaatcagtcttgcttc

SEQ ID NO: 3625605 - DNA, 25 bp, Homo sapien
cagtttgtaggtgaatcagtcttgc

SEQ ID NO: 3625606 - DNA, 25 bp, Homo sapien
agtttgtaggtgaatcagtcttgct

SEQ ID NO: 3625607 - DNA, 25 bp, Homo sapien
gtcagtttgtaggtgaatcagtctt

SEQ ID NO: 3625608 - DNA, 25 bp, Homo sapien
ggccaggaatgaccactcgagacat

SEQ ID NO: 3625609 - DNA, 25 bp, Homo sapien
taaatagacttgcttcctcctgcct

SEQ ID NO: 3625610 - DNA, 25 bp, Homo sapien
tctttaaatagacttgcttcctcct

SEQ ID NO: 3625611 - DNA, 25 bp, Homo sapien
catccatcataactggtaatagggc

SEQ ID NO: 3625612 - DNA, 25 bp, Homo sapien
tcatcttttggtcgccattatatta

SEQ ID NO: 3625613 - DNA, 25 bp, Homo sapien
ttggtcgccattatattatctgcta

SEQ ID NO: 3625614 - DNA, 25 bp, Homo sapien
tcttttggtcgccattatattatct

SEQ ID NO: 3625615 - DNA, 25 bp, Homo sapien
ttttggtcgccattatattatctgc

SEQ ID NO: 3625616 - DNA, 25 bp, Homo sapien
cctctcactctctgaataaaatacg

SEQ ID NO: 3625617 - DNA, 25 bp, Homo sapien
tacggatcagatgctgcaacattgc

SEQ ID NO: 3625618 - DNA, 25 bp, Homo sapien
tgttgacgctgattatttaatctga

SEQ ID NO: 3625619 - DNA, 25 bp, Homo sapien
gcaacattgctattcttaggagcaa

SEQ ID NO: 3625620 - DNA, 25 bp, Homo sapien
gaatgctgccgattgtacctgacca

SEQ ID NO: 3625621 - DNA, 25 bp, Homo sapien
gtatccttggcatctgaaacagagc

SEQ ID NO: 3625622 - DNA, 25 bp, Homo sapien
tatcatcactgcgaaggacaggcga

SEQ ID NO: 3625623 - DNA, 25 bp, Homo sapien
catacccaagaaagagagtcactgt

SEQ ID NO: 3625624 - DNA, 25 bp, Homo sapien
ccttcctgtcaaaacgtccgtggag

SEQ ID NO: 3625625 - DNA, 25 bp, Homo sapien
ctccagagttatattaatttgtacg

SEQ ID NO: 3625626 - DNA, 25 bp, Homo sapien
cattagagtaagaggtataccttcc

SEQ ID NO: 3625627 - DNA, 25 bp, Homo sapien
tccgtggagtaagactccagagtta

SEQ ID NO: 3625628 - DNA, 25 bp, Homo sapien
ttctgcgtaagtattctcatgactc

SEQ ID NO: 3625629 - DNA, 25 bp, Homo sapien
tcaattgttctgcgtaagtattctc

SEQ ID NO: 3625630 - DNA, 25 bp, Homo sapien
tgttctgcgtaagtattctcatgac

SEQ ID NO: 3625631 - DNA, 25 bp, Homo sapien
attgttctgcgtaagtattctcatg

SEQ ID NO: 3625632 - DNA, 25 bp, Homo sapien
caactgatactgcttaatgggacca

SEQ ID NO: 3625633 - DNA, 25 bp, Homo sapien
gaaataggatcagaacttcttaggc

SEQ ID NO: 3625634 - DNA, 25 bp, Homo sapien
tgcgatctagcgctatcatataaag

SEQ ID NO: 3625635 - DNA, 25 bp, Homo sapien
caagggtaagatttcatgcgatcta

SEQ ID NO: 3625636 - DNA, 25 bp, Homo sapien
gccatgtaacatggtccctagccat

SEQ ID NO: 3625637 - DNA, 25 bp, Homo sapien
ttcctgtgcaccaatcaggcgccat

SEQ ID NO: 3625638 - DNA, 25 bp, Homo sapien
caatcaggcgccatgtaacatggtc

SEQ ID NO: 3625639 - DNA, 25 bp, Homo sapien
tgtgcaccaatcaggcgccatgtaa

SEQ ID NO: 3625640 - DNA, 25 bp, Homo sapien
tgtagactgggtaatgtcgcaggcc

SEQ ID NO: 3625641 - DNA, 25 bp, Homo sapien
tgggtaatgtcgcaggcctgtcccc

SEQ ID NO: 3625642 - DNA, 25 bp, Homo sapien
gactgggtaatgtcgcaggcctgtc

SEQ ID NO: 3625643 - DNA, 25 bp, Homo sapien
ctgcctttgtagactgggtaatgtc

SEQ ID NO: 3625644 - DNA, 25 bp, Homo sapien
gacaagatgcatagtgaaagccacg

SEQ ID NO: 3625645 - DNA, 25 bp, Homo sapien
gaaagccacggcaatccattacgtc

SEQ ID NO: 3625646 - DNA, 25 bp, Homo sapien
tacgtcctgcttcaaggtgagtgtg

SEQ ID NO: 3625647 - DNA, 25 bp, Homo sapien
taactcaaactggagggactgaggc

SEQ ID NO: 3625648 - DNA, 25 bp, Homo sapien
tgcccagaggatgcgcccctggaga

SEQ ID NO: 3625649 - DNA, 25 bp, Homo sapien
gtgagccagagaggcattctccgaa

SEQ ID NO: 3625650 - DNA, 25 bp, Homo sapien
tctgaggaatggcatagaagtctgt

SEQ ID NO: 3625651 - DNA, 25 bp, Homo sapien
catgagcagttggagcaaaagcacc

SEQ ID NO: 3625652 - DNA, 25 bp, Homo sapien
caacctgggaggaatgacccacaaa

SEQ ID NO: 3625653 - DNA, 25 bp, Homo sapien
tgcacatctctggaagtgtcccaag

SEQ ID NO: 3625654 - DNA, 25 bp, Homo sapien
gaacttagtaagatgagctcctcaa

SEQ ID NO: 3625655 - DNA, 25 bp, Homo sapien
gcatatgggcaacttgactgcctca

SEQ ID NO: 3625656 - DNA, 25 bp, Homo sapien
gtcactatcaactccctttaccgaa

SEQ ID NO: 3625657 - DNA, 25 bp, Homo sapien
tggtttttgaattcagtcttattca

SEQ ID NO: 3625658 - DNA, 25 bp, Homo sapien
ctggggtcactatcaactcccttta

SEQ ID NO: 3625659 - DNA, 25 bp, Homo sapien
tccctttaccgaacctgcctctctg

SEQ ID NO: 3625660 - DNA, 25 bp, Homo sapien
tgataaactatcagagcctggctca

SEQ ID NO: 3625661 - DNA, 25 bp, Homo sapien
cctggctcagttgatagaaaatcta

SEQ ID NO: 3625662 - DNA, 25 bp, Homo sapien
tccccatgacattttgtcaatcata

SEQ ID NO: 3625663 - DNA, 25 bp, Homo sapien
tcttggctgtcaggatagcattgct

SEQ ID NO: 3625664 - DNA, 25 bp, Homo sapien
tcagccctggctaaggccatggaat

SEQ ID NO: 3625665 - DNA, 25 bp, Homo sapien
tcacaaacgtctgccatgctgacaa

SEQ ID NO: 3625666 - DNA, 25 bp, Homo sapien
tgtctgtgcctatatctcttctggg

SEQ ID NO: 3625667 - DNA, 25 bp, Homo sapien
cagtggcttgcggattctcatgctc

SEQ ID NO: 3625668 - DNA, 25 bp, Homo sapien
gtcagacataataggatcatagatt

SEQ ID NO: 3625669 - DNA, 25 bp, Homo sapien
catctaatcgtagagccaaaattct

SEQ ID NO: 3625670 - DNA, 25 bp, Homo sapien
tgaatgaagtcaccatatgagagaa

SEQ ID NO: 3625671 - DNA, 25 bp, Homo sapien
tatagagctggaaggcatcttaaaa

SEQ ID NO: 3625672 - DNA, 25 bp, Homo sapien
tgacttcttgcatatacatcccaga

SEQ ID NO: 3625673 - DNA, 25 bp, Homo sapien
cattccctgaatttgtaggaatctc

SEQ ID NO: 3625674 - DNA, 25 bp, Homo sapien
tgtaggaatctcttgctgctgtgta

SEQ ID NO: 3625675 - DNA, 25 bp, Homo sapien
tcttgctgctgtgtaaaggcataag

SEQ ID NO: 3625676 - DNA, 25 bp, Homo sapien
aaaggcataagaatgggccaaggca

SEQ ID NO: 3625677 - DNA, 25 bp, Homo sapien
ctggggaacgctctgatttccttaa

SEQ ID NO: 3625678 - DNA, 25 bp, Homo sapien
catgaagtagcacaatggcttgctt

SEQ ID NO: 3625679 - DNA, 25 bp, Homo sapien
gtagcacaatggcttgcttatccat

SEQ ID NO: 3625680 - DNA, 25 bp, Homo sapien
cttaacatgaagtagcacaatggct

SEQ ID NO: 3625681 - DNA, 25 bp, Homo sapien
gccaaaataccaccattaatctttc

SEQ ID NO: 3625682 - DNA, 25 bp, Homo sapien
aataccaccattaatctttcgcact

SEQ ID NO: 3625683 - DNA, 25 bp, Homo sapien
caaaataccaccattaatctttcgc

SEQ ID NO: 3625684 - DNA, 25 bp, Homo sapien
aaataccaccattaatctttcgcac

SEQ ID NO: 3625685 - DNA, 25 bp, Homo sapien
tctgagactgggtacgggaatctgt

SEQ ID NO: 3625686 - DNA, 25 bp, Homo sapien
gattgcacctacttacacagctggg

SEQ ID NO: 3625687 - DNA, 25 bp, Homo sapien
aagtcaaggctgtattgggccacga

SEQ ID NO: 3625688 - DNA, 25 bp, Homo sapien
taatatggccggataacctgcaaga

SEQ ID NO: 3625689 - DNA, 25 bp, Homo sapien
acagcacttcctaatgtccctcaga

SEQ ID NO: 3625690 - DNA, 25 bp, Homo sapien
tcctaatgtccctcagagcaatcaa

SEQ ID NO: 3625691 - DNA, 25 bp, Homo sapien
ccacgttcaaagcttcagtgtcttc

SEQ ID NO: 3625692 - DNA, 25 bp, Homo sapien
gaaaacgagtttcatccacgttcaa

SEQ ID NO: 3625693 - DNA, 25 bp, Homo sapien
ccccagtggcacattagatggtaaa

SEQ ID NO: 3625694 - DNA, 25 bp, Homo sapien
caaatgcgtattgggaaatgttccc

SEQ ID NO: 3625695 - DNA, 25 bp, Homo sapien
catgtattataacccgtgtgctgct

SEQ ID NO: 3625696 - DNA, 25 bp, Homo sapien
gcatcaacatccctgaacactggta

SEQ ID NO: 3625697 - DNA, 25 bp, Homo sapien
ctgttctctaactaaaaagaagatc

SEQ ID NO: 3625698 - DNA, 25 bp, Homo sapien
aagatccagctaagtatcacccaaa

SEQ ID NO: 3625699 - DNA, 25 bp, Homo sapien
cataatttacaatagggaccctagg

SEQ ID NO: 3625700 - DNA, 25 bp, Homo sapien
tgaggagactcataacaggccgtgg

SEQ ID NO: 3625701 - DNA, 25 bp, Homo sapien
tgtctagatgcaggaaaggttccac

SEQ ID NO: 3625702 - DNA, 25 bp, Homo sapien
taaccatcaaagtcataggcagggc

SEQ ID NO: 3625703 - DNA, 25 bp, Homo sapien
gaatctagcctgtcgtggcttcaaa

SEQ ID NO: 3625704 - DNA, 25 bp, Homo sapien
atcctggaccagcatagccggagca

SEQ ID NO: 3625705 - DNA, 25 bp, Homo sapien
tgcccaagcaggagagaatctagcc

SEQ ID NO: 3625706 - DNA, 25 bp, Homo sapien
tggacttcaaggttcacgcataaga

SEQ ID NO: 3625707 - DNA, 25 bp, Homo sapien
ggaaggtggcatctccgctgcgcac

SEQ ID NO: 3625708 - DNA, 25 bp, Homo sapien
aaggtggcatctccgctgcgcacgg

SEQ ID NO: 3625709 - DNA, 25 bp, Homo sapien
ccgtcacgttgtccatagctttggg

SEQ ID NO: 3625710 - DNA, 25 bp, Homo sapien
ctgccggaccgtcacgttgtccata

SEQ ID NO: 3625711 - DNA, 25 bp, Homo sapien
agacacgaccacgaggcacttccag

SEQ ID NO: 3625712 - DNA, 25 bp, Homo sapien
acgaccacgaggcacttccagggca

SEQ ID NO: 3625713 - DNA, 25 bp, Homo sapien
ctgagagacacgaccacgaggcact

SEQ ID NO: 3625714 - DNA, 25 bp, Homo sapien
acgaggcacttccagggcaggaaca

SEQ ID NO: 3625715 - DNA, 25 bp, Homo sapien
gaaggtcacagattgcgctttctct

SEQ ID NO: 3625716 - DNA, 25 bp, Homo sapien
agagctttcttgacgctcccctggg

SEQ ID NO: 3625717 - DNA, 25 bp, Homo sapien
ctttaagattcagttgggcacgttc

SEQ ID NO: 3625718 - DNA, 25 bp, Homo sapien
gctgtcataaaaagctgcggcttca

SEQ ID NO: 3625719 - DNA, 25 bp, Homo sapien
aggtctcgcatctggaaccccaagg

SEQ ID NO: 3625720 - DNA, 25 bp, Homo sapien
cagccagggtcgtccggtcggtggc

SEQ ID NO: 3625721 - DNA, 25 bp, Homo sapien
tctcgcatctggaaccccaaggcgg

SEQ ID NO: 3625722 - DNA, 25 bp, Homo sapien
ggacagatgtacgtgtcccccagcc

SEQ ID NO: 3625723 - DNA, 25 bp, Homo sapien
ctgcagcccggtcggcgactcgcgg

SEQ ID NO: 3625724 - DNA, 25 bp, Homo sapien
cccggtcggcgactcgcggccagcc

SEQ ID NO: 3625725 - DNA, 25 bp, Homo sapien
gactcgcggccagccgggggagcgc

SEQ ID NO: 3625726 - DNA, 25 bp, Homo sapien
ggtcggcgactcgcggccagccggg

SEQ ID NO: 3625727 - DNA, 25 bp, Homo sapien
ctccatccctgaccgccactttctc

SEQ ID NO: 3625728 - DNA, 25 bp, Homo sapien
gctccatccctgaccgccactttct

SEQ ID NO: 3625729 - DNA, 25 bp, Homo sapien
atgcctgcggggatgagcccgcacc

SEQ ID NO: 3625730 - DNA, 25 bp, Homo sapien
gcccacttcgctccgtcccgacacc

SEQ ID NO: 3625731 - DNA, 25 bp, Homo sapien
gcgcccacttcgctccgtcccgaca

SEQ ID NO: 3625732 - DNA, 25 bp, Homo sapien
cacttcgctccgtcccgacacccgc

SEQ ID NO: 3625733 - DNA, 25 bp, Homo sapien
ctcgccgatgccagcgcagaagttg

SEQ ID NO: 3625734 - DNA, 25 bp, Homo sapien
gttgacaaaccccgccctggagagc

SEQ ID NO: 3625735 - DNA, 25 bp, Homo sapien
cccacgccagatggggcaccggtgt

SEQ ID NO: 3625736 - DNA, 25 bp, Homo sapien
tggagagctgaactaccctgcccac

SEQ ID NO: 3625737 - DNA, 25 bp, Homo sapien
ttagatcgggttcttggaaagctgc

SEQ ID NO: 3625738 - DNA, 25 bp, Homo sapien
tgggtatgactgactgccatgtggc

SEQ ID NO: 3625739 - DNA, 25 bp, Homo sapien
tatgtacagcatgctacaggatctc

SEQ ID NO: 3625740 - DNA, 25 bp, Homo sapien
gatgagtgaacagcgttgccagtcc

SEQ ID NO: 3625741 - DNA, 25 bp, Homo sapien
cacaggcagacatagagtggcttcc

SEQ ID NO: 3625742 - DNA, 25 bp, Homo sapien
cttgttggtgctggtcacacaggca

SEQ ID NO: 3625743 - DNA, 25 bp, Homo sapien
tacttgtacattaaccaccctgctg

SEQ ID NO: 3625744 - DNA, 25 bp, Homo sapien
gggcctaaatacttgccatcccagg

SEQ ID NO: 3625745 - DNA, 25 bp, Homo sapien
tgcagacaaattagacttgacccgc

SEQ ID NO: 3625746 - DNA, 25 bp, Homo sapien
tattgccccatagaggaatcagagc

SEQ ID NO: 3625747 - DNA, 25 bp, Homo sapien
tctctgacatgtactgcccatagga

SEQ ID NO: 3625748 - DNA, 25 bp, Homo sapien
aatgtctacagcaattcgcactgga

SEQ ID NO: 3625749 - DNA, 25 bp, Homo sapien
gagctattgttagtccgaatgtaaa

SEQ ID NO: 3625750 - DNA, 25 bp, Homo sapien
gaatgtaaataagattcagggcggg

SEQ ID NO: 3625751 - DNA, 25 bp, Homo sapien
taaataagattcagggcgggagtcc

SEQ ID NO: 3625752 - DNA, 25 bp, Homo sapien
ccaggttccagagctattgttagtc

SEQ ID NO: 3625753 - DNA, 25 bp, Homo sapien
cagcgtgagtacacggaggaggagc

SEQ ID NO: 3625754 - DNA, 25 bp, Homo sapien
aggtcagcgtgagtacacggaggag

SEQ ID NO: 3625755 - DNA, 25 bp, Homo sapien
gtcagcgtgagtacacggaggagga

SEQ ID NO: 3625756 - DNA, 25 bp, Homo sapien
caggtcagcgtgagtacacggagga

SEQ ID NO: 3625757 - DNA, 25 bp, Homo sapien
caaggtagtactgagtctgctgaag

SEQ ID NO: 3625758 - DNA, 25 bp, Homo sapien
ggaaaggaacttccagcgaccaggc

SEQ ID NO: 3625759 - DNA, 25 bp, Homo sapien
caaataactgcttcgagggggccaa

SEQ ID NO: 3625760 - DNA, 25 bp, Homo sapien
cgcctcgtgggtaccagggctgcct

SEQ ID NO: 3625761 - DNA, 25 bp, Homo sapien
gtaagcagcgtttgcaatccctcat

SEQ ID NO: 3625762 - DNA, 25 bp, Homo sapien
tgtaagcagcgtttgcaatccctca

SEQ ID NO: 3625763 - DNA, 25 bp, Homo sapien
ctgtaagcagcgtttgcaatccctc

SEQ ID NO: 3625764 - DNA, 25 bp, Homo sapien
agccagaggcggccatcagaaatgt

SEQ ID NO: 3625765 - DNA, 25 bp, Homo sapien
agcgtgcctgtgtggtacagccaga

SEQ ID NO: 3625766 - DNA, 25 bp, Homo sapien
tcagaaatgtcaggaactccggcgc

SEQ ID NO: 3625767 - DNA, 25 bp, Homo sapien
tctgcgtgctgccacgagcgtgcct

SEQ ID NO: 3625768 - DNA, 25 bp, Homo sapien
tgcagctgggtttatcctttctcac

SEQ ID NO: 3625769 - DNA, 25 bp, Homo sapien
ggaggaaatccttaatgtataattg

SEQ ID NO: 3625770 - DNA, 25 bp, Homo sapien
actggaggaaatccttaatgtataa

SEQ ID NO: 3625771 - DNA, 25 bp, Homo sapien
gaggaaatccttaatgtataattgc

SEQ ID NO: 3625772 - DNA, 25 bp, Homo sapien
gctctggagtcaggcggaaatgcca

SEQ ID NO: 3625773 - DNA, 25 bp, Homo sapien
caccgctctggagtcaggcggaaat

SEQ ID NO: 3625774 - DNA, 25 bp, Homo sapien
ccgctctggagtcaggcggaaatgc

SEQ ID NO: 3625775 - DNA, 25 bp, Homo sapien
tcaccgctctggagtcaggcggaaa

SEQ ID NO: 3625776 - DNA, 25 bp, Homo sapien
actgctgcactcttactcctcccat

SEQ ID NO: 3625777 - DNA, 25 bp, Homo sapien
ctcctttctcagcattggtggcagc

SEQ ID NO: 3625778 - DNA, 25 bp, Homo sapien
tttctcagcattggtggcagccgtg

SEQ ID NO: 3625779 - DNA, 25 bp, Homo sapien
gccgtgagagcctgggaagctttca

SEQ ID NO: 3625780 - DNA, 25 bp, Homo sapien
ctgtgtggtcagcatggttgtacgt

SEQ ID NO: 3625781 - DNA, 25 bp, Homo sapien
aacggcaatgagctttgctgcatca

SEQ ID NO: 3625782 - DNA, 25 bp, Homo sapien
tcacaagccgaagacacatttgttc

SEQ ID NO: 3625783 - DNA, 25 bp, Homo sapien
tgtacgtaaggctttctcaacggca

SEQ ID NO: 3625784 - DNA, 25 bp, Homo sapien
gatctttggttatgagtgaaggggc

SEQ ID NO: 3625785 - DNA, 25 bp, Homo sapien
gctggcaattttctgctgatggaga

SEQ ID NO: 3625786 - DNA, 25 bp, Homo sapien
gtgaaggggctggcaattttctgct

SEQ ID NO: 3625787 - DNA, 25 bp, Homo sapien
catgtgatctttggttatgagtgaa

SEQ ID NO: 3625788 - DNA, 25 bp, Homo sapien
tctaatagcgctggttcgcacgggc

SEQ ID NO: 3625789 - DNA, 25 bp, Homo sapien
gatatgaccttcaacaccagatgga

SEQ ID NO: 3625790 - DNA, 25 bp, Homo sapien
cctggcatgatgcaatgggagctct

SEQ ID NO: 3625791 - DNA, 25 bp, Homo sapien
ggagtagcctcatgtgaacttgcag

SEQ ID NO: 3625792 - DNA, 25 bp, Homo sapien
tattgcaggtgcatgttcatggatc

SEQ ID NO: 3625793 - DNA, 25 bp, Homo sapien
tcatggatctctccaacaaactcca

SEQ ID NO: 3625794 - DNA, 25 bp, Homo sapien
tgttcatggatctctccaacaaact

SEQ ID NO: 3625795 - DNA, 25 bp, Homo sapien
accacaaaagtaatattgcaggtgc

SEQ ID NO: 3625796 - DNA, 25 bp, Homo sapien
gaagagcaagctcatcatctgtgcc

SEQ ID NO: 3625797 - DNA, 25 bp, Homo sapien
caaagaagagcaagctcatcatctg

SEQ ID NO: 3625798 - DNA, 25 bp, Homo sapien
agaagagcaagctcatcatctgtgc

SEQ ID NO: 3625799 - DNA, 25 bp, Homo sapien
cttcaaagaagagcaagctcatcat

SEQ ID NO: 3625800 - DNA, 25 bp, Homo sapien
tggtaagccctcaacgcatggcgtg

SEQ ID NO: 3625801 - DNA, 25 bp, Homo sapien
gagccatgatctgctagacgccagc

SEQ ID NO: 3625802 - DNA, 25 bp, Homo sapien
ccagctcaggtaagtttgtgcaaca

SEQ ID NO: 3625803 - DNA, 25 bp, Homo sapien
taaatatatcaacgggtgtctagcg

SEQ ID NO: 3625804 - DNA, 25 bp, Homo sapien
ctgcctttactggttgggcacatca

SEQ ID NO: 3625805 - DNA, 25 bp, Homo sapien
ttgttgtctgcctttactggttggg

SEQ ID NO: 3625806 - DNA, 25 bp, Homo sapien
tcatcacaggggcatagacgaaaca

SEQ ID NO: 3625807 - DNA, 25 bp, Homo sapien
tgtctgcctttactggttgggcaca

SEQ ID NO: 3625808 - DNA, 25 bp, Homo sapien
gtaatttcataaactactgtgtggc

SEQ ID NO: 3625809 - DNA, 25 bp, Homo sapien
taatttcataaactactgtgtggcc

SEQ ID NO: 3625810 - DNA, 25 bp, Homo sapien
acatatagtcacatgtagaagacag

SEQ ID NO: 3625811 - DNA, 25 bp, Homo sapien
tatagtcacatgtagaagacagttc

SEQ ID NO: 3625812 - DNA, 25 bp, Homo sapien
gacagttctccacccttaaaacaca

SEQ ID NO: 3625813 - DNA, 25 bp, Homo sapien
gtcacatgtagaagacagttctcca

SEQ ID NO: 3625814 - DNA, 25 bp, Homo sapien
ggtctaggctcagacctgtctgtcc

SEQ ID NO: 3625815 - DNA, 25 bp, Homo sapien
agacctgtctgtcccacgctcagga

SEQ ID NO: 3625816 - DNA, 25 bp, Homo sapien
tctgtcccacgctcaggacaaagtc

SEQ ID NO: 3625817 - DNA, 25 bp, Homo sapien
tcagtgcctgcgtgcaggtctaggc

SEQ ID NO: 3625818 - DNA, 25 bp, Homo sapien
tgtgcctgtccagtgcctcccatgg

SEQ ID NO: 3625819 - DNA, 25 bp, Homo sapien
tctgtaaagacagccgcatcctcct

SEQ ID NO: 3625820 - DNA, 25 bp, Homo sapien
gagttttcccgttgtattccagtca

SEQ ID NO: 3625821 - DNA, 25 bp, Homo sapien
caccactgtctgtaaagacagccgc

SEQ ID NO: 3625822 - DNA, 25 bp, Homo sapien
agacgctgccgggtaactgatgccg

SEQ ID NO: 3625823 - DNA, 25 bp, Homo sapien
cctttccctggtagctgtggcaaca

SEQ ID NO: 3625824 - DNA, 25 bp, Homo sapien
tccgcagggagcattcccgtggaca

SEQ ID NO: 3625825 - DNA, 25 bp, Homo sapien
tgatgccgccggcacagcttctgtt

SEQ ID NO: 3625826 - DNA, 25 bp, Homo sapien
agaagggacggccagctggtcctac

SEQ ID NO: 3625827 - DNA, 25 bp, Homo sapien
ctggtcctaccagagactgtcgctg

SEQ ID NO: 3625828 - DNA, 25 bp, Homo sapien
cagcggaccaggaggagggtcaaat

SEQ ID NO: 3625829 - DNA, 25 bp, Homo sapien
tgcctgaattcttgtccgggtggga

SEQ ID NO: 3625830 - DNA, 25 bp, Homo sapien
cagaggaaacggttcagtctggtgc

SEQ ID NO: 3625831 - DNA, 25 bp, Homo sapien
ccggaggaaagcacggtgcagagga

SEQ ID NO: 3625832 - DNA, 25 bp, Homo sapien
tcagtctggtgcttgaagccccagg

SEQ ID NO: 3625833 - DNA, 25 bp, Homo sapien
aacggttcagtctggtgcttgaagc

SEQ ID NO: 3625834 - DNA, 25 bp, Homo sapien
agggcacttttaaaccacgtgtgca

SEQ ID NO: 3625835 - DNA, 25 bp, Homo sapien
caagggaacaaggtcagaaggagcc

SEQ ID NO: 3625836 - DNA, 25 bp, Homo sapien
acttttaaaccacgtgtgcagatgc

SEQ ID NO: 3625837 - DNA, 25 bp, Homo sapien
agatgcccaccaagggaacaaggtc

SEQ ID NO: 3625838 - DNA, 25 bp, Homo sapien
gggttggagatgcacaccccgccac

SEQ ID NO: 3625839 - DNA, 25 bp, Homo sapien
agatgggtcgtctccaaggcgctgc

SEQ ID NO: 3625840 - DNA, 25 bp, Homo sapien
gacttgcttcggagatgggtcgtct

SEQ ID NO: 3625841 - DNA, 25 bp, Homo sapien
cccctagccagacttgcttcggaga

SEQ ID NO: 3625842 - DNA, 25 bp, Homo sapien
catggcagcattggctggaatgaaa

SEQ ID NO: 3625843 - DNA, 25 bp, Homo sapien
actggtgtgagtaagggcacagcag

SEQ ID NO: 3625844 - DNA, 25 bp, Homo sapien
aatggtggatttccatggaccagcg

SEQ ID NO: 3625845 - DNA, 25 bp, Homo sapien
aggaggacagaactggtgtgagtaa

SEQ ID NO: 3625846 - DNA, 25 bp, Homo sapien
aagggctctcctagcaggactccaa

SEQ ID NO: 3625847 - DNA, 25 bp, Homo sapien
tcctagcaggactccaaccacggaa

SEQ ID NO: 3625848 - DNA, 25 bp, Homo sapien
agtgccaaagggctctcctagcagg

SEQ ID NO: 3625849 - DNA, 25 bp, Homo sapien
tagcaggactccaaccacggaaacc

SEQ ID NO: 3625850 - DNA, 25 bp, Homo sapien
agcctttcattcattatgaggccaa

SEQ ID NO: 3625851 - DNA, 25 bp, Homo sapien
ggccaaacgggagccatgtttctcc

SEQ ID NO: 3625852 - DNA, 25 bp, Homo sapien
cattatgaggccaaacgggagccat

SEQ ID NO: 3625853 - DNA, 25 bp, Homo sapien
ttcattcattatgaggccaaacggg

SEQ ID NO: 3625854 - DNA, 25 bp, Homo sapien
ggatgaagacatttgccgttggcaa

SEQ ID NO: 3625855 - DNA, 25 bp, Homo sapien
atacacgcccgcctgaattgatctc

SEQ ID NO: 3625856 - DNA, 25 bp, Homo sapien
gcctgaattgatctccgggcccctg

SEQ ID NO: 3625857 - DNA, 25 bp, Homo sapien
gctctctctggatgaagacatttgc

SEQ ID NO: 3625858 - DNA, 25 bp, Homo sapien
tgttagaattggaaggacccgaagc

SEQ ID NO: 3625859 - DNA, 25 bp, Homo sapien
gatttactcacctaggccttctgca

SEQ ID NO: 3625860 - DNA, 25 bp, Homo sapien
tgacttcagggtgacaggcgcatct

SEQ ID NO: 3625861 - DNA, 25 bp, Homo sapien
gccatttagcaccttgaagctggag

SEQ ID NO: 3625862 - DNA, 25 bp, Homo sapien
gatagtcctcaatgaatcatgctgg

SEQ ID NO: 3625863 - DNA, 25 bp, Homo sapien
tgaaaatagatcataggcccagatg

SEQ ID NO: 3625864 - DNA, 25 bp, Homo sapien
cgaaactataaaacgcccaggagat

SEQ ID NO: 3625865 - DNA, 25 bp, Homo sapien
gatgaccttggatacaacaatgtgt

SEQ ID NO: 3625866 - DNA, 25 bp, Homo sapien
aaagttgtgctggaaggaaacctgg

SEQ ID NO: 3625867 - DNA, 25 bp, Homo sapien
agaagcaaggtaacccttacggcag

SEQ ID NO: 3625868 - DNA, 25 bp, Homo sapien
tggtcagcaagcaaattaggcatgg

SEQ ID NO: 3625869 - DNA, 25 bp, Homo sapien
tacggcagtacataaggcacattgg

SEQ ID NO: 3625870 - DNA, 25 bp, Homo sapien
agcagtctccacagcgggctgtgtg

SEQ ID NO: 3625871 - DNA, 25 bp, Homo sapien
cagcctgaaagccttggcagcgatt

SEQ ID NO: 3625872 - DNA, 25 bp, Homo sapien
agcgattggcgagggagcagtctcc

SEQ ID NO: 3625873 - DNA, 25 bp, Homo sapien
ccacagcgggctgtgtgttccacgg

SEQ ID NO: 3625874 - DNA, 25 bp, Homo sapien
aagacagtgagacacgttgtcacag

SEQ ID NO: 3625875 - DNA, 25 bp, Homo sapien
gttggagttcccttgctgagatgca

SEQ ID NO: 3625876 - DNA, 25 bp, Homo sapien
catctggatatagaagttggagttc

SEQ ID NO: 3625877 - DNA, 25 bp, Homo sapien
tctcaccgagaacacggaagtgccc

SEQ ID NO: 3625878 - DNA, 25 bp, Homo sapien
ccagggcacgcgagttctcatccac

SEQ ID NO: 3625879 - DNA, 25 bp, Homo sapien
agagccccagggcacgcgagttctc

SEQ ID NO: 3625880 - DNA, 25 bp, Homo sapien
agggcacgcgagttctcatccacag

SEQ ID NO: 3625881 - DNA, 25 bp, Homo sapien
agccccagggcacgcgagttctcat

SEQ ID NO: 3625882 - DNA, 25 bp, Homo sapien
gccagggcacacctttgactgtgtt

SEQ ID NO: 3625883 - DNA, 25 bp, Homo sapien
gggaatccacaggaggatgttcaga

SEQ ID NO: 3625884 - DNA, 25 bp, Homo sapien
ttatctcttaatcgactaaagggaa

SEQ ID NO: 3625885 - DNA, 25 bp, Homo sapien
gggcacacctttgactgtgttttat

SEQ ID NO: 3625886 - DNA, 25 bp, Homo sapien
gaacactactcagttcactatcaac

SEQ ID NO: 3625887 - DNA, 25 bp, Homo sapien
gtgcatgcaaattgtctacactgca

SEQ ID NO: 3625888 - DNA, 25 bp, Homo sapien
gggaaagtgcatgcaaattgtctac

SEQ ID NO: 3625889 - DNA, 25 bp, Homo sapien
gttcactatcaaccatgcctagatc

SEQ ID NO: 3625890 - DNA, 25 bp, Homo sapien
ccagaattttgctgtgcggtttcat

SEQ ID NO: 3625891 - DNA, 25 bp, Homo sapien
ggcagcggactttgccctccacgtg

SEQ ID NO: 3625892 - DNA, 25 bp, Homo sapien
gagcaggcagcggactttgccctcc

SEQ ID NO: 3625893 - DNA, 25 bp, Homo sapien
gggcgatatcctttgagacgtgcag

SEQ ID NO: 3625894 - DNA, 25 bp, Homo sapien
ccttccttgtaattatgtagggatg

SEQ ID NO: 3625895 - DNA, 25 bp, Homo sapien
tgttatctcctgttcaatttattcc

SEQ ID NO: 3625896 - DNA, 25 bp, Homo sapien
ttcctcaataattccaggtgtaagt

SEQ ID NO: 3625897 - DNA, 25 bp, Homo sapien
ccaggagctggtatgcagtcagtgc

SEQ ID NO: 3625898 - DNA, 25 bp, Homo sapien
gcaccgagtgcttagaaaaggcctg

SEQ ID NO: 3625899 - DNA, 25 bp, Homo sapien
aagtgactcctacctgagacctgaa

SEQ ID NO: 3625900 - DNA, 25 bp, Homo sapien
tttcaggcagagaaaaccccacgga

SEQ ID NO: 3625901 - DNA, 25 bp, Homo sapien
gaaacagtgcaagacagcaccgagt

SEQ ID NO: 3625902 - DNA, 25 bp, Homo sapien
cacttcaccttctgctaagattata

SEQ ID NO: 3625903 - DNA, 25 bp, Homo sapien
atttttcaacagcattaggcaagca

SEQ ID NO: 3625904 - DNA, 25 bp, Homo sapien
ttaggcaagcaatatggtttggata

SEQ ID NO: 3625905 - DNA, 25 bp, Homo sapien
gatagaagctctcctaagacctggt

SEQ ID NO: 3625906 - DNA, 25 bp, Homo sapien
cagcagagctgtgtagcaccctgac

SEQ ID NO: 3625907 - DNA, 25 bp, Homo sapien
ccttcagagcaatggtccaagggcc

SEQ ID NO: 3625908 - DNA, 25 bp, Homo sapien
gggaccctggcaacaccaagttgct

SEQ ID NO: 3625909 - DNA, 25 bp, Homo sapien
cacacactccttgggcatgcagctt

SEQ ID NO: 3625910 - DNA, 25 bp, Homo sapien
gtgtgtgtgtgtgacggagtttcac

SEQ ID NO: 3625911 - DNA, 25 bp, Homo sapien
tgtgtgtgtgtgacggagtttcact

SEQ ID NO: 3625912 - DNA, 25 bp, Homo sapien
agtacaaaggcgtgatcttgggttc

SEQ ID NO: 3625913 - DNA, 25 bp, Homo sapien
acaaaggcgtgatcttgggttcaag

SEQ ID NO: 3625914 - DNA, 25 bp, Homo sapien
tctgaagccagagtcaataatacta

SEQ ID NO: 3625915 - DNA, 25 bp, Homo sapien
taatactaatatcttgatggccctg

SEQ ID NO: 3625916 - DNA, 25 bp, Homo sapien
tgttggttgcaggaataaatgcaca

SEQ ID NO: 3625917 - DNA, 25 bp, Homo sapien
cagggaggaagctcatctgcagatt

SEQ ID NO: 3625918 - DNA, 25 bp, Homo sapien
ggtccacggcgaagagtagcccaat

SEQ ID NO: 3625919 - DNA, 25 bp, Homo sapien
ttggttcgctaaaggagaaatgccc

SEQ ID NO: 3625920 - DNA, 25 bp, Homo sapien
taagtgatcgcctttagaaagccag

SEQ ID NO: 3625921 - DNA, 25 bp, Homo sapien
caaagacggtgaactagtgtcctcc

SEQ ID NO: 3625922 - DNA, 25 bp, Homo sapien
cttagccatggaagatccccaggcc

SEQ ID NO: 3625923 - DNA, 25 bp, Homo sapien
gaactaatctcacggctgtatggcc

SEQ ID NO: 3625924 - DNA, 25 bp, Homo sapien
cactgactcgaaattggacggaact

SEQ ID NO: 3625925 - DNA, 25 bp, Homo sapien
ggcttcgttcgagtccgtttggaga

SEQ ID NO: 3625926 - DNA, 25 bp, Homo sapien
gacacattagtggagttaggtacct

SEQ ID NO: 3625927 - DNA, 25 bp, Homo sapien
gaattagcaggcacataaagaaggg

SEQ ID NO: 3625928 - DNA, 25 bp, Homo sapien
gatgtaaattcagatgagtgccagg

SEQ ID NO: 3625929 - DNA, 25 bp, Homo sapien
aaggtgggacacctctttggctaag

SEQ ID NO: 3625930 - DNA, 25 bp, Homo sapien
gaccattaaatctatcgatgactgg

SEQ ID NO: 3625931 - DNA, 25 bp, Homo sapien
gatttattctaagattgtatctggg

SEQ ID NO: 3625932 - DNA, 25 bp, Homo sapien
cgatgactggaaaaccttattggac

SEQ ID NO: 3625933 - DNA, 25 bp, Homo sapien
gctgaacaccttggagccaacttcc

SEQ ID NO: 3625934 - DNA, 25 bp, Homo sapien
cacaaatagtgacatgtcctggacc

SEQ ID NO: 3625935 - DNA, 25 bp, Homo sapien
gggtccccttgccttagcttatgca

SEQ ID NO: 3625936 - DNA, 25 bp, Homo sapien
agcttatgcaggcaagtcactggca

SEQ ID NO: 3625937 - DNA, 25 bp, Homo sapien
tgaacgacatccagttttggaaggc

SEQ ID NO: 3625938 - DNA, 25 bp, Homo sapien
gatgagcacgtgacctacaggcaca

SEQ ID NO: 3625939 - DNA, 25 bp, Homo sapien
tcattgccccacttagaggtcacag

SEQ ID NO: 3625940 - DNA, 25 bp, Homo sapien
gactttgaacaagaaggtccaccag

SEQ ID NO: 3625941 - DNA, 25 bp, Homo sapien
agttgccttcctgagcgtttgccga

SEQ ID NO: 3625942 - DNA, 25 bp, Homo sapien
tcaattgccttcttctgtgagcggc

SEQ ID NO: 3625943 - DNA, 25 bp, Homo sapien
tgagcggcaccctcagagtgtgctt

SEQ ID NO: 3625944 - DNA, 25 bp, Homo sapien
agcggcaccctcagagtgtgcttct

SEQ ID NO: 3625945 - DNA, 25 bp, Homo sapien
tgccttcttctgtgagcggcaccct

SEQ ID NO: 3625946 - DNA, 25 bp, Homo sapien
cttgatgactcgctgcgccgtggga

SEQ ID NO: 3625947 - DNA, 25 bp, Homo sapien
tgatgactcgctgcgccgtgggaat

SEQ ID NO: 3625948 - DNA, 25 bp, Homo sapien
gcctcgggtccttgatgactcgctg

SEQ ID NO: 3625949 - DNA, 25 bp, Homo sapien
ggtccttgatgactcgctgcgccgt

SEQ ID NO: 3625950 - DNA, 25 bp, Homo sapien
ttggctatccattgatcagctctgg

SEQ ID NO: 3625951 - DNA, 25 bp, Homo sapien
cagggtctgatatattggcgttggc

SEQ ID NO: 3625952 - DNA, 25 bp, Homo sapien
tgatatattggcgttggctatccat

SEQ ID NO: 3625953 - DNA, 25 bp, Homo sapien
gctctgcagggtctgatatattggc

SEQ ID NO: 3625954 - DNA, 25 bp, Homo sapien
ttgcctgacattgatagatgttgtc

SEQ ID NO: 3625955 - DNA, 25 bp, Homo sapien
tgcctgacattgatagatgttgtct

SEQ ID NO: 3625956 - DNA, 25 bp, Homo sapien
taaattgatttactgacaagcaccc

SEQ ID NO: 3625957 - DNA, 25 bp, Homo sapien
attggatcaattgtccacagcctac

SEQ ID NO: 3625958 - DNA, 25 bp, Homo sapien
acatttttgggtctggccacaatta

SEQ ID NO: 3625959 - DNA, 25 bp, Homo sapien
tatccttagggttagagtgacagct

SEQ ID NO: 3625960 - DNA, 25 bp, Homo sapien
tttatacattagtttaggcatttgg

SEQ ID NO: 3625961 - DNA, 25 bp, Homo sapien
ggcatctatgcattcattaatttat

SEQ ID NO: 3625962 - DNA, 25 bp, Homo sapien
tcttccacttccagatcattcacct

SEQ ID NO: 3625963 - DNA, 25 bp, Homo sapien
gacgaagttaaaatctcatgcagaa

SEQ ID NO: 3625964 - DNA, 25 bp, Homo sapien
ttaagttacgcgaggccaggtgagc

SEQ ID NO: 3625965 - DNA, 25 bp, Homo sapien
tgattccttatcatatgtattcctt

SEQ ID NO: 3625966 - DNA, 25 bp, Homo sapien
ccaggtgagcaggaaagacaactga

SEQ ID NO: 3625967 - DNA, 25 bp, Homo sapien
ccagtacatgtatccagtgtatata

SEQ ID NO: 3625968 - DNA, 25 bp, Homo sapien
taagtactttgctcatctcgtcaga

SEQ ID NO: 3625969 - DNA, 25 bp, Homo sapien
tctcgtcagaaaccccataagatag

SEQ ID NO: 3625970 - DNA, 25 bp, Homo sapien
cataagataggcattattgtccccg

SEQ ID NO: 3625971 - DNA, 25 bp, Homo sapien
taggagacacggagtaactagttgc

SEQ ID NO: 3625972 - DNA, 25 bp, Homo sapien
tgtcccactgtagcgtatgttcagc

SEQ ID NO: 3625973 - DNA, 25 bp, Homo sapien
cttggtctggatatccgttgtccca

SEQ ID NO: 3625974 - DNA, 25 bp, Homo sapien
tgtagcgtatgttcagcctccacca

SEQ ID NO: 3625975 - DNA, 25 bp, Homo sapien
ggatatccgttgtcccactgtagcg

SEQ ID NO: 3625976 - DNA, 25 bp, Homo sapien
ggatctcttggcatgggaagcaccc

SEQ ID NO: 3625977 - DNA, 25 bp, Homo sapien
tcttttaagcctgcttgaatatcag

SEQ ID NO: 3625978 - DNA, 25 bp, Homo sapien
gcatgggaagcacccaaatgccaca

SEQ ID NO: 3625979 - DNA, 25 bp, Homo sapien
gacgggctcttttaagcctgcttga

SEQ ID NO: 3625980 - DNA, 25 bp, Homo sapien
ctacagagagtgacaccatgagtac

SEQ ID NO: 3625981 - DNA, 25 bp, Homo sapien
gagagtgacaccatgagtactgatt

SEQ ID NO: 3625982 - DNA, 25 bp, Homo sapien
cagagagtgacaccatgagtactga

SEQ ID NO: 3625983 - DNA, 25 bp, Homo sapien
gtgacaccatgagtactgatttctg

SEQ ID NO: 3625984 - DNA, 25 bp, Homo sapien
tacgttcttatgagggaatctctgc

SEQ ID NO: 3625985 - DNA, 25 bp, Homo sapien
ggccagtggcatttgatgcaccttt

SEQ ID NO: 3625986 - DNA, 25 bp, Homo sapien
tcagcttggactcattcttctctca

SEQ ID NO: 3625987 - DNA, 25 bp, Homo sapien
agcttaaggttctttataaatctct

SEQ ID NO: 3625988 - DNA, 25 bp, Homo sapien
tgaacactcctgataagcagccgtc

SEQ ID NO: 3625989 - DNA, 25 bp, Homo sapien
tgtggttaaatgatccccggtgctc

SEQ ID NO: 3625990 - DNA, 25 bp, Homo sapien
gaagaactgacaatagaacctcgct

SEQ ID NO: 3625991 - DNA, 25 bp, Homo sapien
agcacagaggtatggccagggttca

SEQ ID NO: 3625992 - DNA, 25 bp, Homo sapien
tttagaccaccgagaaggattttca

SEQ ID NO: 3625993 - DNA, 25 bp, Homo sapien
tcactgacaacagcatgaagcggtg

SEQ ID NO: 3625994 - DNA, 25 bp, Homo sapien
tgtgggtccatgtggtaccatagct

SEQ ID NO: 3625995 - DNA, 25 bp, Homo sapien
gaggcaaacgggcacatgcagaaat

SEQ ID NO: 3625996 - DNA, 25 bp, Homo sapien
ttttaccatgaacagttgcaaaccc

SEQ ID NO: 3625997 - DNA, 25 bp, Homo sapien
tcagttcccaggaattgctcataat

SEQ ID NO: 3625998 - DNA, 25 bp, Homo sapien
ttttctcagacccaactgtgtattc

SEQ ID NO: 3625999 - DNA, 25 bp, Homo sapien
cacaataatttgacgtacagaggta

SEQ ID NO: 3626000 - DNA, 25 bp, Homo sapien
tgaggtctctcctgaagaagctcaa

SEQ ID NO: 3626001 - DNA, 25 bp, Homo sapien
ccttccaatgggattgacaggtagg

SEQ ID NO: 3626002 - DNA, 25 bp, Homo sapien
tgaagaagctcaaaacaataatcaa

SEQ ID NO: 3626003 - DNA, 25 bp, Homo sapien
agccaaaagatggaatgggaccact

SEQ ID NO: 3626004 - DNA, 25 bp, Homo sapien
tgactagaacagaggatgccatccc

SEQ ID NO: 3626005 - DNA, 25 bp, Homo sapien
taaagagcatagaaaagtacctggc

SEQ ID NO: 3626006 - DNA, 25 bp, Homo sapien
aaaacaagatatgcgctggaggtgc

SEQ ID NO: 3626007 - DNA, 25 bp, Homo sapien
ggaagttcttagacccagatcagca

SEQ ID NO: 3626008 - DNA, 25 bp, Homo sapien
tgctgggacccaaagaactgttctt

SEQ ID NO: 3626009 - DNA, 25 bp, Homo sapien
caaggtaagggtgcctcaaggtcaa

SEQ ID NO: 3626010 - DNA, 25 bp, Homo sapien
tccaggagtacagccagtcaacatg

SEQ ID NO: 3626011 - DNA, 25 bp, Homo sapien
caccttgcttattagtgggcagaca

SEQ ID NO: 3626012 - DNA, 25 bp, Homo sapien
tattggcattttccttgaagctctt

SEQ ID NO: 3626013 - DNA, 25 bp, Homo sapien
tcattttaaagcattgctttggatt

SEQ ID NO: 3626014 - DNA, 25 bp, Homo sapien
aagcattgctttggatttctaattc

SEQ ID NO: 3626015 - DNA, 25 bp, Homo sapien
tgctttggatttctaattcattatc

SEQ ID NO: 3626016 - DNA, 25 bp, Homo sapien
tctctgcatccttgaatctctttga

SEQ ID NO: 3626017 - DNA, 25 bp, Homo sapien
accacgttctatattctgggttctc

SEQ ID NO: 3626018 - DNA, 25 bp, Homo sapien
gatgaggatttgcaagtaccacgtt

SEQ ID NO: 3626019 - DNA, 25 bp, Homo sapien
tctttgactgcatctatgatgagga

SEQ ID NO: 3626020 - DNA, 25 bp, Homo sapien
tgaagtcagcgcctctcctggtgag

SEQ ID NO: 3626021 - DNA, 25 bp, Homo sapien
caagtggccggcagattgtcttcag

SEQ ID NO: 3626022 - DNA, 25 bp, Homo sapien
tgctgctggtgtaggcaaactcggt

SEQ ID NO: 3626023 - DNA, 25 bp, Homo sapien
acttcaatttacagtgtgggccctg

SEQ ID NO: 3626024 - DNA, 25 bp, Homo sapien
ccagctgtatggattaagagaggag

SEQ ID NO: 3626025 - DNA, 25 bp, Homo sapien
tgtagctcccaagaatcaaactgat

SEQ ID NO: 3626026 - DNA, 25 bp, Homo sapien
taacccgttgaggtccaagcaggaa

SEQ ID NO: 3626027 - DNA, 25 bp, Homo sapien
gtgcaggctactggcaagtgtagct

SEQ ID NO: 3626028 - DNA, 25 bp, Homo sapien
gctgctattgatcaatatgcagtca

SEQ ID NO: 3626029 - DNA, 25 bp, Homo sapien
tatgcagtcaacagatgtctggtct

SEQ ID NO: 3626030 - DNA, 25 bp, Homo sapien
ggaaccacggacttccatggaagtc

SEQ ID NO: 3626031 - DNA, 25 bp, Homo sapien
aggaggaacaatcgcccagttgcct

SEQ ID NO: 3626032 - DNA, 25 bp, Homo sapien
tgggctaggtttcaactcagggtga

SEQ ID NO: 3626033 - DNA, 25 bp, Homo sapien
tctggtgcacagaaacccttaaaat

SEQ ID NO: 3626034 - DNA, 25 bp, Homo sapien
gaactcaaagtaagaatacctgggc

SEQ ID NO: 3626035 - DNA, 25 bp, Homo sapien
gttgggcacaacacaagaaaccctg

SEQ ID NO: 3626036 - DNA, 25 bp, Homo sapien
gggtgaagggatgtgccacagctgt

SEQ ID NO: 3626037 - DNA, 25 bp, Homo sapien
tctcttgctacaaaagcaagcacct

SEQ ID NO: 3626038 - DNA, 25 bp, Homo sapien
ggtgggcgatgccatattgactggg

SEQ ID NO: 3626039 - DNA, 25 bp, Homo sapien
caagcacctgtttcatcatcctggg

SEQ ID NO: 3626040 - DNA, 25 bp, Homo sapien
gagaaagctcaaaaaggtgcctcat

SEQ ID NO: 3626041 - DNA, 25 bp, Homo sapien
aaaggctcagaaggcaacatttgcc

SEQ ID NO: 3626042 - DNA, 25 bp, Homo sapien
tgcactggacttaccacaaaaaggc

SEQ ID NO: 3626043 - DNA, 25 bp, Homo sapien
tataaagagggccaacagcgaaact

SEQ ID NO: 3626044 - DNA, 25 bp, Homo sapien
tggagactttgctgagaattactca

SEQ ID NO: 3626045 - DNA, 25 bp, Homo sapien
cttaggccttcatggagactttgct

SEQ ID NO: 3626046 - DNA, 25 bp, Homo sapien
aggccttcatggagactttgctgag

SEQ ID NO: 3626047 - DNA, 25 bp, Homo sapien
ggagactttgctgagaattactcat

SEQ ID NO: 3626048 - DNA, 25 bp, Homo sapien
cttcttccttcacatgtggcatgct

SEQ ID NO: 3626049 - DNA, 25 bp, Homo sapien
tccttcacatgtggcatgctggcca

SEQ ID NO: 3626050 - DNA, 25 bp, Homo sapien
tcttccttcacatgtggcatgctgg

SEQ ID NO: 3626051 - DNA, 25 bp, Homo sapien
ttccttcacatgtggcatgctggcc

SEQ ID NO: 3626052 - DNA, 25 bp, Homo sapien
gacggttattcagcagacgagccct

SEQ ID NO: 3626053 - DNA, 25 bp, Homo sapien
cttctagagggacagagcaaccacc

SEQ ID NO: 3626054 - DNA, 25 bp, Homo sapien
gaagggcaaatggttctccgcagca

SEQ ID NO: 3626055 - DNA, 25 bp, Homo sapien
ggagtcagacttgcccgggttcaaa

SEQ ID NO: 3626056 - DNA, 25 bp, Homo sapien
caggagttcaacacgggaataggga

SEQ ID NO: 3626057 - DNA, 25 bp, Homo sapien
caaacaatggctcctcttagcaagg

SEQ ID NO: 3626058 - DNA, 25 bp, Homo sapien
acatggccatccacagctgcaaagg

SEQ ID NO: 3626059 - DNA, 25 bp, Homo sapien
cattattatcctcgcatggctgaga

SEQ ID NO: 3626060 - DNA, 25 bp, Homo sapien
tgccagtctgctgtcggttgagttt

SEQ ID NO: 3626061 - DNA, 25 bp, Homo sapien
tgtcggttgagttttgccgattgaa

SEQ ID NO: 3626062 - DNA, 25 bp, Homo sapien
ttgagttttgccgattgaagatacc

SEQ ID NO: 3626063 - DNA, 25 bp, Homo sapien
tttgccgattgaagataccaggatg

SEQ ID NO: 3626064 - DNA, 25 bp, Homo sapien
cacccctgtgcgtctgatcatttat

SEQ ID NO: 3626065 - DNA, 25 bp, Homo sapien
ccctgtgcgtctgatcatttatttc

SEQ ID NO: 3626066 - DNA, 25 bp, Homo sapien
tgctctggtcttctacacccctgtg

SEQ ID NO: 3626067 - DNA, 25 bp, Homo sapien
tcttctacacccctgtgcgtctgat

SEQ ID NO: 3626068 - DNA, 25 bp, Homo sapien
acagtcccctggatagccctaagag

SEQ ID NO: 3626069 - DNA, 25 bp, Homo sapien
ttctctaaacttcgggcagcttgga

SEQ ID NO: 3626070 - DNA, 25 bp, Homo sapien
taacaataatcgcaattcagtgcac

SEQ ID NO: 3626071 - DNA, 25 bp, Homo sapien
gagagtcaagaacatacacacagtc

SEQ ID NO: 3626072 - DNA, 25 bp, Homo sapien
tcacttgacgacatgttgtacattc

SEQ ID NO: 3626073 - DNA, 25 bp, Homo sapien
cacttgacgacatgttgtacattct

SEQ ID NO: 3626074 - DNA, 25 bp, Homo sapien
ctcaagcatcttcgcattttgatct

SEQ ID NO: 3626075 - DNA, 25 bp, Homo sapien
tctcccttggttagacctgtggctg

SEQ ID NO: 3626076 - DNA, 25 bp, Homo sapien
cccttggttagacctgtggctggca

SEQ ID NO: 3626077 - DNA, 25 bp, Homo sapien
tcgcattttgatctcccttggttag

SEQ ID NO: 3626078 - DNA, 25 bp, Homo sapien
ttctatgaatgagaacttgtcgcat

SEQ ID NO: 3626079 - DNA, 25 bp, Homo sapien
tatgaatgagaacttgtcgcattac

SEQ ID NO: 3626080 - DNA, 25 bp, Homo sapien
ggttttttgagatgtattttctatg

SEQ ID NO: 3626081 - DNA, 25 bp, Homo sapien
ttgagatgtattttctatgaatgag

SEQ ID NO: 3626082 - DNA, 25 bp, Homo sapien
tctcttcatacacgccaataaactt

SEQ ID NO: 3626083 - DNA, 25 bp, Homo sapien
tccactgtagtctgttgtttgtagt

SEQ ID NO: 3626084 - DNA, 25 bp, Homo sapien
tagtacacgtatgcccctatcctct

SEQ ID NO: 3626085 - DNA, 25 bp, Homo sapien
tcagctgatacagatgaaaaatagt

SEQ ID NO: 3626086 - DNA, 25 bp, Homo sapien
aatcaaggcccaaatgagaagcacc

SEQ ID NO: 3626087 - DNA, 25 bp, Homo sapien
gttgatgagtgcagctgacccatag

SEQ ID NO: 3626088 - DNA, 25 bp, Homo sapien
gctgacccatagaacttctgcagga

SEQ ID NO: 3626089 - DNA, 25 bp, Homo sapien
gaagcaccatcacacaggttgatga

SEQ ID NO: 3626090 - DNA, 25 bp, Homo sapien
taaatgcatgctgataacaatggag

SEQ ID NO: 3626091 - DNA, 25 bp, Homo sapien
tactaggaaattcgggaggagacca

SEQ ID NO: 3626092 - DNA, 25 bp, Homo sapien
caagctttgttccttgcgagacgta

SEQ ID NO: 3626093 - DNA, 25 bp, Homo sapien
ccacctctgagtgagaacgtctata

SEQ ID NO: 3626094 - DNA, 25 bp, Homo sapien
aagtatgccatctgtggttcggagg

SEQ ID NO: 3626095 - DNA, 25 bp, Homo sapien
aaagtatgccatctgtggttcggag

SEQ ID NO: 3626096 - DNA, 25 bp, Homo sapien
agtatgccatctgtggttcggagga

SEQ ID NO: 3626097 - DNA, 25 bp, Homo sapien
aatatggcgtgaagtcgaagacagc

SEQ ID NO: 3626098 - DNA, 25 bp, Homo sapien
ctggaaaatactctcgcctgtctgc

SEQ ID NO: 3626099 - DNA, 25 bp, Homo sapien
gactggaaaatactctcgcctgtct

SEQ ID NO: 3626100 - DNA, 25 bp, Homo sapien
ctggtaagaatatggcgtgaagtcg

SEQ ID NO: 3626101 - DNA, 25 bp, Homo sapien
tcaccactaaacacgaagatatggg

SEQ ID NO: 3626102 - DNA, 25 bp, Homo sapien
agttttgacaagtgtgtcgtgggac

SEQ ID NO: 3626103 - DNA, 25 bp, Homo sapien
tgtgtcgtgggactcaccactaaac

SEQ ID NO: 3626104 - DNA, 25 bp, Homo sapien
tgggactcaccactaaacacgaaga

SEQ ID NO: 3626105 - DNA, 25 bp, Homo sapien
cacatctcacacatccgcatgagcc

SEQ ID NO: 3626106 - DNA, 25 bp, Homo sapien
ccagccatcacccttatgaaccaca

SEQ ID NO: 3626107 - DNA, 25 bp, Homo sapien
acacatccgcatgagcccagccatc

SEQ ID NO: 3626108 - DNA, 25 bp, Homo sapien
agccatcacccttatgaaccacaga

SEQ ID NO: 3626109 - DNA, 25 bp, Homo sapien
tcttatgtaagaggaggatatagat

SEQ ID NO: 3626110 - DNA, 25 bp, Homo sapien
ggatatagatgttatagctgtcgac

SEQ ID NO: 3626111 - DNA, 25 bp, Homo sapien
ccactagaagaatataaatagacat

SEQ ID NO: 3626112 - DNA, 25 bp, Homo sapien
gctgtcgacagaattgttaaaattg

SEQ ID NO: 3626113 - DNA, 25 bp, Homo sapien
ttttgcatgcagctgtatccatggt

SEQ ID NO: 3626114 - DNA, 25 bp, Homo sapien
ttgcatgcagctgtatccatggtga

SEQ ID NO: 3626115 - DNA, 25 bp, Homo sapien
tgcatgcagctgtatccatggtgat

SEQ ID NO: 3626116 - DNA, 25 bp, Homo sapien
catgcagctgtatccatggtgatcc

SEQ ID NO: 3626117 - DNA, 25 bp, Homo sapien
ggctttctatgcactccagagtaca

SEQ ID NO: 3626118 - DNA, 25 bp, Homo sapien
cacctgcctcatcaactggagtggg

SEQ ID NO: 3626119 - DNA, 25 bp, Homo sapien
gtaaaggagatcacccaggcaacgt

SEQ ID NO: 3626120 - DNA, 25 bp, Homo sapien
caggcaacgtgtttcctggactgtc

SEQ ID NO: 3626121 - DNA, 25 bp, Homo sapien
aagttgctgtagaccgacccaaatg

SEQ ID NO: 3626122 - DNA, 25 bp, Homo sapien
agttgctgtagaccgacccaaatgg

SEQ ID NO: 3626123 - DNA, 25 bp, Homo sapien
caaagttgctgtagaccgacccaaa

SEQ ID NO: 3626124 - DNA, 25 bp, Homo sapien
gtcaaagttgctgtagaccgaccca

SEQ ID NO: 3626125 - DNA, 25 bp, Homo sapien
caagcgctctgcaaatctgtgtttc

SEQ ID NO: 3626126 - DNA, 25 bp, Homo sapien
caagcaatatcagctctgtgtagag

SEQ ID NO: 3626127 - DNA, 25 bp, Homo sapien
tcagaaactcaaactaaggcccagg

SEQ ID NO: 3626128 - DNA, 25 bp, Homo sapien
cagaggattctcacgcacagtggca

SEQ ID NO: 3626129 - DNA, 25 bp, Homo sapien
catgtaacctggagtggtagaacca

SEQ ID NO: 3626130 - DNA, 25 bp, Homo sapien
tttggccttgctctgcacctcggca

SEQ ID NO: 3626131 - DNA, 25 bp, Homo sapien
tccttcttagagcaggcatcccagc

SEQ ID NO: 3626132 - DNA, 25 bp, Homo sapien
cccttcccttgatcggatggcttgg

SEQ ID NO: 3626133 - DNA, 25 bp, Homo sapien
gccgaggcagggtgacgcagtccat

SEQ ID NO: 3626134 - DNA, 25 bp, Homo sapien
ggtgacgcagtccatgctgttctcg

SEQ ID NO: 3626135 - DNA, 25 bp, Homo sapien
gtcctcgtccaaaccggctgacaag

SEQ ID NO: 3626136 - DNA, 25 bp, Homo sapien
atgctgttctcgtacaccccagcgt

SEQ ID NO: 3626137 - DNA, 25 bp, Homo sapien
cccagctttgttgcggcgatgtttt

SEQ ID NO: 3626138 - DNA, 25 bp, Homo sapien
ggagcccccagctttgttgcggcga

SEQ ID NO: 3626139 - DNA, 25 bp, Homo sapien
gatcttcatccatgccagcattgag

SEQ ID NO: 3626140 - DNA, 25 bp, Homo sapien
cattgagaagccgtcaaatgggact

SEQ ID NO: 3626141 - DNA, 25 bp, Homo sapien
catgatggcgtgaatccatgatggg

SEQ ID NO: 3626142 - DNA, 25 bp, Homo sapien
catgctgaatgcagatgacgcagtc

SEQ ID NO: 3626143 - DNA, 25 bp, Homo sapien
tctaaccttattaacatgtcgatca

SEQ ID NO: 3626144 - DNA, 25 bp, Homo sapien
ttaagggattgagggccacatgatg

SEQ ID NO: 3626145 - DNA, 25 bp, Homo sapien
cttagtgagtctggcgcgtggattc

SEQ ID NO: 3626146 - DNA, 25 bp, Homo sapien
tatctctttcttagtgagtctggcg

SEQ ID NO: 3626147 - DNA, 25 bp, Homo sapien
caggcactcttagcaggttcgccgg

SEQ ID NO: 3626148 - DNA, 25 bp, Homo sapien
tcttagcaggttcgccggctctggg

SEQ ID NO: 3626149 - DNA, 25 bp, Homo sapien
ccatggccacagagccatttctcaa

SEQ ID NO: 3626150 - DNA, 25 bp, Homo sapien
tccaccctgccccatggccacagag

SEQ ID NO: 3626151 - DNA, 25 bp, Homo sapien
gccccatggccacagagccatttct

SEQ ID NO: 3626152 - DNA, 25 bp, Homo sapien
cctgccccatggccacagagccatt

SEQ ID NO: 3626153 - DNA, 25 bp, Homo sapien
gagatcctgactgtgcgacggtttg

SEQ ID NO: 3626154 - DNA, 25 bp, Homo sapien
gaaaaccgacacttttgctgctgcc

SEQ ID NO: 3626155 - DNA, 25 bp, Homo sapien
tttggcatcttaggactactcaggg

SEQ ID NO: 3626156 - DNA, 25 bp, Homo sapien
cattgtttgaaagatgcctgcaggc

SEQ ID NO: 3626157 - DNA, 25 bp, Homo sapien
gtgtcactgcagatttgttttcccc

SEQ ID NO: 3626158 - DNA, 25 bp, Homo sapien
tcactgcagatttgttttccccaaa

SEQ ID NO: 3626159 - DNA, 25 bp, Homo sapien
tgtcactgcagatttgttttcccca

SEQ ID NO: 3626160 - DNA, 25 bp, Homo sapien
ctgtgtcactgcagatttgttttcc

SEQ ID NO: 3626161 - DNA, 25 bp, Homo sapien
gagaccaccacgactgagagagata

SEQ ID NO: 3626162 - DNA, 25 bp, Homo sapien
tatggctgggagttcaaacccctct

SEQ ID NO: 3626163 - DNA, 25 bp, Homo sapien
tgctgaaagcatctgcgcgcgtgtg

SEQ ID NO: 3626164 - DNA, 25 bp, Homo sapien
catggtgcagatctcgaacccagct

SEQ ID NO: 3626165 - DNA, 25 bp, Homo sapien
gacgacccagtaggcaggatggtac

SEQ ID NO: 3626166 - DNA, 25 bp, Homo sapien
agcagggcagttgtcgccgagaaga

SEQ ID NO: 3626167 - DNA, 25 bp, Homo sapien
gagaagacgacccagtaggcaggat

SEQ ID NO: 3626168 - DNA, 25 bp, Homo sapien
tgtcgccgagaagacgacccagtag

SEQ ID NO: 3626169 - DNA, 25 bp, Homo sapien
tgaacacacacgagctccttggtgg

SEQ ID NO: 3626170 - DNA, 25 bp, Homo sapien
gctgccgggcttgctactgcttctg

SEQ ID NO: 3626171 - DNA, 25 bp, Homo sapien
tcctgagcgacggaaggagactttc

SEQ ID NO: 3626172 - DNA, 25 bp, Homo sapien
gccctgcgtgttgctatctgtgtga

SEQ ID NO: 3626173 - DNA, 25 bp, Homo sapien
ggaacagcggtgttgggctgacatc

SEQ ID NO: 3626174 - DNA, 25 bp, Homo sapien
ctggaacagcggtgttgggctgaca

SEQ ID NO: 3626175 - DNA, 25 bp, Homo sapien
gaacagcggtgttgggctgacatct

SEQ ID NO: 3626176 - DNA, 25 bp, Homo sapien
acagcggtgttgggctgacatcttc

SEQ ID NO: 3626177 - DNA, 25 bp, Homo sapien
gatatgacattctctaggcacagcc

SEQ ID NO: 3626178 - DNA, 25 bp, Homo sapien
catctgcgtatttcacgaagaatgc

SEQ ID NO: 3626179 - DNA, 25 bp, Homo sapien
cacagccacatctgcgtatttcacg

SEQ ID NO: 3626180 - DNA, 25 bp, Homo sapien
gtggccatatcatcgttgcggtagt

SEQ ID NO: 3626181 - DNA, 25 bp, Homo sapien
taatcagttggagataatatggtcc

SEQ ID NO: 3626182 - DNA, 25 bp, Homo sapien
tcagtgtgtggcacatgaagccttc

SEQ ID NO: 3626183 - DNA, 25 bp, Homo sapien
ccagagagggatgttcatgttctca

SEQ ID NO: 3626184 - DNA, 25 bp, Homo sapien
tgtgtggcacatgaagccttcatta

SEQ ID NO: 3626185 - DNA, 25 bp, Homo sapien
ctgtgtggcctcctcgccctgtgta

SEQ ID NO: 3626186 - DNA, 25 bp, Homo sapien
gtgtggcctcctcgccctgtgtagc

SEQ ID NO: 3626187 - DNA, 25 bp, Homo sapien
gtggcctcctcgccctgtgtagcct

SEQ ID NO: 3626188 - DNA, 25 bp, Homo sapien
ggcctcctcgccctgtgtagcctcc

SEQ ID NO: 3626189 - DNA, 25 bp, Homo sapien
cagggagggcattaatggccttaga

SEQ ID NO: 3626190 - DNA, 25 bp, Homo sapien
tttgtagcagtaagggagtagaagc

SEQ ID NO: 3626191 - DNA, 25 bp, Homo sapien
aacctcctgtgggttggaagatgag

SEQ ID NO: 3626192 - DNA, 25 bp, Homo sapien
gagggcattaatggccttagaaaaa

SEQ ID NO: 3626193 - DNA, 25 bp, Homo sapien
gaataacccacagtgtgaatttcag

SEQ ID NO: 3626194 - DNA, 25 bp, Homo sapien
agcaccctcagcaagttgggagtgg

SEQ ID NO: 3626195 - DNA, 25 bp, Homo sapien
gtgtgaatttcagcaccctcagcaa

SEQ ID NO: 3626196 - DNA, 25 bp, Homo sapien
tcaatgctcaagctcaaacgaataa

SEQ ID NO: 3626197 - DNA, 25 bp, Homo sapien
caggctgacgaggattcctgactcc

SEQ ID NO: 3626198 - DNA, 25 bp, Homo sapien
gaggattcctgactccaatctttcc

SEQ ID NO: 3626199 - DNA, 25 bp, Homo sapien
ttctgtagtctgcaggctgacgagg

SEQ ID NO: 3626200 - DNA, 25 bp, Homo sapien
tctgtagtctgcaggctgacgagga

SEQ ID NO: 3626201 - DNA, 25 bp, Homo sapien
cttgaggagtagacggcaccggcaa

SEQ ID NO: 3626202 - DNA, 25 bp, Homo sapien
gccttgaggagtagacggcaccggc

SEQ ID NO: 3626203 - DNA, 25 bp, Homo sapien
ctgagacaccacgtctgtgctggcc

SEQ ID NO: 3626204 - DNA, 25 bp, Homo sapien
gctggccttgaggagtagacggcac

SEQ ID NO: 3626205 - DNA, 25 bp, Homo sapien
cagctcctcctgctctttcccctcg

SEQ ID NO: 3626206 - DNA, 25 bp, Homo sapien
ctcatccgtgttccgcagctcctcc

SEQ ID NO: 3626207 - DNA, 25 bp, Homo sapien
tcctcctgctctttcccctcgccac

SEQ ID NO: 3626208 - DNA, 25 bp, Homo sapien
gctcctcctgctctttcccctcgcc

SEQ ID NO: 3626209 - DNA, 25 bp, Homo sapien
cgtttcgaaaggcggaccttctgag

SEQ ID NO: 3626210 - DNA, 25 bp, Homo sapien
catgacaacacaagggtaaacgttt

SEQ ID NO: 3626211 - DNA, 25 bp, Homo sapien
tttcttggggctcggtagcatgaca

SEQ ID NO: 3626212 - DNA, 25 bp, Homo sapien
aaatgaaagtggtcccgtcgaggca

SEQ ID NO: 3626213 - DNA, 25 bp, Homo sapien
ggctccacgcacaccgccagcgccg

SEQ ID NO: 3626214 - DNA, 25 bp, Homo sapien
gctccacgcacaccgccagcgccgc

SEQ ID NO: 3626215 - DNA, 25 bp, Homo sapien
cggctccacgcacaccgccagcgcc

SEQ ID NO: 3626216 - DNA, 25 bp, Homo sapien
tggaatttggttagaaagagactga

SEQ ID NO: 3626217 - DNA, 25 bp, Homo sapien
tgcccagatggaatttggttagaaa

SEQ ID NO: 3626218 - DNA, 25 bp, Homo sapien
ttggttagaaagagactgattggag

SEQ ID NO: 3626219 - DNA, 25 bp, Homo sapien
cagatgcccagatggaatttggtta

SEQ ID NO: 3626220 - DNA, 25 bp, Homo sapien
gctggttaattctgaggatgatggg

SEQ ID NO: 3626221 - DNA, 25 bp, Homo sapien
tggggaccgggcaatagtggctgca

SEQ ID NO: 3626222 - DNA, 25 bp, Homo sapien
gtaggaggatcacgacctgggctgg

SEQ ID NO: 3626223 - DNA, 25 bp, Homo sapien
tctgcaggtcaaggcccaaggtagg

SEQ ID NO: 3626224 - DNA, 25 bp, Homo sapien
gcatggcagtgcacagacagaagta

SEQ ID NO: 3626225 - DNA, 25 bp, Homo sapien
ctgggtgcatggcagtgcacagaca

SEQ ID NO: 3626226 - DNA, 25 bp, Homo sapien
cagacagaagtagggagtgggcaca

SEQ ID NO: 3626227 - DNA, 25 bp, Homo sapien
cagtgcacagacagaagtagggagt

SEQ ID NO: 3626228 - DNA, 25 bp, Homo sapien
atgaatccaacctccctttaaccag

SEQ ID NO: 3626229 - DNA, 25 bp, Homo sapien
cttcatgaatccaacctccctttaa

SEQ ID NO: 3626230 - DNA, 25 bp, Homo sapien
ttcatgaatccaacctccctttaac

SEQ ID NO: 3626231 - DNA, 25 bp, Homo sapien
tccttcatgaatccaacctcccttt

SEQ ID NO: 3626232 - DNA, 25 bp, Homo sapien
catccttgagtgcccacctttgaca

SEQ ID NO: 3626233 - DNA, 25 bp, Homo sapien
tccttgagtgcccacctttgacaca

SEQ ID NO: 3626234 - DNA, 25 bp, Homo sapien
tcatccttgagtgcccacctttgac

SEQ ID NO: 3626235 - DNA, 25 bp, Homo sapien
ccttgagtgcccacctttgacacat

SEQ ID NO: 3626236 - DNA, 25 bp, Homo sapien
ggagtctcagcttccgtgaacctaa

SEQ ID NO: 3626237 - DNA, 25 bp, Homo sapien
tgagctccagatccgtataatcagt

SEQ ID NO: 3626238 - DNA, 25 bp, Homo sapien
catctccacttggtttatgtctggg

SEQ ID NO: 3626239 - DNA, 25 bp, Homo sapien
gatgtccaggtccaaatcttttgaa

SEQ ID NO: 3626240 - DNA, 25 bp, Homo sapien
tggtcggcgcttcgttttgctttgt

SEQ ID NO: 3626241 - DNA, 25 bp, Homo sapien
ttaatagtaccgcactggtcggcgc

SEQ ID NO: 3626242 - DNA, 25 bp, Homo sapien
tgccaggcaccagctttatttgtag

SEQ ID NO: 3626243 - DNA, 25 bp, Homo sapien
tgtggacgccacagacttctttgtt

SEQ ID NO: 3626244 - DNA, 25 bp, Homo sapien
tgccacatacatcaacggagagttt

SEQ ID NO: 3626245 - DNA, 25 bp, Homo sapien
cacctgagattgtcttggaggccac

SEQ ID NO: 3626246 - DNA, 25 bp, Homo sapien
tctgggtcaagcgtattcacctgag

SEQ ID NO: 3626247 - DNA, 25 bp, Homo sapien
tgctggagatgacactggcctctgc

SEQ ID NO: 3626248 - DNA, 25 bp, Homo sapien
cagcttcgaggtgcatttgtctgga

SEQ ID NO: 3626249 - DNA, 25 bp, Homo sapien
gggaaacgtgtcaccgctgtgcttc

SEQ ID NO: 3626250 - DNA, 25 bp, Homo sapien
cgtgtcaccgctgtgcttccttggc

SEQ ID NO: 3626251 - DNA, 25 bp, Homo sapien
cgaggtgcatttgtctggacacaca

SEQ ID NO: 3626252 - DNA, 25 bp, Homo sapien
gtcagctcaatggtacaggaactag

SEQ ID NO: 3626253 - DNA, 25 bp, Homo sapien
tgctagaaagcatattaaacacaag

SEQ ID NO: 3626254 - DNA, 25 bp, Homo sapien
caggaactagaagaacgtgctagaa

SEQ ID NO: 3626255 - DNA, 25 bp, Homo sapien
tccagaaatggtgatgcctttcata

SEQ ID NO: 3626256 - DNA, 25 bp, Homo sapien
gaaaatcagctattggcttctgcat

SEQ ID NO: 3626257 - DNA, 25 bp, Homo sapien
cagatgtccccagatggaatgtgac

SEQ ID NO: 3626258 - DNA, 25 bp, Homo sapien
gaggaaaatcagctattggcttctg

SEQ ID NO: 3626259 - DNA, 25 bp, Homo sapien
ccagatggaatgtgactttgctctc

SEQ ID NO: 3626260 - DNA, 25 bp, Homo sapien
tcactggagtcacgctggtgattac

SEQ ID NO: 3626261 - DNA, 25 bp, Homo sapien
aatcttttccggatcaggtggcttc

SEQ ID NO: 3626262 - DNA, 25 bp, Homo sapien
aagatgataactgagttgactctgc

SEQ ID NO: 3626263 - DNA, 25 bp, Homo sapien
agcccggccgccaagatgataactg

SEQ ID NO: 3626264 - DNA, 25 bp, Homo sapien
tcacttcctgtatatctcctttttc

SEQ ID NO: 3626265 - DNA, 25 bp, Homo sapien
cattcacttcctgtatatctccttt

SEQ ID NO: 3626266 - DNA, 25 bp, Homo sapien
cactgctgattacagatacatccat

SEQ ID NO: 3626267 - DNA, 25 bp, Homo sapien
ttttcatcactgctgattacagata

SEQ ID NO: 3626268 - DNA, 25 bp, Homo sapien
caaactgaatcaaagaactggctct

SEQ ID NO: 3626269 - DNA, 25 bp, Homo sapien
gcaaatagtctgaaaacaaactgaa

SEQ ID NO: 3626270 - DNA, 25 bp, Homo sapien
tggatggtatttcaaaatggcacca

SEQ ID NO: 3626271 - DNA, 25 bp, Homo sapien
gaagggtcagaatttgctaatgtca

SEQ ID NO: 3626272 - DNA, 25 bp, Homo sapien
aacgcttgcggccttcagtgttcca

SEQ ID NO: 3626273 - DNA, 25 bp, Homo sapien
tgggaaacgcttgcggccttcagtg

SEQ ID NO: 3626274 - DNA, 25 bp, Homo sapien
tgcggccttcagtgttccagttgcc

SEQ ID NO: 3626275 - DNA, 25 bp, Homo sapien
actgggaaacgcttgcggccttcag

SEQ ID NO: 3626276 - DNA, 25 bp, Homo sapien
aaaaaactctcccattgtggcagag

SEQ ID NO: 3626277 - DNA, 25 bp, Homo sapien
cagccttggcttgacaagcccctag

SEQ ID NO: 3626278 - DNA, 25 bp, Homo sapien
aactctcccattgtggcagagctgg

SEQ ID NO: 3626279 - DNA, 25 bp, Homo sapien
gacaagcccctagcaggacagtggt

SEQ ID NO: 3626280 - DNA, 25 bp, Homo sapien
taattacaggcaatgccatcttggg

SEQ ID NO: 3626281 - DNA, 25 bp, Homo sapien
ggatgatttgcatgagaccctgagc

SEQ ID NO: 3626282 - DNA, 25 bp, Homo sapien
agagtgagagaaaacccgctggagc

SEQ ID NO: 3626283 - DNA, 25 bp, Homo sapien
taggaaaccaggacctctgaaacat

SEQ ID NO: 3626284 - DNA, 25 bp, Homo sapien
tcttcctacattatcaatctctaga

SEQ ID NO: 3626285 - DNA, 25 bp, Homo sapien
ctaaatggaactgctgtcttcctac

SEQ ID NO: 3626286 - DNA, 25 bp, Homo sapien
tatgtctgtctccttctctaaatgg

SEQ ID NO: 3626287 - DNA, 25 bp, Homo sapien
ctgtctccttctctaaatggaactg

SEQ ID NO: 3626288 - DNA, 25 bp, Homo sapien
taaggctttgctccctcgtaaatgc

SEQ ID NO: 3626289 - DNA, 25 bp, Homo sapien
gatatcttgcagcattgtctccaga

SEQ ID NO: 3626290 - DNA, 25 bp, Homo sapien
gagaaacccatcagtccatttggca

SEQ ID NO: 3626291 - DNA, 25 bp, Homo sapien
gcattttgctagctgcccagtagga

SEQ ID NO: 3626292 - DNA, 25 bp, Homo sapien
ccttgctgggtggcatttaatttat

SEQ ID NO: 3626293 - DNA, 25 bp, Homo sapien
ttgctgggtggcatttaatttatta

SEQ ID NO: 3626294 - DNA, 25 bp, Homo sapien
cttgctgggtggcatttaatttatt

SEQ ID NO: 3626295 - DNA, 25 bp, Homo sapien
tgctgggtggcatttaatttattac

SEQ ID NO: 3626296 - DNA, 25 bp, Homo sapien
ttttcatgagcttgtatctctgcat

SEQ ID NO: 3626297 - DNA, 25 bp, Homo sapien
tccatgtgctccttttcatgagctt

SEQ ID NO: 3626298 - DNA, 25 bp, Homo sapien
tgctccttttcatgagcttgtatct

SEQ ID NO: 3626299 - DNA, 25 bp, Homo sapien
catgagcttgtatctctgcatattt

SEQ ID NO: 3626300 - DNA, 25 bp, Homo sapien
gattgaagaatcctgcgtcagcatc

SEQ ID NO: 3626301 - DNA, 25 bp, Homo sapien
ttgaagaatcctgcgtcagcatctg

SEQ ID NO: 3626302 - DNA, 25 bp, Homo sapien
agaatcctgcgtcagcatctgggtc

SEQ ID NO: 3626303 - DNA, 25 bp, Homo sapien
gaagaatcctgcgtcagcatctggg

SEQ ID NO: 3626304 - DNA, 25 bp, Homo sapien
agcctgcaagtagctctcagggcca

SEQ ID NO: 3626305 - DNA, 25 bp, Homo sapien
gcaagtagctctcagggccagccag

SEQ ID NO: 3626306 - DNA, 25 bp, Homo sapien
tggcagcctgcaagtagctctcagg

SEQ ID NO: 3626307 - DNA, 25 bp, Homo sapien
gggccagccaggtggtcacctgcat

SEQ ID NO: 3626308 - DNA, 25 bp, Homo sapien
aggcagtgaaattcctcatgcttcc

SEQ ID NO: 3626309 - DNA, 25 bp, Homo sapien
gaaatgtcgttgcagaccaccaagg

SEQ ID NO: 3626310 - DNA, 25 bp, Homo sapien
gcaatttaattgctggaaggcagtg

SEQ ID NO: 3626311 - DNA, 25 bp, Homo sapien
cagacaggagatagagcatctaatc

SEQ ID NO: 3626312 - DNA, 25 bp, Homo sapien
atctgttgcattgcgagggttgagc

SEQ ID NO: 3626313 - DNA, 25 bp, Homo sapien
tgccatctgttgcattgcgagggtt

SEQ ID NO: 3626314 - DNA, 25 bp, Homo sapien
gttgcattgcgagggttgagcagga

SEQ ID NO: 3626315 - DNA, 25 bp, Homo sapien
ccaggtgccatctgttgcattgcga

SEQ ID NO: 3626316 - DNA, 25 bp, Homo sapien
tgtgaggcttcaagataaggcagag

SEQ ID NO: 3626317 - DNA, 25 bp, Homo sapien
ccccattaagggtttgatgtgtttg

SEQ ID NO: 3626318 - DNA, 25 bp, Homo sapien
tgctgctgagttaaaaagcaccagc

SEQ ID NO: 3626319 - DNA, 25 bp, Homo sapien
agagttcttgtctccgctgcagtgg

SEQ ID NO: 3626320 - DNA, 25 bp, Homo sapien
ttcagggatgaacgccacacaaggt

SEQ ID NO: 3626321 - DNA, 25 bp, Homo sapien
tacacgcacaggagagttcgggaga

SEQ ID NO: 3626322 - DNA, 25 bp, Homo sapien
ttcgggagagctccaagtgcagtct

SEQ ID NO: 3626323 - DNA, 25 bp, Homo sapien
ccaatggatcagcagggaaggaacc

SEQ ID NO: 3626324 - DNA, 25 bp, Homo sapien
cttcaggagggatttgtgtaaacaa

SEQ ID NO: 3626325 - DNA, 25 bp, Homo sapien
atgacgggaggatgtagacaagccc

SEQ ID NO: 3626326 - DNA, 25 bp, Homo sapien
caagggggcatgacgggaggatgta

SEQ ID NO: 3626327 - DNA, 25 bp, Homo sapien
cccagggtgaagacaaggagggaca

SEQ ID NO: 3626328 - DNA, 25 bp, Homo sapien
ccagggtgaagacaaggagggacaa

SEQ ID NO: 3626329 - DNA, 25 bp, Homo sapien
tcctgtgggatgtagacaccctgga

SEQ ID NO: 3626330 - DNA, 25 bp, Homo sapien
tctctaccacgacgacacgaaggaa

SEQ ID NO: 3626331 - DNA, 25 bp, Homo sapien
taggcgtctctaagtgacaagtgca

SEQ ID NO: 3626332 - DNA, 25 bp, Homo sapien
catacaccctccataatcctgtggg

SEQ ID NO: 3626333 - DNA, 25 bp, Homo sapien
ccttcccgtgcctttctgaacaaga

SEQ ID NO: 3626334 - DNA, 25 bp, Homo sapien
ctgatgtcttgcctaggtgcaaagt

SEQ ID NO: 3626335 - DNA, 25 bp, Homo sapien
gatgtcttgcctaggtgcaaagttg

SEQ ID NO: 3626336 - DNA, 25 bp, Homo sapien
tgtcttgcctaggtgcaaagttgag

SEQ ID NO: 3626337 - DNA, 25 bp, Homo sapien
actgatgtcttgcctaggtgcaaag

SEQ ID NO: 3626338 - DNA, 25 bp, Homo sapien
tcggctgctagtcccgccaggtctt

SEQ ID NO: 3626339 - DNA, 25 bp, Homo sapien
gctagtcccgccaggtcttcattat

SEQ ID NO: 3626340 - DNA, 25 bp, Homo sapien
ttgtcggctgctagtcccgccaggt

SEQ ID NO: 3626341 - DNA, 25 bp, Homo sapien
atttttgtcggctgctagtcccgcc

SEQ ID NO: 3626342 - DNA, 25 bp, Homo sapien
ttggatgtcccacttaaagccgcgg

SEQ ID NO: 3626343 - DNA, 25 bp, Homo sapien
ttccatacacatgcaccgggctttc

SEQ ID NO: 3626344 - DNA, 25 bp, Homo sapien
gatgctcgcgctgcagcgcaagttg

SEQ ID NO: 3626345 - DNA, 25 bp, Homo sapien
ttctctgggcagaaccgcggagagc

SEQ ID NO: 3626346 - DNA, 25 bp, Homo sapien
gtaattagggtatgccgtaatccca

SEQ ID NO: 3626347 - DNA, 25 bp, Homo sapien
taagcacttactccaggcctgatgt

SEQ ID NO: 3626348 - DNA, 25 bp, Homo sapien
tccaggcatgtagcgtcatctccat

SEQ ID NO: 3626349 - DNA, 25 bp, Homo sapien
tgagagccttctctatgccaggtgc

SEQ ID NO: 3626350 - DNA, 25 bp, Homo sapien
caaagctttcgatttggtttgtagc

SEQ ID NO: 3626351 - DNA, 25 bp, Homo sapien
gtagcagcagaactccttcctttca

SEQ ID NO: 3626352 - DNA, 25 bp, Homo sapien
tgagcagaaaaccggcatccgctcc

SEQ ID NO: 3626353 - DNA, 25 bp, Homo sapien
agaaaaccggcatccgctccgagag

SEQ ID NO: 3626354 - DNA, 25 bp, Homo sapien
tgattgaagtgaggccttcgagccc

SEQ ID NO: 3626355 - DNA, 25 bp, Homo sapien
ctgattgaagtgaggccttcgagcc

SEQ ID NO: 3626356 - DNA, 25 bp, Homo sapien
ttgggaacagtcgagctagtctgga

SEQ ID NO: 3626357 - DNA, 25 bp, Homo sapien
ccggctccggacaagcgcagcttgg

SEQ ID NO: 3626358 - DNA, 25 bp, Homo sapien
gtggaaaggcgacaccgcagggcgg

SEQ ID NO: 3626359 - DNA, 25 bp, Homo sapien
aggcaggaaggcgtggaaaggcgac

SEQ ID NO: 3626360 - DNA, 25 bp, Homo sapien
ctgcagcccgggagcaaagccgaag

SEQ ID NO: 3626361 - DNA, 25 bp, Homo sapien
agcccgggagcaaagccgaagcccg

SEQ ID NO: 3626362 - DNA, 25 bp, Homo sapien
tccagccccgtgacgacgctgcgcg

SEQ ID NO: 3626363 - DNA, 25 bp, Homo sapien
cagccccgtgacgacgctgcgcgcg

SEQ ID NO: 3626364 - DNA, 25 bp, Homo sapien
cccgtgacgacgctgcgcgcgcagc

SEQ ID NO: 3626365 - DNA, 25 bp, Homo sapien
cgtgacgacgctgcgcgcgcagcag

SEQ ID NO: 3626366 - DNA, 25 bp, Homo sapien
caggacccccgaaggagtctgttgt

SEQ ID NO: 3626367 - DNA, 25 bp, Homo sapien
gctgcaggacccccgaaggagtctg

SEQ ID NO: 3626368 - DNA, 25 bp, Homo sapien
ggacccccgaaggagtctgttgtca

SEQ ID NO: 3626369 - DNA, 25 bp, Homo sapien
tgcaggacccccgaaggagtctgtt

SEQ ID NO: 3626370 - DNA, 25 bp, Homo sapien
ctgctcccacgaaacagtcatgggc

SEQ ID NO: 3626371 - DNA, 25 bp, Homo sapien
cgtccacctgctcccacgaaacagt

SEQ ID NO: 3626372 - DNA, 25 bp, Homo sapien
atgctcccccagacgcagccgtcca

SEQ ID NO: 3626373 - DNA, 25 bp, Homo sapien
cacctgctcccacgaaacagtcatg

SEQ ID NO: 3626374 - DNA, 25 bp, Homo sapien
atataacgttctaacaggacggagg

SEQ ID NO: 3626375 - DNA, 25 bp, Homo sapien
catataacgttctaacaggacggag

SEQ ID NO: 3626376 - DNA, 25 bp, Homo sapien
tctcatataacgttctaacaggacg

SEQ ID NO: 3626377 - DNA, 25 bp, Homo sapien
tcatataacgttctaacaggacgga

SEQ ID NO: 3626378 - DNA, 25 bp, Homo sapien
atcagcttcatgacacctgtgctgg

SEQ ID NO: 3626379 - DNA, 25 bp, Homo sapien
ggcttggagctgatggctcaatgca

SEQ ID NO: 3626380 - DNA, 25 bp, Homo sapien
cccctcccacgccagagaagccatc

SEQ ID NO: 3626381 - DNA, 25 bp, Homo sapien
agctgatggctcaatgcaccttccc

SEQ ID NO: 3626382 - DNA, 25 bp, Homo sapien
tcagggagctccagaaacggcgttt

SEQ ID NO: 3626383 - DNA, 25 bp, Homo sapien
gtcctccacttttggcagcagcctt

SEQ ID NO: 3626384 - DNA, 25 bp, Homo sapien
gagctccagaaacggcgttttcttc

SEQ ID NO: 3626385 - DNA, 25 bp, Homo sapien
gcctccagctttaagtcctccactt

SEQ ID NO: 3626386 - DNA, 25 bp, Homo sapien
ggcccacacagacagctcggatcaa

SEQ ID NO: 3626387 - DNA, 25 bp, Homo sapien
cacagacagctcggatcaaactcat

SEQ ID NO: 3626388 - DNA, 25 bp, Homo sapien
ccacacagacagctcggatcaaact

SEQ ID NO: 3626389 - DNA, 25 bp, Homo sapien
cacacagacagctcggatcaaactc

SEQ ID NO: 3626390 - DNA, 25 bp, Homo sapien
ctgtctgctccagccttgctggatg

SEQ ID NO: 3626391 - DNA, 25 bp, Homo sapien
tctgctccagccttgctggatgagg

SEQ ID NO: 3626392 - DNA, 25 bp, Homo sapien
tgctccagccttgctggatgaggga

SEQ ID NO: 3626393 - DNA, 25 bp, Homo sapien
ctggatgagggaggagcaggcctgc

SEQ ID NO: 3626394 - DNA, 25 bp, Homo sapien
tccaggggaggtcgttccttgctgc

SEQ ID NO: 3626395 - DNA, 25 bp, Homo sapien
gtccaggggaggtcgttccttgctg

SEQ ID NO: 3626396 - DNA, 25 bp, Homo sapien
ccaggggaggtcgttccttgctgcc

SEQ ID NO: 3626397 - DNA, 25 bp, Homo sapien
gtccttgaccaccaggatggaaagg

SEQ ID NO: 3626398 - DNA, 25 bp, Homo sapien
tgctctccacaccactcgcccacag

SEQ ID NO: 3626399 - DNA, 25 bp, Homo sapien
gctctccacaccactcgcccacagg

SEQ ID NO: 3626400 - DNA, 25 bp, Homo sapien
tctccacaccactcgcccacaggca

SEQ ID NO: 3626401 - DNA, 25 bp, Homo sapien
ctccacaccactcgcccacaggcag

SEQ ID NO: 3626402 - DNA, 25 bp, Homo sapien
aacatgcgaactcagcatcaatgag

SEQ ID NO: 3626403 - DNA, 25 bp, Homo sapien
catgcgaactcagcatcaatgagtt

SEQ ID NO: 3626404 - DNA, 25 bp, Homo sapien
cacaaacatgcgaactcagcatcaa

SEQ ID NO: 3626405 - DNA, 25 bp, Homo sapien
ttcccacaaacatgcgaactcagca

SEQ ID NO: 3626406 - DNA, 25 bp, Homo sapien
aggttggagaagctccactttgctg

SEQ ID NO: 3626407 - DNA, 25 bp, Homo sapien
gctctgggactctgattcatggtgc

SEQ ID NO: 3626408 - DNA, 25 bp, Homo sapien
ggactctgattcatggtgctgctcc

SEQ ID NO: 3626409 - DNA, 25 bp, Homo sapien
gaagtagatgcaggacctgggtccc

SEQ ID NO: 3626410 - DNA, 25 bp, Homo sapien
ttgcatgacccgctcagccttcatt

SEQ ID NO: 3626411 - DNA, 25 bp, Homo sapien
ttcattttcgggacctccaggcctg

SEQ ID NO: 3626412 - DNA, 25 bp, Homo sapien
aggtttcccttgcatgacccgctca

SEQ ID NO: 3626413 - DNA, 25 bp, Homo sapien
tgcccacgaacaggtgcctatgaag

SEQ ID NO: 3626414 - DNA, 25 bp, Homo sapien
cccctctcgggatggaaaatgaatt

SEQ ID NO: 3626415 - DNA, 25 bp, Homo sapien
agtttcccaactcgccgagagcagc

SEQ ID NO: 3626416 - DNA, 25 bp, Homo sapien
ttccggctggttgcggcgaagtttc

SEQ ID NO: 3626417 - DNA, 25 bp, Homo sapien
tgaatttcgagcatcgctgcggagc

SEQ ID NO: 3626418 - DNA, 25 bp, Homo sapien
tctctttattcgcagttcagcaaga

SEQ ID NO: 3626419 - DNA, 25 bp, Homo sapien
gcaagaagactccagtgctgacact

SEQ ID NO: 3626420 - DNA, 25 bp, Homo sapien
tgacactgtcgcatgaagagctcac

SEQ ID NO: 3626421 - DNA, 25 bp, Homo sapien
gcacatctctttattcgcagttcag

SEQ ID NO: 3626422 - DNA, 25 bp, Homo sapien
tcaggtcaagcagagaaggatgttc

SEQ ID NO: 3626423 - DNA, 25 bp, Homo sapien
acaggttgctgctggaccctgaagg

SEQ ID NO: 3626424 - DNA, 25 bp, Homo sapien
atgttcttctgatacaggttgctgc

SEQ ID NO: 3626425 - DNA, 25 bp, Homo sapien
tacaggttgctgctggaccctgaag

SEQ ID NO: 3626426 - DNA, 25 bp, Homo sapien
gatgatgactccctgtaaccccact

SEQ ID NO: 3626427 - DNA, 25 bp, Homo sapien
tgtaaccccactgttctccgcgttc

SEQ ID NO: 3626428 - DNA, 25 bp, Homo sapien
caaggggtagggctgatgatgactc

SEQ ID NO: 3626429 - DNA, 25 bp, Homo sapien
ttggccaaggggtagggctgatgat

SEQ ID NO: 3626430 - DNA, 25 bp, Homo sapien
aggagggtctcatactgaagtcctg

SEQ ID NO: 3626431 - DNA, 25 bp, Homo sapien
tgagctgagacatctgtaagacggg

SEQ ID NO: 3626432 - DNA, 25 bp, Homo sapien
tgagacatctgtaagacgggatatg

SEQ ID NO: 3626433 - DNA, 25 bp, Homo sapien
ggagggtctcatactgaagtcctga

SEQ ID NO: 3626434 - DNA, 25 bp, Homo sapien
ttggcacttggaagatacgagtgtg

SEQ ID NO: 3626435 - DNA, 25 bp, Homo sapien
acttggcacttggaagatacgagtg

SEQ ID NO: 3626436 - DNA, 25 bp, Homo sapien
ctgctctattcgatctcgcatgatg

SEQ ID NO: 3626437 - DNA, 25 bp, Homo sapien
cgcatgatgtcctctgtcatctcac

SEQ ID NO: 3626438 - DNA, 25 bp, Homo sapien
cattcgtacattggcatatgggatc

SEQ ID NO: 3626439 - DNA, 25 bp, Homo sapien
tgcaaaaggccattcgtacattggc

SEQ ID NO: 3626440 - DNA, 25 bp, Homo sapien
aaggccattcgtacattggcatatg

SEQ ID NO: 3626441 - DNA, 25 bp, Homo sapien
cgtacattggcatatgggatctgag

SEQ ID NO: 3626442 - DNA, 25 bp, Homo sapien
ctccatcttatgaactggattcgtg

SEQ ID NO: 3626443 - DNA, 25 bp, Homo sapien
tcagacttagagaggtggtgcttca

SEQ ID NO: 3626444 - DNA, 25 bp, Homo sapien
ttctctcctctaggacctcttggct

SEQ ID NO: 3626445 - DNA, 25 bp, Homo sapien
tgaactggattcgtgttctctcctc

SEQ ID NO: 3626446 - DNA, 25 bp, Homo sapien
ggcaaggtctcaaactctcatttac

SEQ ID NO: 3626447 - DNA, 25 bp, Homo sapien
gctactcccaggcaaggtctcaaac

SEQ ID NO: 3626448 - DNA, 25 bp, Homo sapien
cgctactcccaggcaaggtctcaaa

SEQ ID NO: 3626449 - DNA, 25 bp, Homo sapien
ccaggcaaggtctcaaactctcatt

SEQ ID NO: 3626450 - DNA, 25 bp, Homo sapien
agcttttcctttatgccccgagaag

SEQ ID NO: 3626451 - DNA, 25 bp, Homo sapien
tcctttatgccccgagaagcctctt

SEQ ID NO: 3626452 - DNA, 25 bp, Homo sapien
catcttctcccttacaccctgggaa

SEQ ID NO: 3626453 - DNA, 25 bp, Homo sapien
gaggggagtcagtggacatcttctc

SEQ ID NO: 3626454 - DNA, 25 bp, Homo sapien
aagggtgtctggcaatgaacttgag

SEQ ID NO: 3626455 - DNA, 25 bp, Homo sapien
agtgtcctccagcacatgtgaagaa

SEQ ID NO: 3626456 - DNA, 25 bp, Homo sapien
gaaattagactcaaatctaggaagg

SEQ ID NO: 3626457 - DNA, 25 bp, Homo sapien
ggtgtctggcaatgaacttgagttc

SEQ ID NO: 3626458 - DNA, 25 bp, Homo sapien
gcctcactttccacaacgtcaatgt

SEQ ID NO: 3626459 - DNA, 25 bp, Homo sapien
caaccaatgatgtagtacagacaca

SEQ ID NO: 3626460 - DNA, 25 bp, Homo sapien
tttcaaccaatgatgtagtacagac

SEQ ID NO: 3626461 - DNA, 25 bp, Homo sapien
aatgatgtagtacagacacagcctc

SEQ ID NO: 3626462 - DNA, 25 bp, Homo sapien
cctttccgagcaagaatatacacaa

SEQ ID NO: 3626463 - DNA, 25 bp, Homo sapien
tacacaatccatgtcgtaattatca

SEQ ID NO: 3626464 - DNA, 25 bp, Homo sapien
tattggtaggaagggaagccctaca

SEQ ID NO: 3626465 - DNA, 25 bp, Homo sapien
gggaagccctacacctttccgagca

SEQ ID NO: 3626466 - DNA, 25 bp, Homo sapien
ctttgaatgtataccaggccccctt

SEQ ID NO: 3626467 - DNA, 25 bp, Homo sapien
cacattcagaggacacgacctccat

SEQ ID NO: 3626468 - DNA, 25 bp, Homo sapien
ggtccacattcagaggacacgacct

SEQ ID NO: 3626469 - DNA, 25 bp, Homo sapien
aggtccacattcagaggacacgacc

SEQ ID NO: 3626470 - DNA, 25 bp, Homo sapien
tccacattcagaggacacgacctcc

SEQ ID NO: 3626471 - DNA, 25 bp, Homo sapien
tgcttctccgagtgcgtgtcaccga

SEQ ID NO: 3626472 - DNA, 25 bp, Homo sapien
cagtctcctcctcgtagtaagcgga

SEQ ID NO: 3626473 - DNA, 25 bp, Homo sapien
catgagtgtgcgtaagataatccaa

SEQ ID NO: 3626474 - DNA, 25 bp, Homo sapien
cgggcattcatggtggcgtcctcaa

SEQ ID NO: 3626475 - DNA, 25 bp, Homo sapien
catatatatgcaggtgcgcgcacac

SEQ ID NO: 3626476 - DNA, 25 bp, Homo sapien
cagtttaacttgcaacactcccggg

SEQ ID NO: 3626477 - DNA, 25 bp, Homo sapien
aaataccagcgagtggagcctggcg

SEQ ID NO: 3626478 - DNA, 25 bp, Homo sapien
tataaggctttggtacagcaccgat

SEQ ID NO: 3626479 - DNA, 25 bp, Homo sapien
caacagaacagtaatgggagcctcc

SEQ ID NO: 3626480 - DNA, 25 bp, Homo sapien
gaccgcccaaagtggatcaccatga

SEQ ID NO: 3626481 - DNA, 25 bp, Homo sapien
tctaccgccaagaagagtggaagcg

SEQ ID NO: 3626482 - DNA, 25 bp, Homo sapien
caaggcatgagctagtatcccagac

SEQ ID NO: 3626483 - DNA, 25 bp, Homo sapien
gaaccaattctgtagatttatataa

SEQ ID NO: 3626484 - DNA, 25 bp, Homo sapien
atacaccacacgcaacatacacaca

SEQ ID NO: 3626485 - DNA, 25 bp, Homo sapien
gcatacaccacacgcaacatacaca

SEQ ID NO: 3626486 - DNA, 25 bp, Homo sapien
aagcatacaccacacgcaacataca

SEQ ID NO: 3626487 - DNA, 25 bp, Homo sapien
agcatacaccacacgcaacatacac

SEQ ID NO: 3626488 - DNA, 25 bp, Homo sapien
acaggtgttgcccagtctccaatcc

SEQ ID NO: 3626489 - DNA, 25 bp, Homo sapien
agacacccgctctggcaaaagaggg

SEQ ID NO: 3626490 - DNA, 25 bp, Homo sapien
gacccacaggtggaaggtgtgccca

SEQ ID NO: 3626491 - DNA, 25 bp, Homo sapien
ccttggcagacggaggaggacacac

SEQ ID NO: 3626492 - DNA, 25 bp, Homo sapien
catgtcctgggtcatcgtggtccac

SEQ ID NO: 3626493 - DNA, 25 bp, Homo sapien
gaatcgctgtctggtcttccggaag

SEQ ID NO: 3626494 - DNA, 25 bp, Homo sapien
ggcacaagtctgagagccgggcaaa

SEQ ID NO: 3626495 - DNA, 25 bp, Homo sapien
tggtccacactgttgagaatcgctg

SEQ ID NO: 3626496 - DNA, 25 bp, Homo sapien
cttttccacctgcatttgttccggg

SEQ ID NO: 3626497 - DNA, 25 bp, Homo sapien
gaggctgggcccaggctgcagtgta

SEQ ID NO: 3626498 - DNA, 25 bp, Homo sapien
cagaggctgggcccaggctgcagtg

SEQ ID NO: 3626499 - DNA, 25 bp, Homo sapien
ctgcagaggctgggcccaggctgca

SEQ ID NO: 3626500 - DNA, 25 bp, Homo sapien
tgcagaggctgggcccaggctgcag

SEQ ID NO: 3626501 - DNA, 25 bp, Homo sapien
ggggtcctgtcatgcctttgttcac

SEQ ID NO: 3626502 - DNA, 25 bp, Homo sapien
ccacatggggtcctgtcatgccttt

SEQ ID NO: 3626503 - DNA, 25 bp, Homo sapien
ggtccacatggggtcctgtcatgcc

SEQ ID NO: 3626504 - DNA, 25 bp, Homo sapien
cctgaggtccacatggggtcctgtc

SEQ ID NO: 3626505 - DNA, 25 bp, Homo sapien
cattttctgaagctgtaggcacaga

SEQ ID NO: 3626506 - DNA, 25 bp, Homo sapien
gaaaagtttccaaaggcacacatgc

SEQ ID NO: 3626507 - DNA, 25 bp, Homo sapien
gagatagagttatgtgcaaggtgaa

SEQ ID NO: 3626508 - DNA, 25 bp, Homo sapien
tgctgaaaacgacagttctccaggt

SEQ ID NO: 3626509 - DNA, 25 bp, Homo sapien
gcttctttatccgttggtatttcag

SEQ ID NO: 3626510 - DNA, 25 bp, Homo sapien
tttctttgacttcgaagagcccttg

SEQ ID NO: 3626511 - DNA, 25 bp, Homo sapien
tttatccgttggtatttcagagcct

SEQ ID NO: 3626512 - DNA, 25 bp, Homo sapien
ttcgaagagcccttggatgactttt

SEQ ID NO: 3626513 - DNA, 25 bp, Homo sapien
caattcagctcccggatgtgtgagg

SEQ ID NO: 3626514 - DNA, 25 bp, Homo sapien
gccacaattcagctcccggatgtgt

SEQ ID NO: 3626515 - DNA, 25 bp, Homo sapien
ccacaattcagctcccggatgtgtg

SEQ ID NO: 3626516 - DNA, 25 bp, Homo sapien
cacaattcagctcccggatgtgtga

SEQ ID NO: 3626517 - DNA, 25 bp, Homo sapien
ctggaagaaagccaagtagctgacc

SEQ ID NO: 3626518 - DNA, 25 bp, Homo sapien
ggaagaaagccaagtagctgaccca

SEQ ID NO: 3626519 - DNA, 25 bp, Homo sapien
tggaagaaagccaagtagctgaccc

SEQ ID NO: 3626520 - DNA, 25 bp, Homo sapien
gaagaaagccaagtagctgacccac

SEQ ID NO: 3626521 - DNA, 25 bp, Homo sapien
ccttctcatcctcaactgaggcttc

SEQ ID NO: 3626522 - DNA, 25 bp, Homo sapien
aagagatctgccctctgggccacgg

SEQ ID NO: 3626523 - DNA, 25 bp, Homo sapien
gcctcagaacctggcagaagcttgt

SEQ ID NO: 3626524 - DNA, 25 bp, Homo sapien
tgattatacaccgatggaggcaggg

SEQ ID NO: 3626525 - DNA, 25 bp, Homo sapien
tcatagacgggccatagcaagggaa

SEQ ID NO: 3626526 - DNA, 25 bp, Homo sapien
tgagaacgcacgtggacaagagctg

SEQ ID NO: 3626527 - DNA, 25 bp, Homo sapien
tacatatggaccaaaggaacaggag

SEQ ID NO: 3626528 - DNA, 25 bp, Homo sapien
acaggagctaagaattggctcggcc

SEQ ID NO: 3626529 - DNA, 25 bp, Homo sapien
tgaggacagggcatcactaggctca

SEQ ID NO: 3626530 - DNA, 25 bp, Homo sapien
ccgggagagaaacgatggtccctca

SEQ ID NO: 3626531 - DNA, 25 bp, Homo sapien
tgagctcataaacgctgcctgacag

SEQ ID NO: 3626532 - DNA, 25 bp, Homo sapien
cagtgaaaggagagcgggcttctct

SEQ ID NO: 3626533 - DNA, 25 bp, Homo sapien
ggtgagagctagtctagggctccca

SEQ ID NO: 3626534 - DNA, 25 bp, Homo sapien
cctctgggctgctgacaattttata

SEQ ID NO: 3626535 - DNA, 25 bp, Homo sapien
ccacaattccagggcctctgggctg

SEQ ID NO: 3626536 - DNA, 25 bp, Homo sapien
cagggcctctgggctgctgacaatt

SEQ ID NO: 3626537 - DNA, 25 bp, Homo sapien
cacaattccagggcctctgggctgc

SEQ ID NO: 3626538 - DNA, 25 bp, Homo sapien
gatgcaaagcagatctcgggtgttc

SEQ ID NO: 3626539 - DNA, 25 bp, Homo sapien
gatgacatttcgctacaaagcccca

SEQ ID NO: 3626540 - DNA, 25 bp, Homo sapien
catggtttggatcccctgtccagga

SEQ ID NO: 3626541 - DNA, 25 bp, Homo sapien
ggtaaagaaatgtcagggcagtcct

SEQ ID NO: 3626542 - DNA, 25 bp, Homo sapien
tgcgggtgggaggtgaccttggact

SEQ ID NO: 3626543 - DNA, 25 bp, Homo sapien
ctccacaggcggctacatcgagaag

SEQ ID NO: 3626544 - DNA, 25 bp, Homo sapien
caggcggctacatcgagaagagaga

SEQ ID NO: 3626545 - DNA, 25 bp, Homo sapien
ggctacatcgagaagagagaccaaa

SEQ ID NO: 3626546 - DNA, 25 bp, Homo sapien
gtcgcgggagctggtctgtctctct

SEQ ID NO: 3626547 - DNA, 25 bp, Homo sapien
ctctcaggcgggctggtcgcgggag

SEQ ID NO: 3626548 - DNA, 25 bp, Homo sapien
ggaataccagctgctacagtttaga

SEQ ID NO: 3626549 - DNA, 25 bp, Homo sapien
ctgctacagtttagagagtgctctc

SEQ ID NO: 3626550 - DNA, 25 bp, Homo sapien
tagacacgaggtgtgtgggcaaccc

SEQ ID NO: 3626551 - DNA, 25 bp, Homo sapien
ccgatgccaggaccgcagggactcg

SEQ ID NO: 3626552 - DNA, 25 bp, Homo sapien
tcactagggctgctaagggccagga

SEQ ID NO: 3626553 - DNA, 25 bp, Homo sapien
gagagccgtcaactccaagagggac

SEQ ID NO: 3626554 - DNA, 25 bp, Homo sapien
ggtacatgtccgtctcctcggcgaa

SEQ ID NO: 3626555 - DNA, 25 bp, Homo sapien
cacttgatgtaaactgggctcggcg

SEQ ID NO: 3626556 - DNA, 25 bp, Homo sapien
ctctcgggcacatcacagggtggca

SEQ ID NO: 3626557 - DNA, 25 bp, Homo sapien
tacttcttgctgctgatggcccgct

SEQ ID NO: 3626558 - DNA, 25 bp, Homo sapien
gactccaggctcttcctgcagtggg

SEQ ID NO: 3626559 - DNA, 25 bp, Homo sapien
tccaggctcttcctgcagtgggtga

SEQ ID NO: 3626560 - DNA, 25 bp, Homo sapien
cagtgggtgatggagagtggagggt

SEQ ID NO: 3626561 - DNA, 25 bp, Homo sapien
aggctcttcctgcagtgggtgatgg

SEQ ID NO: 3626562 - DNA, 25 bp, Homo sapien
catcctcggtcaggtccggctgcgg

SEQ ID NO: 3626563 - DNA, 25 bp, Homo sapien
gcttgttgacaaagcaggcagccag

SEQ ID NO: 3626564 - DNA, 25 bp, Homo sapien
cgcttgagcttacgcttgcgctgct

SEQ ID NO: 3626565 - DNA, 25 bp, Homo sapien
agatggtagctacgattcccgccag

SEQ ID NO: 3626566 - DNA, 25 bp, Homo sapien
tcagatcctgcatgacggccagaac

SEQ ID NO: 3626567 - DNA, 25 bp, Homo sapien
gagacgccggcgatgttgctgggct

SEQ ID NO: 3626568 - DNA, 25 bp, Homo sapien
agaacccggaactcataccacgtgt

SEQ ID NO: 3626569 - DNA, 25 bp, Homo sapien
tgctgggctcgctgatcagatcctg

SEQ ID NO: 3626570 - DNA, 25 bp, Homo sapien
agccccagggacaatacccagtcag

SEQ ID NO: 3626571 - DNA, 25 bp, Homo sapien
gacaatacccagtcagccgagggac

SEQ ID NO: 3626572 - DNA, 25 bp, Homo sapien
ccagggacaatacccagtcagccga

SEQ ID NO: 3626573 - DNA, 25 bp, Homo sapien
tgcagccccagggacaatacccagt

SEQ ID NO: 3626574 - DNA, 25 bp, Homo sapien
aggagtccaggccttggtagcgagt

SEQ ID NO: 3626575 - DNA, 25 bp, Homo sapien
cctgtgggccatgatctgaggagtc

SEQ ID NO: 3626576 - DNA, 25 bp, Homo sapien
cctcagtagaacacaggtccccgct

SEQ ID NO: 3626577 - DNA, 25 bp, Homo sapien
ggccatgatctgaggagtccaggcc

SEQ ID NO: 3626578 - DNA, 25 bp, Homo sapien
cgctctgcgacacggaactccatga

SEQ ID NO: 3626579 - DNA, 25 bp, Homo sapien
ctgagtccgattggctatgaggcac

SEQ ID NO: 3626580 - DNA, 25 bp, Homo sapien
tgtgacagatccttggcaaagaact

SEQ ID NO: 3626581 - DNA, 25 bp, Homo sapien
gcaaagaactctccttcggtgccgg

SEQ ID NO: 3626582 - DNA, 25 bp, Homo sapien
cagctgggtcctggcggcactggca

SEQ ID NO: 3626583 - DNA, 25 bp, Homo sapien
tgaactggtacgctgtctcaggctc

SEQ ID NO: 3626584 - DNA, 25 bp, Homo sapien
acctcactgaaggcgctggttccca

SEQ ID NO: 3626585 - DNA, 25 bp, Homo sapien
gccaggacgctgaactggtacgctg

SEQ ID NO: 3626586 - DNA, 25 bp, Homo sapien
ccaggcatctccaaagacagcttga

SEQ ID NO: 3626587 - DNA, 25 bp, Homo sapien
cctggacacctaggcgctgagcagc

SEQ ID NO: 3626588 - DNA, 25 bp, Homo sapien
tgagcagcaccggtctcccagcagc

SEQ ID NO: 3626589 - DNA, 25 bp, Homo sapien
gacagcttgaccacaccaaatgtcc

SEQ ID NO: 3626590 - DNA, 25 bp, Homo sapien
ctctccacaccagtttctgtggcct

SEQ ID NO: 3626591 - DNA, 25 bp, Homo sapien
tgctcgtagcctccatcatagcctg

SEQ ID NO: 3626592 - DNA, 25 bp, Homo sapien
gctcgtagcctccatcatagcctgg

SEQ ID NO: 3626593 - DNA, 25 bp, Homo sapien
ctcgtagcctccatcatagcctggt

SEQ ID NO: 3626594 - DNA, 25 bp, Homo sapien
catggagacctggacccggacactg

SEQ ID NO: 3626595 - DNA, 25 bp, Homo sapien
aggacacgttggcagttgtcatgga

SEQ ID NO: 3626596 - DNA, 25 bp, Homo sapien
tggacccggacactgcccggggcat

SEQ ID NO: 3626597 - DNA, 25 bp, Homo sapien
ccaggacacgttggcagttgtcatg

SEQ ID NO: 3626598 - DNA, 25 bp, Homo sapien
gaagcgcatggcagcggagcacaat

SEQ ID NO: 3626599 - DNA, 25 bp, Homo sapien
gctgaagcgcatggcagcggagcac

SEQ ID NO: 3626600 - DNA, 25 bp, Homo sapien
aagcgcatggcagcggagcacaata

SEQ ID NO: 3626601 - DNA, 25 bp, Homo sapien
tgaagcgcatggcagcggagcacaa

SEQ ID NO: 3626602 - DNA, 25 bp, Homo sapien
cacgttggtggcgacacattcccac

SEQ ID NO: 3626603 - DNA, 25 bp, Homo sapien
ttactcagggcacggaactgcaggc

SEQ ID NO: 3626604 - DNA, 25 bp, Homo sapien
tggcagtgatgctcgtgaccacgtt

SEQ ID NO: 3626605 - DNA, 25 bp, Homo sapien
tggtcctccttactcagggcacgga

SEQ ID NO: 3626606 - DNA, 25 bp, Homo sapien
agcctggtagcaccgtgaaataggg

SEQ ID NO: 3626607 - DNA, 25 bp, Homo sapien
cagcctggtagcaccgtgaaatagg

SEQ ID NO: 3626608 - DNA, 25 bp, Homo sapien
agcacaggggataagtagctcccgg

SEQ ID NO: 3626609 - DNA, 25 bp, Homo sapien
acaggggataagtagctcccggccg

SEQ ID NO: 3626610 - DNA, 25 bp, Homo sapien
ggcagactggcccatggtccccaga

SEQ ID NO: 3626611 - DNA, 25 bp, Homo sapien
tcgaatggagccatcctccatcagg

SEQ ID NO: 3626612 - DNA, 25 bp, Homo sapien
ctgtggcctcctcaattcgaatgga

SEQ ID NO: 3626613 - DNA, 25 bp, Homo sapien
tcaggacaagcctcgcaggggcaga

SEQ ID NO: 3626614 - DNA, 25 bp, Homo sapien
gtccacagggcagcggatgtagcca

SEQ ID NO: 3626615 - DNA, 25 bp, Homo sapien
tgttccacttgaccacggtggccgg

SEQ ID NO: 3626616 - DNA, 25 bp, Homo sapien
ggacggccgtccttgttccacttga

SEQ ID NO: 3626617 - DNA, 25 bp, Homo sapien
ccccacgggcacgtaaatcacaggg

SEQ ID NO: 3626618 - DNA, 25 bp, Homo sapien
gatgatcagggtcccatcgattagg

SEQ ID NO: 3626619 - DNA, 25 bp, Homo sapien
acacaggtgtacttccccgagtcct

SEQ ID NO: 3626620 - DNA, 25 bp, Homo sapien
actgcacggtcaggtacgccgaggc

SEQ ID NO: 3626621 - DNA, 25 bp, Homo sapien
gagtcctccggcttcacccggaaga

SEQ ID NO: 3626622 - DNA, 25 bp, Homo sapien
tctgaaagtagacgttctcgtcctg

SEQ ID NO: 3626623 - DNA, 25 bp, Homo sapien
gagatgttgacggtgatgttctcag

SEQ ID NO: 3626624 - DNA, 25 bp, Homo sapien
tgaggttgcccggatacgcctctgc

SEQ ID NO: 3626625 - DNA, 25 bp, Homo sapien
tctgcccggcaggtgagcagagcat

SEQ ID NO: 3626626 - DNA, 25 bp, Homo sapien
gacaagcaggtgagtcgtgtggaca

SEQ ID NO: 3626627 - DNA, 25 bp, Homo sapien
gtcactgtcaggctgccgtcactca

SEQ ID NO: 3626628 - DNA, 25 bp, Homo sapien
tcccgactgaccgatgtcactgtca

SEQ ID NO: 3626629 - DNA, 25 bp, Homo sapien
ctgaatgctgtacgctcggcaggtg

SEQ ID NO: 3626630 - DNA, 25 bp, Homo sapien
atttcccactagcaccgaggagcgt

SEQ ID NO: 3626631 - DNA, 25 bp, Homo sapien
ggttcccaaaagctgtgcaggtcat

SEQ ID NO: 3626632 - DNA, 25 bp, Homo sapien
gcttggggttcccaaaagctgtgca

SEQ ID NO: 3626633 - DNA, 25 bp, Homo sapien
ctggtatttcccactagcaccgagg

SEQ ID NO: 3626634 - DNA, 25 bp, Homo sapien
ccttggcctcgatgtactggggggg

SEQ ID NO: 3626635 - DNA, 25 bp, Homo sapien
accctccttggcctcgatgtactgg

SEQ ID NO: 3626636 - DNA, 25 bp, Homo sapien
tggcctcgatgtactgggggggtgt

SEQ ID NO: 3626637 - DNA, 25 bp, Homo sapien
ggtgatactaccaccctccttggcc

SEQ ID NO: 3626638 - DNA, 25 bp, Homo sapien
tgcggctctgcggaatgcaaggaca

SEQ ID NO: 3626639 - DNA, 25 bp, Homo sapien
tgaaggacacgccatcagccacatc

SEQ ID NO: 3626640 - DNA, 25 bp, Homo sapien
accacaaagatgaaggacacgccat

SEQ ID NO: 3626641 - DNA, 25 bp, Homo sapien
agccacatcgctgccctgcaacaac

SEQ ID NO: 3626642 - DNA, 25 bp, Homo sapien
tgcagaaacatacaccttgcacgtc

SEQ ID NO: 3626643 - DNA, 25 bp, Homo sapien
acgtcctcgcatgcgtcatcgcatg

SEQ ID NO: 3626644 - DNA, 25 bp, Homo sapien
tcgcacgcgtcatcacatgcaaaaa

SEQ ID NO: 3626645 - DNA, 25 bp, Homo sapien
cgcgtcatcgcatacagaaacatac

SEQ ID NO: 3626646 - DNA, 25 bp, Homo sapien
atgcaaaaacacacctcgcatgtcc

SEQ ID NO: 3626647 - DNA, 25 bp, Homo sapien
ctcgcacgcgtcatcacataaacat

SEQ ID NO: 3626648 - DNA, 25 bp, Homo sapien
tgtcctcgcacgcgtcatcacataa

SEQ ID NO: 3626649 - DNA, 25 bp, Homo sapien
caaaaacacacctcgcatgtcctcg

SEQ ID NO: 3626650 - DNA, 25 bp, Homo sapien
atgcaaaaacatacacctcgcatgt

SEQ ID NO: 3626651 - DNA, 25 bp, Homo sapien
catgcaaaaacatacacctcgcatg

SEQ ID NO: 3626652 - DNA, 25 bp, Homo sapien
tgcaaaaacatacacctcgcatgtc

SEQ ID NO: 3626653 - DNA, 25 bp, Homo sapien
cacatgcaaaaacatacacctcgca

SEQ ID NO: 3626654 - DNA, 25 bp, Homo sapien
tcagtaacggaaatttttatgctgg

SEQ ID NO: 3626655 - DNA, 25 bp, Homo sapien
cagtaacggaaatttttatgctgga

SEQ ID NO: 3626656 - DNA, 25 bp, Homo sapien
tcaggcaccgttgatggtgaggtgg

SEQ ID NO: 3626657 - DNA, 25 bp, Homo sapien
ccgttgatggtgaggtggacccacc

SEQ ID NO: 3626658 - DNA, 25 bp, Homo sapien
caccgttgatggtgaggtggaccca

SEQ ID NO: 3626659 - DNA, 25 bp, Homo sapien
ggcaccgttgatggtgaggtggacc

SEQ ID NO: 3626660 - DNA, 25 bp, Homo sapien
gccttatcatgaagactggcccggc

SEQ ID NO: 3626661 - DNA, 25 bp, Homo sapien
gaacttgttccagccgcagagatgc

SEQ ID NO: 3626662 - DNA, 25 bp, Homo sapien
ccagctgccattgtggaaggtgtca

SEQ ID NO: 3626663 - DNA, 25 bp, Homo sapien
ctggtcctcagagcgaacttgttcc

SEQ ID NO: 3626664 - DNA, 25 bp, Homo sapien
cagcggcagtgagtcacgaggcctt

SEQ ID NO: 3626665 - DNA, 25 bp, Homo sapien
agtcacgaggcctttgctggcagga

SEQ ID NO: 3626666 - DNA, 25 bp, Homo sapien
gagtaactgccaaacaggacacaga

SEQ ID NO: 3626667 - DNA, 25 bp, Homo sapien
aggagtaactgccaaacaggacaca

SEQ ID NO: 3626668 - DNA, 25 bp, Homo sapien
ggtggatcacgtcgcatcgcaggac

SEQ ID NO: 3626669 - DNA, 25 bp, Homo sapien
ggctgtcccgtcactgggtggatca

SEQ ID NO: 3626670 - DNA, 25 bp, Homo sapien
acttgaaccactctacgacataggg

SEQ ID NO: 3626671 - DNA, 25 bp, Homo sapien
gctcttgccgtcacaaactcgggct

SEQ ID NO: 3626672 - DNA, 25 bp, Homo sapien
ctgggccaggtggtacccagtgggt

SEQ ID NO: 3626673 - DNA, 25 bp, Homo sapien
tgggccaggtggtacccagtgggtg

SEQ ID NO: 3626674 - DNA, 25 bp, Homo sapien
tggcacagcccatgtctagcactca

SEQ ID NO: 3626675 - DNA, 25 bp, Homo sapien
gttggacccctgtgcagaaccatga

SEQ ID NO: 3626676 - DNA, 25 bp, Homo sapien
tggacccctgtgcagaaccatgagg

SEQ ID NO: 3626677 - DNA, 25 bp, Homo sapien
gccgttggacccctgtgcagaacca

SEQ ID NO: 3626678 - DNA, 25 bp, Homo sapien
aaggagggtgcctgaaagcaggact

SEQ ID NO: 3626679 - DNA, 25 bp, Homo sapien
aggagggtgcctgaaagcaggactg

SEQ ID NO: 3626680 - DNA, 25 bp, Homo sapien
gaaggagggtgcctgaaagcaggac

SEQ ID NO: 3626681 - DNA, 25 bp, Homo sapien
gcagacgggtacgggttgttctgga

SEQ ID NO: 3626682 - DNA, 25 bp, Homo sapien
caggaaggcagacgggtacgggttg

SEQ ID NO: 3626683 - DNA, 25 bp, Homo sapien
aggcagacgggtacgggttgttctg

SEQ ID NO: 3626684 - DNA, 25 bp, Homo sapien
caaaacgccgacggtgtcctgttct

SEQ ID NO: 3626685 - DNA, 25 bp, Homo sapien
caaaaggaagcataggtcaaggcca

SEQ ID NO: 3626686 - DNA, 25 bp, Homo sapien
gagtcagaacctcactgtatttggg

SEQ ID NO: 3626687 - DNA, 25 bp, Homo sapien
ggcccaactaccagcaggatctgag

SEQ ID NO: 3626688 - DNA, 25 bp, Homo sapien
tagtcagggataatgtaacgacaga

SEQ ID NO: 3626689 - DNA, 25 bp, Homo sapien
agtcccagggatcctccgggtcgcg

SEQ ID NO: 3626690 - DNA, 25 bp, Homo sapien
aaaagcggacacacctcgaagctgg

SEQ ID NO: 3626691 - DNA, 25 bp, Homo sapien
gggctctagcgtgctgcagcctgcc

SEQ ID NO: 3626692 - DNA, 25 bp, Homo sapien
ttagacgcgggtgccgccagtccca

SEQ ID NO: 3626693 - DNA, 25 bp, Homo sapien
cctcgggtgccgatcacacttgcta

SEQ ID NO: 3626694 - DNA, 25 bp, Homo sapien
ttgctatgaaagtggccacatacca

SEQ ID NO: 3626695 - DNA, 25 bp, Homo sapien
gatcacacttgctatgaaagtggcc

SEQ ID NO: 3626696 - DNA, 25 bp, Homo sapien
ggtgccgatcacacttgctatgaaa

SEQ ID NO: 3626697 - DNA, 25 bp, Homo sapien
tccatccctcctaggctccgctcgg

SEQ ID NO: 3626698 - DNA, 25 bp, Homo sapien
atccctcctaggctccgctcggctc

SEQ ID NO: 3626699 - DNA, 25 bp, Homo sapien
tctccatccctcctaggctccgctc

SEQ ID NO: 3626700 - DNA, 25 bp, Homo sapien
ccatccctcctaggctccgctcggc

SEQ ID NO: 3626701 - DNA, 25 bp, Homo sapien
catctctccctgagccatgattttg

SEQ ID NO: 3626702 - DNA, 25 bp, Homo sapien
gatgcataacttggggccatctctc

SEQ ID NO: 3626703 - DNA, 25 bp, Homo sapien
ataacttggggccatctctccctga

SEQ ID NO: 3626704 - DNA, 25 bp, Homo sapien
tccctgagccatgattttggttctc

SEQ ID NO: 3626705 - DNA, 25 bp, Homo sapien
ttcctcttggcgtatggctgagctt

SEQ ID NO: 3626706 - DNA, 25 bp, Homo sapien
cctcttggcgtatggctgagctttg

SEQ ID NO: 3626707 - DNA, 25 bp, Homo sapien
ctgagctttggacccagaaaggatg

SEQ ID NO: 3626708 - DNA, 25 bp, Homo sapien
ggctgagctttggacccagaaagga

SEQ ID NO: 3626709 - DNA, 25 bp, Homo sapien
tgagtatgcccttgtctgcccatgg

SEQ ID NO: 3626710 - DNA, 25 bp, Homo sapien
gggctaccctggcccacctgagtat

SEQ ID NO: 3626711 - DNA, 25 bp, Homo sapien
gcccacctgagtatgcccttgtctg

SEQ ID NO: 3626712 - DNA, 25 bp, Homo sapien
ctggcccacctgagtatgcccttgt

SEQ ID NO: 3626713 - DNA, 25 bp, Homo sapien
tgggccctcctgcgcacacactcac

SEQ ID NO: 3626714 - DNA, 25 bp, Homo sapien
caatgtgggccctcctgcgcacaca

SEQ ID NO: 3626715 - DNA, 25 bp, Homo sapien
atgtgggccctcctgcgcacacact

SEQ ID NO: 3626716 - DNA, 25 bp, Homo sapien
tgtgggccctcctgcgcacacactc

SEQ ID NO: 3626717 - DNA, 25 bp, Homo sapien
gaatctcttcagataaccacacata

SEQ ID NO: 3626718 - DNA, 25 bp, Homo sapien
acgcagaatctcttcagataaccac

SEQ ID NO: 3626719 - DNA, 25 bp, Homo sapien
ctcttcagataaccacacatatgtt

SEQ ID NO: 3626720 - DNA, 25 bp, Homo sapien
cagaatctcttcagataaccacaca

SEQ ID NO: 3626721 - DNA, 25 bp, Homo sapien
gtgtgtgccacatcctcacgcatcg

SEQ ID NO: 3626722 - DNA, 25 bp, Homo sapien
ggtaggacgcgtgaacacacgtgtt

SEQ ID NO: 3626723 - DNA, 25 bp, Homo sapien
tcacgcatcgcgaggctaacgtggg

SEQ ID NO: 3626724 - DNA, 25 bp, Homo sapien
agaactcctggcatagacgtaccca

SEQ ID NO: 3626725 - DNA, 25 bp, Homo sapien
agtggtggtccagccgagtccttca

SEQ ID NO: 3626726 - DNA, 25 bp, Homo sapien
tcagaggtgcaggacaccagaggcc

SEQ ID NO: 3626727 - DNA, 25 bp, Homo sapien
cctccatagcagggctgcgaagcct

SEQ ID NO: 3626728 - DNA, 25 bp, Homo sapien
gctgcgaagcctggagcagttctca

SEQ ID NO: 3626729 - DNA, 25 bp, Homo sapien
tctgcagcgcctgagggtgagacct

SEQ ID NO: 3626730 - DNA, 25 bp, Homo sapien
ctgggggttatctgacccttggaag

SEQ ID NO: 3626731 - DNA, 25 bp, Homo sapien
ctgagggtgagacctgggggttatc

SEQ ID NO: 3626732 - DNA, 25 bp, Homo sapien
ggctctgcagcgcctgagggtgaga

SEQ ID NO: 3626733 - DNA, 25 bp, Homo sapien
tgtcctcgatcatacagagcttttc

SEQ ID NO: 3626734 - DNA, 25 bp, Homo sapien
tgccccatcaacacctcaggacttg

SEQ ID NO: 3626735 - DNA, 25 bp, Homo sapien
tctctgtgtaacctatttcctgtcc

SEQ ID NO: 3626736 - DNA, 25 bp, Homo sapien
tccatgtccgtggtctgaaccttct

SEQ ID NO: 3626737 - DNA, 25 bp, Homo sapien
cataccccgccagtaagagctgcgt

SEQ ID NO: 3626738 - DNA, 25 bp, Homo sapien
ccggagggcttaaggaccagcaact

SEQ ID NO: 3626739 - DNA, 25 bp, Homo sapien
ggcttaaggaccagcaactctgccc

SEQ ID NO: 3626740 - DNA, 25 bp, Homo sapien
tgcgtggactgagagggatttgcca

SEQ ID NO: 3626741 - DNA, 25 bp, Homo sapien
tttgggataccgctcctagcatggc

SEQ ID NO: 3626742 - DNA, 25 bp, Homo sapien
gggataccgctcctagcatggcaaa

SEQ ID NO: 3626743 - DNA, 25 bp, Homo sapien
gctcggaaatactgtttccttctct

SEQ ID NO: 3626744 - DNA, 25 bp, Homo sapien
ctctgcaccaaaggctgctcggaaa

SEQ ID NO: 3626745 - DNA, 25 bp, Homo sapien
ctggaaatgcaaaagccttgtgaat

SEQ ID NO: 3626746 - DNA, 25 bp, Homo sapien
tggaaatgcaaaagccttgtgaatt

SEQ ID NO: 3626747 - DNA, 25 bp, Homo sapien
cccagcaccaatccgcagccaggcc

SEQ ID NO: 3626748 - DNA, 25 bp, Homo sapien
gcccagcaccaatccgcagccaggc

SEQ ID NO: 3626749 - DNA, 25 bp, Homo sapien
ccaggtagttggcattctggccaaa

SEQ ID NO: 3626750 - DNA, 25 bp, Homo sapien
tggcattctggccaaactctgccag

SEQ ID NO: 3626751 - DNA, 25 bp, Homo sapien
gcattctggccaaactctgccagca

SEQ ID NO: 3626752 - DNA, 25 bp, Homo sapien
ctcccaggtagttggcattctggcc

SEQ ID NO: 3626753 - DNA, 25 bp, Homo sapien
tcgcaagggcgtttataaacagtcc

SEQ ID NO: 3626754 - DNA, 25 bp, Homo sapien
aagctgccagagagactgtgtcgtc

SEQ ID NO: 3626755 - DNA, 25 bp, Homo sapien
cagagcttaaaaatctcgcaagggc

SEQ ID NO: 3626756 - DNA, 25 bp, Homo sapien
tgtgtcgtctacctccacgtacatc

SEQ ID NO: 3626757 - DNA, 25 bp, Homo sapien
ccgcctgtagggttttctggtgtct

SEQ ID NO: 3626758 - DNA, 25 bp, Homo sapien
gcacatgcccgcctgtagggttttc

SEQ ID NO: 3626759 - DNA, 25 bp, Homo sapien
tccacaaacctgcatcgagggtctc

SEQ ID NO: 3626760 - DNA, 25 bp, Homo sapien
ccaaggtggcaactggtgtctgtcg

SEQ ID NO: 3626761 - DNA, 25 bp, Homo sapien
gctccgtcggccacagccgtctcca

SEQ ID NO: 3626762 - DNA, 25 bp, Homo sapien
ggcagcacgctgtgtccttggctct

SEQ ID NO: 3626763 - DNA, 25 bp, Homo sapien
tccacgcctaagtgacagccctgct

SEQ ID NO: 3626764 - DNA, 25 bp, Homo sapien
cggcagcacgctgtgtccttggctc

SEQ ID NO: 3626765 - DNA, 25 bp, Homo sapien
ctccgtgggacttcaggtcggtcaa

SEQ ID NO: 3626766 - DNA, 25 bp, Homo sapien
aaatatctccttgctgactccgtgg

SEQ ID NO: 3626767 - DNA, 25 bp, Homo sapien
ttgatggtatatctggaaaccagct

SEQ ID NO: 3626768 - DNA, 25 bp, Homo sapien
gggcttcttggcgaatctcgaattt

SEQ ID NO: 3626769 - DNA, 25 bp, Homo sapien
gcagtgggcttgagcaagacaacca

SEQ ID NO: 3626770 - DNA, 25 bp, Homo sapien
ctgcggagagcagtgggcttgagca

SEQ ID NO: 3626771 - DNA, 25 bp, Homo sapien
gtgggcttgagcaagacaaccaatg

SEQ ID NO: 3626772 - DNA, 25 bp, Homo sapien
agagcagtgggcttgagcaagacaa

SEQ ID NO: 3626773 - DNA, 25 bp, Homo sapien
ctgaggagaaaaagccggaataggg

SEQ ID NO: 3626774 - DNA, 25 bp, Homo sapien
caaatgtgccgaaacacgagaccca

SEQ ID NO: 3626775 - DNA, 25 bp, Homo sapien
aaacacgagacccacaggcaatcga

SEQ ID NO: 3626776 - DNA, 25 bp, Homo sapien
caggcaatcgacatgccagtctggg

SEQ ID NO: 3626777 - DNA, 25 bp, Homo sapien
gctcccaaatgtgccgaaacacgag

SEQ ID NO: 3626778 - DNA, 25 bp, Homo sapien
ggtggtggggaccttatagctcctc

SEQ ID NO: 3626779 - DNA, 25 bp, Homo sapien
agccggtggtggggaccttatagct

SEQ ID NO: 3626780 - DNA, 25 bp, Homo sapien
gccggtggtggggaccttatagctc

SEQ ID NO: 3626781 - DNA, 25 bp, Homo sapien
cggtggtggggaccttatagctcct

SEQ ID NO: 3626782 - DNA, 25 bp, Homo sapien
gcagagccgcgcctccagtgatgtg

SEQ ID NO: 3626783 - DNA, 25 bp, Homo sapien
agccgcgcctccagtgatgtgatag

SEQ ID NO: 3626784 - DNA, 25 bp, Homo sapien
cagtgatgtgataggggacagtcca

SEQ ID NO: 3626785 - DNA, 25 bp, Homo sapien
agagccgcgcctccagtgatgtgat

SEQ ID NO: 3626786 - DNA, 25 bp, Homo sapien
aggacggtgatgagtgcccaccccc

SEQ ID NO: 3626787 - DNA, 25 bp, Homo sapien
ggccaggacggtgatgagtgcccac

SEQ ID NO: 3626788 - DNA, 25 bp, Homo sapien
gacggtgatgagtgcccacccccgg

SEQ ID NO: 3626789 - DNA, 25 bp, Homo sapien
tgatgagtgcccacccccggctctg

SEQ ID NO: 3626790 - DNA, 25 bp, Homo sapien
tcacttgatgagcatggaaagggtg

SEQ ID NO: 3626791 - DNA, 25 bp, Homo sapien
cacttgatgagcatggaaagggtgg

SEQ ID NO: 3626792 - DNA, 25 bp, Homo sapien
cttgatgagcatggaaagggtgggg

SEQ ID NO: 3626793 - DNA, 25 bp, Homo sapien
acttgatgagcatggaaagggtggg

SEQ ID NO: 3626794 - DNA, 25 bp, Homo sapien
ctctcaactgttatttcggcagctc

SEQ ID NO: 3626795 - DNA, 25 bp, Homo sapien
tctcaactgttatttcggcagctct

SEQ ID NO: 3626796 - DNA, 25 bp, Homo sapien
tcaactgttatttcggcagctctgc

SEQ ID NO: 3626797 - DNA, 25 bp, Homo sapien
ctcaactgttatttcggcagctctg

SEQ ID NO: 3626798 - DNA, 25 bp, Homo sapien
gggtgagtgtgaaccgctgcagtgt

SEQ ID NO: 3626799 - DNA, 25 bp, Homo sapien
gaaggaagcgggctgcgttggaggg

SEQ ID NO: 3626800 - DNA, 25 bp, Homo sapien
tcttcctcgggtgggagcatgtgca

SEQ ID NO: 3626801 - DNA, 25 bp, Homo sapien
cgctgcagtgtgcttagctcttcct

SEQ ID NO: 3626802 - DNA, 25 bp, Homo sapien
attccgcagaggacccgaaacctca

SEQ ID NO: 3626803 - DNA, 25 bp, Homo sapien
caattgccgctgataacatttaaat

SEQ ID NO: 3626804 - DNA, 25 bp, Homo sapien
cgaaacctcagtcccgagcagatca

SEQ ID NO: 3626805 - DNA, 25 bp, Homo sapien
tcccaattccgcagaggacccgaaa

SEQ ID NO: 3626806 - DNA, 25 bp, Homo sapien
gcatgaactcccgtagccagagagt

SEQ ID NO: 3626807 - DNA, 25 bp, Homo sapien
tgtgagctggactctacctggagca

SEQ ID NO: 3626808 - DNA, 25 bp, Homo sapien
gctctgtagatgtcaaaggacccca

SEQ ID NO: 3626809 - DNA, 25 bp, Homo sapien
cccatgggcaaagagtaggtgagac

SEQ ID NO: 3626810 - DNA, 25 bp, Homo sapien
ttgtttaaggccaaagcacacacca

SEQ ID NO: 3626811 - DNA, 25 bp, Homo sapien
gcagcataacccttagtaggacaga

SEQ ID NO: 3626812 - DNA, 25 bp, Homo sapien
cataaatcttgcatggcgtccggag

SEQ ID NO: 3626813 - DNA, 25 bp, Homo sapien
gatggcagggtgctcatacacacag

SEQ ID NO: 3626814 - DNA, 25 bp, Homo sapien
tgtggtttgtcaccggttagctcct

SEQ ID NO: 3626815 - DNA, 25 bp, Homo sapien
tgtggtgcgcaatttcccctgtggt

SEQ ID NO: 3626816 - DNA, 25 bp, Homo sapien
ggctcccgcctgtcacgtagatatg

SEQ ID NO: 3626817 - DNA, 25 bp, Homo sapien
caatgcctgtcgtgtaggtctgctg

SEQ ID NO: 3626818 - DNA, 25 bp, Homo sapien
agaagcacacaggaggtccacccaa

SEQ ID NO: 3626819 - DNA, 25 bp, Homo sapien
gaagcacacaggaggtccacccaaa

SEQ ID NO: 3626820 - DNA, 25 bp, Homo sapien
acctagggaacaatgcccggctgga

SEQ ID NO: 3626821 - DNA, 25 bp, Homo sapien
gggcacagggacagtgcaaacctag

SEQ ID NO: 3626822 - DNA, 25 bp, Homo sapien
tccaagctcagcagagtttcctgtt

SEQ ID NO: 3626823 - DNA, 25 bp, Homo sapien
acaatgcccggctggaaaacaacat

SEQ ID NO: 3626824 - DNA, 25 bp, Homo sapien
atggaaattcacatttcgcttggga

SEQ ID NO: 3626825 - DNA, 25 bp, Homo sapien
aaattcacatttcgcttgggaacat

SEQ ID NO: 3626826 - DNA, 25 bp, Homo sapien
ggaaattcacatttcgcttgggaac

SEQ ID NO: 3626827 - DNA, 25 bp, Homo sapien
gaaattcacatttcgcttgggaaca

SEQ ID NO: 3626828 - DNA, 25 bp, Homo sapien
caaaagagtctaggttaaagcacta

SEQ ID NO: 3626829 - DNA, 25 bp, Homo sapien
gaagtactcagttacgagtgtgctg

SEQ ID NO: 3626830 - DNA, 25 bp, Homo sapien
tttgttctaataggcccagcgcagt

SEQ ID NO: 3626831 - DNA, 25 bp, Homo sapien
ggttaaagcactacggaagtactca

SEQ ID NO: 3626832 - DNA, 25 bp, Homo sapien
ttgggcagatgtttactagggactc

SEQ ID NO: 3626833 - DNA, 25 bp, Homo sapien
tagggactctaatcacctgctcttc

SEQ ID NO: 3626834 - DNA, 25 bp, Homo sapien
gacatccttggagtgagctttcagt

SEQ ID NO: 3626835 - DNA, 25 bp, Homo sapien
tgagacaaacaataaggcaagggct

SEQ ID NO: 3626836 - DNA, 25 bp, Homo sapien
acatctctctatgtcaaactggctt

SEQ ID NO: 3626837 - DNA, 25 bp, Homo sapien
tctctatgtcaaactggcttcagct

SEQ ID NO: 3626838 - DNA, 25 bp, Homo sapien
ctatgtcaaactggcttcagctagc

SEQ ID NO: 3626839 - DNA, 25 bp, Homo sapien
tctctctatgtcaaactggcttcag

SEQ ID NO: 3626840 - DNA, 25 bp, Homo sapien
atcactactttgatgacacaggtaa

SEQ ID NO: 3626841 - DNA, 25 bp, Homo sapien
attcaatcaaagcaagtgcaaccag

SEQ ID NO: 3626842 - DNA, 25 bp, Homo sapien
ctgcaacacagccacctggctcttc

SEQ ID NO: 3626843 - DNA, 25 bp, Homo sapien
acacagccacctggctcttcacaga

SEQ ID NO: 3626844 - DNA, 25 bp, Homo sapien
cagccacctggctcttcacagaatt

SEQ ID NO: 3626845 - DNA, 25 bp, Homo sapien
ccacctggctcttcacagaatttgg

SEQ ID NO: 3626846 - DNA, 25 bp, Homo sapien
gggaactcgttgagagtagcactgg

SEQ ID NO: 3626847 - DNA, 25 bp, Homo sapien
ctgggaactcgttgagagtagcact

SEQ ID NO: 3626848 - DNA, 25 bp, Homo sapien
ggaactcgttgagagtagcactggt

SEQ ID NO: 3626849 - DNA, 25 bp, Homo sapien
tctgggaactcgttgagagtagcac

SEQ ID NO: 3626850 - DNA, 25 bp, Homo sapien
catcatccaggtgagcagtgctctc

SEQ ID NO: 3626851 - DNA, 25 bp, Homo sapien
gattgggttgtccagtcatcatcca

SEQ ID NO: 3626852 - DNA, 25 bp, Homo sapien
cctcgtcgaagtcatggtgctcata

SEQ ID NO: 3626853 - DNA, 25 bp, Homo sapien
ccttagagccagtggtggtgcctcg

SEQ ID NO: 3626854 - DNA, 25 bp, Homo sapien
tctcacatggtaaaggttcgaatcc

SEQ ID NO: 3626855 - DNA, 25 bp, Homo sapien
gggagacggtttcccgcacagaatg

SEQ ID NO: 3626856 - DNA, 25 bp, Homo sapien
tgccaacgtctgtgctccatcggaa

SEQ ID NO: 3626857 - DNA, 25 bp, Homo sapien
ttatggagctgtaattcgtaccgca

SEQ ID NO: 3626858 - DNA, 25 bp, Homo sapien
gagtcttacagtagttgcatgttta

SEQ ID NO: 3626859 - DNA, 25 bp, Homo sapien
caactgctgagtcttacagtagttg

SEQ ID NO: 3626860 - DNA, 25 bp, Homo sapien
gctgctatcagtatttgtttacagg

SEQ ID NO: 3626861 - DNA, 25 bp, Homo sapien
aatgctgctatcagtatttgtttac

SEQ ID NO: 3626862 - DNA, 25 bp, Homo sapien
cctgatcacgttgggcatctgctgt

SEQ ID NO: 3626863 - DNA, 25 bp, Homo sapien
ggttgtccttgctgtactggccctg

SEQ ID NO: 3626864 - DNA, 25 bp, Homo sapien
gacctgaacattggcggaattattg

SEQ ID NO: 3626865 - DNA, 25 bp, Homo sapien
tcagatgacctgaacattggcggaa

SEQ ID NO: 3626866 - DNA, 25 bp, Homo sapien
tataaccacaaggaagcgaaactgg

SEQ ID NO: 3626867 - DNA, 25 bp, Homo sapien
aagagtttgctcacgtaaacgcccg

SEQ ID NO: 3626868 - DNA, 25 bp, Homo sapien
gaagagggatcttgcctgaggaacc

SEQ ID NO: 3626869 - DNA, 25 bp, Homo sapien
gtttctggcctgattcccgcatgag

SEQ ID NO: 3626870 - DNA, 25 bp, Homo sapien
tcagaccatagttgcttaggaaacc

SEQ ID NO: 3626871 - DNA, 25 bp, Homo sapien
gaagccctcagatgtacatacacag

SEQ ID NO: 3626872 - DNA, 25 bp, Homo sapien
caagggaactcatactgtctacaca

SEQ ID NO: 3626873 - DNA, 25 bp, Homo sapien
gatgactaggacagtctgtacccag

SEQ ID NO: 3626874 - DNA, 25 bp, Homo sapien
gaatgtgactcaagactcgaggccg

SEQ ID NO: 3626875 - DNA, 25 bp, Homo sapien
caaaccatgatggagtggcggccag

SEQ ID NO: 3626876 - DNA, 25 bp, Homo sapien
tcttcaagagcaggtgttctcagcc

SEQ ID NO: 3626877 - DNA, 25 bp, Homo sapien
taacagagggctgcacaaatcggca

SEQ ID NO: 3626878 - DNA, 25 bp, Homo sapien
acacggaggacacgagactgcttcc

SEQ ID NO: 3626879 - DNA, 25 bp, Homo sapien
acagcaaagcgctgcccaaggactg

SEQ ID NO: 3626880 - DNA, 25 bp, Homo sapien
gaggagctctcgtgttccacagcaa

SEQ ID NO: 3626881 - DNA, 25 bp, Homo sapien
caaaatttcgtcattacagatggga

SEQ ID NO: 3626882 - DNA, 25 bp, Homo sapien
gtctttcggagggacctcctgctgc

SEQ ID NO: 3626883 - DNA, 25 bp, Homo sapien
gcacattccactgctgaggctgtgg

SEQ ID NO: 3626884 - DNA, 25 bp, Homo sapien
tattcctggcgggagaccgcacatt

SEQ ID NO: 3626885 - DNA, 25 bp, Homo sapien
agtgtctttattcctggcgggagac

SEQ ID NO: 3626886 - DNA, 25 bp, Homo sapien
acatgtgcagtcattctggaactca

SEQ ID NO: 3626887 - DNA, 25 bp, Homo sapien
agaaaaaccctgacagaaacatcca

SEQ ID NO: 3626888 - DNA, 25 bp, Homo sapien
agggaaaggacatgtgcagtcattc

SEQ ID NO: 3626889 - DNA, 25 bp, Homo sapien
aaaaccctgacagaaacatccacct

SEQ ID NO: 3626890 - DNA, 25 bp, Homo sapien
aaacataagatgtcatttccttgac

SEQ ID NO: 3626891 - DNA, 25 bp, Homo sapien
taagatgtcatttccttgactccgg

SEQ ID NO: 3626892 - DNA, 25 bp, Homo sapien
tgataaacataagatgtcatttcct

SEQ ID NO: 3626893 - DNA, 25 bp, Homo sapien
tcatttccttgactccggccttcaa

SEQ ID NO: 3626894 - DNA, 25 bp, Homo sapien
ctcaaaggcagtgcatctatcagcc

SEQ ID NO: 3626895 - DNA, 25 bp, Homo sapien
cagcccagaaggacaccaagaactt

SEQ ID NO: 3626896 - DNA, 25 bp, Homo sapien
gcagtgcatctatcagcccagaagg

SEQ ID NO: 3626897 - DNA, 25 bp, Homo sapien
catctatcagcccagaaggacacca

SEQ ID NO: 3626898 - DNA, 25 bp, Homo sapien
ctttggctgacgacggagtccgtgg

SEQ ID NO: 3626899 - DNA, 25 bp, Homo sapien
ggtgtcccgatgtaactgacccctg

SEQ ID NO: 3626900 - DNA, 25 bp, Homo sapien
cctgctccaaacgtgacatcactga

SEQ ID NO: 3626901 - DNA, 25 bp, Homo sapien
cggagtccgtggtgtcccgatgtaa

SEQ ID NO: 3626902 - DNA, 25 bp, Homo sapien
cactgagtgaaagccgcgtggtcta

SEQ ID NO: 3626903 - DNA, 25 bp, Homo sapien
cgcgtggtctatcggaggtctctgt

SEQ ID NO: 3626904 - DNA, 25 bp, Homo sapien
tctagttgtccgtgggacgtaggca

SEQ ID NO: 3626905 - DNA, 25 bp, Homo sapien
tgcataaagaggagacaccactgag

SEQ ID NO: 3626906 - DNA, 25 bp, Homo sapien
tgcacctccacgcgtgcctgctggt

SEQ ID NO: 3626907 - DNA, 25 bp, Homo sapien
tctgcacctccacgcgtgcctgctg

SEQ ID NO: 3626908 - DNA, 25 bp, Homo sapien
gcctctgcacctccacgcgtgcctg

SEQ ID NO: 3626909 - DNA, 25 bp, Homo sapien
ctctgcacctccacgcgtgcctgct

SEQ ID NO: 3626910 - DNA, 25 bp, Homo sapien
tacagactcacctgttaggctcagg

SEQ ID NO: 3626911 - DNA, 25 bp, Homo sapien
tcaagaagctggtaaatttactgcc

SEQ ID NO: 3626912 - DNA, 25 bp, Homo sapien
gcttcaagacacctcaatcgctgtg

SEQ ID NO: 3626913 - DNA, 25 bp, Homo sapien
caagagatgttagcagccactgtca

SEQ ID NO: 3626914 - DNA, 25 bp, Homo sapien
ccctgtggagaaacacgagctgcta

SEQ ID NO: 3626915 - DNA, 25 bp, Homo sapien
cactgcagctgtgtacccgatggct

SEQ ID NO: 3626916 - DNA, 25 bp, Homo sapien
tagaatcgaaggcagcagcgtctgt

SEQ ID NO: 3626917 - DNA, 25 bp, Homo sapien
gcctgatttccagcacaaagcgtgg

SEQ ID NO: 3626918 - DNA, 25 bp, Homo sapien
tccgcgggccactgtggtgtttgac

SEQ ID NO: 3626919 - DNA, 25 bp, Homo sapien
gtgtttgactgactgaatgtaacga

SEQ ID NO: 3626920 - DNA, 25 bp, Homo sapien
gtttgactgactgaatgtaacgaca

SEQ ID NO: 3626921 - DNA, 25 bp, Homo sapien
tgcctcaacggcattgtctgctccg

SEQ ID NO: 3626922 - DNA, 25 bp, Homo sapien
gaactatcctgcaccggaaggagtt

SEQ ID NO: 3626923 - DNA, 25 bp, Homo sapien
cacatcacgaatgcaggagagactg

SEQ ID NO: 3626924 - DNA, 25 bp, Homo sapien
gagttttactgcgactctagcaaac

SEQ ID NO: 3626925 - DNA, 25 bp, Homo sapien
gagaagcccacgtgttccgatcagt

SEQ ID NO: 3626926 - DNA, 25 bp, Homo sapien
acgtgctcaatctcgccattcgact

SEQ ID NO: 3626927 - DNA, 25 bp, Homo sapien
tcaatctcgccattcgactcttgct

SEQ ID NO: 3626928 - DNA, 25 bp, Homo sapien
ttggtcacgtgctcaatctcgccat

SEQ ID NO: 3626929 - DNA, 25 bp, Homo sapien
tcacgtgctcaatctcgccattcga

SEQ ID NO: 3626930 - DNA, 25 bp, Homo sapien
aatttaaagtgaaaggcagcactcc

SEQ ID NO: 3626931 - DNA, 25 bp, Homo sapien
gactgcacgttttttctgggcttcc

SEQ ID NO: 3626932 - DNA, 25 bp, Homo sapien
acagaattcaggattgcaatggtgc

SEQ ID NO: 3626933 - DNA, 25 bp, Homo sapien
tgactccacggctttcttgacagaa

SEQ ID NO: 3626934 - DNA, 25 bp, Homo sapien
tttgggcagcaacctctgcaatggc

SEQ ID NO: 3626935 - DNA, 25 bp, Homo sapien
gatgatactgctacatggccagcac

SEQ ID NO: 3626936 - DNA, 25 bp, Homo sapien
ggcactgtttctaaacacagggcaa

SEQ ID NO: 3626937 - DNA, 25 bp, Homo sapien
gctggctcacggcaggtgacatggc

SEQ ID NO: 3626938 - DNA, 25 bp, Homo sapien
tgtgccacaggtgccacctcagcac

SEQ ID NO: 3626939 - DNA, 25 bp, Homo sapien
gccacaggtgccacctcagcacctc

SEQ ID NO: 3626940 - DNA, 25 bp, Homo sapien
tgccacaggtgccacctcagcacct

SEQ ID NO: 3626941 - DNA, 25 bp, Homo sapien
ctgtgccacaggtgccacctcagca

SEQ ID NO: 3626942 - DNA, 25 bp, Homo sapien
tcttcatgtcatactcaagctctga

SEQ ID NO: 3626943 - DNA, 25 bp, Homo sapien
gaagtccttgagctcatctcggtaa

SEQ ID NO: 3626944 - DNA, 25 bp, Homo sapien
tgcaaagaagtccttgagctcatct

SEQ ID NO: 3626945 - DNA, 25 bp, Homo sapien
gagctcatctcggtaatcctgcatc

SEQ ID NO: 3626946 - DNA, 25 bp, Homo sapien
cctgagatagtgcatgagttcccgc

SEQ ID NO: 3626947 - DNA, 25 bp, Homo sapien
agtgcatgagttcccgcaaagctgg

SEQ ID NO: 3626948 - DNA, 25 bp, Homo sapien
gcacagtcttcagggagatgataat

SEQ ID NO: 3626949 - DNA, 25 bp, Homo sapien
cagggagatgataattggaataata

SEQ ID NO: 3626950 - DNA, 25 bp, Homo sapien
gatactggatgtagaggacctctgc

SEQ ID NO: 3626951 - DNA, 25 bp, Homo sapien
tctagttctttgagtagagccaccc

SEQ ID NO: 3626952 - DNA, 25 bp, Homo sapien
gaagtcagctcgttctggctaccca

SEQ ID NO: 3626953 - DNA, 25 bp, Homo sapien
ggacacttcgtattcctgctggtga

SEQ ID NO: 3626954 - DNA, 25 bp, Homo sapien
tcttccataaggaggtctttgtctg

SEQ ID NO: 3626955 - DNA, 25 bp, Homo sapien
gactacatttgccaaggccatgtca

SEQ ID NO: 3626956 - DNA, 25 bp, Homo sapien
tttgccaaggccatgtcatcttctt

SEQ ID NO: 3626957 - DNA, 25 bp, Homo sapien
tccataaggaggtctttgtctggtt

SEQ ID NO: 3626958 - DNA, 25 bp, Homo sapien
tttgagctgaggacctcaaacgtgt

SEQ ID NO: 3626959 - DNA, 25 bp, Homo sapien
caaaagcttgatctcctttgagctg

SEQ ID NO: 3626960 - DNA, 25 bp, Homo sapien
tgagagtaactcactggcgtccagg

SEQ ID NO: 3626961 - DNA, 25 bp, Homo sapien
tcaaacgtgtctgagagtaactcac

SEQ ID NO: 3626962 - DNA, 25 bp, Homo sapien
tgttgaatcgctgttcatctgtgaa

SEQ ID NO: 3626963 - DNA, 25 bp, Homo sapien
gaatcgctgttcatctgtgaagtgc

SEQ ID NO: 3626964 - DNA, 25 bp, Homo sapien
tggaagtgatgttgaatcgctgttc

SEQ ID NO: 3626965 - DNA, 25 bp, Homo sapien
aagtgatgttgaatcgctgttcatc

SEQ ID NO: 3626966 - DNA, 25 bp, Homo sapien
ttcgtctctctttgtttgactttcc

SEQ ID NO: 3626967 - DNA, 25 bp, Homo sapien
gtagattttcattcgtctctctttg

SEQ ID NO: 3626968 - DNA, 25 bp, Homo sapien
ttcattcgtctctctttgtttgact

SEQ ID NO: 3626969 - DNA, 25 bp, Homo sapien
gaaatttgtagattttcattcgtct

SEQ ID NO: 3626970 - DNA, 25 bp, Homo sapien
cttcaatgaaaacagccgcttctct

SEQ ID NO: 3626971 - DNA, 25 bp, Homo sapien
gtgagccaggcaaaactccccgaag

SEQ ID NO: 3626972 - DNA, 25 bp, Homo sapien
tgcttctcatagttattaaagtgaa

SEQ ID NO: 3626973 - DNA, 25 bp, Homo sapien
tgactgggggaacttgttgtacttc

SEQ ID NO: 3626974 - DNA, 25 bp, Homo sapien
ttcaatgaagtgttggaagaacatg

SEQ ID NO: 3626975 - DNA, 25 bp, Homo sapien
tggcacctaccgaaagctcactaaa

SEQ ID NO: 3626976 - DNA, 25 bp, Homo sapien
tctagtggctgctactctatacagt

SEQ ID NO: 3626977 - DNA, 25 bp, Homo sapien
cgtctgacgtgaggaaaagatttac

SEQ ID NO: 3626978 - DNA, 25 bp, Homo sapien
ggtaaactgttgagtcgtctgacgt

SEQ ID NO: 3626979 - DNA, 25 bp, Homo sapien
tctgggtgtgaatcgatcagagtgc

SEQ ID NO: 3626980 - DNA, 25 bp, Homo sapien
gacaaatcggaagaacagggagccc

SEQ ID NO: 3626981 - DNA, 25 bp, Homo sapien
cagagtgctgacaaatcggaagaac

SEQ ID NO: 3626982 - DNA, 25 bp, Homo sapien
ggtgtgaatcgatcagagtgctgac

SEQ ID NO: 3626983 - DNA, 25 bp, Homo sapien
agatgagtgtctgcttccggatgaa

SEQ ID NO: 3626984 - DNA, 25 bp, Homo sapien
aatgatgacgttgttgcggacagcc

SEQ ID NO: 3626985 - DNA, 25 bp, Homo sapien
gaatgggtcggaatccttcagacac

SEQ ID NO: 3626986 - DNA, 25 bp, Homo sapien
ggaatatacttgtccaccatgatgg

SEQ ID NO: 3626987 - DNA, 25 bp, Homo sapien
gggcttacttaagacaacagctaca

SEQ ID NO: 3626988 - DNA, 25 bp, Homo sapien
cagctacacacagaacgatgtcaag

SEQ ID NO: 3626989 - DNA, 25 bp, Homo sapien
tacttaagacaacagctacacacag

SEQ ID NO: 3626990 - DNA, 25 bp, Homo sapien
ctgggcttacttaagacaacagcta

SEQ ID NO: 3626991 - DNA, 25 bp, Homo sapien
taaggtaatgatggcatgtgctcta

SEQ ID NO: 3626992 - DNA, 25 bp, Homo sapien
cagagggcatgacagaacctctgac

SEQ ID NO: 3626993 - DNA, 25 bp, Homo sapien
gctctaatcacagagggcatgacag

SEQ ID NO: 3626994 - DNA, 25 bp, Homo sapien
gatggcatgtgctctaatcacagag

SEQ ID NO: 3626995 - DNA, 25 bp, Homo sapien
cacagctgggctatatcccctaagg

SEQ ID NO: 3626996 - DNA, 25 bp, Homo sapien
aggaagatgcgcttctccaccctgg

SEQ ID NO: 3626997 - DNA, 25 bp, Homo sapien
agtggtcagcatcagcagacgaagc

SEQ ID NO: 3626998 - DNA, 25 bp, Homo sapien
cagacgaagccaggacggactgaat

SEQ ID NO: 3626999 - DNA, 25 bp, Homo sapien
gagaggcggtgctcgcaggtggaga

SEQ ID NO: 3627000 - DNA, 25 bp, Homo sapien
tgctcgcaggtggagagtacatccc

SEQ ID NO: 3627001 - DNA, 25 bp, Homo sapien
caacaggtcttcgtccatattccct

SEQ ID NO: 3627002 - DNA, 25 bp, Homo sapien
tccttgagaacgatgttggagaggc

SEQ ID NO: 3627003 - DNA, 25 bp, Homo sapien
gctgctgagctatatctttgggtaa

SEQ ID NO: 3627004 - DNA, 25 bp, Homo sapien
caccaagtgaggttgtgtcggcaga

SEQ ID NO: 3627005 - DNA, 25 bp, Homo sapien
aaccgtggcggtctttgctaatgca

SEQ ID NO: 3627006 - DNA, 25 bp, Homo sapien
gaaacaagcgggtcacatggattga

SEQ ID NO: 3627007 - DNA, 25 bp, Homo sapien
gcaagtatccctttcatcaataaaa

SEQ ID NO: 3627008 - DNA, 25 bp, Homo sapien
ggtcaacagtcttaagtcccaagca

SEQ ID NO: 3627009 - DNA, 25 bp, Homo sapien
cttgggtcttgagataaagggttag

SEQ ID NO: 3627010 - DNA, 25 bp, Homo sapien
tctaatgaacttggtcaagaaaagg

SEQ ID NO: 3627011 - DNA, 25 bp, Homo sapien
cagctgaactgatcacctctagaga

SEQ ID NO: 3627012 - DNA, 25 bp, Homo sapien
tctagagaccactgaaatccattca

SEQ ID NO: 3627013 - DNA, 25 bp, Homo sapien
ggtgtctctgcagatgctctacaaa

SEQ ID NO: 3627014 - DNA, 25 bp, Homo sapien
tctacaaagcctctgcaaggcgtca

SEQ ID NO: 3627015 - DNA, 25 bp, Homo sapien
ggtgtttgaattgggattctgctga

SEQ ID NO: 3627016 - DNA, 25 bp, Homo sapien
tgtcctaaggtgtttgaattgggat

SEQ ID NO: 3627017 - DNA, 25 bp, Homo sapien
gatgctttgcaatatgcccaatcac

SEQ ID NO: 3627018 - DNA, 25 bp, Homo sapien
tgtcccgggtgctcttaggaagatg

SEQ ID NO: 3627019 - DNA, 25 bp, Homo sapien
agaagcaagttaaacactgctgcca

SEQ ID NO: 3627020 - DNA, 25 bp, Homo sapien
gctgccaacaaaggcctttcttctg

SEQ ID NO: 3627021 - DNA, 25 bp, Homo sapien
ggaggaatatgaagggagaagcaag

SEQ ID NO: 3627022 - DNA, 25 bp, Homo sapien
aagggagaagcaagttaaacactgc

SEQ ID NO: 3627023 - DNA, 25 bp, Homo sapien
catccaggcaggtgccgaatgttcc

SEQ ID NO: 3627024 - DNA, 25 bp, Homo sapien
cgaatgttccgtgccagtgtgagat

SEQ ID NO: 3627025 - DNA, 25 bp, Homo sapien
tcttggaccagatatgaaaagcctt

SEQ ID NO: 3627026 - DNA, 25 bp, Homo sapien
gagccagcaatcttggagagcagca

SEQ ID NO: 3627027 - DNA, 25 bp, Homo sapien
tgcacagtgctctcgcagtccatca

SEQ ID NO: 3627028 - DNA, 25 bp, Homo sapien
cagttcctggctttcggtggtgagg

SEQ ID NO: 3627029 - DNA, 25 bp, Homo sapien
cccagagtgaaaatgactgtgatgc

SEQ ID NO: 3627030 - DNA, 25 bp, Homo sapien
gtaagaagcgcccaggcgaggacct

SEQ ID NO: 3627031 - DNA, 25 bp, Homo sapien
gcctgagacatcacagtgtttcaaa

SEQ ID NO: 3627032 - DNA, 25 bp, Homo sapien
gacactgcagggtcccgacactggt

SEQ ID NO: 3627033 - DNA, 25 bp, Homo sapien
ggtcccgacactggtcctgcagaat

SEQ ID NO: 3627034 - DNA, 25 bp, Homo sapien
taaggagttcagtaagagactggag

SEQ ID NO: 3627035 - DNA, 25 bp, Homo sapien
agtgcagacttcctaacgttggtct

SEQ ID NO: 3627036 - DNA, 25 bp, Homo sapien
gttggtcttctcatccctgatcctc

SEQ ID NO: 3627037 - DNA, 25 bp, Homo sapien
gacttcctaacgttggtcttctcat

SEQ ID NO: 3627038 - DNA, 25 bp, Homo sapien
cctaacgttggtcttctcatccctg

SEQ ID NO: 3627039 - DNA, 25 bp, Homo sapien
gactgagatcagaggatcaactgag

SEQ ID NO: 3627040 - DNA, 25 bp, Homo sapien
gatatgttactgttagtactttttc

SEQ ID NO: 3627041 - DNA, 25 bp, Homo sapien
tgttactgttagtactttttcataa

SEQ ID NO: 3627042 - DNA, 25 bp, Homo sapien
gaggaccctaaagagattatatctt

SEQ ID NO: 3627043 - DNA, 25 bp, Homo sapien
catgagtcaccacgcccagccagct

SEQ ID NO: 3627044 - DNA, 25 bp, Homo sapien
tgctgggattatgggattacaggca

SEQ ID NO: 3627045 - DNA, 25 bp, Homo sapien
ggcatgagtcaccacgcccagccag

SEQ ID NO: 3627046 - DNA, 25 bp, Homo sapien
caggcatgagtcaccacgcccagcc

SEQ ID NO: 3627047 - DNA, 25 bp, Homo sapien
cctgagggttcggaacggttagatg

SEQ ID NO: 3627048 - DNA, 25 bp, Homo sapien
cagatccaactgtttcaccactgct

SEQ ID NO: 3627049 - DNA, 25 bp, Homo sapien
gtctatgttgatctcccctgagggt

SEQ ID NO: 3627050 - DNA, 25 bp, Homo sapien
ggttcggaacggttagatgtctgcc

SEQ ID NO: 3627051 - DNA, 25 bp, Homo sapien
ctcagtaaggtaccagggtgactct

SEQ ID NO: 3627052 - DNA, 25 bp, Homo sapien
ggtaccagggtgactctctattaca

SEQ ID NO: 3627053 - DNA, 25 bp, Homo sapien
gggtgactctctattacagaaaacg

SEQ ID NO: 3627054 - DNA, 25 bp, Homo sapien
ctctctattacagaaaacgtaggac

SEQ ID NO: 3627055 - DNA, 25 bp, Homo sapien
agtaggcgccttgtctaagcaacga

SEQ ID NO: 3627056 - DNA, 25 bp, Homo sapien
catcaagagtaaaaacccggtgtgg

SEQ ID NO: 3627057 - DNA, 25 bp, Homo sapien
tggtaacagtcaactccagacagtg

SEQ ID NO: 3627058 - DNA, 25 bp, Homo sapien
aggatactctccgacgcactggtaa

SEQ ID NO: 3627059 - DNA, 25 bp, Homo sapien
cacaaggaagtttactgagcagctg

SEQ ID NO: 3627060 - DNA, 25 bp, Homo sapien
acttcgggagtatttgtaaagccag

SEQ ID NO: 3627061 - DNA, 25 bp, Homo sapien
gaacatagcgtattccccacaagga

SEQ ID NO: 3627062 - DNA, 25 bp, Homo sapien
gactgggctgcaaaagtacgatact

SEQ ID NO: 3627063 - DNA, 25 bp, Homo sapien
agatgtgctgcagtaagatacggac

SEQ ID NO: 3627064 - DNA, 25 bp, Homo sapien
ctgggaatatactctcctttaattc

SEQ ID NO: 3627065 - DNA, 25 bp, Homo sapien
cagtaagatacggacgactgggaat

SEQ ID NO: 3627066 - DNA, 25 bp, Homo sapien
tatactctcctttaattcatccaca

SEQ ID NO: 3627067 - DNA, 25 bp, Homo sapien
cccgccaccacgcctagtttctgta

SEQ ID NO: 3627068 - DNA, 25 bp, Homo sapien
ctcactgcaacttcccccaccgggt

SEQ ID NO: 3627069 - DNA, 25 bp, Homo sapien
cacgcctagtttctgtattttttag

SEQ ID NO: 3627070 - DNA, 25 bp, Homo sapien
caccgggttcaagagtttctcctgc

SEQ ID NO: 3627071 - DNA, 25 bp, Homo sapien
gaccgcctggtttctacagttgatg

SEQ ID NO: 3627072 - DNA, 25 bp, Homo sapien
cattaatattacactgagcatttga

SEQ ID NO: 3627073 - DNA, 25 bp, Homo sapien
ggcacgatgggatccttcaccaact

SEQ ID NO: 3627074 - DNA, 25 bp, Homo sapien
cactgagcatttgatggaaaacaca

SEQ ID NO: 3627075 - DNA, 25 bp, Homo sapien
gggagagcacagcaaatacaatcca

SEQ ID NO: 3627076 - DNA, 25 bp, Homo sapien
agagcacagcaaatacaatccataa

SEQ ID NO: 3627077 - DNA, 25 bp, Homo sapien
gagagcacagcaaatacaatccata

SEQ ID NO: 3627078 - DNA, 25 bp, Homo sapien
tgggagagcacagcaaatacaatcc

SEQ ID NO: 3627079 - DNA, 25 bp, Homo sapien
tatgtattttgcttggttaagagct

SEQ ID NO: 3627080 - DNA, 25 bp, Homo sapien
tgacattcatgaagaactggctcaa

SEQ ID NO: 3627081 - DNA, 25 bp, Homo sapien
ctggcttgtgtaacatgacattcat

SEQ ID NO: 3627082 - DNA, 25 bp, Homo sapien
ctggctcaaaattagttaatgaaac

SEQ ID NO: 3627083 - DNA, 25 bp, Homo sapien
tgaagaactggctcaaaattagtta

SEQ ID NO: 3627084 - DNA, 25 bp, Homo sapien
aaagatggcatttcgaatttgagaa

SEQ ID NO: 3627085 - DNA, 25 bp, Homo sapien
gaaagatggcatttcgaatttgaga

SEQ ID NO: 3627086 - DNA, 25 bp, Homo sapien
gatggcatttcgaatttgagaaagg

SEQ ID NO: 3627087 - DNA, 25 bp, Homo sapien
gcatttcgaatttgagaaaggtccc

SEQ ID NO: 3627088 - DNA, 25 bp, Homo sapien
ttccgattcaagttagattcctggg

SEQ ID NO: 3627089 - DNA, 25 bp, Homo sapien
tgcctcccggggttagcctgagagc

SEQ ID NO: 3627090 - DNA, 25 bp, Homo sapien
ctgagagctcttaggctgttctttc

SEQ ID NO: 3627091 - DNA, 25 bp, Homo sapien
tggaatacttgattggctacactgc

SEQ ID NO: 3627092 - DNA, 25 bp, Homo sapien
caaaatgatagaacaatgccaccag

SEQ ID NO: 3627093 - DNA, 25 bp, Homo sapien
tgccaccagtgtactatgggaaaca

SEQ ID NO: 3627094 - DNA, 25 bp, Homo sapien
cagcggcatgaaggccatattctcg

SEQ ID NO: 3627095 - DNA, 25 bp, Homo sapien
catattctcgatactgtacactgac

SEQ ID NO: 3627096 - DNA, 25 bp, Homo sapien
cagacaagtaccttgaagcttttgg

SEQ ID NO: 3627097 - DNA, 25 bp, Homo sapien
ctattgtaaaaaacagtcgtgtctt

SEQ ID NO: 3627098 - DNA, 25 bp, Homo sapien
tattgtaaaaaacagtcgtgtctta

SEQ ID NO: 3627099 - DNA, 25 bp, Homo sapien
aaaaatcagacaagtaccttgaagc

SEQ ID NO: 3627100 - DNA, 25 bp, Homo sapien
tagcaaagggtaaaaggctttcata

SEQ ID NO: 3627101 - DNA, 25 bp, Homo sapien
aaaggctttcatagagttttgtgaa

SEQ ID NO: 3627102 - DNA, 25 bp, Homo sapien
cagtctctgtgaaatccagttccca

SEQ ID NO: 3627103 - DNA, 25 bp, Homo sapien
gtctctgtgaaatccagttcccaca

SEQ ID NO: 3627104 - DNA, 25 bp, Homo sapien
tcgaggctatgatgaaggcagcagc

SEQ ID NO: 3627105 - DNA, 25 bp, Homo sapien
gcagaaatgccatgactcctgggtt

SEQ ID NO: 3627106 - DNA, 25 bp, Homo sapien
caaaagtcgttctgcaaaagtgtgg

SEQ ID NO: 3627107 - DNA, 25 bp, Homo sapien
aaatactcctgcaattgctcgaggc

SEQ ID NO: 3627108 - DNA, 25 bp, Homo sapien
cgagtctaagatccagcggacacca

SEQ ID NO: 3627109 - DNA, 25 bp, Homo sapien
taagatccagcggacaccagggctg

SEQ ID NO: 3627110 - DNA, 25 bp, Homo sapien
gtctaagatccagcggacaccaggg

SEQ ID NO: 3627111 - DNA, 25 bp, Homo sapien
tgcaggccgctaccaaggccccgca

SEQ ID NO: 3627112 - DNA, 25 bp, Homo sapien
gtgctcaactttcaaagctcgctcc

SEQ ID NO: 3627113 - DNA, 25 bp, Homo sapien
gccgccgtgctcaactttcaaagct

SEQ ID NO: 3627114 - DNA, 25 bp, Homo sapien
cgccgtgctcaactttcaaagctcg

SEQ ID NO: 3627115 - DNA, 25 bp, Homo sapien
ccgccgccgtgctcaactttcaaag

SEQ ID NO: 3627116 - DNA, 25 bp, Homo sapien
tctgagatagggtacttccggtagt

SEQ ID NO: 3627117 - DNA, 25 bp, Homo sapien
gagccgtttccattcgctcaaccaa

SEQ ID NO: 3627118 - DNA, 25 bp, Homo sapien
ctaattcgttcgagaaggagccagg

SEQ ID NO: 3627119 - DNA, 25 bp, Homo sapien
aacgtacagaatttcccactggcca

SEQ ID NO: 3627120 - DNA, 25 bp, Homo sapien
tcgtcaggcgacatttcgcgtgcgt

SEQ ID NO: 3627121 - DNA, 25 bp, Homo sapien
tttcgcgtgcgtgtcaaagggctgc

SEQ ID NO: 3627122 - DNA, 25 bp, Homo sapien
gacatttcgcgtgcgtgtcaaaggg

SEQ ID NO: 3627123 - DNA, 25 bp, Homo sapien
tttgccctcgtcaggcgacatttcg

SEQ ID NO: 3627124 - DNA, 25 bp, Homo sapien
tccgagaagacaagacaactgcagt

SEQ ID NO: 3627125 - DNA, 25 bp, Homo sapien
taatatccgaatgtgaaaggcagcc

SEQ ID NO: 3627126 - DNA, 25 bp, Homo sapien
aaaggcagcccaacgtgtatcgagc

SEQ ID NO: 3627127 - DNA, 25 bp, Homo sapien
gaaaagtagccgaaagcactccgag

SEQ ID NO: 3627128 - DNA, 25 bp, Homo sapien
tgcattgctgctcgggcgccgcagc

SEQ ID NO: 3627129 - DNA, 25 bp, Homo sapien
ggcactgctcctcggtgcattgctg

SEQ ID NO: 3627130 - DNA, 25 bp, Homo sapien
tcctcggtgcattgctgctcgggcg

SEQ ID NO: 3627131 - DNA, 25 bp, Homo sapien
gtggagccggctgtccgtcggcgcc

SEQ ID NO: 3627132 - DNA, 25 bp, Homo sapien
cttcttcggcttcgggcagagcgtg

SEQ ID NO: 3627133 - DNA, 25 bp, Homo sapien
cccggcggtgcgatgagcttcttcg

SEQ ID NO: 3627134 - DNA, 25 bp, Homo sapien
cggtctccgggaaggtgagccttgc

SEQ ID NO: 3627135 - DNA, 25 bp, Homo sapien
ggtggaaatccttctgaacgatgca

SEQ ID NO: 3627136 - DNA, 25 bp, Homo sapien
tgtggtaagcacgaatcctgacagt

SEQ ID NO: 3627137 - DNA, 25 bp, Homo sapien
tgattctggcctacttaacaagctg

SEQ ID NO: 3627138 - DNA, 25 bp, Homo sapien
ttcattagcccttgaaacactaagt

SEQ ID NO: 3627139 - DNA, 25 bp, Homo sapien
taaaaggcacattaagatgaggtgg

SEQ ID NO: 3627140 - DNA, 25 bp, Homo sapien
cccatctaccaacaccagcggctgg

SEQ ID NO: 3627141 - DNA, 25 bp, Homo sapien
agttgacccgttacttgcaacctga

SEQ ID NO: 3627142 - DNA, 25 bp, Homo sapien
gtgaggctcagttgacccgttactt

SEQ ID NO: 3627143 - DNA, 25 bp, Homo sapien
gggcggaccttgtgaggctcagttg

SEQ ID NO: 3627144 - DNA, 25 bp, Homo sapien
tgggaacaggatcacccatgcgctg

SEQ ID NO: 3627145 - DNA, 25 bp, Homo sapien
aatttgctttgattctctcaggcgc

SEQ ID NO: 3627146 - DNA, 25 bp, Homo sapien
tctctatccaactgtgaaagtgagg

SEQ ID NO: 3627147 - DNA, 25 bp, Homo sapien
ggtgcgacacacaatcctcatggga

SEQ ID NO: 3627148 - DNA, 25 bp, Homo sapien
aaagcttgacttctttgcagcaatg

SEQ ID NO: 3627149 - DNA, 25 bp, Homo sapien
tgcagcaatgtctcgcccattccag

SEQ ID NO: 3627150 - DNA, 25 bp, Homo sapien
caggtaagcataccaagcaagcccc

SEQ ID NO: 3627151 - DNA, 25 bp, Homo sapien
ggtacacaagcccaggtaagcatac

SEQ ID NO: 3627152 - DNA, 25 bp, Homo sapien
gcgagcagtcattcgttcaaaacta

SEQ ID NO: 3627153 - DNA, 25 bp, Homo sapien
tgccaagcactatagagtactgggt

SEQ ID NO: 3627154 - DNA, 25 bp, Homo sapien
tacatcttacatggtactaaggcga

SEQ ID NO: 3627155 - DNA, 25 bp, Homo sapien
tcaaaactatttaccaggtgccaag

SEQ ID NO: 3627156 - DNA, 25 bp, Homo sapien
gggtcaggggctggattgataatct

SEQ ID NO: 3627157 - DNA, 25 bp, Homo sapien
tgggtcaggggctggattgataatc

SEQ ID NO: 3627158 - DNA, 25 bp, Homo sapien
cctgggtcaggggctggattgataa

SEQ ID NO: 3627159 - DNA, 25 bp, Homo sapien
ctgggtcaggggctggattgataat

SEQ ID NO: 3627160 - DNA, 25 bp, Homo sapien
ctggcgagtgaagagaaccatattt

SEQ ID NO: 3627161 - DNA, 25 bp, Homo sapien
gaaacgtttcatcatccgaacaaac

SEQ ID NO: 3627162 - DNA, 25 bp, Homo sapien
ttaaggggccaccagtagctttgtg

SEQ ID NO: 3627163 - DNA, 25 bp, Homo sapien
gggaatgaaacgtttcatcatccga

SEQ ID NO: 3627164 - DNA, 25 bp, Homo sapien
aagacgtgtctaggctgactgtgcc

SEQ ID NO: 3627165 - DNA, 25 bp, Homo sapien
cctcatctgagtaagtgctgggccg

SEQ ID NO: 3627166 - DNA, 25 bp, Homo sapien
tgggccgtgtaccttgacctacagt

SEQ ID NO: 3627167 - DNA, 25 bp, Homo sapien
caggaagctcctatctcagtatcac

SEQ ID NO: 3627168 - DNA, 25 bp, Homo sapien
ctgtgtgtggtctgggtaagcctct

SEQ ID NO: 3627169 - DNA, 25 bp, Homo sapien
catggaccacttagggttgtcctct

SEQ ID NO: 3627170 - DNA, 25 bp, Homo sapien
tggtctgggtaagcctctttcacga

SEQ ID NO: 3627171 - DNA, 25 bp, Homo sapien
tctttgctagatgggtcataatggg

SEQ ID NO: 3627172 - DNA, 25 bp, Homo sapien
tttatcctgataagcttggaggagc

SEQ ID NO: 3627173 - DNA, 25 bp, Homo sapien
tatcctgataagcttggaggagcta

SEQ ID NO: 3627174 - DNA, 25 bp, Homo sapien
ttttatcctgataagcttggaggag

SEQ ID NO: 3627175 - DNA, 25 bp, Homo sapien
tcctgataagcttggaggagctatc

SEQ ID NO: 3627176 - DNA, 25 bp, Homo sapien
ctacttaagttagtctccctggagg

SEQ ID NO: 3627177 - DNA, 25 bp, Homo sapien
gaagtctgtgctagtcggacctgaa

SEQ ID NO: 3627178 - DNA, 25 bp, Homo sapien
ggacctgaatgaaggcctgctttga

SEQ ID NO: 3627179 - DNA, 25 bp, Homo sapien
gatcaagacttagaggtggagtgaa

SEQ ID NO: 3627180 - DNA, 25 bp, Homo sapien
gctctttgcagttgctatggtagaa

SEQ ID NO: 3627181 - DNA, 25 bp, Homo sapien
cagttgctatggtagaagaaggctt

SEQ ID NO: 3627182 - DNA, 25 bp, Homo sapien
tgcgatgcctggctctttgcagttg

SEQ ID NO: 3627183 - DNA, 25 bp, Homo sapien
tcatggctctaaggaagttccgagc

SEQ ID NO: 3627184 - DNA, 25 bp, Homo sapien
tggtagttacgaacaccatcccagc

SEQ ID NO: 3627185 - DNA, 25 bp, Homo sapien
gtgctttgagatcctcaatgctgaa

SEQ ID NO: 3627186 - DNA, 25 bp, Homo sapien
ctgtttgggctgtgctttgagatcc

SEQ ID NO: 3627187 - DNA, 25 bp, Homo sapien
accatcccagcatgttgtctgtttg

SEQ ID NO: 3627188 - DNA, 25 bp, Homo sapien
cttcacatctacacctttctctagg

SEQ ID NO: 3627189 - DNA, 25 bp, Homo sapien
tttctctaggcggctctctggctct

SEQ ID NO: 3627190 - DNA, 25 bp, Homo sapien
ctctaggcggctctctggctctgac

SEQ ID NO: 3627191 - DNA, 25 bp, Homo sapien
cacctttctctaggcggctctctgg

SEQ ID NO: 3627192 - DNA, 25 bp, Homo sapien
cagtttttagtggctgaagtcttct

SEQ ID NO: 3627193 - DNA, 25 bp, Homo sapien
ttttggtgcgttttcctgatagtcc

SEQ ID NO: 3627194 - DNA, 25 bp, Homo sapien
tggagtcctccactttagctaatgc

SEQ ID NO: 3627195 - DNA, 25 bp, Homo sapien
tccactttagctaatgcctcacctg

SEQ ID NO: 3627196 - DNA, 25 bp, Homo sapien
ttcaaatcatggatccattaccagc

SEQ ID NO: 3627197 - DNA, 25 bp, Homo sapien
gcaaaaagaaaagatcatgcttgtt

SEQ ID NO: 3627198 - DNA, 25 bp, Homo sapien
cattaccagctgtaggaacttaatc

SEQ ID NO: 3627199 - DNA, 25 bp, Homo sapien
catgcttgttaaaggcaatgtttca

SEQ ID NO: 3627200 - DNA, 25 bp, Homo sapien
ttgtagaaaaatggtgatgattcga

SEQ ID NO: 3627201 - DNA, 25 bp, Homo sapien
gaaaaatggtgatgattcgatttca

SEQ ID NO: 3627202 - DNA, 25 bp, Homo sapien
gattcgatttcatcccaagacaatc

SEQ ID NO: 3627203 - DNA, 25 bp, Homo sapien
tgattcgatttcatcccaagacaat

SEQ ID NO: 3627204 - DNA, 25 bp, Homo sapien
tttgtgcacaacaaccattgcctga

SEQ ID NO: 3627205 - DNA, 25 bp, Homo sapien
tatattctttagcacgccacctggt

SEQ ID NO: 3627206 - DNA, 25 bp, Homo sapien
tgtttgcagttcacccgcaagcagg

SEQ ID NO: 3627207 - DNA, 25 bp, Homo sapien
gccacctggtatctcaaagagtctt

SEQ ID NO: 3627208 - DNA, 25 bp, Homo sapien
agccagcctcttccggggtctcgac

SEQ ID NO: 3627209 - DNA, 25 bp, Homo sapien
ccagcctcttccggggtctcgacat

SEQ ID NO: 3627210 - DNA, 25 bp, Homo sapien
cagccagcctcttccggggtctcga

SEQ ID NO: 3627211 - DNA, 25 bp, Homo sapien
ctgaaccagaagtcccagccagcct

SEQ ID NO: 3627212 - DNA, 25 bp, Homo sapien
gcaggggactttagtgcggacgatt

SEQ ID NO: 3627213 - DNA, 25 bp, Homo sapien
ggtcacgctgcaggggactttagtg

SEQ ID NO: 3627214 - DNA, 25 bp, Homo sapien
tcacgctgcaggggactttagtgcg

SEQ ID NO: 3627215 - DNA, 25 bp, Homo sapien
cgctgcaggggactttagtgcggac

SEQ ID NO: 3627216 - DNA, 25 bp, Homo sapien
aaaacccgcgcagagcgagatggag

SEQ ID NO: 3627217 - DNA, 25 bp, Homo sapien
ttttgcgaaacacagacgcctacgt

SEQ ID NO: 3627218 - DNA, 25 bp, Homo sapien
tagaacgtctccaacttttgcgaaa

SEQ ID NO: 3627219 - DNA, 25 bp, Homo sapien
caacgagaggcagcctagaacgtct

SEQ ID NO: 3627220 - DNA, 25 bp, Homo sapien
aaactcttctcggttctgtccttgg

SEQ ID NO: 3627221 - DNA, 25 bp, Homo sapien
cgttatctgcgccatttccatctcg

SEQ ID NO: 3627222 - DNA, 25 bp, Homo sapien
ggctccacagagacacttttgttgg

SEQ ID NO: 3627223 - DNA, 25 bp, Homo sapien
caggaacccctatctcagtatgtag

SEQ ID NO: 3627224 - DNA, 25 bp, Homo sapien
gaatggataatctagatgatgaagt

SEQ ID NO: 3627225 - DNA, 25 bp, Homo sapien
tatccttgctaattaggatcaactg

SEQ ID NO: 3627226 - DNA, 25 bp, Homo sapien
taatctagatgatgaagtaatttgc

SEQ ID NO: 3627227 - DNA, 25 bp, Homo sapien
gttatccttgctaattaggatcaac

SEQ ID NO: 3627228 - DNA, 25 bp, Homo sapien
aacactctgcagactcgactgcggt

SEQ ID NO: 3627229 - DNA, 25 bp, Homo sapien
ccaacactctgcagactcgactgcg

SEQ ID NO: 3627230 - DNA, 25 bp, Homo sapien
acactctgcagactcgactgcggtc

SEQ ID NO: 3627231 - DNA, 25 bp, Homo sapien
actctgcagactcgactgcggtccg

SEQ ID NO: 3627232 - DNA, 25 bp, Homo sapien
cgacccccgcggcgcttggtgggcg

SEQ ID NO: 3627233 - DNA, 25 bp, Homo sapien
cccccgcggcgcttggtgggcggtg

SEQ ID NO: 3627234 - DNA, 25 bp, Homo sapien
gctgtgcagcgcgacccccgcggcg

SEQ ID NO: 3627235 - DNA, 25 bp, Homo sapien
cagcgcgacccccgcggcgcttggt

SEQ ID NO: 3627236 - DNA, 25 bp, Homo sapien
gagacccggccagtttgtgacttct

SEQ ID NO: 3627237 - DNA, 25 bp, Homo sapien
ttgccagtgggaaactctaccagag

SEQ ID NO: 3627238 - DNA, 25 bp, Homo sapien
gatttgctcacacacaaagatttgg

SEQ ID NO: 3627239 - DNA, 25 bp, Homo sapien
gaactccaggtcatacaagatttgc

SEQ ID NO: 3627240 - DNA, 25 bp, Homo sapien
gctgtcgcatgtgcaagcctcctaa

SEQ ID NO: 3627241 - DNA, 25 bp, Homo sapien
tgtgccctctaaaaggaaggccgtc

SEQ ID NO: 3627242 - DNA, 25 bp, Homo sapien
taagagaattcatacgctgtcgcat

SEQ ID NO: 3627243 - DNA, 25 bp, Homo sapien
tgtacataggagctgttcccagtgg

SEQ ID NO: 3627244 - DNA, 25 bp, Homo sapien
tgctgacaggcctttaaacctgaac

SEQ ID NO: 3627245 - DNA, 25 bp, Homo sapien
gggcagttggtgtcacaatcctaaa

SEQ ID NO: 3627246 - DNA, 25 bp, Homo sapien
caatcctaaaagaagttgtgagaag

SEQ ID NO: 3627247 - DNA, 25 bp, Homo sapien
ggtctaagtcttgggtgctgaaacc

SEQ ID NO: 3627248 - DNA, 25 bp, Homo sapien
tctggactgcctcaatatcaagggc

SEQ ID NO: 3627249 - DNA, 25 bp, Homo sapien
tctggatagcacacctctgaatgta

SEQ ID NO: 3627250 - DNA, 25 bp, Homo sapien
cacagctacagatgcagaaggtttc

SEQ ID NO: 3627251 - DNA, 25 bp, Homo sapien
gcctgtggtctaggagtgctattca

SEQ ID NO: 3627252 - DNA, 25 bp, Homo sapien
cagttcctgccgctcttattcaaca

SEQ ID NO: 3627253 - DNA, 25 bp, Homo sapien
cctgtgcttgggatgttggccttgt

SEQ ID NO: 3627254 - DNA, 25 bp, Homo sapien
aggcccagctgtcaaactctttcaa

SEQ ID NO: 3627255 - DNA, 25 bp, Homo sapien
cagggctccttcatagaggttctca

SEQ ID NO: 3627256 - DNA, 25 bp, Homo sapien
gaaccctcgttttaggatctgcacg

SEQ ID NO: 3627257 - DNA, 25 bp, Homo sapien
gaatagtccccactgtcttctggaa

SEQ ID NO: 3627258 - DNA, 25 bp, Homo sapien
tgtcgacccaggttaggaagcccga

SEQ ID NO: 3627259 - DNA, 25 bp, Homo sapien
caattctcgctcgtttgccaagagg

SEQ ID NO: 3627260 - DNA, 25 bp, Homo sapien
acaaaaattcgagagcgtggtgagc

SEQ ID NO: 3627261 - DNA, 25 bp, Homo sapien
ttgtttgaagggctgaagctgtatg

SEQ ID NO: 3627262 - DNA, 25 bp, Homo sapien
tgcatttctgcaatctagatgggac

SEQ ID NO: 3627263 - DNA, 25 bp, Homo sapien
tctgcaatctagatgggactcagtg

SEQ ID NO: 3627264 - DNA, 25 bp, Homo sapien
tctgtttgcatttctgcaatctaga

SEQ ID NO: 3627265 - DNA, 25 bp, Homo sapien
caatgtaaaggagattccgagccca

SEQ ID NO: 3627266 - DNA, 25 bp, Homo sapien
cagagttccacgaggtcatgtcaga

SEQ ID NO: 3627267 - DNA, 25 bp, Homo sapien
catttggacctgaaaaggactctgg

SEQ ID NO: 3627268 - DNA, 25 bp, Homo sapien
aacagacagtttagggcagcaggat

SEQ ID NO: 3627269 - DNA, 25 bp, Homo sapien
tcttggtcaggatcttcatgggatg

SEQ ID NO: 3627270 - DNA, 25 bp, Homo sapien
ttttcttggtcaggatcttcatggg

SEQ ID NO: 3627271 - DNA, 25 bp, Homo sapien
gtcaggatcttcatgggatgccctg

SEQ ID NO: 3627272 - DNA, 25 bp, Homo sapien
cttggtcaggatcttcatgggatgc

SEQ ID NO: 3627273 - DNA, 25 bp, Homo sapien
gggccacagtgtacctaaaaattga

SEQ ID NO: 3627274 - DNA, 25 bp, Homo sapien
tgtaagctatcgtctcagatgaaca

SEQ ID NO: 3627275 - DNA, 25 bp, Homo sapien
gccggcaaggacttatgttctggga

SEQ ID NO: 3627276 - DNA, 25 bp, Homo sapien
tgttctgggaatcgaaggacaatga

SEQ ID NO: 3627277 - DNA, 25 bp, Homo sapien
tgttcacggcactccggatgttctg

SEQ ID NO: 3627278 - DNA, 25 bp, Homo sapien
tgctgtgcccggttgcatggatcct

SEQ ID NO: 3627279 - DNA, 25 bp, Homo sapien
tggatcctggcctatctgtgtctgg

SEQ ID NO: 3627280 - DNA, 25 bp, Homo sapien
cagcttgcgtatgctggtggccagc

SEQ ID NO: 3627281 - DNA, 25 bp, Homo sapien
gtcttgttaggttgtgcgcggcccc

SEQ ID NO: 3627282 - DNA, 25 bp, Homo sapien
cacatccgggagcactttttactac

SEQ ID NO: 3627283 - DNA, 25 bp, Homo sapien
gaaaaattactccagagggctccac

SEQ ID NO: 3627284 - DNA, 25 bp, Homo sapien
tggcatggcaggacgcatttcaagc

SEQ ID NO: 3627285 - DNA, 25 bp, Homo sapien
tgagttcagggtttgctgtccggac

SEQ ID NO: 3627286 - DNA, 25 bp, Homo sapien
cttctaaggtggaaaaatcgctttg

SEQ ID NO: 3627287 - DNA, 25 bp, Homo sapien
ggaatcctagcagaaagtgttaaca

SEQ ID NO: 3627288 - DNA, 25 bp, Homo sapien
tcgctttggataaatgaagccgaga

SEQ ID NO: 3627289 - DNA, 25 bp, Homo sapien
gatgcctgtcgatggtgttcctcag

SEQ ID NO: 3627290 - DNA, 25 bp, Homo sapien
tctgatccggctcgtgtggaggcct

SEQ ID NO: 3627291 - DNA, 25 bp, Homo sapien
tgtgcctgtccggttctgcctgggt

SEQ ID NO: 3627292 - DNA, 25 bp, Homo sapien
tgccagagatgtcgcagatgcctgt

SEQ ID NO: 3627293 - DNA, 25 bp, Homo sapien
gttgtgcgtgtctttcgtggtgctc

SEQ ID NO: 3627294 - DNA, 25 bp, Homo sapien
tgggccgtgcgggttgtgcgtgtct

SEQ ID NO: 3627295 - DNA, 25 bp, Homo sapien
tgtctttcgtggtgctccaccctct

SEQ ID NO: 3627296 - DNA, 25 bp, Homo sapien
tctcgtcctcgggtctttcggtcat

SEQ ID NO: 3627297 - DNA, 25 bp, Homo sapien
aaccgtgtctgccattgtggacgcc

SEQ ID NO: 3627298 - DNA, 25 bp, Homo sapien
tcagagacttgaccaggattgacag

SEQ ID NO: 3627299 - DNA, 25 bp, Homo sapien
tgtgcacttgatacacctggtcagg

SEQ ID NO: 3627300 - DNA, 25 bp, Homo sapien
tctacatgttccacggaggcaccaa

SEQ ID NO: 3627301 - DNA, 25 bp, Homo sapien
gggccatgctgtgatcatggacagt

SEQ ID NO: 3627302 - DNA, 25 bp, Homo sapien
tcctttaggttgagagtcccagaaa

SEQ ID NO: 3627303 - DNA, 25 bp, Homo sapien
gagaaggtacttgcctggacagtca

SEQ ID NO: 3627304 - DNA, 25 bp, Homo sapien
gaaattacacctgcagctagaaatt

SEQ ID NO: 3627305 - DNA, 25 bp, Homo sapien
catgaagcttcgagacttcttcggc

SEQ ID NO: 3627306 - DNA, 25 bp, Homo sapien
ccttatctcctgtggaggacgggag

SEQ ID NO: 3627307 - DNA, 25 bp, Homo sapien
tcttgccggcttcacctgttacagg

SEQ ID NO: 3627308 - DNA, 25 bp, Homo sapien
gcgtgcaagaatatcctagacaagg

SEQ ID NO: 3627309 - DNA, 25 bp, Homo sapien
gctctgcatgctcctgacttaggga

SEQ ID NO: 3627310 - DNA, 25 bp, Homo sapien
aataaacacctcttcagtaggctgg

SEQ ID NO: 3627311 - DNA, 25 bp, Homo sapien
gccttatgctctgtaaacgtgaacc

SEQ ID NO: 3627312 - DNA, 25 bp, Homo sapien
tccaacttgcaggagaatgagccgg

SEQ ID NO: 3627313 - DNA, 25 bp, Homo sapien
cctgcagccccgtcagtgcggggag

SEQ ID NO: 3627314 - DNA, 25 bp, Homo sapien
gtgcgctggagcaccagcttggctg

SEQ ID NO: 3627315 - DNA, 25 bp, Homo sapien
accctggccatcaggtctctcgggc

SEQ ID NO: 3627316 - DNA, 25 bp, Homo sapien
gccatcaggtctctcgggccctggt

SEQ ID NO: 3627317 - DNA, 25 bp, Homo sapien
gagaacaacaggtctgggatttctg

SEQ ID NO: 3627318 - DNA, 25 bp, Homo sapien
ggatggaaggccaagaacagggtct

SEQ ID NO: 3627319 - DNA, 25 bp, Homo sapien
ggtgattccttaggagtcggccttg

SEQ ID NO: 3627320 - DNA, 25 bp, Homo sapien
agtcggccttggagggaccatcagc

SEQ ID NO: 3627321 - DNA, 25 bp, Homo sapien
gctattgcttagctccagggcaaga

SEQ ID NO: 3627322 - DNA, 25 bp, Homo sapien
agtgaggctcggtacagatgcattc

SEQ ID NO: 3627323 - DNA, 25 bp, Homo sapien
gatgcattctaagtggcgctggcca

SEQ ID NO: 3627324 - DNA, 25 bp, Homo sapien
tagggagtcaggagtaccagctgct

SEQ ID NO: 3627325 - DNA, 25 bp, Homo sapien
gggacagacgctggccagcgagagt

SEQ ID NO: 3627326 - DNA, 25 bp, Homo sapien
aatggcagtgccttgtggggtgcag

SEQ ID NO: 3627327 - DNA, 25 bp, Homo sapien
acgctggccagcgagagtctgaatg

SEQ ID NO: 3627328 - DNA, 25 bp, Homo sapien
ctggccagcgagagtctgaatggca

SEQ ID NO: 3627329 - DNA, 25 bp, Homo sapien
agtgtgtggcccaccctcgtcatgc

SEQ ID NO: 3627330 - DNA, 25 bp, Homo sapien
ttaatgcctggatactttcaggtgg

SEQ ID NO: 3627331 - DNA, 25 bp, Homo sapien
cagctgcgtgggtgaaagttaatgc

SEQ ID NO: 3627332 - DNA, 25 bp, Homo sapien
aagaatgagacagttgattcggccc

SEQ ID NO: 3627333 - DNA, 25 bp, Homo sapien
caccgaggggtcagtgaagcccttc

SEQ ID NO: 3627334 - DNA, 25 bp, Homo sapien
tctccaccgaggggtcagtgaagcc

SEQ ID NO: 3627335 - DNA, 25 bp, Homo sapien
tccaccgaggggtcagtgaagccct

SEQ ID NO: 3627336 - DNA, 25 bp, Homo sapien
accgaggggtcagtgaagcccttct

SEQ ID NO: 3627337 - DNA, 25 bp, Homo sapien
ccaggtcgttgagggtgacaagttc

SEQ ID NO: 3627338 - DNA, 25 bp, Homo sapien
catgtctattgcaaatggccggtgg

SEQ ID NO: 3627339 - DNA, 25 bp, Homo sapien
caagttctcgaaggaggctgctttc

SEQ ID NO: 3627340 - DNA, 25 bp, Homo sapien
tcgcagcttgaagtaggcctggctt

SEQ ID NO: 3627341 - DNA, 25 bp, Homo sapien
ggtcagacgtgcagtactccctggg

SEQ ID NO: 3627342 - DNA, 25 bp, Homo sapien
ctcttcgaagagctccaggctgtag

SEQ ID NO: 3627343 - DNA, 25 bp, Homo sapien
gtgtacacgtactcggtgcgcacca

SEQ ID NO: 3627344 - DNA, 25 bp, Homo sapien
gtcgtcgtcggcgaagtagaccacg

SEQ ID NO: 3627345 - DNA, 25 bp, Homo sapien
agcacacacgcagtcgctcagaggg

SEQ ID NO: 3627346 - DNA, 25 bp, Homo sapien
tgtggcacgctagcgtggagctcat

SEQ ID NO: 3627347 - DNA, 25 bp, Homo sapien
gagctcatctgaacggacccaggag

SEQ ID NO: 3627348 - DNA, 25 bp, Homo sapien
gccactgtcatcggcagcatgtggg

SEQ ID NO: 3627349 - DNA, 25 bp, Homo sapien
cagaggacctgtgcccttggacagt

SEQ ID NO: 3627350 - DNA, 25 bp, Homo sapien
ttggacagtccccatacattagggc

SEQ ID NO: 3627351 - DNA, 25 bp, Homo sapien
ggcacggctactgcgtgtgctcctg

SEQ ID NO: 3627352 - DNA, 25 bp, Homo sapien
atcccaaggccgcagaggacctgtg

SEQ ID NO: 3627353 - DNA, 25 bp, Homo sapien
gcaatcgacacgatatcatgtcgct

SEQ ID NO: 3627354 - DNA, 25 bp, Homo sapien
caatgattctgaactgacaagcaca

SEQ ID NO: 3627355 - DNA, 25 bp, Homo sapien
acccctctggagtgatgtatttgca

SEQ ID NO: 3627356 - DNA, 25 bp, Homo sapien
agctctgccaagaacgcaatcgaca

SEQ ID NO: 3627357 - DNA, 25 bp, Homo sapien
ccttcttgtttatcacactgccagg

SEQ ID NO: 3627358 - DNA, 25 bp, Homo sapien
gcacgctgcaaacgaacagctgcct

SEQ ID NO: 3627359 - DNA, 25 bp, Homo sapien
catgcacgctgcaaacgaacagctg

SEQ ID NO: 3627360 - DNA, 25 bp, Homo sapien
atcacactgccaggtggtatcatgc

SEQ ID NO: 3627361 - DNA, 25 bp, Homo sapien
ggtgcgagggtgctctggtgccaga

SEQ ID NO: 3627362 - DNA, 25 bp, Homo sapien
tccagggcagcacgatgaggacgat

SEQ ID NO: 3627363 - DNA, 25 bp, Homo sapien
tgaggacgatcgctaggatgtcccg

SEQ ID NO: 3627364 - DNA, 25 bp, Homo sapien
ctaggatgtcccgtctcttcggcat

SEQ ID NO: 3627365 - DNA, 25 bp, Homo sapien
tgagtggcggtaagttcaggagagg

SEQ ID NO: 3627366 - DNA, 25 bp, Homo sapien
ggagaaaagaacaggcatgggccgg

SEQ ID NO: 3627367 - DNA, 25 bp, Homo sapien
aggacagagcagctgaatgttggct

SEQ ID NO: 3627368 - DNA, 25 bp, Homo sapien
ctgaatgttggctagcaggtcttac

SEQ ID NO: 3627369 - DNA, 25 bp, Homo sapien
gtccggcccaactggagtctgagaa

SEQ ID NO: 3627370 - DNA, 25 bp, Homo sapien
tggagagtccggcccaactggagtc

SEQ ID NO: 3627371 - DNA, 25 bp, Homo sapien
agagtccggcccaactggagtctga

SEQ ID NO: 3627372 - DNA, 25 bp, Homo sapien
tctgagaaggggtcgctgtccaggg

SEQ ID NO: 3627373 - DNA, 25 bp, Homo sapien
ctcctgccccagctcacgtgtgctc

SEQ ID NO: 3627374 - DNA, 25 bp, Homo sapien
ctgccccagctcacgtgtgctcacc

SEQ ID NO: 3627375 - DNA, 25 bp, Homo sapien
gccccagctcacgtgtgctcaccat

SEQ ID NO: 3627376 - DNA, 25 bp, Homo sapien
ctgggggccatgctgcctgctcctg

SEQ ID NO: 3627377 - DNA, 25 bp, Homo sapien
tcttcaaagtgattcaagggctgag

SEQ ID NO: 3627378 - DNA, 25 bp, Homo sapien
catagatgatgtttccccaggactg

SEQ ID NO: 3627379 - DNA, 25 bp, Homo sapien
taagtaactcgcagagccagttgtc

SEQ ID NO: 3627380 - DNA, 25 bp, Homo sapien
tgagcagtctgagtgtagcaccctt

SEQ ID NO: 3627381 - DNA, 25 bp, Homo sapien
cccaccctgccctcgccttgctcat

SEQ ID NO: 3627382 - DNA, 25 bp, Homo sapien
tggtcgggccgagtgcccccaggaa

SEQ ID NO: 3627383 - DNA, 25 bp, Homo sapien
ccaggaaggcactgctgctctcccc

SEQ ID NO: 3627384 - DNA, 25 bp, Homo sapien
tcagtggtcgggccgagtgccccca

SEQ ID NO: 3627385 - DNA, 25 bp, Homo sapien
caccgtgtgacgacatcacttgctg

SEQ ID NO: 3627386 - DNA, 25 bp, Homo sapien
tctgcaagtcaaagtccattctggc

SEQ ID NO: 3627387 - DNA, 25 bp, Homo sapien
atgtagctagtggtcttcaggcagc

SEQ ID NO: 3627388 - DNA, 25 bp, Homo sapien
gaatctcaaccgaatacactgttgg

SEQ ID NO: 3627389 - DNA, 25 bp, Homo sapien
tgaccggacgatggtgcacagagca

SEQ ID NO: 3627390 - DNA, 25 bp, Homo sapien
ccaggcccatggaagaccccagaga

SEQ ID NO: 3627391 - DNA, 25 bp, Homo sapien
aaggcgttcggcaggaatgtgctaa

SEQ ID NO: 3627392 - DNA, 25 bp, Homo sapien
aacctgataaaggattgtgggacgc

SEQ ID NO: 3627393 - DNA, 25 bp, Homo sapien
gtccaggggcaagccgtcgaagctg

SEQ ID NO: 3627394 - DNA, 25 bp, Homo sapien
gtgaggcacattctgctacccagtg

SEQ ID NO: 3627395 - DNA, 25 bp, Homo sapien
ccaggcccgtagggccccagagtgt

SEQ ID NO: 3627396 - DNA, 25 bp, Homo sapien
caccacagggcgcctgctcagtggg

SEQ ID NO: 3627397 - DNA, 25 bp, Homo sapien
tccaaggcttgggttagctgaaaca

SEQ ID NO: 3627398 - DNA, 25 bp, Homo sapien
gcttgggttagctgaaacagccctg

SEQ ID NO: 3627399 - DNA, 25 bp, Homo sapien
agtgtccaaggcttgggttagctga

SEQ ID NO: 3627400 - DNA, 25 bp, Homo sapien
ggttagctgaaacagccctgcagaa

SEQ ID NO: 3627401 - DNA, 25 bp, Homo sapien
tgctgtggcttgagctcaatggaaa

SEQ ID NO: 3627402 - DNA, 25 bp, Homo sapien
tctctccccagcacgaggcggtgct

SEQ ID NO: 3627403 - DNA, 25 bp, Homo sapien
acaccagcatgcagttgtgacaaaa

SEQ ID NO: 3627404 - DNA, 25 bp, Homo sapien
tggctcagtggcgaccagccttcgg

SEQ ID NO: 3627405 - DNA, 25 bp, Homo sapien
ggcccctggaacctggcgctgtggc

SEQ ID NO: 3627406 - DNA, 25 bp, Homo sapien
agcctgaccactgtcgggaggcggg

SEQ ID NO: 3627407 - DNA, 25 bp, Homo sapien
tgcttggaggacgtgcccctgcaca

SEQ ID NO: 3627408 - DNA, 25 bp, Homo sapien
cctgcacaggtggaccaggcgacaa

SEQ ID NO: 3627409 - DNA, 25 bp, Homo sapien
tgggacatgcttccctccctcatag

SEQ ID NO: 3627410 - DNA, 25 bp, Homo sapien
aggctggcatcccttcacaccggta

SEQ ID NO: 3627411 - DNA, 25 bp, Homo sapien
caggtagactctaggagtacccggc

SEQ ID NO: 3627412 - DNA, 25 bp, Homo sapien
accggtacgtttgcctgggacatgc

SEQ ID NO: 3627413 - DNA, 25 bp, Homo sapien
ggcaccacagggtgcctgggcagcc

SEQ ID NO: 3627414 - DNA, 25 bp, Homo sapien
ctgggcaccacagggtgcctgggca

SEQ ID NO: 3627415 - DNA, 25 bp, Homo sapien
tgggcaccacagggtgcctgggcag

SEQ ID NO: 3627416 - DNA, 25 bp, Homo sapien
gggcaccacagggtgcctgggcagc

SEQ ID NO: 3627417 - DNA, 25 bp, Homo sapien
tgtgggtgcaactggccggtccctt

SEQ ID NO: 3627418 - DNA, 25 bp, Homo sapien
gcccggaggctgtacttcagcccag

SEQ ID NO: 3627419 - DNA, 25 bp, Homo sapien
cgtgaggaaagcagctcgcccggag

SEQ ID NO: 3627420 - DNA, 25 bp, Homo sapien
cctgtgtcggtcagctgcagtgtgg

SEQ ID NO: 3627421 - DNA, 25 bp, Homo sapien
ctctgtcagggatagttgaggttgg

SEQ ID NO: 3627422 - DNA, 25 bp, Homo sapien
agggctctgtcagggatagttgagg

SEQ ID NO: 3627423 - DNA, 25 bp, Homo sapien
gctctgtcagggatagttgaggttg

SEQ ID NO: 3627424 - DNA, 25 bp, Homo sapien
ggctctgtcagggatagttgaggtt

SEQ ID NO: 3627425 - DNA, 25 bp, Homo sapien
ctccctctggcctccggcttgggtc

SEQ ID NO: 3627426 - DNA, 25 bp, Homo sapien
tccctctggcctccggcttgggtcg

SEQ ID NO: 3627427 - DNA, 25 bp, Homo sapien
cttccacccctggtggcttggtggg

SEQ ID NO: 3627428 - DNA, 25 bp, Homo sapien
ttggtgggcagggtccctccctctg

SEQ ID NO: 3627429 - DNA, 25 bp, Homo sapien
tctggtggaacagtgagtaactgcc

SEQ ID NO: 3627430 - DNA, 25 bp, Homo sapien
ctggacctggagtgatccccaagca

SEQ ID NO: 3627431 - DNA, 25 bp, Homo sapien
gagtaactgcccaaccagaaaccta

SEQ ID NO: 3627432 - DNA, 25 bp, Homo sapien
cacatattcaacacagcgcctgcaa

SEQ ID NO: 3627433 - DNA, 25 bp, Homo sapien
ttgctacaccgaaggtcccaagggc

SEQ ID NO: 3627434 - DNA, 25 bp, Homo sapien
gtggtgaactggtcgcgcctccttc

SEQ ID NO: 3627435 - DNA, 25 bp, Homo sapien
caagagagttaacttggcagtgccc

SEQ ID NO: 3627436 - DNA, 25 bp, Homo sapien
aggagccagagagcgatccagagag

SEQ ID NO: 3627437 - DNA, 25 bp, Homo sapien
gcgacgagtccggagcgtctccggt

SEQ ID NO: 3627438 - DNA, 25 bp, Homo sapien
gagtccggagcgtctccggtgcggt

SEQ ID NO: 3627439 - DNA, 25 bp, Homo sapien
tccggagcgtctccggtgcggtcca

SEQ ID NO: 3627440 - DNA, 25 bp, Homo sapien
ctgcggcgacgagtccggagcgtct

SEQ ID NO: 3627441 - DNA, 25 bp, Homo sapien
cccgggggccacttcatagccgcgg

SEQ ID NO: 3627442 - DNA, 25 bp, Homo sapien
gcggccgaaggctgggagcgcgcgg

SEQ ID NO: 3627443 - DNA, 25 bp, Homo sapien
ggccacttcatagccgcggggtccg

SEQ ID NO: 3627444 - DNA, 25 bp, Homo sapien
ccggctcgttctgggctcagcgagg

SEQ ID NO: 3627445 - DNA, 25 bp, Homo sapien
tattttcctagtctccatactctgc

SEQ ID NO: 3627446 - DNA, 25 bp, Homo sapien
ttcctagtctccatactctgcttct

SEQ ID NO: 3627447 - DNA, 25 bp, Homo sapien
ctttcctaagtcggtgttctctggt

SEQ ID NO: 3627448 - DNA, 25 bp, Homo sapien
ctggtattttcctagtctccatact

SEQ ID NO: 3627449 - DNA, 25 bp, Homo sapien
acatccacacggagccctttttcca

SEQ ID NO: 3627450 - DNA, 25 bp, Homo sapien
cgcattgtggaagccaggtgacatc

SEQ ID NO: 3627451 - DNA, 25 bp, Homo sapien
ctttttccaggcattgtcattgtgt

SEQ ID NO: 3627452 - DNA, 25 bp, Homo sapien
gtttggcaggaaggcatcgcattgt

SEQ ID NO: 3627453 - DNA, 25 bp, Homo sapien
tcctgagtggcccagtaacacatca

SEQ ID NO: 3627454 - DNA, 25 bp, Homo sapien
gcagagggcaaatttgcttccaggt

SEQ ID NO: 3627455 - DNA, 25 bp, Homo sapien
agtggcccagtaacacatcacagca

SEQ ID NO: 3627456 - DNA, 25 bp, Homo sapien
tcagcagagggcaaatttgcttcca

SEQ ID NO: 3627457 - DNA, 25 bp, Homo sapien
tagtactgcggacatcctgagagtg

SEQ ID NO: 3627458 - DNA, 25 bp, Homo sapien
cctgagagtgatgtagctgctgact

SEQ ID NO: 3627459 - DNA, 25 bp, Homo sapien
aaagctctagtactgcggacatcct

SEQ ID NO: 3627460 - DNA, 25 bp, Homo sapien
ctgactacctgggatctatgtgttc

SEQ ID NO: 3627461 - DNA, 25 bp, Homo sapien
tcatgtccagccaactgagagggac

SEQ ID NO: 3627462 - DNA, 25 bp, Homo sapien
cagttttgctgagggtcgctttaca

SEQ ID NO: 3627463 - DNA, 25 bp, Homo sapien
ggccttcagtgggtcaaactcatgt

SEQ ID NO: 3627464 - DNA, 25 bp, Homo sapien
gttcctcgcagaatgttaaccggcg

SEQ ID NO: 3627465 - DNA, 25 bp, Homo sapien
cacagctctgtcagagaatcccaca

SEQ ID NO: 3627466 - DNA, 25 bp, Homo sapien
tcacagctctgtcagagaatcccac

SEQ ID NO: 3627467 - DNA, 25 bp, Homo sapien
agctctgtcagagaatcccacagct

SEQ ID NO: 3627468 - DNA, 25 bp, Homo sapien
cagctctgtcagagaatcccacagc

SEQ ID NO: 3627469 - DNA, 25 bp, Homo sapien
ggagcagcagtcaaatacctgaata

SEQ ID NO: 3627470 - DNA, 25 bp, Homo sapien
gcagcagtcaaatacctgaatagtc

SEQ ID NO: 3627471 - DNA, 25 bp, Homo sapien
ctgtggcccgtagagacatattgga

SEQ ID NO: 3627472 - DNA, 25 bp, Homo sapien
cccgtagagacatattggagcagca

SEQ ID NO: 3627473 - DNA, 25 bp, Homo sapien
ctggcagtaatattgcctggactcc

SEQ ID NO: 3627474 - DNA, 25 bp, Homo sapien
ccaggcctggcagtaatattgcctg

SEQ ID NO: 3627475 - DNA, 25 bp, Homo sapien
cacaccccccggtcacacctccagg

SEQ ID NO: 3627476 - DNA, 25 bp, Homo sapien
ggcctggcagtaatattgcctggac

SEQ ID NO: 3627477 - DNA, 25 bp, Homo sapien
ccagagctccgctttgataatatca

SEQ ID NO: 3627478 - DNA, 25 bp, Homo sapien
tgcaaccagattaatcgtcccagag

SEQ ID NO: 3627479 - DNA, 25 bp, Homo sapien
taatcgtcccagagctccgctttga

SEQ ID NO: 3627480 - DNA, 25 bp, Homo sapien
accagattaatcgtcccagagctcc

SEQ ID NO: 3627481 - DNA, 25 bp, Homo sapien
aacagcatgggaacagttgtaccaa

SEQ ID NO: 3627482 - DNA, 25 bp, Homo sapien
gcatgggcaggctggtcgggcttca

SEQ ID NO: 3627483 - DNA, 25 bp, Homo sapien
tgggcaggctggtcgggcttcagca

SEQ ID NO: 3627484 - DNA, 25 bp, Homo sapien
agcatgggaacagttgtaccaaggc

SEQ ID NO: 3627485 - DNA, 25 bp, Homo sapien
aatgggccgacccaggctgtgacag

SEQ ID NO: 3627486 - DNA, 25 bp, Homo sapien
gatggtgtatgactggctgcctcga

SEQ ID NO: 3627487 - DNA, 25 bp, Homo sapien
cacagtgatcgggaggcgtgtctca

SEQ ID NO: 3627488 - DNA, 25 bp, Homo sapien
gatgtgggacccaactccctgttga

SEQ ID NO: 3627489 - DNA, 25 bp, Homo sapien
tgcatctttgagcagatgacgtttt

SEQ ID NO: 3627490 - DNA, 25 bp, Homo sapien
tgagcagatgacgtttttctcctgg

SEQ ID NO: 3627491 - DNA, 25 bp, Homo sapien
agcagatgacgtttttctcctggtc

SEQ ID NO: 3627492 - DNA, 25 bp, Homo sapien
ctttgagcagatgacgtttttctcc

SEQ ID NO: 3627493 - DNA, 25 bp, Homo sapien
gattacaggcttttgctcatacaga

SEQ ID NO: 3627494 - DNA, 25 bp, Homo sapien
aagttcagtttgagacccctgcagg

SEQ ID NO: 3627495 - DNA, 25 bp, Homo sapien
tctgaacgcatgacgattacaggct

SEQ ID NO: 3627496 - DNA, 25 bp, Homo sapien
tgcagtcagctgtcgtgagaggcct

SEQ ID NO: 3627497 - DNA, 25 bp, Homo sapien
gctggtgtcggagccctagcgcagc

SEQ ID NO: 3627498 - DNA, 25 bp, Homo sapien
ggtgtcggagccctagcgcagccat

SEQ ID NO: 3627499 - DNA, 25 bp, Homo sapien
aggtgcactggatgcgccctcgctc

SEQ ID NO: 3627500 - DNA, 25 bp, Homo sapien
ggccaggtgcactggatgcgccctc

SEQ ID NO: 3627501 - DNA, 25 bp, Homo sapien
gcatcgccttgaactgtgtcttcat

SEQ ID NO: 3627502 - DNA, 25 bp, Homo sapien
caggagcatcgccttgaactgtgtc

SEQ ID NO: 3627503 - DNA, 25 bp, Homo sapien
tctccaggagcatcgccttgaactg

SEQ ID NO: 3627504 - DNA, 25 bp, Homo sapien
cactgtctccaggagcatcgccttg

SEQ ID NO: 3627505 - DNA, 25 bp, Homo sapien
gctttgtctgtttggacaaggctcc

SEQ ID NO: 3627506 - DNA, 25 bp, Homo sapien
ttgtccgacggtgaggcatcttgag

SEQ ID NO: 3627507 - DNA, 25 bp, Homo sapien
catcaaggcatcctttgtccgacgg

SEQ ID NO: 3627508 - DNA, 25 bp, Homo sapien
ggacaaggctccatcaaggcatcct

SEQ ID NO: 3627509 - DNA, 25 bp, Homo sapien
cctcagctcggctctgttgggtccg

SEQ ID NO: 3627510 - DNA, 25 bp, Homo sapien
gggccagttgtcagtaagctgcaga

SEQ ID NO: 3627511 - DNA, 25 bp, Homo sapien
gagaagttgcatggaaagggctcct

SEQ ID NO: 3627512 - DNA, 25 bp, Homo sapien
gccagttgtcagtaagctgcagaag

SEQ ID NO: 3627513 - DNA, 25 bp, Homo sapien
aacaccctctcgtcctgtatgaagc

SEQ ID NO: 3627514 - DNA, 25 bp, Homo sapien
ctctcgtcctgtatgaagcttgtac

SEQ ID NO: 3627515 - DNA, 25 bp, Homo sapien
gggcaacaccctctcgtcctgtatg

SEQ ID NO: 3627516 - DNA, 25 bp, Homo sapien
accctctcgtcctgtatgaagcttg

SEQ ID NO: 3627517 - DNA, 25 bp, Homo sapien
ctttctccacccaagtgagtgacag

SEQ ID NO: 3627518 - DNA, 25 bp, Homo sapien
tgagtgacagctggcgggagttttg

SEQ ID NO: 3627519 - DNA, 25 bp, Homo sapien
tctccacccaagtgagtgacagctg

SEQ ID NO: 3627520 - DNA, 25 bp, Homo sapien
cacccaagtgagtgacagctggcgg

SEQ ID NO: 3627521 - DNA, 25 bp, Homo sapien
agtagaagatatcttgtgcttgtca

SEQ ID NO: 3627522 - DNA, 25 bp, Homo sapien
gtagaagatatcttgtgcttgtcag

SEQ ID NO: 3627523 - DNA, 25 bp, Homo sapien
gggaagggggcccagcgtgaagcca

SEQ ID NO: 3627524 - DNA, 25 bp, Homo sapien
ggcccagcgtgaagccaggtgggac

SEQ ID NO: 3627525 - DNA, 25 bp, Homo sapien
agcgtgaagccaggtgggacggctt

SEQ ID NO: 3627526 - DNA, 25 bp, Homo sapien
gaagggggcccagcgtgaagccagg

SEQ ID NO: 3627527 - DNA, 25 bp, Homo sapien
gggttggtgtgagctaaggctgtga

SEQ ID NO: 3627528 - DNA, 25 bp, Homo sapien
ggtgtgagctaaggctgtgatccca

SEQ ID NO: 3627529 - DNA, 25 bp, Homo sapien
tggtgtgagctaaggctgtgatccc

SEQ ID NO: 3627530 - DNA, 25 bp, Homo sapien
gtgagctaaggctgtgatcccattt

SEQ ID NO: 3627531 - DNA, 25 bp, Homo sapien
tccgctccattaccgctgccgggct

SEQ ID NO: 3627532 - DNA, 25 bp, Homo sapien
gggctcctcacgtctctccttgctg

SEQ ID NO: 3627533 - DNA, 25 bp, Homo sapien
agctccactagtgacactggcggcc

SEQ ID NO: 3627534 - DNA, 25 bp, Homo sapien
actgctgtggacatgtgatagcttg

SEQ ID NO: 3627535 - DNA, 25 bp, Homo sapien
gagaccggagaagctccaggctttt

SEQ ID NO: 3627536 - DNA, 25 bp, Homo sapien
ggctggtccccttgagaccggagaa

SEQ ID NO: 3627537 - DNA, 25 bp, Homo sapien
gtccccttgagaccggagaagctcc

SEQ ID NO: 3627538 - DNA, 25 bp, Homo sapien
cttgagaccggagaagctccaggct

SEQ ID NO: 3627539 - DNA, 25 bp, Homo sapien
cgtggggttctcctcaatcaggagg

SEQ ID NO: 3627540 - DNA, 25 bp, Homo sapien
cctcctggtctatacccgtgggatt

SEQ ID NO: 3627541 - DNA, 25 bp, Homo sapien
gtggggttctcctcaatcaggaggt

SEQ ID NO: 3627542 - DNA, 25 bp, Homo sapien
ccctcctggtctatacccgtgggat

SEQ ID NO: 3627543 - DNA, 25 bp, Homo sapien
agatgatctctgtagctcaccccag

SEQ ID NO: 3627544 - DNA, 25 bp, Homo sapien
ctacagatgatctctgtagctcacc

SEQ ID NO: 3627545 - DNA, 25 bp, Homo sapien
tacagatgatctctgtagctcaccc

SEQ ID NO: 3627546 - DNA, 25 bp, Homo sapien
cagatgatctctgtagctcacccca

SEQ ID NO: 3627547 - DNA, 25 bp, Homo sapien
ctcgtctctataagagggctgcaga

SEQ ID NO: 3627548 - DNA, 25 bp, Homo sapien
ggatgtgcacgacatactgaatctg

SEQ ID NO: 3627549 - DNA, 25 bp, Homo sapien
gaaaagaagactggatgtgcacgac

SEQ ID NO: 3627550 - DNA, 25 bp, Homo sapien
gtctctataagagggctgcagaaaa

SEQ ID NO: 3627551 - DNA, 25 bp, Homo sapien
gagtgggcgtggttctgtcttcaga

SEQ ID NO: 3627552 - DNA, 25 bp, Homo sapien
aggagtggccgctggtttttcagac

SEQ ID NO: 3627553 - DNA, 25 bp, Homo sapien
tgcttcccggaggatgcgctgtccg

SEQ ID NO: 3627554 - DNA, 25 bp, Homo sapien
gagttttcacgtccaggctcgggca

SEQ ID NO: 3627555 - DNA, 25 bp, Homo sapien
tgggcccgcagtcggacctggtgag

SEQ ID NO: 3627556 - DNA, 25 bp, Homo sapien
agctgggcccgcagtcggacctggt

SEQ ID NO: 3627557 - DNA, 25 bp, Homo sapien
gcccgcagtcggacctggtgagatc

SEQ ID NO: 3627558 - DNA, 25 bp, Homo sapien
cgcagtcggacctggtgagatcaga

SEQ ID NO: 3627559 - DNA, 25 bp, Homo sapien
gaaggagactcttctctggatgcca

SEQ ID NO: 3627560 - DNA, 25 bp, Homo sapien
agccgaagctcaagctggagaccag

SEQ ID NO: 3627561 - DNA, 25 bp, Homo sapien
ctgccactgagatgcgatgtggtat

SEQ ID NO: 3627562 - DNA, 25 bp, Homo sapien
tggatgccattggaggccctggagc

SEQ ID NO: 3627563 - DNA, 25 bp, Homo sapien
caatctccttgttggtgttcagtct

SEQ ID NO: 3627564 - DNA, 25 bp, Homo sapien
ttttaagggcttaggctcatactcc

SEQ ID NO: 3627565 - DNA, 25 bp, Homo sapien
cgtaatgtggattcacccgctcagc

SEQ ID NO: 3627566 - DNA, 25 bp, Homo sapien
ggttctgagcccacgctttccgtaa

SEQ ID NO: 3627567 - DNA, 25 bp, Homo sapien
gtgaccagtgcaggctgactctcca

SEQ ID NO: 3627568 - DNA, 25 bp, Homo sapien
gtgcccatgccagggttgttggcac

SEQ ID NO: 3627569 - DNA, 25 bp, Homo sapien
cagcctggtggtggatatgtgctgc

SEQ ID NO: 3627570 - DNA, 25 bp, Homo sapien
tgggtctccactgggaagatgcagc

SEQ ID NO: 3627571 - DNA, 25 bp, Homo sapien
taacggtaggtggtctttggcactc

SEQ ID NO: 3627572 - DNA, 25 bp, Homo sapien
gaatctaacagggactgcaaacagg

SEQ ID NO: 3627573 - DNA, 25 bp, Homo sapien
gactgcaaacaggaattgactcaaa

SEQ ID NO: 3627574 - DNA, 25 bp, Homo sapien
tgactcaaagaaggtggcggtagca

SEQ ID NO: 3627575 - DNA, 25 bp, Homo sapien
ggtgctccatttggtaatcactgtg

SEQ ID NO: 3627576 - DNA, 25 bp, Homo sapien
ccatttggtaatcactgtgtactac

SEQ ID NO: 3627577 - DNA, 25 bp, Homo sapien
ctgtgtactacattgttgccaagaa

SEQ ID NO: 3627578 - DNA, 25 bp, Homo sapien
attacttccccggtgctccatttgg

SEQ ID NO: 3627579 - DNA, 25 bp, Homo sapien
ggacaacatctagaactgaacgccg

SEQ ID NO: 3627580 - DNA, 25 bp, Homo sapien
ctaacgccaaaggacaacatctaga

SEQ ID NO: 3627581 - DNA, 25 bp, Homo sapien
gccgtagcagtctggacccctgact

SEQ ID NO: 3627582 - DNA, 25 bp, Homo sapien
gaactgaacgccgtagcagtctgga

SEQ ID NO: 3627583 - DNA, 25 bp, Homo sapien
tgtagttggaaacagtcacagcaaa

SEQ ID NO: 3627584 - DNA, 25 bp, Homo sapien
gacgaggttctctccatagccagga

SEQ ID NO: 3627585 - DNA, 25 bp, Homo sapien
aagcaactagctcgactaagagcag

SEQ ID NO: 3627586 - DNA, 25 bp, Homo sapien
ggaggatgcgttccgtgctcgcctt

SEQ ID NO: 3627587 - DNA, 25 bp, Homo sapien
ccagcctcacgttgtcaatggtcat

SEQ ID NO: 3627588 - DNA, 25 bp, Homo sapien
cctcccagcctcacgttgtcaatgg

SEQ ID NO: 3627589 - DNA, 25 bp, Homo sapien
tctgtaaaagctttccatccacctt

SEQ ID NO: 3627590 - DNA, 25 bp, Homo sapien
tgtaaaagctttccatccaccttcc

SEQ ID NO: 3627591 - DNA, 25 bp, Homo sapien
tgcagatgccgaggttagcaccagg

SEQ ID NO: 3627592 - DNA, 25 bp, Homo sapien
gggcggaatgtggtgacatggagct

SEQ ID NO: 3627593 - DNA, 25 bp, Homo sapien
gcggaatgtggtgacatggagctgg

SEQ ID NO: 3627594 - DNA, 25 bp, Homo sapien
tttgcagatgccgaggttagcacca

SEQ ID NO: 3627595 - DNA, 25 bp, Homo sapien
cttgggagaggctttcgaaaagaag

SEQ ID NO: 3627596 - DNA, 25 bp, Homo sapien
ctcccgcagagccagagtagctaca

SEQ ID NO: 3627597 - DNA, 25 bp, Homo sapien
ccagagtagctacagagctcaggga

SEQ ID NO: 3627598 - DNA, 25 bp, Homo sapien
gaaaagaggtgaacacgcacacgga

SEQ ID NO: 3627599 - DNA, 25 bp, Homo sapien
cccccatgctcacaccatgctcagt

SEQ ID NO: 3627600 - DNA, 25 bp, Homo sapien
gcccccatgctcacaccatgctcag

SEQ ID NO: 3627601 - DNA, 25 bp, Homo sapien
gcaggccaggatgcaagctgtagca

SEQ ID NO: 3627602 - DNA, 25 bp, Homo sapien
gctgtagcagcttccaagttaggct

SEQ ID NO: 3627603 - DNA, 25 bp, Homo sapien
gaagaacagagtttggccctgggaa

SEQ ID NO: 3627604 - DNA, 25 bp, Homo sapien
caaatctctgggtcgcggaagaaca

SEQ ID NO: 3627605 - DNA, 25 bp, Homo sapien
tgggtccaggtagccaacccagaga

SEQ ID NO: 3627606 - DNA, 25 bp, Homo sapien
gaggtacttctccagccaggttttc

SEQ ID NO: 3627607 - DNA, 25 bp, Homo sapien
cagtgctcgtgtgatgggtccaggt

SEQ ID NO: 3627608 - DNA, 25 bp, Homo sapien
caggttttcttgctcagtgctcgtg

SEQ ID NO: 3627609 - DNA, 25 bp, Homo sapien
ctgcttgcatagagtggcagttaga

SEQ ID NO: 3627610 - DNA, 25 bp, Homo sapien
tgcttgcatagagtggcagttagag

SEQ ID NO: 3627611 - DNA, 25 bp, Homo sapien
cttgcatagagtggcagttagagtc

SEQ ID NO: 3627612 - DNA, 25 bp, Homo sapien
gcttgcatagagtggcagttagagt

SEQ ID NO: 3627613 - DNA, 25 bp, Homo sapien
gccgaaaggaaactatgccagataa

SEQ ID NO: 3627614 - DNA, 25 bp, Homo sapien
tactgctcgaatatggctgcaaaaa

SEQ ID NO: 3627615 - DNA, 25 bp, Homo sapien
caacaaaggccaaaagataatagag

SEQ ID NO: 3627616 - DNA, 25 bp, Homo sapien
ggccagcaatatgcatgacgcgact

SEQ ID NO: 3627617 - DNA, 25 bp, Homo sapien
ccacaagggccggcaacttctgctt

SEQ ID NO: 3627618 - DNA, 25 bp, Homo sapien
atggccacaagggccggcaacttct

SEQ ID NO: 3627619 - DNA, 25 bp, Homo sapien
tggccacaagggccggcaacttctg

SEQ ID NO: 3627620 - DNA, 25 bp, Homo sapien
ggccacaagggccggcaacttctgc

SEQ ID NO: 3627621 - DNA, 25 bp, Homo sapien
agtacatggcacacgccctttccag

SEQ ID NO: 3627622 - DNA, 25 bp, Homo sapien
aatagagagcgacgttgctttgctc

SEQ ID NO: 3627623 - DNA, 25 bp, Homo sapien
gtacatggcacacgccctttccagg

SEQ ID NO: 3627624 - DNA, 25 bp, Homo sapien
tccactcagatctctgtcaatagag

SEQ ID NO: 3627625 - DNA, 25 bp, Homo sapien
tatgcttgcaattgcttcactgtgc

SEQ ID NO: 3627626 - DNA, 25 bp, Homo sapien
aggctgcagtcctcagtccatcgtg

SEQ ID NO: 3627627 - DNA, 25 bp, Homo sapien
gtgctgaccgcgtccatctgcccct

SEQ ID NO: 3627628 - DNA, 25 bp, Homo sapien
cgtgctgtgtgctgtatgcttgcaa

SEQ ID NO: 3627629 - DNA, 25 bp, Homo sapien
tcaccagacgcactcaggatgaggg

SEQ ID NO: 3627630 - DNA, 25 bp, Homo sapien
tcaggaagcctgaccggaggatgtt

SEQ ID NO: 3627631 - DNA, 25 bp, Homo sapien
cacgcgctggactgctccaaggaag

SEQ ID NO: 3627632 - DNA, 25 bp, Homo sapien
cttggtgggtttgaacaggctgtcc

SEQ ID NO: 3627633 - DNA, 25 bp, Homo sapien
ggttctgaagttcggacactgtcat

SEQ ID NO: 3627634 - DNA, 25 bp, Homo sapien
gttcggacactgtcatgggttccat

SEQ ID NO: 3627635 - DNA, 25 bp, Homo sapien
tgggtctggttctgaagttcggaca

SEQ ID NO: 3627636 - DNA, 25 bp, Homo sapien
gaagttcggacactgtcatgggttc

SEQ ID NO: 3627637 - DNA, 25 bp, Homo sapien
gcagatgcaacggatacacccttga

SEQ ID NO: 3627638 - DNA, 25 bp, Homo sapien
gatgcaacggatacacccttgagtg

SEQ ID NO: 3627639 - DNA, 25 bp, Homo sapien
gcaacggatacacccttgagtggac

SEQ ID NO: 3627640 - DNA, 25 bp, Homo sapien
aggcagatgcaacggatacaccctt

SEQ ID NO: 3627641 - DNA, 25 bp, Homo sapien
tgtggcagaggctgctcatctctca

SEQ ID NO: 3627642 - DNA, 25 bp, Homo sapien
ctggtttcttgtgtggcagaggctg

SEQ ID NO: 3627643 - DNA, 25 bp, Homo sapien
ggcagaggctgctcatctctcaggg

SEQ ID NO: 3627644 - DNA, 25 bp, Homo sapien
tggtttcttgtgtggcagaggctgc

SEQ ID NO: 3627645 - DNA, 25 bp, Homo sapien
gcatccaagtcacaggatgatggaa

SEQ ID NO: 3627646 - DNA, 25 bp, Homo sapien
catccaagtcacaggatgatggaag

SEQ ID NO: 3627647 - DNA, 25 bp, Homo sapien
ccaagtcacaggatgatggaagaag

SEQ ID NO: 3627648 - DNA, 25 bp, Homo sapien
tccaagtcacaggatgatggaagaa

SEQ ID NO: 3627649 - DNA, 25 bp, Homo sapien
attactgtaatgtgcccatcactgc

SEQ ID NO: 3627650 - DNA, 25 bp, Homo sapien
cgaagtggatgacccattactgtaa

SEQ ID NO: 3627651 - DNA, 25 bp, Homo sapien
gcacagtcacacacttgggtcgcgt

SEQ ID NO: 3627652 - DNA, 25 bp, Homo sapien
gtcgcgttgcccgaagtggatgacc

SEQ ID NO: 3627653 - DNA, 25 bp, Homo sapien
acagtggttgtcacccgggcagaca

SEQ ID NO: 3627654 - DNA, 25 bp, Homo sapien
ctacagtggttgtcacccgggcaga

SEQ ID NO: 3627655 - DNA, 25 bp, Homo sapien
gactacagtggttgtcacccgggca

SEQ ID NO: 3627656 - DNA, 25 bp, Homo sapien
gggcagacaccccatgcaatgccca

SEQ ID NO: 3627657 - DNA, 25 bp, Homo sapien
aaaaggatggatttgccgaactgac

SEQ ID NO: 3627658 - DNA, 25 bp, Homo sapien
tgatcgtggccgtgacttttggtcg

SEQ ID NO: 3627659 - DNA, 25 bp, Homo sapien
tctgcatccaggcaaatccgatgtg

SEQ ID NO: 3627660 - DNA, 25 bp, Homo sapien
gctgacacctccttctggttcatca

SEQ ID NO: 3627661 - DNA, 25 bp, Homo sapien
gacatgcagttgacgtcctggttgc

SEQ ID NO: 3627662 - DNA, 25 bp, Homo sapien
cccagctactggggtcattccagcc

SEQ ID NO: 3627663 - DNA, 25 bp, Homo sapien
gctactggggtcattccagcccctg

SEQ ID NO: 3627664 - DNA, 25 bp, Homo sapien
ctactggggtcattccagcccctgt

SEQ ID NO: 3627665 - DNA, 25 bp, Homo sapien
cagctactggggtcattccagcccc

SEQ ID NO: 3627666 - DNA, 25 bp, Homo sapien
taataagcctccatgggtggaatcc

SEQ ID NO: 3627667 - DNA, 25 bp, Homo sapien
aaatagacgtcagtttcagcagaac

SEQ ID NO: 3627668 - DNA, 25 bp, Homo sapien
tggaatcctgatgccaaccagggct

SEQ ID NO: 3627669 - DNA, 25 bp, Homo sapien
gcagaacaacccgattcatccttgg

SEQ ID NO: 3627670 - DNA, 25 bp, Homo sapien
caggatggccggccttgggggtgag

SEQ ID NO: 3627671 - DNA, 25 bp, Homo sapien
agccaggatggccggccttgggggt

SEQ ID NO: 3627672 - DNA, 25 bp, Homo sapien
ccaggatggccggccttgggggtga

SEQ ID NO: 3627673 - DNA, 25 bp, Homo sapien
gccaggatggccggccttgggggtg

SEQ ID NO: 3627674 - DNA, 25 bp, Homo sapien
acagattctgctccggtgtcaagga

SEQ ID NO: 3627675 - DNA, 25 bp, Homo sapien
gaaggtcataccctcacacaggtag

SEQ ID NO: 3627676 - DNA, 25 bp, Homo sapien
ggtaggagggtctaagtcaagccta

SEQ ID NO: 3627677 - DNA, 25 bp, Homo sapien
ccacaatgtcgggagaggagctgaa

SEQ ID NO: 3627678 - DNA, 25 bp, Homo sapien
gcagctggatctaggtccagggcag

SEQ ID NO: 3627679 - DNA, 25 bp, Homo sapien
tggatctaggtccagggcagctttt

SEQ ID NO: 3627680 - DNA, 25 bp, Homo sapien
cagctggatctaggtccagggcagc

SEQ ID NO: 3627681 - DNA, 25 bp, Homo sapien
gctggatctaggtccagggcagctt

SEQ ID NO: 3627682 - DNA, 25 bp, Homo sapien
atgaaggtcacccacacgccgtcca

SEQ ID NO: 3627683 - DNA, 25 bp, Homo sapien
actgcctgtatcctgttcggtggtg

SEQ ID NO: 3627684 - DNA, 25 bp, Homo sapien
caggtactgcctgtatcctgttcgg

SEQ ID NO: 3627685 - DNA, 25 bp, Homo sapien
gtgcgtgttcgggtctcccagccag

SEQ ID NO: 3627686 - DNA, 25 bp, Homo sapien
ctgtgcgtgttcgggtctcccagcc

SEQ ID NO: 3627687 - DNA, 25 bp, Homo sapien
acccaggtctgggggcgcacagaac

SEQ ID NO: 3627688 - DNA, 25 bp, Homo sapien
aagctggccgtgtccgagcacccag

SEQ ID NO: 3627689 - DNA, 25 bp, Homo sapien
gggcgcacagaacggggtggcaggc

SEQ ID NO: 3627690 - DNA, 25 bp, Homo sapien
gcaccagccagagcccgagctccat

SEQ ID NO: 3627691 - DNA, 25 bp, Homo sapien
ggacttcagatgctgaaatgggaag

SEQ ID NO: 3627692 - DNA, 25 bp, Homo sapien
gagaaatctactgcatccctcatgt

SEQ ID NO: 3627693 - DNA, 25 bp, Homo sapien
gttgtccaggaagtaggacttcaga

SEQ ID NO: 3627694 - DNA, 25 bp, Homo sapien
atgggaagttgctctgacagagtga

SEQ ID NO: 3627695 - DNA, 25 bp, Homo sapien
accagtatctgcttcttgtgaggcc

SEQ ID NO: 3627696 - DNA, 25 bp, Homo sapien
tcggagctctcaaccagagtcctct

SEQ ID NO: 3627697 - DNA, 25 bp, Homo sapien
agttaccccattggacagggcagct

SEQ ID NO: 3627698 - DNA, 25 bp, Homo sapien
tgtgaagatggagaatcggagctct

SEQ ID NO: 3627699 - DNA, 25 bp, Homo sapien
cttgataaatgttcgtgacagtttg

SEQ ID NO: 3627700 - DNA, 25 bp, Homo sapien
tgttcgtgacagtttgaacatctgt

SEQ ID NO: 3627701 - DNA, 25 bp, Homo sapien
gataaatgttcgtgacagtttgaac

SEQ ID NO: 3627702 - DNA, 25 bp, Homo sapien
aaatgttcgtgacagtttgaacatc

SEQ ID NO: 3627703 - DNA, 25 bp, Homo sapien
gagcctgggcagttgtaatgcagcc

SEQ ID NO: 3627704 - DNA, 25 bp, Homo sapien
tggagcctgggcagttgtaatgcag

SEQ ID NO: 3627705 - DNA, 25 bp, Homo sapien
tgggcagttgtaatgcagccctcag

SEQ ID NO: 3627706 - DNA, 25 bp, Homo sapien
cctgggcagttgtaatgcagccctc

SEQ ID NO: 3627707 - DNA, 25 bp, Homo sapien
agggtggtggcccagaaggtgagag

SEQ ID NO: 3627708 - DNA, 25 bp, Homo sapien
gcttctctgcaaagctgatgaacat

SEQ ID NO: 3627709 - DNA, 25 bp, Homo sapien
ggcccagaaggtgagaggcttctct

SEQ ID NO: 3627710 - DNA, 25 bp, Homo sapien
ggcttctctgcaaagctgatgaaca

SEQ ID NO: 3627711 - DNA, 25 bp, Homo sapien
gccttggaaggcacgatggctgcat

SEQ ID NO: 3627712 - DNA, 25 bp, Homo sapien
gatgacagatccatcggtgcagagt

SEQ ID NO: 3627713 - DNA, 25 bp, Homo sapien
tggtgctcggagtggcagaacaacc

SEQ ID NO: 3627714 - DNA, 25 bp, Homo sapien
cgatggctgcatggaggatcttgac

SEQ ID NO: 3627715 - DNA, 25 bp, Homo sapien
tattgggatcctttcagggaataat

SEQ ID NO: 3627716 - DNA, 25 bp, Homo sapien
gccagcatagtaggtagtacaaact

SEQ ID NO: 3627717 - DNA, 25 bp, Homo sapien
taatattgggatcctttcatcctca

SEQ ID NO: 3627718 - DNA, 25 bp, Homo sapien
tctgtcatcattgtagccagcatag

SEQ ID NO: 3627719 - DNA, 25 bp, Homo sapien
tagggatcttcctatattctaaggc

SEQ ID NO: 3627720 - DNA, 25 bp, Homo sapien
cacaattccattagggatcttccta

SEQ ID NO: 3627721 - DNA, 25 bp, Homo sapien
ccattagggatcttcctatattcta

SEQ ID NO: 3627722 - DNA, 25 bp, Homo sapien
ggatcttcctatattctaaggccat

SEQ ID NO: 3627723 - DNA, 25 bp, Homo sapien
tagatacagtaaatcaggcctctga

SEQ ID NO: 3627724 - DNA, 25 bp, Homo sapien
tacagtaaatcaggcctctgagaac

SEQ ID NO: 3627725 - DNA, 25 bp, Homo sapien
agtagactgctccattttggttatt

SEQ ID NO: 3627726 - DNA, 25 bp, Homo sapien
actgctccattttggttattgccaa

SEQ ID NO: 3627727 - DNA, 25 bp, Homo sapien
gtttgatatacggtgtgtgcacaaa

SEQ ID NO: 3627728 - DNA, 25 bp, Homo sapien
tgtgcacaaaatggatggcagctgc

SEQ ID NO: 3627729 - DNA, 25 bp, Homo sapien
cagctgcacgatgccttggaaggca

SEQ ID NO: 3627730 - DNA, 25 bp, Homo sapien
ttgcttcacgggcaggttggtttga

SEQ ID NO: 3627731 - DNA, 25 bp, Homo sapien
gcagtatactgcctttgtaaaaggt

SEQ ID NO: 3627732 - DNA, 25 bp, Homo sapien
ctgggaacctgcagtatactgcctt

SEQ ID NO: 3627733 - DNA, 25 bp, Homo sapien
tactgcctttgtaaaaggtaggatc

SEQ ID NO: 3627734 - DNA, 25 bp, Homo sapien
aaggtaggatctgtgccgggatgtc

SEQ ID NO: 3627735 - DNA, 25 bp, Homo sapien
ggagaattgggcatcgtcacgtgct

SEQ ID NO: 3627736 - DNA, 25 bp, Homo sapien
tctgtttccgccctgagagcgggct

SEQ ID NO: 3627737 - DNA, 25 bp, Homo sapien
ggttgcgtgcgcagcctcctctgtt

SEQ ID NO: 3627738 - DNA, 25 bp, Homo sapien
acgtgctctgtctgcgccccgagtg

SEQ ID NO: 3627739 - DNA, 25 bp, Homo sapien
cctcaggaagcttgggggctgcgca

SEQ ID NO: 3627740 - DNA, 25 bp, Homo sapien
ttgggggctgcgcaggccagggctc

SEQ ID NO: 3627741 - DNA, 25 bp, Homo sapien
aagcttgggggctgcgcaggccagg

SEQ ID NO: 3627742 - DNA, 25 bp, Homo sapien
ggaagcttgggggctgcgcaggcca

SEQ ID NO: 3627743 - DNA, 25 bp, Homo sapien
cattggatacctgccactgtccaga

SEQ ID NO: 3627744 - DNA, 25 bp, Homo sapien
tttccacattggatacctgccactg

SEQ ID NO: 3627745 - DNA, 25 bp, Homo sapien
cacattggatacctgccactgtcca

SEQ ID NO: 3627746 - DNA, 25 bp, Homo sapien
tccacattggatacctgccactgtc

SEQ ID NO: 3627747 - DNA, 25 bp, Homo sapien
gaccaagctgcctcgtgtgagctgt

SEQ ID NO: 3627748 - DNA, 25 bp, Homo sapien
tgagccccgagggaccaagctgcct

SEQ ID NO: 3627749 - DNA, 25 bp, Homo sapien
tgtgtgagccccgagggaccaagct

SEQ ID NO: 3627750 - DNA, 25 bp, Homo sapien
cccgagggaccaagctgcctcgtgt

SEQ ID NO: 3627751 - DNA, 25 bp, Homo sapien
tgaagtctctttaaggattttggta

SEQ ID NO: 3627752 - DNA, 25 bp, Homo sapien
gtccagctctgcgtctgtcactgtc

SEQ ID NO: 3627753 - DNA, 25 bp, Homo sapien
tccagctctgcgtctgtcactgtca

SEQ ID NO: 3627754 - DNA, 25 bp, Homo sapien
ctgtccagctctgcgtctgtcactg

SEQ ID NO: 3627755 - DNA, 25 bp, Homo sapien
ccagctctgcgtctgtcactgtcag

SEQ ID NO: 3627756 - DNA, 25 bp, Homo sapien
tcacagcacctcacatccgtgctgg

SEQ ID NO: 3627757 - DNA, 25 bp, Homo sapien
actcaggtcaacctcaggaggcctg

SEQ ID NO: 3627758 - DNA, 25 bp, Homo sapien
tgtgggaccaatgctgcaagcactc

SEQ ID NO: 3627759 - DNA, 25 bp, Homo sapien
gggccgattgaccttttgctccagc

SEQ ID NO: 3627760 - DNA, 25 bp, Homo sapien
cttggtttcgtaggtgtcagctgcc

SEQ ID NO: 3627761 - DNA, 25 bp, Homo sapien
ggtttcgtaggtgtcagctgccttc

SEQ ID NO: 3627762 - DNA, 25 bp, Homo sapien
gtcagctgccttcattgcatcataa

SEQ ID NO: 3627763 - DNA, 25 bp, Homo sapien
gtaggtgtcagctgccttcattgca

SEQ ID NO: 3627764 - DNA, 25 bp, Homo sapien
gagtggttggctgccccactgtcag

SEQ ID NO: 3627765 - DNA, 25 bp, Homo sapien
ggctccaaagcatctccgcagcgat

SEQ ID NO: 3627766 - DNA, 25 bp, Homo sapien
cagccaagcctgtggtcctttattc

SEQ ID NO: 3627767 - DNA, 25 bp, Homo sapien
atctccgcagcgatggagaactggg

SEQ ID NO: 3627768 - DNA, 25 bp, Homo sapien
ccccatgaaagcgacgaaggactcc

SEQ ID NO: 3627769 - DNA, 25 bp, Homo sapien
atgaaagcgacgaaggactcccaga

SEQ ID NO: 3627770 - DNA, 25 bp, Homo sapien
gcgacgaaggactcccagaaccatt

SEQ ID NO: 3627771 - DNA, 25 bp, Homo sapien
cacccccatgaaagcgacgaaggac

SEQ ID NO: 3627772 - DNA, 25 bp, Homo sapien
aggcggtcatcacctgtgggatctc

SEQ ID NO: 3627773 - DNA, 25 bp, Homo sapien
gtgggatctcctgggagggacagga

SEQ ID NO: 3627774 - DNA, 25 bp, Homo sapien
acaggaggcacaggcggtcatcacc

SEQ ID NO: 3627775 - DNA, 25 bp, Homo sapien
gaggcacaggcggtcatcacctgtg

SEQ ID NO: 3627776 - DNA, 25 bp, Homo sapien
aggcggtcatcacctgtgggatctc

SEQ ID NO: 3627777 - DNA, 25 bp, Homo sapien
cacaggcggtcatcacctgtgggat

SEQ ID NO: 3627778 - DNA, 25 bp, Homo sapien
acaggaggcacaggcggtcatcacc

SEQ ID NO: 3627779 - DNA, 25 bp, Homo sapien
gaggcacaggcggtcatcacctgtg

SEQ ID NO: 3627780 - DNA, 25 bp, Homo sapien
caggcggtcatcacctgtgggatct

SEQ ID NO: 3627781 - DNA, 25 bp, Homo sapien
aggcggtcatcacctgtgggatctc

SEQ ID NO: 3627782 - DNA, 25 bp, Homo sapien
aggcacaggcggtcatcacctgtgg

SEQ ID NO: 3627783 - DNA, 25 bp, Homo sapien
gaggcacaggcggtcatcacctgtg

SEQ ID NO: 3627784 - DNA, 25 bp, Homo sapien
gtgggatctcctgggagggacagga

SEQ ID NO: 3627785 - DNA, 25 bp, Homo sapien
gacaggaggcacaggcggtcatcac

SEQ ID NO: 3627786 - DNA, 25 bp, Homo sapien
agggacaggaggcacaggcggtcat

SEQ ID NO: 3627787 - DNA, 25 bp, Homo sapien
ctgtgggatctcctgggagggacag

SEQ ID NO: 3627788 - DNA, 25 bp, Homo sapien
aggcggtcatcacctgtgggatctc

SEQ ID NO: 3627789 - DNA, 25 bp, Homo sapien
gtgggatctcctgggagggacagga

SEQ ID NO: 3627790 - DNA, 25 bp, Homo sapien
acaggaggcacaggcggtcatcacc

SEQ ID NO: 3627791 - DNA, 25 bp, Homo sapien
gaggcacaggcggtcatcacctgtg

SEQ ID NO: 3627792 - DNA, 25 bp, Homo sapien
ccctcgagcacaggtgtcccggagg

SEQ ID NO: 3627793 - DNA, 25 bp, Homo sapien
tggacccgttgcctgtcctcaggac

SEQ ID NO: 3627794 - DNA, 25 bp, Homo sapien
tcccggaggccacgtgtgtggaccc

SEQ ID NO: 3627795 - DNA, 25 bp, Homo sapien
ttcttggcatgaccatccctcgagc

SEQ ID NO: 3627796 - DNA, 25 bp, Homo sapien
gatggtgcctgacatcccctagctg

SEQ ID NO: 3627797 - DNA, 25 bp, Homo sapien
gggcacacgtctagggtcatgcttg

SEQ ID NO: 3627798 - DNA, 25 bp, Homo sapien
tcctggtgctgttcacggcagaacg

SEQ ID NO: 3627799 - DNA, 25 bp, Homo sapien
tcatgcttgtggaatgcaggtttct

SEQ ID NO: 3627800 - DNA, 25 bp, Homo sapien
gagtccagtctttcattatggcagg

SEQ ID NO: 3627801 - DNA, 25 bp, Homo sapien
gggtccctgatgaaggtagtgcaag

SEQ ID NO: 3627802 - DNA, 25 bp, Homo sapien
agggctggaggtgacttttccaaca

SEQ ID NO: 3627803 - DNA, 25 bp, Homo sapien
cagtctttcattatggcaggtttgg

SEQ ID NO: 3627804 - DNA, 25 bp, Homo sapien
cctatctcctgggtgagaagtctgg

SEQ ID NO: 3627805 - DNA, 25 bp, Homo sapien
gtcctatctcctgggtgagaagtct

SEQ ID NO: 3627806 - DNA, 25 bp, Homo sapien
tgtcctatctcctgggtgagaagtc

SEQ ID NO: 3627807 - DNA, 25 bp, Homo sapien
ctatctcctgggtgagaagtctggg

SEQ ID NO: 3627808 - DNA, 25 bp, Homo sapien
cgctctgggatacggttatgtcctt

SEQ ID NO: 3627809 - DNA, 25 bp, Homo sapien
tctgggatacggttatgtccttgtc

SEQ ID NO: 3627810 - DNA, 25 bp, Homo sapien
gagacgctctgggatacggttatgt

SEQ ID NO: 3627811 - DNA, 25 bp, Homo sapien
gggatacggttatgtccttgtcctg

SEQ ID NO: 3627812 - DNA, 25 bp, Homo sapien
cttctcaaagttgttgtgaaactct

SEQ ID NO: 3627813 - DNA, 25 bp, Homo sapien
ttctcaaagttgttgtgaaactctc

SEQ ID NO: 3627814 - DNA, 25 bp, Homo sapien
gctgtggatggaactcccactcagc

SEQ ID NO: 3627815 - DNA, 25 bp, Homo sapien
gaggagacgagagcggctgccgaga

SEQ ID NO: 3627816 - DNA, 25 bp, Homo sapien
cacggaggagacgagagcggctgcc

SEQ ID NO: 3627817 - DNA, 25 bp, Homo sapien
gccaggcagcgctgtggatggaact

SEQ ID NO: 3627818 - DNA, 25 bp, Homo sapien
ctggaactgaggatgtagtcatccc

SEQ ID NO: 3627819 - DNA, 25 bp, Homo sapien
ggaactgaggatgtagtcatccctg

SEQ ID NO: 3627820 - DNA, 25 bp, Homo sapien
gggtgtacgcactgcacaatgcttg

SEQ ID NO: 3627821 - DNA, 25 bp, Homo sapien
ggccagcctgggtgtacgcactgca

SEQ ID NO: 3627822 - DNA, 25 bp, Homo sapien
cacaagcagtgtgtctacagggaca

SEQ ID NO: 3627823 - DNA, 25 bp, Homo sapien
tctgaccctctgatgaagaaaacag

SEQ ID NO: 3627824 - DNA, 25 bp, Homo sapien
ggtttttagattaggctgcccagtg

SEQ ID NO: 3627825 - DNA, 25 bp, Homo sapien
gggacacaacctgaattcggaagct

SEQ ID NO: 3627826 - DNA, 25 bp, Homo sapien
tgtgggcgttggcagtgttgcctcc

SEQ ID NO: 3627827 - DNA, 25 bp, Homo sapien
ttgctgtgggcgttggcagtgttgc

SEQ ID NO: 3627828 - DNA, 25 bp, Homo sapien
gtgggcgttggcagtgttgcctcca

SEQ ID NO: 3627829 - DNA, 25 bp, Homo sapien
gctgtgggcgttggcagtgttgcct

SEQ ID NO: 3627830 - DNA, 25 bp, Homo sapien
ctgggcccttgacatagcctatgat

SEQ ID NO: 3627831 - DNA, 25 bp, Homo sapien
cagcataatctcaggggtgaacaag

SEQ ID NO: 3627832 - DNA, 25 bp, Homo sapien
ccttgacatagcctatgatcagcat

SEQ ID NO: 3627833 - DNA, 25 bp, Homo sapien
gacatagcctatgatcagcataatc

SEQ ID NO: 3627834 - DNA, 25 bp, Homo sapien
acaggcacaagccgtctgctctcca

SEQ ID NO: 3627835 - DNA, 25 bp, Homo sapien
cctgttcccttgctagggacaggtg

SEQ ID NO: 3627836 - DNA, 25 bp, Homo sapien
gcggcagagagctcggagggagccc

SEQ ID NO: 3627837 - DNA, 25 bp, Homo sapien
tcatgaaggcggcagagagctcgga

SEQ ID NO: 3627838 - DNA, 25 bp, Homo sapien
aaggcggcagagagctcggagggag

SEQ ID NO: 3627839 - DNA, 25 bp, Homo sapien
cggcagagagctcggagggagccca

SEQ ID NO: 3627840 - DNA, 25 bp, Homo sapien
ccttcgggatctcgccctctgcagt

SEQ ID NO: 3627841 - DNA, 25 bp, Homo sapien
gcggcagccgcgggacggtgctgag

SEQ ID NO: 3627842 - DNA, 25 bp, Homo sapien
cgccctctgcagtgcggagaactca

SEQ ID NO: 3627843 - DNA, 25 bp, Homo sapien
gatccaggccttcgggatctcgccc

SEQ ID NO: 3627844 - DNA, 25 bp, Homo sapien
tggacggagacgagagaggcggcgg

SEQ ID NO: 3627845 - DNA, 25 bp, Homo sapien
gcggcggctgcacagctggtgcgtg

SEQ ID NO: 3627846 - DNA, 25 bp, Homo sapien
gcgggtgagcgctgtccttggctgg

SEQ ID NO: 3627847 - DNA, 25 bp, Homo sapien
ctggggggcgggtgagcgctgtcct

SEQ ID NO: 3627848 - DNA, 25 bp, Homo sapien
cagagccaaggctgcccgctggtcc

SEQ ID NO: 3627849 - DNA, 25 bp, Homo sapien
agaaaggagggcgccccagagccaa

SEQ ID NO: 3627850 - DNA, 25 bp, Homo sapien
agggagaaaggagggcgccccagag

SEQ ID NO: 3627851 - DNA, 25 bp, Homo sapien
gggcgccccagagccaaggctgccc

SEQ ID NO: 3627852 - DNA, 25 bp, Homo sapien
tcagtcagcttccataagtaggtgg

SEQ ID NO: 3627853 - DNA, 25 bp, Homo sapien
acctgcttgtggttcaacttggcta

SEQ ID NO: 3627854 - DNA, 25 bp, Homo sapien
gacttcatcttgggaccaaagctgt

SEQ ID NO: 3627855 - DNA, 25 bp, Homo sapien
cttggctatgggacttcatcttggg

SEQ ID NO: 3627856 - DNA, 25 bp, Homo sapien
tcatgtcacactgaggctggatggt

SEQ ID NO: 3627857 - DNA, 25 bp, Homo sapien
gaggctggatggtgtcactatcggg

SEQ ID NO: 3627858 - DNA, 25 bp, Homo sapien
agacagccttcaccaccgggaaggt

SEQ ID NO: 3627859 - DNA, 25 bp, Homo sapien
gaaggttttcagaagcccagagtcc

SEQ ID NO: 3627860 - DNA, 25 bp, Homo sapien
ccgtactcaggagcagcggatggca

SEQ ID NO: 3627861 - DNA, 25 bp, Homo sapien
cattggccacaaacaggcatttggt

SEQ ID NO: 3627862 - DNA, 25 bp, Homo sapien
aaggctaaaggacatggcatacaga

SEQ ID NO: 3627863 - DNA, 25 bp, Homo sapien
caaactcagctccattggccacaaa

SEQ ID NO: 3627864 - DNA, 25 bp, Homo sapien
gtaaatatctccatgcgttggttct

SEQ ID NO: 3627865 - DNA, 25 bp, Homo sapien
catgcgttggttcttgaattcaaca

SEQ ID NO: 3627866 - DNA, 25 bp, Homo sapien
tctccatgcgttggttcttgaattc

SEQ ID NO: 3627867 - DNA, 25 bp, Homo sapien
atatctccatgcgttggttcttgaa

SEQ ID NO: 3627868 - DNA, 25 bp, Homo sapien
gaggcaacattagaggctcccacca

SEQ ID NO: 3627869 - DNA, 25 bp, Homo sapien
taagatcgtgtcagaaaggctcagg

SEQ ID NO: 3627870 - DNA, 25 bp, Homo sapien
gaaaacctgtgacatccaaattgtg

SEQ ID NO: 3627871 - DNA, 25 bp, Homo sapien
tttatcatcaaacggacccagggct

SEQ ID NO: 3627872 - DNA, 25 bp, Homo sapien
cagtctccattttcgagggcaggga

SEQ ID NO: 3627873 - DNA, 25 bp, Homo sapien
tgctgtgtagtgtaccaactcgtgt

SEQ ID NO: 3627874 - DNA, 25 bp, Homo sapien
gcagttggtttcttagcagcgccca

SEQ ID NO: 3627875 - DNA, 25 bp, Homo sapien
tcggatcattggagctagaccggct

SEQ ID NO: 3627876 - DNA, 25 bp, Homo sapien
cttctggaggaggagtattatcttc

SEQ ID NO: 3627877 - DNA, 25 bp, Homo sapien
ttctggaggaggagtattatcttct

SEQ ID NO: 3627878 - DNA, 25 bp, Homo sapien
tctggaggaggagtattatcttctg

SEQ ID NO: 3627879 - DNA, 25 bp, Homo sapien
tcttctggagggggagtattatctt

SEQ ID NO: 3627880 - DNA, 25 bp, Homo sapien
gaatgggcagtactaacttcagagc

SEQ ID NO: 3627881 - DNA, 25 bp, Homo sapien
cagtgggcgcttggagactgacatt

SEQ ID NO: 3627882 - DNA, 25 bp, Homo sapien
aatggttggattcactgagtgggca

SEQ ID NO: 3627883 - DNA, 25 bp, Homo sapien
ctgcgtgcaccagctgtcggaagct

SEQ ID NO: 3627884 - DNA, 25 bp, Homo sapien
agggatgttggatgccatggcatga

SEQ ID NO: 3627885 - DNA, 25 bp, Homo sapien
catggcatgatcagcgactgagatc

SEQ ID NO: 3627886 - DNA, 25 bp, Homo sapien
ggatgccatggcatgatcagcgact

SEQ ID NO: 3627887 - DNA, 25 bp, Homo sapien
gatcagcgactgagatccttcctcc

SEQ ID NO: 3627888 - DNA, 25 bp, Homo sapien
aagatttctagaagctacagcaaag

SEQ ID NO: 3627889 - DNA, 25 bp, Homo sapien
gatttctagaagctacagcaaagat

SEQ ID NO: 3627890 - DNA, 25 bp, Homo sapien
caagatttctagaagctacagcaaa

SEQ ID NO: 3627891 - DNA, 25 bp, Homo sapien
tttctagaagctacagcaaagatgg

SEQ ID NO: 3627892 - DNA, 25 bp, Homo sapien
aggagagctccacagcaccagagct

SEQ ID NO: 3627893 - DNA, 25 bp, Homo sapien
caaggagacatgatgtcaggattct

SEQ ID NO: 3627894 - DNA, 25 bp, Homo sapien
tgtcaggattcttgagttgagctcc

SEQ ID NO: 3627895 - DNA, 25 bp, Homo sapien
ctagaaggaccccactgattccgag

SEQ ID NO: 3627896 - DNA, 25 bp, Homo sapien
agattcccacatcagctctggcgag

SEQ ID NO: 3627897 - DNA, 25 bp, Homo sapien
gcttctagagaaggcagggtttgct

SEQ ID NO: 3627898 - DNA, 25 bp, Homo sapien
tggaatcgagggatcagattcccac

SEQ ID NO: 3627899 - DNA, 25 bp, Homo sapien
ctctcaccgagggattgcagtaagg

SEQ ID NO: 3627900 - DNA, 25 bp, Homo sapien
gagactccagggcccaaaggagtca

SEQ ID NO: 3627901 - DNA, 25 bp, Homo sapien
agactccagggcccaaaggagtcac

SEQ ID NO: 3627902 - DNA, 25 bp, Homo sapien
gactccagggcccaaaggagtcaca

SEQ ID NO: 3627903 - DNA, 25 bp, Homo sapien
ttttgagctcgatggacttgcagag

SEQ ID NO: 3627904 - DNA, 25 bp, Homo sapien
cttttgagctcgatggacttgcaga

SEQ ID NO: 3627905 - DNA, 25 bp, Homo sapien
tgagctcgatggacttgcagagctg

SEQ ID NO: 3627906 - DNA, 25 bp, Homo sapien
tttgagctcgatggacttgcagagc

SEQ ID NO: 3627907 - DNA, 25 bp, Homo sapien
caagcagcagcctcttcataaaact

SEQ ID NO: 3627908 - DNA, 25 bp, Homo sapien
tctgattctctcacaagcagcagcc

SEQ ID NO: 3627909 - DNA, 25 bp, Homo sapien
cacctctctgattctctcacaagca

SEQ ID NO: 3627910 - DNA, 25 bp, Homo sapien
cagcactgcccctccccatctgtac

SEQ ID NO: 3627911 - DNA, 25 bp, Homo sapien
tgctgtcccctgagtggtctgcgct

SEQ ID NO: 3627912 - DNA, 25 bp, Homo sapien
agcctcctctcttgggggccagagg

SEQ ID NO: 3627913 - DNA, 25 bp, Homo sapien
tcttgggggccagaggtgcagcagg

SEQ ID NO: 3627914 - DNA, 25 bp, Homo sapien
aggacaggagatgccggggctctct

SEQ ID NO: 3627915 - DNA, 25 bp, Homo sapien
tgactcttgataatgttggaatttc

SEQ ID NO: 3627916 - DNA, 25 bp, Homo sapien
gactcttgataatgttggaatttct

SEQ ID NO: 3627917 - DNA, 25 bp, Homo sapien
cagaggccgttcttgggtgaccgct

SEQ ID NO: 3627918 - DNA, 25 bp, Homo sapien
cgttcttgggtgaccgctgacatcc

SEQ ID NO: 3627919 - DNA, 25 bp, Homo sapien
agggcagaggccgttcttgggtgac

SEQ ID NO: 3627920 - DNA, 25 bp, Homo sapien
ttgggtgaccgctgacatcccggag

SEQ ID NO: 3627921 - DNA, 25 bp, Homo sapien
cagcctggttagtccaggtggccag

SEQ ID NO: 3627922 - DNA, 25 bp, Homo sapien
aggtggccagcgatcctggaataga

SEQ ID NO: 3627923 - DNA, 25 bp, Homo sapien
agtggtcgatggtggccacctttgt

SEQ ID NO: 3627924 - DNA, 25 bp, Homo sapien
cctggaatagagttgagtggtcgat

SEQ ID NO: 3627925 - DNA, 25 bp, Homo sapien
cttgtgaaccagacgcgagtaggtt

SEQ ID NO: 3627926 - DNA, 25 bp, Homo sapien
cagcccacggtgctgggtggtatca

SEQ ID NO: 3627927 - DNA, 25 bp, Homo sapien
agcccacggtgctgggtggtatcat

SEQ ID NO: 3627928 - DNA, 25 bp, Homo sapien
gcagcccacggtgctgggtggtatc

SEQ ID NO: 3627929 - DNA, 25 bp, Homo sapien
tcaccgacagcagcaaatcaggcaa

SEQ ID NO: 3627930 - DNA, 25 bp, Homo sapien
ctgtcaccgacagcagcaaatcagg

SEQ ID NO: 3627931 - DNA, 25 bp, Homo sapien
ctgttatctgtcaccgacagcagca

SEQ ID NO: 3627932 - DNA, 25 bp, Homo sapien
tgttatctgtcaccgacagcagcaa

SEQ ID NO: 3627933 - DNA, 25 bp, Homo sapien
catagacccttgactgtggccaaac

SEQ ID NO: 3627934 - DNA, 25 bp, Homo sapien
tcacatagacccttgactgtggcca

SEQ ID NO: 3627935 - DNA, 25 bp, Homo sapien
ccttatggcatgtctctggcacatc

SEQ ID NO: 3627936 - DNA, 25 bp, Homo sapien
ataaccgttccttatggcatgtctc

SEQ ID NO: 3627937 - DNA, 25 bp, Homo sapien
gacaggacaccaggaagtcagcacc

SEQ ID NO: 3627938 - DNA, 25 bp, Homo sapien
ggacaggacaccaggaagtcagcac

SEQ ID NO: 3627939 - DNA, 25 bp, Homo sapien
caggacaggacaccaggaagtcagc

SEQ ID NO: 3627940 - DNA, 25 bp, Homo sapien
agcaggacaggacaccaggaagtca

SEQ ID NO: 3627941 - DNA, 25 bp, Homo sapien
ccctagtcagtgtagaaaagtagaa

SEQ ID NO: 3627942 - DNA, 25 bp, Homo sapien
cttgccctagtcagtgtagaaaagt

SEQ ID NO: 3627943 - DNA, 25 bp, Homo sapien
gccctagtcagtgtagaaaagtaga

SEQ ID NO: 3627944 - DNA, 25 bp, Homo sapien
tgccctagtcagtgtagaaaagtag

SEQ ID NO: 3627945 - DNA, 25 bp, Homo sapien
aagcatggtccacaaaagcgcccat

SEQ ID NO: 3627946 - DNA, 25 bp, Homo sapien
ggaagcatggtccacaaaagcgccc

SEQ ID NO: 3627947 - DNA, 25 bp, Homo sapien
cacgtgtgcatgtcgttggatgcct

SEQ ID NO: 3627948 - DNA, 25 bp, Homo sapien
catgtcgttggatgcctccaaggag

SEQ ID NO: 3627949 - DNA, 25 bp, Homo sapien
tctgctctgctagacgggtaacatg

SEQ ID NO: 3627950 - DNA, 25 bp, Homo sapien
gcatgctggaatctgactgttggaa

SEQ ID NO: 3627951 - DNA, 25 bp, Homo sapien
caatgaggccttttcgactgactcc

SEQ ID NO: 3627952 - DNA, 25 bp, Homo sapien
catgaatgtgtgaatccgctggcct

SEQ ID NO: 3627953 - DNA, 25 bp, Homo sapien
ttccttcacaaaggcattggtattt

SEQ ID NO: 3627954 - DNA, 25 bp, Homo sapien
cttcacaaaggcattggtatttgga

SEQ ID NO: 3627955 - DNA, 25 bp, Homo sapien
aaggcattggtatttggaattgaca

SEQ ID NO: 3627956 - DNA, 25 bp, Homo sapien
cacaaaggcattggtatttggaatt

SEQ ID NO: 3627957 - DNA, 25 bp, Homo sapien
tatctttaactcaccactggatcca

SEQ ID NO: 3627958 - DNA, 25 bp, Homo sapien
gcttgaatgcaaaccaagcctttga

SEQ ID NO: 3627959 - DNA, 25 bp, Homo sapien
ttgatgcaacgacagctttgctgat

SEQ ID NO: 3627960 - DNA, 25 bp, Homo sapien
tgatgatgacatacacccattggcc

SEQ ID NO: 3627961 - DNA, 25 bp, Homo sapien
acaatcaatctgctgtgctaaaact

SEQ ID NO: 3627962 - DNA, 25 bp, Homo sapien
aacaatcaatctgctgtgctaaaac

SEQ ID NO: 3627963 - DNA, 25 bp, Homo sapien
ggggctggacgatgccccttccctg

SEQ ID NO: 3627964 - DNA, 25 bp, Homo sapien
acattttgctcatctgagaagctcc

SEQ ID NO: 3627965 - DNA, 25 bp, Homo sapien
cattttgctcatctgagaagctcca

SEQ ID NO: 3627966 - DNA, 25 bp, Homo sapien
atgcaggggctggacgatgcccctt

SEQ ID NO: 3627967 - DNA, 25 bp, Homo sapien
agtgaatagaggatctcaggttgaa

SEQ ID NO: 3627968 - DNA, 25 bp, Homo sapien
gggaactgcagcctggtaatgcagg

SEQ ID NO: 3627969 - DNA, 25 bp, Homo sapien
ttcaggaggcacgcttctccccgga

SEQ ID NO: 3627970 - DNA, 25 bp, Homo sapien
ggatggggaccagcccctaagtgaa

SEQ ID NO: 3627971 - DNA, 25 bp, Homo sapien
gctggtggtcactctacacaaggcc

SEQ ID NO: 3627972 - DNA, 25 bp, Homo sapien
agatgattcaccacagcgtcccttt

SEQ ID NO: 3627973 - DNA, 25 bp, Homo sapien
cactctacacaaggccagtgggcag

SEQ ID NO: 3627974 - DNA, 25 bp, Homo sapien
tcagatgattcaccacagcgtccct

SEQ ID NO: 3627975 - DNA, 25 bp, Homo sapien
ggtacagagatatgggctacgcgct

SEQ ID NO: 3627976 - DNA, 25 bp, Homo sapien
ggtatgcggagctttgcttcaatga

SEQ ID NO: 3627977 - DNA, 25 bp, Homo sapien
ggataaacagcaggcgactctgtgg

SEQ ID NO: 3627978 - DNA, 25 bp, Homo sapien
tacgcgctggcatcatcacagcctg

SEQ ID NO: 3627979 - DNA, 25 bp, Homo sapien
catgggttagtcttctgcaggccaa

SEQ ID NO: 3627980 - DNA, 25 bp, Homo sapien
ccaaacatgggttagtcttctgcag

SEQ ID NO: 3627981 - DNA, 25 bp, Homo sapien
aacatgggttagtcttctgcaggcc

SEQ ID NO: 3627982 - DNA, 25 bp, Homo sapien
gaagaggatgtccagagcagcctct

SEQ ID NO: 3627983 - DNA, 25 bp, Homo sapien
agctggaggtgagctccgctgccag

SEQ ID NO: 3627984 - DNA, 25 bp, Homo sapien
ggatactgcaacagggaagcccgct

SEQ ID NO: 3627985 - DNA, 25 bp, Homo sapien
gtaagagatcaggatactgcaacag

SEQ ID NO: 3627986 - DNA, 25 bp, Homo sapien
acacagcttcggcacatgctagtaa

SEQ ID NO: 3627987 - DNA, 25 bp, Homo sapien
agggaagcccgctccctttcttgag

SEQ ID NO: 3627988 - DNA, 25 bp, Homo sapien
ccttcacgggaatcaattgcttctc

SEQ ID NO: 3627989 - DNA, 25 bp, Homo sapien
gggaatcaattgcttctcagcaatg

SEQ ID NO: 3627990 - DNA, 25 bp, Homo sapien
cacgggaatcaattgcttctcagca

SEQ ID NO: 3627991 - DNA, 25 bp, Homo sapien
aacccttcacgggaatcaattgctt

SEQ ID NO: 3627992 - DNA, 25 bp, Homo sapien
ggtcatagttgattgttaaccagtg

SEQ ID NO: 3627993 - DNA, 25 bp, Homo sapien
caggtggtcatagttgattgttaac

SEQ ID NO: 3627994 - DNA, 25 bp, Homo sapien
ttgaggcaggtggtcatagttgatt

SEQ ID NO: 3627995 - DNA, 25 bp, Homo sapien
gcaggtggtcatagttgattgttaa

SEQ ID NO: 3627996 - DNA, 25 bp, Homo sapien
ttgaggcaggtggtcatagttgatt

SEQ ID NO: 3627997 - DNA, 25 bp, Homo sapien
ggtcatagttgattgttaaccagtg

SEQ ID NO: 3627998 - DNA, 25 bp, Homo sapien
caggtggtcatagttgattgttaac

SEQ ID NO: 3627999 - DNA, 25 bp, Homo sapien
gtcatagttgattgttaaccagtgt

SEQ ID NO: 3628000 - DNA, 25 bp, Homo sapien
tgttaaccagtgttgaggcaggtgg

SEQ ID NO: 3628001 - DNA, 25 bp, Homo sapien
ccagtgttgaggcaggtggtcatag

SEQ ID NO: 3628002 - DNA, 25 bp, Homo sapien
aaccagtgttgaggcaggtggtcat

SEQ ID NO: 3628003 - DNA, 25 bp, Homo sapien
ttaaccagtgttgaggcaggtggtc

SEQ ID NO: 3628004 - DNA, 25 bp, Homo sapien
ggtcatagttgattgttaaccagtg

SEQ ID NO: 3628005 - DNA, 25 bp, Homo sapien
caggtggtcatagttgattgttaac

SEQ ID NO: 3628006 - DNA, 25 bp, Homo sapien
tgattgctaaccagtgttgaggcag

SEQ ID NO: 3628007 - DNA, 25 bp, Homo sapien
gcaggtggtcatagttgattgctaa

SEQ ID NO: 3628008 - DNA, 25 bp, Homo sapien
taggtggtcatagttgattgttaac

SEQ ID NO: 3628009 - DNA, 25 bp, Homo sapien
ctagtgttgaggtaggtggtcatag

SEQ ID NO: 3628010 - DNA, 25 bp, Homo sapien
aggtaggtggtcatagttgattgtt

SEQ ID NO: 3628011 - DNA, 25 bp, Homo sapien
tgttgaggtaggtggtcatagttga

SEQ ID NO: 3628012 - DNA, 25 bp, Homo sapien
tgattgctaaccagtgttgaggcag

SEQ ID NO: 3628013 - DNA, 25 bp, Homo sapien
agttgattgctaaccagtgttgagg

SEQ ID NO: 3628014 - DNA, 25 bp, Homo sapien
tagttgattgctaaccagtgttgag

SEQ ID NO: 3628015 - DNA, 25 bp, Homo sapien
ttgattgctaaccagtgttgaggca

SEQ ID NO: 3628016 - DNA, 25 bp, Homo sapien
ggcaaggtcctgactttagtcttaa

SEQ ID NO: 3628017 - DNA, 25 bp, Homo sapien
gcctagagaccatgttgactttcct

SEQ ID NO: 3628018 - DNA, 25 bp, Homo sapien
aatcctccactctctggaaggagac

SEQ ID NO: 3628019 - DNA, 25 bp, Homo sapien
gttctttcttgagtgtatagcccca

SEQ ID NO: 3628020 - DNA, 25 bp, Homo sapien
atagccccatcttgtggtaacttgc

SEQ ID NO: 3628021 - DNA, 25 bp, Homo sapien
gaaacttcgctaaccaactgttctt

SEQ ID NO: 3628022 - DNA, 25 bp, Homo sapien
aaagtccacataaccctagaattct

SEQ ID NO: 3628023 - DNA, 25 bp, Homo sapien
gcttctgcacttcatatccatattt

SEQ ID NO: 3628024 - DNA, 25 bp, Homo sapien
atccatatttcctattgttcacttt

SEQ ID NO: 3628025 - DNA, 25 bp, Homo sapien
agcctatccttaataaatcctccac

SEQ ID NO: 3628026 - DNA, 25 bp, Homo sapien
tttattctgtagagcagcctgccaa

SEQ ID NO: 3628027 - DNA, 25 bp, Homo sapien
gtggaggatttattaaggataggct

SEQ ID NO: 3628028 - DNA, 25 bp, Homo sapien
aagaacagttggttagcgaagtttc

SEQ ID NO: 3628029 - DNA, 25 bp, Homo sapien
aaagtgaacaataggaaatatggat

SEQ ID NO: 3628030 - DNA, 25 bp, Homo sapien
aaatatggatatgaagtgcagaagc

SEQ ID NO: 3628031 - DNA, 25 bp, Homo sapien
gcaagttaccacaagatggggctat

SEQ ID NO: 3628032 - DNA, 25 bp, Homo sapien
tggggctatacactcaagaaagaac

SEQ ID NO: 3628033 - DNA, 25 bp, Homo sapien
ttggcaggctgctctacagaataaa

SEQ ID NO: 3628034 - DNA, 25 bp, Homo sapien
agaattctagggttatgtggacttt

SEQ ID NO: 3628035 - DNA, 25 bp, Homo sapien
aggaaagtcaacatggtctctaggc

SEQ ID NO: 3628036 - DNA, 25 bp, Homo sapien
ttaagactaaagtcaggaccttgcc

SEQ ID NO: 3628037 - DNA, 25 bp, Homo sapien
gtctccttccagagagtggaggatt

SEQ ID NO: 3628038 - DNA, 25 bp, Homo sapien
tttccccggctgtctgccaagcatg

SEQ ID NO: 3628039 - DNA, 25 bp, Homo sapien
ctttccccggctgtctgccaagcat

SEQ ID NO: 3628040 - DNA, 25 bp, Homo sapien
ttccccggctgtctgccaagcatgg

SEQ ID NO: 3628041 - DNA, 25 bp, Homo sapien
ccccggctgtctgccaagcatggcg

SEQ ID NO: 3628042 - DNA, 25 bp, Homo sapien
gggagtcccctttgactgacaggga

SEQ ID NO: 3628043 - DNA, 25 bp, Homo sapien
gcagggagtcccctttgactgacag

SEQ ID NO: 3628044 - DNA, 25 bp, Homo sapien
gagtcccctttgactgacagggaca

SEQ ID NO: 3628045 - DNA, 25 bp, Homo sapien
ccagcagggagtcccctttgactga

SEQ ID NO: 3628046 - DNA, 25 bp, Homo sapien
ggagaatgtgtaggcccctctctgc

SEQ ID NO: 3628047 - DNA, 25 bp, Homo sapien
gggaggagaatgtgtaggcccctct

SEQ ID NO: 3628048 - DNA, 25 bp, Homo sapien
gaggagaatgtgtaggcccctctct

SEQ ID NO: 3628049 - DNA, 25 bp, Homo sapien
ctgctgctgtcctggagggtggggc

SEQ ID NO: 3628050 - DNA, 25 bp, Homo sapien
gggagaatctgcatctggtccaggc

SEQ ID NO: 3628051 - DNA, 25 bp, Homo sapien
tctggatggagcctgcctggttgcc

SEQ ID NO: 3628052 - DNA, 25 bp, Homo sapien
tattctgaggactcccctgaaggca

SEQ ID NO: 3628053 - DNA, 25 bp, Homo sapien
tctgcctgctcatggaggtctccac

SEQ ID NO: 3628054 - DNA, 25 bp, Homo sapien
tacgcagagctgcacgtggaagatg

SEQ ID NO: 3628055 - DNA, 25 bp, Homo sapien
tagggtgcgcagatttgtacttggt

SEQ ID NO: 3628056 - DNA, 25 bp, Homo sapien
ctttccttgtgatacgcagagctgc

SEQ ID NO: 3628057 - DNA, 25 bp, Homo sapien
gcagttttgctggttagttctgaac

SEQ ID NO: 3628058 - DNA, 25 bp, Homo sapien
tgttccagaagctcctgagagccat

SEQ ID NO: 3628059 - DNA, 25 bp, Homo sapien
ttgttccagaagctcctgagagcca

SEQ ID NO: 3628060 - DNA, 25 bp, Homo sapien
ctctgcgatgactgcctggcggtgg

SEQ ID NO: 3628061 - DNA, 25 bp, Homo sapien
cctggcggtggctgttacgtgattc

SEQ ID NO: 3628062 - DNA, 25 bp, Homo sapien
tgcgatgactgcctggcggtggctg

SEQ ID NO: 3628063 - DNA, 25 bp, Homo sapien
ctggcggtggctgttacgtgattcc

SEQ ID NO: 3628064 - DNA, 25 bp, Homo sapien
ggaagcgtgggggccggcaggtcat

SEQ ID NO: 3628065 - DNA, 25 bp, Homo sapien
agagaagaagctcatgctcctggaa

SEQ ID NO: 3628066 - DNA, 25 bp, Homo sapien
gcctctgtgtcttggtaatgcagta

SEQ ID NO: 3628067 - DNA, 25 bp, Homo sapien
atgtcagtaagccgggcagatttta

SEQ ID NO: 3628068 - DNA, 25 bp, Homo sapien
ttaagcctctgtgtcttggtaatgc

SEQ ID NO: 3628069 - DNA, 25 bp, Homo sapien
taagccgggcagattttaatgtggg

SEQ ID NO: 3628070 - DNA, 25 bp, Homo sapien
gccatctctgcgttgtgagaacact

SEQ ID NO: 3628071 - DNA, 25 bp, Homo sapien
tcaggccatctctgcgttgtgagaa

SEQ ID NO: 3628072 - DNA, 25 bp, Homo sapien
ctgcgttgtgagaacactcagtgtc

SEQ ID NO: 3628073 - DNA, 25 bp, Homo sapien
tctctgcgttgtgagaacactcagt

SEQ ID NO: 3628074 - DNA, 25 bp, Homo sapien
gatttctcagagtgaaagtcccggg

SEQ ID NO: 3628075 - DNA, 25 bp, Homo sapien
cttccacggtaaaggatttctcaga

SEQ ID NO: 3628076 - DNA, 25 bp, Homo sapien
ttctcagagtgaaagtcccggggtg

SEQ ID NO: 3628077 - DNA, 25 bp, Homo sapien
ctcagagtgaaagtcccggggtgca

SEQ ID NO: 3628078 - DNA, 25 bp, Homo sapien
caaacctattcctctgtacgtgaag

SEQ ID NO: 3628079 - DNA, 25 bp, Homo sapien
ctcaaacctattcctctgtacgtga

SEQ ID NO: 3628080 - DNA, 25 bp, Homo sapien
cctattcctctgtacgtgaagaata

SEQ ID NO: 3628081 - DNA, 25 bp, Homo sapien
aacctattcctctgtacgtgaagaa

SEQ ID NO: 3628082 - DNA, 25 bp, Homo sapien
ccaatggccctagtggtgtcctgtt

SEQ ID NO: 3628083 - DNA, 25 bp, Homo sapien
tgaggctgatgcgtctccattcctg

SEQ ID NO: 3628084 - DNA, 25 bp, Homo sapien
atggaggaagcccaatggccctagt

SEQ ID NO: 3628085 - DNA, 25 bp, Homo sapien
actccgctgaggctgatgcgtctcc

SEQ ID NO: 3628086 - DNA, 25 bp, Homo sapien
ccttccgctgcctggaggagcaatc

SEQ ID NO: 3628087 - DNA, 25 bp, Homo sapien
tccgctgcctggaggagcaatctga

SEQ ID NO: 3628088 - DNA, 25 bp, Homo sapien
ctgcctggaggagcaatctgagcct

SEQ ID NO: 3628089 - DNA, 25 bp, Homo sapien
gaggagcaatctgagcctggccagc

SEQ ID NO: 3628090 - DNA, 25 bp, Homo sapien
ccagaagaaagggaggagacagctt

SEQ ID NO: 3628091 - DNA, 25 bp, Homo sapien
gaagaaagggaggagacagcttcat

SEQ ID NO: 3628092 - DNA, 25 bp, Homo sapien
ccaggaggtggcccagaagaaaggg

SEQ ID NO: 3628093 - DNA, 25 bp, Homo sapien
caggaggtggcccagaagaaaggga

SEQ ID NO: 3628094 - DNA, 25 bp, Homo sapien
agtccgtaacaagtgcttcccatgg

SEQ ID NO: 3628095 - DNA, 25 bp, Homo sapien
aggtctaagtccgtaacaagtgctt

SEQ ID NO: 3628096 - DNA, 25 bp, Homo sapien
tccgtaacaagtgcttcccatggat

SEQ ID NO: 3628097 - DNA, 25 bp, Homo sapien
tctaagtccgtaacaagtgcttccc

SEQ ID NO: 3628098 - DNA, 25 bp, Homo sapien
cccagctcttgggccttcttgggac

SEQ ID NO: 3628099 - DNA, 25 bp, Homo sapien
agctcttgggccttcttgggaccac

SEQ ID NO: 3628100 - DNA, 25 bp, Homo sapien
ctcttgggccttcttgggaccacct

SEQ ID NO: 3628101 - DNA, 25 bp, Homo sapien
cagctcttgggccttcttgggacca

SEQ ID NO: 3628102 - DNA, 25 bp, Homo sapien
atcttaaattgccaagtgtcactag

SEQ ID NO: 3628103 - DNA, 25 bp, Homo sapien
tgccaagtgtcactagtgccctgat

SEQ ID NO: 3628104 - DNA, 25 bp, Homo sapien
taaattgccaagtgtcactagtgcc

SEQ ID NO: 3628105 - DNA, 25 bp, Homo sapien
tctgaggggacactcggcctcttgg

SEQ ID NO: 3628106 - DNA, 25 bp, Homo sapien
cagccctgattctgtctatagtccc

SEQ ID NO: 3628107 - DNA, 25 bp, Homo sapien
agccctgattctgtctatagtccct

SEQ ID NO: 3628108 - DNA, 25 bp, Homo sapien
ccagctccacagcaaacatccacct

SEQ ID NO: 3628109 - DNA, 25 bp, Homo sapien
cccagctccacagcaaacatccacc

SEQ ID NO: 3628110 - DNA, 25 bp, Homo sapien
cagctccacagcaaacatccacctt

SEQ ID NO: 3628111 - DNA, 25 bp, Homo sapien
cactggacagcgacaagcagggcta

SEQ ID NO: 3628112 - DNA, 25 bp, Homo sapien
gctagctacgtagcacctcagtgaa

SEQ ID NO: 3628113 - DNA, 25 bp, Homo sapien
cagggtcaggaagagagccgttttc

SEQ ID NO: 3628114 - DNA, 25 bp, Homo sapien
gtcaggaagagagccgttttcagca

SEQ ID NO: 3628115 - DNA, 25 bp, Homo sapien
agcattgtgtgtgccgtaacgatgg

SEQ ID NO: 3628116 - DNA, 25 bp, Homo sapien
aagtgcagagcattgtgtgtgccgt

SEQ ID NO: 3628117 - DNA, 25 bp, Homo sapien
cagagcattgtgtgtgccgtaacga

SEQ ID NO: 3628118 - DNA, 25 bp, Homo sapien
gtgcagagcattgtgtgtgccgtaa

SEQ ID NO: 3628119 - DNA, 25 bp, Homo sapien
tccaacccgtgtgccgtaacaatgg

SEQ ID NO: 3628120 - DNA, 25 bp, Homo sapien
tccaacccgtgtgccgtagcaatgg

SEQ ID NO: 3628121 - DNA, 25 bp, Homo sapien
gagatccaacccgtgtgccgtaaca

SEQ ID NO: 3628122 - DNA, 25 bp, Homo sapien
gagatccaacccgtgtgccgtagca

SEQ ID NO: 3628123 - DNA, 25 bp, Homo sapien
caggttctctgcagagccctgacta

SEQ ID NO: 3628124 - DNA, 25 bp, Homo sapien
tccaggttctctgcagagccctgac

SEQ ID NO: 3628125 - DNA, 25 bp, Homo sapien
ccaggttctctgcagagccctgact

SEQ ID NO: 3628126 - DNA, 25 bp, Homo sapien
tctccaggttctctgcagagccctg

SEQ ID NO: 3628127 - DNA, 25 bp, Homo sapien
aatggaaatgggctgcccgttcctc

SEQ ID NO: 3628128 - DNA, 25 bp, Homo sapien
cattccaatggaaatgggctgcccg

SEQ ID NO: 3628129 - DNA, 25 bp, Homo sapien
tcacattccaatggaaatgggctgc

SEQ ID NO: 3628130 - DNA, 25 bp, Homo sapien
tctagtgcagcccttgtcacattcc

SEQ ID NO: 3628131 - DNA, 25 bp, Homo sapien
ctggagtcagacgaggtgctggcat

SEQ ID NO: 3628132 - DNA, 25 bp, Homo sapien
ctgtggcagatgccaatggctcctc

SEQ ID NO: 3628133 - DNA, 25 bp, Homo sapien
gcagatgccaatggctcctctgtgc

SEQ ID NO: 3628134 - DNA, 25 bp, Homo sapien
tggcagatgccaatggctcctctgt

SEQ ID NO: 3628135 - DNA, 25 bp, Homo sapien
tgtggcagatgccaatggctcctct

SEQ ID NO: 3628136 - DNA, 25 bp, Homo sapien
cagatgtgttctgagtcggcatctc

SEQ ID NO: 3628137 - DNA, 25 bp, Homo sapien
agatgtgttctgagtcggcatctcc

SEQ ID NO: 3628138 - DNA, 25 bp, Homo sapien
tcaccaggcatgtcctgagtcggca

SEQ ID NO: 3628139 - DNA, 25 bp, Homo sapien
atgtgttctgagtcggcatctcccc

SEQ ID NO: 3628140 - DNA, 25 bp, Homo sapien
ttccccgtcaccaggtgtgtcctga

SEQ ID NO: 3628141 - DNA, 25 bp, Homo sapien
tctccccgtcaccaggtgtgtcctg

SEQ ID NO: 3628142 - DNA, 25 bp, Homo sapien
ttccccgtcaccaggtgtgtcctga

SEQ ID NO: 3628143 - DNA, 25 bp, Homo sapien
gtcctgagtcggcatttccccgtca

SEQ ID NO: 3628144 - DNA, 25 bp, Homo sapien
atgtgttctgagtcggcatctcccc

SEQ ID NO: 3628145 - DNA, 25 bp, Homo sapien
gtcctgagtcggcatttccccgtca

SEQ ID NO: 3628146 - DNA, 25 bp, Homo sapien
gatgtgttctgagtcggcgtctccc

SEQ ID NO: 3628147 - DNA, 25 bp, Homo sapien
cagatgtgttctgagtcggcgtctc

SEQ ID NO: 3628148 - DNA, 25 bp, Homo sapien
agatgtgttctgagtcggcgtctcc

SEQ ID NO: 3628149 - DNA, 25 bp, Homo sapien
catctccccgtcaccaggtgtgtcc

SEQ ID NO: 3628150 - DNA, 25 bp, Homo sapien
tctccccgtcaccaggtgtgtcctg

SEQ ID NO: 3628151 - DNA, 25 bp, Homo sapien
gtcctgagtcggcatctccccgtca

SEQ ID NO: 3628152 - DNA, 25 bp, Homo sapien
atgtgttctgagtcggcatctcccc

SEQ ID NO: 3628153 - DNA, 25 bp, Homo sapien
catctccccgtcaccaggtgtgtcc

SEQ ID NO: 3628154 - DNA, 25 bp, Homo sapien
tctccccgtcaccaggtgtgtcctg

SEQ ID NO: 3628155 - DNA, 25 bp, Homo sapien
gtcctgagtcggcatctccccgtca

SEQ ID NO: 3628156 - DNA, 25 bp, Homo sapien
atgtgttctgagtcggcatctcccc

SEQ ID NO: 3628157 - DNA, 25 bp, Homo sapien
caggtgtgtcctgagtgtgtcctga

SEQ ID NO: 3628158 - DNA, 25 bp, Homo sapien
gtcctgagtgtgtcctgagtcggca

SEQ ID NO: 3628159 - DNA, 25 bp, Homo sapien
tgagtgtgtcctgagtcggcatctc

SEQ ID NO: 3628160 - DNA, 25 bp, Homo sapien
gtgtgtcctgagtcggcatctcccc

SEQ ID NO: 3628161 - DNA, 25 bp, Homo sapien
tctccccgtcaccaggtgtgtcctg

SEQ ID NO: 3628162 - DNA, 25 bp, Homo sapien
gtcctgagtcggcatctccccgtca

SEQ ID NO: 3628163 - DNA, 25 bp, Homo sapien
tcaccaggcatgtcctgagtcggca

SEQ ID NO: 3628164 - DNA, 25 bp, Homo sapien
atgtgttctgagtcggcatctcccc

SEQ ID NO: 3628165 - DNA, 25 bp, Homo sapien
catcaccaggtgtgtcctgagtcgg

SEQ ID NO: 3628166 - DNA, 25 bp, Homo sapien
tcaccaggtgtgtcctgagtcggca

SEQ ID NO: 3628167 - DNA, 25 bp, Homo sapien
tccccatcaccaggtgtgtcctgag

SEQ ID NO: 3628168 - DNA, 25 bp, Homo sapien
cccatcaccaggtgtgtcctgagtc

SEQ ID NO: 3628169 - DNA, 25 bp, Homo sapien
gcagtaaaggacacccaactcaggt

SEQ ID NO: 3628170 - DNA, 25 bp, Homo sapien
tagtgacacctaggtccttgggagg

SEQ ID NO: 3628171 - DNA, 25 bp, Homo sapien
tgcggcccctgactagcttatgaac

SEQ ID NO: 3628172 - DNA, 25 bp, Homo sapien
cccaggcttctatgtaaggcagtaa

SEQ ID NO: 3628173 - DNA, 25 bp, Homo sapien
aggattgagaggaagcacccacaca

SEQ ID NO: 3628174 - DNA, 25 bp, Homo sapien
ctgtcatgtttaatagtccaaactg

SEQ ID NO: 3628175 - DNA, 25 bp, Homo sapien
gcatgtgcttggattaaaagtcccc

SEQ ID NO: 3628176 - DNA, 25 bp, Homo sapien
tccaaactgagtggtgcacgagaca

SEQ ID NO: 3628177 - DNA, 25 bp, Homo sapien
aatccttgcaagagtctgagaggca

SEQ ID NO: 3628178 - DNA, 25 bp, Homo sapien
gtgtatcaatcatatttgcttatcc

SEQ ID NO: 3628179 - DNA, 25 bp, Homo sapien
ttttttgatggcagctatgcttaca

SEQ ID NO: 3628180 - DNA, 25 bp, Homo sapien
caccttatcctgtgcttactggtca

SEQ ID NO: 3628181 - DNA, 25 bp, Homo sapien
cttacatgtgtcagttggtattgca

SEQ ID NO: 3628182 - DNA, 25 bp, Homo sapien
tcataaacacattcagcatcctgcc

SEQ ID NO: 3628183 - DNA, 25 bp, Homo sapien
cctgccctcgcccaaggtgtcggac

SEQ ID NO: 3628184 - DNA, 25 bp, Homo sapien
atcctgccctcgcccaaggtgtcgg

SEQ ID NO: 3628185 - DNA, 25 bp, Homo sapien
aagatccgggaggagtacccagaca

SEQ ID NO: 3628186 - DNA, 25 bp, Homo sapien
cgggacaccgaggcaaaagtgagga

SEQ ID NO: 3628187 - DNA, 25 bp, Homo sapien
gacaccgaggcaaaagtgaggaaaa

SEQ ID NO: 3628188 - DNA, 25 bp, Homo sapien
ggacaccgaggcaaaagtgaggaaa

SEQ ID NO: 3628189 - DNA, 25 bp, Homo sapien
gggacaccgaggcaaaagtgaggaa

SEQ ID NO: 3628190 - DNA, 25 bp, Homo sapien
ctgtgaggacggggggtccaccgtg

SEQ ID NO: 3628191 - DNA, 25 bp, Homo sapien
tgtgaggacggggggtccaccgtga

SEQ ID NO: 3628192 - DNA, 25 bp, Homo sapien
ggtccaccgtgaggacggagcttcc

SEQ ID NO: 3628193 - DNA, 25 bp, Homo sapien
gaggacggagcttcctctcctcagc

SEQ ID NO: 3628194 - DNA, 25 bp, Homo sapien
gcgcgaaccgtgtccgaaccgcacg

SEQ ID NO: 3628195 - DNA, 25 bp, Homo sapien
accgtgtccgaaccgcacggcggcg

SEQ ID NO: 3628196 - DNA, 25 bp, Homo sapien
cgcgcgcgaaccgtgtccgaaccgc

SEQ ID NO: 3628197 - DNA, 25 bp, Homo sapien
cgaaccgtgtccgaaccgcacggcg

SEQ ID NO: 3628198 - DNA, 25 bp, Homo sapien
gatggtggtctccagttcagttgaa

SEQ ID NO: 3628199 - DNA, 25 bp, Homo sapien
tggtctccagttcagttgaaatttc

SEQ ID NO: 3628200 - DNA, 25 bp, Homo sapien
tggtggtctccagttcagttgaaat

SEQ ID NO: 3628201 - DNA, 25 bp, Homo sapien
ctatctccatgcgttccggtcaagg

SEQ ID NO: 3628202 - DNA, 25 bp, Homo sapien
cccagacttcactttgtacgagcgt

SEQ ID NO: 3628203 - DNA, 25 bp, Homo sapien
tgtacccagacttcactttgtacga

SEQ ID NO: 3628204 - DNA, 25 bp, Homo sapien
tacccagacttcactttgtacgagc

SEQ ID NO: 3628205 - DNA, 25 bp, Homo sapien
ttcccgtctggccatttgtacccag

SEQ ID NO: 3628206 - DNA, 25 bp, Homo sapien
tccagtgggtacctggataggctgc

SEQ ID NO: 3628207 - DNA, 25 bp, Homo sapien
cgtgtatgctgtagtctgggtgcat

SEQ ID NO: 3628208 - DNA, 25 bp, Homo sapien
gcgtgctgtagtctgcgtgtatgct

SEQ ID NO: 3628209 - DNA, 25 bp, Homo sapien
gttccttaagggtgcgcgtgctgta

SEQ ID NO: 3628210 - DNA, 25 bp, Homo sapien
gatatcccaagagcaggctgactgt

SEQ ID NO: 3628211 - DNA, 25 bp, Homo sapien
tcagctgtggccattgtgcctgtgc

SEQ ID NO: 3628212 - DNA, 25 bp, Homo sapien
tgtggccattgtgcctgtgcttccc

SEQ ID NO: 3628213 - DNA, 25 bp, Homo sapien
tatcccaagagcaggctgactgtct

SEQ ID NO: 3628214 - DNA, 25 bp, Homo sapien
tgccagcaagatgttttatatgtac

SEQ ID NO: 3628215 - DNA, 25 bp, Homo sapien
catgtatattagtagaaagagacca

SEQ ID NO: 3628216 - DNA, 25 bp, Homo sapien
tagattacaacaagatttagggaca

SEQ ID NO: 3628217 - DNA, 25 bp, Homo sapien
cacacgcgcgatagagcgatggcta

SEQ ID NO: 3628218 - DNA, 25 bp, Homo sapien
ggattagagtcctaactccaccatt

SEQ ID NO: 3628219 - DNA, 25 bp, Homo sapien
gcactagtgcacctgagtccaaatt

SEQ ID NO: 3628220 - DNA, 25 bp, Homo sapien
caccattctctagctattgaccttg

SEQ ID NO: 3628221 - DNA, 25 bp, Homo sapien
gccccgactctcttctatagcatga

SEQ ID NO: 3628222 - DNA, 25 bp, Homo sapien
cgagggggcattgtcaggcgccgcc

SEQ ID NO: 3628223 - DNA, 25 bp, Homo sapien
caggcgcgctggagccgggagcggg

SEQ ID NO: 3628224 - DNA, 25 bp, Homo sapien
ggggcattgtcaggcgccgccgcag

SEQ ID NO: 3628225 - DNA, 25 bp, Homo sapien
aggcgcgctggagccgggagcgggc

SEQ ID NO: 3628226 - DNA, 25 bp, Homo sapien
tccacacatgcactccgtatccaca

SEQ ID NO: 3628227 - DNA, 25 bp, Homo sapien
cctctatccgaaatttgttggagca

SEQ ID NO: 3628228 - DNA, 25 bp, Homo sapien
tgttggagcatattcctctgtctcc

SEQ ID NO: 3628229 - DNA, 25 bp, Homo sapien
tccccacgtcctgtcttcggcgcct

SEQ ID NO: 3628230 - DNA, 25 bp, Homo sapien
cgcccgccctcggagtttattgtgt

SEQ ID NO: 3628231 - DNA, 25 bp, Homo sapien
ttattgtgtcgggtcgaggcgcccc

SEQ ID NO: 3628232 - DNA, 25 bp, Homo sapien
tcgcgcctgagcgagggaggctagg

SEQ ID NO: 3628233 - DNA, 25 bp, Homo sapien
agccgctcacatggcgatgcgcgcg

SEQ ID NO: 3628234 - DNA, 25 bp, Homo sapien
cattatgctccggctcctccaccgc

SEQ ID NO: 3628235 - DNA, 25 bp, Homo sapien
attatgctccggctcctccaccgcc

SEQ ID NO: 3628236 - DNA, 25 bp, Homo sapien
gccgccgccgccgcgcccggccctc

SEQ ID NO: 3628237 - DNA, 25 bp, Homo sapien
gcggaccccacaggactgtcccgga

SEQ ID NO: 3628238 - DNA, 25 bp, Homo sapien
agaaaagcgcgaggagagactgcaa

SEQ ID NO: 3628239 - DNA, 25 bp, Homo sapien
ctgtcccggaggtccgcgaggacct

SEQ ID NO: 3628240 - DNA, 25 bp, Homo sapien
tcccgggctagcacacgacgtgccg

SEQ ID NO: 3628241 - DNA, 25 bp, Homo sapien
cacccagtggaatgctgaagcctta

SEQ ID NO: 3628242 - DNA, 25 bp, Homo sapien
caatctgtgggtgctacaactcgat

SEQ ID NO: 3628243 - DNA, 25 bp, Homo sapien
tgtagaacatatacgtgcagactgg

SEQ ID NO: 3628244 - DNA, 25 bp, Homo sapien
ttatgttagatgacggcacacccag

SEQ ID NO: 3628245 - DNA, 25 bp, Homo sapien
tataggaatcacactagtccatgct

SEQ ID NO: 3628246 - DNA, 25 bp, Homo sapien
cctagagaacatatcagtacatcag

SEQ ID NO: 3628247 - DNA, 25 bp, Homo sapien
agtacatcagtaccacggctaaagg

SEQ ID NO: 3628248 - DNA, 25 bp, Homo sapien
tgtaggttgtataacagtagacttc

SEQ ID NO: 3628249 - DNA, 25 bp, Homo sapien
ccccaagtgtaatgctgaagtgcta

SEQ ID NO: 3628250 - DNA, 25 bp, Homo sapien
gaattatagtgctactggccttgag

SEQ ID NO: 3628251 - DNA, 25 bp, Homo sapien
taaacccttcttggctagtgctggc

SEQ ID NO: 3628252 - DNA, 25 bp, Homo sapien
gctaatctgtgtatgaggccattcc

SEQ ID NO: 3628253 - DNA, 25 bp, Homo sapien
tctatgttgccaatacagttccagt

SEQ ID NO: 3628254 - DNA, 25 bp, Homo sapien
tttgggttatcatctatgttgccaa

SEQ ID NO: 3628255 - DNA, 25 bp, Homo sapien
gttatcatctatgttgccaatacag

SEQ ID NO: 3628256 - DNA, 25 bp, Homo sapien
ttatataccataagaatattatcct

SEQ ID NO: 3628257 - DNA, 25 bp, Homo sapien
tattgtgctccgcaagtattgcttc

SEQ ID NO: 3628258 - DNA, 25 bp, Homo sapien
aaaaatctgatgtggcaaccctgag

SEQ ID NO: 3628259 - DNA, 25 bp, Homo sapien
tttctgacagcgtatgcccagttca

SEQ ID NO: 3628260 - DNA, 25 bp, Homo sapien
caagcaagtctactgccctttttct

SEQ ID NO: 3628261 - DNA, 25 bp, Homo sapien
tccaactcacgcagaataggtatag

SEQ ID NO: 3628262 - DNA, 25 bp, Homo sapien
cagacagccacagataaccaggtat

SEQ ID NO: 3628263 - DNA, 25 bp, Homo sapien
tatactatgggtaatggcaatcccc

SEQ ID NO: 3628264 - DNA, 25 bp, Homo sapien
gactctttagacactgacatgtgaa

SEQ ID NO: 3628265 - DNA, 25 bp, Homo sapien
gagcccttagaatggatctcctggt

SEQ ID NO: 3628266 - DNA, 25 bp, Homo sapien
tgctttccatatgtggcaggcatag

SEQ ID NO: 3628267 - DNA, 25 bp, Homo sapien
tcaaggttcctgatagcaaaacagg

SEQ ID NO: 3628268 - DNA, 25 bp, Homo sapien
gatcaataatactgccccaagagcc

SEQ ID NO: 3628269 - DNA, 25 bp, Homo sapien
gcattacgaggtgaagactttggga

SEQ ID NO: 3628270 - DNA, 25 bp, Homo sapien
tgcaacttggctacaaccacttagt

SEQ ID NO: 3628271 - DNA, 25 bp, Homo sapien
gcattagctagtactgcagtttgaa

SEQ ID NO: 3628272 - DNA, 25 bp, Homo sapien
aaccccaaggtgacggcattacgag

SEQ ID NO: 3628273 - DNA, 25 bp, Homo sapien
tgtcttcccaagtgaccggaccatt

SEQ ID NO: 3628274 - DNA, 25 bp, Homo sapien
gcctctgctccttggtaaaagttga

SEQ ID NO: 3628275 - DNA, 25 bp, Homo sapien
gactgagcgcttctattgttccaca

SEQ ID NO: 3628276 - DNA, 25 bp, Homo sapien
tagctgctggttcgtacggttagaa

SEQ ID NO: 3628277 - DNA, 25 bp, Homo sapien
catcgcgttgtttgtaatttgatca

SEQ ID NO: 3628278 - DNA, 25 bp, Homo sapien
gaaagttactcctggaatgagatgt

SEQ ID NO: 3628279 - DNA, 25 bp, Homo sapien
tagtatgtagtattgcccactttct

SEQ ID NO: 3628280 - DNA, 25 bp, Homo sapien
gaaggataagtggtcacttcatacc

SEQ ID NO: 3628281 - DNA, 25 bp, Homo sapien
ttttgttaaacgtgccatgacctgt

SEQ ID NO: 3628282 - DNA, 25 bp, Homo sapien
tgtaatacggtcaatgttggcaatc

SEQ ID NO: 3628283 - DNA, 25 bp, Homo sapien
tctggttccgtataatctcaatggc

SEQ ID NO: 3628284 - DNA, 25 bp, Homo sapien
ggatagcttttgtatccgcctgtcg

SEQ ID NO: 3628285 - DNA, 25 bp, Homo sapien
taccatgcctatcctatgttaaaat

SEQ ID NO: 3628286 - DNA, 25 bp, Homo sapien
tgtctacccatataaatagcatgag

SEQ ID NO: 3628287 - DNA, 25 bp, Homo sapien
gcttcgctacataaaagtgattcac

SEQ ID NO: 3628288 - DNA, 25 bp, Homo sapien
taaaaattctgttagtgggctataa

SEQ ID NO: 3628289 - DNA, 25 bp, Homo sapien
cagtttataacaatgatacaactaa

SEQ ID NO: 3628290 - DNA, 25 bp, Homo sapien
tgtaaaaatcaccataggttcaaga

SEQ ID NO: 3628291 - DNA, 25 bp, Homo sapien
gtttataacaatgatacaactaatg

SEQ ID NO: 3628292 - DNA, 25 bp, Homo sapien
aaatgacatatctgtgtaatgatgt

SEQ ID NO: 3628293 - DNA, 25 bp, Homo sapien
gagagggagccctaccttagattgt

SEQ ID NO: 3628294 - DNA, 25 bp, Homo sapien
gcaggacattgggacaactggttat

SEQ ID NO: 3628295 - DNA, 25 bp, Homo sapien
taacagcattcatatacagaaacca

SEQ ID NO: 3628296 - DNA, 25 bp, Homo sapien
tcattttagtattgctggcagcaag

SEQ ID NO: 3628297 - DNA, 25 bp, Homo sapien
gacctcccatcctcaagtgctcctc

SEQ ID NO: 3628298 - DNA, 25 bp, Homo sapien
gcaggcttgacctcccatcctcaag

SEQ ID NO: 3628299 - DNA, 25 bp, Homo sapien
ttgacctcccatcctcaagtgctcc

SEQ ID NO: 3628300 - DNA, 25 bp, Homo sapien
cactacacctgactaactttttaat

SEQ ID NO: 3628301 - DNA, 25 bp, Homo sapien
gcctctggctttattcttttggctt

SEQ ID NO: 3628302 - DNA, 25 bp, Homo sapien
tctggctttattcttttggcttagg

SEQ ID NO: 3628303 - DNA, 25 bp, Homo sapien
gatgcctctggctttattcttttgg

SEQ ID NO: 3628304 - DNA, 25 bp, Homo sapien
cgtgatgcctctggctttattcttt

SEQ ID NO: 3628305 - DNA, 25 bp, Homo sapien
gagtttcgacaataagaccatcttt

SEQ ID NO: 3628306 - DNA, 25 bp, Homo sapien
gctaagctcagctgacgggtggtct

SEQ ID NO: 3628307 - DNA, 25 bp, Homo sapien
ggtgcataccgtggactcgagacat

SEQ ID NO: 3628308 - DNA, 25 bp, Homo sapien
tgcagcccactgttagagtttcgac

SEQ ID NO: 3628309 - DNA, 25 bp, Homo sapien
caattgtcattagtcaacgtaggca

SEQ ID NO: 3628310 - DNA, 25 bp, Homo sapien
gacgaaaacacttaggaatgccatg

SEQ ID NO: 3628311 - DNA, 25 bp, Homo sapien
tgataccatcctacctgaactgagg

SEQ ID NO: 3628312 - DNA, 25 bp, Homo sapien
aacgtaggcactggccaggagaact

SEQ ID NO: 3628313 - DNA, 25 bp, Homo sapien
gctcagtttgaatttagcctcactt

SEQ ID NO: 3628314 - DNA, 25 bp, Homo sapien
cctacggtggtagttctgaagaata

SEQ ID NO: 3628315 - DNA, 25 bp, Homo sapien
ttcctcaagaacaacgcaagggcgc

SEQ ID NO: 3628316 - DNA, 25 bp, Homo sapien
tacgattgattaacttatgacaact

SEQ ID NO: 3628317 - DNA, 25 bp, Homo sapien
caaaacaataccagtcatgattttc

SEQ ID NO: 3628318 - DNA, 25 bp, Homo sapien
tggaatgatacacacgaaaacacag

SEQ ID NO: 3628319 - DNA, 25 bp, Homo sapien
tcagacaaacacttggaatgataca

SEQ ID NO: 3628320 - DNA, 25 bp, Homo sapien
ctgtctctaagcctgaactcatcag

SEQ ID NO: 3628321 - DNA, 25 bp, Homo sapien
gactctaggttctcttagtccatga

SEQ ID NO: 3628322 - DNA, 25 bp, Homo sapien
gaaagttattctgattcggaaccac

SEQ ID NO: 3628323 - DNA, 25 bp, Homo sapien
taaagctcaagataaaactctccat

SEQ ID NO: 3628324 - DNA, 25 bp, Homo sapien
tctggtcactctcctaaaaaacggc

SEQ ID NO: 3628325 - DNA, 25 bp, Homo sapien
ctgctgtgtatactagggagaggaa

SEQ ID NO: 3628326 - DNA, 25 bp, Homo sapien
aagaaaacgggtagctcactgtaat

SEQ ID NO: 3628327 - DNA, 25 bp, Homo sapien
gagcggtattccatttcagcgggcc

SEQ ID NO: 3628328 - DNA, 25 bp, Homo sapien
tatagccactaatctgtgcagggca

SEQ ID NO: 3628329 - DNA, 25 bp, Homo sapien
gcactgctctgtgatgggcctcaca

SEQ ID NO: 3628330 - DNA, 25 bp, Homo sapien
gaagcccttctcaagcactgctctg

SEQ ID NO: 3628331 - DNA, 25 bp, Homo sapien
tcaagcactgctctgtgatgggcct

SEQ ID NO: 3628332 - DNA, 25 bp, Homo sapien
aagcactgctctgtgatgggcctca

SEQ ID NO: 3628333 - DNA, 25 bp, Homo sapien
taaatgagggatctattccggacac

SEQ ID NO: 3628334 - DNA, 25 bp, Homo sapien
aatgagggatctattccggacacca

SEQ ID NO: 3628335 - DNA, 25 bp, Homo sapien
gataaatgagggatctattccggac

SEQ ID NO: 3628336 - DNA, 25 bp, Homo sapien
ggtgataaatgagggatctattccg

SEQ ID NO: 3628337 - DNA, 25 bp, Homo sapien
aggagattattttgttgaaagcttc

SEQ ID NO: 3628338 - DNA, 25 bp, Homo sapien
ggagattattttgttgaaagcttcc

SEQ ID NO: 3628339 - DNA, 25 bp, Homo sapien
aaggagattattttgttgaaagctt

SEQ ID NO: 3628340 - DNA, 25 bp, Homo sapien
ttcatgcgggagacaatgaatctga

SEQ ID NO: 3628341 - DNA, 25 bp, Homo sapien
ccttcatgcgggagacaatgaatct

SEQ ID NO: 3628342 - DNA, 25 bp, Homo sapien
ctccttcatgcgggagacaatgaat

SEQ ID NO: 3628343 - DNA, 25 bp, Homo sapien
cctctccttcatgcgggagacaatg

SEQ ID NO: 3628344 - DNA, 25 bp, Homo sapien
taatatgacattccttaaagttgtg

SEQ ID NO: 3628345 - DNA, 25 bp, Homo sapien
gcctgttatagaactgtttactgca

SEQ ID NO: 3628346 - DNA, 25 bp, Homo sapien
gggtgctctccacacttcatattgc

SEQ ID NO: 3628347 - DNA, 25 bp, Homo sapien
aatatgacatgacggggtgctctcc

SEQ ID NO: 3628348 - DNA, 25 bp, Homo sapien
gaacgtccacagctgagtgcaccag

SEQ ID NO: 3628349 - DNA, 25 bp, Homo sapien
tacatcgggtgtttattgtccttcc

SEQ ID NO: 3628350 - DNA, 25 bp, Homo sapien
cctgtacatcgggtgtttattgtcc

SEQ ID NO: 3628351 - DNA, 25 bp, Homo sapien
caccagcctcctgtacatcgggtgt

SEQ ID NO: 3628352 - DNA, 25 bp, Homo sapien
gtaccactgctaaacctggaaaaca

SEQ ID NO: 3628353 - DNA, 25 bp, Homo sapien
caaggatcaagaagctacaagctgc

SEQ ID NO: 3628354 - DNA, 25 bp, Homo sapien
taatgcttcatttggtagttatgcc

SEQ ID NO: 3628355 - DNA, 25 bp, Homo sapien
caaccaaaatctgcttaactgctac

SEQ ID NO: 3628356 - DNA, 25 bp, Homo sapien
tctggactaagttcacaggacaagc

SEQ ID NO: 3628357 - DNA, 25 bp, Homo sapien
gaagcatggcaggtcagatatcccg

SEQ ID NO: 3628358 - DNA, 25 bp, Homo sapien
gctgctaagcttggtagtgcacgaa

SEQ ID NO: 3628359 - DNA, 25 bp, Homo sapien
gatgacatcaggatgactactgcca

SEQ ID NO: 3628360 - DNA, 25 bp, Homo sapien
gtattgtggagaagcaattgggcat

SEQ ID NO: 3628361 - DNA, 25 bp, Homo sapien
tattgtggagaagcaattgggcatc

SEQ ID NO: 3628362 - DNA, 25 bp, Homo sapien
taacttcggtatttcccttcattca

SEQ ID NO: 3628363 - DNA, 25 bp, Homo sapien
tttgaactcttcataacttcggtat

SEQ ID NO: 3628364 - DNA, 25 bp, Homo sapien
taaaagatagtgttcaacatggaat

SEQ ID NO: 3628365 - DNA, 25 bp, Homo sapien
ttataaaagatagtgttcaacatgg

SEQ ID NO: 3628366 - DNA, 25 bp, Homo sapien
gatagtgttcaacatggaatgtaaa

SEQ ID NO: 3628367 - DNA, 25 bp, Homo sapien
gtgttcaacatggaatgtaaatggt

SEQ ID NO: 3628368 - DNA, 25 bp, Homo sapien
catcctcgcaatgtcagcttgctca

SEQ ID NO: 3628369 - DNA, 25 bp, Homo sapien
tagcatcctcgcaatgtcagcttgc

SEQ ID NO: 3628370 - DNA, 25 bp, Homo sapien
ctttatatagcatcctcgcaatgtc

SEQ ID NO: 3628371 - DNA, 25 bp, Homo sapien
tatatagcatcctcgcaatgtcagc

SEQ ID NO: 3628372 - DNA, 25 bp, Homo sapien
taacattcacgtatataaatagtgt

SEQ ID NO: 3628373 - DNA, 25 bp, Homo sapien
tgtaaattaacattcacgtatataa

SEQ ID NO: 3628374 - DNA, 25 bp, Homo sapien
cattcacgtatataaatagtgttga

SEQ ID NO: 3628375 - DNA, 25 bp, Homo sapien
aattaacattcacgtatataaatag

SEQ ID NO: 3628376 - DNA, 25 bp, Homo sapien
caaggataacagaaccagttgtcag

SEQ ID NO: 3628377 - DNA, 25 bp, Homo sapien
gacgagcatttgacaagtaaaagca

SEQ ID NO: 3628378 - DNA, 25 bp, Homo sapien
agcaattcttgcaaagctgcagttc

SEQ ID NO: 3628379 - DNA, 25 bp, Homo sapien
ccagttgtcaggacgagcatttgac

SEQ ID NO: 3628380 - DNA, 25 bp, Homo sapien
tagagctgtatgttacacacttgag

SEQ ID NO: 3628381 - DNA, 25 bp, Homo sapien
taaacttccttagagctgtatgtta

SEQ ID NO: 3628382 - DNA, 25 bp, Homo sapien
gctgtatgttacacacttgaggtaa

SEQ ID NO: 3628383 - DNA, 25 bp, Homo sapien
tccttagagctgtatgttacacact

SEQ ID NO: 3628384 - DNA, 25 bp, Homo sapien
tgtcagtgcacggtttgaagctgta

SEQ ID NO: 3628385 - DNA, 25 bp, Homo sapien
gcagccaaggctgccggccaagaat

SEQ ID NO: 3628386 - DNA, 25 bp, Homo sapien
tcagaattccctttgtcagtgcacg

SEQ ID NO: 3628387 - DNA, 25 bp, Homo sapien
attttggggaaattatacagctaca

SEQ ID NO: 3628388 - DNA, 25 bp, Homo sapien
gagtgccaacatgaaccttattcct

SEQ ID NO: 3628389 - DNA, 25 bp, Homo sapien
tttatatttgcatcagagtgccaac

SEQ ID NO: 3628390 - DNA, 25 bp, Homo sapien
taaagtattaaatgcaagtgtacca

SEQ ID NO: 3628391 - DNA, 25 bp, Homo sapien
ccttattcctcagaagaggtcggga

SEQ ID NO: 3628392 - DNA, 25 bp, Homo sapien
gcccaaaccagctcatgattaggta

SEQ ID NO: 3628393 - DNA, 25 bp, Homo sapien
cccaaaccagctcatgattaggtat

SEQ ID NO: 3628394 - DNA, 25 bp, Homo sapien
gcgaacgtcgacttgattgtcttct

SEQ ID NO: 3628395 - DNA, 25 bp, Homo sapien
ccaaagaagcgaacgtcgacttgat

SEQ ID NO: 3628396 - DNA, 25 bp, Homo sapien
tggtggccaaagaagcgaacgtcga

SEQ ID NO: 3628397 - DNA, 25 bp, Homo sapien
ggtggtggtggccaaagaagcgaac

SEQ ID NO: 3628398 - DNA, 25 bp, Homo sapien
gaccgctgaacatgggatcacaaat

SEQ ID NO: 3628399 - DNA, 25 bp, Homo sapien
tcatcaaactttcttaaggacttca

SEQ ID NO: 3628400 - DNA, 25 bp, Homo sapien
taaggacttcataagcacagctgtg

SEQ ID NO: 3628401 - DNA, 25 bp, Homo sapien
tctctgatggagaaatcatcaaact

SEQ ID NO: 3628402 - DNA, 25 bp, Homo sapien
actgttaccaagcggaaaataaatg

SEQ ID NO: 3628403 - DNA, 25 bp, Homo sapien
gcctgccataaagtgcgacctgtgg

SEQ ID NO: 3628404 - DNA, 25 bp, Homo sapien
aaagtgcgacctgtggcagttctcg

SEQ ID NO: 3628405 - DNA, 25 bp, Homo sapien
aagagggcttcagtggaccctgcct

SEQ ID NO: 3628406 - DNA, 25 bp, Homo sapien
tatagttagaaacatcccaaatggc

SEQ ID NO: 3628407 - DNA, 25 bp, Homo sapien
cattactggtggaggagatactgga

SEQ ID NO: 3628408 - DNA, 25 bp, Homo sapien
tactgcgcttcacgtgcagccgatg

SEQ ID NO: 3628409 - DNA, 25 bp, Homo sapien
gcagccgatgaatgttgactgtgat

SEQ ID NO: 3628410 - DNA, 25 bp, Homo sapien
ccttctcgtaggaaacgctgatgca

SEQ ID NO: 3628411 - DNA, 25 bp, Homo sapien
gaaaacactcatagtggacccacag

SEQ ID NO: 3628412 - DNA, 25 bp, Homo sapien
agccagcgcaccttcagagaggagc

SEQ ID NO: 3628413 - DNA, 25 bp, Homo sapien
cttaactctcttggtactggcaggg

SEQ ID NO: 3628414 - DNA, 25 bp, Homo sapien
taactgtaggcttgaaagagccagc

SEQ ID NO: 3628415 - DNA, 25 bp, Homo sapien
tcctttttgggctccacactttgat

SEQ ID NO: 3628416 - DNA, 25 bp, Homo sapien
tgattacgtcgtcctttctttgctc

SEQ ID NO: 3628417 - DNA, 25 bp, Homo sapien
cctttttgggctccacactttgatt

SEQ ID NO: 3628418 - DNA, 25 bp, Homo sapien
tccacactttgattacgtcgtcctt

SEQ ID NO: 3628419 - DNA, 25 bp, Homo sapien
tggatactgcgaggtgggcaactta

SEQ ID NO: 3628420 - DNA, 25 bp, Homo sapien
ggatactgcgaggtgggcaacttac

SEQ ID NO: 3628421 - DNA, 25 bp, Homo sapien
ctggatactgcgaggtgggcaactt

SEQ ID NO: 3628422 - DNA, 25 bp, Homo sapien
ttgaaaatatttcctgtttcatttg

SEQ ID NO: 3628423 - DNA, 25 bp, Homo sapien
ctttgaaaatatttcctgtttcatt

SEQ ID NO: 3628424 - DNA, 25 bp, Homo sapien
gaaaatatttcctgtttcatttgcc

SEQ ID NO: 3628425 - DNA, 25 bp, Homo sapien
aaatatttcctgtttcatttgccac

SEQ ID NO: 3628426 - DNA, 25 bp, Homo sapien
tacttagccaagctttggtcagcgg

SEQ ID NO: 3628427 - DNA, 25 bp, Homo sapien
tatatcacttaaaacggctgagctc

SEQ ID NO: 3628428 - DNA, 25 bp, Homo sapien
tgttggcacaactgatatactggat

SEQ ID NO: 3628429 - DNA, 25 bp, Homo sapien
ggagcatgtacgctattccagggta

SEQ ID NO: 3628430 - DNA, 25 bp, Homo sapien
ggtagatgtcacgtatattttgcca

SEQ ID NO: 3628431 - DNA, 25 bp, Homo sapien
tagacgccaaacgaagccacataat

SEQ ID NO: 3628432 - DNA, 25 bp, Homo sapien
cagttcaagaactaccccattcgga

SEQ ID NO: 3628433 - DNA, 25 bp, Homo sapien
ggtgagacaagagtttagacgccaa

SEQ ID NO: 3628434 - DNA, 25 bp, Homo sapien
ccgatgcagcattcttggtgaagag

SEQ ID NO: 3628435 - DNA, 25 bp, Homo sapien
cacggagactttttcgatgggctga

SEQ ID NO: 3628436 - DNA, 25 bp, Homo sapien
cacacgccgtcgtttgtggtctggg

SEQ ID NO: 3628437 - DNA, 25 bp, Homo sapien
catcgtgggtatttcctggctagaa

SEQ ID NO: 3628438 - DNA, 25 bp, Homo sapien
ctaaccatgacaggagtgccggctg

SEQ ID NO: 3628439 - DNA, 25 bp, Homo sapien
agcagggcacccacagtggcgacaa

SEQ ID NO: 3628440 - DNA, 25 bp, Homo sapien
gtgaaaggagcctaaccatgacagg

SEQ ID NO: 3628441 - DNA, 25 bp, Homo sapien
agctgctactgggttgatgcatgag

SEQ ID NO: 3628442 - DNA, 25 bp, Homo sapien
tgcgtcagcacacaacttaacacag

SEQ ID NO: 3628443 - DNA, 25 bp, Homo sapien
gaaatgctgtaaaagatactggtgt

SEQ ID NO: 3628444 - DNA, 25 bp, Homo sapien
taacacaacttgcatgaggtacctt

SEQ ID NO: 3628445 - DNA, 25 bp, Homo sapien
aatttaggtgaggaaagtatcatta

SEQ ID NO: 3628446 - DNA, 25 bp, Homo sapien
ctgcatgttggctacagctttattt

SEQ ID NO: 3628447 - DNA, 25 bp, Homo sapien
gcatgttggctacagctttatttac

SEQ ID NO: 3628448 - DNA, 25 bp, Homo sapien
tgcatgttggctacagctttattta

SEQ ID NO: 3628449 - DNA, 25 bp, Homo sapien
catacctgtggtacattttcagaaa

SEQ ID NO: 3628450 - DNA, 25 bp, Homo sapien
taacgggcatcatacctgtggtaca

SEQ ID NO: 3628451 - DNA, 25 bp, Homo sapien
taccttctgaattaacgggcatcat

SEQ ID NO: 3628452 - DNA, 25 bp, Homo sapien
tgagagatcataggacttttaataa

SEQ ID NO: 3628453 - DNA, 25 bp, Homo sapien
acttggaccctgtgcactcagaagc

SEQ ID NO: 3628454 - DNA, 25 bp, Homo sapien
ctggcgagcaggacacgatgacaaa

SEQ ID NO: 3628455 - DNA, 25 bp, Homo sapien
tataaatgttaagtgcagggaaatc

SEQ ID NO: 3628456 - DNA, 25 bp, Homo sapien
tagagaccaatgagatgtcactact

SEQ ID NO: 3628457 - DNA, 25 bp, Homo sapien
gctagcagggtcacttacaacttca

SEQ ID NO: 3628458 - DNA, 25 bp, Homo sapien
tacgttttatgcacagcagatggaa

SEQ ID NO: 3628459 - DNA, 25 bp, Homo sapien
aagaatgttctagtgcaagggtcca

SEQ ID NO: 3628460 - DNA, 25 bp, Homo sapien
gaaggtactactggcagacagaggc

SEQ ID NO: 3628461 - DNA, 25 bp, Homo sapien
tgtgctccgcgtgccagtgctcctg

SEQ ID NO: 3628462 - DNA, 25 bp, Homo sapien
tcatcttttccggcggcaggtgcgc

SEQ ID NO: 3628463 - DNA, 25 bp, Homo sapien
agcagcagtggtacatggcctcctc

SEQ ID NO: 3628464 - DNA, 25 bp, Homo sapien
aggtgcgcttgtgctccgcgtgcca

SEQ ID NO: 3628465 - DNA, 25 bp, Homo sapien
cccctgaaaaacttcggaggagcat

SEQ ID NO: 3628466 - DNA, 25 bp, Homo sapien
taaaggctggtgcaaaatgggaagc

SEQ ID NO: 3628467 - DNA, 25 bp, Homo sapien
aaataataccctccactgatgttac

SEQ ID NO: 3628468 - DNA, 25 bp, Homo sapien
ccgctgtgtctgaaaagagtaatca

SEQ ID NO: 3628469 - DNA, 25 bp, Homo sapien
tctctaagatccagctcagtaaaag

SEQ ID NO: 3628470 - DNA, 25 bp, Homo sapien
gaaaaaatatgcaggactagccctg

SEQ ID NO: 3628471 - DNA, 25 bp, Homo sapien
aacttacgatacatgaggtgacacc

SEQ ID NO: 3628472 - DNA, 25 bp, Homo sapien
tacaagcactcatgttaggacaaag

SEQ ID NO: 3628473 - DNA, 25 bp, Homo sapien
tagtggctaagctcaacacctcgat

SEQ ID NO: 3628474 - DNA, 25 bp, Homo sapien
caacaaggagggaacgatgatgcca

SEQ ID NO: 3628475 - DNA, 25 bp, Homo sapien
aatgtgcaaccgtgtcaacagagac

SEQ ID NO: 3628476 - DNA, 25 bp, Homo sapien
tagagtgaccctgacaaacctggag

SEQ ID NO: 3628477 - DNA, 25 bp, Homo sapien
taagccctccagtgatcctgatgtc

SEQ ID NO: 3628478 - DNA, 25 bp, Homo sapien
gatgttcccgtcagcaacacttagg

SEQ ID NO: 3628479 - DNA, 25 bp, Homo sapien
cccatgtcagtaaagcagtgttctc

SEQ ID NO: 3628480 - DNA, 25 bp, Homo sapien
cagggcgaggccacttggtacatca

SEQ ID NO: 3628481 - DNA, 25 bp, Homo sapien
gggttgctctgtccaacgtaccgaa

SEQ ID NO: 3628482 - DNA, 25 bp, Homo sapien
aatctgaagttacatgcatgcctcg

SEQ ID NO: 3628483 - DNA, 25 bp, Homo sapien
gaattgaatacaggtcgccaccggc

SEQ ID NO: 3628484 - DNA, 25 bp, Homo sapien
taaggcgctgatagggcatgctctg

SEQ ID NO: 3628485 - DNA, 25 bp, Homo sapien
tgcttgacactttacccaagggaga

SEQ ID NO: 3628486 - DNA, 25 bp, Homo sapien
tatgttaaaccaccagtacgctttg

SEQ ID NO: 3628487 - DNA, 25 bp, Homo sapien
caaaaagagggtacacagtgaacat

SEQ ID NO: 3628488 - DNA, 25 bp, Homo sapien
ttttatgtgcaaaggacagcaacct

SEQ ID NO: 3628489 - DNA, 25 bp, Homo sapien
tttgacttctgagatccaaggctga

SEQ ID NO: 3628490 - DNA, 25 bp, Homo sapien
ctttgaggtccagctgaagtcagga

SEQ ID NO: 3628491 - DNA, 25 bp, Homo sapien
tacattcaaggagtgtggacgctgc

SEQ ID NO: 3628492 - DNA, 25 bp, Homo sapien
caggccaggcactgactatgaaaca

SEQ ID NO: 3628493 - DNA, 25 bp, Homo sapien
caaagtgtccggaactcacatcggt

SEQ ID NO: 3628494 - DNA, 25 bp, Homo sapien
ccaatgtggagtggacaaagtgtcc

SEQ ID NO: 3628495 - DNA, 25 bp, Homo sapien
cacggtgtccaaccaagaaggagca

SEQ ID NO: 3628496 - DNA, 25 bp, Homo sapien
tctaaattgaattggcccacggtgt

SEQ ID NO: 3628497 - DNA, 25 bp, Homo sapien
tctgttatgtatccttggcttgcct

SEQ ID NO: 3628498 - DNA, 25 bp, Homo sapien
ccctgtattcctcccattgacaaga

SEQ ID NO: 3628499 - DNA, 25 bp, Homo sapien
gagttgagtgtcctccgagatccag

SEQ ID NO: 3628500 - DNA, 25 bp, Homo sapien
gattataattgccaacccagaaaca

SEQ ID NO: 3628501 - DNA, 25 bp, Homo sapien
ttctcagctgagattccgtcttgct

SEQ ID NO: 3628502 - DNA, 25 bp, Homo sapien
tcaacacttcagacaaggttctcag

SEQ ID NO: 3628503 - DNA, 25 bp, Homo sapien
tgatgatcttccgtgttttcaacac

SEQ ID NO: 3628504 - DNA, 25 bp, Homo sapien
tcctgaggcttaggatcaatatggg

SEQ ID NO: 3628505 - DNA, 25 bp, Homo sapien
cagggcttcagccttccgagacgtc

SEQ ID NO: 3628506 - DNA, 25 bp, Homo sapien
ggcttcagccttccgagacgtcgct

SEQ ID NO: 3628507 - DNA, 25 bp, Homo sapien
agggcttcagccttccgagacgtcg

SEQ ID NO: 3628508 - DNA, 25 bp, Homo sapien
gcttcagccttccgagacgtcgctt

SEQ ID NO: 3628509 - DNA, 25 bp, Homo sapien
agccatgcattcgttccccactcgg

SEQ ID NO: 3628510 - DNA, 25 bp, Homo sapien
catgcattcgttccccactcggttg

SEQ ID NO: 3628511 - DNA, 25 bp, Homo sapien
attcgttccccactcggttgcacgg

SEQ ID NO: 3628512 - DNA, 25 bp, Homo sapien
acagccatgcattcgttccccactc

SEQ ID NO: 3628513 - DNA, 25 bp, Homo sapien
tctgcatctggtctgtcacgctggt

SEQ ID NO: 3628514 - DNA, 25 bp, Homo sapien
tcagctttccatgaccgggtttccc

SEQ ID NO: 3628515 - DNA, 25 bp, Homo sapien
tcacgctggtttttgagattgaagg

SEQ ID NO: 3628516 - DNA, 25 bp, Homo sapien
gacccttcaggtcatgagtgaccat

SEQ ID NO: 3628517 - DNA, 25 bp, Homo sapien
cggtttctccacacacgcagggctg

SEQ ID NO: 3628518 - DNA, 25 bp, Homo sapien
ccggtttctccacacacgcagggct

SEQ ID NO: 3628519 - DNA, 25 bp, Homo sapien
gttccggcttctccacacgctcagg

SEQ ID NO: 3628520 - DNA, 25 bp, Homo sapien
ctgggttccggcttctccacacgct

SEQ ID NO: 3628521 - DNA, 25 bp, Homo sapien
cagggccgcgcctgggttccggctt

SEQ ID NO: 3628522 - DNA, 25 bp, Homo sapien
tgggttccggcttctccacacgctc

SEQ ID NO: 3628523 - DNA, 25 bp, Homo sapien
gagcgagttccggtttctccacacg

SEQ ID NO: 3628524 - DNA, 25 bp, Homo sapien
agcgagttccggtttctccacacgc

SEQ ID NO: 3628525 - DNA, 25 bp, Homo sapien
ttagagcgagttccggtttctccac

SEQ ID NO: 3628526 - DNA, 25 bp, Homo sapien
tagagcgagttccggtttctccaca

SEQ ID NO: 3628527 - DNA, 25 bp, Homo sapien
gccgagcagaccgtgtgagagccca

SEQ ID NO: 3628528 - DNA, 25 bp, Homo sapien
ctcctgaggctgccgagcagaccgt

SEQ ID NO: 3628529 - DNA, 25 bp, Homo sapien
cccagcgctggattctttcaggctt

SEQ ID NO: 3628530 - DNA, 25 bp, Homo sapien
cagcgctggattctttcaggcttca

SEQ ID NO: 3628531 - DNA, 25 bp, Homo sapien
tatatgcgccaagctgaacggcaga

SEQ ID NO: 3628532 - DNA, 25 bp, Homo sapien
tccaggttgcgatgaaatttgacaa

SEQ ID NO: 3628533 - DNA, 25 bp, Homo sapien
tctgttctgaacaacggcccttgta

SEQ ID NO: 3628534 - DNA, 25 bp, Homo sapien
taactcagaagtcacaagatcacag

SEQ ID NO: 3628535 - DNA, 25 bp, Homo sapien
gttgctgcaacaggaaaactcatgg

SEQ ID NO: 3628536 - DNA, 25 bp, Homo sapien
gtgcagttttgctccagaccccatt

SEQ ID NO: 3628537 - DNA, 25 bp, Homo sapien
tggctgactaccatccgtgcagttt

SEQ ID NO: 3628538 - DNA, 25 bp, Homo sapien
cactggtgtcgttcatattcgcgtc

SEQ ID NO: 3628539 - DNA, 25 bp, Homo sapien
tggtgtccgtggcactctctgagac

SEQ ID NO: 3628540 - DNA, 25 bp, Homo sapien
tggtgtctgtggtgctccttgagaa

SEQ ID NO: 3628541 - DNA, 25 bp, Homo sapien
tccacggtgctccatgagagctgct

SEQ ID NO: 3628542 - DNA, 25 bp, Homo sapien
tgtgcagcccggtgtccgtggtgct

SEQ ID NO: 3628543 - DNA, 25 bp, Homo sapien
cccacatgtacaagtaacctgtgtt

SEQ ID NO: 3628544 - DNA, 25 bp, Homo sapien
cacagggcttagtgggaatccagaa

SEQ ID NO: 3628545 - DNA, 25 bp, Homo sapien
ccagaaatagggttgtctattaaca

SEQ ID NO: 3628546 - DNA, 25 bp, Homo sapien
tctattaacactctatcatcgaagg

SEQ ID NO: 3628547 - DNA, 25 bp, Homo sapien
ctaccacacgtgtaaaatcacagga

SEQ ID NO: 3628548 - DNA, 25 bp, Homo sapien
cacacgtgtaaaatcacaggattca

SEQ ID NO: 3628549 - DNA, 25 bp, Homo sapien
tgctaatgctaccacacgtgtaaaa

SEQ ID NO: 3628550 - DNA, 25 bp, Homo sapien
taccacacgtgtaaaatcacaggat

SEQ ID NO: 3628551 - DNA, 25 bp, Homo sapien
caaacttgtccataaggaagagtaa

SEQ ID NO: 3628552 - DNA, 25 bp, Homo sapien
caaacttgtccataaggaagagtaa

SEQ ID NO: 3628553 - DNA, 25 bp, Homo sapien
cacacgtgtaaaatcacaggattca

SEQ ID NO: 3628554 - DNA, 25 bp, Homo sapien
atgctaatgctaccacacgtgtaaa

SEQ ID NO: 3628555 - DNA, 25 bp, Homo sapien
caaacttgtccataaggaagagtaa

SEQ ID NO: 3628556 - DNA, 25 bp, Homo sapien
cacgtgtaaaatcacaggattcatg

SEQ ID NO: 3628557 - DNA, 25 bp, Homo sapien
caaacttgtccataaggaagagtaa

SEQ ID NO: 3628558 - DNA, 25 bp, Homo sapien
cacgtgtaaaatcacaggattcatg

SEQ ID NO: 3628559 - DNA, 25 bp, Homo sapien
cacacgtgtaaaatcacaggattca

SEQ ID NO: 3628560 - DNA, 25 bp, Homo sapien
accacacgtgtaaaatcacaggatt

SEQ ID NO: 3628561 - DNA, 25 bp, Homo sapien
caaacttgtccataaggaagagtaa

SEQ ID NO: 3628562 - DNA, 25 bp, Homo sapien
ggagctgggaatccttcagccggaa

SEQ ID NO: 3628563 - DNA, 25 bp, Homo sapien
gagctgggaatccttcagccggaaa

SEQ ID NO: 3628564 - DNA, 25 bp, Homo sapien
ctgggaatccttcagccggaaaggc

SEQ ID NO: 3628565 - DNA, 25 bp, Homo sapien
gctgggaatccttcagccggaaagg

SEQ ID NO: 3628566 - DNA, 25 bp, Homo sapien
gctgaagcctttcgcctggacagca

SEQ ID NO: 3628567 - DNA, 25 bp, Homo sapien
aaagatgagccggtagctcttgggc

SEQ ID NO: 3628568 - DNA, 25 bp, Homo sapien
ccaggaagtagcgtggaaggtgctg

SEQ ID NO: 3628569 - DNA, 25 bp, Homo sapien
aagggctctcgaggagaaaagatga

SEQ ID NO: 3628570 - DNA, 25 bp, Homo sapien
cacctcagagcactcgatacaggtg

SEQ ID NO: 3628571 - DNA, 25 bp, Homo sapien
gtaaccacgtacacctcagagcact

SEQ ID NO: 3628572 - DNA, 25 bp, Homo sapien
tcattctgcacctcctgacgtaacc

SEQ ID NO: 3628573 - DNA, 25 bp, Homo sapien
ctgacgtaaccacgtacacctcaga

SEQ ID NO: 3628574 - DNA, 25 bp, Homo sapien
atcaatatggagcactggatcagcc

SEQ ID NO: 3628575 - DNA, 25 bp, Homo sapien
ctcctcgtcctctacgcagagcggg

SEQ ID NO: 3628576 - DNA, 25 bp, Homo sapien
tgcccacaggctggcggacgtcatg

SEQ ID NO: 3628577 - DNA, 25 bp, Homo sapien
gacgtcatggctcagacccacatag

SEQ ID NO: 3628578 - DNA, 25 bp, Homo sapien
aactgcacaaaacgaatgagatggc

SEQ ID NO: 3628579 - DNA, 25 bp, Homo sapien
taacagtggttagatcttatctcag

SEQ ID NO: 3628580 - DNA, 25 bp, Homo sapien
tagccatgatgagataacagggacc

SEQ ID NO: 3628581 - DNA, 25 bp, Homo sapien
tggagaaactctcattagcattgtc

SEQ ID NO: 3628582 - DNA, 25 bp, Homo sapien
tgaacgccgtgctagcaaatgctag

SEQ ID NO: 3628583 - DNA, 25 bp, Homo sapien
gccgtgctagcaaggttgttggcaa

SEQ ID NO: 3628584 - DNA, 25 bp, Homo sapien
aacacagtgccagcgggcaagagag

SEQ ID NO: 3628585 - DNA, 25 bp, Homo sapien
tgaacgccgtgctagcaaatgccag

SEQ ID NO: 3628586 - DNA, 25 bp, Homo sapien
caaacacaaagagcggaagatggca

SEQ ID NO: 3628587 - DNA, 25 bp, Homo sapien
gtgcagacctcgatggacgcctaca

SEQ ID NO: 3628588 - DNA, 25 bp, Homo sapien
acgcaggtccctggtcgtgcagacc

SEQ ID NO: 3628589 - DNA, 25 bp, Homo sapien
agatggcagtgcctatgccttccaa

SEQ ID NO: 3628590 - DNA, 25 bp, Homo sapien
gtccacacggaagctgtccaggcgg

SEQ ID NO: 3628591 - DNA, 25 bp, Homo sapien
tctccgtttcagacgtccacacgga

SEQ ID NO: 3628592 - DNA, 25 bp, Homo sapien
cccacccatctgttggtgagtttca

SEQ ID NO: 3628593 - DNA, 25 bp, Homo sapien
tgattttctttcctcgcccacccat

SEQ ID NO: 3628594 - DNA, 25 bp, Homo sapien
gagcagcgagaggaaccagggggcc

SEQ ID NO: 3628595 - DNA, 25 bp, Homo sapien
agcagcgagaggaaccagggggcca

SEQ ID NO: 3628596 - DNA, 25 bp, Homo sapien
gcagcgagaggaaccagggggccat

SEQ ID NO: 3628597 - DNA, 25 bp, Homo sapien
tcagtagcggtgtgtggtgttttct

SEQ ID NO: 3628598 - DNA, 25 bp, Homo sapien
cagtagcggtgtgtggtgttttctc

SEQ ID NO: 3628599 - DNA, 25 bp, Homo sapien
aagttcctcctctatgccgaagttt

SEQ ID NO: 3628600 - DNA, 25 bp, Homo sapien
ctcctctatgccgaagtttaatttt

SEQ ID NO: 3628601 - DNA, 25 bp, Homo sapien
ttcctcctctatgccgaagtttaat

SEQ ID NO: 3628602 - DNA, 25 bp, Homo sapien
agttcctcctctatgccgaagttta

SEQ ID NO: 3628603 - DNA, 25 bp, Homo sapien
gcatccttgccgtcacaggttccaa

SEQ ID NO: 3628604 - DNA, 25 bp, Homo sapien
gttctgagcactccgtcacacgctg

SEQ ID NO: 3628605 - DNA, 25 bp, Homo sapien
tctgtcacgcgctgccggtgaggca

SEQ ID NO: 3628606 - DNA, 25 bp, Homo sapien
gtcatgggttccgagcactctgcca

SEQ ID NO: 3628607 - DNA, 25 bp, Homo sapien
gtcacgagatgagcgctatcggtca

SEQ ID NO: 3628608 - DNA, 25 bp, Homo sapien
tttgccgcaagaacgccgggctcct

SEQ ID NO: 3628609 - DNA, 25 bp, Homo sapien
gggtggaccaagctttgccgcaaga

SEQ ID NO: 3628610 - DNA, 25 bp, Homo sapien
accgccgacggtcttcagggtcacg

SEQ ID NO: 3628611 - DNA, 25 bp, Homo sapien
gccgtggttcggtgtagactgcagc

SEQ ID NO: 3628612 - DNA, 25 bp, Homo sapien
caccgcagggaaccggcctctgttt

SEQ ID NO: 3628613 - DNA, 25 bp, Homo sapien
gggtgtgcgacgtccgagaagctgc

SEQ ID NO: 3628614 - DNA, 25 bp, Homo sapien
ggagcgccgaggagaacattccgct

SEQ ID NO: 3628615 - DNA, 25 bp, Homo sapien
gtaggtaacccccatgagtagcatg

SEQ ID NO: 3628616 - DNA, 25 bp, Homo sapien
cccatgagtagcatgagtcctctca

SEQ ID NO: 3628617 - DNA, 25 bp, Homo sapien
taacccccatgagtagcatgagtcc

SEQ ID NO: 3628618 - DNA, 25 bp, Homo sapien
agcctccgagtaggtaacccccatg

SEQ ID NO: 3628619 - DNA, 25 bp, Homo sapien
gaagaggtcaaagttaattggagcc

SEQ ID NO: 3628620 - DNA, 25 bp, Homo sapien
aagaggtcaaagttaattggagcct

SEQ ID NO: 3628621 - DNA, 25 bp, Homo sapien
agaagaggtcaaagttaattggagc

SEQ ID NO: 3628622 - DNA, 25 bp, Homo sapien
gaggtcaaagttaattggagcctac

SEQ ID NO: 3628623 - DNA, 25 bp, Homo sapien
cacagacgtctgtgtgtgtggtaca

SEQ ID NO: 3628624 - DNA, 25 bp, Homo sapien
tctgcgtcaggcacagacgtctgtg

SEQ ID NO: 3628625 - DNA, 25 bp, Homo sapien
ctgcaggtctctctgcgtcaggcac

SEQ ID NO: 3628626 - DNA, 25 bp, Homo sapien
tctctctgcgtcaggcacagacgtc

SEQ ID NO: 3628627 - DNA, 25 bp, Homo sapien
ccaccacctgccatctgtccatcat

SEQ ID NO: 3628628 - DNA, 25 bp, Homo sapien
tcccaccacctgccatctgtccatc

SEQ ID NO: 3628629 - DNA, 25 bp, Homo sapien
cccaccacctgccatctgtccatca

SEQ ID NO: 3628630 - DNA, 25 bp, Homo sapien
ctcccaccacctgccatctgtccat

SEQ ID NO: 3628631 - DNA, 25 bp, Homo sapien
tttatggaatttaagctgccgatgc

SEQ ID NO: 3628632 - DNA, 25 bp, Homo sapien
ggaatttaagctgccgatgcttgca

SEQ ID NO: 3628633 - DNA, 25 bp, Homo sapien
ttaagctgccgatgcttgcactgga

SEQ ID NO: 3628634 - DNA, 25 bp, Homo sapien
taaaagatctttatggaatttaagc

SEQ ID NO: 3628635 - DNA, 25 bp, Homo sapien
acaaggatgatagtgcttgtggagt

SEQ ID NO: 3628636 - DNA, 25 bp, Homo sapien
gatagtgcttgtggagtgtttaaat

SEQ ID NO: 3628637 - DNA, 25 bp, Homo sapien
ctgtgaaacaaggatgatagtgctt

SEQ ID NO: 3628638 - DNA, 25 bp, Homo sapien
gatgatagtgcttgtggagtgttta

SEQ ID NO: 3628639 - DNA, 25 bp, Homo sapien
gggtggtccagcgtgacttttcaga

SEQ ID NO: 3628640 - DNA, 25 bp, Homo sapien
caggcggttctgcacgatgactttg

SEQ ID NO: 3628641 - DNA, 25 bp, Homo sapien
cagatcctggaagtgacgtggattt

SEQ ID NO: 3628642 - DNA, 25 bp, Homo sapien
tttgttgccaccagtctggcccttg

SEQ ID NO: 3628643 - DNA, 25 bp, Homo sapien
caaacagttcgcaagtgaaggacgc

SEQ ID NO: 3628644 - DNA, 25 bp, Homo sapien
tgaaggacgcctgcttctccctgtc

SEQ ID NO: 3628645 - DNA, 25 bp, Homo sapien
gacaaggtcttgagctcgttgccgc

SEQ ID NO: 3628646 - DNA, 25 bp, Homo sapien
tatgagcgtctggaagaagacaagg

SEQ ID NO: 3628647 - DNA, 25 bp, Homo sapien
tctggatccaagacattgctgtgtg

SEQ ID NO: 3628648 - DNA, 25 bp, Homo sapien
tctctggatccaagacattgctgtg

SEQ ID NO: 3628649 - DNA, 25 bp, Homo sapien
ttctctggatccaagacattgctgt

SEQ ID NO: 3628650 - DNA, 25 bp, Homo sapien
ggatccaagacattgctgtgtgtgg

SEQ ID NO: 3628651 - DNA, 25 bp, Homo sapien
gtgtacagcgtgtccctgtcatctg

SEQ ID NO: 3628652 - DNA, 25 bp, Homo sapien
cccagtcattccctgggtgtacagc

SEQ ID NO: 3628653 - DNA, 25 bp, Homo sapien
tccctgggtgtacagcgtgtccctg

SEQ ID NO: 3628654 - DNA, 25 bp, Homo sapien
cattccctgggtgtacagcgtgtcc

SEQ ID NO: 3628655 - DNA, 25 bp, Homo sapien
tctcattgagcagcccattttcaaa

SEQ ID NO: 3628656 - DNA, 25 bp, Homo sapien
tcattgagcagcccattttcaaagt

SEQ ID NO: 3628657 - DNA, 25 bp, Homo sapien
tgttctcattgagcagcccattttc

SEQ ID NO: 3628658 - DNA, 25 bp, Homo sapien
gttctcattgagcagcccattttca

SEQ ID NO: 3628659 - DNA, 25 bp, Homo sapien
ctttgccccagacgctgatgagcac

SEQ ID NO: 3628660 - DNA, 25 bp, Homo sapien
gccccagacgctgatgagcacagag

SEQ ID NO: 3628661 - DNA, 25 bp, Homo sapien
agggaagctggcacattgcctgcag

SEQ ID NO: 3628662 - DNA, 25 bp, Homo sapien
gatgagcacagaggtggttgtcagg

SEQ ID NO: 3628663 - DNA, 25 bp, Homo sapien
tgagggtttgacatgcaatgaaagc

SEQ ID NO: 3628664 - DNA, 25 bp, Homo sapien
tctctgagtatgacggggtcagcac

SEQ ID NO: 3628665 - DNA, 25 bp, Homo sapien
tttgacatgcaatgaaagccgtgat

SEQ ID NO: 3628666 - DNA, 25 bp, Homo sapien
tcagcaccgctggagctgagggttt

SEQ ID NO: 3628667 - DNA, 25 bp, Homo sapien
actgttgtcaggtgcgcccagagga

SEQ ID NO: 3628668 - DNA, 25 bp, Homo sapien
gtctccctggtgtcaggtgcaccca

SEQ ID NO: 3628669 - DNA, 25 bp, Homo sapien
tgtcagtgtaggcacatgcagcatc

SEQ ID NO: 3628670 - DNA, 25 bp, Homo sapien
gagtttttacagcaggagatgatgc

SEQ ID NO: 3628671 - DNA, 25 bp, Homo sapien
gctgccaaatgtgacatcgtgtaga

SEQ ID NO: 3628672 - DNA, 25 bp, Homo sapien
gacatcgtgtagatgtcacaacctc

SEQ ID NO: 3628673 - DNA, 25 bp, Homo sapien
cttttgtcacctgcgttcctaatcc

SEQ ID NO: 3628674 - DNA, 25 bp, Homo sapien
tgtcacaacctccttttgtcacctg

SEQ ID NO: 3628675 - DNA, 25 bp, Homo sapien
gtgaccaggtccctaacctcgcata

SEQ ID NO: 3628676 - DNA, 25 bp, Homo sapien
gcatacctctcatcgtgcacagcgg

SEQ ID NO: 3628677 - DNA, 25 bp, Homo sapien
tgtaacgtcgcatggctctgactgc

SEQ ID NO: 3628678 - DNA, 25 bp, Homo sapien
tgaccgggtctgtgacctcacacct

SEQ ID NO: 3628679 - DNA, 25 bp, Homo sapien
cacagcgggtgaccaggtccctaac

SEQ ID NO: 3628680 - DNA, 25 bp, Homo sapien
cagcgggtgaccaggtccctaacct

SEQ ID NO: 3628681 - DNA, 25 bp, Homo sapien
gcgggtgaccaggtccctaacctca

SEQ ID NO: 3628682 - DNA, 25 bp, Homo sapien
ttggacacagcgggtgaccaggtcc

SEQ ID NO: 3628683 - DNA, 25 bp, Homo sapien
ggtctgtaacctcgcacagctctgg

SEQ ID NO: 3628684 - DNA, 25 bp, Homo sapien
acagctctggttggacacagcgggt

SEQ ID NO: 3628685 - DNA, 25 bp, Homo sapien
gaaagcttctgattgtgtgcagctg

SEQ ID NO: 3628686 - DNA, 25 bp, Homo sapien
gctggtgactaggtctgtaacctca

SEQ ID NO: 3628687 - DNA, 25 bp, Homo sapien
ctgatagtgcacagcgagtgaccaa

SEQ ID NO: 3628688 - DNA, 25 bp, Homo sapien
tctgatagtgcacagcgagtgacca

SEQ ID NO: 3628689 - DNA, 25 bp, Homo sapien
ctctgatagtgcacagcgagtgacc

SEQ ID NO: 3628690 - DNA, 25 bp, Homo sapien
tgatgaccaggtccgtcaccgcgca

SEQ ID NO: 3628691 - DNA, 25 bp, Homo sapien
gtgaccgggtccctaacctcacaca

SEQ ID NO: 3628692 - DNA, 25 bp, Homo sapien
tcaccgcgcacacagtccctaacct

SEQ ID NO: 3628693 - DNA, 25 bp, Homo sapien
aacctcgcacgcctctgattggaca

SEQ ID NO: 3628694 - DNA, 25 bp, Homo sapien
tcaaagacggacgagcttttgggaa

SEQ ID NO: 3628695 - DNA, 25 bp, Homo sapien
tatcgttttcaaagacggacgagct

SEQ ID NO: 3628696 - DNA, 25 bp, Homo sapien
ctgtgcgcatatgtatcgttttcaa

SEQ ID NO: 3628697 - DNA, 25 bp, Homo sapien
tatgtatcgttttcaaagacggacg

SEQ ID NO: 3628698 - DNA, 25 bp, Homo sapien
ggaatgctctaaccttcgatcttca

SEQ ID NO: 3628699 - DNA, 25 bp, Homo sapien
aaccttcgatcttcaatcgtcagta

SEQ ID NO: 3628700 - DNA, 25 bp, Homo sapien
tgctctaaccttcgatcttcaatcg

SEQ ID NO: 3628701 - DNA, 25 bp, Homo sapien
gggctggaatgctctaaccttcgat

SEQ ID NO: 3628702 - DNA, 25 bp, Homo sapien
gagcaagggagtaagggcacacatg

SEQ ID NO: 3628703 - DNA, 25 bp, Homo sapien
aaatcgaggatgggggcattaacgc

SEQ ID NO: 3628704 - DNA, 25 bp, Homo sapien
ggcattaacgctggggagcaaggga

SEQ ID NO: 3628705 - DNA, 25 bp, Homo sapien
aggctgcacgggcaccggagatgct

SEQ ID NO: 3628706 - DNA, 25 bp, Homo sapien
gaaagagcgttgctggtccacatac

SEQ ID NO: 3628707 - DNA, 25 bp, Homo sapien
taaagcaggcgagagctttccggaa

SEQ ID NO: 3628708 - DNA, 25 bp, Homo sapien
gcagctgagcatgtacgtgcacgtt

SEQ ID NO: 3628709 - DNA, 25 bp, Homo sapien
gtccacatacggcagtgcacctgca

SEQ ID NO: 3628710 - DNA, 25 bp, Homo sapien
tcccgggagtaccagaggctcttct

SEQ ID NO: 3628711 - DNA, 25 bp, Homo sapien
cgagggcctcccgggagtaccagag

SEQ ID NO: 3628712 - DNA, 25 bp, Homo sapien
ttctcccgcagtcggccagccaggc

SEQ ID NO: 3628713 - DNA, 25 bp, Homo sapien
gagtaccagaggctcttctcccgca

SEQ ID NO: 3628714 - DNA, 25 bp, Homo sapien
cctgagaggtgattgtggtgctcac

SEQ ID NO: 3628715 - DNA, 25 bp, Homo sapien
accctaacgtgtgcggtgtcctgag

SEQ ID NO: 3628716 - DNA, 25 bp, Homo sapien
aggaggcccgttcatgcctttgtaa

SEQ ID NO: 3628717 - DNA, 25 bp, Homo sapien
gaacggccgtctgtgggcgacccta

SEQ ID NO: 3628718 - DNA, 25 bp, Homo sapien
acccgcggtccttggagtgaggtct

SEQ ID NO: 3628719 - DNA, 25 bp, Homo sapien
gaggaggtggcgaagggagcatgtg

SEQ ID NO: 3628720 - DNA, 25 bp, Homo sapien
catgaggaaatacggtgttggcagc

SEQ ID NO: 3628721 - DNA, 25 bp, Homo sapien
gcagccctggaacccgcggtccttg

SEQ ID NO: 3628722 - DNA, 25 bp, Homo sapien
agaagaggcagaggccatgaccttg

SEQ ID NO: 3628723 - DNA, 25 bp, Homo sapien
tgggtgtccgccctccaggcctcat

SEQ ID NO: 3628724 - DNA, 25 bp, Homo sapien
ctgacgggtcagcagagaagaggca

SEQ ID NO: 3628725 - DNA, 25 bp, Homo sapien
cagcagcactgggtgtccgccctcc

SEQ ID NO: 3628726 - DNA, 25 bp, Homo sapien
gctttcctggcagttgtactcataa

SEQ ID NO: 3628727 - DNA, 25 bp, Homo sapien
aagctatcctggcaacgccgctttt

SEQ ID NO: 3628728 - DNA, 25 bp, Homo sapien
cagttgtactcataagctatcctgg

SEQ ID NO: 3628729 - DNA, 25 bp, Homo sapien
tggcaacgccgcttttcacgaagga

SEQ ID NO: 3628730 - DNA, 25 bp, Homo sapien
ttgaaggcccgtgtggaaactttgc

SEQ ID NO: 3628731 - DNA, 25 bp, Homo sapien
ttgcctgtaagcatgtcgaccccag

SEQ ID NO: 3628732 - DNA, 25 bp, Homo sapien
cagccgccttggttctcggaaacct

SEQ ID NO: 3628733 - DNA, 25 bp, Homo sapien
gctgagcgctgcttgttgaaggccc

SEQ ID NO: 3628734 - DNA, 25 bp, Homo sapien
ctagtaactttctgcaggtaacgca

SEQ ID NO: 3628735 - DNA, 25 bp, Homo sapien
tagtaactttctgcaggtaacgcac

SEQ ID NO: 3628736 - DNA, 25 bp, Homo sapien
acttggacgttcagagtggaaacca

SEQ ID NO: 3628737 - DNA, 25 bp, Homo sapien
ctttgtgagtggtgagccgtgcaca

SEQ ID NO: 3628738 - DNA, 25 bp, Homo sapien
gaaaccacgcggctgtgggctttgt

SEQ ID NO: 3628739 - DNA, 25 bp, Homo sapien
tcagagtggaaaccacgcggctgtg

SEQ ID NO: 3628740 - DNA, 25 bp, Homo sapien
ggtgaacggcacgtatgatacctcg

SEQ ID NO: 3628741 - DNA, 25 bp, Homo sapien
cgatagacgcttccgtcagactggg

SEQ ID NO: 3628742 - DNA, 25 bp, Homo sapien
gctcggcctttacctccagagttgg

SEQ ID NO: 3628743 - DNA, 25 bp, Homo sapien
cagagttggctttagggcgatagac

SEQ ID NO: 3628744 - DNA, 25 bp, Homo sapien
tgtgttcttgacacgggcacccgtc

SEQ ID NO: 3628745 - DNA, 25 bp, Homo sapien
aagctgccgcgtgctggagttgcaa

SEQ ID NO: 3628746 - DNA, 25 bp, Homo sapien
ggcacccgtcgaggcagctgtttgt

SEQ ID NO: 3628747 - DNA, 25 bp, Homo sapien
ctgtttgtccgtgttcctctgaggt

SEQ ID NO: 3628748 - DNA, 25 bp, Homo sapien
ctgcagaagggggcgtgggcttcat

SEQ ID NO: 3628749 - DNA, 25 bp, Homo sapien
cagcagaagcatggactctgggaag

SEQ ID NO: 3628750 - DNA, 25 bp, Homo sapien
ctgagcagcagaagcatggactctg

SEQ ID NO: 3628751 - DNA, 25 bp, Homo sapien
tcagggggcggcctctgctgcatcc

SEQ ID NO: 3628752 - DNA, 25 bp, Homo sapien
tgctgcatccgcaggaggggctcct

SEQ ID NO: 3628753 - DNA, 25 bp, Homo sapien
tcctgaacaggctgcggtagaggag

SEQ ID NO: 3628754 - DNA, 25 bp, Homo sapien
agatgtgagagatgctctgatccag

SEQ ID NO: 3628755 - DNA, 25 bp, Homo sapien
tctggctgtacttgagatgtgagag

SEQ ID NO: 3628756 - DNA, 25 bp, Homo sapien
agcatcctgcaaacccgggtgctga

SEQ ID NO: 3628757 - DNA, 25 bp, Homo sapien
tcatcttctatgactacaaaatggg

SEQ ID NO: 3628758 - DNA, 25 bp, Homo sapien
ggtgtcacggcagggatgataagtt

SEQ ID NO: 3628759 - DNA, 25 bp, Homo sapien
gtggtggtgtcacggcagggatgat

SEQ ID NO: 3628760 - DNA, 25 bp, Homo sapien
tcttctatgactacaaaatgggtgg

SEQ ID NO: 3628761 - DNA, 25 bp, Homo sapien
tggggtgagatgcaggacacagcca

SEQ ID NO: 3628762 - DNA, 25 bp, Homo sapien
ggtgagatgcaggacacagccagcc

SEQ ID NO: 3628763 - DNA, 25 bp, Homo sapien
tgagtcccttcaggctgcctgacag

SEQ ID NO: 3628764 - DNA, 25 bp, Homo sapien
gggtgagatgcaggacacagccagc

SEQ ID NO: 3628765 - DNA, 25 bp, Homo sapien
ggtgcagggatgcactagacagggt

SEQ ID NO: 3628766 - DNA, 25 bp, Homo sapien
ggcacacagcggattgttggtgctt

SEQ ID NO: 3628767 - DNA, 25 bp, Homo sapien
cttgacccgacgagaaggtgaggaa

SEQ ID NO: 3628768 - DNA, 25 bp, Homo sapien
atgcactagacagggtgcagtcagg

SEQ ID NO: 3628769 - DNA, 25 bp, Homo sapien
aggaggagaagacatagagcatctg

SEQ ID NO: 3628770 - DNA, 25 bp, Homo sapien
gagaagacatagagcatctgttgag

SEQ ID NO: 3628771 - DNA, 25 bp, Homo sapien
agaagacatagagcatctgttgagg

SEQ ID NO: 3628772 - DNA, 25 bp, Homo sapien
gaggaggagaagacatagagcatct

SEQ ID NO: 3628773 - DNA, 25 bp, Homo sapien
tgaagctgtgcatttctggagcctg

SEQ ID NO: 3628774 - DNA, 25 bp, Homo sapien
gtgggtcctgcctctttgacaccgt

SEQ ID NO: 3628775 - DNA, 25 bp, Homo sapien
tgacaccgttcctttctgaagcttg

SEQ ID NO: 3628776 - DNA, 25 bp, Homo sapien
tgtggtcgtctggccgctggcagtc

SEQ ID NO: 3628777 - DNA, 25 bp, Homo sapien
tccattccccaatccgattgttgaa

SEQ ID NO: 3628778 - DNA, 25 bp, Homo sapien
tccttgcgaagactggtgatgtcca

SEQ ID NO: 3628779 - DNA, 25 bp, Homo sapien
agcgagttaccaaagctgccagagc

SEQ ID NO: 3628780 - DNA, 25 bp, Homo sapien
tgccagagccgcatgtgttggtatc

SEQ ID NO: 3628781 - DNA, 25 bp, Homo sapien
gattcaggaacacgatccttgcgaa

SEQ ID NO: 3628782 - DNA, 25 bp, Homo sapien
tctgatgagttagatctccctgcac

SEQ ID NO: 3628783 - DNA, 25 bp, Homo sapien
gcaacgtcagtttaatttccatggc

SEQ ID NO: 3628784 - DNA, 25 bp, Homo sapien
cacttgcccggaaatgcgcacaaag

SEQ ID NO: 3628785 - DNA, 25 bp, Homo sapien
tacgttctcgctactgaaatcagtg

SEQ ID NO: 3628786 - DNA, 25 bp, Homo sapien
ggggtggggcagactcgtgtgaatt

SEQ ID NO: 3628787 - DNA, 25 bp, Homo sapien
gaattggactgaaaaggtgcttcca

SEQ ID NO: 3628788 - DNA, 25 bp, Homo sapien
gcagactcgtgtgaattggactgaa

SEQ ID NO: 3628789 - DNA, 25 bp, Homo sapien
aattggactgaaaaggtgcttccag

SEQ ID NO: 3628790 - DNA, 25 bp, Homo sapien
ggggccctgagccctgaccaccagg

SEQ ID NO: 3628791 - DNA, 25 bp, Homo sapien
ctgggggccctgagccctgaccacc

SEQ ID NO: 3628792 - DNA, 25 bp, Homo sapien
ctgagccctgaccaccagggctttc

SEQ ID NO: 3628793 - DNA, 25 bp, Homo sapien
ggccctgagccctgaccaccagggc

SEQ ID NO: 3628794 - DNA, 25 bp, Homo sapien
ggttgtgcgagcgtgaaagctccac

SEQ ID NO: 3628795 - DNA, 25 bp, Homo sapien
tcaggcacagtctgtgaggttgtgc

SEQ ID NO: 3628796 - DNA, 25 bp, Homo sapien
cacaatggttctaaataactacttt

SEQ ID NO: 3628797 - DNA, 25 bp, Homo sapien
gctatatttgtaccgtgctttaaac

SEQ ID NO: 3628798 - DNA, 25 bp, Homo sapien
ccaggattcagtgcaacgtcttccg

SEQ ID NO: 3628799 - DNA, 25 bp, Homo sapien
tcagtgcaacgtcttccgaagctgt

SEQ ID NO: 3628800 - DNA, 25 bp, Homo sapien
gattcagtgcaacgtcttccgaagc

SEQ ID NO: 3628801 - DNA, 25 bp, Homo sapien
aacgtcttccgaagctgtagccacc

SEQ ID NO: 3628802 - DNA, 25 bp, Homo sapien
gtgggaccatcgagggctggctcct

SEQ ID NO: 3628803 - DNA, 25 bp, Homo sapien
tcctgggccatctgagaagccctgg

SEQ ID NO: 3628804 - DNA, 25 bp, Homo sapien
gagggagcacacagccgtgtgggac

SEQ ID NO: 3628805 - DNA, 25 bp, Homo sapien
tgggccatctgagaagccctggctg

SEQ ID NO: 3628806 - DNA, 25 bp, Homo sapien
tggccggtctcctggccgtgtcccg

SEQ ID NO: 3628807 - DNA, 25 bp, Homo sapien
aaggtggccggtctcctggccgtgt

SEQ ID NO: 3628808 - DNA, 25 bp, Homo sapien
agtgtcaaggtggccggtctcctgg

SEQ ID NO: 3628809 - DNA, 25 bp, Homo sapien
ggtggccggtctcctggccgtgtcc

SEQ ID NO: 3628810 - DNA, 25 bp, Homo sapien
tggaagaacctgagctcatctgggc

SEQ ID NO: 3628811 - DNA, 25 bp, Homo sapien
gaagaacctgagctcatctgggcca

SEQ ID NO: 3628812 - DNA, 25 bp, Homo sapien
agaacctgagctcatctgggccaga

SEQ ID NO: 3628813 - DNA, 25 bp, Homo sapien
ctggaagaacctgagctcatctggg

SEQ ID NO: 3628814 - DNA, 25 bp, Homo sapien
cgtgctgtgctgaaccctgagcagg

SEQ ID NO: 3628815 - DNA, 25 bp, Homo sapien
ccggtgtggctggaccgtgctgtgc

SEQ ID NO: 3628816 - DNA, 25 bp, Homo sapien
gggtgggttgtgagggcttgtgcat

SEQ ID NO: 3628817 - DNA, 25 bp, Homo sapien
tggctggaccgtgctgtgctgaacc

SEQ ID NO: 3628818 - DNA, 25 bp, Homo sapien
ccgcactgctgacaccgaaggtggg

SEQ ID NO: 3628819 - DNA, 25 bp, Homo sapien
tggccttggctgacctccagaagag

SEQ ID NO: 3628820 - DNA, 25 bp, Homo sapien
gggctagagctgtcacgcgtgactc

SEQ ID NO: 3628821 - DNA, 25 bp, Homo sapien
cgtgactcgtgcagatggccttggc

SEQ ID NO: 3628822 - DNA, 25 bp, Homo sapien
taaaatgcatccttcggaacgtccg

SEQ ID NO: 3628823 - DNA, 25 bp, Homo sapien
tcactatagtctggtgacagcagtt

SEQ ID NO: 3628824 - DNA, 25 bp, Homo sapien
cagcagttgtaggaacaggtgcacg

SEQ ID NO: 3628825 - DNA, 25 bp, Homo sapien
cggaacgtccgcttgctgattattt

SEQ ID NO: 3628826 - DNA, 25 bp, Homo sapien
tggcacgctagctgtgcatcacagc

SEQ ID NO: 3628827 - DNA, 25 bp, Homo sapien
tgtgcatcacagcagccatagacgc

SEQ ID NO: 3628828 - DNA, 25 bp, Homo sapien
atgagatgtctctgtggcacgctag

SEQ ID NO: 3628829 - DNA, 25 bp, Homo sapien
agcagccatagacgctgctccgcat

SEQ ID NO: 3628830 - DNA, 25 bp, Homo sapien
tgatgcttcgagtgttgtagtcggt

SEQ ID NO: 3628831 - DNA, 25 bp, Homo sapien
tgggaagctcggtgggacgtggatg

SEQ ID NO: 3628832 - DNA, 25 bp, Homo sapien
gcccttgctgtgatgcttcgagtgt

SEQ ID NO: 3628833 - DNA, 25 bp, Homo sapien
tgttgtagtcggtgtgggaagctcg

SEQ ID NO: 3628834 - DNA, 25 bp, Homo sapien
ctggatggaagagcgcaggcctctg

SEQ ID NO: 3628835 - DNA, 25 bp, Homo sapien
tgtctggctggatggaagagcgcag

SEQ ID NO: 3628836 - DNA, 25 bp, Homo sapien
ttggctgaagtagtgttgggtgcag

SEQ ID NO: 3628837 - DNA, 25 bp, Homo sapien
aggtactgaagtgtgatgtctggct

SEQ ID NO: 3628838 - DNA, 25 bp, Homo sapien
cattctacagagcagtcggccagct

SEQ ID NO: 3628839 - DNA, 25 bp, Homo sapien
tgtcgttaggccagtgccggtccag

SEQ ID NO: 3628840 - DNA, 25 bp, Homo sapien
gggcaccactctcgtgtcgttaggc

SEQ ID NO: 3628841 - DNA, 25 bp, Homo sapien
cagatcctgtaattgtgggggcacc

SEQ ID NO: 3628842 - DNA, 25 bp, Homo sapien
cgttatcccgaagaggtcgtccgca

SEQ ID NO: 3628843 - DNA, 25 bp, Homo sapien
ctgagatgtggtcgacgttatcccg

SEQ ID NO: 3628844 - DNA, 25 bp, Homo sapien
tggatttttcccggtttagctgagc

SEQ ID NO: 3628845 - DNA, 25 bp, Homo sapien
cgaagaggtcgtccgcacagccact

SEQ ID NO: 3628846 - DNA, 25 bp, Homo sapien
ggggagctgattggccctcagtggg

SEQ ID NO: 3628847 - DNA, 25 bp, Homo sapien
ttaggaagtgtgatggccgggggga

SEQ ID NO: 3628848 - DNA, 25 bp, Homo sapien
gccggggggagctgattggccctca

SEQ ID NO: 3628849 - DNA, 25 bp, Homo sapien
ctgattggccctcagtggggctgtt

SEQ ID NO: 3628850 - DNA, 25 bp, Homo sapien
aaccctctgcctggacggagttgaa

SEQ ID NO: 3628851 - DNA, 25 bp, Homo sapien
ttttgtggcgctcaggatgcacagt

SEQ ID NO: 3628852 - DNA, 25 bp, Homo sapien
cggagttgaatttttgtggcgctca

SEQ ID NO: 3628853 - DNA, 25 bp, Homo sapien
gggaccccgtgatggaaagatgcaa

SEQ ID NO: 3628854 - DNA, 25 bp, Homo sapien
ttgcttctcccggacaaaggtgagt

SEQ ID NO: 3628855 - DNA, 25 bp, Homo sapien
tgtgctggatggcaacaggtgtggc

SEQ ID NO: 3628856 - DNA, 25 bp, Homo sapien
tgtggcctcaggagcaggacagaga

SEQ ID NO: 3628857 - DNA, 25 bp, Homo sapien
tggcacccacgtgcaggagtagcat

SEQ ID NO: 3628858 - DNA, 25 bp, Homo sapien
cacccttgatggaggattgcaagaa

SEQ ID NO: 3628859 - DNA, 25 bp, Homo sapien
ccaggttctaccatggagaaataga

SEQ ID NO: 3628860 - DNA, 25 bp, Homo sapien
cagtctgtctcaaaggtaaattcca

SEQ ID NO: 3628861 - DNA, 25 bp, Homo sapien
gagaaatagaaattgctcccaactt

SEQ ID NO: 3628862 - DNA, 25 bp, Homo sapien
gtttcagcacagtctcgggagcagc

SEQ ID NO: 3628863 - DNA, 25 bp, Homo sapien
tttattacaaggaggatgaccgtgg

SEQ ID NO: 3628864 - DNA, 25 bp, Homo sapien
ggcagaactgcttccggctgttgag

SEQ ID NO: 3628865 - DNA, 25 bp, Homo sapien
tggcgtgcacagatcggtttcagca

SEQ ID NO: 3628866 - DNA, 25 bp, Homo sapien
catttgaatggtgtccaaggctctt

SEQ ID NO: 3628867 - DNA, 25 bp, Homo sapien
tttgaatggtgtccaaggctctttc

SEQ ID NO: 3628868 - DNA, 25 bp, Homo sapien
cgtgagtgggggccaggtcgtgggc

SEQ ID NO: 3628869 - DNA, 25 bp, Homo sapien
gctggagaggtgatgcccgtgagtg

SEQ ID NO: 3628870 - DNA, 25 bp, Homo sapien
tgtgtctccttgaggcccgttgaga

SEQ ID NO: 3628871 - DNA, 25 bp, Homo sapien
agttgagccgtttctgcccaggagt

SEQ ID NO: 3628872 - DNA, 25 bp, Homo sapien
actccacctgcccttagagttgagc

SEQ ID NO: 3628873 - DNA, 25 bp, Homo sapien
ctgcctttaatcctgtgtctccttg

SEQ ID NO: 3628874 - DNA, 25 bp, Homo sapien
tatctgagatccagaacgttccctg

SEQ ID NO: 3628875 - DNA, 25 bp, Homo sapien
aagccattatctatctgagatccag

SEQ ID NO: 3628876 - DNA, 25 bp, Homo sapien
catgagtggataagccattatctat

SEQ ID NO: 3628877 - DNA, 25 bp, Homo sapien
gatccagaacgttccctggacctgg

SEQ ID NO: 3628878 - DNA, 25 bp, Homo sapien
tgtcgatatgccgtaagataccagc

SEQ ID NO: 3628879 - DNA, 25 bp, Homo sapien
tttaaaggaacatgtcgatatgccg

SEQ ID NO: 3628880 - DNA, 25 bp, Homo sapien
gcgtgggttcgcaggaactgggcct

SEQ ID NO: 3628881 - DNA, 25 bp, Homo sapien
aagttcctcactgaggttcggcgtg

SEQ ID NO: 3628882 - DNA, 25 bp, Homo sapien
cttcgcttgaaatgtgaaatgacac

SEQ ID NO: 3628883 - DNA, 25 bp, Homo sapien
gctgcctgcactgtgggacgtctga

SEQ ID NO: 3628884 - DNA, 25 bp, Homo sapien
tagactcgcatcgttcttcagagac

SEQ ID NO: 3628885 - DNA, 25 bp, Homo sapien
gaatgtgatttcctggtcgcctcat

SEQ ID NO: 3628886 - DNA, 25 bp, Homo sapien
attggttggcactggttccacggcc

SEQ ID NO: 3628887 - DNA, 25 bp, Homo sapien
cctgaattggttggcactggttcca

SEQ ID NO: 3628888 - DNA, 25 bp, Homo sapien
ttccgccgtggttggagtcattcat

SEQ ID NO: 3628889 - DNA, 25 bp, Homo sapien
tggttccacggccagttccgccgtg

SEQ ID NO: 3628890 - DNA, 25 bp, Homo sapien
ggccatgttcccttacgttgaaatg

SEQ ID NO: 3628891 - DNA, 25 bp, Homo sapien
ctcggccatgttcccttacgttgaa

SEQ ID NO: 3628892 - DNA, 25 bp, Homo sapien
tctgtactcggccatgttcccttac

SEQ ID NO: 3628893 - DNA, 25 bp, Homo sapien
tgaaatggtctgtactcggccatgt

SEQ ID NO: 3628894 - DNA, 25 bp, Homo sapien
tcttgtcccgagtgcccaggaggct

SEQ ID NO: 3628895 - DNA, 25 bp, Homo sapien
gcatcggacacactgcaccttggga

SEQ ID NO: 3628896 - DNA, 25 bp, Homo sapien
cacatctgagaagtgcgtgctttgc

SEQ ID NO: 3628897 - DNA, 25 bp, Homo sapien
tgatgccatgtagaagacctgcggg

SEQ ID NO: 3628898 - DNA, 25 bp, Homo sapien
attcaccaggtctccattcaccttt

SEQ ID NO: 3628899 - DNA, 25 bp, Homo sapien
ggtctccattcaccaggtctccatt

SEQ ID NO: 3628900 - DNA, 25 bp, Homo sapien
tctccattcaccaggtctccattca

SEQ ID NO: 3628901 - DNA, 25 bp, Homo sapien
cattcaccaggtctccattcacctt

SEQ ID NO: 3628902 - DNA, 25 bp, Homo sapien
gccgctttatgatgcaaggatgagg

SEQ ID NO: 3628903 - DNA, 25 bp, Homo sapien
cagaaagtcgttgttggaaggatgt

SEQ ID NO: 3628904 - DNA, 25 bp, Homo sapien
aaaggctcgatgcagaaagtcgttg

SEQ ID NO: 3628905 - DNA, 25 bp, Homo sapien
ttattccacacggtcttcgccgctt

SEQ ID NO: 3628906 - DNA, 25 bp, Homo sapien
gtcattgaggagcatccggaaaccc

SEQ ID NO: 3628907 - DNA, 25 bp, Homo sapien
gggtcgcacgggagcatccgcacac

SEQ ID NO: 3628908 - DNA, 25 bp, Homo sapien
gggtcgctccggagcatccgaacac

SEQ ID NO: 3628909 - DNA, 25 bp, Homo sapien
tggaaagggctgtcgggtcattgag

SEQ ID NO: 3628910 - DNA, 25 bp, Homo sapien
gtttgtccacaacgatactcctcca

SEQ ID NO: 3628911 - DNA, 25 bp, Homo sapien
gtgtttgtccacaacgatactcctc

SEQ ID NO: 3628912 - DNA, 25 bp, Homo sapien
atcagtgtttgtccacaacgatact

SEQ ID NO: 3628913 - DNA, 25 bp, Homo sapien
cagtgtttgtccacaacgatactcc

SEQ ID NO: 3628914 - DNA, 25 bp, Homo sapien
ctgagcttccttgttgagtatcata

SEQ ID NO: 3628915 - DNA, 25 bp, Homo sapien
ttccttgttgagtatcatagccctg

SEQ ID NO: 3628916 - DNA, 25 bp, Homo sapien
cttctgagcttccttgttgagtatc

SEQ ID NO: 3628917 - DNA, 25 bp, Homo sapien
tctgagcttccttgttgagtatcat

SEQ ID NO: 3628918 - DNA, 25 bp, Homo sapien
ccaggaagacttgcacagtcggacc

SEQ ID NO: 3628919 - DNA, 25 bp, Homo sapien
tgcaggactcgttctgaggacaact

SEQ ID NO: 3628920 - DNA, 25 bp, Homo sapien
gaggacaacttagaacccagaaagc

SEQ ID NO: 3628921 - DNA, 25 bp, Homo sapien
acccagaaagcagcgcgaggagaaa

SEQ ID NO: 3628922 - DNA, 25 bp, Homo sapien
gtgtcttccccctcggacagagcgt

SEQ ID NO: 3628923 - DNA, 25 bp, Homo sapien
gtaattacggcagcggggcgagtgg

SEQ ID NO: 3628924 - DNA, 25 bp, Homo sapien
agcggggcgagtggccgtgccctga

SEQ ID NO: 3628925 - DNA, 25 bp, Homo sapien
cctcagtggtcctctgggggggtgg

SEQ ID NO: 3628926 - DNA, 25 bp, Homo sapien
gatcctagggtatttgaagtcgtgg

SEQ ID NO: 3628927 - DNA, 25 bp, Homo sapien
ggcccagcacaaaccatagttacat

SEQ ID NO: 3628928 - DNA, 25 bp, Homo sapien
gacagggattcggacaccagttgaa

SEQ ID NO: 3628929 - DNA, 25 bp, Homo sapien
tacatgggtcactgggcctgttaga

SEQ ID NO: 3628930 - DNA, 25 bp, Homo sapien
cttaaaagatagttaaattcaacat

SEQ ID NO: 3628931 - DNA, 25 bp, Homo sapien
attcaacattgaaatgtaaacacat

SEQ ID NO: 3628932 - DNA, 25 bp, Homo sapien
aaaagatagttaaattcaacattga

SEQ ID NO: 3628933 - DNA, 25 bp, Homo sapien
aaattcaacattgaaatgtaaacac

SEQ ID NO: 3628934 - DNA, 25 bp, Homo sapien
catccttggggaacttctttccatc

SEQ ID NO: 3628935 - DNA, 25 bp, Homo sapien
tctccttccatccttggggaacttc

SEQ ID NO: 3628936 - DNA, 25 bp, Homo sapien
atccttggggaacttctttccatct

SEQ ID NO: 3628937 - DNA, 25 bp, Homo sapien
tccatccttggggaacttctttcca

SEQ ID NO: 3628938 - DNA, 25 bp, Homo sapien
tgtgggtatccctgaatatcctggg

SEQ ID NO: 3628939 - DNA, 25 bp, Homo sapien
caaagagaatgcagcgttgtcagct

SEQ ID NO: 3628940 - DNA, 25 bp, Homo sapien
tcagcttgaatccagatgtgtgcct

SEQ ID NO: 3628941 - DNA, 25 bp, Homo sapien
catggaggacgttgaatgcaggcac

SEQ ID NO: 3628942 - DNA, 25 bp, Homo sapien
tcggccgagcagattgggacgtttc

SEQ ID NO: 3628943 - DNA, 25 bp, Homo sapien
gctgttgtctttgtgtcggccgagc

SEQ ID NO: 3628944 - DNA, 25 bp, Homo sapien
gcagttctcttgcacggctgtgcct

SEQ ID NO: 3628945 - DNA, 25 bp, Homo sapien
gattgggacgtttccagttcagcag

SEQ ID NO: 3628946 - DNA, 25 bp, Homo sapien
gtctccattgtaaacaccgtggccc

SEQ ID NO: 3628947 - DNA, 25 bp, Homo sapien
caccgtggcccctatgcgggtggct

SEQ ID NO: 3628948 - DNA, 25 bp, Homo sapien
ctatgcgggtggctgcgagtttcca

SEQ ID NO: 3628949 - DNA, 25 bp, Homo sapien
ttgtaaacaccgtggcccctatgcg

SEQ ID NO: 3628950 - DNA, 25 bp, Homo sapien
ttcagcctgaacgtggccgtgtggc

SEQ ID NO: 3628951 - DNA, 25 bp, Homo sapien
ttctggcgatcgtgcggcttcagcc

SEQ ID NO: 3628952 - DNA, 25 bp, Homo sapien
ggcttcagcctgaacgtggccgtgt

SEQ ID NO: 3628953 - DNA, 25 bp, Homo sapien
cttggcgagggacagtgtttctggc

SEQ ID NO: 3628954 - DNA, 25 bp, Homo sapien
tgtacagaaggtgtgtgcacacctg

SEQ ID NO: 3628955 - DNA, 25 bp, Homo sapien
ggcacagatgagcatgtacagaagg

SEQ ID NO: 3628956 - DNA, 25 bp, Homo sapien
tggcgaatacgtggcccgttgcgtc

SEQ ID NO: 3628957 - DNA, 25 bp, Homo sapien
tgttgtttggtaagtggcgaatacg

SEQ ID NO: 3628958 - DNA, 25 bp, Homo sapien
atcttcacacgcgtgctccgtgcag

SEQ ID NO: 3628959 - DNA, 25 bp, Homo sapien
gctcctgaatcttcacacgcgtgct

SEQ ID NO: 3628960 - DNA, 25 bp, Homo sapien
tgaatcttcacacgcgtgctccgtg

SEQ ID NO: 3628961 - DNA, 25 bp, Homo sapien
tcctgaatcttcacacgcgtgctcc

SEQ ID NO: 3628962 - DNA, 25 bp, Homo sapien
tgttcgtacaccctagaaaggcact

SEQ ID NO: 3628963 - DNA, 25 bp, Homo sapien
caaggccccactttgtgttcgtaca

SEQ ID NO: 3628964 - DNA, 25 bp, Homo sapien
cctcttgagtgaggcacaaaagcct

SEQ ID NO: 3628965 - DNA, 25 bp, Homo sapien
ggtccctttcagatgagtcagccag

SEQ ID NO: 3628966 - DNA, 25 bp, Homo sapien
cgtagttttctcgtgggtgccccag

SEQ ID NO: 3628967 - DNA, 25 bp, Homo sapien
acagcttccgtagttttctcgtggg

SEQ ID NO: 3628968 - DNA, 25 bp, Homo sapien
ctccgtcttcacagcttccgtagtt

SEQ ID NO: 3628969 - DNA, 25 bp, Homo sapien
tcttcacagcttccgtagttttctc

SEQ ID NO: 3628970 - DNA, 25 bp, Homo sapien
tttgtttagggaagcagcgaaccca

SEQ ID NO: 3628971 - DNA, 25 bp, Homo sapien
cagcgaacccagctgaaaatccagt

SEQ ID NO: 3628972 - DNA, 25 bp, Homo sapien
cagagcggctggtgacacaggtcca

SEQ ID NO: 3628973 - DNA, 25 bp, Homo sapien
aatccagttctcttgtacggcagag

SEQ ID NO: 3628974 - DNA, 25 bp, Homo sapien
tggtgtggtgagaaccggcggctgg

SEQ ID NO: 3628975 - DNA, 25 bp, Homo sapien
ctggatgtcgcgaggttgccaagaa

SEQ ID NO: 3628976 - DNA, 25 bp, Homo sapien
gtggcgctcggttgaagacactgtc

SEQ ID NO: 3628977 - DNA, 25 bp, Homo sapien
tctgccctgggtggacatctctggt

SEQ ID NO: 3628978 - DNA, 25 bp, Homo sapien
tgtggcttccggttccccgaggcca

SEQ ID NO: 3628979 - DNA, 25 bp, Homo sapien
tctccaccttcgctggttagcaatg

SEQ ID NO: 3628980 - DNA, 25 bp, Homo sapien
tgttcatccattagagctcaaagca

SEQ ID NO: 3628981 - DNA, 25 bp, Homo sapien
tcttcatcttctcagacgggtgccc

SEQ ID NO: 3628982 - DNA, 25 bp, Homo sapien
ttcttagacccagacagcgagtgcc

SEQ ID NO: 3628983 - DNA, 25 bp, Homo sapien
catgtatggcgatcctcaggctgtg

SEQ ID NO: 3628984 - DNA, 25 bp, Homo sapien
tgggacacctcagcatcatgtatgg

SEQ ID NO: 3628985 - DNA, 25 bp, Homo sapien
caagatcgcccgctttggagttggc

SEQ ID NO: 3628986 - DNA, 25 bp, Homo sapien
caatggtggcgtcgttccgtgagtc

SEQ ID NO: 3628987 - DNA, 25 bp, Homo sapien
aagcgaattatcttcagcaaggtgg

SEQ ID NO: 3628988 - DNA, 25 bp, Homo sapien
cacattgcaaaggatggagtccaga

SEQ ID NO: 3628989 - DNA, 25 bp, Homo sapien
gagtgtggagatgagttaatccgac

SEQ ID NO: 3628990 - DNA, 25 bp, Homo sapien
ggacgttggccgctgtgcttcactt

SEQ ID NO: 3628991 - DNA, 25 bp, Homo sapien
aatccctggtctaaatgaaatcgaa

SEQ ID NO: 3628992 - DNA, 25 bp, Homo sapien
agcccttgggaatcaggccgtcggc

SEQ ID NO: 3628993 - DNA, 25 bp, Homo sapien
caaggcccggattctatggctgcca

SEQ ID NO: 3628994 - DNA, 25 bp, Homo sapien
acgggtctcagggagatgccggcca

SEQ ID NO: 3628995 - DNA, 25 bp, Homo sapien
ccagcaggtatgcatggcgaggcct

SEQ ID NO: 3628996 - DNA, 25 bp, Homo sapien
tccctgtgctccaagggccgggccc

SEQ ID NO: 3628997 - DNA, 25 bp, Homo sapien
cgttgcctgtgccagacgggtctca

SEQ ID NO: 3628998 - DNA, 25 bp, Homo sapien
ccaggagctcttgcggagaagccac

SEQ ID NO: 3628999 - DNA, 25 bp, Homo sapien
tgagtcagcacaaatgttagcattg

SEQ ID NO: 3629000 - DNA, 25 bp, Homo sapien
agaattccccattgaggagccctca

SEQ ID NO: 3629001 - DNA, 25 bp, Homo sapien
tagcattgatatctgacccccttcc

SEQ ID NO: 3629002 - DNA, 25 bp, Homo sapien
agtttcatcatccgctgtcgccagg

SEQ ID NO: 3629003 - DNA, 25 bp, Homo sapien
tgtcgccaggtgacacgtccagtgt

SEQ ID NO: 3629004 - DNA, 25 bp, Homo sapien
catgtcagacgtggccacagggcca

SEQ ID NO: 3629005 - DNA, 25 bp, Homo sapien
cacgtccagtgtttagctgcatgtc

SEQ ID NO: 3629006 - DNA, 25 bp, Homo sapien
gctggtgcccgcgtggtttccagtt

SEQ ID NO: 3629007 - DNA, 25 bp, Homo sapien
ccagttacagtgctggccgcttgta

SEQ ID NO: 3629008 - DNA, 25 bp, Homo sapien
tggtctccagttacggtgctggctg

SEQ ID NO: 3629009 - DNA, 25 bp, Homo sapien
agttcacgctggtgcccgcgtggtt

SEQ ID NO: 3629010 - DNA, 25 bp, Homo sapien
gctgcagaacgggttctggtggtgg

SEQ ID NO: 3629011 - DNA, 25 bp, Homo sapien
ggtgccgttgcgtctgagttcacac

SEQ ID NO: 3629012 - DNA, 25 bp, Homo sapien
tccagaatcagcttcgagttcagct

SEQ ID NO: 3629013 - DNA, 25 bp, Homo sapien
gcccaggagggtgccgttgcgtctg

SEQ ID NO: 3629014 - DNA, 25 bp, Homo sapien
cagggaagcatagcaacctgaaacc

SEQ ID NO: 3629015 - DNA, 25 bp, Homo sapien
ttctccagcgctacttccaactctg

SEQ ID NO: 3629016 - DNA, 25 bp, Homo sapien
ggaagcatagcaacctgaaaccacc

SEQ ID NO: 3629017 - DNA, 25 bp, Homo sapien
agggcagggaagcatagcaacctga

SEQ ID NO: 3629018 - DNA, 25 bp, Homo sapien
tatccaggctgattccacaggagga

SEQ ID NO: 3629019 - DNA, 25 bp, Homo sapien
tgtgtcatgggttcgtggaatcctc

SEQ ID NO: 3629020 - DNA, 25 bp, Homo sapien
tagccaccagggactgttatccagg

SEQ ID NO: 3629021 - DNA, 25 bp, Homo sapien
tgacgtctgcgtaaatcttgcttgt

SEQ ID NO: 3629022 - DNA, 25 bp, Homo sapien
cccattcacaggtggatttgccttg

SEQ ID NO: 3629023 - DNA, 25 bp, Homo sapien
cattcacaggtggatttgccttgtt

SEQ ID NO: 3629024 - DNA, 25 bp, Homo sapien
tcacaggtggatttgccttgttttt

SEQ ID NO: 3629025 - DNA, 25 bp, Homo sapien
ccaccccattcacaggtggatttgc

SEQ ID NO: 3629026 - DNA, 25 bp, Homo sapien
tgtccaggacgtctatccatccatc

SEQ ID NO: 3629027 - DNA, 25 bp, Homo sapien
tcagtgtgcaggaaagtgagttcct

SEQ ID NO: 3629028 - DNA, 25 bp, Homo sapien
cactgttatcccagtctgtgagggg

SEQ ID NO: 3629029 - DNA, 25 bp, Homo sapien
tgccggccgatgtggagacgctgat

SEQ ID NO: 3629030 - DNA, 25 bp, Homo sapien
cagcccacactgcgcggccgcttct

SEQ ID NO: 3629031 - DNA, 25 bp, Homo sapien
ccacactgcgcggccgcttctgctt

SEQ ID NO: 3629032 - DNA, 25 bp, Homo sapien
tcctgctgtgtcataccagctgctt

SEQ ID NO: 3629033 - DNA, 25 bp, Homo sapien
gcctcctgctgtgtcataccagctg

SEQ ID NO: 3629034 - DNA, 25 bp, Homo sapien
tgcccaggggcaatttcccgccttc

SEQ ID NO: 3629035 - DNA, 25 bp, Homo sapien
cgagactgaaacttcctgtttacag

SEQ ID NO: 3629036 - DNA, 25 bp, Homo sapien
cggaaggtgattgcgcctcgagact

SEQ ID NO: 3629037 - DNA, 25 bp, Homo sapien
tgtatgacggaaggtgattgcgcct

SEQ ID NO: 3629038 - DNA, 25 bp, Homo sapien
tgcgcctcgagactgaaacttcctg

SEQ ID NO: 3629039 - DNA, 25 bp, Homo sapien
acgagtcccatgtggtgccggtcgc

SEQ ID NO: 3629040 - DNA, 25 bp, Homo sapien
ctccaggtgtctcggctgcccgcgg

SEQ ID NO: 3629041 - DNA, 25 bp, Homo sapien
tgggtgctggtgcacacgagtccca

SEQ ID NO: 3629042 - DNA, 25 bp, Homo sapien
tggtgccggtcgcagctatgccgtc

SEQ ID NO: 3629043 - DNA, 25 bp, Homo sapien
gccttggtgttaagctctggactga

SEQ ID NO: 3629044 - DNA, 25 bp, Homo sapien
ttaagctctggactgactctgacct

SEQ ID NO: 3629045 - DNA, 25 bp, Homo sapien
tgttaagctctggactgactctgac

SEQ ID NO: 3629046 - DNA, 25 bp, Homo sapien
ttggtgttaagctctggactgactc

SEQ ID NO: 3629047 - DNA, 25 bp, Homo sapien
caaagcccttggtggccgtgggcgg

SEQ ID NO: 3629048 - DNA, 25 bp, Homo sapien
gggcggccgtgcctgtctgtgtgtc

SEQ ID NO: 3629049 - DNA, 25 bp, Homo sapien
gacaaagcaaagcccttggtggccg

SEQ ID NO: 3629050 - DNA, 25 bp, Homo sapien
ggcggggcggccgtgcctgtctgtg

SEQ ID NO: 3629051 - DNA, 25 bp, Homo sapien
gccgtgtgaccccatcgaagggcac

SEQ ID NO: 3629052 - DNA, 25 bp, Homo sapien
taacacttggccatctgccgtgtga

SEQ ID NO: 3629053 - DNA, 25 bp, Homo sapien
ctgccgtgtgaccccatcgaagggc

SEQ ID NO: 3629054 - DNA, 25 bp, Homo sapien
cgtgtgaccccatcgaagggcacct

SEQ ID NO: 3629055 - DNA, 25 bp, Homo sapien
gagcactgctttgctagcacaccag

SEQ ID NO: 3629056 - DNA, 25 bp, Homo sapien
gcacaccagcgagtcctgcttaaag

SEQ ID NO: 3629057 - DNA, 25 bp, Homo sapien
caggttaccaaattgtgtagcagaa

SEQ ID NO: 3629058 - DNA, 25 bp, Homo sapien
caccccagtgtgacgttaggaggcg

SEQ ID NO: 3629059 - DNA, 25 bp, Homo sapien
ccaatgtggacgtggactcagtttc

SEQ ID NO: 3629060 - DNA, 25 bp, Homo sapien
caaatgtggacgtggactcagtttc

SEQ ID NO: 3629061 - DNA, 25 bp, Homo sapien
aaatgtggacgtggactcagtttcc

SEQ ID NO: 3629062 - DNA, 25 bp, Homo sapien
caatgtggacgtggactcagtttcc

SEQ ID NO: 3629063 - DNA, 25 bp, Homo sapien
tccaatgtggacgtggactcagttt

SEQ ID NO: 3629064 - DNA, 25 bp, Homo sapien
tgtggacgtggactcagtttccttc

SEQ ID NO: 3629065 - DNA, 25 bp, Homo sapien
cgtccaatgtggacgtggactcagt

SEQ ID NO: 3629066 - DNA, 25 bp, Homo sapien
caatgtggacgtggactcagtttcc

SEQ ID NO: 3629067 - DNA, 25 bp, Homo sapien
caaatgtggacgtggactcagtttc

SEQ ID NO: 3629068 - DNA, 25 bp, Homo sapien
tgttctcgcccaccgtccaatgtgg

SEQ ID NO: 3629069 - DNA, 25 bp, Homo sapien
caatgtggacgtggactcagtttcc

SEQ ID NO: 3629070 - DNA, 25 bp, Homo sapien
caatgtcgacgtggactcagtttcc

SEQ ID NO: 3629071 - DNA, 25 bp, Homo sapien
cctcaaatgtggacgtggactcagt

SEQ ID NO: 3629072 - DNA, 25 bp, Homo sapien
tgttctcgcccaccgtccaatgtgg

SEQ ID NO: 3629073 - DNA, 25 bp, Homo sapien
ccctcaaatgtggacgtggactcag

SEQ ID NO: 3629074 - DNA, 25 bp, Homo sapien
catcaaatgtggacgtggactcagt

SEQ ID NO: 3629075 - DNA, 25 bp, Homo sapien
caaatgtggacgtggactcagtttc

SEQ ID NO: 3629076 - DNA, 25 bp, Homo sapien
caccgtcaaatgtggacgtggactc

SEQ ID NO: 3629077 - DNA, 25 bp, Homo sapien
aaatgtggacgtggactcagtttcc

SEQ ID NO: 3629078 - DNA, 25 bp, Homo sapien
tgttctctcccaccgtcaaatgtgg

SEQ ID NO: 3629079 - DNA, 25 bp, Homo sapien
tgacgtggactcagttttcctctgt

SEQ ID NO: 3629080 - DNA, 25 bp, Homo sapien
cctcaaatgttgacgtggactcagt

SEQ ID NO: 3629081 - DNA, 25 bp, Homo sapien
aatgttgacgtggactcagttttcc

SEQ ID NO: 3629082 - DNA, 25 bp, Homo sapien
gactcagttttcctctgttctcgcc

SEQ ID NO: 3629083 - DNA, 25 bp, Homo sapien
aatgtggacgtggactcagtttgcc

SEQ ID NO: 3629084 - DNA, 25 bp, Homo sapien
caatgtggacgtggactcagtttcc

SEQ ID NO: 3629085 - DNA, 25 bp, Homo sapien
tctcccaccatccaatgtggacgtg

SEQ ID NO: 3629086 - DNA, 25 bp, Homo sapien
catcaaatgtggacgtggactcagt

SEQ ID NO: 3629087 - DNA, 25 bp, Homo sapien
cctcaaatgtggatgtgggctcagt

SEQ ID NO: 3629088 - DNA, 25 bp, Homo sapien
tcagtttccctctgttgtctcccac

SEQ ID NO: 3629089 - DNA, 25 bp, Homo sapien
ggctcagtttccctctgttgtctcc

SEQ ID NO: 3629090 - DNA, 25 bp, Homo sapien
tcaaatgtggatgtgggctcagttt

SEQ ID NO: 3629091 - DNA, 25 bp, Homo sapien
tttggacggcaaacactgcttacat

SEQ ID NO: 3629092 - DNA, 25 bp, Homo sapien
ggccgcaggaggtgtcaagctattt

SEQ ID NO: 3629093 - DNA, 25 bp, Homo sapien
tgcaggaggaaaggctcagaattgc

SEQ ID NO: 3629094 - DNA, 25 bp, Homo sapien
cagaattgccttcctaataaggaat

SEQ ID NO: 3629095 - DNA, 25 bp, Homo sapien
cagtgttgactctgctggggtcttc

SEQ ID NO: 3629096 - DNA, 25 bp, Homo sapien
ctccagtgttgactctgctggggtc

SEQ ID NO: 3629097 - DNA, 25 bp, Homo sapien
tccttgtcccaacgggaggactcca

SEQ ID NO: 3629098 - DNA, 25 bp, Homo sapien
cttctctctcctggggggtccttgt

SEQ ID NO: 3629099 - DNA, 25 bp, Homo sapien
cagggaacagccctccccgtgtggc

SEQ ID NO: 3629100 - DNA, 25 bp, Homo sapien
aacagggaacagccctccccgtgtg

SEQ ID NO: 3629101 - DNA, 25 bp, Homo sapien
ctgaggggaagggaacagggaacag

SEQ ID NO: 3629102 - DNA, 25 bp, Homo sapien
ccgtgtggcctccccagcaccaccc

SEQ ID NO: 3629103 - DNA, 25 bp, Homo sapien
ctgaaatcgcatccagtgctgtgtc

SEQ ID NO: 3629104 - DNA, 25 bp, Homo sapien
tgaaatcgcatccagtgctgtgtca

SEQ ID NO: 3629105 - DNA, 25 bp, Homo sapien
gaaatcgcatccagtgctgtgtcac

SEQ ID NO: 3629106 - DNA, 25 bp, Homo sapien
aaatcgcatccagtgctgtgtcacc

SEQ ID NO: 3629107 - DNA, 25 bp, Homo sapien
tggcgttatccacagccccggtctg

SEQ ID NO: 3629108 - DNA, 25 bp, Homo sapien
gcctgcgttcttctcgtgttggtct

SEQ ID NO: 3629109 - DNA, 25 bp, Homo sapien
ctggcgtggtccacagccccgggca

SEQ ID NO: 3629110 - DNA, 25 bp, Homo sapien
gatgaagatgttgtcggcctgcgtt

SEQ ID NO: 3629111 - DNA, 25 bp, Homo sapien
cctgcaaactgaaggggcccacgtc

SEQ ID NO: 3629112 - DNA, 25 bp, Homo sapien
gtgctgtggaatggcttccccgcct

SEQ ID NO: 3629113 - DNA, 25 bp, Homo sapien
atcccattctcagggacacggctgt

SEQ ID NO: 3629114 - DNA, 25 bp, Homo sapien
tgcatcccattctcagggacacggc

SEQ ID NO: 3629115 - DNA, 25 bp, Homo sapien
tatgccacggacctctcacaagtgg

SEQ ID NO: 3629116 - DNA, 25 bp, Homo sapien
catctgggttccatggtggatcagc

SEQ ID NO: 3629117 - DNA, 25 bp, Homo sapien
agcctcggggtcctgcatggacaca

SEQ ID NO: 3629118 - DNA, 25 bp, Homo sapien
ccctggcaccgggagagatggagag

SEQ ID NO: 3629119 - DNA, 25 bp, Homo sapien
agtggacattgactgagtgtggcga

SEQ ID NO: 3629120 - DNA, 25 bp, Homo sapien
gtggaggacggtggtcccagacctg

SEQ ID NO: 3629121 - DNA, 25 bp, Homo sapien
tggacattgactgagtgtggcgaga

SEQ ID NO: 3629122 - DNA, 25 bp, Homo sapien
ctgtagatatgcgtggaggacggtg

SEQ ID NO: 3629123 - DNA, 25 bp, Homo sapien
tggtgaccggaacccacgctgtgac

SEQ ID NO: 3629124 - DNA, 25 bp, Homo sapien
cgctgtgacgccatcattggtgtga

SEQ ID NO: 3629125 - DNA, 25 bp, Homo sapien
tctgcttgtaaggagtccacgttgg

SEQ ID NO: 3629126 - DNA, 25 bp, Homo sapien
ggttcctgatgggatcgtgtccacg

SEQ ID NO: 3629127 - DNA, 25 bp, Homo sapien
gagtttggttgttccacagtttgct

SEQ ID NO: 3629128 - DNA, 25 bp, Homo sapien
cgagtttggttgttccacagtttgc

SEQ ID NO: 3629129 - DNA, 25 bp, Homo sapien
agtttggttgttccacagtttgctg

SEQ ID NO: 3629130 - DNA, 25 bp, Homo sapien
acgagtttggttgttccacagtttg

SEQ ID NO: 3629131 - DNA, 25 bp, Homo sapien
taagggcaccatttagcaaaagtcc

SEQ ID NO: 3629132 - DNA, 25 bp, Homo sapien
gcataataccttcacgtggatacgg

SEQ ID NO: 3629133 - DNA, 25 bp, Homo sapien
ggagagactcctgtgctaagggcac

SEQ ID NO: 3629134 - DNA, 25 bp, Homo sapien
gaaaggcactgaaacaaagttaagc

SEQ ID NO: 3629135 - DNA, 25 bp, Homo sapien
gctgctgctgatgatgactgatgac

SEQ ID NO: 3629136 - DNA, 25 bp, Homo sapien
cgcagctgctgctgatgatgactga

SEQ ID NO: 3629137 - DNA, 25 bp, Homo sapien
catctctctcatgccgcagctgctg

SEQ ID NO: 3629138 - DNA, 25 bp, Homo sapien
cagctgctgctgatgatgactgatg

SEQ ID NO: 3629139 - DNA, 25 bp, Homo sapien
gccagtggagtttggtcagcagcca

SEQ ID NO: 3629140 - DNA, 25 bp, Homo sapien
ggaactcagttctcagcctcgggct

SEQ ID NO: 3629141 - DNA, 25 bp, Homo sapien
tacagcgaggccgtttgcagtagca

SEQ ID NO: 3629142 - DNA, 25 bp, Homo sapien
tctgtacacgcaggttcggcaggtc

SEQ ID NO: 3629143 - DNA, 25 bp, Homo sapien
aatcactctgcgtgcggttctgtgc

SEQ ID NO: 3629144 - DNA, 25 bp, Homo sapien
aaaaaatcactctgcgtgcggttct

SEQ ID NO: 3629145 - DNA, 25 bp, Homo sapien
actctgcgtgcggttctgtgcttga

SEQ ID NO: 3629146 - DNA, 25 bp, Homo sapien
ggtcagcaccgggaagtgggatggg

SEQ ID NO: 3629147 - DNA, 25 bp, Homo sapien
ttccaggctcgaggccgcgtctgaa

SEQ ID NO: 3629148 - DNA, 25 bp, Homo sapien
tcttgcgagggtttatggctcagtg

SEQ ID NO: 3629149 - DNA, 25 bp, Homo sapien
ccttgagatgcccacagtcttgcga

SEQ ID NO: 3629150 - DNA, 25 bp, Homo sapien
ggcttccaggctcgaggccgcgtct

SEQ ID NO: 3629151 - DNA, 25 bp, Homo sapien
tggggtcatttccttattggacttg

SEQ ID NO: 3629152 - DNA, 25 bp, Homo sapien
tcatttccttattggacttggctgg

SEQ ID NO: 3629153 - DNA, 25 bp, Homo sapien
tgtggggtcatttccttattggact

SEQ ID NO: 3629154 - DNA, 25 bp, Homo sapien
gggtcatttccttattggacttggc

SEQ ID NO: 3629155 - DNA, 25 bp, Homo sapien
tgattagcatgagatcagatagcag

SEQ ID NO: 3629156 - DNA, 25 bp, Homo sapien
attagcatgagatcagatagcagct

SEQ ID NO: 3629157 - DNA, 25 bp, Homo sapien
ctgattagcatgagatcagatagca

SEQ ID NO: 3629158 - DNA, 25 bp, Homo sapien
gattagcatgagatcagatagcagc

SEQ ID NO: 3629159 - DNA, 25 bp, Homo sapien
cattctttcatctggcagtctcttc

SEQ ID NO: 3629160 - DNA, 25 bp, Homo sapien
cccattctttcatctggcagtctct

SEQ ID NO: 3629161 - DNA, 25 bp, Homo sapien
tgggtacagaaacgggcttctgtct

SEQ ID NO: 3629162 - DNA, 25 bp, Homo sapien
tgtccagctgggtacagaaacgggc

SEQ ID NO: 3629163 - DNA, 25 bp, Homo sapien
gaatacactgatgacgtctctacag

SEQ ID NO: 3629164 - DNA, 25 bp, Homo sapien
tgtgcattgtaggaagtccgggcct

SEQ ID NO: 3629165 - DNA, 25 bp, Homo sapien
taaacagttgtctcatgcctggcac

SEQ ID NO: 3629166 - DNA, 25 bp, Homo sapien
aaagccgtgcatatttggaatggcc

SEQ ID NO: 3629167 - DNA, 25 bp, Homo sapien
taaccaccaggagagcgttcttcag

SEQ ID NO: 3629168 - DNA, 25 bp, Homo sapien
tatagaatagtagcctcgcgcagca

SEQ ID NO: 3629169 - DNA, 25 bp, Homo sapien
cagtgttgtgctccatactacagag

SEQ ID NO: 3629170 - DNA, 25 bp, Homo sapien
tagtatagaatagaacaaaccgatc

SEQ ID NO: 3629171 - DNA, 25 bp, Homo sapien
aaaacatcacatttgaataccgcac

SEQ ID NO: 3629172 - DNA, 25 bp, Homo sapien
atttgaataccgcactgggtaagag

SEQ ID NO: 3629173 - DNA, 25 bp, Homo sapien
catcacatttgaataccgcactggg

SEQ ID NO: 3629174 - DNA, 25 bp, Homo sapien
cacatttgaataccgcactgggtaa

SEQ ID NO: 3629175 - DNA, 25 bp, Homo sapien
ctgtggagccacgggggacaggcca

SEQ ID NO: 3629176 - DNA, 25 bp, Homo sapien
gagccacgggggacaggccaggctc

SEQ ID NO: 3629177 - DNA, 25 bp, Homo sapien
gtggagccacgggggacaggccagg

SEQ ID NO: 3629178 - DNA, 25 bp, Homo sapien
ggagccacgggggacaggccaggct

SEQ ID NO: 3629179 - DNA, 25 bp, Homo sapien
ctgtcagatactaggaagccactga

SEQ ID NO: 3629180 - DNA, 25 bp, Homo sapien
gccactgagggcttcggagagaatc

SEQ ID NO: 3629181 - DNA, 25 bp, Homo sapien
gaatcgtgcctttgatgtgcggtat

SEQ ID NO: 3629182 - DNA, 25 bp, Homo sapien
gtcagatactaggaagccactgagg

SEQ ID NO: 3629183 - DNA, 25 bp, Homo sapien
cctcttccacgtggggctaggctgc

SEQ ID NO: 3629184 - DNA, 25 bp, Homo sapien
tctcccgagagtgttcacgcctctt

SEQ ID NO: 3629185 - DNA, 25 bp, Homo sapien
acagccatcgcaggcctgccacagt

SEQ ID NO: 3629186 - DNA, 25 bp, Homo sapien
agtgttcacgcctcttccacgtggg

SEQ ID NO: 3629187 - DNA, 25 bp, Homo sapien
ctgagaaccattagcgtacatccac

SEQ ID NO: 3629188 - DNA, 25 bp, Homo sapien
tcacagaggtcggagctgagaacca

SEQ ID NO: 3629189 - DNA, 25 bp, Homo sapien
gagctgagaaccattagcgtacatc

SEQ ID NO: 3629190 - DNA, 25 bp, Homo sapien
ttaatcacagaggtcggagctgaga

SEQ ID NO: 3629191 - DNA, 25 bp, Homo sapien
tgacgttcagataaaaccaatcagc

SEQ ID NO: 3629192 - DNA, 25 bp, Homo sapien
tgtgtgacgttcagataaaaccaat

SEQ ID NO: 3629193 - DNA, 25 bp, Homo sapien
aaacccttttgtgtgacgttcagat

SEQ ID NO: 3629194 - DNA, 25 bp, Homo sapien
agataaaaccaatcagcatgttctg

SEQ ID NO: 3629195 - DNA, 25 bp, Homo sapien
cagggtccagagtgtttagagtctt

SEQ ID NO: 3629196 - DNA, 25 bp, Homo sapien
ccagcagggtccagagtgtttagag

SEQ ID NO: 3629197 - DNA, 25 bp, Homo sapien
agcagggtccagagtgtttagagtc

SEQ ID NO: 3629198 - DNA, 25 bp, Homo sapien
gccccagcagggtccagagtgttta

SEQ ID NO: 3629199 - DNA, 25 bp, Homo sapien
gagtggtatcactgggtcacggtca

SEQ ID NO: 3629200 - DNA, 25 bp, Homo sapien
agtggtatcactgggtcacggtcac

SEQ ID NO: 3629201 - DNA, 25 bp, Homo sapien
gctgcccactggagagtggtatcac

SEQ ID NO: 3629202 - DNA, 25 bp, Homo sapien
ctgcccactggagagtggtatcact

SEQ ID NO: 3629203 - DNA, 25 bp, Homo sapien
gtttatcgattgcaagaccccagag

SEQ ID NO: 3629204 - DNA, 25 bp, Homo sapien
gaccttcgagtagacaagcttccgg

SEQ ID NO: 3629205 - DNA, 25 bp, Homo sapien
tgataacagaacacagcggacttgg

SEQ ID NO: 3629206 - DNA, 25 bp, Homo sapien
ggagataccctgagcaacgttgaaa

SEQ ID NO: 3629207 - DNA, 25 bp, Homo sapien
aagtgccacggcaaagacttcggcg

SEQ ID NO: 3629208 - DNA, 25 bp, Homo sapien
agtgccacggcaaagacttcggcgt

SEQ ID NO: 3629209 - DNA, 25 bp, Homo sapien
tccaccgtagccacgcgtggaggga

SEQ ID NO: 3629210 - DNA, 25 bp, Homo sapien
gcgctgagaagttagagcaccccat

SEQ ID NO: 3629211 - DNA, 25 bp, Homo sapien
ttccagggtgctgccggcctgcgtt

SEQ ID NO: 3629212 - DNA, 25 bp, Homo sapien
ggcctgcgttggtgacggccagcgc

SEQ ID NO: 3629213 - DNA, 25 bp, Homo sapien
ggtgttactcccgtgttcacatcag

SEQ ID NO: 3629214 - DNA, 25 bp, Homo sapien
gctctgaacgcagaccagccgttcg

SEQ ID NO: 3629215 - DNA, 25 bp, Homo sapien
agtggattccccacgcgcggtgtta

SEQ ID NO: 3629216 - DNA, 25 bp, Homo sapien
gccgttcgcctcgttgcttttccag

SEQ ID NO: 3629217 - DNA, 25 bp, Homo sapien
cacgggccgacctcgtggctttgct

SEQ ID NO: 3629218 - DNA, 25 bp, Homo sapien
aggccacgggccgacctcgtggctt

SEQ ID NO: 3629219 - DNA, 25 bp, Homo sapien
cacgggcagacaggccacgggccga

SEQ ID NO: 3629220 - DNA, 25 bp, Homo sapien
ggccacgggcagacaggccacgggc

SEQ ID NO: 3629221 - DNA, 25 bp, Homo sapien
gggagctacatctgtccccgtaggc

SEQ ID NO: 3629222 - DNA, 25 bp, Homo sapien
tctgattttgggaggcgcactgctt

SEQ ID NO: 3629223 - DNA, 25 bp, Homo sapien
gaacttttaatagctgtgcgcagac

SEQ ID NO: 3629224 - DNA, 25 bp, Homo sapien
tgagtacacgcctcaacacacgtgc

SEQ ID NO: 3629225 - DNA, 25 bp, Homo sapien
gttgtgttttgttccgagggatgac

SEQ ID NO: 3629226 - DNA, 25 bp, Homo sapien
tttgttccgagggatgactgaggct

SEQ ID NO: 3629227 - DNA, 25 bp, Homo sapien
ttccgagggatgactgaggctcctg

SEQ ID NO: 3629228 - DNA, 25 bp, Homo sapien
agagtgtgtgtcgccccccgagttc

SEQ ID NO: 3629229 - DNA, 25 bp, Homo sapien
tcttcataatgcagggaggttctcc

SEQ ID NO: 3629230 - DNA, 25 bp, Homo sapien
tttctgaggcgataaccctggagtc

SEQ ID NO: 3629231 - DNA, 25 bp, Homo sapien
tctttttgactaacaggccctctgc

SEQ ID NO: 3629232 - DNA, 25 bp, Homo sapien
gttccagccgcggttacatgtaaag

SEQ ID NO: 3629233 - DNA, 25 bp, Homo sapien
gaaaatgggtagctcatcattaata

SEQ ID NO: 3629234 - DNA, 25 bp, Homo sapien
tcagtcagaaaatgggtagctcatc

SEQ ID NO: 3629235 - DNA, 25 bp, Homo sapien
taaagatgaacattcgatatcagga

SEQ ID NO: 3629236 - DNA, 25 bp, Homo sapien
gatgaacattcgatatcaggaatcc

SEQ ID NO: 3629237 - DNA, 25 bp, Homo sapien
cacaggcggtagctgtaccatgcaa

SEQ ID NO: 3629238 - DNA, 25 bp, Homo sapien
caggcggtggccataccatgtgact

SEQ ID NO: 3629239 - DNA, 25 bp, Homo sapien
gctgcaccatgtgactgcggtctgt

SEQ ID NO: 3629240 - DNA, 25 bp, Homo sapien
ggactggggtctatgttccctggaa

SEQ ID NO: 3629241 - DNA, 25 bp, Homo sapien
gcggcgcccgcggagcatggcggac

SEQ ID NO: 3629242 - DNA, 25 bp, Homo sapien
gagggcatggcgctgcccctggagg

SEQ ID NO: 3629243 - DNA, 25 bp, Homo sapien
gaggccgtgcggggcgcggcgcccg

SEQ ID NO: 3629244 - DNA, 25 bp, Homo sapien
cctggagggcatggcgctgcccctg

SEQ ID NO: 3629245 - DNA, 25 bp, Homo sapien
aggcggaggcacacggctcggcgca

SEQ ID NO: 3629246 - DNA, 25 bp, Homo sapien
ctgtttcccagctcatcgtcgaatg

SEQ ID NO: 3629247 - DNA, 25 bp, Homo sapien
ggaggcacacggctcggcgcaggaa

SEQ ID NO: 3629248 - DNA, 25 bp, Homo sapien
ttcccagctcatcgtcgaatgtcat

SEQ ID NO: 3629249 - DNA, 25 bp, Homo sapien
ggccacatgcttgtgccacccgtat

SEQ ID NO: 3629250 - DNA, 25 bp, Homo sapien
tgttgcattgaacgcagtctggagc

SEQ ID NO: 3629251 - DNA, 25 bp, Homo sapien
tgtgccacccgtatctgttgcattg

SEQ ID NO: 3629252 - DNA, 25 bp, Homo sapien
agtctggagcgaaggacgaacccac

SEQ ID NO: 3629253 - DNA, 25 bp, Homo sapien
tgcccggacacactgcttggtggat

SEQ ID NO: 3629254 - DNA, 25 bp, Homo sapien
gcctgcgggttcctggtttctgccc

SEQ ID NO: 3629255 - DNA, 25 bp, Homo sapien
ctgctcgggcgctgtaggctgggtg

SEQ ID NO: 3629256 - DNA, 25 bp, Homo sapien
cccagctgacatgtggtggttctca

SEQ ID NO: 3629257 - DNA, 25 bp, Homo sapien
gatcacacaggatcctcacccgcgg

SEQ ID NO: 3629258 - DNA, 25 bp, Homo sapien
atcacacaggatcctcacccgcggg

SEQ ID NO: 3629259 - DNA, 25 bp, Homo sapien
tcacacaggatcctcacccgcgggt

SEQ ID NO: 3629260 - DNA, 25 bp, Homo sapien
cacacaggatcctcacccgcgggtc

SEQ ID NO: 3629261 - DNA, 25 bp, Homo sapien
cacctggacgcactgcttggtggat

SEQ ID NO: 3629262 - DNA, 25 bp, Homo sapien
tgaccaccagagggaaaccaccagc

SEQ ID NO: 3629263 - DNA, 25 bp, Homo sapien
gaccaccagagggaaaccaccagcc

SEQ ID NO: 3629264 - DNA, 25 bp, Homo sapien
accaccagagggaaaccaccagccg

SEQ ID NO: 3629265 - DNA, 25 bp, Homo sapien
agccgcgtgcagagcgtgacaacct

SEQ ID NO: 3629266 - DNA, 25 bp, Homo sapien
aagccgcgtgcagagcgtgacaacc

SEQ ID NO: 3629267 - DNA, 25 bp, Homo sapien
aaaccacgtgcagcccttggtgagg

SEQ ID NO: 3629268 - DNA, 25 bp, Homo sapien
tacttgctaaattctgctttgctct

SEQ ID NO: 3629269 - DNA, 25 bp, Homo sapien
ttcctcaggaacacgctactcatgg

SEQ ID NO: 3629270 - DNA, 25 bp, Homo sapien
aaactccttgagaaaccacgtgcag

SEQ ID NO: 3629271 - DNA, 25 bp, Homo sapien
cggagacccgagcaagagtgaatga

SEQ ID NO: 3629272 - DNA, 25 bp, Homo sapien
cccgagcaagagtgaatgattttca

SEQ ID NO: 3629273 - DNA, 25 bp, Homo sapien
gagacccgagcaagagtgaatgatt

SEQ ID NO: 3629274 - DNA, 25 bp, Homo sapien
gacccgagcaagagtgaatgatttt

SEQ ID NO: 3629275 - DNA, 25 bp, Homo sapien
gttgggtcagagaaatggtgttctt

SEQ ID NO: 3629276 - DNA, 25 bp, Homo sapien
tgttgggtcagagaaatggtgttct

SEQ ID NO: 3629277 - DNA, 25 bp, Homo sapien
cctcaaccatccaggtaggggtgga

SEQ ID NO: 3629278 - DNA, 25 bp, Homo sapien
ggagcctggaaagctaaagctgacc

SEQ ID NO: 3629279 - DNA, 25 bp, Homo sapien
gacggcacgaggaacacatctgcaa

SEQ ID NO: 3629280 - DNA, 25 bp, Homo sapien
gaccatcagacactgcctcaaccat

SEQ ID NO: 3629281 - DNA, 25 bp, Homo sapien
ggcacccaaatccttcgtgtataaa

SEQ ID NO: 3629282 - DNA, 25 bp, Homo sapien
cccaaatccttcgtgtataaagcat

SEQ ID NO: 3629283 - DNA, 25 bp, Homo sapien
gatgcttttccacggcacccaaatc

SEQ ID NO: 3629284 - DNA, 25 bp, Homo sapien
cacggcacccaaatccttcgtgtat

SEQ ID NO: 3629285 - DNA, 25 bp, Homo sapien
cagtttctggatgttcgggtatgta

SEQ ID NO: 3629286 - DNA, 25 bp, Homo sapien
ggaccctttgcaggcagtttctgga

SEQ ID NO: 3629287 - DNA, 25 bp, Homo sapien
tgggaacgtgagctgtggacccttt

SEQ ID NO: 3629288 - DNA, 25 bp, Homo sapien
tgaataacctggacacccgaggtgg

SEQ ID NO: 3629289 - DNA, 25 bp, Homo sapien
tagtgcagtgagcagatgccttctc

SEQ ID NO: 3629290 - DNA, 25 bp, Homo sapien
gagccgtctgattcctccacgtgga

SEQ ID NO: 3629291 - DNA, 25 bp, Homo sapien
tttccggccctgctgcggacactag

SEQ ID NO: 3629292 - DNA, 25 bp, Homo sapien
ccacgtggacctgggtttccacaca

SEQ ID NO: 3629293 - DNA, 25 bp, Homo sapien
tgtttcaagtcagatctatgcatgc

SEQ ID NO: 3629294 - DNA, 25 bp, Homo sapien
cagaggtgagcccagacgttcataa

SEQ ID NO: 3629295 - DNA, 25 bp, Homo sapien
tccatgatgtcctggcacttttcaa

SEQ ID NO: 3629296 - DNA, 25 bp, Homo sapien
tgaggtcttgtttaagtcttatgaa

SEQ ID NO: 3629297 - DNA, 25 bp, Homo sapien
gaggtaacgagcccacgcagcctgt

SEQ ID NO: 3629298 - DNA, 25 bp, Homo sapien
atgaggtaacgagcccacgcagcct

SEQ ID NO: 3629299 - DNA, 25 bp, Homo sapien
tgaggtaacgagcccacgcagcctg

SEQ ID NO: 3629300 - DNA, 25 bp, Homo sapien
catgaggtaacgagcccacgcagcc

SEQ ID NO: 3629301 - DNA, 25 bp, Homo sapien
caggtcaggaccctcacccgtggta

SEQ ID NO: 3629302 - DNA, 25 bp, Homo sapien
ctggtgctctcacgtggaagcaggt

SEQ ID NO: 3629303 - DNA, 25 bp, Homo sapien
gctctcacgtggaagcaggtcagga

SEQ ID NO: 3629304 - DNA, 25 bp, Homo sapien
ccagggccacggagctggctgagca

SEQ ID NO: 3629305 - DNA, 25 bp, Homo sapien
tcctgccactacaggctgccacact

SEQ ID NO: 3629306 - DNA, 25 bp, Homo sapien
aaaatgaccaggagtagagagggag

SEQ ID NO: 3629307 - DNA, 25 bp, Homo sapien
cagttcccagcagctccgttcctgc

SEQ ID NO: 3629308 - DNA, 25 bp, Homo sapien
ctggctggggcgaatcagcgcctct

SEQ ID NO: 3629309 - DNA, 25 bp, Homo sapien
aagatgctttcaccagctccccggg

SEQ ID NO: 3629310 - DNA, 25 bp, Homo sapien
tgctcaggtctccactgggcagtgt

SEQ ID NO: 3629311 - DNA, 25 bp, Homo sapien
tgggcagtgtcatccaagatgcttt

SEQ ID NO: 3629312 - DNA, 25 bp, Homo sapien
gggccaggtccgcacccggactgct

SEQ ID NO: 3629313 - DNA, 25 bp, Homo sapien
gagcctttggccttgcagatcacac

SEQ ID NO: 3629314 - DNA, 25 bp, Homo sapien
tgagcctttggccttgcagatcaca

SEQ ID NO: 3629315 - DNA, 25 bp, Homo sapien
ctgcctgtctcagagtggacggtcc

SEQ ID NO: 3629316 - DNA, 25 bp, Homo sapien
cggtcccagggtggacggcggcgct

SEQ ID NO: 3629317 - DNA, 25 bp, Homo sapien
gcctgtctcagagtggacggtccca

SEQ ID NO: 3629318 - DNA, 25 bp, Homo sapien
ctgtctcagagtggacggtcccagg

SEQ ID NO: 3629319 - DNA, 25 bp, Homo sapien
tgagggcagcttgtggatcagagcg

SEQ ID NO: 3629320 - DNA, 25 bp, Homo sapien
cagcttgtggatcagagcggcagtc

SEQ ID NO: 3629321 - DNA, 25 bp, Homo sapien
gggcagcttgtggatcagagcggca

SEQ ID NO: 3629322 - DNA, 25 bp, Homo sapien
gaatgagggcagcttgtggatcaga

SEQ ID NO: 3629323 - DNA, 25 bp, Homo sapien
agccttctgtgcagaaagcagattg

SEQ ID NO: 3629324 - DNA, 25 bp, Homo sapien
tgcagaaagcagattgattcctgtg

SEQ ID NO: 3629325 - DNA, 25 bp, Homo sapien
ccttctgtgcagaaagcagattgat

SEQ ID NO: 3629326 - DNA, 25 bp, Homo sapien
tctgtgcagaaagcagattgattcc

SEQ ID NO: 3629327 - DNA, 25 bp, Homo sapien
gtcagagtcggcactgaccctccag

SEQ ID NO: 3629328 - DNA, 25 bp, Homo sapien
ttgcacactggtaaggagcacctct

SEQ ID NO: 3629329 - DNA, 25 bp, Homo sapien
ggagaccccacgtgctcaggcagct

SEQ ID NO: 3629330 - DNA, 25 bp, Homo sapien
aaaattgggcagaaatgactgtcac

SEQ ID NO: 3629331 - DNA, 25 bp, Homo sapien
cgcccatgggagtcagcagaggctg

SEQ ID NO: 3629332 - DNA, 25 bp, Homo sapien
tgggagtcagcagaggctggaagtc

SEQ ID NO: 3629333 - DNA, 25 bp, Homo sapien
agcagaggctggaagtcgtggttgc

SEQ ID NO: 3629334 - DNA, 25 bp, Homo sapien
cacaggcgcccatgggagtcagcag

SEQ ID NO: 3629335 - DNA, 25 bp, Homo sapien
gcagtgcgtttaggtagggcctcaa

SEQ ID NO: 3629336 - DNA, 25 bp, Homo sapien
ccaaacggctgcacagagggtctga

SEQ ID NO: 3629337 - DNA, 25 bp, Homo sapien
caaacatggagcagcgtcgtgtgcg

SEQ ID NO: 3629338 - DNA, 25 bp, Homo sapien
cggacaaggcgaagtcatccagcaa

SEQ ID NO: 3629339 - DNA, 25 bp, Homo sapien
gtgctgcgccccagggatctagcaa

SEQ ID NO: 3629340 - DNA, 25 bp, Homo sapien
caatggctgtgatttcgcccgtggc

SEQ ID NO: 3629341 - DNA, 25 bp, Homo sapien
gatgtctcgagtctggacgctgcct

SEQ ID NO: 3629342 - DNA, 25 bp, Homo sapien
ggtgagcctgtttcccgcagtctgt

SEQ ID NO: 3629343 - DNA, 25 bp, Homo sapien
tcgaagggcgcatgggccttgcaaa

SEQ ID NO: 3629344 - DNA, 25 bp, Homo sapien
ctggcgaggaaacgcagcggcaaca

SEQ ID NO: 3629345 - DNA, 25 bp, Homo sapien
tgcaaggtaggacttccccgcggcc

SEQ ID NO: 3629346 - DNA, 25 bp, Homo sapien
gcagcggcaacatctgcctgcgcag

SEQ ID NO: 3629347 - DNA, 25 bp, Homo sapien
gctcttggccgttggctgtgtcaca

SEQ ID NO: 3629348 - DNA, 25 bp, Homo sapien
tttttgggaggaccgacgccctgca

SEQ ID NO: 3629349 - DNA, 25 bp, Homo sapien
gcctggcccctagatttctgatgaa

SEQ ID NO: 3629350 - DNA, 25 bp, Homo sapien
tgcagtctgatcaatacccgcagct

SEQ ID NO: 3629351 - DNA, 25 bp, Homo sapien
gaccgacattgggtaggaccgacat

SEQ ID NO: 3629352 - DNA, 25 bp, Homo sapien
gactgacattgcgtaggaccgacat

SEQ ID NO: 3629353 - DNA, 25 bp, Homo sapien
gaccgacattgcgtaggaccgacat

SEQ ID NO: 3629354 - DNA, 25 bp, Homo sapien
tccaacattgggtaggactgacatt

SEQ ID NO: 3629355 - DNA, 25 bp, Homo sapien
gaccgacattgggtaggaccgacat

SEQ ID NO: 3629356 - DNA, 25 bp, Homo sapien
gactgacattgcgtaggaccgacat

SEQ ID NO: 3629357 - DNA, 25 bp, Homo sapien
gaccgacattgcgtaggaccgacat

SEQ ID NO: 3629358 - DNA, 25 bp, Homo sapien
taggaccgacattgcgtaggaccga

SEQ ID NO: 3629359 - DNA, 25 bp, Homo sapien
gaccgacattgggtaggaccgacat

SEQ ID NO: 3629360 - DNA, 25 bp, Homo sapien
gactgacattgcgtaggaccgacat

SEQ ID NO: 3629361 - DNA, 25 bp, Homo sapien
gaccgacattgcgtaggaccgacat

SEQ ID NO: 3629362 - DNA, 25 bp, Homo sapien
taggaccgacattgcgtaggaccga

SEQ ID NO: 3629363 - DNA, 25 bp, Homo sapien
gaccgacattgggtaggaccgacat

SEQ ID NO: 3629364 - DNA, 25 bp, Homo sapien
gactgacattgcgtaggaccgacat

SEQ ID NO: 3629365 - DNA, 25 bp, Homo sapien
gaccgacattgcgtaggaccgacat

SEQ ID NO: 3629366 - DNA, 25 bp, Homo sapien
taggaccgacattgcgtaggaccga

SEQ ID NO: 3629367 - DNA, 25 bp, Homo sapien
tgggttcgtggtgttgacactgcaa

SEQ ID NO: 3629368 - DNA, 25 bp, Homo sapien
gtgggttcgtggtgttgacactgca

SEQ ID NO: 3629369 - DNA, 25 bp, Homo sapien
gggttcgtggtgttgacactgcaag

SEQ ID NO: 3629370 - DNA, 25 bp, Homo sapien
gcccctccgaggctctggagctgcc

SEQ ID NO: 3629371 - DNA, 25 bp, Homo sapien
gaatccaggcggctggccggaggtt

SEQ ID NO: 3629372 - DNA, 25 bp, Homo sapien
tggagctgcctcataggaagtaaac

SEQ ID NO: 3629373 - DNA, 25 bp, Homo sapien
ctcgctcagagcagagaccagaatc

SEQ ID NO: 3629374 - DNA, 25 bp, Homo sapien
gtccgcctttttccgcgcagcagcc

SEQ ID NO: 3629375 - DNA, 25 bp, Homo sapien
tgccgccgtctgtgtcggcctctcc

SEQ ID NO: 3629376 - DNA, 25 bp, Homo sapien
tgcttgcgccctggatccccgtccg

SEQ ID NO: 3629377 - DNA, 25 bp, Homo sapien
tgcatccccgctcaaaagcagggag

SEQ ID NO: 3629378 - DNA, 25 bp, Homo sapien
ttcaagtcccggcttgcgcgcccct

SEQ ID NO: 3629379 - DNA, 25 bp, Homo sapien
cagctccgcagagggcgctccgcag

SEQ ID NO: 3629380 - DNA, 25 bp, Homo sapien
gcagctccgcagagggcgctccgca

SEQ ID NO: 3629381 - DNA, 25 bp, Homo sapien
gcagaggccgccaggccgcgtccac

SEQ ID NO: 3629382 - DNA, 25 bp, Homo sapien
tgggcaggggacgcttccgggtcca

SEQ ID NO: 3629383 - DNA, 25 bp, Homo sapien
ggacgcttccgggtccattcctcgc

SEQ ID NO: 3629384 - DNA, 25 bp, Homo sapien
ccattcctcgcccggtgtccagacg

SEQ ID NO: 3629385 - DNA, 25 bp, Homo sapien
ggtccattcctcgcccggtgtccag

SEQ ID NO: 3629386 - DNA, 25 bp, Homo sapien
tgttcccttgctttaaacgctccaa

SEQ ID NO: 3629387 - DNA, 25 bp, Homo sapien
ttgtggtagtgagcgcgccctgttc

SEQ ID NO: 3629388 - DNA, 25 bp, Homo sapien
ccttgctttaaacgctccaatggtt

SEQ ID NO: 3629389 - DNA, 25 bp, Homo sapien
cgagggttcttttgtggtagtgagc

SEQ ID NO: 3629390 - DNA, 25 bp, Homo sapien
ttccgagagtccagcccggccatct

SEQ ID NO: 3629391 - DNA, 25 bp, Homo sapien
caaatcctgggccagtcttggttct

SEQ ID NO: 3629392 - DNA, 25 bp, Homo sapien
tcttccccagatccttccgagagtc

SEQ ID NO: 3629393 - DNA, 25 bp, Homo sapien
ccgacgcagacaggcaagcccaaat

SEQ ID NO: 3629394 - DNA, 25 bp, Homo sapien
ctttctacttcgtgcaatgccgcac

SEQ ID NO: 3629395 - DNA, 25 bp, Homo sapien
gtgcaatgccgcactttccatgcca

SEQ ID NO: 3629396 - DNA, 25 bp, Homo sapien
tacttcgtgcaatgccgcactttcc

SEQ ID NO: 3629397 - DNA, 25 bp, Homo sapien
tctacttcgtgcaatgccgcacttt

SEQ ID NO: 3629398 - DNA, 25 bp, Homo sapien
tctctaaagcattggattgaaccaa

SEQ ID NO: 3629399 - DNA, 25 bp, Homo sapien
tgctaaaatcccgtgtttctctaaa

SEQ ID NO: 3629400 - DNA, 25 bp, Homo sapien
taatgctaaaatcccgtgtttctct

SEQ ID NO: 3629401 - DNA, 25 bp, Homo sapien
ttctctaaagcattggattgaacca

SEQ ID NO: 3629402 - DNA, 25 bp, Homo sapien
gggtcagcaggtcccacaagagagc

SEQ ID NO: 3629403 - DNA, 25 bp, Homo sapien
ctgtcagaggtttacgtattccgcc

SEQ ID NO: 3629404 - DNA, 25 bp, Homo sapien
cctggatggaagtgaccaccgtgta

SEQ ID NO: 3629405 - DNA, 25 bp, Homo sapien
caccgtgtatctgtggattgtctgc

SEQ ID NO: 3629406 - DNA, 25 bp, Homo sapien
tcagagtgagcattaacatcagatg

SEQ ID NO: 3629407 - DNA, 25 bp, Homo sapien
gaaacacgggcctcatatatgattg

SEQ ID NO: 3629408 - DNA, 25 bp, Homo sapien
catcagatgctcatgcggagacagc

SEQ ID NO: 3629409 - DNA, 25 bp, Homo sapien
gctgtttggagctaacgttgggtct

SEQ ID NO: 3629410 - DNA, 25 bp, Homo sapien
gactggaatcaagcttacatgtaaa

SEQ ID NO: 3629411 - DNA, 25 bp, Homo sapien
catgtggtcgctcctcgagggtttc

SEQ ID NO: 3629412 - DNA, 25 bp, Homo sapien
tgttctgcttcattaagactggaat

SEQ ID NO: 3629413 - DNA, 25 bp, Homo sapien
ccttttgtgtcattcagtgtaaaac

SEQ ID NO: 3629414 - DNA, 25 bp, Homo sapien
tcacatacagcgatgagagtggctt

SEQ ID NO: 3629415 - DNA, 25 bp, Homo sapien
taagcatgattgaccctgccagagg

SEQ ID NO: 3629416 - DNA, 25 bp, Homo sapien
aaaccagttcagtgtatccgggcga

SEQ ID NO: 3629417 - DNA, 25 bp, Homo sapien
gcatcttcgctacggaagggccagg

SEQ ID NO: 3629418 - DNA, 25 bp, Homo sapien
tactcagttactgcgtggatctcct

SEQ ID NO: 3629419 - DNA, 25 bp, Homo sapien
catatgaaaaaggtaccctacagag

SEQ ID NO: 3629420 - DNA, 25 bp, Homo sapien
gatctcctgtcgctagttttactga

SEQ ID NO: 3629421 - DNA, 25 bp, Homo sapien
tattaaatacgtgcacttggagtgt

SEQ ID NO: 3629422 - DNA, 25 bp, Homo sapien
tctcctcagtgaaaaccgtacgtct

SEQ ID NO: 3629423 - DNA, 25 bp, Homo sapien
agaacgtccccgcagatgaatgagg

SEQ ID NO: 3629424 - DNA, 25 bp, Homo sapien
gagagtccacatcttcagctccgtg

SEQ ID NO: 3629425 - DNA, 25 bp, Homo sapien
cgcagagcgctgtgttaaccacaaa

SEQ ID NO: 3629426 - DNA, 25 bp, Homo sapien
tggatgtcaccttagcctcactgtg

SEQ ID NO: 3629427 - DNA, 25 bp, Homo sapien
ccttcaattgagtgaggaagccctt

SEQ ID NO: 3629428 - DNA, 25 bp, Homo sapien
tgcccctgctgttcgtgagtgctgg

SEQ ID NO: 3629429 - DNA, 25 bp, Homo sapien
taatgtctagactcaggctgccctg

SEQ ID NO: 3629430 - DNA, 25 bp, Homo sapien
tcagccgaggaactgcgtactcgca

SEQ ID NO: 3629431 - DNA, 25 bp, Homo sapien
tactcgcaaaatgactgccagcttg

SEQ ID NO: 3629432 - DNA, 25 bp, Homo sapien
aagcgggttgatagatcattttcca

SEQ ID NO: 3629433 - DNA, 25 bp, Homo sapien
tgtgccatgtgtccttcagccgagg

SEQ ID NO: 3629434 - DNA, 25 bp, Homo sapien
ggtggagcctggagcgggtaaccag

SEQ ID NO: 3629435 - DNA, 25 bp, Homo sapien
catggctgctggcctggcgccctcc

SEQ ID NO: 3629436 - DNA, 25 bp, Homo sapien
agcgggtaaccaggcagatcagcat

SEQ ID NO: 3629437 - DNA, 25 bp, Homo sapien
atggctgctggcctggcgccctcca

SEQ ID NO: 3629438 - DNA, 25 bp, Homo sapien
ggctctatgcgtatctctgtcactt

SEQ ID NO: 3629439 - DNA, 25 bp, Homo sapien
aacaaggagggctctatgcgtatct

SEQ ID NO: 3629440 - DNA, 25 bp, Homo sapien
caaggagggctctatgcgtatctct

SEQ ID NO: 3629441 - DNA, 25 bp, Homo sapien
ggagggctctatgcgtatctctgtc

SEQ ID NO: 3629442 - DNA, 25 bp, Homo sapien
gatttagacccctggacgtgagcct

SEQ ID NO: 3629443 - DNA, 25 bp, Homo sapien
ccctggacgtgagcctgtatgccca

SEQ ID NO: 3629444 - DNA, 25 bp, Homo sapien
tgccaaagaatggatttagacccct

SEQ ID NO: 3629445 - DNA, 25 bp, Homo sapien
gcagcgctacgcgacgtcgttctac

SEQ ID NO: 3629446 - DNA, 25 bp, Homo sapien
cagcccagaacatgatatgatagtt

SEQ ID NO: 3629447 - DNA, 25 bp, Homo sapien
cagaacatgatatgatagttttcac

SEQ ID NO: 3629448 - DNA, 25 bp, Homo sapien
tgtgcagttatcagcccagaacatg

SEQ ID NO: 3629449 - DNA, 25 bp, Homo sapien
gttatcagcccagaacatgatatga

SEQ ID NO: 3629450 - DNA, 25 bp, Homo sapien
tgtaattcacagagcaccatgcctc

SEQ ID NO: 3629451 - DNA, 25 bp, Homo sapien
taattctacacagtcataagcctca

SEQ ID NO: 3629452 - DNA, 25 bp, Homo sapien
tgcctctttaccttacagccatgct

SEQ ID NO: 3629453 - DNA, 25 bp, Homo sapien
tagctgaccctctaactttactaga

SEQ ID NO: 3629454 - DNA, 25 bp, Homo sapien
tgagaatgccgcattgccagacccg

SEQ ID NO: 3629455 - DNA, 25 bp, Homo sapien
ccagggccatgagaatgccgcattg

SEQ ID NO: 3629456 - DNA, 25 bp, Homo sapien
acccgcaggagtcggacccagcaga

SEQ ID NO: 3629457 - DNA, 25 bp, Homo sapien
cgcattgccagacccgcaggagtcg

SEQ ID NO: 3629458 - DNA, 25 bp, Homo sapien
gaggtggctggccaccacgcagacc

SEQ ID NO: 3629459 - DNA, 25 bp, Homo sapien
tctgagcttttggatcctggtcctg

SEQ ID NO: 3629460 - DNA, 25 bp, Homo sapien
tggaattgggcacacggagtatgct

SEQ ID NO: 3629461 - DNA, 25 bp, Homo sapien
tgctggctgtcagtcgggctctgtt

SEQ ID NO: 3629462 - DNA, 25 bp, Homo sapien
caggaacatgtgaccgctgtgcaag

SEQ ID NO: 3629463 - DNA, 25 bp, Homo sapien
aactggtcttgacacctttgtggaa

SEQ ID NO: 3629464 - DNA, 25 bp, Homo sapien
ctgtttgtctggtctatgccagtac

SEQ ID NO: 3629465 - DNA, 25 bp, Homo sapien
catgttgacatttagttgtcccagc

SEQ ID NO: 3629466 - DNA, 25 bp, Homo sapien
atgtaacggtttctttctggactct

SEQ ID NO: 3629467 - DNA, 25 bp, Homo sapien
caaacttgttcatcgatcatactca

SEQ ID NO: 3629468 - DNA, 25 bp, Homo sapien
tcagcttccaaacttgttcatcgat

SEQ ID NO: 3629469 - DNA, 25 bp, Homo sapien
gcttccaaacttgttcatcgatcat

SEQ ID NO: 3629470 - DNA, 25 bp, Homo sapien
tccaaacttgttcatcgatcatact

SEQ ID NO: 3629471 - DNA, 25 bp, Homo sapien
caccaggatcaacgctgtctgtgga

SEQ ID NO: 3629472 - DNA, 25 bp, Homo sapien
ggatcaacgctgtctgtggatccat

SEQ ID NO: 3629473 - DNA, 25 bp, Homo sapien
tgtcaccaggatcaacgctgtctgt

SEQ ID NO: 3629474 - DNA, 25 bp, Homo sapien
cgtggcctgtcaccaggatcaacgc

SEQ ID NO: 3629475 - DNA, 25 bp, Homo sapien
gaactgttttataccacatgacaac

SEQ ID NO: 3629476 - DNA, 25 bp, Homo sapien
tcattttgaccatacaaagatctct

SEQ ID NO: 3629477 - DNA, 25 bp, Homo sapien
tagtaactcgaatttccagtgaaaa

SEQ ID NO: 3629478 - DNA, 25 bp, Homo sapien
taactcttagtaactcgaatttcca

SEQ ID NO: 3629479 - DNA, 25 bp, Homo sapien
ttaagcctaataggtctctctcgga

SEQ ID NO: 3629480 - DNA, 25 bp, Homo sapien
gggaaatgtgtcaaatattgaaaag

SEQ ID NO: 3629481 - DNA, 25 bp, Homo sapien
caattaagcctaataggtctctctc

SEQ ID NO: 3629482 - DNA, 25 bp, Homo sapien
tgaaaaggatgttgttcaaaacaga

SEQ ID NO: 3629483 - DNA, 25 bp, Homo sapien
ttcagacctgtgccgggaaacccca

SEQ ID NO: 3629484 - DNA, 25 bp, Homo sapien
gtaattggtaggattcagacctgtg

SEQ ID NO: 3629485 - DNA, 25 bp, Homo sapien
tctagttcattgctttaaccattca

SEQ ID NO: 3629486 - DNA, 25 bp, Homo sapien
tgctttaaccattcagtcctgactt

SEQ ID NO: 3629487 - DNA, 25 bp, Homo sapien
cttggtgttgcaaacgttgtagcca

SEQ ID NO: 3629488 - DNA, 25 bp, Homo sapien
ttggtgttgcaaacgttgtagccat

SEQ ID NO: 3629489 - DNA, 25 bp, Homo sapien
gctgtcatggctcctatttcaacca

SEQ ID NO: 3629490 - DNA, 25 bp, Homo sapien
gtttttctggtgaagctgtcatggc

SEQ ID NO: 3629491 - DNA, 25 bp, Homo sapien
ttctttcccatcaaccccattgccc

SEQ ID NO: 3629492 - DNA, 25 bp, Homo sapien
ccataaaggatttgcagttcagtga

SEQ ID NO: 3629493 - DNA, 25 bp, Homo sapien
tgtttggaacgctcctgttttcctg

SEQ ID NO: 3629494 - DNA, 25 bp, Homo sapien
ggcatcgcattcctttagaaccagg

SEQ ID NO: 3629495 - DNA, 25 bp, Homo sapien
aagttgggatcctgttgctcggtgt

SEQ ID NO: 3629496 - DNA, 25 bp, Homo sapien
ggacgggtcatcagggcatcgcatt

SEQ ID NO: 3629497 - DNA, 25 bp, Homo sapien
aactgatcaggggtaggtagagtat

SEQ ID NO: 3629498 - DNA, 25 bp, Homo sapien
tcttccataaactgatcaggggtag

SEQ ID NO: 3629499 - DNA, 25 bp, Homo sapien
tagagtatgctgctatagttcggag

SEQ ID NO: 3629500 - DNA, 25 bp, Homo sapien
gagtatgctgctatagttcggagtc

SEQ ID NO: 3629501 - DNA, 25 bp, Homo sapien
actagcgtgtgaagggtcttctttc

SEQ ID NO: 3629502 - DNA, 25 bp, Homo sapien
ggatgtcttaggataaggcaggaaa

SEQ ID NO: 3629503 - DNA, 25 bp, Homo sapien
gtgtagactcatcaactccctcaat

SEQ ID NO: 3629504 - DNA, 25 bp, Homo sapien
ccttcaaaaatgctcggaaagtgag

SEQ ID NO: 3629505 - DNA, 25 bp, Homo sapien
ctctcctgcgctcccgcacttctcc

SEQ ID NO: 3629506 - DNA, 25 bp, Homo sapien
tcccgcacttctcccgtcatgcctt

SEQ ID NO: 3629507 - DNA, 25 bp, Homo sapien
tgccttctggtccaaatggttccat

SEQ ID NO: 3629508 - DNA, 25 bp, Homo sapien
acttctcccgtcatgccttctggtc

SEQ ID NO: 3629509 - DNA, 25 bp, Homo sapien
gacttccatgaacacaataggtgac

SEQ ID NO: 3629510 - DNA, 25 bp, Homo sapien
gggttggagaaggacttccatgaac

SEQ ID NO: 3629511 - DNA, 25 bp, Homo sapien
tccatgaacacaataggtgacaact

SEQ ID NO: 3629512 - DNA, 25 bp, Homo sapien
gaaggacttccatgaacacaatagg

SEQ ID NO: 3629513 - DNA, 25 bp, Homo sapien
cctgagctgtctccatcatggactt

SEQ ID NO: 3629514 - DNA, 25 bp, Homo sapien
tatgatcttcctgtatgggttcccc

SEQ ID NO: 3629515 - DNA, 25 bp, Homo sapien
tatgagtgacacttctagcatggga

SEQ ID NO: 3629516 - DNA, 25 bp, Homo sapien
aaagagaaccgacttccaggacaga

SEQ ID NO: 3629517 - DNA, 25 bp, Homo sapien
tgggttccccactgattcaaagctg

SEQ ID NO: 3629518 - DNA, 25 bp, Homo sapien
gacaaggaagaacgacctggcagtg

SEQ ID NO: 3629519 - DNA, 25 bp, Homo sapien
catggtgttagcaaacgtaaactcc

SEQ ID NO: 3629520 - DNA, 25 bp, Homo sapien
caaaggcccgagttgaaggtctgag

SEQ ID NO: 3629521 - DNA, 25 bp, Homo sapien
cgaggacatgctccaatcagcagca

SEQ ID NO: 3629522 - DNA, 25 bp, Homo sapien
attagccggaaacctggcaggagcc

SEQ ID NO: 3629523 - DNA, 25 bp, Homo sapien
gagcctcctgtcctgcagatcctgt

SEQ ID NO: 3629524 - DNA, 25 bp, Homo sapien
ttggtggattagccggaaacctggc

SEQ ID NO: 3629525 - DNA, 25 bp, Homo sapien
ccggaaacctggcaggagcctcctg

SEQ ID NO: 3629526 - DNA, 25 bp, Homo sapien
gttggcttgggtataatttgatgga

SEQ ID NO: 3629527 - DNA, 25 bp, Homo sapien
gatggaatctgtcagggttcgtgga

SEQ ID NO: 3629528 - DNA, 25 bp, Homo sapien
gctgccgtcacgctcagctgtaggg

SEQ ID NO: 3629529 - DNA, 25 bp, Homo sapien
taacgtaactgtgtagtttgtggtg

SEQ ID NO: 3629530 - DNA, 25 bp, Homo sapien
tccccagcaaggctacacaggtgct

SEQ ID NO: 3629531 - DNA, 25 bp, Homo sapien
ccttaggctgcaggatgcttaaaca

SEQ ID NO: 3629532 - DNA, 25 bp, Homo sapien
gctacacaggtgcttttcttggcag

SEQ ID NO: 3629533 - DNA, 25 bp, Homo sapien
ttcttggcagccatcaagagaaagg

SEQ ID NO: 3629534 - DNA, 25 bp, Homo sapien
gattgtgcctcggaagtgaatcagc

SEQ ID NO: 3629535 - DNA, 25 bp, Homo sapien
aagtgaatcagcaccaccgccttct

SEQ ID NO: 3629536 - DNA, 25 bp, Homo sapien
tgtccttgggacgttccgctgagca

SEQ ID NO: 3629537 - DNA, 25 bp, Homo sapien
tgagcaccaccgtgggagacgccga

SEQ ID NO: 3629538 - DNA, 25 bp, Homo sapien
aggtcacgaactcccgtcagctgca

SEQ ID NO: 3629539 - DNA, 25 bp, Homo sapien
caggtcacgaactcccgtcagctgc

SEQ ID NO: 3629540 - DNA, 25 bp, Homo sapien
gcattgtgtcgacacttcatctcag

SEQ ID NO: 3629541 - DNA, 25 bp, Homo sapien
tcatctcagtcgttattagttccca

SEQ ID NO: 3629542 - DNA, 25 bp, Homo sapien
ttagttcccagtcactgcccgacgg

SEQ ID NO: 3629543 - DNA, 25 bp, Homo sapien
tccatcagcattgtgtcgacacttc

SEQ ID NO: 3629544 - DNA, 25 bp, Homo sapien
gtcaagttgggtccatccttgggag

SEQ ID NO: 3629545 - DNA, 25 bp, Homo sapien
tgtttgtcaagttgggtccatcctt

SEQ ID NO: 3629546 - DNA, 25 bp, Homo sapien
gacacagggagctgttgatgtttgt

SEQ ID NO: 3629547 - DNA, 25 bp, Homo sapien
cgactgtccacctttgggacacagg

SEQ ID NO: 3629548 - DNA, 25 bp, Homo sapien
gtcagagctgctgataaggggtgtt

SEQ ID NO: 3629549 - DNA, 25 bp, Homo sapien
ctgataaggggtgtttctatgggtt

SEQ ID NO: 3629550 - DNA, 25 bp, Homo sapien
tttctatgggttgagtacgagtcat

SEQ ID NO: 3629551 - DNA, 25 bp, Homo sapien
gtttctatgggttgagtacgagtca

SEQ ID NO: 3629552 - DNA, 25 bp, Homo sapien
tgtgctaatgaacttctgcccttgc

SEQ ID NO: 3629553 - DNA, 25 bp, Homo sapien
gtgctaatgaacttctgcccttgct

SEQ ID NO: 3629554 - DNA, 25 bp, Homo sapien
ctaatgaacttctgcccttgctcac

SEQ ID NO: 3629555 - DNA, 25 bp, Homo sapien
gctaatgaacttctgcccttgctca

SEQ ID NO: 3629556 - DNA, 25 bp, Homo sapien
tcgttgctgtaattctgatggatga

SEQ ID NO: 3629557 - DNA, 25 bp, Homo sapien
gatgaaaggtacattttgcagaact

SEQ ID NO: 3629558 - DNA, 25 bp, Homo sapien
gcagaactgaacttcctgcctgaaa

SEQ ID NO: 3629559 - DNA, 25 bp, Homo sapien
actgaacttcctgcctgaaaggagc

SEQ ID NO: 3629560 - DNA, 25 bp, Homo sapien
gaacttccgccgtcgggcgcaggtg

SEQ ID NO: 3629561 - DNA, 25 bp, Homo sapien
ccggcagccgtatgcacgcgggtac

SEQ ID NO: 3629562 - DNA, 25 bp, Homo sapien
ccgtcgggcgcaggtgggacttcca

SEQ ID NO: 3629563 - DNA, 25 bp, Homo sapien
cacgcgggtacttggcactcccgga

SEQ ID NO: 3629564 - DNA, 25 bp, Homo sapien
cttggcggacggcaccaccgtaatt

SEQ ID NO: 3629565 - DNA, 25 bp, Homo sapien
ctcagtctttgggtggaccacggtc

SEQ ID NO: 3629566 - DNA, 25 bp, Homo sapien
gaatccgaaggctcatcacggacca

SEQ ID NO: 3629567 - DNA, 25 bp, Homo sapien
gggctacgccaaacccagaatccga

SEQ ID NO: 3629568 - DNA, 25 bp, Homo sapien
aacgcttcctccctcacatgtcggg

SEQ ID NO: 3629569 - DNA, 25 bp, Homo sapien
gtctaatgcgatgtatttggtaatg

SEQ ID NO: 3629570 - DNA, 25 bp, Homo sapien
ttgagtcttcgacaacgtgaggtct

SEQ ID NO: 3629571 - DNA, 25 bp, Homo sapien
agtctatcatggtaattctgttgag

SEQ ID NO: 3629572 - DNA, 25 bp, Homo sapien
ggttggagtctttcgttgagtcttc

SEQ ID NO: 3629573 - DNA, 25 bp, Homo sapien
ttgccccagagccaacttgtaatga

SEQ ID NO: 3629574 - DNA, 25 bp, Homo sapien
tccttgtcgtagagaatattcatca

SEQ ID NO: 3629575 - DNA, 25 bp, Homo sapien
aatcagcatagaacggatgaatatc

SEQ ID NO: 3629576 - DNA, 25 bp, Homo sapien
tattcatcaaatcagcatagaacgg

SEQ ID NO: 3629577 - DNA, 25 bp, Homo sapien
cagggccgcacgcttcagctgtttg

SEQ ID NO: 3629578 - DNA, 25 bp, Homo sapien
aaatactccaaactctgcttctgcc

SEQ ID NO: 3629579 - DNA, 25 bp, Homo sapien
tgatcactgtgcacatccgtcccag

SEQ ID NO: 3629580 - DNA, 25 bp, Homo sapien
tgcagcggtagagagagtcgccata

SEQ ID NO: 3629581 - DNA, 25 bp, Homo sapien
atgctagcacggttcccgcggatgc

SEQ ID NO: 3629582 - DNA, 25 bp, Homo sapien
aagtcctcaacaaggacgcatcctc

SEQ ID NO: 3629583 - DNA, 25 bp, Homo sapien
gttcccgcggatgcgtgacaagcac

SEQ ID NO: 3629584 - DNA, 25 bp, Homo sapien
cagcaggatgctagcacggttcccg

SEQ ID NO: 3629585 - DNA, 25 bp, Homo sapien
cgtttgggctacaacatgggttact

SEQ ID NO: 3629586 - DNA, 25 bp, Homo sapien
tctgtaacaaacacggctccagggt

SEQ ID NO: 3629587 - DNA, 25 bp, Homo sapien
cagtccaggcctatggtgatattca

SEQ ID NO: 3629588 - DNA, 25 bp, Homo sapien
caagatgacattagggaaccagtgc

SEQ ID NO: 3629589 - DNA, 25 bp, Homo sapien
ggcaaacgggataaatgctgacgca

SEQ ID NO: 3629590 - DNA, 25 bp, Homo sapien
ttcccaacatttgggtacccacaca

SEQ ID NO: 3629591 - DNA, 25 bp, Homo sapien
ctggtattcggatcaatggttggca

SEQ ID NO: 3629592 - DNA, 25 bp, Homo sapien
caacatttgggtacccacacaaaag

SEQ ID NO: 3629593 - DNA, 25 bp, Homo sapien
gtcggtcactctgcgggaccgtcgt

SEQ ID NO: 3629594 - DNA, 25 bp, Homo sapien
acgacggtcccgcagagtgaccgac

SEQ ID NO: 3629595 - DNA, 25 bp, Homo sapien
aggagctcggcgtgctcaggcaccg

SEQ ID NO: 3629596 - DNA, 25 bp, Homo sapien
caagaggagctcggcgtgctcaggc

SEQ ID NO: 3629597 - DNA, 25 bp, Homo sapien
gaggagctcggcgtgctcaggcacc

SEQ ID NO: 3629598 - DNA, 25 bp, Homo sapien
gagctcggcgtgctcaggcaccggg

SEQ ID NO: 3629599 - DNA, 25 bp, Homo sapien
gacttggttgtgaacgcatagggct

SEQ ID NO: 3629600 - DNA, 25 bp, Homo sapien
tggacatccacgtctgctctcgtca

SEQ ID NO: 3629601 - DNA, 25 bp, Homo sapien
ctgccaacgtagatacttataatcc

SEQ ID NO: 3629602 - DNA, 25 bp, Homo sapien
caaacagagacttggttgtgaacgc

SEQ ID NO: 3629603 - DNA, 25 bp, Homo sapien
aaatccatcacatacaggaccgcag

SEQ ID NO: 3629604 - DNA, 25 bp, Homo sapien
ctccagagggtggtccaggatccca

SEQ ID NO: 3629605 - DNA, 25 bp, Homo sapien
cgatggtgttcctatcctccagagg

SEQ ID NO: 3629606 - DNA, 25 bp, Homo sapien
agtgatggcctgcatctcgatggtg

SEQ ID NO: 3629607 - DNA, 25 bp, Homo sapien
agctattctcttcacatcacatttg

SEQ ID NO: 3629608 - DNA, 25 bp, Homo sapien
cagctattctcttcacatcacattt

SEQ ID NO: 3629609 - DNA, 25 bp, Homo sapien
atttgttggctacaactatgagagg

SEQ ID NO: 3629610 - DNA, 25 bp, Homo sapien
acatttgttggctacaactatgaga

SEQ ID NO: 3629611 - DNA, 25 bp, Homo sapien
ctctattacagggaatccttcagac

SEQ ID NO: 3629612 - DNA, 25 bp, Homo sapien
tggtctctattacagggaatccttc

SEQ ID NO: 3629613 - DNA, 25 bp, Homo sapien
tgctggtctctattacagggaatcc

SEQ ID NO: 3629614 - DNA, 25 bp, Homo sapien
cagggtgctggtctctattacaggg

SEQ ID NO: 3629615 - DNA, 25 bp, Homo sapien
gttgggatagccaggtgcagtctat

SEQ ID NO: 3629616 - DNA, 25 bp, Homo sapien
tccactcgatgagccaaaagcctat

SEQ ID NO: 3629617 - DNA, 25 bp, Homo sapien
tctattcagcacctcattcacttta

SEQ ID NO: 3629618 - DNA, 25 bp, Homo sapien
ttttggtttccactcgatgagccaa

SEQ ID NO: 3629619 - DNA, 25 bp, Homo sapien
tcaccttctcgatcctttatgtaag

SEQ ID NO: 3629620 - DNA, 25 bp, Homo sapien
taagcaagaaggtgaaactgaggcc

SEQ ID NO: 3629621 - DNA, 25 bp, Homo sapien
tatccacctgcgagtgtgtgaagct

SEQ ID NO: 3629622 - DNA, 25 bp, Homo sapien
ggaaaaggcacgcagacagcacctg

SEQ ID NO: 3629623 - DNA, 25 bp, Homo sapien
gccaccactccttcagggatgaaag

SEQ ID NO: 3629624 - DNA, 25 bp, Homo sapien
ccaccactccttcagggatgaaagg

SEQ ID NO: 3629625 - DNA, 25 bp, Homo sapien
cccatttccagctcaagatctcgtt

SEQ ID NO: 3629626 - DNA, 25 bp, Homo sapien
tcccatttccagctcaagatctcgt

SEQ ID NO: 3629627 - DNA, 25 bp, Homo sapien
tgatggctggatcaatataatcagc

SEQ ID NO: 3629628 - DNA, 25 bp, Homo sapien
ttcccagatttctggtatcttatca

SEQ ID NO: 3629629 - DNA, 25 bp, Homo sapien
gatttctggtatcttatcatgtttt

SEQ ID NO: 3629630 - DNA, 25 bp, Homo sapien
atcagctatattatggccttcccag

SEQ ID NO: 3629631 - DNA, 25 bp, Homo sapien
ctatcttccagcaatactactataa

SEQ ID NO: 3629632 - DNA, 25 bp, Homo sapien
aggcccagctgagccgaagccatgc

SEQ ID NO: 3629633 - DNA, 25 bp, Homo sapien
tgctatcttccagcaatactactat

SEQ ID NO: 3629634 - DNA, 25 bp, Homo sapien
atcttccagcaatactactataata

SEQ ID NO: 3629635 - DNA, 25 bp, Homo sapien
atctccaccagagtctcggggtggg

SEQ ID NO: 3629636 - DNA, 25 bp, Homo sapien
gcatctccaccagagtctcggggtg

SEQ ID NO: 3629637 - DNA, 25 bp, Homo sapien
gagaatgaagaggcccagcatctcc

SEQ ID NO: 3629638 - DNA, 25 bp, Homo sapien
ctccaccagagtctcggggtgggga

SEQ ID NO: 3629639 - DNA, 25 bp, Homo sapien
tagcaactaatggaggacacggtct

SEQ ID NO: 3629640 - DNA, 25 bp, Homo sapien
cagaatctgctatggaggcacaggg

SEQ ID NO: 3629641 - DNA, 25 bp, Homo sapien
aatgtgaactcaatgacggagggcc

SEQ ID NO: 3629642 - DNA, 25 bp, Homo sapien
tagcatgtttcagacagctcagctg

SEQ ID NO: 3629643 - DNA, 25 bp, Homo sapien
atggagttgtaatgaagcaaaatta

SEQ ID NO: 3629644 - DNA, 25 bp, Homo sapien
ttaaaaatggagttgtaatgaagca

SEQ ID NO: 3629645 - DNA, 25 bp, Homo sapien
taaaaatggagttgtaatgaagcaa

SEQ ID NO: 3629646 - DNA, 25 bp, Homo sapien
aaaatggagttgtaatgaagcaaaa

SEQ ID NO: 3629647 - DNA, 25 bp, Homo sapien
caacttctttttctctcgaatttgc

SEQ ID NO: 3629648 - DNA, 25 bp, Homo sapien
tcagatacactgtcatactctccag

SEQ ID NO: 3629649 - DNA, 25 bp, Homo sapien
ttcttagcagttcgcggcatcctgg

SEQ ID NO: 3629650 - DNA, 25 bp, Homo sapien
ttgctttgccagctgtcggatttcc

SEQ ID NO: 3629651 - DNA, 25 bp, Homo sapien
ttatcgtccatgtcaacaccaagac

SEQ ID NO: 3629652 - DNA, 25 bp, Homo sapien
cgtctttatcgtccatgtcaacacc

SEQ ID NO: 3629653 - DNA, 25 bp, Homo sapien
aacaccaagactacgcatctccttc

SEQ ID NO: 3629654 - DNA, 25 bp, Homo sapien
tctttatcgtccatgtcaacaccaa

SEQ ID NO: 3629655 - DNA, 25 bp, Homo sapien
cgggggagcagagtcttcccgcttt

SEQ ID NO: 3629656 - DNA, 25 bp, Homo sapien
gatgctccgggatcttcttgcctgg

SEQ ID NO: 3629657 - DNA, 25 bp, Homo sapien
aacgtcacgtggagttcgagagcaa

SEQ ID NO: 3629658 - DNA, 25 bp, Homo sapien
ttgacatccctaagaccagaaacgt

SEQ ID NO: 3629659 - DNA, 25 bp, Homo sapien
caagtgcttgggcttcatatcaaac

SEQ ID NO: 3629660 - DNA, 25 bp, Homo sapien
tgggcttcatatcaaacacgtgtct

SEQ ID NO: 3629661 - DNA, 25 bp, Homo sapien
gtgtctatccgcctcccctttcttc

SEQ ID NO: 3629662 - DNA, 25 bp, Homo sapien
cccaaccgattcatcttcttctgag

SEQ ID NO: 3629663 - DNA, 25 bp, Homo sapien
cgaagccacgccaaccaaacggata

SEQ ID NO: 3629664 - DNA, 25 bp, Homo sapien
tcagtttatacagagctccaatttc

SEQ ID NO: 3629665 - DNA, 25 bp, Homo sapien
aaacagcaacactctagcgaagcca

SEQ ID NO: 3629666 - DNA, 25 bp, Homo sapien
tgaaaccatactgtgccaaaccagg

SEQ ID NO: 3629667 - DNA, 25 bp, Homo sapien
gcgtattttaagcacgggattccga

SEQ ID NO: 3629668 - DNA, 25 bp, Homo sapien
cacacctatatagggttaaccatag

SEQ ID NO: 3629669 - DNA, 25 bp, Homo sapien
ggattccgacacactcataaacgtg

SEQ ID NO: 3629670 - DNA, 25 bp, Homo sapien
cataaacgtgtttgctcccagctct

SEQ ID NO: 3629671 - DNA, 25 bp, Homo sapien
ccatagcgactataactaaaccaaa

SEQ ID NO: 3629672 - DNA, 25 bp, Homo sapien
gactataactaaaccaaaacatgag

SEQ ID NO: 3629673 - DNA, 25 bp, Homo sapien
ttttatttggccaaatccatagcga

SEQ ID NO: 3629674 - DNA, 25 bp, Homo sapien
ggccaaatccatagcgactataact

SEQ ID NO: 3629675 - DNA, 25 bp, Homo sapien
caggcagacgcaccattgaggcaat

SEQ ID NO: 3629676 - DNA, 25 bp, Homo sapien
aacatgtaacttcagggacgggcca

SEQ ID NO: 3629677 - DNA, 25 bp, Homo sapien
tatggtctcagccaagtgactcgac

SEQ ID NO: 3629678 - DNA, 25 bp, Homo sapien
tctgaacccggatcccagtgaaacg

SEQ ID NO: 3629679 - DNA, 25 bp, Homo sapien
tttacattagcgttgttaacactgc

SEQ ID NO: 3629680 - DNA, 25 bp, Homo sapien
gcgttgttaacactgcaccaatttc

SEQ ID NO: 3629681 - DNA, 25 bp, Homo sapien
cattagcgttgttaacactgcacca

SEQ ID NO: 3629682 - DNA, 25 bp, Homo sapien
tgtgttttacattagcgttgttaac

SEQ ID NO: 3629683 - DNA, 25 bp, Homo sapien
caagaatcgaatcctgatacagcag

SEQ ID NO: 3629684 - DNA, 25 bp, Homo sapien
aaagtcacgtttcctggtgagtccg

SEQ ID NO: 3629685 - DNA, 25 bp, Homo sapien
cagaggtcggacacgaaagtcacgt

SEQ ID NO: 3629686 - DNA, 25 bp, Homo sapien
gcaccgagccttcagcgttgtcttg

SEQ ID NO: 3629687 - DNA, 25 bp, Homo sapien
gacaggccagcacgaccaagtggcc

SEQ ID NO: 3629688 - DNA, 25 bp, Homo sapien
gtcagcacgctgaaacctaagacac

SEQ ID NO: 3629689 - DNA, 25 bp, Homo sapien
tcagggcccagagaacgtcagcacg

SEQ ID NO: 3629690 - DNA, 25 bp, Homo sapien
gagacaggccagcacgaccaagtgg

SEQ ID NO: 3629691 - DNA, 25 bp, Homo sapien
gtggaggacaatagcacatcacaga

SEQ ID NO: 3629692 - DNA, 25 bp, Homo sapien
tatgtggaggacaatagcacatcac

SEQ ID NO: 3629693 - DNA, 25 bp, Homo sapien
caaacaacccccatgtctttgtcat

SEQ ID NO: 3629694 - DNA, 25 bp, Homo sapien
cattatgtggaggacaatagcacat

SEQ ID NO: 3629695 - DNA, 25 bp, Homo sapien
cactcccacgtcaaaggctgttcat

SEQ ID NO: 3629696 - DNA, 25 bp, Homo sapien
ggtcccataaggctacattgcttgt

SEQ ID NO: 3629697 - DNA, 25 bp, Homo sapien
gcttgtgtacagacagttccctctc

SEQ ID NO: 3629698 - DNA, 25 bp, Homo sapien
tcccttcaggtaatggtgggccagg

SEQ ID NO: 3629699 - DNA, 25 bp, Homo sapien
acacgccctgcgtgggttggggctc

SEQ ID NO: 3629700 - DNA, 25 bp, Homo sapien
gaagacacgccctgcgtgggttggg

SEQ ID NO: 3629701 - DNA, 25 bp, Homo sapien
ccctgcgtgggttggggctccactc

SEQ ID NO: 3629702 - DNA, 25 bp, Homo sapien
cgccctgcgtgggttggggctccac

SEQ ID NO: 3629703 - DNA, 25 bp, Homo sapien
tgcatcttggtatcagattggccag

SEQ ID NO: 3629704 - DNA, 25 bp, Homo sapien
ggccactgcatcttggtatcagatt

SEQ ID NO: 3629705 - DNA, 25 bp, Homo sapien
gcatcttggtatcagattggccagg

SEQ ID NO: 3629706 - DNA, 25 bp, Homo sapien
cactgcatcttggtatcagattggc

SEQ ID NO: 3629707 - DNA, 25 bp, Homo sapien
agtccaggtcgtacccgcagtgcgt

SEQ ID NO: 3629708 - DNA, 25 bp, Homo sapien
gggacaagtccaggtcgtacccgca

SEQ ID NO: 3629709 - DNA, 25 bp, Homo sapien
cagtgcgtccctgtgggaactgccc

SEQ ID NO: 3629710 - DNA, 25 bp, Homo sapien
acaagtccaggtcgtacccgcagtg

SEQ ID NO: 3629711 - DNA, 25 bp, Homo sapien
ggaccactgtcctacagagtcagga

SEQ ID NO: 3629712 - DNA, 25 bp, Homo sapien
ttgagtcccactcggtaagagttgc

SEQ ID NO: 3629713 - DNA, 25 bp, Homo sapien
tgggctggataaaacccctgtggtg

SEQ ID NO: 3629714 - DNA, 25 bp, Homo sapien
tgtgacacccacagttatgccggat

SEQ ID NO: 3629715 - DNA, 25 bp, Homo sapien
taaagtgagtttacacaatgagtgc

SEQ ID NO: 3629716 - DNA, 25 bp, Homo sapien
ggaacctacctacaaatgtagtctg

SEQ ID NO: 3629717 - DNA, 25 bp, Homo sapien
taagaactagtaagcaattgggcaa

SEQ ID NO: 3629718 - DNA, 25 bp, Homo sapien
aatgagtgcaacctaatacaacagc

SEQ ID NO: 3629719 - DNA, 25 bp, Homo sapien
gattcatagaagagggactagccct

SEQ ID NO: 3629720 - DNA, 25 bp, Homo sapien
tgatagggaacttgactgccggaaa

SEQ ID NO: 3629721 - DNA, 25 bp, Homo sapien
cgagaacattgagaaaggtgctgct

SEQ ID NO: 3629722 - DNA, 25 bp, Homo sapien
gactagccctgacatacagcagcag

SEQ ID NO: 3629723 - DNA, 25 bp, Homo sapien
ctgggcggtgtggtgtagacagtgg

SEQ ID NO: 3629724 - DNA, 25 bp, Homo sapien
ggcggtgtggtgtagacagtggagc

SEQ ID NO: 3629725 - DNA, 25 bp, Homo sapien
gtggtgtagacagtggagcagctgg

SEQ ID NO: 3629726 - DNA, 25 bp, Homo sapien
tgtggtgtagacagtggagcagctg

SEQ ID NO: 3629727 - DNA, 25 bp, Homo sapien
gcagctgggctgtgtggtgtagaca

SEQ ID NO: 3629728 - DNA, 25 bp, Homo sapien
ctgtgtggtgtagacagtggagcag

SEQ ID NO: 3629729 - DNA, 25 bp, Homo sapien
tgtgtggtgtagacagtggagcagc

SEQ ID NO: 3629730 - DNA, 25 bp, Homo sapien
tgtggtgtagacagtggagcagctg

SEQ ID NO: 3629731 - DNA, 25 bp, Homo sapien
ctgtgtggtgtagacagtagacagt

SEQ ID NO: 3629732 - DNA, 25 bp, Homo sapien
gctgtgtggtgtagacagtagacag

SEQ ID NO: 3629733 - DNA, 25 bp, Homo sapien
ggctgtgtggtgtagacagtagaca

SEQ ID NO: 3629734 - DNA, 25 bp, Homo sapien
agctgggctgtgtggtgtagacagt

SEQ ID NO: 3629735 - DNA, 25 bp, Homo sapien
gggctgtgtggtgtagacaaaggac

SEQ ID NO: 3629736 - DNA, 25 bp, Homo sapien
agctgggctgtgtggtgtagacaaa

SEQ ID NO: 3629737 - DNA, 25 bp, Homo sapien
ctgggctgtgtggtgtagacaaagg

SEQ ID NO: 3629738 - DNA, 25 bp, Homo sapien
gagttgcgagtctccccttagagaa

SEQ ID NO: 3629739 - DNA, 25 bp, Homo sapien
tcgtggaactggaaaccgagtcgca

SEQ ID NO: 3629740 - DNA, 25 bp, Homo sapien
tcagaaacaagcgtagacagcatcg

SEQ ID NO: 3629741 - DNA, 25 bp, Homo sapien
gacagcatcgtcagaaacacgagcg

SEQ ID NO: 3629742 - DNA, 25 bp, Homo sapien
tgtgctcaaagcgggcgccatccgg

SEQ ID NO: 3629743 - DNA, 25 bp, Homo sapien
tgatcaggtactgtggacgggcggc

SEQ ID NO: 3629744 - DNA, 25 bp, Homo sapien
ggcggttgtctgtggccggaggctg

SEQ ID NO: 3629745 - DNA, 25 bp, Homo sapien
acgggcggcggagttcgggagacag

SEQ ID NO: 3629746 - DNA, 25 bp, Homo sapien
cttaaaggcgccagagcccgcggtc

SEQ ID NO: 3629747 - DNA, 25 bp, Homo sapien
aggttcccggtgcttcgcgcgtctg

SEQ ID NO: 3629748 - DNA, 25 bp, Homo sapien
cttcgcgcgtctgccgttgtcacag

SEQ ID NO: 3629749 - DNA, 25 bp, Homo sapien
agagcccgcggtcacggctcaggtt

SEQ ID NO: 3629750 - DNA, 25 bp, Homo sapien
gagggcttcctccatggaacgcgag

SEQ ID NO: 3629751 - DNA, 25 bp, Homo sapien
gcgagcctcgagacgtctgacgtta

SEQ ID NO: 3629752 - DNA, 25 bp, Homo sapien
tctgacgttaggcaccgttcgcagc

SEQ ID NO: 3629753 - DNA, 25 bp, Homo sapien
ttggtccagccatgcggaggtcgct

SEQ ID NO: 3629754 - DNA, 25 bp, Homo sapien
ctagacatacgagaactccccgtgc

SEQ ID NO: 3629755 - DNA, 25 bp, Homo sapien
tagacatacgagaactccccgtgca

SEQ ID NO: 3629756 - DNA, 25 bp, Homo sapien
cggcgactttgctccgccttggtcc

SEQ ID NO: 3629757 - DNA, 25 bp, Homo sapien
gaacactcccaacatagcgtggaac

SEQ ID NO: 3629758 - DNA, 25 bp, Homo sapien
tggtcccggtcgcagacaccgcaga

SEQ ID NO: 3629759 - DNA, 25 bp, Homo sapien
cagacaccgcagaaaggccatcgtt

SEQ ID NO: 3629760 - DNA, 25 bp, Homo sapien
cattttaagagagtgcaagcgtcct

SEQ ID NO: 3629761 - DNA, 25 bp, Homo sapien
ccaggttcatctcacaagttcagta

SEQ ID NO: 3629762 - DNA, 25 bp, Homo sapien
cacttcggtaagctgagccaggtgg

SEQ ID NO: 3629763 - DNA, 25 bp, Homo sapien
gcttcagctgcgcatacatttcacg

SEQ ID NO: 3629764 - DNA, 25 bp, Homo sapien
aaatataacttatgttagtgtcgtg

SEQ ID NO: 3629765 - DNA, 25 bp, Homo sapien
aaaaatataacttatgttagtgtcg

SEQ ID NO: 3629766 - DNA, 25 bp, Homo sapien
aaaatataacttatgttagtgtcgt

SEQ ID NO: 3629767 - DNA, 25 bp, Homo sapien
tgcgcatgcgggaggccagattttc

SEQ ID NO: 3629768 - DNA, 25 bp, Homo sapien
ttcccaagaacgcactgacagcagt

SEQ ID NO: 3629769 - DNA, 25 bp, Homo sapien
tgctatacgttgtttcacttaaaag

SEQ ID NO: 3629770 - DNA, 25 bp, Homo sapien
gagatctgtcaacacataaaacaaa

SEQ ID NO: 3629771 - DNA, 25 bp, Homo sapien
taaatatgttcgtgccacttcaagg

SEQ ID NO: 3629772 - DNA, 25 bp, Homo sapien
aacttggtgactttatgtggaagcc

SEQ ID NO: 3629773 - DNA, 25 bp, Homo sapien
gctcagctgatggttagcagtaaaa

SEQ ID NO: 3629774 - DNA, 25 bp, Homo sapien
ccgcttttactggaaagaactgaca

SEQ ID NO: 3629775 - DNA, 25 bp, Homo sapien
tactaagactcatttttgcgcatgg

SEQ ID NO: 3629776 - DNA, 25 bp, Homo sapien
agctgtttgacatgtcgcttcctaa

SEQ ID NO: 3629777 - DNA, 25 bp, Homo sapien
gaaccacccctatataagacagcaa

SEQ ID NO: 3629778 - DNA, 25 bp, Homo sapien
cctgacatagggcaacaatgctgaa

SEQ ID NO: 3629779 - DNA, 25 bp, Homo sapien
ccggggcgcggtccgcctgaggcct

SEQ ID NO: 3629780 - DNA, 25 bp, Homo sapien
tccatctgccccgtagcccggcagc

SEQ ID NO: 3629781 - DNA, 25 bp, Homo sapien
ggcgcggtccgcctgaggcctgaga

SEQ ID NO: 3629782 - DNA, 25 bp, Homo sapien
gtccatctgccccgtagcccggcag

SEQ ID NO: 3629783 - DNA, 25 bp, Homo sapien
cccacaaccccaacctggcgctaat

SEQ ID NO: 3629784 - DNA, 25 bp, Homo sapien
ccgccagtgagtccctacgacgcgg

SEQ ID NO: 3629785 - DNA, 25 bp, Homo sapien
gaagacgcgcaggacaccgctgtct

SEQ ID NO: 3629786 - DNA, 25 bp, Homo sapien
cgctgtctccgcactgacgcgaccc

SEQ ID NO: 3629787 - DNA, 25 bp, Homo sapien
tctcctctctgaagggcctcccaag

SEQ ID NO: 3629788 - DNA, 25 bp, Homo sapien
tctgaagggcctcccaagtgcttcc

SEQ ID NO: 3629789 - DNA, 25 bp, Homo sapien
gagaagaaaggccattctcctctct

SEQ ID NO: 3629790 - DNA, 25 bp, Homo sapien
ccactctttggagagaagaaaggcc

SEQ ID NO: 3629791 - DNA, 25 bp, Homo sapien
gattttagttcagggcaaatgccca

SEQ ID NO: 3629792 - DNA, 25 bp, Homo sapien
caaatgcccaaagtgaacagcctaa

SEQ ID NO: 3629793 - DNA, 25 bp, Homo sapien
cacactgctgttgagacgtggccag

SEQ ID NO: 3629794 - DNA, 25 bp, Homo sapien
gacgaattcctagtgggctgagaca

SEQ ID NO: 3629795 - DNA, 25 bp, Homo sapien
tatgataccctagcagaaaggaggc

SEQ ID NO: 3629796 - DNA, 25 bp, Homo sapien
gcatcttctgttaaagtcccacggg

SEQ ID NO: 3629797 - DNA, 25 bp, Homo sapien
tacgtctgaaggtgtatggcttgcc

SEQ ID NO: 3629798 - DNA, 25 bp, Homo sapien
catctctacgttggcatcagtggtc

SEQ ID NO: 3629799 - DNA, 25 bp, Homo sapien
ttacatcttacatcattacagtaca

SEQ ID NO: 3629800 - DNA, 25 bp, Homo sapien
gttacatcttacatcattacagtac

SEQ ID NO: 3629801 - DNA, 25 bp, Homo sapien
ggttacatcttacatcattacagta

SEQ ID NO: 3629802 - DNA, 25 bp, Homo sapien
ggtagtgtcctggtcactcctgcaa

SEQ ID NO: 3629803 - DNA, 25 bp, Homo sapien
taggaggtagtgtcctggtcactcc

SEQ ID NO: 3629804 - DNA, 25 bp, Homo sapien
ctaggaggtagtgtcctggtcactc

SEQ ID NO: 3629805 - DNA, 25 bp, Homo sapien
gtgtcctggtcactcctgcaataag

SEQ ID NO: 3629806 - DNA, 25 bp, Homo sapien
gaaaggctatgggatttgcgcttct

SEQ ID NO: 3629807 - DNA, 25 bp, Homo sapien
tgctccgagctgttagttcttcgta

SEQ ID NO: 3629808 - DNA, 25 bp, Homo sapien
taacatgtctcttggcagtcccgtc

SEQ ID NO: 3629809 - DNA, 25 bp, Homo sapien
tttggcgagcagtcgaacaacttgc

SEQ ID NO: 3629810 - DNA, 25 bp, Homo sapien
gttaccatgagatgcagtcaccgcc

SEQ ID NO: 3629811 - DNA, 25 bp, Homo sapien
gacaactctagaacatgccagcagg

SEQ ID NO: 3629812 - DNA, 25 bp, Homo sapien
aaaagaacactttcaccccaggcag

SEQ ID NO: 3629813 - DNA, 25 bp, Homo sapien
tctcctaagtgctgtgttgaacggg

SEQ ID NO: 3629814 - DNA, 25 bp, Homo sapien
actccgaatcactgctcattgaaca

SEQ ID NO: 3629815 - DNA, 25 bp, Homo sapien
tgctcattgaacaaatgagctccgt

SEQ ID NO: 3629816 - DNA, 25 bp, Homo sapien
ggtcccactccgaatcactgctcat

SEQ ID NO: 3629817 - DNA, 25 bp, Homo sapien
accggtcccactccgaatcactgct

SEQ ID NO: 3629818 - DNA, 25 bp, Homo sapien
gaggacttgtcccactagagggcaa

SEQ ID NO: 3629819 - DNA, 25 bp, Homo sapien
acgtggacgtcgcagttctcggcaa

SEQ ID NO: 3629820 - DNA, 25 bp, Homo sapien
gaaagggcgtcactctacactgtct

SEQ ID NO: 3629821 - DNA, 25 bp, Homo sapien
gagaaaactcaagacactactgccg

SEQ ID NO: 3629822 - DNA, 25 bp, Homo sapien
ggagcctgctagatacagccatgtg

SEQ ID NO: 3629823 - DNA, 25 bp, Homo sapien
tacattgtcaagtgtggtccagcaa

SEQ ID NO: 3629824 - DNA, 25 bp, Homo sapien
ggtccagcaagtaagcaggtcctga

SEQ ID NO: 3629825 - DNA, 25 bp, Homo sapien
tgcttggacccaccagtcaacagga

SEQ ID NO: 3629826 - DNA, 25 bp, Homo sapien
aaactctaagtacaaatatgctttt

SEQ ID NO: 3629827 - DNA, 25 bp, Homo sapien
aaaaactctaagtacaaatatgctt

SEQ ID NO: 3629828 - DNA, 25 bp, Homo sapien
aaaactctaagtacaaatatgcttt

SEQ ID NO: 3629829 - DNA, 25 bp, Homo sapien
attctctttctatttgaccaaacag

SEQ ID NO: 3629830 - DNA, 25 bp, Homo sapien
aagtgtactgcgaaccgaggaaggc

SEQ ID NO: 3629831 - DNA, 25 bp, Homo sapien
cgaaccgaggaaggcagtttagaat

SEQ ID NO: 3629832 - DNA, 25 bp, Homo sapien
cagttccagaagtgtactgcgaacc

SEQ ID NO: 3629833 - DNA, 25 bp, Homo sapien
gagtcctcgtgggaattataccaga

SEQ ID NO: 3629834 - DNA, 25 bp, Homo sapien
aataagtttaagtttgctacagcag

SEQ ID NO: 3629835 - DNA, 25 bp, Homo sapien
gcaagatgacaaatctgtgttagtt

SEQ ID NO: 3629836 - DNA, 25 bp, Homo sapien
tgactatggataggtaaagctataa

SEQ ID NO: 3629837 - DNA, 25 bp, Homo sapien
gaagacactgctatcagggtctcaa

SEQ ID NO: 3629838 - DNA, 25 bp, Homo sapien
cacacttgctacactgtggaagaca

SEQ ID NO: 3629839 - DNA, 25 bp, Homo sapien
gattgattctgcacgattaaaaaca

SEQ ID NO: 3629840 - DNA, 25 bp, Homo sapien
gacagcacccgcatttcaacatagt

SEQ ID NO: 3629841 - DNA, 25 bp, Homo sapien
catcaatcgcttgtccttcagcagc

SEQ ID NO: 3629842 - DNA, 25 bp, Homo sapien
gtccttcagcagctaaacgttcatt

SEQ ID NO: 3629843 - DNA, 25 bp, Homo sapien
agctctgctccatcaatcgcttgtc

SEQ ID NO: 3629844 - DNA, 25 bp, Homo sapien
cattaagagtgtcgatttctctacg

SEQ ID NO: 3629845 - DNA, 25 bp, Homo sapien
gaacaggaacaagaaccgagctcct

SEQ ID NO: 3629846 - DNA, 25 bp, Homo sapien
tgaccctagtgacacagagccatgg

SEQ ID NO: 3629847 - DNA, 25 bp, Homo sapien
gatagttcgaggtctgctgacagca

SEQ ID NO: 3629848 - DNA, 25 bp, Homo sapien
ccagaaaggctcgtttgaccctagt

SEQ ID NO: 3629849 - DNA, 25 bp, Homo sapien
ggaagccttgtaagtggtcttcagt

SEQ ID NO: 3629850 - DNA, 25 bp, Homo sapien
tggtcttcagtttctgggagagctg

SEQ ID NO: 3629851 - DNA, 25 bp, Homo sapien
cttgctggtggaagccttgtaagtg

SEQ ID NO: 3629852 - DNA, 25 bp, Homo sapien
tcttcagtttctgggagagctggct

SEQ ID NO: 3629853 - DNA, 25 bp, Homo sapien
ctgcacaccttaaccaccacatgat

SEQ ID NO: 3629854 - DNA, 25 bp, Homo sapien
accttaaccaccacatgatggctca

SEQ ID NO: 3629855 - DNA, 25 bp, Homo sapien
gcacaccttaaccaccacatgatgg

SEQ ID NO: 3629856 - DNA, 25 bp, Homo sapien
gtacacatctgcacaccttaaccac

SEQ ID NO: 3629857 - DNA, 25 bp, Homo sapien
gtgcggtggtgtaagctcggctcac

SEQ ID NO: 3629858 - DNA, 25 bp, Homo sapien
agtgcggtggtgtaagctcggctca

SEQ ID NO: 3629859 - DNA, 25 bp, Homo sapien
gagtgcggtggtgtaagctcggctc

SEQ ID NO: 3629860 - DNA, 25 bp, Homo sapien
ggtaagctactatgtaaatgcctgc

SEQ ID NO: 3629861 - DNA, 25 bp, Homo sapien
gatagtaatccatcacagacaaatg

SEQ ID NO: 3629862 - DNA, 25 bp, Homo sapien
gactatcaagtgaggacaaacggca

SEQ ID NO: 3629863 - DNA, 25 bp, Homo sapien
tccactttaagaaggtcagcacgag

SEQ ID NO: 3629864 - DNA, 25 bp, Homo sapien
tctcgatgtcgtggtcttaaagctg

SEQ ID NO: 3629865 - DNA, 25 bp, Homo sapien
gatgccgtcccggtggccgatgtac

SEQ ID NO: 3629866 - DNA, 25 bp, Homo sapien
gccgatgtactccttcacgagctgg

SEQ ID NO: 3629867 - DNA, 25 bp, Homo sapien
tggctgtgtcttggccacgctgaca

SEQ ID NO: 3629868 - DNA, 25 bp, Homo sapien
tggcctgcgtacttgactaggcact

SEQ ID NO: 3629869 - DNA, 25 bp, Homo sapien
tacttgactaggcacttccctgtct

SEQ ID NO: 3629870 - DNA, 25 bp, Homo sapien
gcgtacttgactaggcacttccctg

SEQ ID NO: 3629871 - DNA, 25 bp, Homo sapien
gcccacgtggcctgcgtacttgact

SEQ ID NO: 3629872 - DNA, 25 bp, Homo sapien
aagcttttccctgttattgagccca

SEQ ID NO: 3629873 - DNA, 25 bp, Homo sapien
gaaacagtaaggcttcctacacagt

SEQ ID NO: 3629874 - DNA, 25 bp, Homo sapien
tggagaaggcaacggcctctggcta

SEQ ID NO: 3629875 - DNA, 25 bp, Homo sapien
tgtcccctgacaaccgaaacagtaa

SEQ ID NO: 3629876 - DNA, 25 bp, Homo sapien
tgtgatctctgatgctaccattgtc

SEQ ID NO: 3629877 - DNA, 25 bp, Homo sapien
aggcacaaaccacacccacataaga

SEQ ID NO: 3629878 - DNA, 25 bp, Homo sapien
tcaggcctctctactccgagacaaa

SEQ ID NO: 3629879 - DNA, 25 bp, Homo sapien
taaatgttgtgggagttatgactgc

SEQ ID NO: 3629880 - DNA, 25 bp, Homo sapien
gacacctctctaaatgcagaaggca

SEQ ID NO: 3629881 - DNA, 25 bp, Homo sapien
gagacacacgcaacacgacaacgtg

SEQ ID NO: 3629882 - DNA, 25 bp, Homo sapien
gtgtgattcagggtcaagaccatct

SEQ ID NO: 3629883 - DNA, 25 bp, Homo sapien
ggtcaacttaagagatcaaaacatc

SEQ ID NO: 3629884 - DNA, 25 bp, Homo sapien
tgctctgagggatgaaatttgatag

SEQ ID NO: 3629885 - DNA, 25 bp, Homo sapien
gctctgagggatgaaatttgataga

SEQ ID NO: 3629886 - DNA, 25 bp, Homo sapien
gtgtcggcagctgcaccgcgtatct

SEQ ID NO: 3629887 - DNA, 25 bp, Homo sapien
tgcaccgcgtatctccagatatgag

SEQ ID NO: 3629888 - DNA, 25 bp, Homo sapien
gtatctccagatatgagcagtctga

SEQ ID NO: 3629889 - DNA, 25 bp, Homo sapien
gatatgagcagtctgatctccagaa

SEQ ID NO: 3629890 - DNA, 25 bp, Homo sapien
agacatcagcatcctacacattcac

SEQ ID NO: 3629891 - DNA, 25 bp, Homo sapien
gattcgcagacatcagcatcctaca

SEQ ID NO: 3629892 - DNA, 25 bp, Homo sapien
cgcagacatcagcatcctacacatt

SEQ ID NO: 3629893 - DNA, 25 bp, Homo sapien
cagattcgcagacatcagcatccta

SEQ ID NO: 3629894 - DNA, 25 bp, Homo sapien
caagatcaagccaattcaggttctg

SEQ ID NO: 3629895 - DNA, 25 bp, Homo sapien
gctctgctcttacgtgacacggaga

SEQ ID NO: 3629896 - DNA, 25 bp, Homo sapien
gtgcgggctcatccttaaagacggc

SEQ ID NO: 3629897 - DNA, 25 bp, Homo sapien
gagagattgagaacacaggtgagct

SEQ ID NO: 3629898 - DNA, 25 bp, Homo sapien
tctcatgctgaactggaatcccctg

SEQ ID NO: 3629899 - DNA, 25 bp, Homo sapien
ggcaaagtcgggaacagctcctgta

SEQ ID NO: 3629900 - DNA, 25 bp, Homo sapien
tactagggaatgcacgtcacaggga

SEQ ID NO: 3629901 - DNA, 25 bp, Homo sapien
cacacacacccgttagtatggagag

SEQ ID NO: 3629902 - DNA, 25 bp, Homo sapien
cgaggtcgggctcgtccttgtcaga

SEQ ID NO: 3629903 - DNA, 25 bp, Homo sapien
tctccacgtcgtacaggtttgccgt

SEQ ID NO: 3629904 - DNA, 25 bp, Homo sapien
cagagagtgaacgagctcggacgtc

SEQ ID NO: 3629905 - DNA, 25 bp, Homo sapien
tggacacatccccatcgaggtcggg

SEQ ID NO: 3629906 - DNA, 25 bp, Homo sapien
tgtgtgcagcagtgcgtcaactcct

SEQ ID NO: 3629907 - DNA, 25 bp, Homo sapien
agaggcggaaagtcgtgtcacggga

SEQ ID NO: 3629908 - DNA, 25 bp, Homo sapien
tcacgggaggaggtcaccacgagcc

SEQ ID NO: 3629909 - DNA, 25 bp, Homo sapien
cagtgcgtcaactcctggtcgtgcc

SEQ ID NO: 3629910 - DNA, 25 bp, Homo sapien
tccgtgtgtccctggaaaacattca

SEQ ID NO: 3629911 - DNA, 25 bp, Homo sapien
ccgtgtgtccctggaaaacattcac

SEQ ID NO: 3629912 - DNA, 25 bp, Homo sapien
ttactatggctatcgctgacggagc

SEQ ID NO: 3629913 - DNA, 25 bp, Homo sapien
gtcaggcccatgtggcggagctcat

SEQ ID NO: 3629914 - DNA, 25 bp, Homo sapien
caccgggaggtctgtattactatgg

SEQ ID NO: 3629915 - DNA, 25 bp, Homo sapien
cagtgctgcgttcagccactgacca

SEQ ID NO: 3629916 - DNA, 25 bp, Homo sapien
gaggctcacggatgtccttggcgat

SEQ ID NO: 3629917 - DNA, 25 bp, Homo sapien
ctaacacgctggacacccatcggag

SEQ ID NO: 3629918 - DNA, 25 bp, Homo sapien
ggtctgggcgctaacacgctggaca

SEQ ID NO: 3629919 - DNA, 25 bp, Homo sapien
gacacccatcggaggctcacggatg

SEQ ID NO: 3629920 - DNA, 25 bp, Homo sapien
aggcccacacccaagctgacacctg

SEQ ID NO: 3629921 - DNA, 25 bp, Homo sapien
ctcccaggcggccagctggccggac

SEQ ID NO: 3629922 - DNA, 25 bp, Homo sapien
agctggccggacagcacccagaggc

SEQ ID NO: 3629923 - DNA, 25 bp, Homo sapien
gccagctggccggacagcacccaga

SEQ ID NO: 3629924 - DNA, 25 bp, Homo sapien
ggctctgcagtggccatgcacacag

SEQ ID NO: 3629925 - DNA, 25 bp, Homo sapien
atgcacacagcatggtcaccaccat

SEQ ID NO: 3629926 - DNA, 25 bp, Homo sapien
ctctgcagtggccatgcacacagca

SEQ ID NO: 3629927 - DNA, 25 bp, Homo sapien
agtggccatgcacacagcatggtca

SEQ ID NO: 3629928 - DNA, 25 bp, Homo sapien
tctattccacatctacaggcaacgg

SEQ ID NO: 3629929 - DNA, 25 bp, Homo sapien
aaagtagggttggacagaacatgcc

SEQ ID NO: 3629930 - DNA, 25 bp, Homo sapien
tacacatctgggtctatggcagaga

SEQ ID NO: 3629931 - DNA, 25 bp, Homo sapien
caggcaacggaacgaagagaggtta

SEQ ID NO: 3629932 - DNA, 25 bp, Homo sapien
ggaaggaggtcggagaagcgcaaac

SEQ ID NO: 3629933 - DNA, 25 bp, Homo sapien
gcaggtgcaggacgtgacaccacac

SEQ ID NO: 3629934 - DNA, 25 bp, Homo sapien
cacacacaaccctgaccaagtgggt

SEQ ID NO: 3629935 - DNA, 25 bp, Homo sapien
caaccctgaccaagtgggtgggaag

SEQ ID NO: 3629936 - DNA, 25 bp, Homo sapien
tcccacggtgaacacggcagaagtc

SEQ ID NO: 3629937 - DNA, 25 bp, Homo sapien
tcaagtcccagactttcaccgtgcg

SEQ ID NO: 3629938 - DNA, 25 bp, Homo sapien
ctgttaatggcagagtccgtgcgaa

SEQ ID NO: 3629939 - DNA, 25 bp, Homo sapien
tgaaaccacgttgtctcccacggtg

SEQ ID NO: 3629940 - DNA, 25 bp, Homo sapien
ctgcattagaggacaaaggagccta

SEQ ID NO: 3629941 - DNA, 25 bp, Homo sapien
gcatgtctgccacaaacgggtcatt

SEQ ID NO: 3629942 - DNA, 25 bp, Homo sapien
caagaccaatcctcacaagaagtca

SEQ ID NO: 3629943 - DNA, 25 bp, Homo sapien
tgatccaacctggttttaggctaag

SEQ ID NO: 3629944 - DNA, 25 bp, Homo sapien
tttttggccgacacatacattgatc

SEQ ID NO: 3629945 - DNA, 25 bp, Homo sapien
ccaggcgcactcctgacatatcaaa

SEQ ID NO: 3629946 - DNA, 25 bp, Homo sapien
ggagggctatgattttttggccgac

SEQ ID NO: 3629947 - DNA, 25 bp, Homo sapien
catatcaaacagtctcacttgtcgg

SEQ ID NO: 3629948 - DNA, 25 bp, Homo sapien
catatgttcaccgaccgtgctgtta

SEQ ID NO: 3629949 - DNA, 25 bp, Homo sapien
cctgcatatgttcaccgaccgtgct

SEQ ID NO: 3629950 - DNA, 25 bp, Homo sapien
ctgtgccctgcatatgttcaccgac

SEQ ID NO: 3629951 - DNA, 25 bp, Homo sapien
tgccctgcatatgttcaccgaccgt

SEQ ID NO: 3629952 - DNA, 25 bp, Homo sapien
ctgtgaaacagaggagctgcatgtt

SEQ ID NO: 3629953 - DNA, 25 bp, Homo sapien
cagaggagctgcatgttttctttat

SEQ ID NO: 3629954 - DNA, 25 bp, Homo sapien
tgtgaaacagaggagctgcatgttt

SEQ ID NO: 3629955 - DNA, 25 bp, Homo sapien
gaaacagaggagctgcatgttttct

SEQ ID NO: 3629956 - DNA, 25 bp, Homo sapien
caccactaacacgtgcaccaaagag

SEQ ID NO: 3629957 - DNA, 25 bp, Homo sapien
acagagccaccaccactaacacgtg

SEQ ID NO: 3629958 - DNA, 25 bp, Homo sapien
actaacacgtgcaccaaagagctcg

SEQ ID NO: 3629959 - DNA, 25 bp, Homo sapien
tgcaccaaagagctcgttccgcatg

SEQ ID NO: 3629960 - DNA, 25 bp, Homo sapien
cagggaagctcatttccagaaagtc

SEQ ID NO: 3629961 - DNA, 25 bp, Homo sapien
gggaagctcatttccagaaagtctg

SEQ ID NO: 3629962 - DNA, 25 bp, Homo sapien
tcagggaagctcatttccagaaagt

SEQ ID NO: 3629963 - DNA, 25 bp, Homo sapien
gaagctcatttccagaaagtctgtg

SEQ ID NO: 3629964 - DNA, 25 bp, Homo sapien
catagagcatggaccaccaagcatg

SEQ ID NO: 3629965 - DNA, 25 bp, Homo sapien
ccagaatgagtgatgccgagacacc

SEQ ID NO: 3629966 - DNA, 25 bp, Homo sapien
gcccaaaagcactgtatgagtcctt

SEQ ID NO: 3629967 - DNA, 25 bp, Homo sapien
ccgagacaccagtgagcacgagggt

SEQ ID NO: 3629968 - DNA, 25 bp, Homo sapien
tgccgagcagcataccattctcctg

SEQ ID NO: 3629969 - DNA, 25 bp, Homo sapien
tgaacagattgcacacggggtggtc

SEQ ID NO: 3629970 - DNA, 25 bp, Homo sapien
gttccaaccaatggcttgccggtca

SEQ ID NO: 3629971 - DNA, 25 bp, Homo sapien
ttgccggtcaaacccacaggtgaac

SEQ ID NO: 3629972 - DNA, 25 bp, Homo sapien
aatttgctagcatgagacctcggga

SEQ ID NO: 3629973 - DNA, 25 bp, Homo sapien
tacgtacagttactccagggaacgc

SEQ ID NO: 3629974 - DNA, 25 bp, Homo sapien
gattctaatcaaccagagggaccag

SEQ ID NO: 3629975 - DNA, 25 bp, Homo sapien
caaacagtgaaactaagggctgccg

SEQ ID NO: 3629976 - DNA, 25 bp, Homo sapien
tcaatttctagctcatcgtgatgtt

SEQ ID NO: 3629977 - DNA, 25 bp, Homo sapien
gactcccaataacacaaagctttta

SEQ ID NO: 3629978 - DNA, 25 bp, Homo sapien
aatttctagctcatcgtgatgttta

SEQ ID NO: 3629979 - DNA, 25 bp, Homo sapien
aagactcccaataacacaaagcttt

SEQ ID NO: 3629980 - DNA, 25 bp, Homo sapien
cagagaagcctccatgaccagatac

SEQ ID NO: 3629981 - DNA, 25 bp, Homo sapien
ccaggaaactctagcttgacttcca

SEQ ID NO: 3629982 - DNA, 25 bp, Homo sapien
aactgctttagcttagaagttcgag

SEQ ID NO: 3629983 - DNA, 25 bp, Homo sapien
ggtgccttgactaacctcagagaag

SEQ ID NO: 3629984 - DNA, 25 bp, Homo sapien
tagatgtacttgaaagctgtccagc

SEQ ID NO: 3629985 - DNA, 25 bp, Homo sapien
tgcaggcaacagatgtcggccctct

SEQ ID NO: 3629986 - DNA, 25 bp, Homo sapien
ttgaatacaaaccaaagcctacgtg

SEQ ID NO: 3629987 - DNA, 25 bp, Homo sapien
aacacggtgcaatttggactatcgc

SEQ ID NO: 3629988 - DNA, 25 bp, Homo sapien
tcatccacctaaagcgcgtggcgcg

SEQ ID NO: 3629989 - DNA, 25 bp, Homo sapien
ggcgccatccctcatctacgcaaag

SEQ ID NO: 3629990 - DNA, 25 bp, Homo sapien
tgtgccaattcctgtgctgcctcat

SEQ ID NO: 3629991 - DNA, 25 bp, Homo sapien
tcatgtacataaagcgtgaggcgcg

SEQ ID NO: 3629992 - DNA, 25 bp, Homo sapien
ctgaaatatgggtgtgatgtacgga

SEQ ID NO: 3629993 - DNA, 25 bp, Homo sapien
cagcatgagatgactgttgagtaca

SEQ ID NO: 3629994 - DNA, 25 bp, Homo sapien
ttgagtacaggacacgcagaacgaa

SEQ ID NO: 3629995 - DNA, 25 bp, Homo sapien
tgtgatgtacggagcacacgcagcc

SEQ ID NO: 3629996 - DNA, 25 bp, Homo sapien
tcgcagctaacatggccgcgtgcaa

SEQ ID NO: 3629997 - DNA, 25 bp, Homo sapien
cagaacataactggctggaccccag

SEQ ID NO: 3629998 - DNA, 25 bp, Homo sapien
aacgtgccagccagcaggatgtcag

SEQ ID NO: 3629999 - DNA, 25 bp, Homo sapien
tgctcccaggcaaaaacggtcaggg

SEQ ID NO: 3630000 - DNA, 25 bp, Homo sapien
gacaggcgggtttctctaacacgaa

SEQ ID NO: 3630001 - DNA, 25 bp, Homo sapien
tgtgaatgaaccctgacctctgaga

SEQ ID NO: 3630002 - DNA, 25 bp, Homo sapien
gaatctatggttctcccacaagggc

SEQ ID NO: 3630003 - DNA, 25 bp, Homo sapien
caagtgggaccaagaaaatgtgcgc

SEQ ID NO: 3630004 - DNA, 25 bp, Homo sapien
cctaagattctactgcggcgcaatg

SEQ ID NO: 3630005 - DNA, 25 bp, Homo sapien
tatcagagccgttcatgacagagga

SEQ ID NO: 3630006 - DNA, 25 bp, Homo sapien
cagaaaaaccaatcaaactcgggag

SEQ ID NO: 3630007 - DNA, 25 bp, Homo sapien
tgacagaggaaagcgtcaggccacg

SEQ ID NO: 3630008 - DNA, 25 bp, Homo sapien
tgcacattagactccagggatctgg

SEQ ID NO: 3630009 - DNA, 25 bp, Homo sapien
tgacatgagcatccatgagcatccg

SEQ ID NO: 3630010 - DNA, 25 bp, Homo sapien
gaaagagtcattaacggcaaaccta

SEQ ID NO: 3630011 - DNA, 25 bp, Homo sapien
cataagggatctgttccatggaaag

SEQ ID NO: 3630012 - DNA, 25 bp, Homo sapien
aggaacaccatgagcaagcaactgg

SEQ ID NO: 3630013 - DNA, 25 bp, Homo sapien
tcgacaggaacaccatgagcaagca

SEQ ID NO: 3630014 - DNA, 25 bp, Homo sapien
ggtgctcgacaggaacaccatgagc

SEQ ID NO: 3630015 - DNA, 25 bp, Homo sapien
ccaggaaggtgctcgacaggaacac

SEQ ID NO: 3630016 - DNA, 25 bp, Homo sapien
ctggggaaggaggtagcgccacgtg

SEQ ID NO: 3630017 - DNA, 25 bp, Homo sapien
tggggaaggaggtagcgccacgtgt

SEQ ID NO: 3630018 - DNA, 25 bp, Homo sapien
tctgagttcagacgacacaggctct

SEQ ID NO: 3630019 - DNA, 25 bp, Homo sapien
cgtgcaatttctcaggaggacgcat

SEQ ID NO: 3630020 - DNA, 25 bp, Homo sapien
tctgttggcacctttcactgctgga

SEQ ID NO: 3630021 - DNA, 25 bp, Homo sapien
gctggcctgatgctcacgttttctg

SEQ ID NO: 3630022 - DNA, 25 bp, Homo sapien
aattgccttgaaaccatctgctact

SEQ ID NO: 3630023 - DNA, 25 bp, Homo sapien
tgttgtgcaggctacgtcagtatgg

SEQ ID NO: 3630024 - DNA, 25 bp, Homo sapien
catgataacacacaacccgaaggct

SEQ ID NO: 3630025 - DNA, 25 bp, Homo sapien
tattttgtctaactgagggtcctct

SEQ ID NO: 3630026 - DNA, 25 bp, Homo sapien
tctagtccaggacacaggtctcttc

SEQ ID NO: 3630027 - DNA, 25 bp, Homo sapien
ccctctcttaacactggctttgatg

SEQ ID NO: 3630028 - DNA, 25 bp, Homo sapien
cttctagtccaggacacaggtctct

SEQ ID NO: 3630029 - DNA, 25 bp, Homo sapien
tccaggacacaggtctcttctttct

SEQ ID NO: 3630030 - DNA, 25 bp, Homo sapien
tctcaatgcctttgtcgtgttgtat

SEQ ID NO: 3630031 - DNA, 25 bp, Homo sapien
gttgtatgttatgtggagtgagcag

SEQ ID NO: 3630032 - DNA, 25 bp, Homo sapien
gccagcgtcagcctggcatggtttc

SEQ ID NO: 3630033 - DNA, 25 bp, Homo sapien
cgtcagcctggcatggtttctgggc

SEQ ID NO: 3630034 - DNA, 25 bp, Homo sapien
tgacatctggtcacatccctgtcca

SEQ ID NO: 3630035 - DNA, 25 bp, Homo sapien
agcaaagagcgttgaccagctgaca

SEQ ID NO: 3630036 - DNA, 25 bp, Homo sapien
gggaacagcaaagagcgttgaccag

SEQ ID NO: 3630037 - DNA, 25 bp, Homo sapien
gacatctggtcacatccctgtccat

SEQ ID NO: 3630038 - DNA, 25 bp, Homo sapien
gcccatcaggtttggagaagttcca

SEQ ID NO: 3630039 - DNA, 25 bp, Homo sapien
cagcccatcaggtttggagaagttc

SEQ ID NO: 3630040 - DNA, 25 bp, Homo sapien
gacagcccatcaggtttggagaagt

SEQ ID NO: 3630041 - DNA, 25 bp, Homo sapien
cgacagcccatcaggtttggagaag

SEQ ID NO: 3630042 - DNA, 25 bp, Homo sapien
aggtcatgctcccagaccccatcag

SEQ ID NO: 3630043 - DNA, 25 bp, Homo sapien
aggaggaggacatgttccatcccac

SEQ ID NO: 3630044 - DNA, 25 bp, Homo sapien
ggaggaggacatgttccatcccaca

SEQ ID NO: 3630045 - DNA, 25 bp, Homo sapien
gccgtcttccgggagagtctgggcc

SEQ ID NO: 3630046 - DNA, 25 bp, Homo sapien
atcttctcagagggcgtggaccgtg

SEQ ID NO: 3630047 - DNA, 25 bp, Homo sapien
cgtggaccgtgtcttccgggagagc

SEQ ID NO: 3630048 - DNA, 25 bp, Homo sapien
tcagagggcgtggaccgtgtcttcc

SEQ ID NO: 3630049 - DNA, 25 bp, Homo sapien
agtgcctcggcatcctctgtcagaa

SEQ ID NO: 3630050 - DNA, 25 bp, Homo sapien
tagacaaccgcgtcacatgtcagag

SEQ ID NO: 3630051 - DNA, 25 bp, Homo sapien
ggagaccagggtttgaccatgcaga

SEQ ID NO: 3630052 - DNA, 25 bp, Homo sapien
gcttacaccagcgtttagacaaccg

SEQ ID NO: 3630053 - DNA, 25 bp, Homo sapien
acagatagtagctcacgggctgctg

SEQ ID NO: 3630054 - DNA, 25 bp, Homo sapien
cttttcattttattggactttgagg

SEQ ID NO: 3630055 - DNA, 25 bp, Homo sapien
ttttattggactttgaggtctgcag

SEQ ID NO: 3630056 - DNA, 25 bp, Homo sapien
ccacagatagtagctcacgggctgc

SEQ ID NO: 3630057 - DNA, 25 bp, Homo sapien
tgcccatgagtctgcgtcttgccat

SEQ ID NO: 3630058 - DNA, 25 bp, Homo sapien
ctgcccatgagtctgcgtcttgcca

SEQ ID NO: 3630059 - DNA, 25 bp, Homo sapien
ctaggccaccccgccgcttcttcca

SEQ ID NO: 3630060 - DNA, 25 bp, Homo sapien
taggccaccccgccgcttcttccat

SEQ ID NO: 3630061 - DNA, 25 bp, Homo sapien
atggaagaattgtttgcaggatgtt

SEQ ID NO: 3630062 - DNA, 25 bp, Homo sapien
tggaagaattgtttgcaggatgttt

SEQ ID NO: 3630063 - DNA, 25 bp, Homo sapien
catggaagaattgtttgcaggatgt

SEQ ID NO: 3630064 - DNA, 25 bp, Homo sapien
ggaagaattgtttgcaggatgtttc

SEQ ID NO: 3630065 - DNA, 25 bp, Homo sapien
tgtcatattgttgggaatgcattcc

SEQ ID NO: 3630066 - DNA, 25 bp, Homo sapien
ggctggcacctgctatcgatggatg

SEQ ID NO: 3630067 - DNA, 25 bp, Homo sapien
aaagtctgcacttggtcacgggtgg

SEQ ID NO: 3630068 - DNA, 25 bp, Homo sapien
cacctgctatcgatggatgtttctt

SEQ ID NO: 3630069 - DNA, 25 bp, Homo sapien
tggggcacgtggttctctggtgggt

SEQ ID NO: 3630070 - DNA, 25 bp, Homo sapien
ctgtggggcacgtggttctctggtg

SEQ ID NO: 3630071 - DNA, 25 bp, Homo sapien
tgtggggcacgtggttctctggtgg

SEQ ID NO: 3630072 - DNA, 25 bp, Homo sapien
ggggcacgtggttctctggtgggtg

SEQ ID NO: 3630073 - DNA, 25 bp, Homo sapien
gatgattatcaccactgtaggacac

SEQ ID NO: 3630074 - DNA, 25 bp, Homo sapien
tgctgattatcaccactgcgggaca

SEQ ID NO: 3630075 - DNA, 25 bp, Homo sapien
tgtaggacactttgttctgtggtgg

SEQ ID NO: 3630076 - DNA, 25 bp, Homo sapien
gctggttatcactgctttggggcac

SEQ ID NO: 3630077 - DNA, 25 bp, Homo sapien
gcctgaaggaaatcgccactgcggg

SEQ ID NO: 3630078 - DNA, 25 bp, Homo sapien
agagccccattccgcctgaaggaaa

SEQ ID NO: 3630079 - DNA, 25 bp, Homo sapien
cattccgcctgaaggaaatcgccac

SEQ ID NO: 3630080 - DNA, 25 bp, Homo sapien
caggaaaaagttatcacaaaagagc

SEQ ID NO: 3630081 - DNA, 25 bp, Homo sapien
ttactgagggtctcgtagccgatgg

SEQ ID NO: 3630082 - DNA, 25 bp, Homo sapien
tcgaggcacccgtggtcttactgag

SEQ ID NO: 3630083 - DNA, 25 bp, Homo sapien
aggcgttgatggctgtgctccttgt

SEQ ID NO: 3630084 - DNA, 25 bp, Homo sapien
tccttgtgcaccagccgggtcgagg

SEQ ID NO: 3630085 - DNA, 25 bp, Homo sapien
cgtacgtggggtccagaggagggcg

SEQ ID NO: 3630086 - DNA, 25 bp, Homo sapien
gggtgccttcggtgcactgcgtacg

SEQ ID NO: 3630087 - DNA, 25 bp, Homo sapien
tgccttcggtgcactgcgtacgtgg

SEQ ID NO: 3630088 - DNA, 25 bp, Homo sapien
tgggggtgccttcggtgcactgcgt

SEQ ID NO: 3630089 - DNA, 25 bp, Homo sapien
catccccaaaccttctggctttctt

SEQ ID NO: 3630090 - DNA, 25 bp, Homo sapien
ccatgcaggaaggcaaggtgctctt

SEQ ID NO: 3630091 - DNA, 25 bp, Homo sapien
aacagtcctgcagatccagccatcc

SEQ ID NO: 3630092 - DNA, 25 bp, Homo sapien
aaggcaaggtgctcttttagggaag

SEQ ID NO: 3630093 - DNA, 25 bp, Homo sapien
gagcactcagagaggtcacggatat

SEQ ID NO: 3630094 - DNA, 25 bp, Homo sapien
tctcactcactttgtgaataaatcg

SEQ ID NO: 3630095 - DNA, 25 bp, Homo sapien
tagaaaccagccattcagtctcact

SEQ ID NO: 3630096 - DNA, 25 bp, Homo sapien
catgcatccctccttgcaactgaaa

SEQ ID NO: 3630097 - DNA, 25 bp, Homo sapien
tcagtccaaactccaaagtagtgcc

SEQ ID NO: 3630098 - DNA, 25 bp, Homo sapien
catgtcaggcaaagacaccctgttg

SEQ ID NO: 3630099 - DNA, 25 bp, Homo sapien
acataaaaagtgtctgtgaagtccc

SEQ ID NO: 3630100 - DNA, 25 bp, Homo sapien
cctgggcagcggaaaaggcactaga

SEQ ID NO: 3630101 - DNA, 25 bp, Homo sapien
cgttgaggacgcttggccgtttccg

SEQ ID NO: 3630102 - DNA, 25 bp, Homo sapien
ggaattccagccaccgcgttgagga

SEQ ID NO: 3630103 - DNA, 25 bp, Homo sapien
ggccgtttccgggaggactgtgcat

SEQ ID NO: 3630104 - DNA, 25 bp, Homo sapien
tccagccaccgcgttgaggacgctt

SEQ ID NO: 3630105 - DNA, 25 bp, Homo sapien
atgtagcgccgtcagcctttatttt

SEQ ID NO: 3630106 - DNA, 25 bp, Homo sapien
tgtaaacatgtagcgccgtcagcct

SEQ ID NO: 3630107 - DNA, 25 bp, Homo sapien
atgtaaacatgtagcgccgtcagcc

SEQ ID NO: 3630108 - DNA, 25 bp, Homo sapien
aacatgtagcgccgtcagcctttat

SEQ ID NO: 3630109 - DNA, 25 bp, Homo sapien
ttgtgtttagatagaagtgcatcca

SEQ ID NO: 3630110 - DNA, 25 bp, Homo sapien
gatagaagtgcatccatttgaagac

SEQ ID NO: 3630111 - DNA, 25 bp, Homo sapien
tacctgtattctgttcgaatataca

SEQ ID NO: 3630112 - DNA, 25 bp, Homo sapien
tccatttgaagacatacctgtattc

SEQ ID NO: 3630113 - DNA, 25 bp, Homo sapien
gcctgacttgtgcattaggcttcga

SEQ ID NO: 3630114 - DNA, 25 bp, Homo sapien
tgcattaggcttcgattcaagacgg

SEQ ID NO: 3630115 - DNA, 25 bp, Homo sapien
gggcttaaagcctgacttgtgcatt

SEQ ID NO: 3630116 - DNA, 25 bp, Homo sapien
ggcttcgattcaagacggtgtcatc

SEQ ID NO: 3630117 - DNA, 25 bp, Homo sapien
cccaggacgcagatagggatggtct

SEQ ID NO: 3630118 - DNA, 25 bp, Homo sapien
ctgcgtcgcagggatgaggacaaca

SEQ ID NO: 3630119 - DNA, 25 bp, Homo sapien
tcattggattcccgcagctgcccag

SEQ ID NO: 3630120 - DNA, 25 bp, Homo sapien
ggatggtctgcgacgccgggatggt

SEQ ID NO: 3630121 - DNA, 25 bp, Homo sapien
gggcgtgaaggctgcgtcggccgag

SEQ ID NO: 3630122 - DNA, 25 bp, Homo sapien
tgaaggctgcgtcggccgaggcgtg

SEQ ID NO: 3630123 - DNA, 25 bp, Homo sapien
cagagacgggcgtgaaggctgcgtc

SEQ ID NO: 3630124 - DNA, 25 bp, Homo sapien
tgcgtcggccgaggcgtgggcgccc

SEQ ID NO: 3630125 - DNA, 25 bp, Homo sapien
gaggggtcttcactggagctccaca

SEQ ID NO: 3630126 - DNA, 25 bp, Homo sapien
ctggaactggggttaggggctcctg

SEQ ID NO: 3630127 - DNA, 25 bp, Homo sapien
gggtcttcactggagctccacaggg

SEQ ID NO: 3630128 - DNA, 25 bp, Homo sapien
ggagaggggtcttcactggagctcc

SEQ ID NO: 3630129 - DNA, 25 bp, Homo sapien
catcgcaaagatttctgagagagga

SEQ ID NO: 3630130 - DNA, 25 bp, Homo sapien
gaactataaataccctccttcagcc

SEQ ID NO: 3630131 - DNA, 25 bp, Homo sapien
gatctccagaggtggtttctccttg

SEQ ID NO: 3630132 - DNA, 25 bp, Homo sapien
cagcctcttagaaaacagccggcac

SEQ ID NO: 3630133 - DNA, 25 bp, Homo sapien
tctcatggccaagcatagagctcct

SEQ ID NO: 3630134 - DNA, 25 bp, Homo sapien
gcagctttaagagactcgccaggca

SEQ ID NO: 3630135 - DNA, 25 bp, Homo sapien
ccaatgtagaaagcgtgagctcccg

SEQ ID NO: 3630136 - DNA, 25 bp, Homo sapien
aatgtcactgttggccggtcaaacg

SEQ ID NO: 3630137 - DNA, 25 bp, Homo sapien
ccgggctcgcaggatgcagcacgct

SEQ ID NO: 3630138 - DNA, 25 bp, Homo sapien
atgcagcacgctccgaacccgtcca

SEQ ID NO: 3630139 - DNA, 25 bp, Homo sapien
ccccgaggtctccgggctcgcagga

SEQ ID NO: 3630140 - DNA, 25 bp, Homo sapien
agcacgctccgaacccgtccagcat

SEQ ID NO: 3630141 - DNA, 25 bp, Homo sapien
aagccttcagttgctcctgagttga

SEQ ID NO: 3630142 - DNA, 25 bp, Homo sapien
ggcaaccacaaattgactcattacg

SEQ ID NO: 3630143 - DNA, 25 bp, Homo sapien
tacgtggtccattaccctcggaagc

SEQ ID NO: 3630144 - DNA, 25 bp, Homo sapien
gaagcaacgtagcttcccacaggtg

SEQ ID NO: 3630145 - DNA, 25 bp, Homo sapien
gacaaacaaattagtgcaaagatgc

SEQ ID NO: 3630146 - DNA, 25 bp, Homo sapien
tctcggggcaaccaaaatgcgacag

SEQ ID NO: 3630147 - DNA, 25 bp, Homo sapien
cagcagagcagatgtgttgagttcc

SEQ ID NO: 3630148 - DNA, 25 bp, Homo sapien
tcacatggaacaagcaatgagaagc

SEQ ID NO: 3630149 - DNA, 25 bp, Homo sapien
gtttcatctcctggcatttcatgca

SEQ ID NO: 3630150 - DNA, 25 bp, Homo sapien
tgttctcttgaggaccccatttcat

SEQ ID NO: 3630151 - DNA, 25 bp, Homo sapien
aagtctgtgctcatgttctcttgag

SEQ ID NO: 3630152 - DNA, 25 bp, Homo sapien
catttcattacttaaaacagtttca

SEQ ID NO: 3630153 - DNA, 25 bp, Homo sapien
aagtgtcacgttgttgctgaaatga

SEQ ID NO: 3630154 - DNA, 25 bp, Homo sapien
ttcttctggaggttcgaagtgtcac

SEQ ID NO: 3630155 - DNA, 25 bp, Homo sapien
gatgtcattgatatggcacttcttc

SEQ ID NO: 3630156 - DNA, 25 bp, Homo sapien
tgtcattgatatggcacttcttctg

SEQ ID NO: 3630157 - DNA, 25 bp, Homo sapien
agagccagagccataatgagtgact

SEQ ID NO: 3630158 - DNA, 25 bp, Homo sapien
ataattcggtctggggcgtttgtca

SEQ ID NO: 3630159 - DNA, 25 bp, Homo sapien
tgacacagaaataattcggtctggg

SEQ ID NO: 3630160 - DNA, 25 bp, Homo sapien
agccataatgagtgactctgacaca

SEQ ID NO: 3630161 - DNA, 25 bp, Homo sapien
caagttctcctaaatgggagatgac

SEQ ID NO: 3630162 - DNA, 25 bp, Homo sapien
gactgcaggcctgacaagtacacgt

SEQ ID NO: 3630163 - DNA, 25 bp, Homo sapien
cgtgttctgatgaagacaataggac

SEQ ID NO: 3630164 - DNA, 25 bp, Homo sapien
ccgggaagggctataattacagtga

SEQ ID NO: 3630165 - DNA, 25 bp, Homo sapien
ggcagcttaattgggacaatcatgt

SEQ ID NO: 3630166 - DNA, 25 bp, Homo sapien
tggcagcttaattgggacaatcatg

SEQ ID NO: 3630167 - DNA, 25 bp, Homo sapien
gcaccgtgggctgacttcctgtgcc

SEQ ID NO: 3630168 - DNA, 25 bp, Homo sapien
acacaccacccaggcaccgtgggct

SEQ ID NO: 3630169 - DNA, 25 bp, Homo sapien
ggaaacactgctgaacaccacaggc

SEQ ID NO: 3630170 - DNA, 25 bp, Homo sapien
ctgtgaacgccccagagaggaaaca

SEQ ID NO: 3630171 - DNA, 25 bp, Homo sapien
ctgtgtgacaagtgctggaatagcg

SEQ ID NO: 3630172 - DNA, 25 bp, Homo sapien
tgtgacaagtgctggaatagcggcc

SEQ ID NO: 3630173 - DNA, 25 bp, Homo sapien
aagtgctggaatagcggcctccacc

SEQ ID NO: 3630174 - DNA, 25 bp, Homo sapien
tgacaagtgctggaatagcggcctc

SEQ ID NO: 3630175 - DNA, 25 bp, Homo sapien
tcctctttgccaacgacacacggag

SEQ ID NO: 3630176 - DNA, 25 bp, Homo sapien
tgccaacgacacacggaggtttctg

SEQ ID NO: 3630177 - DNA, 25 bp, Homo sapien
cgacacacggaggtttctgagcagg

SEQ ID NO: 3630178 - DNA, 25 bp, Homo sapien
aggacacgctcctctttgccaacga

SEQ ID NO: 3630179 - DNA, 25 bp, Homo sapien
aagctgacggcatcaaacctgctgc

SEQ ID NO: 3630180 - DNA, 25 bp, Homo sapien
cggaaaagctgacggcatcaaacct

SEQ ID NO: 3630181 - DNA, 25 bp, Homo sapien
aaaagctgacggcatcaaacctgct

SEQ ID NO: 3630182 - DNA, 25 bp, Homo sapien
ttagcggaaaagctgacggcatcaa

SEQ ID NO: 3630183 - DNA, 25 bp, Homo sapien
tgactgtccccagcgcgtgtgtggg

SEQ ID NO: 3630184 - DNA, 25 bp, Homo sapien
gtgcactgcccgctgtgactgcccc

SEQ ID NO: 3630185 - DNA, 25 bp, Homo sapien
gtgactgtccccagcgcgtgtgtgg

SEQ ID NO: 3630186 - DNA, 25 bp, Homo sapien
tccagtgcactgcccgctgtgactg

SEQ ID NO: 3630187 - DNA, 25 bp, Homo sapien
actaggtagcatctccccgttgacg

SEQ ID NO: 3630188 - DNA, 25 bp, Homo sapien
ggatgagttggacaaaagcgcatct

SEQ ID NO: 3630189 - DNA, 25 bp, Homo sapien
ggacaaaagcgcatcttgggccaca

SEQ ID NO: 3630190 - DNA, 25 bp, Homo sapien
tcttgggccacactaggtagcatct

SEQ ID NO: 3630191 - DNA, 25 bp, Homo sapien
ctgtgagatagccacgaagctgcac

SEQ ID NO: 3630192 - DNA, 25 bp, Homo sapien
gccacgaagctgcaccacagccgga

SEQ ID NO: 3630193 - DNA, 25 bp, Homo sapien
gagatagccacgaagctgcaccaca

SEQ ID NO: 3630194 - DNA, 25 bp, Homo sapien
ccacgaagctgcaccacagccggat

SEQ ID NO: 3630195 - DNA, 25 bp, Homo sapien
tggagagaatttggatagcagcgct

SEQ ID NO: 3630196 - DNA, 25 bp, Homo sapien
gttggagagaatttggatagcagcg

SEQ ID NO: 3630197 - DNA, 25 bp, Homo sapien
tgggggattccgatgccagaataac

SEQ ID NO: 3630198 - DNA, 25 bp, Homo sapien
ggggattccgatgccagaataacac

SEQ ID NO: 3630199 - DNA, 25 bp, Homo sapien
ttctccagcaccagccactgcctgc

SEQ ID NO: 3630200 - DNA, 25 bp, Homo sapien
gcaccagccactgcctgccgccttc

SEQ ID NO: 3630201 - DNA, 25 bp, Homo sapien
tccagcaccagccactgcctgccgc

SEQ ID NO: 3630202 - DNA, 25 bp, Homo sapien
cagcaccagccactgcctgccgcct

SEQ ID NO: 3630203 - DNA, 25 bp, Homo sapien
ggaaggcaccacttgtccttggacc

SEQ ID NO: 3630204 - DNA, 25 bp, Homo sapien
aggcaccacttgtccttggaccaga

SEQ ID NO: 3630205 - DNA, 25 bp, Homo sapien
cttggaccagaatgggttggacagc

SEQ ID NO: 3630206 - DNA, 25 bp, Homo sapien
actgccaaaaccagactttggcaga

SEQ ID NO: 3630207 - DNA, 25 bp, Homo sapien
tcacctccacacctgttccgtggca

SEQ ID NO: 3630208 - DNA, 25 bp, Homo sapien
ccgtggcagctttgccatgcacgcc

SEQ ID NO: 3630209 - DNA, 25 bp, Homo sapien
ccgtcgcttccgcaggcgaaaggga

SEQ ID NO: 3630210 - DNA, 25 bp, Homo sapien
ctttgccatgcacgccccgtcgctt

SEQ ID NO: 3630211 - DNA, 25 bp, Homo sapien
gtggcaccattagaccagggtccca

SEQ ID NO: 3630212 - DNA, 25 bp, Homo sapien
ctgctctgtagcagcggcccgtggg

SEQ ID NO: 3630213 - DNA, 25 bp, Homo sapien
gggtcccacccactgtgcaatagat

SEQ ID NO: 3630214 - DNA, 25 bp, Homo sapien
tcggtccagccgtgtggtgcgtgac

SEQ ID NO: 3630215 - DNA, 25 bp, Homo sapien
tgagcttgacgacgccgcgttgatt

SEQ ID NO: 3630216 - DNA, 25 bp, Homo sapien
tgacgacgccgcgttgatttctctt

SEQ ID NO: 3630217 - DNA, 25 bp, Homo sapien
ctgactgagcttgacgacgccgcgt

SEQ ID NO: 3630218 - DNA, 25 bp, Homo sapien
gacgccgcgttgatttctcttcacc

SEQ ID NO: 3630219 - DNA, 25 bp, Homo sapien
ctggcagatgcgttcaggcctcagc

SEQ ID NO: 3630220 - DNA, 25 bp, Homo sapien
agctcccccgtcctgtgtgcgtttc

SEQ ID NO: 3630221 - DNA, 25 bp, Homo sapien
ctcagctcccccgtcctgtgtgcgt

SEQ ID NO: 3630222 - DNA, 25 bp, Homo sapien
cacctggcagatgcgttcaggcctc

SEQ ID NO: 3630223 - DNA, 25 bp, Homo sapien
ctgggcatcacaggatcccacatgg

SEQ ID NO: 3630224 - DNA, 25 bp, Homo sapien
gaccctcttagtcctccagcagagg

SEQ ID NO: 3630225 - DNA, 25 bp, Homo sapien
cacatggaccctcttagtcctccag

SEQ ID NO: 3630226 - DNA, 25 bp, Homo sapien
atggaccctcttagtcctccagcag

SEQ ID NO: 3630227 - DNA, 25 bp, Homo sapien
tgtccgtgacgctgttcccagggct

SEQ ID NO: 3630228 - DNA, 25 bp, Homo sapien
gtccgtgacgctgttcccagggctt

SEQ ID NO: 3630229 - DNA, 25 bp, Homo sapien
tccgtgacgctgttcccagggcttc

SEQ ID NO: 3630230 - DNA, 25 bp, Homo sapien
gttttggcgcactcccatctgaggg

SEQ ID NO: 3630231 - DNA, 25 bp, Homo sapien
catctgagggtccttattttggcac

SEQ ID NO: 3630232 - DNA, 25 bp, Homo sapien
tgagggttcccattttggcactctc

SEQ ID NO: 3630233 - DNA, 25 bp, Homo sapien
tggcactcctgtcggagggtcctta

SEQ ID NO: 3630234 - DNA, 25 bp, Homo sapien
tattggattcgttggtgaagaccca

SEQ ID NO: 3630235 - DNA, 25 bp, Homo sapien
taccagctattggattcgttggtga

SEQ ID NO: 3630236 - DNA, 25 bp, Homo sapien
gtgctaccagctattggattcgttg

SEQ ID NO: 3630237 - DNA, 25 bp, Homo sapien
cagctattggattcgttggtgaaga

SEQ ID NO: 3630238 - DNA, 25 bp, Homo sapien
cacccagcattttcatggagaagtg

SEQ ID NO: 3630239 - DNA, 25 bp, Homo sapien
ccagcattttcatggagaagtgact

SEQ ID NO: 3630240 - DNA, 25 bp, Homo sapien
acaggaagggacgacagcgtggaca

SEQ ID NO: 3630241 - DNA, 25 bp, Homo sapien
gaagggacgacagcgtggacagggc

SEQ ID NO: 3630242 - DNA, 25 bp, Homo sapien
atgctgatggctggccgtcgtttct

SEQ ID NO: 3630243 - DNA, 25 bp, Homo sapien
tttcttgaggtctgtatacccatat

SEQ ID NO: 3630244 - DNA, 25 bp, Homo sapien
gctggccgtcgtttcttttgcaccc

SEQ ID NO: 3630245 - DNA, 25 bp, Homo sapien
tgatggctggccgtcgtttcttttg

SEQ ID NO: 3630246 - DNA, 25 bp, Homo sapien
gactttccaggtttgctatccaagg

SEQ ID NO: 3630247 - DNA, 25 bp, Homo sapien
ttttatagatggaccggctcctccc

SEQ ID NO: 3630248 - DNA, 25 bp, Homo sapien
gctcctcccggatgctacaaaatag

SEQ ID NO: 3630249 - DNA, 25 bp, Homo sapien
tgaaagcaggaaacgaggcacgatt

SEQ ID NO: 3630250 - DNA, 25 bp, Homo sapien
tagactcctcttcaagaaaggcacc

SEQ ID NO: 3630251 - DNA, 25 bp, Homo sapien
acagcattgacctcttggtatccaa

SEQ ID NO: 3630252 - DNA, 25 bp, Homo sapien
caccttggtatgcagtgtagacacc

SEQ ID NO: 3630253 - DNA, 25 bp, Homo sapien
acagcatcgatgtcttgttgtccag

SEQ ID NO: 3630254 - DNA, 25 bp, Homo sapien
tgtagaagcatcaacgtcttggtgt

SEQ ID NO: 3630255 - DNA, 25 bp, Homo sapien
acttagagggctgagaccgaagctc

SEQ ID NO: 3630256 - DNA, 25 bp, Homo sapien
catgagaacgtggtagagtggatca

SEQ ID NO: 3630257 - DNA, 25 bp, Homo sapien
tctgatcggggagtttcggatccat

SEQ ID NO: 3630258 - DNA, 25 bp, Homo sapien
gaccgaagctcatgcggccaacaca

SEQ ID NO: 3630259 - DNA, 25 bp, Homo sapien
gaaaggtttgtgcagccatggctct

SEQ ID NO: 3630260 - DNA, 25 bp, Homo sapien
cacgcaccaagtgcgtgagtcaggg

SEQ ID NO: 3630261 - DNA, 25 bp, Homo sapien
aacagctgcttcatgtcatccggct

SEQ ID NO: 3630262 - DNA, 25 bp, Homo sapien
cagtccgtgtgtgttgctagaaagg

SEQ ID NO: 3630263 - DNA, 25 bp, Homo sapien
tgcgtggactgattggaggatttgt

SEQ ID NO: 3630264 - DNA, 25 bp, Homo sapien
tgttgggcatggtgcgtggactgat

SEQ ID NO: 3630265 - DNA, 25 bp, Homo sapien
tgcgtggactgattggaggattggt

SEQ ID NO: 3630266 - DNA, 25 bp, Homo sapien
atggtgcatggactgattggaggat

SEQ ID NO: 3630267 - DNA, 25 bp, Homo sapien
aatcttccccctcaatctgtggggg

SEQ ID NO: 3630268 - DNA, 25 bp, Homo sapien
tcttccccctcaatctgtgggggac

SEQ ID NO: 3630269 - DNA, 25 bp, Homo sapien
taatcttccccctcaatctgtgggg

SEQ ID NO: 3630270 - DNA, 25 bp, Homo sapien
ctaatcttccccctcaatctgtggg

SEQ ID NO: 3630271 - DNA, 25 bp, Homo sapien
tgaaggtgcgattgacccactggga

SEQ ID NO: 3630272 - DNA, 25 bp, Homo sapien
ccagagtgaaggtgcgattgaccca

SEQ ID NO: 3630273 - DNA, 25 bp, Homo sapien
gcccagagtgaaggtgcgattgacc

SEQ ID NO: 3630274 - DNA, 25 bp, Homo sapien
gagtgaaggtgcgattgacccactg

SEQ ID NO: 3630275 - DNA, 25 bp, Homo sapien
tcagctccgccaactaatgcaggga

SEQ ID NO: 3630276 - DNA, 25 bp, Homo sapien
gcagcatccggaaatgagaccacag

SEQ ID NO: 3630277 - DNA, 25 bp, Homo sapien
ttcacaatgatctggacacctctcc

SEQ ID NO: 3630278 - DNA, 25 bp, Homo sapien
ggtaaaacagggaacaccatcagct

SEQ ID NO: 3630279 - DNA, 25 bp, Homo sapien
ttgccccgacctcgcccctgtgagt

SEQ ID NO: 3630280 - DNA, 25 bp, Homo sapien
ggccctgagtctccttgccccgacc

SEQ ID NO: 3630281 - DNA, 25 bp, Homo sapien
ctcgcccctgtgagtccatagaggt

SEQ ID NO: 3630282 - DNA, 25 bp, Homo sapien
gacctcgcccctgtgagtccataga

SEQ ID NO: 3630283 - DNA, 25 bp, Homo sapien
ctcctaaccagctgtgacttctcac

SEQ ID NO: 3630284 - DNA, 25 bp, Homo sapien
gtggcctcctaaccagctgtgactt

SEQ ID NO: 3630285 - DNA, 25 bp, Homo sapien
ctgtggcctcctaaccagctgtgac

SEQ ID NO: 3630286 - DNA, 25 bp, Homo sapien
ggcctcctaaccagctgtgacttct

SEQ ID NO: 3630287 - DNA, 25 bp, Homo sapien
gggacggcgtaaagagcagaatccc

SEQ ID NO: 3630288 - DNA, 25 bp, Homo sapien
gcgtaaagagcagaatcccagcaca

SEQ ID NO: 3630289 - DNA, 25 bp, Homo sapien
cagcacacgcgtgaccgtgggaacc

SEQ ID NO: 3630290 - DNA, 25 bp, Homo sapien
ccagaggggtgttgcgtgtcaccaa

SEQ ID NO: 3630291 - DNA, 25 bp, Homo sapien
atctcgccatcagcgacattgccgt

SEQ ID NO: 3630292 - DNA, 25 bp, Homo sapien
ggataaatggatggcccggaatctc

SEQ ID NO: 3630293 - DNA, 25 bp, Homo sapien
cacaggataaatggatggcccggaa

SEQ ID NO: 3630294 - DNA, 25 bp, Homo sapien
tggcccggaatctcgccatcagcga

SEQ ID NO: 3630295 - DNA, 25 bp, Homo sapien
ctgcttgatgggccgggatctctgt

SEQ ID NO: 3630296 - DNA, 25 bp, Homo sapien
ctgccaggagcttgggcactctcct

SEQ ID NO: 3630297 - DNA, 25 bp, Homo sapien
cctgcttgatgggccgggatctctg

SEQ ID NO: 3630298 - DNA, 25 bp, Homo sapien
cacatgcaagaacacggcattggcc

SEQ ID NO: 3630299 - DNA, 25 bp, Homo sapien
ggagagactgccaggctctctggac

SEQ ID NO: 3630300 - DNA, 25 bp, Homo sapien
ttcccagaggtctgcgacccctgca

SEQ ID NO: 3630301 - DNA, 25 bp, Homo sapien
agccggcacagacccacgggctccc

SEQ ID NO: 3630302 - DNA, 25 bp, Homo sapien
tctctctcgtctaccagatgcttgg

SEQ ID NO: 3630303 - DNA, 25 bp, Homo sapien
gggccgcgtgatcctctgagataac

SEQ ID NO: 3630304 - DNA, 25 bp, Homo sapien
gtcaggtgtgcgtccagcatgtcct

SEQ ID NO: 3630305 - DNA, 25 bp, Homo sapien
tgtctcactcctggatcccctgtgt

SEQ ID NO: 3630306 - DNA, 25 bp, Homo sapien
gctccccgtccaccacgtgatgccc

SEQ ID NO: 3630307 - DNA, 25 bp, Homo sapien
ccgtccaccacgtgatgcccatcct

SEQ ID NO: 3630308 - DNA, 25 bp, Homo sapien
catcctccaagtgccctgtggcctc

SEQ ID NO: 3630309 - DNA, 25 bp, Homo sapien
gcccatcctccaagtgccctgtggc

SEQ ID NO: 3630310 - DNA, 25 bp, Homo sapien
cctgacgtgccctcggtggcataga

SEQ ID NO: 3630311 - DNA, 25 bp, Homo sapien
ggctgttgcctgacgtgccctcggt

SEQ ID NO: 3630312 - DNA, 25 bp, Homo sapien
ccctcggtggcatagactgagttta

SEQ ID NO: 3630313 - DNA, 25 bp, Homo sapien
tgaccacgttggccaccgagaaact

SEQ ID NO: 3630314 - DNA, 25 bp, Homo sapien
atctggacggatccagagtccgaac

SEQ ID NO: 3630315 - DNA, 25 bp, Homo sapien
ggatctggacggatccagagtccga

SEQ ID NO: 3630316 - DNA, 25 bp, Homo sapien
gatctggacggatccagagtccgaa

SEQ ID NO: 3630317 - DNA, 25 bp, Homo sapien
tgggatctggacggatccagagtcc

SEQ ID NO: 3630318 - DNA, 25 bp, Homo sapien
gacggatccagggtctgaactacat

SEQ ID NO: 3630319 - DNA, 25 bp, Homo sapien
ctggacggatccagggtctgaacta

SEQ ID NO: 3630320 - DNA, 25 bp, Homo sapien
ggatccagggtctgaactacatctg

SEQ ID NO: 3630321 - DNA, 25 bp, Homo sapien
cagggtctgaactacatctgagtgg

SEQ ID NO: 3630322 - DNA, 25 bp, Homo sapien
tgaactacatctgagtgcggtctgg

SEQ ID NO: 3630323 - DNA, 25 bp, Homo sapien
tgatccagggtctgaactacgtctg

SEQ ID NO: 3630324 - DNA, 25 bp, Homo sapien
gatccagggtccgaactgcgtctga

SEQ ID NO: 3630325 - DNA, 25 bp, Homo sapien
tgtgatccagggtccgaactgcgtc

SEQ ID NO: 3630326 - DNA, 25 bp, Homo sapien
tgatccagggtctgaactgcgtctg

SEQ ID NO: 3630327 - DNA, 25 bp, Homo sapien
gatccagggtctgaactgcgtctga

SEQ ID NO: 3630328 - DNA, 25 bp, Homo sapien
tgaactacatctgagtgcggtctgg

SEQ ID NO: 3630329 - DNA, 25 bp, Homo sapien
tgatccagggtctgaactacgtctg

SEQ ID NO: 3630330 - DNA, 25 bp, Homo sapien
tggacaagaatctgctcgggcggac

SEQ ID NO: 3630331 - DNA, 25 bp, Homo sapien
tttcgtttctggctctcaacgccgc

SEQ ID NO: 3630332 - DNA, 25 bp, Homo sapien
gcaccgtcgctgtaacaggcctgaa

SEQ ID NO: 3630333 - DNA, 25 bp, Homo sapien
catcctgcaccgtgggaacgcagag

SEQ ID NO: 3630334 - DNA, 25 bp, Homo sapien
accataggcccctttgccatccctg

SEQ ID NO: 3630335 - DNA, 25 bp, Homo sapien
ccttggctgctaaggccacagcatt

SEQ ID NO: 3630336 - DNA, 25 bp, Homo sapien
cgaggacccttcctggctaaccgag

SEQ ID NO: 3630337 - DNA, 25 bp, Homo sapien
tgcccacacccacgaacaggtaata

SEQ ID NO: 3630338 - DNA, 25 bp, Homo sapien
ggagtgcagtccatgagctgcaaag

SEQ ID NO: 3630339 - DNA, 25 bp, Homo sapien
agtccatgagctgcaaaggaaaggc

SEQ ID NO: 3630340 - DNA, 25 bp, Homo sapien
ccctggagtgcagtccatgagctgc

SEQ ID NO: 3630341 - DNA, 25 bp, Homo sapien
catgagctgcaaaggaaaggctcct

SEQ ID NO: 3630342 - DNA, 25 bp, Homo sapien
gagcatcgcgttcctttgatttcca

SEQ ID NO: 3630343 - DNA, 25 bp, Homo sapien
tgcatccttcctttgagaccggcta

SEQ ID NO: 3630344 - DNA, 25 bp, Homo sapien
tctctgattaaagggtcttctggct

SEQ ID NO: 3630345 - DNA, 25 bp, Homo sapien
tgatttccattttcgacggcgcaaa

SEQ ID NO: 3630346 - DNA, 25 bp, Homo sapien
gagaacagacatcagggcatcctcg

SEQ ID NO: 3630347 - DNA, 25 bp, Homo sapien
ggatgtgccctctggtcccggtttg

SEQ ID NO: 3630348 - DNA, 25 bp, Homo sapien
tcaaaagaggcctcattcaggtacc

SEQ ID NO: 3630349 - DNA, 25 bp, Homo sapien
gctggctcccacacaactctgttga

SEQ ID NO: 3630350 - DNA, 25 bp, Homo sapien
ggggagttctagggtacggtgcatg

SEQ ID NO: 3630351 - DNA, 25 bp, Homo sapien
ttaggaagctcttatcagcatccag

SEQ ID NO: 3630352 - DNA, 25 bp, Homo sapien
tttaggaagctcttatcagcatcca

SEQ ID NO: 3630353 - DNA, 25 bp, Homo sapien
tacggtgcatgagattcatttagga

SEQ ID NO: 3630354 - DNA, 25 bp, Homo sapien
ggttcatgaagacgcattcgatctg

SEQ ID NO: 3630355 - DNA, 25 bp, Homo sapien
gacgcattcgatctgtgttgcaggc

SEQ ID NO: 3630356 - DNA, 25 bp, Homo sapien
ccatgtatttatagtggttcatgaa

SEQ ID NO: 3630357 - DNA, 25 bp, Homo sapien
tatttatagtggttcatgaagacgc

SEQ ID NO: 3630358 - DNA, 25 bp, Homo sapien
ttaaactattaacttggcaaatagc

SEQ ID NO: 3630359 - DNA, 25 bp, Homo sapien
ctggaccgtgtgttcgctgaggccc

SEQ ID NO: 3630360 - DNA, 25 bp, Homo sapien
cagtgtctgcggagacggccccgca

SEQ ID NO: 3630361 - DNA, 25 bp, Homo sapien
ctgagcgtttcctggcagccgtggt

SEQ ID NO: 3630362 - DNA, 25 bp, Homo sapien
taggtgttgggtaaaccagccacgc

SEQ ID NO: 3630363 - DNA, 25 bp, Homo sapien
gaaaaatagacggagtcagaaccca

SEQ ID NO: 3630364 - DNA, 25 bp, Homo sapien
gagacaggtgcgaatatagaaatgc

SEQ ID NO: 3630365 - DNA, 25 bp, Homo sapien
tgagagaggattgctccccaactgc

SEQ ID NO: 3630366 - DNA, 25 bp, Homo sapien
ttcctgaagagcctcctgcagccat

SEQ ID NO: 3630367 - DNA, 25 bp, Homo sapien
tcagttcctgaagagcctcctgcag

SEQ ID NO: 3630368 - DNA, 25 bp, Homo sapien
agttcctgaagagcctcctgcagcc

SEQ ID NO: 3630369 - DNA, 25 bp, Homo sapien
cgtcagttcctgaagagcctcctgc

SEQ ID NO: 3630370 - DNA, 25 bp, Homo sapien
catcaggggacggaatgagagtgag

SEQ ID NO: 3630371 - DNA, 25 bp, Homo sapien
cttctctaagaaatggacatcaggg

SEQ ID NO: 3630372 - DNA, 25 bp, Homo sapien
ttctgctgtgtacttcggcctcacc

SEQ ID NO: 3630373 - DNA, 25 bp, Homo sapien
tgtacttcggcctcaccagtttccg

SEQ ID NO: 3630374 - DNA, 25 bp, Homo sapien
aatgccctcaaaccggctgtttcct

SEQ ID NO: 3630375 - DNA, 25 bp, Homo sapien
ctctgagaaaatgccctcaaaccgg

SEQ ID NO: 3630376 - DNA, 25 bp, Homo sapien
agaaaatgccctcaaaccggctgtt

SEQ ID NO: 3630377 - DNA, 25 bp, Homo sapien
cctcaaaccggctgtttccttcatg

SEQ ID NO: 3630378 - DNA, 25 bp, Homo sapien
gcctgacacctcatcatctatgcag

SEQ ID NO: 3630379 - DNA, 25 bp, Homo sapien
tcatcatctatgcaggttcgactca

SEQ ID NO: 3630380 - DNA, 25 bp, Homo sapien
tctgctttcagcaccggtttctcaa

SEQ ID NO: 3630381 - DNA, 25 bp, Homo sapien
aatcttcaactcaaagcccttgtcc

SEQ ID NO: 3630382 - DNA, 25 bp, Homo sapien
actgaatcgcacttgacgaagtcca

SEQ ID NO: 3630383 - DNA, 25 bp, Homo sapien
ttgcagccattgtccccaagggcct

SEQ ID NO: 3630384 - DNA, 25 bp, Homo sapien
acacagcagactgaatcgcacttga

SEQ ID NO: 3630385 - DNA, 25 bp, Homo sapien
tgcagccattgtccccaagggcctt

SEQ ID NO: 3630386 - DNA, 25 bp, Homo sapien
tcttcgaaggccatttctggtcttc

SEQ ID NO: 3630387 - DNA, 25 bp, Homo sapien
gcagcacgaggatggattttgcttc

SEQ ID NO: 3630388 - DNA, 25 bp, Homo sapien
attcttcgaaggccatttctggtct

SEQ ID NO: 3630389 - DNA, 25 bp, Homo sapien
atgcatggatttattcttcgaaggc

SEQ ID NO: 3630390 - DNA, 25 bp, Homo sapien
gcttgagttcatgcactggcactga

SEQ ID NO: 3630391 - DNA, 25 bp, Homo sapien
gcactagtgttagggtcgagccaca

SEQ ID NO: 3630392 - DNA, 25 bp, Homo sapien
gtggcaattgcaatggaagtggtca

SEQ ID NO: 3630393 - DNA, 25 bp, Homo sapien
cagcctgagaagagtagcatttgca

SEQ ID NO: 3630394 - DNA, 25 bp, Homo sapien
tccgagctcggtatcaggcatagaa

SEQ ID NO: 3630395 - DNA, 25 bp, Homo sapien
tagaaaggttttctctgccttcatc

SEQ ID NO: 3630396 - DNA, 25 bp, Homo sapien
caggcgatgttccagccgcagaagg

SEQ ID NO: 3630397 - DNA, 25 bp, Homo sapien
tgccttcatccaggcgatgttccag

SEQ ID NO: 3630398 - DNA, 25 bp, Homo sapien
tttcctggaagtgagctcattctcc

SEQ ID NO: 3630399 - DNA, 25 bp, Homo sapien
tgctgggcctagggctgctctgatc

SEQ ID NO: 3630400 - DNA, 25 bp, Homo sapien
ccaacatgtagatgtccaaagctgc

SEQ ID NO: 3630401 - DNA, 25 bp, Homo sapien
tgtggatccccacaaaccaactttg

SEQ ID NO: 3630402 - DNA, 25 bp, Homo sapien
ctgagggtctgtttgaaaacagctt

SEQ ID NO: 3630403 - DNA, 25 bp, Homo sapien
tgaaaacagctttttcggtctggct

SEQ ID NO: 3630404 - DNA, 25 bp, Homo sapien
tgagggtctgtttgaaaacagcttt

SEQ ID NO: 3630405 - DNA, 25 bp, Homo sapien
cagctttttcggtctggctttatgt

SEQ ID NO: 3630406 - DNA, 25 bp, Homo sapien
gcacaggcacgctgcgtctccatga

SEQ ID NO: 3630407 - DNA, 25 bp, Homo sapien
gacccggtgagcataaatccaggaa

SEQ ID NO: 3630408 - DNA, 25 bp, Homo sapien
tatttcctgccgctggtgacgattt

SEQ ID NO: 3630409 - DNA, 25 bp, Homo sapien
tcttggacaaacatctcagcagcag

SEQ ID NO: 3630410 - DNA, 25 bp, Homo sapien
gcagctgttggatgcatgcaggaga

SEQ ID NO: 3630411 - DNA, 25 bp, Homo sapien
ggcttaggaccgaaggtttctcata

SEQ ID NO: 3630412 - DNA, 25 bp, Homo sapien
ttctcataagggaagagatggcagc

SEQ ID NO: 3630413 - DNA, 25 bp, Homo sapien
ctgatgccctggcttaggaccgaag

SEQ ID NO: 3630414 - DNA, 25 bp, Homo sapien
ggcgttgtgaccgcctccttatgtc

SEQ ID NO: 3630415 - DNA, 25 bp, Homo sapien
cggcgttgtgaccgcctccttatgt

SEQ ID NO: 3630416 - DNA, 25 bp, Homo sapien
tccccaacaatgagaagaaagagcc

SEQ ID NO: 3630417 - DNA, 25 bp, Homo sapien
ggcagacagaccactaagcagtgca

SEQ ID NO: 3630418 - DNA, 25 bp, Homo sapien
agtgcacctgctgaccattctagaa

SEQ ID NO: 3630419 - DNA, 25 bp, Homo sapien
tcagtagaccgaggtgtacccaggg

SEQ ID NO: 3630420 - DNA, 25 bp, Homo sapien
agcgtccgaggtccagtggaggcct

SEQ ID NO: 3630421 - DNA, 25 bp, Homo sapien
cgtccgaggtccagtggaggcctgt

SEQ ID NO: 3630422 - DNA, 25 bp, Homo sapien
gggttagcgtccgaggtccagtgga

SEQ ID NO: 3630423 - DNA, 25 bp, Homo sapien
tggggttagcgtccgaggtccagtg

SEQ ID NO: 3630424 - DNA, 25 bp, Homo sapien
ctcttcaagtgctggcaccttgagg

SEQ ID NO: 3630425 - DNA, 25 bp, Homo sapien
tcttcaagtgctggcaccttgagga

SEQ ID NO: 3630426 - DNA, 25 bp, Homo sapien
agcctcgccataggcccagccacat

SEQ ID NO: 3630427 - DNA, 25 bp, Homo sapien
cagacttggagaaccgtcatggaca

SEQ ID NO: 3630428 - DNA, 25 bp, Homo sapien
ttggagaaccgtcatggacactgtc

SEQ ID NO: 3630429 - DNA, 25 bp, Homo sapien
gtgagggccacaactcagcccacag

SEQ ID NO: 3630430 - DNA, 25 bp, Homo sapien
ttccattcagcacccctgatactag

SEQ ID NO: 3630431 - DNA, 25 bp, Homo sapien
ctacttttccattcagcacccctga

SEQ ID NO: 3630432 - DNA, 25 bp, Homo sapien
cattcagcacccctgatactagtgt

SEQ ID NO: 3630433 - DNA, 25 bp, Homo sapien
acttttccattcagcacccctgata

SEQ ID NO: 3630434 - DNA, 25 bp, Homo sapien
gggaccatggccctcccattctcct

SEQ ID NO: 3630435 - DNA, 25 bp, Homo sapien
catgggaccatggccctcccattct

SEQ ID NO: 3630436 - DNA, 25 bp, Homo sapien
atgggaccatggccctcccattctc

SEQ ID NO: 3630437 - DNA, 25 bp, Homo sapien
tgggaccatggccctcccattctcc

SEQ ID NO: 3630438 - DNA, 25 bp, Homo sapien
cctgggacattcctgaaggctctgg

SEQ ID NO: 3630439 - DNA, 25 bp, Homo sapien
gggccacatgactgaccacagagca

SEQ ID NO: 3630440 - DNA, 25 bp, Homo sapien
gtcttctctgattccaagaccctgg

SEQ ID NO: 3630441 - DNA, 25 bp, Homo sapien
ttccagggccacatgactgaccaca

SEQ ID NO: 3630442 - DNA, 25 bp, Homo sapien
agccgtgtgggctgcgtgcgattcg

SEQ ID NO: 3630443 - DNA, 25 bp, Homo sapien
gctgcgtgcgattcggtaatgaagc

SEQ ID NO: 3630444 - DNA, 25 bp, Homo sapien
cgtgcgattcggtaatgaagctctc

SEQ ID NO: 3630445 - DNA, 25 bp, Homo sapien
gtaatgaagctctccatgaggaagc

SEQ ID NO: 3630446 - DNA, 25 bp, Homo sapien
tagtggcgtagcttggcacactcgc

SEQ ID NO: 3630447 - DNA, 25 bp, Homo sapien
tcagtagtggcgtagcttggcacac

SEQ ID NO: 3630448 - DNA, 25 bp, Homo sapien
cgtagcttggcacactcgcaaatgc

SEQ ID NO: 3630449 - DNA, 25 bp, Homo sapien
ggcacactcgcaaatgcggctgcag

SEQ ID NO: 3630450 - DNA, 25 bp, Homo sapien
ggtggcaatggcagctcggggacat

SEQ ID NO: 3630451 - DNA, 25 bp, Homo sapien
tctgtaagaaagacgcccggggaca

SEQ ID NO: 3630452 - DNA, 25 bp, Homo sapien
catacaagcaagtgaataattttct

SEQ ID NO: 3630453 - DNA, 25 bp, Homo sapien
gacattgatggagtgctgttcccag

SEQ ID NO: 3630454 - DNA, 25 bp, Homo sapien
tacatccacgtcagcatttgccagt

SEQ ID NO: 3630455 - DNA, 25 bp, Homo sapien
gggttttggtgaccgtgctacatcc

SEQ ID NO: 3630456 - DNA, 25 bp, Homo sapien
tccaccatctcggacacgcggggtt

SEQ ID NO: 3630457 - DNA, 25 bp, Homo sapien
agccgggaaaagctgctccaccatc

SEQ ID NO: 3630458 - DNA, 25 bp, Homo sapien
caacctggtagagtcgtcagggaga

SEQ ID NO: 3630459 - DNA, 25 bp, Homo sapien
acagaagcatgcagggccaacctgg

SEQ ID NO: 3630460 - DNA, 25 bp, Homo sapien
cagggccaacctggtagagtcgtca

SEQ ID NO: 3630461 - DNA, 25 bp, Homo sapien
cacacagaagcatgcagggccaacc

SEQ ID NO: 3630462 - DNA, 25 bp, Homo sapien
cagcaccttcacacaactgagcatt

SEQ ID NO: 3630463 - DNA, 25 bp, Homo sapien
tgtgctgatggctccaccttgtaac

SEQ ID NO: 3630464 - DNA, 25 bp, Homo sapien
cattccagctctcgtgggctggcca

SEQ ID NO: 3630465 - DNA, 25 bp, Homo sapien
ccttcacacaactgagcatttcatc

SEQ ID NO: 3630466 - DNA, 25 bp, Homo sapien
taggcgagttcaccaggctctgaaa

SEQ ID NO: 3630467 - DNA, 25 bp, Homo sapien
gagacaaaggcgttgtattccagcc

SEQ ID NO: 3630468 - DNA, 25 bp, Homo sapien
ttgggctgggattgcccggatctta

SEQ ID NO: 3630469 - DNA, 25 bp, Homo sapien
cagatgtgggcataggcgagttcac

SEQ ID NO: 3630470 - DNA, 25 bp, Homo sapien
gcacaggctcggtcacagggagctt

SEQ ID NO: 3630471 - DNA, 25 bp, Homo sapien
ctgcagaaggggattgatgattatc

SEQ ID NO: 3630472 - DNA, 25 bp, Homo sapien
aggggattgatgattatcctccagg

SEQ ID NO: 3630473 - DNA, 25 bp, Homo sapien
cacaggctcggtcacagggagcttc

SEQ ID NO: 3630474 - DNA, 25 bp, Homo sapien
tgctgggagacgtcgccccaacttc

SEQ ID NO: 3630475 - DNA, 25 bp, Homo sapien
actgctgggagacgtcgccccaact

SEQ ID NO: 3630476 - DNA, 25 bp, Homo sapien
ctgctgggagacgtcgccccaactt

SEQ ID NO: 3630477 - DNA, 25 bp, Homo sapien
gcactgctgggagacgtcgccccaa

SEQ ID NO: 3630478 - DNA, 25 bp, Homo sapien
tggccgctgcccgtcaggagccagt

SEQ ID NO: 3630479 - DNA, 25 bp, Homo sapien
ccgtagaaaccagagcagaggtggc

SEQ ID NO: 3630480 - DNA, 25 bp, Homo sapien
tgcccgtcaggagccagtgcttctt

SEQ ID NO: 3630481 - DNA, 25 bp, Homo sapien
tggtccgtagaaaccagagcagagg

SEQ ID NO: 3630482 - DNA, 25 bp, Homo sapien
tccactggacttaaatttagctttg

SEQ ID NO: 3630483 - DNA, 25 bp, Homo sapien
cctggtgatgtcgtgttccgcgtct

SEQ ID NO: 3630484 - DNA, 25 bp, Homo sapien
tccgcgtctggttgattggcagttc

SEQ ID NO: 3630485 - DNA, 25 bp, Homo sapien
ctgggtcacaccctggcgttctgct

SEQ ID NO: 3630486 - DNA, 25 bp, Homo sapien
cttgaatctcatgggtccctggtgt

SEQ ID NO: 3630487 - DNA, 25 bp, Homo sapien
ctttcggttctgtggcctcctgaat

SEQ ID NO: 3630488 - DNA, 25 bp, Homo sapien
gaatctcatgggtccctggtgttct

SEQ ID NO: 3630489 - DNA, 25 bp, Homo sapien
ttctttctttcggttctgtggcctc

SEQ ID NO: 3630490 - DNA, 25 bp, Homo sapien
cagggccgcgttgagaagcagaaac

SEQ ID NO: 3630491 - DNA, 25 bp, Homo sapien
gaggccctgagcgacagtaagcgtt

SEQ ID NO: 3630492 - DNA, 25 bp, Homo sapien
tcaggaagccgtagtgttggcccca

SEQ ID NO: 3630493 - DNA, 25 bp, Homo sapien
cgttgagcttcagtggcgctgcaca

SEQ ID NO: 3630494 - DNA, 25 bp, Homo sapien
tgtgcagctgactcactcaatagat

SEQ ID NO: 3630495 - DNA, 25 bp, Homo sapien
gacgtctgagttccccattgtctgg

SEQ ID NO: 3630496 - DNA, 25 bp, Homo sapien
cattgtctggaagcgtttttgccac

SEQ ID NO: 3630497 - DNA, 25 bp, Homo sapien
tgcgcagacgtcctaatcacctgct

SEQ ID NO: 3630498 - DNA, 25 bp, Homo sapien
cacctcgggcaaactccacagtgga

SEQ ID NO: 3630499 - DNA, 25 bp, Homo sapien
gcacctcgggcaaactccacagtgg

SEQ ID NO: 3630500 - DNA, 25 bp, Homo sapien
tgcacctcgggcaaactccacagtg

SEQ ID NO: 3630501 - DNA, 25 bp, Homo sapien
ctgcacctcgggcaaactccacagt

SEQ ID NO: 3630502 - DNA, 25 bp, Homo sapien
acaccaagtgtttctccaccagcat

SEQ ID NO: 3630503 - DNA, 25 bp, Homo sapien
aaaacaccaagtgtttctccaccag

SEQ ID NO: 3630504 - DNA, 25 bp, Homo sapien
ctggtgagtctggtacaaaaacacc

SEQ ID NO: 3630505 - DNA, 25 bp, Homo sapien
tggtgagtctggtacaaaaacacca

SEQ ID NO: 3630506 - DNA, 25 bp, Homo sapien
tcggaacttgcactatccttggctt

SEQ ID NO: 3630507 - DNA, 25 bp, Homo sapien
ccactcggaacttgcactatccttg

SEQ ID NO: 3630508 - DNA, 25 bp, Homo sapien
actcggaacttgcactatccttggc

SEQ ID NO: 3630509 - DNA, 25 bp, Homo sapien
atgaggcccccactcggaacttgca

SEQ ID NO: 3630510 - DNA, 25 bp, Homo sapien
aactgcattactgctggccctccag

SEQ ID NO: 3630511 - DNA, 25 bp, Homo sapien
cacccacccatgagcaaggatgaca

SEQ ID NO: 3630512 - DNA, 25 bp, Homo sapien
tccagactcgacatggtcctgtccg

SEQ ID NO: 3630513 - DNA, 25 bp, Homo sapien
caaggatgacaacccacactcagaa

SEQ ID NO: 3630514 - DNA, 25 bp, Homo sapien
tttctttaaagacgtgctgagaaac

SEQ ID NO: 3630515 - DNA, 25 bp, Homo sapien
tcatttctttaaagacgtgctgaga

SEQ ID NO: 3630516 - DNA, 25 bp, Homo sapien
tctttaaagacgtgctgagaaacat

SEQ ID NO: 3630517 - DNA, 25 bp, Homo sapien
ctttaaagacgtgctgagaaacatc

SEQ ID NO: 3630518 - DNA, 25 bp, Homo sapien
cttccatttccattggtgcagatct

SEQ ID NO: 3630519 - DNA, 25 bp, Homo sapien
gagccatccctgagtgttgtctggg

SEQ ID NO: 3630520 - DNA, 25 bp, Homo sapien
tgccctcggagccatccctgagtgt

SEQ ID NO: 3630521 - DNA, 25 bp, Homo sapien
cattggtgcagatctcagtgagaaa

SEQ ID NO: 3630522 - DNA, 25 bp, Homo sapien
tggcgtcatcagactgccgggcaca

SEQ ID NO: 3630523 - DNA, 25 bp, Homo sapien
gttttgatgagacccgcggtggtcc

SEQ ID NO: 3630524 - DNA, 25 bp, Homo sapien
gcacagggatagatgcgcgttttga

SEQ ID NO: 3630525 - DNA, 25 bp, Homo sapien
tgcctggcgtcatcagactgccggg

SEQ ID NO: 3630526 - DNA, 25 bp, Homo sapien
tcaggcagcagcaacagctgcccta

SEQ ID NO: 3630527 - DNA, 25 bp, Homo sapien
caggcagcagcaacagctgccctat

SEQ ID NO: 3630528 - DNA, 25 bp, Homo sapien
gaggctgagagagcacaggtgactg

SEQ ID NO: 3630529 - DNA, 25 bp, Homo sapien
gctgagagagcacaggtgactgaga

SEQ ID NO: 3630530 - DNA, 25 bp, Homo sapien
tggaggctgagagagcacaggtgac

SEQ ID NO: 3630531 - DNA, 25 bp, Homo sapien
ctggaggctgagagagcacaggtga

SEQ ID NO: 3630532 - DNA, 25 bp, Homo sapien
acgtataagtgatgacatcaaatcc

SEQ ID NO: 3630533 - DNA, 25 bp, Homo sapien
ccacgtataagtgatgacatcaaat

SEQ ID NO: 3630534 - DNA, 25 bp, Homo sapien
accacgtataagtgatgacatcaaa

SEQ ID NO: 3630535 - DNA, 25 bp, Homo sapien
cacgtataagtgatgacatcaaatc

SEQ ID NO: 3630536 - DNA, 25 bp, Homo sapien
tgcgtgtattgactagcgcctggtc

SEQ ID NO: 3630537 - DNA, 25 bp, Homo sapien
tgagcacctggtctcccggtggagt

SEQ ID NO: 3630538 - DNA, 25 bp, Homo sapien
gattgcgtgtactggtgagcacctg

SEQ ID NO: 3630539 - DNA, 25 bp, Homo sapien
cgtgtattggcgagtgcccggtctc

SEQ ID NO: 3630540 - DNA, 25 bp, Homo sapien
tgcgtgtattgactagcgcctggtc

SEQ ID NO: 3630541 - DNA, 25 bp, Homo sapien
ctagcgtctggtctcccggtggagt

SEQ ID NO: 3630542 - DNA, 25 bp, Homo sapien
cctggtctcccggtggagtgggatt

SEQ ID NO: 3630543 - DNA, 25 bp, Homo sapien
gggattgcgtgtattgactagcgtc

SEQ ID NO: 3630544 - DNA, 25 bp, Homo sapien
tattgactagcgtctggtctcccgg

SEQ ID NO: 3630545 - DNA, 25 bp, Homo sapien
gattgagtgtattgacgagcgcctg

SEQ ID NO: 3630546 - DNA, 25 bp, Homo sapien
tgtattggcgagtgcccggtctcct

SEQ ID NO: 3630547 - DNA, 25 bp, Homo sapien
tgagtgtattgacgagcgcctggtc

SEQ ID NO: 3630548 - DNA, 25 bp, Homo sapien
tgaggcattcattctcaaatgtggg

SEQ ID NO: 3630549 - DNA, 25 bp, Homo sapien
cttgaatcttgcattgcaatctgct

SEQ ID NO: 3630550 - DNA, 25 bp, Homo sapien
catcgcatgtggtgaaacattcctc

SEQ ID NO: 3630551 - DNA, 25 bp, Homo sapien
gagaaaatcagcgagagcactgcca

SEQ ID NO: 3630552 - DNA, 25 bp, Homo sapien
gctgttcctattccccagttctctt

SEQ ID NO: 3630553 - DNA, 25 bp, Homo sapien
aggcctgggaagcatctgtggaggt

SEQ ID NO: 3630554 - DNA, 25 bp, Homo sapien
ctgggaagcatctgtggaggtatca

SEQ ID NO: 3630555 - DNA, 25 bp, Homo sapien
tgaccctgcaggaccaccggacagg

SEQ ID NO: 3630556 - DNA, 25 bp, Homo sapien
ttacatttgaccctgcaggaccacc

SEQ ID NO: 3630557 - DNA, 25 bp, Homo sapien
cgactcagatccctgtgcaaccaaa

SEQ ID NO: 3630558 - DNA, 25 bp, Homo sapien
tttgagaaatacatgggccaatctg

SEQ ID NO: 3630559 - DNA, 25 bp, Homo sapien
cacagggccctggacaatgtttctg

SEQ ID NO: 3630560 - DNA, 25 bp, Homo sapien
gctctgtcaggatggacttgtcact

SEQ ID NO: 3630561 - DNA, 25 bp, Homo sapien
ttgaaatcatcttcatccgagcagt

SEQ ID NO: 3630562 - DNA, 25 bp, Homo sapien
aagatgcacattcaaagcggctttg

SEQ ID NO: 3630563 - DNA, 25 bp, Homo sapien
caggacatcgggcacacacgttaat

SEQ ID NO: 3630564 - DNA, 25 bp, Homo sapien
cttccagacagaagcactgcagcga

SEQ ID NO: 3630565 - DNA, 25 bp, Homo sapien
ttccaaggcagagggcaactaggac

SEQ ID NO: 3630566 - DNA, 25 bp, Homo sapien
cacgtctttttaacggtgccagcaa

SEQ ID NO: 3630567 - DNA, 25 bp, Homo sapien
cattcaggtggcttcgttgagctgc

SEQ ID NO: 3630568 - DNA, 25 bp, Homo sapien
tgtgtacaagcaaaatctcccacgg

SEQ ID NO: 3630569 - DNA, 25 bp, Homo sapien
gattccacaaggtacattggaggct

SEQ ID NO: 3630570 - DNA, 25 bp, Homo sapien
tgactggccatgcaggatccgcaat

SEQ ID NO: 3630571 - DNA, 25 bp, Homo sapien
catatttggaaatagattgagggcc

SEQ ID NO: 3630572 - DNA, 25 bp, Homo sapien
gaagcggcgtgtcaatcttcacaga

SEQ ID NO: 3630573 - DNA, 25 bp, Homo sapien
cggacgaagtggggcgagggcggcg

SEQ ID NO: 3630574 - DNA, 25 bp, Homo sapien
ggacgaagtggggcgagggcggcga

SEQ ID NO: 3630575 - DNA, 25 bp, Homo sapien
cgcagtccccagtggccggccgggc

SEQ ID NO: 3630576 - DNA, 25 bp, Homo sapien
tctccgggccccgcagtccccagtg

SEQ ID NO: 3630577 - DNA, 25 bp, Homo sapien
acagtgagcagccacgctgcgacat

SEQ ID NO: 3630578 - DNA, 25 bp, Homo sapien
cagggcgctcgggagttcagatccc

SEQ ID NO: 3630579 - DNA, 25 bp, Homo sapien
ttcagatcccgtggaaatgtctggg

SEQ ID NO: 3630580 - DNA, 25 bp, Homo sapien
tctccgggcttgtccgttgtgagca

SEQ ID NO: 3630581 - DNA, 25 bp, Homo sapien
aacctcaagcttcgcagcagcggcg

SEQ ID NO: 3630582 - DNA, 25 bp, Homo sapien
ggagggctgagcagtcaactcaaat

SEQ ID NO: 3630583 - DNA, 25 bp, Homo sapien
actcaaatgcaagtccaagaggagg

SEQ ID NO: 3630584 - DNA, 25 bp, Homo sapien
gctcccgggtttgcaacctcaagct

SEQ ID NO: 3630585 - DNA, 25 bp, Homo sapien
cgccatcgaggtcttgtgcattaac

SEQ ID NO: 3630586 - DNA, 25 bp, Homo sapien
tagtggtaacaaccccagactgtga

SEQ ID NO: 3630587 - DNA, 25 bp, Homo sapien
tgtgaatcctgactagtaacccgtg

SEQ ID NO: 3630588 - DNA, 25 bp, Homo sapien
gaatattgtttcagtcctgccgcca

SEQ ID NO: 3630589 - DNA, 25 bp, Homo sapien
ctcggggaagcagaaacccaaggct

SEQ ID NO: 3630590 - DNA, 25 bp, Homo sapien
tggatcccagtcaggctggggtctc

SEQ ID NO: 3630591 - DNA, 25 bp, Homo sapien
cggggaagcagaaacccaaggctgc

SEQ ID NO: 3630592 - DNA, 25 bp, Homo sapien
gggaagcagaaacccaaggctgccc

SEQ ID NO: 3630593 - DNA, 25 bp, Homo sapien
gccactgtcctggaaatcggatctc

SEQ ID NO: 3630594 - DNA, 25 bp, Homo sapien
tgtcctggaaatcggatctccctct

SEQ ID NO: 3630595 - DNA, 25 bp, Homo sapien
ggatctccctctgatgtgttggcag

SEQ ID NO: 3630596 - DNA, 25 bp, Homo sapien
ggaaatcggatctccctctgatgtg

SEQ ID NO: 3630597 - DNA, 25 bp, Homo sapien
catcatgaaccttgtcatcagggac

SEQ ID NO: 3630598 - DNA, 25 bp, Homo sapien
aaccttgtcatcagggacaggctcc

SEQ ID NO: 3630599 - DNA, 25 bp, Homo sapien
tctcatagccattttcagaaagctg

SEQ ID NO: 3630600 - DNA, 25 bp, Homo sapien
ttgagcagtattgtggctgtcatca

SEQ ID NO: 3630601 - DNA, 25 bp, Homo sapien
tgtctcctctcgtgctcagctgata

SEQ ID NO: 3630602 - DNA, 25 bp, Homo sapien
aaaatgctaaatagcatcaatgctg

SEQ ID NO: 3630603 - DNA, 25 bp, Homo sapien
cgagcgggggtcagcatcagccaca

SEQ ID NO: 3630604 - DNA, 25 bp, Homo sapien
cggcgctcaaagagctcctgtctcc

SEQ ID NO: 3630605 - DNA, 25 bp, Homo sapien
cgtgtctggcaaaatgcagtggagc

SEQ ID NO: 3630606 - DNA, 25 bp, Homo sapien
cccgtgtctggcaaaatgcagtgga

SEQ ID NO: 3630607 - DNA, 25 bp, Homo sapien
ggagccgtaattgccgctgcttcct

SEQ ID NO: 3630608 - DNA, 25 bp, Homo sapien
tgcagtggagccgtaattgccgctg

SEQ ID NO: 3630609 - DNA, 25 bp, Homo sapien
tttccagccggtcctgacagctcag

SEQ ID NO: 3630610 - DNA, 25 bp, Homo sapien
agcatcagcttttaatcgaggtgac

SEQ ID NO: 3630611 - DNA, 25 bp, Homo sapien
tcagcttttaatcgaggtgacctaa

SEQ ID NO: 3630612 - DNA, 25 bp, Homo sapien
tttaatcgaggtgacctaatccgac

SEQ ID NO: 3630613 - DNA, 25 bp, Homo sapien
gcttttaatcgaggtgacctaatcc

SEQ ID NO: 3630614 - DNA, 25 bp, Homo sapien
agtttttgccttcgtatccaggact

SEQ ID NO: 3630615 - DNA, 25 bp, Homo sapien
gagtctgttggccaatcactggcag

SEQ ID NO: 3630616 - DNA, 25 bp, Homo sapien
ctttcccgctggacaagcaagcatg

SEQ ID NO: 3630617 - DNA, 25 bp, Homo sapien
tatgtccttgtaccagatcatgcag

SEQ ID NO: 3630618 - DNA, 25 bp, Homo sapien
tcaaggtcatcatactttgtggcca

SEQ ID NO: 3630619 - DNA, 25 bp, Homo sapien
atacacctgcccacctgactgttcg

SEQ ID NO: 3630620 - DNA, 25 bp, Homo sapien
tgcccacctgactgttcggagcctc

SEQ ID NO: 3630621 - DNA, 25 bp, Homo sapien
tgactgttcggagcctcctctggag

SEQ ID NO: 3630622 - DNA, 25 bp, Homo sapien
cctgactgttcggagcctcctctgg

SEQ ID NO: 3630623 - DNA, 25 bp, Homo sapien
cacctggctgttcggagcctcctct

SEQ ID NO: 3630624 - DNA, 25 bp, Homo sapien
ctggctgttcggagcctcctctgga

SEQ ID NO: 3630625 - DNA, 25 bp, Homo sapien
ctggagtccatgtcttccggggcat

SEQ ID NO: 3630626 - DNA, 25 bp, Homo sapien
gcccacctggctgttcggagcctcc

SEQ ID NO: 3630627 - DNA, 25 bp, Homo sapien
ctggagtccatgtcttccggggcat

SEQ ID NO: 3630628 - DNA, 25 bp, Homo sapien
tagaacagacgctctgggacaggct

SEQ ID NO: 3630629 - DNA, 25 bp, Homo sapien
tttgtctcagatgccctgatgtgca

SEQ ID NO: 3630630 - DNA, 25 bp, Homo sapien
cacagtgggacgcatccgtagaaca

SEQ ID NO: 3630631 - DNA, 25 bp, Homo sapien
gacaggcttctcacatttgtctcag

SEQ ID NO: 3630632 - DNA, 25 bp, Homo sapien
tcattccaccatatctatttgtatc

SEQ ID NO: 3630633 - DNA, 25 bp, Homo sapien
cattccaccatatctatttgtatct

SEQ ID NO: 3630634 - DNA, 25 bp, Homo sapien
caatggattaaaaagaaccaggcct

SEQ ID NO: 3630635 - DNA, 25 bp, Homo sapien
gccagttccaagagaatgttcaatg

SEQ ID NO: 3630636 - DNA, 25 bp, Homo sapien
taatattggccagttccaagagaat

SEQ ID NO: 3630637 - DNA, 25 bp, Homo sapien
ccaagagaatgttcaatggattaaa

SEQ ID NO: 3630638 - DNA, 25 bp, Homo sapien
ttcttttgttttcaccttctgcaaa

SEQ ID NO: 3630639 - DNA, 25 bp, Homo sapien
cagaaatcgaagccctttccttctt

SEQ ID NO: 3630640 - DNA, 25 bp, Homo sapien
ttgttttcaccttctgcaaagacat

SEQ ID NO: 3630641 - DNA, 25 bp, Homo sapien
cttttgttttcaccttctgcaaaga

SEQ ID NO: 3630642 - DNA, 25 bp, Homo sapien
cctggatgcgccagtgaggatcaag

SEQ ID NO: 3630643 - DNA, 25 bp, Homo sapien
agtggcccggcctggatgcgccagt

SEQ ID NO: 3630644 - DNA, 25 bp, Homo sapien
aaacagaagtggcccggcctggatg

SEQ ID NO: 3630645 - DNA, 25 bp, Homo sapien
cccggcctggatgcgccagtgagga

SEQ ID NO: 3630646 - DNA, 25 bp, Homo sapien
tggtgcaggaacgaacaggtacagc

SEQ ID NO: 3630647 - DNA, 25 bp, Homo sapien
ctgggctgaagtcgtggcccgttca

SEQ ID NO: 3630648 - DNA, 25 bp, Homo sapien
tccaaattcacaggcgaggtggtgc

SEQ ID NO: 3630649 - DNA, 25 bp, Homo sapien
cgttcaaaggcatcacggtggagcc

SEQ ID NO: 3630650 - DNA, 25 bp, Homo sapien
cttgtggcagacagagcttgacaca

SEQ ID NO: 3630651 - DNA, 25 bp, Homo sapien
agacagagcttgacacatggtgacc

SEQ ID NO: 3630652 - DNA, 25 bp, Homo sapien
ggcagacagagcttgacacatggtg

SEQ ID NO: 3630653 - DNA, 25 bp, Homo sapien
tgtggcagacagagcttgacacatg

SEQ ID NO: 3630654 - DNA, 25 bp, Homo sapien
gactgtttctggcttaactcgcctt

SEQ ID NO: 3630655 - DNA, 25 bp, Homo sapien
ggcctggactgtttctggcttaact

SEQ ID NO: 3630656 - DNA, 25 bp, Homo sapien
ttctggcttaactcgcctttgtcat

SEQ ID NO: 3630657 - DNA, 25 bp, Homo sapien
tgcagccacggggagactgagtccc

SEQ ID NO: 3630658 - DNA, 25 bp, Homo sapien
cctgggccgtgctctgctcgggaaa

SEQ ID NO: 3630659 - DNA, 25 bp, Homo sapien
tggcattgggtgtacccagcctgga

SEQ ID NO: 3630660 - DNA, 25 bp, Homo sapien
ggccaacgcgcccaggtttccatct

SEQ ID NO: 3630661 - DNA, 25 bp, Homo sapien
gaaagctcatggtgggtggcacgag

SEQ ID NO: 3630662 - DNA, 25 bp, Homo sapien
ctcatctgccgcagagggggtcact

SEQ ID NO: 3630663 - DNA, 25 bp, Homo sapien
tcaaaatgttcgctttcgtggctct

SEQ ID NO: 3630664 - DNA, 25 bp, Homo sapien
gcctttccggtcatctttttgtgtg

SEQ ID NO: 3630665 - DNA, 25 bp, Homo sapien
taaccttagcaagggcagacttcct

SEQ ID NO: 3630666 - DNA, 25 bp, Homo sapien
aaaagcacgttcatctatcaaaatg

SEQ ID NO: 3630667 - DNA, 25 bp, Homo sapien
aaagcacgttcatctatcaaaatgt

SEQ ID NO: 3630668 - DNA, 25 bp, Homo sapien
gtgcatggcgatgtgtcggcgcagg

SEQ ID NO: 3630669 - DNA, 25 bp, Homo sapien
gcatggcgatgtgtcggcgcagggt

SEQ ID NO: 3630670 - DNA, 25 bp, Homo sapien
atgtgtcggcgcagggtggggaagc

SEQ ID NO: 3630671 - DNA, 25 bp, Homo sapien
atggcgatgtgtcggcgcagggtgg

SEQ ID NO: 3630672 - DNA, 25 bp, Homo sapien
gctcgggcacagcaatcgatttgga

SEQ ID NO: 3630673 - DNA, 25 bp, Homo sapien
cacagcaatcgatttggacagggaa

SEQ ID NO: 3630674 - DNA, 25 bp, Homo sapien
gggcacagcaatcgatttggacagg

SEQ ID NO: 3630675 - DNA, 25 bp, Homo sapien
gggaagtgagtcccgttgcaggcat

SEQ ID NO: 3630676 - DNA, 25 bp, Homo sapien
atttgagaaattgattagagaagtt

SEQ ID NO: 3630677 - DNA, 25 bp, Homo sapien
aaagccaagccggtatatcagagcc

SEQ ID NO: 3630678 - DNA, 25 bp, Homo sapien
ttaacagttagcagggaggtcgtcc

SEQ ID NO: 3630679 - DNA, 25 bp, Homo sapien
tctaggaagatgaaccacaggcctc

SEQ ID NO: 3630680 - DNA, 25 bp, Homo sapien
tcagagccgtgcaatggagaagagc

SEQ ID NO: 3630681 - DNA, 25 bp, Homo sapien
ggtaatgaatcttacgccacatcat

SEQ ID NO: 3630682 - DNA, 25 bp, Homo sapien
tggtaatgaatcttacgccacatca

SEQ ID NO: 3630683 - DNA, 25 bp, Homo sapien
ctggtaatgaatcttacgccacatc

SEQ ID NO: 3630684 - DNA, 25 bp, Homo sapien
gttggtattaaagaaatggattgtg

SEQ ID NO: 3630685 - DNA, 25 bp, Homo sapien
aagttggtattaaagaaatggattg

SEQ ID NO: 3630686 - DNA, 25 bp, Homo sapien
tggtattaaagaaatggattgtgta

SEQ ID NO: 3630687 - DNA, 25 bp, Homo sapien
ttggtattaaagaaatggattgtgt

SEQ ID NO: 3630688 - DNA, 25 bp, Homo sapien
tttcacaattacaggaggttattaa

SEQ ID NO: 3630689 - DNA, 25 bp, Homo sapien
gcaaaaagtcaagcaccacatccca

SEQ ID NO: 3630690 - DNA, 25 bp, Homo sapien
taaataatagccatgtttggacttg

SEQ ID NO: 3630691 - DNA, 25 bp, Homo sapien
tctcatctcacttttagaaacaacc

SEQ ID NO: 3630692 - DNA, 25 bp, Homo sapien
tggacgctgagctctaaggggacag

SEQ ID NO: 3630693 - DNA, 25 bp, Homo sapien
gctgagctctaaggggacagaagac

SEQ ID NO: 3630694 - DNA, 25 bp, Homo sapien
gacgctgagctctaaggggacagaa

SEQ ID NO: 3630695 - DNA, 25 bp, Homo sapien
gctctaaggggacagaagacttccc

SEQ ID NO: 3630696 - DNA, 25 bp, Homo sapien
aattcagcccaaagtccagcatctc

SEQ ID NO: 3630697 - DNA, 25 bp, Homo sapien
agcatctcctcattcacatcgtgtc

SEQ ID NO: 3630698 - DNA, 25 bp, Homo sapien
tcctcattcacatcgtgtccagaca

SEQ ID NO: 3630699 - DNA, 25 bp, Homo sapien
cgtagaattcagcccaaagtccagc

SEQ ID NO: 3630700 - DNA, 25 bp, Homo sapien
tgccaggtggctgcactccggcaca

SEQ ID NO: 3630701 - DNA, 25 bp, Homo sapien
ggtggctgcactccggcacaggcat

SEQ ID NO: 3630702 - DNA, 25 bp, Homo sapien
gccaggtggctgcactccggcacag

SEQ ID NO: 3630703 - DNA, 25 bp, Homo sapien
tggctgcactccggcacaggcatga

SEQ ID NO: 3630704 - DNA, 25 bp, Homo sapien
gtatcttgcatatcatctacgtcaa

SEQ ID NO: 3630705 - DNA, 25 bp, Homo sapien
catctacgtcaaaggcacatttatc

SEQ ID NO: 3630706 - DNA, 25 bp, Homo sapien
ggagaactggtatacacatttgtca

SEQ ID NO: 3630707 - DNA, 25 bp, Homo sapien
ccgatgggaattctgcccaaggaga

SEQ ID NO: 3630708 - DNA, 25 bp, Homo sapien
ccactgcatgggtcattacattcca

SEQ ID NO: 3630709 - DNA, 25 bp, Homo sapien
tcaccaccggtttggatcagtgtct

SEQ ID NO: 3630710 - DNA, 25 bp, Homo sapien
tcaccactgcatgggtcattacatt

SEQ ID NO: 3630711 - DNA, 25 bp, Homo sapien
tagcaagccttcgaatgcatcacga

SEQ ID NO: 3630712 - DNA, 25 bp, Homo sapien
ccttggccctgtttgaagggctgca

SEQ ID NO: 3630713 - DNA, 25 bp, Homo sapien
ctgcgaggagaaaaccactcattgc

SEQ ID NO: 3630714 - DNA, 25 bp, Homo sapien
cccaaacttgagaatactgcgagga

SEQ ID NO: 3630715 - DNA, 25 bp, Homo sapien
taagcacaccataaaccagcatacc

SEQ ID NO: 3630716 - DNA, 25 bp, Homo sapien
ctacaagattaaagcccctctaatg

SEQ ID NO: 3630717 - DNA, 25 bp, Homo sapien
tacaagattaaagcccctctaatga

SEQ ID NO: 3630718 - DNA, 25 bp, Homo sapien
taaagcccctctaatgatctgaccc

SEQ ID NO: 3630719 - DNA, 25 bp, Homo sapien
agattaaagcccctctaatgatctg

SEQ ID NO: 3630720 - DNA, 25 bp, Homo sapien
gaggaagcaaggattttggggccac

SEQ ID NO: 3630721 - DNA, 25 bp, Homo sapien
attttggggccacctggagtgccat

SEQ ID NO: 3630722 - DNA, 25 bp, Homo sapien
aagcaaggattttggggccacctgg

SEQ ID NO: 3630723 - DNA, 25 bp, Homo sapien
ctgaggaagcaaggattttggggcc

SEQ ID NO: 3630724 - DNA, 25 bp, Homo sapien
aatgcatcactagacatgttgacac

SEQ ID NO: 3630725 - DNA, 25 bp, Homo sapien
agtttggaacgagaagttgactgga

SEQ ID NO: 3630726 - DNA, 25 bp, Homo sapien
tgagtttggaacgagaagttgactg

SEQ ID NO: 3630727 - DNA, 25 bp, Homo sapien
tatccatgaaggcttgtttgcaatg

SEQ ID NO: 3630728 - DNA, 25 bp, Homo sapien
tggggcgcagctcagagtccagtgg

SEQ ID NO: 3630729 - DNA, 25 bp, Homo sapien
gctggggcgcagctcagagtccagt

SEQ ID NO: 3630730 - DNA, 25 bp, Homo sapien
gcgcagctcagagtccagtggagac

SEQ ID NO: 3630731 - DNA, 25 bp, Homo sapien
gggcgcagctcagagtccagtggag

SEQ ID NO: 3630732 - DNA, 25 bp, Homo sapien
tggaatcctcatggcaccaaactca

SEQ ID NO: 3630733 - DNA, 25 bp, Homo sapien
agatgctgccaggttggaaatcggc

SEQ ID NO: 3630734 - DNA, 25 bp, Homo sapien
caaactcaagggacctgcggtaaag

SEQ ID NO: 3630735 - DNA, 25 bp, Homo sapien
tcatatgacagaagggtccagagcc

SEQ ID NO: 3630736 - DNA, 25 bp, Homo sapien
taagaagatgcatttgcgtattttt

SEQ ID NO: 3630737 - DNA, 25 bp, Homo sapien
aagaagatgcatttgcgtatttttt

SEQ ID NO: 3630738 - DNA, 25 bp, Homo sapien
ccaggataaaggattagaaaaggct

SEQ ID NO: 3630739 - DNA, 25 bp, Homo sapien
gaaaaggctacatccattaacggga

SEQ ID NO: 3630740 - DNA, 25 bp, Homo sapien
taacgggaatgttctggcagatgca

SEQ ID NO: 3630741 - DNA, 25 bp, Homo sapien
tccgggtgggcattgcattattgca

SEQ ID NO: 3630742 - DNA, 25 bp, Homo sapien
cctgcgtggggtgcctacgtccgaa

SEQ ID NO: 3630743 - DNA, 25 bp, Homo sapien
cgtccgaaggttctaactttatgcg

SEQ ID NO: 3630744 - DNA, 25 bp, Homo sapien
tatgcggatacatccaaccttaagg

SEQ ID NO: 3630745 - DNA, 25 bp, Homo sapien
gatctgccatgggtgtcttcttgtt

SEQ ID NO: 3630746 - DNA, 25 bp, Homo sapien
tgggggcccatttcctccacattca

SEQ ID NO: 3630747 - DNA, 25 bp, Homo sapien
agctaagtgttccatgaaactgtgt

SEQ ID NO: 3630748 - DNA, 25 bp, Homo sapien
agtgttccatgaaactgtgtctaca

SEQ ID NO: 3630749 - DNA, 25 bp, Homo sapien
ttcaccaaaaatagctaagtgttcc

SEQ ID NO: 3630750 - DNA, 25 bp, Homo sapien
gcaacaaggaatgccccttgcaaat

SEQ ID NO: 3630751 - DNA, 25 bp, Homo sapien
tcttcctgagttgtgtcatctgcaa

SEQ ID NO: 3630752 - DNA, 25 bp, Homo sapien
ttggtcataagcaacaaggaatgcc

SEQ ID NO: 3630753 - DNA, 25 bp, Homo sapien
gcaaatcttcctgagttgtgtcatc

SEQ ID NO: 3630754 - DNA, 25 bp, Homo sapien
caatgatggccatccagatgattga

SEQ ID NO: 3630755 - DNA, 25 bp, Homo sapien
gtcattttcaatgatggccatccag

SEQ ID NO: 3630756 - DNA, 25 bp, Homo sapien
ttgagagtgtgcgagcaggattgtt

SEQ ID NO: 3630757 - DNA, 25 bp, Homo sapien
ccagatgattgagagtgtgcgagca

SEQ ID NO: 3630758 - DNA, 25 bp, Homo sapien
gatgacgtttattgagttgcgttat

SEQ ID NO: 3630759 - DNA, 25 bp, Homo sapien
tcatttcttgctccaattttagatg

SEQ ID NO: 3630760 - DNA, 25 bp, Homo sapien
ccaattttagatgacgtttattgag

SEQ ID NO: 3630761 - DNA, 25 bp, Homo sapien
catttcttgctccaattttagatga

SEQ ID NO: 3630762 - DNA, 25 bp, Homo sapien
gatattaatattaatgcagtgccat

SEQ ID NO: 3630763 - DNA, 25 bp, Homo sapien
aaaacgagtaagtgcaataaataca

SEQ ID NO: 3630764 - DNA, 25 bp, Homo sapien
tctaactataccaattaaaggcaat

SEQ ID NO: 3630765 - DNA, 25 bp, Homo sapien
tgttctaactataccaattaaaggc

SEQ ID NO: 3630766 - DNA, 25 bp, Homo sapien
gcaaatgccaagcagacgcctatac

SEQ ID NO: 3630767 - DNA, 25 bp, Homo sapien
tgattgtcggagtaatgtgcacatc

SEQ ID NO: 3630768 - DNA, 25 bp, Homo sapien
gagtaatgtgcacatcacaatggac

SEQ ID NO: 3630769 - DNA, 25 bp, Homo sapien
tgcacatcacaatggaccatgcaga

SEQ ID NO: 3630770 - DNA, 25 bp, Homo sapien
cataaccagatcctctgctgctgaa

SEQ ID NO: 3630771 - DNA, 25 bp, Homo sapien
tgaacactgtttcagccagtgggct

SEQ ID NO: 3630772 - DNA, 25 bp, Homo sapien
tgtttcagccagtgggctacttttc

SEQ ID NO: 3630773 - DNA, 25 bp, Homo sapien
gggagtggggaaccataaccagatc

SEQ ID NO: 3630774 - DNA, 25 bp, Homo sapien
cagaagccatggtgtgagaagaaca

SEQ ID NO: 3630775 - DNA, 25 bp, Homo sapien
tctgagagaagctgtcgtggatgca

SEQ ID NO: 3630776 - DNA, 25 bp, Homo sapien
taatggctaggatcacttgtctgag

SEQ ID NO: 3630777 - DNA, 25 bp, Homo sapien
tggatgcaaaaccacgacatcaggt

SEQ ID NO: 3630778 - DNA, 25 bp, Homo sapien
gggccaactcggagagctgcacaga

SEQ ID NO: 3630779 - DNA, 25 bp, Homo sapien
tgtgtatggaaatagggccaactcg

SEQ ID NO: 3630780 - DNA, 25 bp, Homo sapien
cactggccaacaacccaaacgtggt

SEQ ID NO: 3630781 - DNA, 25 bp, Homo sapien
aacgtggtcctttcaccaactccat

SEQ ID NO: 3630782 - DNA, 25 bp, Homo sapien
tgtttgcaggcataccagtggagat

SEQ ID NO: 3630783 - DNA, 25 bp, Homo sapien
gctggcttgtttgcaggcataccag

SEQ ID NO: 3630784 - DNA, 25 bp, Homo sapien
cataccagtggagatcctttcttcc

SEQ ID NO: 3630785 - DNA, 25 bp, Homo sapien
atttcttgctgaagtgcgttgctgc

SEQ ID NO: 3630786 - DNA, 25 bp, Homo sapien
cttccaaagcctggccggatctcac

SEQ ID NO: 3630787 - DNA, 25 bp, Homo sapien
cagcctgaactgtgagcccaagagt

SEQ ID NO: 3630788 - DNA, 25 bp, Homo sapien
agcctgaactgtgagcccaagagtg

SEQ ID NO: 3630789 - DNA, 25 bp, Homo sapien
cagcttccaaagcctggccggatct

SEQ ID NO: 3630790 - DNA, 25 bp, Homo sapien
tgacagccagtggaacccttcactg

SEQ ID NO: 3630791 - DNA, 25 bp, Homo sapien
tcatgtcggcacagggaacgttcca

SEQ ID NO: 3630792 - DNA, 25 bp, Homo sapien
tgacaagagcccaggcctcatgtcg

SEQ ID NO: 3630793 - DNA, 25 bp, Homo sapien
ggaacgttccatccacaccaagtca

SEQ ID NO: 3630794 - DNA, 25 bp, Homo sapien
ctgacaatggacagcaccgtccagg

SEQ ID NO: 3630795 - DNA, 25 bp, Homo sapien
cccacgcacctggctgttcagggcc

SEQ ID NO: 3630796 - DNA, 25 bp, Homo sapien
accccacgcacctggctgttcaggg

SEQ ID NO: 3630797 - DNA, 25 bp, Homo sapien
gacaatggacagcaccgtccaggct

SEQ ID NO: 3630798 - DNA, 25 bp, Homo sapien
cctccatgggtctgagcccaggctg

SEQ ID NO: 3630799 - DNA, 25 bp, Homo sapien
tctgaaagccgcactgagctcgagt

SEQ ID NO: 3630800 - DNA, 25 bp, Homo sapien
tgcgactgccatccatctgaaagcc

SEQ ID NO: 3630801 - DNA, 25 bp, Homo sapien
tcgagtggccgcgtttctgctgacc

SEQ ID NO: 3630802 - DNA, 25 bp, Homo sapien
tgtccaggctgagacgcccaaaagt

SEQ ID NO: 3630803 - DNA, 25 bp, Homo sapien
tgtgttggggggttcatttcctgca

SEQ ID NO: 3630804 - DNA, 25 bp, Homo sapien
tccaggctgagacgcccaaaagttc

SEQ ID NO: 3630805 - DNA, 25 bp, Homo sapien
ttctgtccaggctgagacgcccaaa

SEQ ID NO: 3630806 - DNA, 25 bp, Homo sapien
gagtcctggtagtggttactggaag

SEQ ID NO: 3630807 - DNA, 25 bp, Homo sapien
ctgagtcctggtagtggttactgga

SEQ ID NO: 3630808 - DNA, 25 bp, Homo sapien
tgagtcctggtagtggttactggaa

SEQ ID NO: 3630809 - DNA, 25 bp, Homo sapien
agtcctggtagtggttactggaagg

SEQ ID NO: 3630810 - DNA, 25 bp, Homo sapien
tctttcctttcagggacagctgtca

SEQ ID NO: 3630811 - DNA, 25 bp, Homo sapien
actgtatagggaggagatgcggcct

SEQ ID NO: 3630812 - DNA, 25 bp, Homo sapien
ctttcctttcagggacagctgtcac

SEQ ID NO: 3630813 - DNA, 25 bp, Homo sapien
ggactttctgaacagcatggtgtaa

SEQ ID NO: 3630814 - DNA, 25 bp, Homo sapien
caacaaaatagcttgccggactttc

SEQ ID NO: 3630815 - DNA, 25 bp, Homo sapien
catggtgtaagaggtaagaggcatt

SEQ ID NO: 3630816 - DNA, 25 bp, Homo sapien
tgcctctcgtcataatgatcacggg

SEQ ID NO: 3630817 - DNA, 25 bp, Homo sapien
gggaagtccctacacttgttgcctg

SEQ ID NO: 3630818 - DNA, 25 bp, Homo sapien
gaggagccctgggtgaacttcctga

SEQ ID NO: 3630819 - DNA, 25 bp, Homo sapien
cgtcctggtgaaccatagtcttgct

SEQ ID NO: 3630820 - DNA, 25 bp, Homo sapien
ggagccttgcatggacatctgatgg

SEQ ID NO: 3630821 - DNA, 25 bp, Homo sapien
gaggaatccttagagtaagttttca

SEQ ID NO: 3630822 - DNA, 25 bp, Homo sapien
taatcggtagttgtgaagtaggtct

SEQ ID NO: 3630823 - DNA, 25 bp, Homo sapien
tctgcgttgggcagctctcaacatc

SEQ ID NO: 3630824 - DNA, 25 bp, Homo sapien
taacccctcacgaaagagggagatg

SEQ ID NO: 3630825 - DNA, 25 bp, Homo sapien
cacggcgaagaacggtgatggaatt

SEQ ID NO: 3630826 - DNA, 25 bp, Homo sapien
gtgacccaggcagcacggcgaagaa

SEQ ID NO: 3630827 - DNA, 25 bp, Homo sapien
catgaatttggtagcagtgacccag

SEQ ID NO: 3630828 - DNA, 25 bp, Homo sapien
gtggcatgaatttggtagcagtgac

SEQ ID NO: 3630829 - DNA, 25 bp, Homo sapien
atgtttttcgattaatgtgctcctg

SEQ ID NO: 3630830 - DNA, 25 bp, Homo sapien
gaggcttcagcccattcccgaattc

SEQ ID NO: 3630831 - DNA, 25 bp, Homo sapien
aagcaattcattgcctgctctaaag

SEQ ID NO: 3630832 - DNA, 25 bp, Homo sapien
tctagtcgaagaagcattttggtgc

SEQ ID NO: 3630833 - DNA, 25 bp, Homo sapien
tgagcagctcagttatttccatgtg

SEQ ID NO: 3630834 - DNA, 25 bp, Homo sapien
tgctccgtaaaaacccagcttggaa

SEQ ID NO: 3630835 - DNA, 25 bp, Homo sapien
agcttggaaacagggtggcggttgg

SEQ ID NO: 3630836 - DNA, 25 bp, Homo sapien
tatttcccgtgactgtcagctgctc

SEQ ID NO: 3630837 - DNA, 25 bp, Homo sapien
cagatcgtgccactgggaagaggca

SEQ ID NO: 3630838 - DNA, 25 bp, Homo sapien
ttggaaaacagacatggtgatgatg

SEQ ID NO: 3630839 - DNA, 25 bp, Homo sapien
ggaaaacagacatggtgatgatgct

SEQ ID NO: 3630840 - DNA, 25 bp, Homo sapien
ccttggaaaacagacatggtgatga

SEQ ID NO: 3630841 - DNA, 25 bp, Homo sapien
aaaacagacatggtgatgatgctca

SEQ ID NO: 3630842 - DNA, 25 bp, Homo sapien
tgatttgcaaccacacggagcctgt

SEQ ID NO: 3630843 - DNA, 25 bp, Homo sapien
gcaggaccactggattcctggtgct

SEQ ID NO: 3630844 - DNA, 25 bp, Homo sapien
ggtcttctgaactcagtgtgacgaa

SEQ ID NO: 3630845 - DNA, 25 bp, Homo sapien
gagtgttagagctaccgcaggacca

SEQ ID NO: 3630846 - DNA, 25 bp, Homo sapien
tgttgcaccctttattaggacacag

SEQ ID NO: 3630847 - DNA, 25 bp, Homo sapien
ggacacagcacaaatccactcaaac

SEQ ID NO: 3630848 - DNA, 25 bp, Homo sapien
tcaaacctagcagctgtccagcatg

SEQ ID NO: 3630849 - DNA, 25 bp, Homo sapien
tcactacccgatcaccaaaacggtg

SEQ ID NO: 3630850 - DNA, 25 bp, Homo sapien
caggcgacttccatcgcaggatgca

SEQ ID NO: 3630851 - DNA, 25 bp, Homo sapien
gaccagagatggctttgacaccagg

SEQ ID NO: 3630852 - DNA, 25 bp, Homo sapien
tggatgtccctgagctaagtcccag

SEQ ID NO: 3630853 - DNA, 25 bp, Homo sapien
ggtgggtttcacactgatagcagca

SEQ ID NO: 3630854 - DNA, 25 bp, Homo sapien
tctaacacgaagcatagagagggaa

SEQ ID NO: 3630855 - DNA, 25 bp, Homo sapien
tgccgccattttgggtaacaaaagc

SEQ ID NO: 3630856 - DNA, 25 bp, Homo sapien
tgaaagagcatttatgattaaagag

SEQ ID NO: 3630857 - DNA, 25 bp, Homo sapien
agcaatgatgtgattaagtctaaca

SEQ ID NO: 3630858 - DNA, 25 bp, Homo sapien
cattcttccggtgagtgtgccaaca

SEQ ID NO: 3630859 - DNA, 25 bp, Homo sapien
gatgagctaccatggaacgcagtga

SEQ ID NO: 3630860 - DNA, 25 bp, Homo sapien
tgcagaagggtacacggagcaacac

SEQ ID NO: 3630861 - DNA, 25 bp, Homo sapien
caaacgccagttacaagtgcaggtg

SEQ ID NO: 3630862 - DNA, 25 bp, Homo sapien
agaagtctgtccctcatactggatg

SEQ ID NO: 3630863 - DNA, 25 bp, Homo sapien
gtggaagtcctatgtcattgctggg

SEQ ID NO: 3630864 - DNA, 25 bp, Homo sapien
gccgagggttttccctgcacaatgt

SEQ ID NO: 3630865 - DNA, 25 bp, Homo sapien
tgcacaatgttttccgcagactgtg

SEQ ID NO: 3630866 - DNA, 25 bp, Homo sapien
gctcagactgttgcgggtgtcgttt

SEQ ID NO: 3630867 - DNA, 25 bp, Homo sapien
ctgcggtacagaagacagtggccca

SEQ ID NO: 3630868 - DNA, 25 bp, Homo sapien
tgtcgttttcattccgggacaatgg

SEQ ID NO: 3630869 - DNA, 25 bp, Homo sapien
agcaagccgagtcccgggaagatca

SEQ ID NO: 3630870 - DNA, 25 bp, Homo sapien
tagacggccactatgttcaccattt

SEQ ID NO: 3630871 - DNA, 25 bp, Homo sapien
cagaggttggcctgcgatcataacc

SEQ ID NO: 3630872 - DNA, 25 bp, Homo sapien
gatatggcaagtgactgaagtcagc

SEQ ID NO: 3630873 - DNA, 25 bp, Homo sapien
taataaacgaacctgtaggcctgct

SEQ ID NO: 3630874 - DNA, 25 bp, Homo sapien
acagggcaaatgctggcacctccag

SEQ ID NO: 3630875 - DNA, 25 bp, Homo sapien
agagagcattgcactttgatttggg

SEQ ID NO: 3630876 - DNA, 25 bp, Homo sapien
aatttcagtgccttttagtccatgc

SEQ ID NO: 3630877 - DNA, 25 bp, Homo sapien
tgtggcatctggatttctgaagaaa

SEQ ID NO: 3630878 - DNA, 25 bp, Homo sapien
gcgcttatgtaattgtcaaaagaca

SEQ ID NO: 3630879 - DNA, 25 bp, Homo sapien
gcttcaggactcatttcacgtaggc

SEQ ID NO: 3630880 - DNA, 25 bp, Homo sapien
attcttttcttacagtgcgcttatg

SEQ ID NO: 3630881 - DNA, 25 bp, Homo sapien
cctgcttcaggactcatttcacgta

SEQ ID NO: 3630882 - DNA, 25 bp, Homo sapien
gatctttaggtcgtgcatgtgaatc

SEQ ID NO: 3630883 - DNA, 25 bp, Homo sapien
tgtgttgatcagatctgccatggtg

SEQ ID NO: 3630884 - DNA, 25 bp, Homo sapien
caggacggattcctccacggccagg

SEQ ID NO: 3630885 - DNA, 25 bp, Homo sapien
cccgtgcgcccagggtgtctgtctt

SEQ ID NO: 3630886 - DNA, 25 bp, Homo sapien
gcaagcctatatgtcccacaagcac

SEQ ID NO: 3630887 - DNA, 25 bp, Homo sapien
tctttcagaaccaggttctcgttca

SEQ ID NO: 3630888 - DNA, 25 bp, Homo sapien
cacgccctctgcaagcctatatgtc

SEQ ID NO: 3630889 - DNA, 25 bp, Homo sapien
tgtcctgtccaggtctttcagaacc

SEQ ID NO: 3630890 - DNA, 25 bp, Homo sapien
ctgagggcaaggtttactgagtgca

SEQ ID NO: 3630891 - DNA, 25 bp, Homo sapien
gcaaggtttactgagtgcatccttt

SEQ ID NO: 3630892 - DNA, 25 bp, Homo sapien
tcctgagggcaaggtttactgagtg

SEQ ID NO: 3630893 - DNA, 25 bp, Homo sapien
gggcaaggtttactgagtgcatcct

SEQ ID NO: 3630894 - DNA, 25 bp, Homo sapien
gacttttttctcagtgttgctataa

SEQ ID NO: 3630895 - DNA, 25 bp, Homo sapien
tcctatcagtgtagaaggccaagaa

SEQ ID NO: 3630896 - DNA, 25 bp, Homo sapien
gaaatctcactgatgcaaacacaaa

SEQ ID NO: 3630897 - DNA, 25 bp, Homo sapien
taatgtctagaaatggcttagggca

SEQ ID NO: 3630898 - DNA, 25 bp, Homo sapien
ctttctcccgttactgaatagtgag

SEQ ID NO: 3630899 - DNA, 25 bp, Homo sapien
ttactgaatagtgagttgctgctcc

SEQ ID NO: 3630900 - DNA, 25 bp, Homo sapien
ctcccgttactgaatagtgagttgc

SEQ ID NO: 3630901 - DNA, 25 bp, Homo sapien
cttgctctttctcccgttactgaat

SEQ ID NO: 3630902 - DNA, 25 bp, Homo sapien
gtctgacccaggcaccgtaaccaga

SEQ ID NO: 3630903 - DNA, 25 bp, Homo sapien
gagatatgctgatcttactgacccc

SEQ ID NO: 3630904 - DNA, 25 bp, Homo sapien
ggattgcaatggctgctgtctgacc

SEQ ID NO: 3630905 - DNA, 25 bp, Homo sapien
taaagaccaatgaacctgctgctgg

SEQ ID NO: 3630906 - DNA, 25 bp, Homo sapien
ccaagcattgctcgggaataccaaa

SEQ ID NO: 3630907 - DNA, 25 bp, Homo sapien
caaacattgctcgtaggaataccga

SEQ ID NO: 3630908 - DNA, 25 bp, Homo sapien
ggctacgcccatagagtgatcatca

SEQ ID NO: 3630909 - DNA, 25 bp, Homo sapien
aactttgctcgcagggataccgaac

SEQ ID NO: 3630910 - DNA, 25 bp, Homo sapien
aggctgcgtccctccacatgaagga

SEQ ID NO: 3630911 - DNA, 25 bp, Homo sapien
tgaggctgcgtccctccacatgaag

SEQ ID NO: 3630912 - DNA, 25 bp, Homo sapien
cttatgaggctgcgtccctccacat

SEQ ID NO: 3630913 - DNA, 25 bp, Homo sapien
ccacatgaaggaaggtggtttctgg

SEQ ID NO: 3630914 - DNA, 25 bp, Homo sapien
tcaagataccgtgtaaagccacagg

SEQ ID NO: 3630915 - DNA, 25 bp, Homo sapien
tcattttgaaggacaggtgcagcac

SEQ ID NO: 3630916 - DNA, 25 bp, Homo sapien
tcaccgcgcggaacataaagaacag

SEQ ID NO: 3630917 - DNA, 25 bp, Homo sapien
tcattgcatataagtctggagggct

SEQ ID NO: 3630918 - DNA, 25 bp, Homo sapien
caaaacaccatattatcttaattgc

SEQ ID NO: 3630919 - DNA, 25 bp, Homo sapien
tcaaaacaccatattatcttaattg

SEQ ID NO: 3630920 - DNA, 25 bp, Homo sapien
aaaacaccatattatcttaattgct

SEQ ID NO: 3630921 - DNA, 25 bp, Homo sapien
ttgctgtcatagcagtagacgtgct

SEQ ID NO: 3630922 - DNA, 25 bp, Homo sapien
gtcactttgctgtcatagcagtaga

SEQ ID NO: 3630923 - DNA, 25 bp, Homo sapien
ctttgctgtcatagcagtagacgtg

SEQ ID NO: 3630924 - DNA, 25 bp, Homo sapien
cactttgctgtcatagcagtagacg

SEQ ID NO: 3630925 - DNA, 25 bp, Homo sapien
taagggatagggctgaagttcatcc

SEQ ID NO: 3630926 - DNA, 25 bp, Homo sapien
gcataacctagagaggagccctact

SEQ ID NO: 3630927 - DNA, 25 bp, Homo sapien
tattttgggacataagctctgccca

SEQ ID NO: 3630928 - DNA, 25 bp, Homo sapien
ttcatccattcacaacagacagacg

SEQ ID NO: 3630929 - DNA, 25 bp, Homo sapien
ggcggtactgctggcgcacttccca

SEQ ID NO: 3630930 - DNA, 25 bp, Homo sapien
ggcagcactgggcactctggttcag

SEQ ID NO: 3630931 - DNA, 25 bp, Homo sapien
ccacatgtgagtcgctcaggagcag

SEQ ID NO: 3630932 - DNA, 25 bp, Homo sapien
gctgtgctggttcttgtcaggtcca

SEQ ID NO: 3630933 - DNA, 25 bp, Homo sapien
gaagcggcactgctccagcgcactt

SEQ ID NO: 3630934 - DNA, 25 bp, Homo sapien
gttctggaagcggcactgctccagc

SEQ ID NO: 3630935 - DNA, 25 bp, Homo sapien
cctgttctggaagcggcactgctcc

SEQ ID NO: 3630936 - DNA, 25 bp, Homo sapien
tggaagcggcactgctccagcgcac

SEQ ID NO: 3630937 - DNA, 25 bp, Homo sapien
tctgagggacaagcggacaccagaa

SEQ ID NO: 3630938 - DNA, 25 bp, Homo sapien
gacaccagaaagacagcggagagtt

SEQ ID NO: 3630939 - DNA, 25 bp, Homo sapien
tgagtgtcctgggaacctcgagcat

SEQ ID NO: 3630940 - DNA, 25 bp, Homo sapien
tgttcccacagagctaacagggaga

SEQ ID NO: 3630941 - DNA, 25 bp, Homo sapien
caagtgtcacattgcaacatggtct

SEQ ID NO: 3630942 - DNA, 25 bp, Homo sapien
tgttcaagcaacaagcctggctgag

SEQ ID NO: 3630943 - DNA, 25 bp, Homo sapien
tggtgtcggaacatcacagtttgct

SEQ ID NO: 3630944 - DNA, 25 bp, Homo sapien
ggcgatggcgtcatcctgtgccaag

SEQ ID NO: 3630945 - DNA, 25 bp, Homo sapien
tagttgtggtttcgggatctctgca

SEQ ID NO: 3630946 - DNA, 25 bp, Homo sapien
agtggctttgacgtctctctggcaa

SEQ ID NO: 3630947 - DNA, 25 bp, Homo sapien
tgttttacaagaagcgtggactcag

SEQ ID NO: 3630948 - DNA, 25 bp, Homo sapien
gtggtttcgggatctctgcatttca

SEQ ID NO: 3630949 - DNA, 25 bp, Homo sapien
cattgccattttccactagtagctc

SEQ ID NO: 3630950 - DNA, 25 bp, Homo sapien
cagctatataccagttgaggttgag

SEQ ID NO: 3630951 - DNA, 25 bp, Homo sapien
tgtagatttgggtgattaccacggg

SEQ ID NO: 3630952 - DNA, 25 bp, Homo sapien
gaggttgagctcgtatccattgcca

SEQ ID NO: 3630953 - DNA, 25 bp, Homo sapien
ccaaaagccttcagaaatgcctgct

SEQ ID NO: 3630954 - DNA, 25 bp, Homo sapien
gctgactgatcttgtccaaaagcct

SEQ ID NO: 3630955 - DNA, 25 bp, Homo sapien
tggtttctgaccttggcgaagctga

SEQ ID NO: 3630956 - DNA, 25 bp, Homo sapien
ctgtggtaagccacgaagatgtggg

SEQ ID NO: 3630957 - DNA, 25 bp, Homo sapien
cattttgactgtatcgtatctcccc

SEQ ID NO: 3630958 - DNA, 25 bp, Homo sapien
tgctcatttgacaggagtgagtgca

SEQ ID NO: 3630959 - DNA, 25 bp, Homo sapien
gtatctcccctttatcacgtcctat

SEQ ID NO: 3630960 - DNA, 25 bp, Homo sapien
ttgcatgcattttgactgtatcgta

SEQ ID NO: 3630961 - DNA, 25 bp, Homo sapien
aaagtgcatcttattcaatgcaaga

SEQ ID NO: 3630962 - DNA, 25 bp, Homo sapien
agaaaaagtgcatcttattcaatgc

SEQ ID NO: 3630963 - DNA, 25 bp, Homo sapien
catcttattcaatgcaagagcaaga

SEQ ID NO: 3630964 - DNA, 25 bp, Homo sapien
agtgcatcttattcaatgcaagagc

SEQ ID NO: 3630965 - DNA, 25 bp, Homo sapien
tccaaagcagcgtcacagtagactg

SEQ ID NO: 3630966 - DNA, 25 bp, Homo sapien
agcagcgtcacagtagactgtctga

SEQ ID NO: 3630967 - DNA, 25 bp, Homo sapien
agtctccaaagcagcgtcacagtag

SEQ ID NO: 3630968 - DNA, 25 bp, Homo sapien
caaagcagcgtcacagtagactgtc

SEQ ID NO: 3630969 - DNA, 25 bp, Homo sapien
catacttaatacttaccctggagtt

SEQ ID NO: 3630970 - DNA, 25 bp, Homo sapien
aaatggtgcccttgtatcctgcaag

SEQ ID NO: 3630971 - DNA, 25 bp, Homo sapien
cctgcaaggagtgaagcaaattacc

SEQ ID NO: 3630972 - DNA, 25 bp, Homo sapien
ttccaggttcctgccatccagtgac

SEQ ID NO: 3630973 - DNA, 25 bp, Homo sapien
ggttcccagattatccgatagacct

SEQ ID NO: 3630974 - DNA, 25 bp, Homo sapien
cacgtgcaatctttgtggttcccag

SEQ ID NO: 3630975 - DNA, 25 bp, Homo sapien
cattcagcacacgtgcaatctttgt

SEQ ID NO: 3630976 - DNA, 25 bp, Homo sapien
aagagaggggttcgtgcattcagca

SEQ ID NO: 3630977 - DNA, 25 bp, Homo sapien
acggtgccctcactgcacgcaggct

SEQ ID NO: 3630978 - DNA, 25 bp, Homo sapien
atcagggtgccctcactgcgtgcaa

SEQ ID NO: 3630979 - DNA, 25 bp, Homo sapien
atctccagggcgtgctcgcatcacg

SEQ ID NO: 3630980 - DNA, 25 bp, Homo sapien
gattgcatttgtcctgcattgtcag

SEQ ID NO: 3630981 - DNA, 25 bp, Homo sapien
catgaaggctgcccctcacgctgcc

SEQ ID NO: 3630982 - DNA, 25 bp, Homo sapien
acaggaggattgcacttgtcctgca

SEQ ID NO: 3630983 - DNA, 25 bp, Homo sapien
cacaggaggattgcacttgtcctgc

SEQ ID NO: 3630984 - DNA, 25 bp, Homo sapien
aggctgcccctcacgctgcccttct

SEQ ID NO: 3630985 - DNA, 25 bp, Homo sapien
catgaaggctgcccctcacgctgcc

SEQ ID NO: 3630986 - DNA, 25 bp, Homo sapien
acaggaggattgcacttgtcctgca

SEQ ID NO: 3630987 - DNA, 25 bp, Homo sapien
cacaggaggattgcacttgtcctgc

SEQ ID NO: 3630988 - DNA, 25 bp, Homo sapien
aggctgcccctcacgctgcccttct

SEQ ID NO: 3630989 - DNA, 25 bp, Homo sapien
ccctagcaaggcctgcagtattctt

SEQ ID NO: 3630990 - DNA, 25 bp, Homo sapien
ccacgaatgcctggactcattgcag

SEQ ID NO: 3630991 - DNA, 25 bp, Homo sapien
tccacgaatgcctggactcattgca

SEQ ID NO: 3630992 - DNA, 25 bp, Homo sapien
gactcattgcaggcccctagcaagg

SEQ ID NO: 3630993 - DNA, 25 bp, Homo sapien
tcacagtccaaagttgggtccactt

SEQ ID NO: 3630994 - DNA, 25 bp, Homo sapien
cacagtccaaagttgggtccacttt

SEQ ID NO: 3630995 - DNA, 25 bp, Homo sapien
tgtgatgggtcacgattgggcgggc

SEQ ID NO: 3630996 - DNA, 25 bp, Homo sapien
agtcacgtgattcctggcttctaac

SEQ ID NO: 3630997 - DNA, 25 bp, Homo sapien
cgtgtggacggactctacagactgc

SEQ ID NO: 3630998 - DNA, 25 bp, Homo sapien
ggcttctaactccatgtagcaggtg

SEQ ID NO: 3630999 - DNA, 25 bp, Homo sapien
ctgccttcctacgagggactgggac

SEQ ID NO: 3631000 - DNA, 25 bp, Homo sapien
tgcttcttttggaaaccttagacga

SEQ ID NO: 3631001 - DNA, 25 bp, Homo sapien
acactgccttcctacgagggactgg

SEQ ID NO: 3631002 - DNA, 25 bp, Homo sapien
ggactgggacattggggtttctctg

SEQ ID NO: 3631003 - DNA, 25 bp, Homo sapien
gcccattctttctacgagaaaggaa

SEQ ID NO: 3631004 - DNA, 25 bp, Homo sapien
gcacgtgcaccgttgctgccttcag

SEQ ID NO: 3631005 - DNA, 25 bp, Homo sapien
cagcctggacaggatgagctcctga

SEQ ID NO: 3631006 - DNA, 25 bp, Homo sapien
aatgcgccttagcaatgttgatggc

SEQ ID NO: 3631007 - DNA, 25 bp, Homo sapien
gcatggacggctgatccttgcagca

SEQ ID NO: 3631008 - DNA, 25 bp, Homo sapien
caagcgactcacagcaaatggaagg

SEQ ID NO: 3631009 - DNA, 25 bp, Homo sapien
gatccttgcagcatcctttgcacag

SEQ ID NO: 3631010 - DNA, 25 bp, Homo sapien
catggacggctgatcctcgaagcgt

SEQ ID NO: 3631011 - DNA, 25 bp, Homo sapien
tactccagagtgcattaatttcagg

SEQ ID NO: 3631012 - DNA, 25 bp, Homo sapien
ctttttggctaagtgagaggcttga

SEQ ID NO: 3631013 - DNA, 25 bp, Homo sapien
aatggacagtgctctctaaagatac

SEQ ID NO: 3631014 - DNA, 25 bp, Homo sapien
caaagatcgtttgtaacatacagcc

SEQ ID NO: 3631015 - DNA, 25 bp, Homo sapien
ctcagaccctagctccttgtttggc

SEQ ID NO: 3631016 - DNA, 25 bp, Homo sapien
gatccctatgtgtccattgcaccat

SEQ ID NO: 3631017 - DNA, 25 bp, Homo sapien
ttgcaccatttttcccttgagtgac

SEQ ID NO: 3631018 - DNA, 25 bp, Homo sapien
aaactcttctagatccctatgtgtc

SEQ ID NO: 3631019 - DNA, 25 bp, Homo sapien
tgctccctgacacgctgcagctcca

SEQ ID NO: 3631020 - DNA, 25 bp, Homo sapien
tgggtgccacctccacgtaccccag

SEQ ID NO: 3631021 - DNA, 25 bp, Homo sapien
gcactgtgttccggccaacagccct

SEQ ID NO: 3631022 - DNA, 25 bp, Homo sapien
cctcgcaccgctgtgcccaagagct

SEQ ID NO: 3631023 - DNA, 25 bp, Homo sapien
cctcagtggaagcattcgagaccca

SEQ ID NO: 3631024 - DNA, 25 bp, Homo sapien
tcgtatgggtgcagttacatcatcc

SEQ ID NO: 3631025 - DNA, 25 bp, Homo sapien
gacctttcctggctgagtgtgacgg

SEQ ID NO: 3631026 - DNA, 25 bp, Homo sapien
caagggctcttagaactgtgacagt

SEQ ID NO: 3631027 - DNA, 25 bp, Homo sapien
tcgggtttatagaatgaccatttgg

SEQ ID NO: 3631028 - DNA, 25 bp, Homo sapien
cctctggaggactgctggtcgggtt

SEQ ID NO: 3631029 - DNA, 25 bp, Homo sapien
gaggactgctggtcgggtttataga

SEQ ID NO: 3631030 - DNA, 25 bp, Homo sapien
tggtcgggtttatagaatgaccatt

SEQ ID NO: 3631031 - DNA, 25 bp, Homo sapien
ggttgttgtgagactttcctgcatc

SEQ ID NO: 3631032 - DNA, 25 bp, Homo sapien
tcttcactcgagcttttctgcacac

SEQ ID NO: 3631033 - DNA, 25 bp, Homo sapien
gcagccagtcggcacagagacaggt

SEQ ID NO: 3631034 - DNA, 25 bp, Homo sapien
cagctgatctgttctgaaggccgcc

SEQ ID NO: 3631035 - DNA, 25 bp, Homo sapien
aaatctgcgggccatccatccaggg

SEQ ID NO: 3631036 - DNA, 25 bp, Homo sapien
gtactctgaatctcagactccttgg

SEQ ID NO: 3631037 - DNA, 25 bp, Homo sapien
gggcgtggtcctgatgaagtagccc

SEQ ID NO: 3631038 - DNA, 25 bp, Homo sapien
ccttctgctcggccgtcagcgtggg

SEQ ID NO: 3631039 - DNA, 25 bp, Homo sapien
aaagctgctttgattcgaatgcata

SEQ ID NO: 3631040 - DNA, 25 bp, Homo sapien
tctgctgatttatccctgaagtccc

SEQ ID NO: 3631041 - DNA, 25 bp, Homo sapien
gcatagaaatgcaacacgagggtaa

SEQ ID NO: 3631042 - DNA, 25 bp, Homo sapien
ctgctttgattcgaatgcatagaaa

SEQ ID NO: 3631043 - DNA, 25 bp, Homo sapien
caaagatgtgtaacaacacactgga

SEQ ID NO: 3631044 - DNA, 25 bp, Homo sapien
ctgtgatgactgacctgagcctaaa

SEQ ID NO: 3631045 - DNA, 25 bp, Homo sapien
aaagcagcaaagatgtgtaacaaca

SEQ ID NO: 3631046 - DNA, 25 bp, Homo sapien
gagcctggagagtttaggatgtaaa

SEQ ID NO: 3631047 - DNA, 25 bp, Homo sapien
ctctccatgaggacgtacgttgcca

SEQ ID NO: 3631048 - DNA, 25 bp, Homo sapien
actggttgtggatctgagcgttccc

SEQ ID NO: 3631049 - DNA, 25 bp, Homo sapien
tccgaatccagaaatccccttgaag

SEQ ID NO: 3631050 - DNA, 25 bp, Homo sapien
ccaatgacgaaaaaggaaagtctgc

SEQ ID NO: 3631051 - DNA, 25 bp, Homo sapien
cagcatgggcttctgccgcgacagc

SEQ ID NO: 3631052 - DNA, 25 bp, Homo sapien
ctccgtagtggaaggagcaacaggt

SEQ ID NO: 3631053 - DNA, 25 bp, Homo sapien
agcatgggcttctgccgcgacagcc

SEQ ID NO: 3631054 - DNA, 25 bp, Homo sapien
tcatgtgtcggcctccgtagtggaa

SEQ ID NO: 3631055 - DNA, 25 bp, Homo sapien
gaaactttggaggacgtcggcgcat

SEQ ID NO: 3631056 - DNA, 25 bp, Homo sapien
ttgcaaaagtgcctcgacatacaga

SEQ ID NO: 3631057 - DNA, 25 bp, Homo sapien
ggacgtcggcgcataaatgggaact

SEQ ID NO: 3631058 - DNA, 25 bp, Homo sapien
cctcgacatacagatgtttgaagtc

SEQ ID NO: 3631059 - DNA, 25 bp, Homo sapien
ttctcagacgtgctccaaggctgtt

SEQ ID NO: 3631060 - DNA, 25 bp, Homo sapien
cccagttttctcagacgtgctccaa

SEQ ID NO: 3631061 - DNA, 25 bp, Homo sapien
taaaacagtcgacttgggagacctg

SEQ ID NO: 3631062 - DNA, 25 bp, Homo sapien
cttttctacacctttgtgcttgaaa

SEQ ID NO: 3631063 - DNA, 25 bp, Homo sapien
gtctcctgcttctgtccacatgcag

SEQ ID NO: 3631064 - DNA, 25 bp, Homo sapien
cagaggaagccatgaaacatcaggg

SEQ ID NO: 3631065 - DNA, 25 bp, Homo sapien
tcaactctgcgtgcgactggacaga

SEQ ID NO: 3631066 - DNA, 25 bp, Homo sapien
gaccctgcgccatgagaaggcgctg

SEQ ID NO: 3631067 - DNA, 25 bp, Homo sapien
tagatctggttgaccctggcattgg

SEQ ID NO: 3631068 - DNA, 25 bp, Homo sapien
tccttatgatgtcctaaaaataacc

SEQ ID NO: 3631069 - DNA, 25 bp, Homo sapien
aaatcacatgtagatctggttgacc

SEQ ID NO: 3631070 - DNA, 25 bp, Homo sapien
ttatgatgtcctaaaaataacccat

SEQ ID NO: 3631071 - DNA, 25 bp, Homo sapien
tggactctgctgtgacacaccagac

SEQ ID NO: 3631072 - DNA, 25 bp, Homo sapien
gacatcacgcattccactttcaagg

SEQ ID NO: 3631073 - DNA, 25 bp, Homo sapien
cacaccagacgtgctagctgaggaa

SEQ ID NO: 3631074 - DNA, 25 bp, Homo sapien
tgttcttcccggtgctaccatagcg

SEQ ID NO: 3631075 - DNA, 25 bp, Homo sapien
cacgatcccgaggaagaagggcgag

SEQ ID NO: 3631076 - DNA, 25 bp, Homo sapien
tgtgaaatccaaccgggtgcgcgac

SEQ ID NO: 3631077 - DNA, 25 bp, Homo sapien
tcttcagaaacggattttaaagcag

SEQ ID NO: 3631078 - DNA, 25 bp, Homo sapien
accgcgtgcacgatcccgaggaaga

SEQ ID NO: 3631079 - DNA, 25 bp, Homo sapien
cactgtcgtgtctcccacgtgaggg

SEQ ID NO: 3631080 - DNA, 25 bp, Homo sapien
gtttgaacggttgctggtggccttc

SEQ ID NO: 3631081 - DNA, 25 bp, Homo sapien
caaatcccagctcccggttacagaa

SEQ ID NO: 3631082 - DNA, 25 bp, Homo sapien
gcgtgcttgtcagccgcaacctttc

SEQ ID NO: 3631083 - DNA, 25 bp, Homo sapien
ctcatctctgggcagcgtcatcatt

SEQ ID NO: 3631084 - DNA, 25 bp, Homo sapien
ctgggcagcgtcatcattacccaga

SEQ ID NO: 3631085 - DNA, 25 bp, Homo sapien
tggatgcattctcatctctgggcag

SEQ ID NO: 3631086 - DNA, 25 bp, Homo sapien
cctgttttcctggatgcattctcat

SEQ ID NO: 3631087 - DNA, 25 bp, Homo sapien
gcttctttgtatgacccaaccattt

SEQ ID NO: 3631088 - DNA, 25 bp, Homo sapien
tgtagcttctttgtatgacccaacc

SEQ ID NO: 3631089 - DNA, 25 bp, Homo sapien
ttgtgtagcttctttgtatgaccca

SEQ ID NO: 3631090 - DNA, 25 bp, Homo sapien
tgtatgacccaaccatttgtgctga

SEQ ID NO: 3631091 - DNA, 25 bp, Homo sapien
cagcaattccttcaggcggcttttg

SEQ ID NO: 3631092 - DNA, 25 bp, Homo sapien
ttccttcaggcggcttttgatgttt

SEQ ID NO: 3631093 - DNA, 25 bp, Homo sapien
gcaattccttcaggcggcttttgat

SEQ ID NO: 3631094 - DNA, 25 bp, Homo sapien
ccttcaggcggcttttgatgttttc

SEQ ID NO: 3631095 - DNA, 25 bp, Homo sapien
cctggataaggtgtgggtgtcgcct

SEQ ID NO: 3631096 - DNA, 25 bp, Homo sapien
gataaggtgtgggtgtcgcccggat

SEQ ID NO: 3631097 - DNA, 25 bp, Homo sapien
taaggtgtgggtgtcgcccggataa

SEQ ID NO: 3631098 - DNA, 25 bp, Homo sapien
taaggtgtgggtgtcgcctggataa

SEQ ID NO: 3631099 - DNA, 25 bp, Homo sapien
tcttgtgcccttgaaataacctgcc

SEQ ID NO: 3631100 - DNA, 25 bp, Homo sapien
ggaaacctgaaacgctgcaattctg

SEQ ID NO: 3631101 - DNA, 25 bp, Homo sapien
gagacatcgttcagtaatatctgga

SEQ ID NO: 3631102 - DNA, 25 bp, Homo sapien
gagcagcacctggttcctttaggaa

SEQ ID NO: 3631103 - DNA, 25 bp, Homo sapien
gggaaggatagctgctcacttctct

SEQ ID NO: 3631104 - DNA, 25 bp, Homo sapien
tcactgcttggagggaccagggact

SEQ ID NO: 3631105 - DNA, 25 bp, Homo sapien
ggactgggaaggatagctgctcact

SEQ ID NO: 3631106 - DNA, 25 bp, Homo sapien
cagggactgggaaggatagctgctc

SEQ ID NO: 3631107 - DNA, 25 bp, Homo sapien
ctattgtcctggagacgcggcaggt

SEQ ID NO: 3631108 - DNA, 25 bp, Homo sapien
tcatgtgggtcagaaatgcctattg

SEQ ID NO: 3631109 - DNA, 25 bp, Homo sapien
tatttgctcatgtgaaatgtgggat

SEQ ID NO: 3631110 - DNA, 25 bp, Homo sapien
taactccaattatgtatcacggtcc

SEQ ID NO: 3631111 - DNA, 25 bp, Homo sapien
gctgaggtcaaactatccccgtctt

SEQ ID NO: 3631112 - DNA, 25 bp, Homo sapien
tattagattatgacacgtgggtttc

SEQ ID NO: 3631113 - DNA, 25 bp, Homo sapien
catggagttactggcatctcacgcc

SEQ ID NO: 3631114 - DNA, 25 bp, Homo sapien
cagcccactgccaatagcacaggaa

SEQ ID NO: 3631115 - DNA, 25 bp, Homo sapien
gaatagagacggctgtaagtcacag

SEQ ID NO: 3631116 - DNA, 25 bp, Homo sapien
ccattaagatcagcaatcacttgca

SEQ ID NO: 3631117 - DNA, 25 bp, Homo sapien
ggaaagtcgtcttcaaccttagcat

SEQ ID NO: 3631118 - DNA, 25 bp, Homo sapien
cacacagagggcaagtccataatca

SEQ ID NO: 3631119 - DNA, 25 bp, Homo sapien
gaccatctctgagcgcaaaggacag

SEQ ID NO: 3631120 - DNA, 25 bp, Homo sapien
gaaatctgcacgttggcgatcacgc

SEQ ID NO: 3631121 - DNA, 25 bp, Homo sapien
gacattttgtccctggtcagcagtg

SEQ ID NO: 3631122 - DNA, 25 bp, Homo sapien
gagtgaaatctgagtaagtgtccca

SEQ ID NO: 3631123 - DNA, 25 bp, Homo sapien
gccgagttccgatgtcttctgcctc

SEQ ID NO: 3631124 - DNA, 25 bp, Homo sapien
gatatggaaataggaacgccgagtt

SEQ ID NO: 3631125 - DNA, 25 bp, Homo sapien
aagagcctcggtattgatatggaaa

SEQ ID NO: 3631126 - DNA, 25 bp, Homo sapien
aatttgaagttccttatcattgaaa

SEQ ID NO: 3631127 - DNA, 25 bp, Homo sapien
tccgttttatcaggcgtctgagggt

SEQ ID NO: 3631128 - DNA, 25 bp, Homo sapien
taaacacacagaggaccagggcaat

SEQ ID NO: 3631129 - DNA, 25 bp, Homo sapien
aagttatggatcagcttgatactta

SEQ ID NO: 3631130 - DNA, 25 bp, Homo sapien
gggcaatctgtcttccgttttatca

SEQ ID NO: 3631131 - DNA, 25 bp, Homo sapien
caaatattttcgaactagacttagg

SEQ ID NO: 3631132 - DNA, 25 bp, Homo sapien
gaatgatgaatggagacgtgtcaga

SEQ ID NO: 3631133 - DNA, 25 bp, Homo sapien
tgccctggaagccttgcaagctgct

SEQ ID NO: 3631134 - DNA, 25 bp, Homo sapien
tgtcagatggagttgacgttgttct

SEQ ID NO: 3631135 - DNA, 25 bp, Homo sapien
taggtctcccctggtaaggctgtgc

SEQ ID NO: 3631136 - DNA, 25 bp, Homo sapien
tacaataaaacacctctacggctgg

SEQ ID NO: 3631137 - DNA, 25 bp, Homo sapien
gacaatgtgtccacccagtcttagg

SEQ ID NO: 3631138 - DNA, 25 bp, Homo sapien
tttgctccacacctgagaaagagga

SEQ ID NO: 3631139 - DNA, 25 bp, Homo sapien
tccgacagtgactgtcgaggtcgca

SEQ ID NO: 3631140 - DNA, 25 bp, Homo sapien
taagtgtgcgggtcccttggtctgt

SEQ ID NO: 3631141 - DNA, 25 bp, Homo sapien
tgtggagtcacctgtccttttctgc

SEQ ID NO: 3631142 - DNA, 25 bp, Homo sapien
tggccctcagcactaagtgtgcggg

SEQ ID NO: 3631143 - DNA, 25 bp, Homo sapien
ttctttcttgagtcctggactagtg

SEQ ID NO: 3631144 - DNA, 25 bp, Homo sapien
gtgaccatggatgccttaatagcag

SEQ ID NO: 3631145 - DNA, 25 bp, Homo sapien
catggatgccttaatagcagcacta

SEQ ID NO: 3631146 - DNA, 25 bp, Homo sapien
tgagtcctggactagtgaccatgga

SEQ ID NO: 3631147 - DNA, 25 bp, Homo sapien
ccactctgccccataatatcgtgat

SEQ ID NO: 3631148 - DNA, 25 bp, Homo sapien
tctgccccataatatcgtgatatgc

SEQ ID NO: 3631149 - DNA, 25 bp, Homo sapien
cttcttcactgatttgtgcaagcct

SEQ ID NO: 3631150 - DNA, 25 bp, Homo sapien
gccttcttcactgatttgtgcaagc

SEQ ID NO: 3631151 - DNA, 25 bp, Homo sapien
gaaagagcattcctgtatccacgct

SEQ ID NO: 3631152 - DNA, 25 bp, Homo sapien
gagttaacacagcagtaagatcaca

SEQ ID NO: 3631153 - DNA, 25 bp, Homo sapien
tatccacgctgtgtgacgagggtga

SEQ ID NO: 3631154 - DNA, 25 bp, Homo sapien
taagatcacagactggtctcgctga

SEQ ID NO: 3631155 - DNA, 25 bp, Homo sapien
gcctgtgtggacgacaccaaacgga

SEQ ID NO: 3631156 - DNA, 25 bp, Homo sapien
gcagctgcctgtgtggacgacacca

SEQ ID NO: 3631157 - DNA, 25 bp, Homo sapien
gacgacaccaaacggacatgcttat

SEQ ID NO: 3631158 - DNA, 25 bp, Homo sapien
ctcgagctgggttgggaatgtctct

SEQ ID NO: 3631159 - DNA, 25 bp, Homo sapien
caacgaaagcctcttggtggcattt

SEQ ID NO: 3631160 - DNA, 25 bp, Homo sapien
gacaactcttctgggattttggcat

SEQ ID NO: 3631161 - DNA, 25 bp, Homo sapien
tgagggcgtggcttattcaagtcca

SEQ ID NO: 3631162 - DNA, 25 bp, Homo sapien
ttccacccattgtcctgagggcgtg

SEQ ID NO: 3631163 - DNA, 25 bp, Homo sapien
tctgcagcagatattcataaagaac

SEQ ID NO: 3631164 - DNA, 25 bp, Homo sapien
tgtcatacacagtactagcagtttg

SEQ ID NO: 3631165 - DNA, 25 bp, Homo sapien
gcaatcgcctaatgtttcttctctg

SEQ ID NO: 3631166 - DNA, 25 bp, Homo sapien
tttgtaaaaggcagactcgcaatcg

SEQ ID NO: 3631167 - DNA, 25 bp, Homo sapien
gacacggagcttttggaacgagcat

SEQ ID NO: 3631168 - DNA, 25 bp, Homo sapien
tcattccatgatgccaaagcggaag

SEQ ID NO: 3631169 - DNA, 25 bp, Homo sapien
cagcttgcttgggtggttgtcctca

SEQ ID NO: 3631170 - DNA, 25 bp, Homo sapien
ccagctggaggatcttgacagagtc

SEQ ID NO: 3631171 - DNA, 25 bp, Homo sapien
gtgcatgcttacctgtgtgcacata

SEQ ID NO: 3631172 - DNA, 25 bp, Homo sapien
ctcacctgtgtgattccctgatttt

SEQ ID NO: 3631173 - DNA, 25 bp, Homo sapien
tgtgcatgctcacctatgtgaacat

SEQ ID NO: 3631174 - DNA, 25 bp, Homo sapien
tgtgaacatggtcacctttgtgtac

SEQ ID NO: 3631175 - DNA, 25 bp, Homo sapien
ccaatcgtcaggttcagggtttcac

SEQ ID NO: 3631176 - DNA, 25 bp, Homo sapien
caatcagtgtagtgaaaccaatcgt

SEQ ID NO: 3631177 - DNA, 25 bp, Homo sapien
tggatcctgtatccaatcagtgtag

SEQ ID NO: 3631178 - DNA, 25 bp, Homo sapien
tgaaaccaatcgtcaggttcagggt

SEQ ID NO: 3631179 - DNA, 25 bp, Homo sapien
ccgtaggcagacaatatttaataag

SEQ ID NO: 3631180 - DNA, 25 bp, Homo sapien
tgtgaaaaattcaccgtaggcagac

SEQ ID NO: 3631181 - DNA, 25 bp, Homo sapien
ttaaaaaggattcatcatgctgctt

SEQ ID NO: 3631182 - DNA, 25 bp, Homo sapien
cagcatttctggcatcgtgttgcag

SEQ ID NO: 3631183 - DNA, 25 bp, Homo sapien
aattttaatgttctgccggagctgg

SEQ ID NO: 3631184 - DNA, 25 bp, Homo sapien
caaaatccagcctgtcaagcggagt

SEQ ID NO: 3631185 - DNA, 25 bp, Homo sapien
tgtaaaatcagacccaaattccagg

SEQ ID NO: 3631186 - DNA, 25 bp, Homo sapien
tcacttcatttctcacggaggctgt

SEQ ID NO: 3631187 - DNA, 25 bp, Homo sapien
cagcattgaggaaaagtttaatcca

SEQ ID NO: 3631188 - DNA, 25 bp, Homo sapien
tgatggagccatggttggaaattga

SEQ ID NO: 3631189 - DNA, 25 bp, Homo sapien
ttgtttcactccgttgctgcctctg

SEQ ID NO: 3631190 - DNA, 25 bp, Homo sapien
ccatggttggaaattgagaattgac

SEQ ID NO: 3631191 - DNA, 25 bp, Homo sapien
gacacttaggtctgttgtagctgct

SEQ ID NO: 3631192 - DNA, 25 bp, Homo sapien
tagctgctgcccgtggatataacgt

SEQ ID NO: 3631193 - DNA, 25 bp, Homo sapien
gacacagttgctaaaccttgcagga

SEQ ID NO: 3631194 - DNA, 25 bp, Homo sapien
cgttttggtattctagttcctctct

SEQ ID NO: 3631195 - DNA, 25 bp, Homo sapien
aacattacatgtggcgtgctcattg

SEQ ID NO: 3631196 - DNA, 25 bp, Homo sapien
ggaatgaattccagatttgaagagc

SEQ ID NO: 3631197 - DNA, 25 bp, Homo sapien
gtgagataggatataatgcaaacta

SEQ ID NO: 3631198 - DNA, 25 bp, Homo sapien
ttcaaattgggtccaggaattagag

SEQ ID NO: 3631199 - DNA, 25 bp, Homo sapien
agcaacggggggagccgaaacgctg

SEQ ID NO: 3631200 - DNA, 25 bp, Homo sapien
gtcggaaaagggctggcgccgcagg

SEQ ID NO: 3631201 - DNA, 25 bp, Homo sapien
tgaaaacgtcccacggggagagagc

SEQ ID NO: 3631202 - DNA, 25 bp, Homo sapien
cattcatctcatctgaaaacgtccc

SEQ ID NO: 3631203 - DNA, 25 bp, Homo sapien
tgttctagaaagtgccgtcctgtca

SEQ ID NO: 3631204 - DNA, 25 bp, Homo sapien
tcgacgtcttccataagagatgcct

SEQ ID NO: 3631205 - DNA, 25 bp, Homo sapien
gctggagcctccaagggttctgaac

SEQ ID NO: 3631206 - DNA, 25 bp, Homo sapien
ctaaaataattgtcgtggctactga

SEQ ID NO: 3631207 - DNA, 25 bp, Homo sapien
gcaggtgcttgctcggaaggtctat

SEQ ID NO: 3631208 - DNA, 25 bp, Homo sapien
taatgccattacgaacgagtgtgac

SEQ ID NO: 3631209 - DNA, 25 bp, Homo sapien
caaagacgcgtttccattgtcccat

SEQ ID NO: 3631210 - DNA, 25 bp, Homo sapien
gatgctgcctgaatcgcgggttcca

SEQ ID NO: 3631211 - DNA, 25 bp, Homo sapien
ggtctctctctttacagtcatccgg

SEQ ID NO: 3631212 - DNA, 25 bp, Homo sapien
cccagggcgtactgagcaccggaga

SEQ ID NO: 3631213 - DNA, 25 bp, Homo sapien
acagtcatccgggatttcttctttc

SEQ ID NO: 3631214 - DNA, 25 bp, Homo sapien
actgagcaccggagactccatggtc

SEQ ID NO: 3631215 - DNA, 25 bp, Homo sapien
tgctggccgatcagttttgaccagt

SEQ ID NO: 3631216 - DNA, 25 bp, Homo sapien
ctgctggccgatcagttttgaccag

SEQ ID NO: 3631217 - DNA, 25 bp, Homo sapien
ctcttcacagctttagctcctgctg

SEQ ID NO: 3631218 - DNA, 25 bp, Homo sapien
gctcttcacagctttagctcctgct

SEQ ID NO: 3631219 - DNA, 25 bp, Homo sapien
attggcttggtgctacgcggctgta

SEQ ID NO: 3631220 - DNA, 25 bp, Homo sapien
tggccacgttcaagatgactggtgc

SEQ ID NO: 3631221 - DNA, 25 bp, Homo sapien
gctgatggccacgttcaagatgact

SEQ ID NO: 3631222 - DNA, 25 bp, Homo sapien
tttcagattggcttggtgctacgcg

SEQ ID NO: 3631223 - DNA, 25 bp, Homo sapien
cacagacaacttcagttcctgttcc

SEQ ID NO: 3631224 - DNA, 25 bp, Homo sapien
tttgggggcagccacagacaacttc

SEQ ID NO: 3631225 - DNA, 25 bp, Homo sapien
gccacagacaacttcagttcctgtt

SEQ ID NO: 3631226 - DNA, 25 bp, Homo sapien
ggggcagccacagacaacttcagtt

SEQ ID NO: 3631227 - DNA, 25 bp, Homo sapien
ttaattgctttttcagtcaagtcgt

SEQ ID NO: 3631228 - DNA, 25 bp, Homo sapien
cttaattgctttttcagtcaagtcg

SEQ ID NO: 3631229 - DNA, 25 bp, Homo sapien
ttttctgccgggactcaggaccact

SEQ ID NO: 3631230 - DNA, 25 bp, Homo sapien
gaggccggcaacatcgtccccaggg

SEQ ID NO: 3631231 - DNA, 25 bp, Homo sapien
tcatccagtgacagatgagcttggg

SEQ ID NO: 3631232 - DNA, 25 bp, Homo sapien
agggttcgcatcgtggctgctgctt

SEQ ID NO: 3631233 - DNA, 25 bp, Homo sapien
tcctggctcagggttctggcgctcc

SEQ ID NO: 3631234 - DNA, 25 bp, Homo sapien
ccttacttggccttgactcatggtg

SEQ ID NO: 3631235 - DNA, 25 bp, Homo sapien
catggtgtttgggtctaaatgttgg

SEQ ID NO: 3631236 - DNA, 25 bp, Homo sapien
caacgccttacttggccttgactca

SEQ ID NO: 3631237 - DNA, 25 bp, Homo sapien
catgcccatgttgttcccgcagagg

SEQ ID NO: 3631238 - DNA, 25 bp, Homo sapien
gaccccagatactgtgctcaaccag

SEQ ID NO: 3631239 - DNA, 25 bp, Homo sapien
tcaaccagtgagtaagaaacaccgg

SEQ ID NO: 3631240 - DNA, 25 bp, Homo sapien
gatgaagctggtctttgttcagcca

SEQ ID NO: 3631241 - DNA, 25 bp, Homo sapien
aaggccctggatctcggcaggccct

SEQ ID NO: 3631242 - DNA, 25 bp, Homo sapien
ccggttcttcgagtgtgtgtcctga

SEQ ID NO: 3631243 - DNA, 25 bp, Homo sapien
tgtgtcctgattcccagacggcagc

SEQ ID NO: 3631244 - DNA, 25 bp, Homo sapien
tcaatcgcggtctgcaatcagtccc

SEQ ID NO: 3631245 - DNA, 25 bp, Homo sapien
tccatgcacatgctgttatatttcc

SEQ ID NO: 3631246 - DNA, 25 bp, Homo sapien
gcagaagtgacagcgtggttcccac

SEQ ID NO: 3631247 - DNA, 25 bp, Homo sapien
tgctcgcgtgggtcttccttccatg

SEQ ID NO: 3631248 - DNA, 25 bp, Homo sapien
tggtgtgctaccgtatgctcgcgtg

SEQ ID NO: 3631249 - DNA, 25 bp, Homo sapien
tcctcgactccgggcagctctgagt

SEQ ID NO: 3631250 - DNA, 25 bp, Homo sapien
tctgagttttcagttcccacctctg

SEQ ID NO: 3631251 - DNA, 25 bp, Homo sapien
agcagcagcatcctcgactccgggc

SEQ ID NO: 3631252 - DNA, 25 bp, Homo sapien
agcatcctcgactccgggcagctct

SEQ ID NO: 3631253 - DNA, 25 bp, Homo sapien
gacagaaagtggacgagtcccggca

SEQ ID NO: 3631254 - DNA, 25 bp, Homo sapien
ctgcaggactgtccgggacagagtc

SEQ ID NO: 3631255 - DNA, 25 bp, Homo sapien
agagggactttgacagggagcactg

SEQ ID NO: 3631256 - DNA, 25 bp, Homo sapien
ggcatcttagtgacacagagggact

SEQ ID NO: 3631257 - DNA, 25 bp, Homo sapien
cagacagcacaggtaacaggaagtg

SEQ ID NO: 3631258 - DNA, 25 bp, Homo sapien
gacagcacaggtaacaggaagtgtg

SEQ ID NO: 3631259 - DNA, 25 bp, Homo sapien
ctgcagacagcacaggtaacaggaa

SEQ ID NO: 3631260 - DNA, 25 bp, Homo sapien
tgcagacagcacaggtaacaggaag

SEQ ID NO: 3631261 - DNA, 25 bp, Homo sapien
gcagagcttctgcaatacacctgac

SEQ ID NO: 3631262 - DNA, 25 bp, Homo sapien
acaaaatacctgttgggcagagctt

SEQ ID NO: 3631263 - DNA, 25 bp, Homo sapien
ttgtttctgctcaggatgcacgggc

SEQ ID NO: 3631264 - DNA, 25 bp, Homo sapien
gcaatacacctgacagtgagagctt

SEQ ID NO: 3631265 - DNA, 25 bp, Homo sapien
atctctccatcagaagtacgctggg

SEQ ID NO: 3631266 - DNA, 25 bp, Homo sapien
tcagaagtacgctgggaaggcacaa

SEQ ID NO: 3631267 - DNA, 25 bp, Homo sapien
tggcaggctacaagccatctctcca

SEQ ID NO: 3631268 - DNA, 25 bp, Homo sapien
ggctacaagccatctctccatcaga

SEQ ID NO: 3631269 - DNA, 25 bp, Homo sapien
catcagatgactgcggtgctgggtc

SEQ ID NO: 3631270 - DNA, 25 bp, Homo sapien
gtggtttgctttcagatcggctccc

SEQ ID NO: 3631271 - DNA, 25 bp, Homo sapien
cgtactctgccagtgttgcctcatg

SEQ ID NO: 3631272 - DNA, 25 bp, Homo sapien
gccccagactgtgaatgtggcccca

SEQ ID NO: 3631273 - DNA, 25 bp, Homo sapien
aacagccgccgctacattcagggat

SEQ ID NO: 3631274 - DNA, 25 bp, Homo sapien
tgttttcccgagaggagaacaggaa

SEQ ID NO: 3631275 - DNA, 25 bp, Homo sapien
ctgctggaggatgaagcgccatgcc

SEQ ID NO: 3631276 - DNA, 25 bp, Homo sapien
aagaccagggcgctgatctgaaagc

SEQ ID NO: 3631277 - DNA, 25 bp, Homo sapien
tggaactcagaccacagagggatgg

SEQ ID NO: 3631278 - DNA, 25 bp, Homo sapien
ttgggacacactcaagagccagcgc

SEQ ID NO: 3631279 - DNA, 25 bp, Homo sapien
ccctggaaacgtccttgggcgatgc

SEQ ID NO: 3631280 - DNA, 25 bp, Homo sapien
cattcctgccggaagagggtacttg

SEQ ID NO: 3631281 - DNA, 25 bp, Homo sapien
caaatacatcaaggtcccacgaagg

SEQ ID NO: 3631282 - DNA, 25 bp, Homo sapien
tacacgcggttctttgcccacaaag

SEQ ID NO: 3631283 - DNA, 25 bp, Homo sapien
cacaaaggcgttggtctggcgtctt

SEQ ID NO: 3631284 - DNA, 25 bp, Homo sapien
gcattgtccagtactcaaccatggg

SEQ ID NO: 3631285 - DNA, 25 bp, Homo sapien
taaagtctaggacctcatgggttgc

SEQ ID NO: 3631286 - DNA, 25 bp, Homo sapien
cagtaaagtctaggacctcatgggt

SEQ ID NO: 3631287 - DNA, 25 bp, Homo sapien
aagtctaggacctcatgggttgctg

SEQ ID NO: 3631288 - DNA, 25 bp, Homo sapien
tccagtaaagtctaggacctcatgg

SEQ ID NO: 3631289 - DNA, 25 bp, Homo sapien
tgacagttggtacaaatacgactac

SEQ ID NO: 3631290 - DNA, 25 bp, Homo sapien
tcttgcacgtgttcaatgagaaaac

SEQ ID NO: 3631291 - DNA, 25 bp, Homo sapien
ggaataaatccatcgcaacaactgc

SEQ ID NO: 3631292 - DNA, 25 bp, Homo sapien
tataattgacggctgtgctctgaca

SEQ ID NO: 3631293 - DNA, 25 bp, Homo sapien
gttgggcccttgcaaactgggcttc

SEQ ID NO: 3631294 - DNA, 25 bp, Homo sapien
ccagttgggcccttgcaaactgggc

SEQ ID NO: 3631295 - DNA, 25 bp, Homo sapien
cagttgggcccttgcaaactgggct

SEQ ID NO: 3631296 - DNA, 25 bp, Homo sapien
agttgggcccttgcaaactgggctt

SEQ ID NO: 3631297 - DNA, 25 bp, Homo sapien
cccgcggttgtatttctaaggtgca

SEQ ID NO: 3631298 - DNA, 25 bp, Homo sapien
caaggtgacttttccaccgaggata

SEQ ID NO: 3631299 - DNA, 25 bp, Homo sapien
taaaacgaggaagctggttgacact

SEQ ID NO: 3631300 - DNA, 25 bp, Homo sapien
taaggtgcagcaacaaccctgctgg

SEQ ID NO: 3631301 - DNA, 25 bp, Homo sapien
tttctagtccgccttctcggaggac

SEQ ID NO: 3631302 - DNA, 25 bp, Homo sapien
cctgttggtcgtcagcgtggatcag

SEQ ID NO: 3631303 - DNA, 25 bp, Homo sapien
gttttcataacctgggatgccttcc

SEQ ID NO: 3631304 - DNA, 25 bp, Homo sapien
tgagttttgacgatacactggctcc

SEQ ID NO: 3631305 - DNA, 25 bp, Homo sapien
atgagccaggtataaaaaatttgtc

SEQ ID NO: 3631306 - DNA, 25 bp, Homo sapien
gatttctgggagaagtgtacacaca

SEQ ID NO: 3631307 - DNA, 25 bp, Homo sapien
tgttgttgaccaacggccttgggag

SEQ ID NO: 3631308 - DNA, 25 bp, Homo sapien
taagggatggatttagacagacagg

SEQ ID NO: 3631309 - DNA, 25 bp, Homo sapien
tgcaaaatacaacgctcatgagaac

SEQ ID NO: 3631310 - DNA, 25 bp, Homo sapien
tgtgcaaaatacaacgctcatgaga

SEQ ID NO: 3631311 - DNA, 25 bp, Homo sapien
gtgcaaaatacaacgctcatgagaa

SEQ ID NO: 3631312 - DNA, 25 bp, Homo sapien
ctgtgcaaaatacaacgctcatgag

SEQ ID NO: 3631313 - DNA, 25 bp, Homo sapien
gagacagtaacaatcaagatatacc

SEQ ID NO: 3631314 - DNA, 25 bp, Homo sapien
gacagtaacaatcaagatataccaa

SEQ ID NO: 3631315 - DNA, 25 bp, Homo sapien
ccagagacagtaacaatcaagatat

SEQ ID NO: 3631316 - DNA, 25 bp, Homo sapien
agtaacaatcaagatataccaattg

SEQ ID NO: 3631317 - DNA, 25 bp, Homo sapien
tgtgaatgaatcgtggacctccagc

SEQ ID NO: 3631318 - DNA, 25 bp, Homo sapien
ccaagccgatggcagaaacgggcaa

SEQ ID NO: 3631319 - DNA, 25 bp, Homo sapien
gctgccctgcaacgccttgtgaatg

SEQ ID NO: 3631320 - DNA, 25 bp, Homo sapien
tttctggatagaagcaagcaagtgc

SEQ ID NO: 3631321 - DNA, 25 bp, Homo sapien
tggcggtgctttttgaaggtaactg

SEQ ID NO: 3631322 - DNA, 25 bp, Homo sapien
gcgtggcggtgctttttgaaggtaa

SEQ ID NO: 3631323 - DNA, 25 bp, Homo sapien
tgtcagcagcgtggcggtgcttttt

SEQ ID NO: 3631324 - DNA, 25 bp, Homo sapien
gcagcgtggcggtgctttttgaagg

SEQ ID NO: 3631325 - DNA, 25 bp, Homo sapien
caaacttgcatgagcttcggaggcc

SEQ ID NO: 3631326 - DNA, 25 bp, Homo sapien
caggccgtatttcactctgaatgtc

SEQ ID NO: 3631327 - DNA, 25 bp, Homo sapien
tacaacttggagtggcttttcaggc

SEQ ID NO: 3631328 - DNA, 25 bp, Homo sapien
cattttaagtcgcttgagaagcaga

SEQ ID NO: 3631329 - DNA, 25 bp, Homo sapien
taacctggtaaacatcagtaggaac

SEQ ID NO: 3631330 - DNA, 25 bp, Homo sapien
tctctcactcctgtggtgatgattg

SEQ ID NO: 3631331 - DNA, 25 bp, Homo sapien
cataaggttggaaggtagttcagcg

SEQ ID NO: 3631332 - DNA, 25 bp, Homo sapien
tattttgggcaaccaggtgtccagc

SEQ ID NO: 3631333 - DNA, 25 bp, Homo sapien
acttcgtcttctgtgaggatgactg

SEQ ID NO: 3631334 - DNA, 25 bp, Homo sapien
gtggaactgaacttcgtcttctgtg

SEQ ID NO: 3631335 - DNA, 25 bp, Homo sapien
aatcctcacgcccttgtgatctgag

SEQ ID NO: 3631336 - DNA, 25 bp, Homo sapien
ccttgtgatctgaggccgagctgtg

SEQ ID NO: 3631337 - DNA, 25 bp, Homo sapien
ctttgacattctaacctgctggcac

SEQ ID NO: 3631338 - DNA, 25 bp, Homo sapien
agggttgctctgtcaatgagaatcc

SEQ ID NO: 3631339 - DNA, 25 bp, Homo sapien
gctggcacccttcttctagcctcag

SEQ ID NO: 3631340 - DNA, 25 bp, Homo sapien
gttgctctgtcaatgagaatcctca

SEQ ID NO: 3631341 - DNA, 25 bp, Homo sapien
tgtactgtctaccattgatcaatgt

SEQ ID NO: 3631342 - DNA, 25 bp, Homo sapien
cacatccccttggttattttagtgt

SEQ ID NO: 3631343 - DNA, 25 bp, Homo sapien
gactatccttattctatcaaatgcc

SEQ ID NO: 3631344 - DNA, 25 bp, Homo sapien
gatcaatgtgtccatcctttctcca

SEQ ID NO: 3631345 - DNA, 25 bp, Homo sapien
ttggctttcgctccaagattttgac

SEQ ID NO: 3631346 - DNA, 25 bp, Homo sapien
tgctttccaagtgctcgtcagggag

SEQ ID NO: 3631347 - DNA, 25 bp, Homo sapien
gcatctttggctttcgctccaagat

SEQ ID NO: 3631348 - DNA, 25 bp, Homo sapien
ggagccgcacatagaagctcttgtt

SEQ ID NO: 3631349 - DNA, 25 bp, Homo sapien
tatcctcattagttgtatatgccag

SEQ ID NO: 3631350 - DNA, 25 bp, Homo sapien
tccggcaggcgcttttatcttcttt

SEQ ID NO: 3631351 - DNA, 25 bp, Homo sapien
tcttatgtaagctgcgacctcttcc

SEQ ID NO: 3631352 - DNA, 25 bp, Homo sapien
cttctttgggtgtcaactttgagat

SEQ ID NO: 3631353 - DNA, 25 bp, Homo sapien
gtccgggtgcgcagcaggcaatggg

SEQ ID NO: 3631354 - DNA, 25 bp, Homo sapien
cgcacgtccgggtgcgcagcaggca

SEQ ID NO: 3631355 - DNA, 25 bp, Homo sapien
caatggggaccctgcccgcgcgcgc

SEQ ID NO: 3631356 - DNA, 25 bp, Homo sapien
aggccgaggggagccgcacgtccgg

SEQ ID NO: 3631357 - DNA, 25 bp, Homo sapien
gccttgccggccccggagaggtgct

SEQ ID NO: 3631358 - DNA, 25 bp, Homo sapien
cttgccggccccggagaggtgctcc

SEQ ID NO: 3631359 - DNA, 25 bp, Homo sapien
ggccttgccggccccggagaggtgc

SEQ ID NO: 3631360 - DNA, 25 bp, Homo sapien
tgccggccccggagaggtgctccag

SEQ ID NO: 3631361 - DNA, 25 bp, Homo sapien
tgcacggatcgggacactccatcat

SEQ ID NO: 3631362 - DNA, 25 bp, Homo sapien
acactccatcatccgggcaccggcg

SEQ ID NO: 3631363 - DNA, 25 bp, Homo sapien
gagtctccgccaccttccgctcttc

SEQ ID NO: 3631364 - DNA, 25 bp, Homo sapien
ccagggattgcacggatcgggacac

SEQ ID NO: 3631365 - DNA, 25 bp, Homo sapien
gaagaacgttgatgctggggtcctt

SEQ ID NO: 3631366 - DNA, 25 bp, Homo sapien
gaacgttgatgctggggtcctttta

SEQ ID NO: 3631367 - DNA, 25 bp, Homo sapien
ttttactggaatgctaacgccagag

SEQ ID NO: 3631368 - DNA, 25 bp, Homo sapien
aggaagaacgttgatgctggggtcc

SEQ ID NO: 3631369 - DNA, 25 bp, Homo sapien
gcgggccaggctatttccacttcac

SEQ ID NO: 3631370 - DNA, 25 bp, Homo sapien
cgcacatctccgggccggtttaagt

SEQ ID NO: 3631371 - DNA, 25 bp, Homo sapien
catcctctgctgcatcacgttttct

SEQ ID NO: 3631372 - DNA, 25 bp, Homo sapien
cggtttaagtcacgcgggccaggct

SEQ ID NO: 3631373 - DNA, 25 bp, Homo sapien
aggtttcttgtctttcgcggcccag

SEQ ID NO: 3631374 - DNA, 25 bp, Homo sapien
aaggcccacagcacctaaattccaa

SEQ ID NO: 3631375 - DNA, 25 bp, Homo sapien
gcctttgactgagaagccactctgg

SEQ ID NO: 3631376 - DNA, 25 bp, Homo sapien
ctttcgcggcccaggtaaggtcact

SEQ ID NO: 3631377 - DNA, 25 bp, Homo sapien
acccacaggacagggacgaagacgt

SEQ ID NO: 3631378 - DNA, 25 bp, Homo sapien
cacaggacagggacgaagacgtgca

SEQ ID NO: 3631379 - DNA, 25 bp, Homo sapien
acaggacagggacgaagacgtgcac

SEQ ID NO: 3631380 - DNA, 25 bp, Homo sapien
ccacaggacagggacgaagacgtgc

SEQ ID NO: 3631381 - DNA, 25 bp, Homo sapien
gtagatacccatgcgcaccacggca

SEQ ID NO: 3631382 - DNA, 25 bp, Homo sapien
ctcgtagatgaagtacaccttggcc

SEQ ID NO: 3631383 - DNA, 25 bp, Homo sapien
atgcgcaccacggcacggacggcag

SEQ ID NO: 3631384 - DNA, 25 bp, Homo sapien
cttggcccccacgtagatacccatg

SEQ ID NO: 3631385 - DNA, 25 bp, Homo sapien
gaaatgcagcaatgcccacgggtaa

SEQ ID NO: 3631386 - DNA, 25 bp, Homo sapien
tctttttctccacggaatatacaag

SEQ ID NO: 3631387 - DNA, 25 bp, Homo sapien
tttctccacggaatatacaagatca

SEQ ID NO: 3631388 - DNA, 25 bp, Homo sapien
tcatctacataactcactttccaca

SEQ ID NO: 3631389 - DNA, 25 bp, Homo sapien
gagccaccgcgcctggccaacaatt

SEQ ID NO: 3631390 - DNA, 25 bp, Homo sapien
gcaacctgcctcccgggttgaagtg

SEQ ID NO: 3631391 - DNA, 25 bp, Homo sapien
gacggggcttcaccttgttggccat

SEQ ID NO: 3631392 - DNA, 25 bp, Homo sapien
cggggcttcaccttgttggccatgc

SEQ ID NO: 3631393 - DNA, 25 bp, Homo sapien
cagcactgtcgagcacgggacatac

SEQ ID NO: 3631394 - DNA, 25 bp, Homo sapien
gcacgggacatacatgggagcattt

SEQ ID NO: 3631395 - DNA, 25 bp, Homo sapien
aggcacacagcactgtcgagcacgg

SEQ ID NO: 3631396 - DNA, 25 bp, Homo sapien
tgtcgagcacgggacatacatggga

SEQ ID NO: 3631397 - DNA, 25 bp, Homo sapien
gatgtttgagcctccgtccaccatg

SEQ ID NO: 3631398 - DNA, 25 bp, Homo sapien
tgctggagacactctcccagtcggc

SEQ ID NO: 3631399 - DNA, 25 bp, Homo sapien
ggcctctgcgatgtttgagcctccg

SEQ ID NO: 3631400 - DNA, 25 bp, Homo sapien
tcccagtcggcctctgcgatgtttg

SEQ ID NO: 3631401 - DNA, 25 bp, Homo sapien
tatttcgcaactgatctgagctcaa

SEQ ID NO: 3631402 - DNA, 25 bp, Homo sapien
gactcacagattaacacatgcattt

SEQ ID NO: 3631403 - DNA, 25 bp, Homo sapien
agctcaagtgttctgggaatttact

SEQ ID NO: 3631404 - DNA, 25 bp, Homo sapien
aaccacaagtaaagagctgctcaca

SEQ ID NO: 3631405 - DNA, 25 bp, Homo sapien
ccaagtgtgaccgagaccatttaca

SEQ ID NO: 3631406 - DNA, 25 bp, Homo sapien
tctctgcactggaggcgaagctctc

SEQ ID NO: 3631407 - DNA, 25 bp, Homo sapien
taagcgcgtgctgactttgtcaagc

SEQ ID NO: 3631408 - DNA, 25 bp, Homo sapien
gatcctacgtcactggcaccaagtg

SEQ ID NO: 3631409 - DNA, 25 bp, Homo sapien
gagcatgccggccaggacaagggaa

SEQ ID NO: 3631410 - DNA, 25 bp, Homo sapien
accagagcatgccggccaggacaag

SEQ ID NO: 3631411 - DNA, 25 bp, Homo sapien
agggaagcggtgtgaccagcagcca

SEQ ID NO: 3631412 - DNA, 25 bp, Homo sapien
ccaggacaagggaagcggtgtgacc

SEQ ID NO: 3631413 - DNA, 25 bp, Homo sapien
actccactccttccggaagaggttg

SEQ ID NO: 3631414 - DNA, 25 bp, Homo sapien
tcaggcggccttcccgcgtgcggaa

SEQ ID NO: 3631415 - DNA, 25 bp, Homo sapien
gtccccgccgatcacacacaggttg

SEQ ID NO: 3631416 - DNA, 25 bp, Homo sapien
ctgcagcaggttgcaagcagccttc

SEQ ID NO: 3631417 - DNA, 25 bp, Homo sapien
tctgcacggcctccttatcgatctg

SEQ ID NO: 3631418 - DNA, 25 bp, Homo sapien
tgaggtaggcgtacttctgcacggc

SEQ ID NO: 3631419 - DNA, 25 bp, Homo sapien
cttctgcacggcctccttatcgatc

SEQ ID NO: 3631420 - DNA, 25 bp, Homo sapien
tgcacggcctccttatcgatctggc

SEQ ID NO: 3631421 - DNA, 25 bp, Homo sapien
cgcagaaatcattgtcgatggagcc

SEQ ID NO: 3631422 - DNA, 25 bp, Homo sapien
agaaatcattgtcgatggagcccac

SEQ ID NO: 3631423 - DNA, 25 bp, Homo sapien
tgccgcagaaatcattgtcgatgga

SEQ ID NO: 3631424 - DNA, 25 bp, Homo sapien
gtcggtgccgcagaaatcattgtcg

SEQ ID NO: 3631425 - DNA, 25 bp, Homo sapien
gatggcgtcgacgacctcgatgatc

SEQ ID NO: 3631426 - DNA, 25 bp, Homo sapien
tgtgcagggcggagtccgtgccgat

SEQ ID NO: 3631427 - DNA, 25 bp, Homo sapien
ccgtggtcatgatggcgtcgacgac

SEQ ID NO: 3631428 - DNA, 25 bp, Homo sapien
tgggccgtggtcatgatggcgtcga

SEQ ID NO: 3631429 - DNA, 25 bp, Homo sapien
tgagtgccagactcactaagtgctt

SEQ ID NO: 3631430 - DNA, 25 bp, Homo sapien
tcccacggaaacaagtgagtgccag

SEQ ID NO: 3631431 - DNA, 25 bp, Homo sapien
tgtcgacagccacggctggatctct

SEQ ID NO: 3631432 - DNA, 25 bp, Homo sapien
taagtgcttaatgcccagagactgt

SEQ ID NO: 3631433 - DNA, 25 bp, Homo sapien
tgcagggacctaggcttcaaaaatg

SEQ ID NO: 3631434 - DNA, 25 bp, Homo sapien
cagttgcacgttggacaccttctgc

SEQ ID NO: 3631435 - DNA, 25 bp, Homo sapien
tagccttccagactcctgcgaggaa

SEQ ID NO: 3631436 - DNA, 25 bp, Homo sapien
ctttgacagccgagttagccaggag

SEQ ID NO: 3631437 - DNA, 25 bp, Homo sapien
gggagcacccactcagtcctggaaa

SEQ ID NO: 3631438 - DNA, 25 bp, Homo sapien
agagggagcacccactcagtcctgg

SEQ ID NO: 3631439 - DNA, 25 bp, Homo sapien
agggagcacccactcagtcctggaa

SEQ ID NO: 3631440 - DNA, 25 bp, Homo sapien
ggagcacccactcagtcctggaaac

SEQ ID NO: 3631441 - DNA, 25 bp, Homo sapien
gaagagaaacagagggagccccgga

SEQ ID NO: 3631442 - DNA, 25 bp, Homo sapien
gagaaacagagggagccccggacac

SEQ ID NO: 3631443 - DNA, 25 bp, Homo sapien
ctggaagagaaacagagggagcccc

SEQ ID NO: 3631444 - DNA, 25 bp, Homo sapien
cccggacacagctcagaaagcagag

SEQ ID NO: 3631445 - DNA, 25 bp, Homo sapien
cacctccagaacgaaggtcctctgg

SEQ ID NO: 3631446 - DNA, 25 bp, Homo sapien
ccacagtgtcgtcccatcacctcca

SEQ ID NO: 3631447 - DNA, 25 bp, Homo sapien
ctccagaacgaaggtcctctggtgg

SEQ ID NO: 3631448 - DNA, 25 bp, Homo sapien
atcacctccagaacgaaggtcctct

SEQ ID NO: 3631449 - DNA, 25 bp, Homo sapien
ggatgccggccccttcaggactttc

SEQ ID NO: 3631450 - DNA, 25 bp, Homo sapien
aacgccaggtatgaagcgggatgcc

SEQ ID NO: 3631451 - DNA, 25 bp, Homo sapien
attcaggatgtggggtgcagcctca

SEQ ID NO: 3631452 - DNA, 25 bp, Homo sapien
caggactttccacgggagcattcag

SEQ ID NO: 3631453 - DNA, 25 bp, Homo sapien
aggaacacccagtccgcaccgcagg

SEQ ID NO: 3631454 - DNA, 25 bp, Homo sapien
acccagtccgcaccgcaggccaagg

SEQ ID NO: 3631455 - DNA, 25 bp, Homo sapien
ctccgagagtttgacacacatctgc

SEQ ID NO: 3631456 - DNA, 25 bp, Homo sapien
gcaccgcaggccaaggcactcacca

SEQ ID NO: 3631457 - DNA, 25 bp, Homo sapien
taaagcaatgcagccagcatcgccc

SEQ ID NO: 3631458 - DNA, 25 bp, Homo sapien
aaagcaatgcagccagcatcgcccg

SEQ ID NO: 3631459 - DNA, 25 bp, Homo sapien
attttgggtatcaattgctccttca

SEQ ID NO: 3631460 - DNA, 25 bp, Homo sapien
tttattttgggtatcaattgctcct

SEQ ID NO: 3631461 - DNA, 25 bp, Homo sapien
tattttgggtatcaattgctccttc

SEQ ID NO: 3631462 - DNA, 25 bp, Homo sapien
tgggtttattttgggtatcaattgc

SEQ ID NO: 3631463 - DNA, 25 bp, Homo sapien
gtcatagcccagctgcgtgacgaca

SEQ ID NO: 3631464 - DNA, 25 bp, Homo sapien
caagatcctgtcgaatgccgaaggg

SEQ ID NO: 3631465 - DNA, 25 bp, Homo sapien
ctctctgcacgtgcccgaggatggt

SEQ ID NO: 3631466 - DNA, 25 bp, Homo sapien
gtcacacgtgtgtcatagcccagct

SEQ ID NO: 3631467 - DNA, 25 bp, Homo sapien
cccacattagggagctctccccgca

SEQ ID NO: 3631468 - DNA, 25 bp, Homo sapien
gggtccacgtcgtgccaacaccaag

SEQ ID NO: 3631469 - DNA, 25 bp, Homo sapien
ctctggggtccacgtcgtgccaaca

SEQ ID NO: 3631470 - DNA, 25 bp, Homo sapien
ccacattagggagctctccccgcat

SEQ ID NO: 3631471 - DNA, 25 bp, Homo sapien
gttcagtgacacgacgcaagctggg

SEQ ID NO: 3631472 - DNA, 25 bp, Homo sapien
gtggttcccgttcagtgacacgacg

SEQ ID NO: 3631473 - DNA, 25 bp, Homo sapien
aggcgcacggcgtggttcccgttca

SEQ ID NO: 3631474 - DNA, 25 bp, Homo sapien
tctagcaaggcgatgactgcctcca

SEQ ID NO: 3631475 - DNA, 25 bp, Homo sapien
tgtaatgcatcgtgcaccgacgaga

SEQ ID NO: 3631476 - DNA, 25 bp, Homo sapien
gaaaggccgtgtaatgcatcgtgca

SEQ ID NO: 3631477 - DNA, 25 bp, Homo sapien
tccttctcagaaaggccgtgtaatg

SEQ ID NO: 3631478 - DNA, 25 bp, Homo sapien
gacgagacacccaaggtgcccaggc

SEQ ID NO: 3631479 - DNA, 25 bp, Homo sapien
tccctcggagtcgaaccgcatcttg

SEQ ID NO: 3631480 - DNA, 25 bp, Homo sapien
catcttgaaatctcctctcgtccat

SEQ ID NO: 3631481 - DNA, 25 bp, Homo sapien
gtcgaaccgcatcttgaaatctcct

SEQ ID NO: 3631482 - DNA, 25 bp, Homo sapien
tcttgaaatctcctctcgtccatcg

SEQ ID NO: 3631483 - DNA, 25 bp, Homo sapien
tccggcagcttgatggcaagtcgct

SEQ ID NO: 3631484 - DNA, 25 bp, Homo sapien
tttgggatctgatcatccggcagct

SEQ ID NO: 3631485 - DNA, 25 bp, Homo sapien
gatggcaagtcgcttgtaggtgttc

SEQ ID NO: 3631486 - DNA, 25 bp, Homo sapien
tgtaggtgttcaggttgcccgcaaa

SEQ ID NO: 3631487 - DNA, 25 bp, Homo sapien
atcatagatggcgagcatcctgtgg

SEQ ID NO: 3631488 - DNA, 25 bp, Homo sapien
tgatgacagctacgttgcaattggt

SEQ ID NO: 3631489 - DNA, 25 bp, Homo sapien
cacagctgagcgtacggctgcgttc

SEQ ID NO: 3631490 - DNA, 25 bp, Homo sapien
gaagccgtcaaagccatcatagatg

SEQ ID NO: 3631491 - DNA, 25 bp, Homo sapien
gcattgctgtctgggggatctccag

SEQ ID NO: 3631492 - DNA, 25 bp, Homo sapien
caggccctcctcggcatgcctctga

SEQ ID NO: 3631493 - DNA, 25 bp, Homo sapien
ttgctgtctgggggatctccagcag

SEQ ID NO: 3631494 - DNA, 25 bp, Homo sapien
ccagcattgctgtctgggggatctc

SEQ ID NO: 3631495 - DNA, 25 bp, Homo sapien
acacagaacgaaacagctaaagtga

SEQ ID NO: 3631496 - DNA, 25 bp, Homo sapien
gaaaggcaagttgcaaagtgctaaa

SEQ ID NO: 3631497 - DNA, 25 bp, Homo sapien
gtgaacaatgaaaggcaagttgcaa

SEQ ID NO: 3631498 - DNA, 25 bp, Homo sapien
tgtgcaaacacagaacgaaacagct

SEQ ID NO: 3631499 - DNA, 25 bp, Homo sapien
ccccgacatctgtccagccgatttc

SEQ ID NO: 3631500 - DNA, 25 bp, Homo sapien
ccgacatctgtccagccgatttctt

SEQ ID NO: 3631501 - DNA, 25 bp, Homo sapien
gacatctgtccagccgatttctttg

SEQ ID NO: 3631502 - DNA, 25 bp, Homo sapien
ggtccagcccccgacatctgtccag

SEQ ID NO: 3631503 - DNA, 25 bp, Homo sapien
cttaaaagcaggtcatagagttgag

SEQ ID NO: 3631504 - DNA, 25 bp, Homo sapien
aacacgggcagttccactggaggga

SEQ ID NO: 3631505 - DNA, 25 bp, Homo sapien
ctggagggaggaccggtaactgcct

SEQ ID NO: 3631506 - DNA, 25 bp, Homo sapien
tttccaggaatccaactggcgtcgg

SEQ ID NO: 3631507 - DNA, 25 bp, Homo sapien
tagatttataagacaccgtagggca

SEQ ID NO: 3631508 - DNA, 25 bp, Homo sapien
ggtgcagctaactcccttggaacaa

SEQ ID NO: 3631509 - DNA, 25 bp, Homo sapien
catgacagggctaacaagtgcaaca

SEQ ID NO: 3631510 - DNA, 25 bp, Homo sapien
tacctagagctttaccgtccagggc

SEQ ID NO: 3631511 - DNA, 25 bp, Homo sapien
ctgaaaatagccacgtggagaacga

SEQ ID NO: 3631512 - DNA, 25 bp, Homo sapien
cggtccgcaggacgccacgccggtc

SEQ ID NO: 3631513 - DNA, 25 bp, Homo sapien
aatagccacgtggagaacgatgtca

SEQ ID NO: 3631514 - DNA, 25 bp, Homo sapien
gaacgatgtcagacaccccaaactc

SEQ ID NO: 3631515 - DNA, 25 bp, Homo sapien
cgtgcgcatctgtgtggcgatctct

SEQ ID NO: 3631516 - DNA, 25 bp, Homo sapien
cgcgttgatgctgtgcgtgcgcatc

SEQ ID NO: 3631517 - DNA, 25 bp, Homo sapien
tctgtgtggcgatctcttccaagta

SEQ ID NO: 3631518 - DNA, 25 bp, Homo sapien
tcgaatccaccgatgatcagcagcg

SEQ ID NO: 3631519 - DNA, 25 bp, Homo sapien
gttggacacagtagcgggaaccatg

SEQ ID NO: 3631520 - DNA, 25 bp, Homo sapien
tcggaacccggcacattgttggaca

SEQ ID NO: 3631521 - DNA, 25 bp, Homo sapien
tgttcagggcggtgtctgccccgat

SEQ ID NO: 3631522 - DNA, 25 bp, Homo sapien
cgatgctgaaatcggaacccggcac

SEQ ID NO: 3631523 - DNA, 25 bp, Homo sapien
tatttctagcgcactggtagataaa

SEQ ID NO: 3631524 - DNA, 25 bp, Homo sapien
cattcagggtatttgtaaaaggcta

SEQ ID NO: 3631525 - DNA, 25 bp, Homo sapien
tgtaaaaggctatttctagcgcact

SEQ ID NO: 3631526 - DNA, 25 bp, Homo sapien
aaaaaagaacgagaagctctcattc

SEQ ID NO: 3631527 - DNA, 25 bp, Homo sapien
tacaatcacaggagactgcgaccca

SEQ ID NO: 3631528 - DNA, 25 bp, Homo sapien
gtgctcacgggcacccctggagtct

SEQ ID NO: 3631529 - DNA, 25 bp, Homo sapien
gcgatttttaatgctggtacaatca

SEQ ID NO: 3631530 - DNA, 25 bp, Homo sapien
tgggagtgagatcaaaaattttcag

SEQ ID NO: 3631531 - DNA, 25 bp, Homo sapien
cattcacagtgcgaaggtaggtcca

SEQ ID NO: 3631532 - DNA, 25 bp, Homo sapien
cagaagcaacgtctaggtcagagat

SEQ ID NO: 3631533 - DNA, 25 bp, Homo sapien
gaatccagtctgtgaaagaggctca

SEQ ID NO: 3631534 - DNA, 25 bp, Homo sapien
ctaaagcaggcgaaagagcagtgaa

SEQ ID NO: 3631535 - DNA, 25 bp, Homo sapien
ggaagagacgctcactcccatgcgt

SEQ ID NO: 3631536 - DNA, 25 bp, Homo sapien
tgaacaatagaagccagtatactgg

SEQ ID NO: 3631537 - DNA, 25 bp, Homo sapien
ctggacgttgcaaacatcccctggg

SEQ ID NO: 3631538 - DNA, 25 bp, Homo sapien
cctgtgctctgagggacgttccgca

SEQ ID NO: 3631539 - DNA, 25 bp, Homo sapien
tggtgcaacgcaaagcatcccaagg

SEQ ID NO: 3631540 - DNA, 25 bp, Homo sapien
cctccctgggagagtcggacagtga

SEQ ID NO: 3631541 - DNA, 25 bp, Homo sapien
tgtggaatacccgagctcaggactg

SEQ ID NO: 3631542 - DNA, 25 bp, Homo sapien
tgtttctccgagaagcgctcgctgg

SEQ ID NO: 3631543 - DNA, 25 bp, Homo sapien
ttagtcacgagtgggacagctcagc

SEQ ID NO: 3631544 - DNA, 25 bp, Homo sapien
tcagctctcggcgtgtcatggtagg

SEQ ID NO: 3631545 - DNA, 25 bp, Homo sapien
tcagggtgttaaccaaagtcacagc

SEQ ID NO: 3631546 - DNA, 25 bp, Homo sapien
aaatgcgctccggtatcagaaaggg

SEQ ID NO: 3631547 - DNA, 25 bp, Homo sapien
gatgcaaagctcctggtggcggcct

SEQ ID NO: 3631548 - DNA, 25 bp, Homo sapien
tctgtgcctgggacattgttgctaa

SEQ ID NO: 3631549 - DNA, 25 bp, Homo sapien
aacagcattcaggccagtgtcggag

SEQ ID NO: 3631550 - DNA, 25 bp, Homo sapien
gttgctaatcgtggccggcaccaca

SEQ ID NO: 3631551 - DNA, 25 bp, Homo sapien
tctaggtgggatagaaacacgatcc

SEQ ID NO: 3631552 - DNA, 25 bp, Homo sapien
taaatccggctcatccttagcacag

SEQ ID NO: 3631553 - DNA, 25 bp, Homo sapien
cagtgtgacataaagccaagctaac

SEQ ID NO: 3631554 - DNA, 25 bp, Homo sapien
agagcaatggtacctgcggctcccc

SEQ ID NO: 3631555 - DNA, 25 bp, Homo sapien
gaaaaggtggcgtttgctacagcat

SEQ ID NO: 3631556 - DNA, 25 bp, Homo sapien
gacgtcaagatgtaaggtaaaggcc

SEQ ID NO: 3631557 - DNA, 25 bp, Homo sapien
gaagtacccggaatagaactgctgt

SEQ ID NO: 3631558 - DNA, 25 bp, Homo sapien
gatggccggaccctaatggcattca

SEQ ID NO: 3631559 - DNA, 25 bp, Homo sapien
gaggccgcctttgctggagcttaga

SEQ ID NO: 3631560 - DNA, 25 bp, Homo sapien
gaaacaggcaatgggaagaattccc

SEQ ID NO: 3631561 - DNA, 25 bp, Homo sapien
gacagatccccgtcaagggtccaaa

SEQ ID NO: 3631562 - DNA, 25 bp, Homo sapien
gttgcactgttccacctgtaccggg

SEQ ID NO: 3631563 - DNA, 25 bp, Homo sapien
cctggagcaaacattctggcctcag

SEQ ID NO: 3631564 - DNA, 25 bp, Homo sapien
ccagagctgtgggagagagtattat

SEQ ID NO: 3631565 - DNA, 25 bp, Homo sapien
gggatgctgcacacccacatggaag

SEQ ID NO: 3631566 - DNA, 25 bp, Homo sapien
gaacaaggcgtacaaggcgtgcaag

SEQ ID NO: 3631567 - DNA, 25 bp, Homo sapien
tgaatcctaggagtacccaggtggg

SEQ ID NO: 3631568 - DNA, 25 bp, Homo sapien
atcaagcctttgtcgggaatccccg

SEQ ID NO: 3631569 - DNA, 25 bp, Homo sapien
tatgctggccgctgtgtgcatcaca

SEQ ID NO: 3631570 - DNA, 25 bp, Homo sapien
ggaatgctccctcatgcggtgataa

SEQ ID NO: 3631571 - DNA, 25 bp, Homo sapien
gcttagtccgtgagaaccgctgtgc

SEQ ID NO: 3631572 - DNA, 25 bp, Homo sapien
gtggttcttagacccaggcacctgg

SEQ ID NO: 3631573 - DNA, 25 bp, Homo sapien
caggcatcggatcccagagtgaaat

SEQ ID NO: 3631574 - DNA, 25 bp, Homo sapien
tggcaaagaaatgcatcggccgcct

SEQ ID NO: 3631575 - DNA, 25 bp, Homo sapien
gaggtgacctcgatgtcccgttttg

SEQ ID NO: 3631576 - DNA, 25 bp, Homo sapien
cggaaaagacgaccccacaagccag

SEQ ID NO: 3631577 - DNA, 25 bp, Homo sapien
ccagcatcccgcagaggtgaagggt

SEQ ID NO: 3631578 - DNA, 25 bp, Homo sapien
tcggagtgggtgtgaacgtggtccc

SEQ ID NO: 3631579 - DNA, 25 bp, Homo sapien
gtcacagagaagcgatcagtcactc

SEQ ID NO: 3631580 - DNA, 25 bp, Homo sapien
cacagagaagcgatcagtcactcca

SEQ ID NO: 3631581 - DNA, 25 bp, Homo sapien
cagagaagcgatcagtcactccagc

SEQ ID NO: 3631582 - DNA, 25 bp, Homo sapien
agagaagcgatcagtcactccagcc

SEQ ID NO: 3631583 - DNA, 25 bp, Homo sapien
tgcagatccctgatgtcgaagggct

SEQ ID NO: 3631584 - DNA, 25 bp, Homo sapien
agtagccgcccatggtctcgatgat

SEQ ID NO: 3631585 - DNA, 25 bp, Homo sapien
tcgatgatgaacacgcgccgcttgg

SEQ ID NO: 3631586 - DNA, 25 bp, Homo sapien
gaagggctcttcgaaaatgtatgcg

SEQ ID NO: 3631587 - DNA, 25 bp, Homo sapien
tgagcacaaggcctctctggatggt

SEQ ID NO: 3631588 - DNA, 25 bp, Homo sapien
ttcattttctccgtcaggtgctcca

SEQ ID NO: 3631589 - DNA, 25 bp, Homo sapien
tctccgtcaggtgctccacgttgga

SEQ ID NO: 3631590 - DNA, 25 bp, Homo sapien
ttttctccgtcaggtgctccacgtt

SEQ ID NO: 3631591 - DNA, 25 bp, Homo sapien
tcttctgaatacagctggtaaatga

SEQ ID NO: 3631592 - DNA, 25 bp, Homo sapien
tacagctggtaaatgaagtcggtgg

SEQ ID NO: 3631593 - DNA, 25 bp, Homo sapien
gaatacagctggtaaatgaagtcgg

SEQ ID NO: 3631594 - DNA, 25 bp, Homo sapien
ttgccctcttctgaatacagctggt

SEQ ID NO: 3631595 - DNA, 25 bp, Homo sapien
cctccttgagttttgcagtgatcca

SEQ ID NO: 3631596 - DNA, 25 bp, Homo sapien
ttctatcaaatggagagggtgcccc

SEQ ID NO: 3631597 - DNA, 25 bp, Homo sapien
gcagtgatccactccatagctctgg

SEQ ID NO: 3631598 - DNA, 25 bp, Homo sapien
agctctggcagagattttggttcca

SEQ ID NO: 3631599 - DNA, 25 bp, Homo sapien
tagaaggccccacttaaactgtgag

SEQ ID NO: 3631600 - DNA, 25 bp, Homo sapien
tggccaacgttcaggatctctagag

SEQ ID NO: 3631601 - DNA, 25 bp, Homo sapien
caggagtaaaacatcacgtgcagct

SEQ ID NO: 3631602 - DNA, 25 bp, Homo sapien
gagaacatgtcatacccaagctgat

SEQ ID NO: 3631603 - DNA, 25 bp, Homo sapien
aaatggaatcatcggtggtaaattt

SEQ ID NO: 3631604 - DNA, 25 bp, Homo sapien
caaatggaatcatcggtggtaaatt

SEQ ID NO: 3631605 - DNA, 25 bp, Homo sapien
ttgcttattcccagcacacaaatgg

SEQ ID NO: 3631606 - DNA, 25 bp, Homo sapien
atggaatcatcggtggtaaattttt

SEQ ID NO: 3631607 - DNA, 25 bp, Homo sapien
gccaccactgttctttgggaatcct

SEQ ID NO: 3631608 - DNA, 25 bp, Homo sapien
tgaggggccgtagcttgagccacca

SEQ ID NO: 3631609 - DNA, 25 bp, Homo sapien
tgtacttggccaggattttcatgag

SEQ ID NO: 3631610 - DNA, 25 bp, Homo sapien
ttgtacttggccaggattttcatga

SEQ ID NO: 3631611 - DNA, 25 bp, Homo sapien
gctgcacatgttccagctggcctga

SEQ ID NO: 3631612 - DNA, 25 bp, Homo sapien
tgcacatgttccagctggcctgagt

SEQ ID NO: 3631613 - DNA, 25 bp, Homo sapien
catgttccagctggcctgagtccga

SEQ ID NO: 3631614 - DNA, 25 bp, Homo sapien
acatgttccagctggcctgagtccg

SEQ ID NO: 3631615 - DNA, 25 bp, Homo sapien
ctgataaaataacttaagtgttaca

SEQ ID NO: 3631616 - DNA, 25 bp, Homo sapien
aaaacagacagtccacggtggctgc

SEQ ID NO: 3631617 - DNA, 25 bp, Homo sapien
caataatacgtgcataaagtgctga

SEQ ID NO: 3631618 - DNA, 25 bp, Homo sapien
tgtcaataatacgtgcataaagtgc

SEQ ID NO: 3631619 - DNA, 25 bp, Homo sapien
tgggcactcgccgattaggtattaa

SEQ ID NO: 3631620 - DNA, 25 bp, Homo sapien
acagacagcacgcactggagcaggt

SEQ ID NO: 3631621 - DNA, 25 bp, Homo sapien
gtttaattaattctgctcatatgca

SEQ ID NO: 3631622 - DNA, 25 bp, Homo sapien
tctgaaagcatgagacacactccac

SEQ ID NO: 3631623 - DNA, 25 bp, Homo sapien
ttcaggaaactccatcacaccgagg

SEQ ID NO: 3631624 - DNA, 25 bp, Homo sapien
gagtgtccaccagacgggagttcac

SEQ ID NO: 3631625 - DNA, 25 bp, Homo sapien
caccagacgggagttcaccgcggcg

SEQ ID NO: 3631626 - DNA, 25 bp, Homo sapien
aagggtgtcccacgtctgcctgcgc

SEQ ID NO: 3631627 - DNA, 25 bp, Homo sapien
gggctgatctcaccacgggcgtctt

SEQ ID NO: 3631628 - DNA, 25 bp, Homo sapien
tttaggaaaaggcctgtctgtggaa

SEQ ID NO: 3631629 - DNA, 25 bp, Homo sapien
aagcggcgacctggggctgatctca

SEQ ID NO: 3631630 - DNA, 25 bp, Homo sapien
ggcgacctggggctgatctcaccac

SEQ ID NO: 3631631 - DNA, 25 bp, Homo sapien
taggctgagatttctgataaacatg

SEQ ID NO: 3631632 - DNA, 25 bp, Homo sapien
tttaggctgagatttctgataaaca

SEQ ID NO: 3631633 - DNA, 25 bp, Homo sapien
taagccttcatgaggacagatgcgt

SEQ ID NO: 3631634 - DNA, 25 bp, Homo sapien
gccttcatgaggacagatgcgtgaa

SEQ ID NO: 3631635 - DNA, 25 bp, Homo sapien
ccttctttgaacgtagctcccgagc

SEQ ID NO: 3631636 - DNA, 25 bp, Homo sapien
tgacagatcctttccgcgactcagc

SEQ ID NO: 3631637 - DNA, 25 bp, Homo sapien
tttggttccttgtggagtagagtga

SEQ ID NO: 3631638 - DNA, 25 bp, Homo sapien
tcgatgccagtggagcggtctgaca

SEQ ID NO: 3631639 - DNA, 25 bp, Homo sapien
tagagtttagagtcacaggctccgc

SEQ ID NO: 3631640 - DNA, 25 bp, Homo sapien
gacgctaacttcctaggcgggagaa

SEQ ID NO: 3631641 - DNA, 25 bp, Homo sapien
ttctcagagcagtccagcatgtggg

SEQ ID NO: 3631642 - DNA, 25 bp, Homo sapien
cacacacggtcgaggtatgcactgg

SEQ ID NO: 3631643 - DNA, 25 bp, Homo sapien
tgtctgccagcgttgaaagtttccg

SEQ ID NO: 3631644 - DNA, 25 bp, Homo sapien
taactctcggtggtgatagactcct

SEQ ID NO: 3631645 - DNA, 25 bp, Homo sapien
ttcactcagtaagagcccgtgtgtg

SEQ ID NO: 3631646 - DNA, 25 bp, Homo sapien
cacagagttggacgtggtcctgaca

SEQ ID NO: 3631647 - DNA, 25 bp, Homo sapien
gagtttaaggcgcttcgttctgatc

SEQ ID NO: 3631648 - DNA, 25 bp, Homo sapien
tgaacgtgcccggattccagtgcat

SEQ ID NO: 3631649 - DNA, 25 bp, Homo sapien
tattacgagggcatgatgaacgtgc

SEQ ID NO: 3631650 - DNA, 25 bp, Homo sapien
gatataatggctacacgagggaggc

SEQ ID NO: 3631651 - DNA, 25 bp, Homo sapien
atgcctgaagccaggaatagcacca

SEQ ID NO: 3631652 - DNA, 25 bp, Homo sapien
ggtgtagtcctggtagtcccggcta

SEQ ID NO: 3631653 - DNA, 25 bp, Homo sapien
tggtgtagtcctggtagtcccggct

SEQ ID NO: 3631654 - DNA, 25 bp, Homo sapien
ctgaagccaggaatagcaccatgcc

SEQ ID NO: 3631655 - DNA, 25 bp, Homo sapien
tagctcaggctatatagtaaagaaa

SEQ ID NO: 3631656 - DNA, 25 bp, Homo sapien
ttcccaaaccttaaccatagctcag

SEQ ID NO: 3631657 - DNA, 25 bp, Homo sapien
ctggattctctcaaccccgagtgtg

SEQ ID NO: 3631658 - DNA, 25 bp, Homo sapien
ttttagtaccactctgacctcacag

SEQ ID NO: 3631659 - DNA, 25 bp, Homo sapien
ctccacatcagctgggctatcgggt

SEQ ID NO: 3631660 - DNA, 25 bp, Homo sapien
cagctgggctatcgggttatcttga

SEQ ID NO: 3631661 - DNA, 25 bp, Homo sapien
atcgggttatcttgaaatatggttc

SEQ ID NO: 3631662 - DNA, 25 bp, Homo sapien
gctatcgggttatcttgaaatatgg

SEQ ID NO: 3631663 - DNA, 25 bp, Homo sapien
ctggtgggcagaccgactgatccat

SEQ ID NO: 3631664 - DNA, 25 bp, Homo sapien
cgtgttaaacaatgcctgcgtgggt

SEQ ID NO: 3631665 - DNA, 25 bp, Homo sapien
gatttacagccctcagctatgcgtt

SEQ ID NO: 3631666 - DNA, 25 bp, Homo sapien
gctatgcgtttgttgcaccacacat

SEQ ID NO: 3631667 - DNA, 25 bp, Homo sapien
gaccattttggattaagagctgctg

SEQ ID NO: 3631668 - DNA, 25 bp, Homo sapien
tccctgaggctcatgggtggcctgc

SEQ ID NO: 3631669 - DNA, 25 bp, Homo sapien
tctcggctggtgaactatttcttac

SEQ ID NO: 3631670 - DNA, 25 bp, Homo sapien
ggtggcctgctctctgattcccgta

SEQ ID NO: 3631671 - DNA, 25 bp, Homo sapien
tcagaaatatccgtgcagagaccct

SEQ ID NO: 3631672 - DNA, 25 bp, Homo sapien
tgcccgtcgagtgcagatcctgaga

SEQ ID NO: 3631673 - DNA, 25 bp, Homo sapien
gatgatgcatctgggaactgtgtcc

SEQ ID NO: 3631674 - DNA, 25 bp, Homo sapien
ggagatatcgctacaatgccagagt

SEQ ID NO: 3631675 - DNA, 25 bp, Homo sapien
gtgatgcttgattataagtgggtgt

SEQ ID NO: 3631676 - DNA, 25 bp, Homo sapien
tataagtgggtgttgttccttgtgt

SEQ ID NO: 3631677 - DNA, 25 bp, Homo sapien
gattataagtgggtgttgttccttg

SEQ ID NO: 3631678 - DNA, 25 bp, Homo sapien
cttgattataagtgggtgttgttcc

SEQ ID NO: 3631679 - DNA, 25 bp, Homo sapien
tggtgacaaagacaggtgctcagtg

SEQ ID NO: 3631680 - DNA, 25 bp, Homo sapien
tcccggacactagagcctgcacagg

SEQ ID NO: 3631681 - DNA, 25 bp, Homo sapien
cctgcacaggccttctcgatgggtg

SEQ ID NO: 3631682 - DNA, 25 bp, Homo sapien
aggcagacatggcccttctcccgga

SEQ ID NO: 3631683 - DNA, 25 bp, Homo sapien
catgctgagatggaaattctaggcc

SEQ ID NO: 3631684 - DNA, 25 bp, Homo sapien
taaagctctgatccaaaggtccagg

SEQ ID NO: 3631685 - DNA, 25 bp, Homo sapien
gaagaccgccagcaagtgggagaat

SEQ ID NO: 3631686 - DNA, 25 bp, Homo sapien
gagaatacgagagagaccatgctga

SEQ ID NO: 3631687 - DNA, 25 bp, Homo sapien
ctccggtggccttcggctggaagca

SEQ ID NO: 3631688 - DNA, 25 bp, Homo sapien
gctgggacgcagagcattcctggaa

SEQ ID NO: 3631689 - DNA, 25 bp, Homo sapien
taccagctgtagaacgagggagact

SEQ ID NO: 3631690 - DNA, 25 bp, Homo sapien
ctggaagcagcggacagagagtccc

SEQ ID NO: 3631691 - DNA, 25 bp, Homo sapien
taagcctcgtgtaatgactcaaccc

SEQ ID NO: 3631692 - DNA, 25 bp, Homo sapien
agtgaaaattctgagctgccgttgc

SEQ ID NO: 3631693 - DNA, 25 bp, Homo sapien
taacgcaatggtcagcggtcactcc

SEQ ID NO: 3631694 - DNA, 25 bp, Homo sapien
cactggcgaatgagctaatcccgaa

SEQ ID NO: 3631695 - DNA, 25 bp, Homo sapien
agtttgccccatgacatccgtgcac

SEQ ID NO: 3631696 - DNA, 25 bp, Homo sapien
tgagaaagctgccccgatttctact

SEQ ID NO: 3631697 - DNA, 25 bp, Homo sapien
gacatccgtgcacgtgaccgtctgt

SEQ ID NO: 3631698 - DNA, 25 bp, Homo sapien
tgaccgtctgttctgtgtttgttct

SEQ ID NO: 3631699 - DNA, 25 bp, Homo sapien
ttctggcttctcaacgcaaacacgt

SEQ ID NO: 3631700 - DNA, 25 bp, Homo sapien
gcaaacacgttgcacatggcatggc

SEQ ID NO: 3631701 - DNA, 25 bp, Homo sapien
agcatcaccgtgaacttccctccag

SEQ ID NO: 3631702 - DNA, 25 bp, Homo sapien
cagcgtgtcgcattccatcccagag

SEQ ID NO: 3631703 - DNA, 25 bp, Homo sapien
tgctctgattttccggttctttgtt

SEQ ID NO: 3631704 - DNA, 25 bp, Homo sapien
gtttattcgaatgtttctgggatgc

SEQ ID NO: 3631705 - DNA, 25 bp, Homo sapien
gctgctctgattttccggttctttg

SEQ ID NO: 3631706 - DNA, 25 bp, Homo sapien
tctttgtttattcgaatgtttctgg

SEQ ID NO: 3631707 - DNA, 25 bp, Homo sapien
ctgctccaagcaagacacgtggatt

SEQ ID NO: 3631708 - DNA, 25 bp, Homo sapien
caagccgtcccatgccccggttggg

SEQ ID NO: 3631709 - DNA, 25 bp, Homo sapien
gtcttggcaagttgggcgctgtgtc

SEQ ID NO: 3631710 - DNA, 25 bp, Homo sapien
gacacgtggattctgcctgaggctg

SEQ ID NO: 3631711 - DNA, 25 bp, Homo sapien
aggccaggagtgtacataagatgaa

SEQ ID NO: 3631712 - DNA, 25 bp, Homo sapien
aagtctgttgttagagagagtaagg

SEQ ID NO: 3631713 - DNA, 25 bp, Homo sapien
tggaacaagatcatagagaaattcc

SEQ ID NO: 3631714 - DNA, 25 bp, Homo sapien
acaggccaggagtgtacataagatg

SEQ ID NO: 3631715 - DNA, 25 bp, Homo sapien
tgtgtgttcacccagacagcgtgag

SEQ ID NO: 3631716 - DNA, 25 bp, Homo sapien
taacaactgtaatgatcccgaatcc

SEQ ID NO: 3631717 - DNA, 25 bp, Homo sapien
cagcgtgagtcaaggagggttccac

SEQ ID NO: 3631718 - DNA, 25 bp, Homo sapien
caatcagacctaagatgagtggcct

SEQ ID NO: 3631719 - DNA, 25 bp, Homo sapien
gtgcccatttcttatgcaagtcagg

SEQ ID NO: 3631720 - DNA, 25 bp, Homo sapien
cagcaaccacgctgcacgtggctcg

SEQ ID NO: 3631721 - DNA, 25 bp, Homo sapien
caagtcaggaaagcgtcccgcgtct

SEQ ID NO: 3631722 - DNA, 25 bp, Homo sapien
gcgtctccagcaaccacgctgcacg

SEQ ID NO: 3631723 - DNA, 25 bp, Homo sapien
ctgtcctgtgctgctacaccctgca

SEQ ID NO: 3631724 - DNA, 25 bp, Homo sapien
gtcctgtgctgctacaccctgcagc

SEQ ID NO: 3631725 - DNA, 25 bp, Homo sapien
tgagaccatgagaacgacgatacgt

SEQ ID NO: 3631726 - DNA, 25 bp, Homo sapien
aggcccgtggccgtctatagcagat

SEQ ID NO: 3631727 - DNA, 25 bp, Homo sapien
gagccgccgatatgcacaacctgta

SEQ ID NO: 3631728 - DNA, 25 bp, Homo sapien
tagcagatccaagtacctgtgtgag

SEQ ID NO: 3631729 - DNA, 25 bp, Homo sapien
gtcggcacagaacctggtcctcaac

SEQ ID NO: 3631730 - DNA, 25 bp, Homo sapien
gcgtgacaccactgcaacatgctca

SEQ ID NO: 3631731 - DNA, 25 bp, Homo sapien
ctccaggagacgcccacactgggtt

SEQ ID NO: 3631732 - DNA, 25 bp, Homo sapien
tgtaactccctatgcaacatcggct

SEQ ID NO: 3631733 - DNA, 25 bp, Homo sapien
aggtcaacctgccattgccaaaggc

SEQ ID NO: 3631734 - DNA, 25 bp, Homo sapien
taccgcaggagtgtgttgcagccag

SEQ ID NO: 3631735 - DNA, 25 bp, Homo sapien
aataaccctatctctgccggacttg

SEQ ID NO: 3631736 - DNA, 25 bp, Homo sapien
caattgaagaacacgcgagtgaccc

SEQ ID NO: 3631737 - DNA, 25 bp, Homo sapien
gatgtcaggccgttccattcgtagc

SEQ ID NO: 3631738 - DNA, 25 bp, Homo sapien
ggtctggctgtcgaaaacctgtttc

SEQ ID NO: 3631739 - DNA, 25 bp, Homo sapien
caggacgggcttgaggtgtttctcc

SEQ ID NO: 3631740 - DNA, 25 bp, Homo sapien
attcgtagccatagctcacccctgg

SEQ ID NO: 3631741 - DNA, 25 bp, Homo sapien
tcagcctcccatcacacagccaccc

SEQ ID NO: 3631742 - DNA, 25 bp, Homo sapien
tgtgcggcgggtcgtccggggcgta

SEQ ID NO: 3631743 - DNA, 25 bp, Homo sapien
tgctgcggccttgcggtcttccctg

SEQ ID NO: 3631744 - DNA, 25 bp, Homo sapien
ccggggcgtagggtgctgcggcctt

SEQ ID NO: 3631745 - DNA, 25 bp, Homo sapien
gggtgctgcggccttgcggtcttcc

SEQ ID NO: 3631746 - DNA, 25 bp, Homo sapien
atcaactccaggcaggcgaaggaca

SEQ ID NO: 3631747 - DNA, 25 bp, Homo sapien
tgaggctccgcggttctcatgttgg

SEQ ID NO: 3631748 - DNA, 25 bp, Homo sapien
tggtgctgcggtatttagtccctcc

SEQ ID NO: 3631749 - DNA, 25 bp, Homo sapien
gggcttgctgatgtcccaagttcct

SEQ ID NO: 3631750 - DNA, 25 bp, Homo sapien
agacccaaaggctttgggatggcca

SEQ ID NO: 3631751 - DNA, 25 bp, Homo sapien
tcatccagacccaaaggctttggga

SEQ ID NO: 3631752 - DNA, 25 bp, Homo sapien
ccccccggtcctgtgtggtcaccat

SEQ ID NO: 3631753 - DNA, 25 bp, Homo sapien
gggctcatccagacccaaaggcttt

SEQ ID NO: 3631754 - DNA, 25 bp, Homo sapien
gaagcggttctccatccgtaatgga

SEQ ID NO: 3631755 - DNA, 25 bp, Homo sapien
cagaaaaaccacatcagcgcatgga

SEQ ID NO: 3631756 - DNA, 25 bp, Homo sapien
gagatggttcgtcttgcactgaggc

SEQ ID NO: 3631757 - DNA, 25 bp, Homo sapien
tcacgagccttactgcctgcgaaga

SEQ ID NO: 3631758 - DNA, 25 bp, Homo sapien
gagggaccagactccattatctgaa

SEQ ID NO: 3631759 - DNA, 25 bp, Homo sapien
ggtgtgctgtagatgccttcttccc

SEQ ID NO: 3631760 - DNA, 25 bp, Homo sapien
gtggtgtgctgtagatgccttcttc

SEQ ID NO: 3631761 - DNA, 25 bp, Homo sapien
tggtgtgctgtagatgccttcttcc

SEQ ID NO: 3631762 - DNA, 25 bp, Homo sapien
tgcactgttcctgcagtgggtgccg

SEQ ID NO: 3631763 - DNA, 25 bp, Homo sapien
tctgcgctgttcctgcagtgggtgc

SEQ ID NO: 3631764 - DNA, 25 bp, Homo sapien
tctgcactgtccctcagtgggtgct

SEQ ID NO: 3631765 - DNA, 25 bp, Homo sapien
tagatgagggaatctgcgctgttcc

SEQ ID NO: 3631766 - DNA, 25 bp, Homo sapien
gctgcagatagtctctccggtccct

SEQ ID NO: 3631767 - DNA, 25 bp, Homo sapien
tgcgtcacagtttcactcatgccgg

SEQ ID NO: 3631768 - DNA, 25 bp, Homo sapien
tcatgccggtctcttcctgtgcaca

SEQ ID NO: 3631769 - DNA, 25 bp, Homo sapien
ccgggaagtagacagctgcgtcaca

SEQ ID NO: 3631770 - DNA, 25 bp, Homo sapien
ctgcacggttggtgttatttctcac

SEQ ID NO: 3631771 - DNA, 25 bp, Homo sapien
gaggactatagtctgatgaggatgc

SEQ ID NO: 3631772 - DNA, 25 bp, Homo sapien
tctcactggtagactctgataagct

SEQ ID NO: 3631773 - DNA, 25 bp, Homo sapien
aacagaacttgggaggaccacacca

SEQ ID NO: 3631774 - DNA, 25 bp, Homo sapien
cctcccaagagctgatgacgctgtt

SEQ ID NO: 3631775 - DNA, 25 bp, Homo sapien
gcacgatagcgccactcaggtcttt

SEQ ID NO: 3631776 - DNA, 25 bp, Homo sapien
aaaagaaacacattgccgaagcacg

SEQ ID NO: 3631777 - DNA, 25 bp, Homo sapien
ggacctaaaatggacacgctctctc

SEQ ID NO: 3631778 - DNA, 25 bp, Homo sapien
tccatgtactcaggctcacaaagga

SEQ ID NO: 3631779 - DNA, 25 bp, Homo sapien
ctgctgtcagaaggagggacgccta

SEQ ID NO: 3631780 - DNA, 25 bp, Homo sapien
gagctgtagtcggtagggtcttcca

SEQ ID NO: 3631781 - DNA, 25 bp, Homo sapien
ccctaatccgaaaggtgagctgtag

SEQ ID NO: 3631782 - DNA, 25 bp, Homo sapien
tgagctccgggagttgattgaggct

SEQ ID NO: 3631783 - DNA, 25 bp, Homo sapien
cttgagctccgggagttgattgagg

SEQ ID NO: 3631784 - DNA, 25 bp, Homo sapien
ttgagctccgggagttgattgaggc

SEQ ID NO: 3631785 - DNA, 25 bp, Homo sapien
tgcttgagctccgggagttgattga

SEQ ID NO: 3631786 - DNA, 25 bp, Homo sapien
gcacctggtaggtaagtctactgga

SEQ ID NO: 3631787 - DNA, 25 bp, Homo sapien
gaacaagaggtttgcttagcacctg

SEQ ID NO: 3631788 - DNA, 25 bp, Homo sapien
ttaattcttctaaacgagcatcagc

SEQ ID NO: 3631789 - DNA, 25 bp, Homo sapien
ggtaagtctactggattattaattc

SEQ ID NO: 3631790 - DNA, 25 bp, Homo sapien
catttgctaagttcctcatatctca

SEQ ID NO: 3631791 - DNA, 25 bp, Homo sapien
tcctggcgcataaggacgggaggcc

SEQ ID NO: 3631792 - DNA, 25 bp, Homo sapien
caatctaaatgacacaagctttgga

SEQ ID NO: 3631793 - DNA, 25 bp, Homo sapien
gaaaatgaagaatgagtccatttgc

SEQ ID NO: 3631794 - DNA, 25 bp, Homo sapien
tgagaacagtcacctacacgtgaaa

SEQ ID NO: 3631795 - DNA, 25 bp, Homo sapien
tgaaatctgtgtgcgttgtaacaac

SEQ ID NO: 3631796 - DNA, 25 bp, Homo sapien
ggatgggctcctcgctgaaatctcc

SEQ ID NO: 3631797 - DNA, 25 bp, Homo sapien
ctttgaaagccagcgtgggagagca

SEQ ID NO: 3631798 - DNA, 25 bp, Homo sapien
tctgccgaagtccacgtttccgtgc

SEQ ID NO: 3631799 - DNA, 25 bp, Homo sapien
cacacatgttctgccgaagtccacg

SEQ ID NO: 3631800 - DNA, 25 bp, Homo sapien
cagccgctccgtggcgcacacatgt

SEQ ID NO: 3631801 - DNA, 25 bp, Homo sapien
gaagtccacgtttccgtgcagccct

SEQ ID NO: 3631802 - DNA, 25 bp, Homo sapien
ggaaggaactcttttcatacgcatg

SEQ ID NO: 3631803 - DNA, 25 bp, Homo sapien
ccccagggctattgaagggatactt

SEQ ID NO: 3631804 - DNA, 25 bp, Homo sapien
cgctttgttaatgataccagggttc

SEQ ID NO: 3631805 - DNA, 25 bp, Homo sapien
tcttgagggctctgatgttgtacga

SEQ ID NO: 3631806 - DNA, 25 bp, Homo sapien
cactgtgttacataattgggctgca

SEQ ID NO: 3631807 - DNA, 25 bp, Homo sapien
tgggctgcattctgtaacgtttaat

SEQ ID NO: 3631808 - DNA, 25 bp, Homo sapien
gatatggcagacaagtgattaacca

SEQ ID NO: 3631809 - DNA, 25 bp, Homo sapien
taattagattgtcgctggccagccc

SEQ ID NO: 3631810 - DNA, 25 bp, Homo sapien
tttccttccgataatgtagccagcc

SEQ ID NO: 3631811 - DNA, 25 bp, Homo sapien
agattcccacccgtcaaaaggcaag

SEQ ID NO: 3631812 - DNA, 25 bp, Homo sapien
ggtgccattgctgaacccgctgtag

SEQ ID NO: 3631813 - DNA, 25 bp, Homo sapien
gagcatccagcgatttccaaacagc

SEQ ID NO: 3631814 - DNA, 25 bp, Homo sapien
caaaaatcagcacaagtggtgttcc

SEQ ID NO: 3631815 - DNA, 25 bp, Homo sapien
gagcagctgcgggacatgccagtta

SEQ ID NO: 3631816 - DNA, 25 bp, Homo sapien
aaatcagcacaagtggtgttccagg

SEQ ID NO: 3631817 - DNA, 25 bp, Homo sapien
agcagctgcgggacatgccagttaa

SEQ ID NO: 3631818 - DNA, 25 bp, Homo sapien
gctgggccctcgctattccagagcg

SEQ ID NO: 3631819 - DNA, 25 bp, Homo sapien
ggccctcgctattccagagcgtggc

SEQ ID NO: 3631820 - DNA, 25 bp, Homo sapien
ggacgctgggccctcgctattccag

SEQ ID NO: 3631821 - DNA, 25 bp, Homo sapien
ggctgtgacaggtgcgatccaatct

SEQ ID NO: 3631822 - DNA, 25 bp, Homo sapien
catcgagtgcatgcaagtgctcagc

SEQ ID NO: 3631823 - DNA, 25 bp, Homo sapien
tgaggagcaaaaaccagacgcaggt

SEQ ID NO: 3631824 - DNA, 25 bp, Homo sapien
gaggattcgtatttagcacaagggc

SEQ ID NO: 3631825 - DNA, 25 bp, Homo sapien
ctatgattagtaggcggcaggctgc

SEQ ID NO: 3631826 - DNA, 25 bp, Homo sapien
aacgtggaaatgacgtctccaggga

SEQ ID NO: 3631827 - DNA, 25 bp, Homo sapien
catgagcgattatctgcgctggaac

SEQ ID NO: 3631828 - DNA, 25 bp, Homo sapien
tctgcgctggaacgtggaaatgacg

SEQ ID NO: 3631829 - DNA, 25 bp, Homo sapien
gaacaaatggtgcatgagcgattat

SEQ ID NO: 3631830 - DNA, 25 bp, Homo sapien
ccggagctggtgtttgtaccaagac

SEQ ID NO: 3631831 - DNA, 25 bp, Homo sapien
acagagaccgtttctgatcagtgcc

SEQ ID NO: 3631832 - DNA, 25 bp, Homo sapien
aggacgggcattttcactacacagc

SEQ ID NO: 3631833 - DNA, 25 bp, Homo sapien
tccagagagcaatgtaggtctaccc

SEQ ID NO: 3631834 - DNA, 25 bp, Homo sapien
gacttggcgccagagaattcaatgg

SEQ ID NO: 3631835 - DNA, 25 bp, Homo sapien
ggagttaagacttggcgccagagaa

SEQ ID NO: 3631836 - DNA, 25 bp, Homo sapien
gagaattcaatggtcgcatctcagt

SEQ ID NO: 3631837 - DNA, 25 bp, Homo sapien
caatggtcgcatctcagttcttgtt

SEQ ID NO: 3631838 - DNA, 25 bp, Homo sapien
tggatacaagatccatgaaactttg

SEQ ID NO: 3631839 - DNA, 25 bp, Homo sapien
atccatgaaactttggtcattctcc

SEQ ID NO: 3631840 - DNA, 25 bp, Homo sapien
ctggatacaagatccatgaaacttt

SEQ ID NO: 3631841 - DNA, 25 bp, Homo sapien
catgaaactttggtcattctcctgc

SEQ ID NO: 3631842 - DNA, 25 bp, Homo sapien
tctaagcacgtatcactgtgatggg

SEQ ID NO: 3631843 - DNA, 25 bp, Homo sapien
cgagaatgtattctacggagctgca

SEQ ID NO: 3631844 - DNA, 25 bp, Homo sapien
cacgggcatgccagttacaagcaaa

SEQ ID NO: 3631845 - DNA, 25 bp, Homo sapien
gatcaaaaaccacgtgtgtgccgcg

SEQ ID NO: 3631846 - DNA, 25 bp, Homo sapien
gccattaaagttggattgttgaggg

SEQ ID NO: 3631847 - DNA, 25 bp, Homo sapien
tgggccattaaagttggattgttga

SEQ ID NO: 3631848 - DNA, 25 bp, Homo sapien
catgggccattaaagttggattgtt

SEQ ID NO: 3631849 - DNA, 25 bp, Homo sapien
ctcatgggccattaaagttggattg

SEQ ID NO: 3631850 - DNA, 25 bp, Homo sapien
ggcttaagccacagacatgatcctc

SEQ ID NO: 3631851 - DNA, 25 bp, Homo sapien
tcagtcagttgtccctttgcgtgcc

SEQ ID NO: 3631852 - DNA, 25 bp, Homo sapien
gtcagatcaaattagggccactcca

SEQ ID NO: 3631853 - DNA, 25 bp, Homo sapien
ccttcctggctagtggatgacgtct

SEQ ID NO: 3631854 - DNA, 25 bp, Homo sapien
aaggagcagtgagcttcctgcggcc

SEQ ID NO: 3631855 - DNA, 25 bp, Homo sapien
tcaggaattcgataagagagataaa

SEQ ID NO: 3631856 - DNA, 25 bp, Homo sapien
ctttcatggaaacagcatcaggaat

SEQ ID NO: 3631857 - DNA, 25 bp, Homo sapien
gctggctgctccgtcgcgacttctt

SEQ ID NO: 3631858 - DNA, 25 bp, Homo sapien
tctcattgtggaatcccattgtgga

SEQ ID NO: 3631859 - DNA, 25 bp, Homo sapien
cattgtggagtgtgagtccattcgg

SEQ ID NO: 3631860 - DNA, 25 bp, Homo sapien
gatctaattccatcctctcattgtg

SEQ ID NO: 3631861 - DNA, 25 bp, Homo sapien
aaaggacaagggtcgtgacagccac

SEQ ID NO: 3631862 - DNA, 25 bp, Homo sapien
tctttggattcactccggccccatt

SEQ ID NO: 3631863 - DNA, 25 bp, Homo sapien
caatattcccaaagtcgtaaggact

SEQ ID NO: 3631864 - DNA, 25 bp, Homo sapien
gagtcacgttctgtttaattttgca

SEQ ID NO: 3631865 - DNA, 25 bp, Homo sapien
gataatgtatttctcggaaaagcag

SEQ ID NO: 3631866 - DNA, 25 bp, Homo sapien
tggtgttcttgcaggagagactgcg

SEQ ID NO: 3631867 - DNA, 25 bp, Homo sapien
ctgccatacgttttgcttggctggg

SEQ ID NO: 3631868 - DNA, 25 bp, Homo sapien
ttcttgcaggagagactgcggaagt

SEQ ID NO: 3631869 - DNA, 25 bp, Homo sapien
tggctgggatggtgttcttgcagga

SEQ ID NO: 3631870 - DNA, 25 bp, Homo sapien
ggctgatggcaagtgcctccgtgca

SEQ ID NO: 3631871 - DNA, 25 bp, Homo sapien
ctgtcttgccgtggcgctctgagga

SEQ ID NO: 3631872 - DNA, 25 bp, Homo sapien
tgccatgcaaggtggtgcccattca

SEQ ID NO: 3631873 - DNA, 25 bp, Homo sapien
gcgctctgaggaggccatgtcttct

SEQ ID NO: 3631874 - DNA, 25 bp, Homo sapien
tgggtttttcacacttctgggcaaa

SEQ ID NO: 3631875 - DNA, 25 bp, Homo sapien
tcgttgtggataataactgcccagc

SEQ ID NO: 3631876 - DNA, 25 bp, Homo sapien
tgtgcagacatcatacgtgggagga

SEQ ID NO: 3631877 - DNA, 25 bp, Homo sapien
tgcccagcaagcttccgggcaggaa

SEQ ID NO: 3631878 - DNA, 25 bp, Homo sapien
atcactagcaggaatggtaataatg

SEQ ID NO: 3631879 - DNA, 25 bp, Homo sapien
ccaggaaacgtgtcaaatgaattca

SEQ ID NO: 3631880 - DNA, 25 bp, Homo sapien
taatcataaaatctgggccccttcc

SEQ ID NO: 3631881 - DNA, 25 bp, Homo sapien
aaagtgcagagatgagcaataatca

SEQ ID NO: 3631882 - DNA, 25 bp, Homo sapien
tactagtcctatctccaccagatct

SEQ ID NO: 3631883 - DNA, 25 bp, Homo sapien
tctactagacctacttccaccaggt

SEQ ID NO: 3631884 - DNA, 25 bp, Homo sapien
tctaccaggcctatctttaccagac

SEQ ID NO: 3631885 - DNA, 25 bp, Homo sapien
tccattagatacacctccacaagat

SEQ ID NO: 3631886 - DNA, 25 bp, Homo sapien
caggtgctagtggataccaccaagt

SEQ ID NO: 3631887 - DNA, 25 bp, Homo sapien
agtcaatattgagtagcaggaaacc

SEQ ID NO: 3631888 - DNA, 25 bp, Homo sapien
gtcaggccatcagggcggagacatt

SEQ ID NO: 3631889 - DNA, 25 bp, Homo sapien
gcctgatgttccgtcaggccatcag

SEQ ID NO: 3631890 - DNA, 25 bp, Homo sapien
ttgtagctataagttacgatgtggt

SEQ ID NO: 3631891 - DNA, 25 bp, Homo sapien
tgtacctacaagttgtgatgtgata

SEQ ID NO: 3631892 - DNA, 25 bp, Homo sapien
ctacaagttgcgatgtgctacggtg

SEQ ID NO: 3631893 - DNA, 25 bp, Homo sapien
gatgtgatatggtgttgtgagacca

SEQ ID NO: 3631894 - DNA, 25 bp, Homo sapien
gaaaaagggatatatctatgctctc

SEQ ID NO: 3631895 - DNA, 25 bp, Homo sapien
gatggaatttctggctcacgcttcg

SEQ ID NO: 3631896 - DNA, 25 bp, Homo sapien
tatgctctccctgatctctcgggaa

SEQ ID NO: 3631897 - DNA, 25 bp, Homo sapien
tcacgcttcgtccttttgctgttgt

SEQ ID NO: 3631898 - DNA, 25 bp, Homo sapien
gagtgagatagcacagactgggaaa

SEQ ID NO: 3631899 - DNA, 25 bp, Homo sapien
ggttcactgctacagaaaacctgca

SEQ ID NO: 3631900 - DNA, 25 bp, Homo sapien
caaagcagtgtcttccttcaggttc

SEQ ID NO: 3631901 - DNA, 25 bp, Homo sapien
tttcacaggaaagatcaacttggcc

SEQ ID NO: 3631902 - DNA, 25 bp, Homo sapien
gcatatccactagccagggtttcac

SEQ ID NO: 3631903 - DNA, 25 bp, Homo sapien
gggatgccggcatatccactagcca

SEQ ID NO: 3631904 - DNA, 25 bp, Homo sapien
ggacgagcacacttcatgcacacaa

SEQ ID NO: 3631905 - DNA, 25 bp, Homo sapien
ggtttcaccacaagccggggtgtca

SEQ ID NO: 3631906 - DNA, 25 bp, Homo sapien
agagggttgctggacagaagccggg

SEQ ID NO: 3631907 - DNA, 25 bp, Homo sapien
gaaagagggttgctggacagaagcc

SEQ ID NO: 3631908 - DNA, 25 bp, Homo sapien
ggttgctggacagaagccggggagg

SEQ ID NO: 3631909 - DNA, 25 bp, Homo sapien
gttgctggacagaagccggggaggg

SEQ ID NO: 3631910 - DNA, 25 bp, Homo sapien
cagggaacccgtgtgccggggacag

SEQ ID NO: 3631911 - DNA, 25 bp, Homo sapien
caagtcagggaacccgtgtgccggg

SEQ ID NO: 3631912 - DNA, 25 bp, Homo sapien
cagcaagtcagggaacccgtgtgcc

SEQ ID NO: 3631913 - DNA, 25 bp, Homo sapien
gggacagcgctcagtgaagcatgtg

SEQ ID NO: 3631914 - DNA, 25 bp, Homo sapien
gatagtctccagttatcgctaaatc

SEQ ID NO: 3631915 - DNA, 25 bp, Homo sapien
aacaagagtcaacctactccagggt

SEQ ID NO: 3631916 - DNA, 25 bp, Homo sapien
tcaacctactccagggtggtacaaa

SEQ ID NO: 3631917 - DNA, 25 bp, Homo sapien
tactatacagtctataggttaaaaa

SEQ ID NO: 3631918 - DNA, 25 bp, Homo sapien
tacctaaatgactactccccaagtg

SEQ ID NO: 3631919 - DNA, 25 bp, Homo sapien
aatagctgaggaacccaaacttcgc

SEQ ID NO: 3631920 - DNA, 25 bp, Homo sapien
tcatgtagacacctcaaacagtacc

SEQ ID NO: 3631921 - DNA, 25 bp, Homo sapien
cataaaacaatgagtctaagaggaa

SEQ ID NO: 3631922 - DNA, 25 bp, Homo sapien
tcccgtgtgggcagcaggttcacag

SEQ ID NO: 3631923 - DNA, 25 bp, Homo sapien
gcaggttcacagaagacagaacaga

SEQ ID NO: 3631924 - DNA, 25 bp, Homo sapien
gacacagccggatggacgtgaaagc

SEQ ID NO: 3631925 - DNA, 25 bp, Homo sapien
agtatgagaaacagcgttcccgtgt

SEQ ID NO: 3631926 - DNA, 25 bp, Homo sapien
aattagctaaactcaggcacctggc

SEQ ID NO: 3631927 - DNA, 25 bp, Homo sapien
cagaccgccctcatgaaaaattagg

SEQ ID NO: 3631928 - DNA, 25 bp, Homo sapien
taaagttacagctattatgcccagc

SEQ ID NO: 3631929 - DNA, 25 bp, Homo sapien
tgcccagcaagttctctcatataac

SEQ ID NO: 3631930 - DNA, 25 bp, Homo sapien
ctgaacatgatgaacctccctaagg

SEQ ID NO: 3631931 - DNA, 25 bp, Homo sapien
ttgctggaggcacggcgctgtcttc

SEQ ID NO: 3631932 - DNA, 25 bp, Homo sapien
cacgggcttctaaagaatatacaca

SEQ ID NO: 3631933 - DNA, 25 bp, Homo sapien
gaaacacaggcttctagagaataca

SEQ ID NO: 3631934 - DNA, 25 bp, Homo sapien
tgcctagtgcttcatggaccggtgc

SEQ ID NO: 3631935 - DNA, 25 bp, Homo sapien
gttagcaaatgactgaaccccgacc

SEQ ID NO: 3631936 - DNA, 25 bp, Homo sapien
cattctctggaattcaccctgggtc

SEQ ID NO: 3631937 - DNA, 25 bp, Homo sapien
agtagcttaagcctcagtgtcccag

SEQ ID NO: 3631938 - DNA, 25 bp, Homo sapien
gaagacagaaccacaaagcctcgca

SEQ ID NO: 3631939 - DNA, 25 bp, Homo sapien
agatgtttcccgtaattgaagacag

SEQ ID NO: 3631940 - DNA, 25 bp, Homo sapien
catagatgtttcccgtaattgaaga

SEQ ID NO: 3631941 - DNA, 25 bp, Homo sapien
tttcccgtaattgaagacagaacca

SEQ ID NO: 3631942 - DNA, 25 bp, Homo sapien
tttgcaaagtcaaatctgcccccac

SEQ ID NO: 3631943 - DNA, 25 bp, Homo sapien
tttctgctttgcaaagtcaaatctg

SEQ ID NO: 3631944 - DNA, 25 bp, Homo sapien
ctcctgcaggatgtcttttctgctt

SEQ ID NO: 3631945 - DNA, 25 bp, Homo sapien
tcctgcaggatgtcttttctgcttt

SEQ ID NO: 3631946 - DNA, 25 bp, Homo sapien
taggacaccttatcatgtaggcatc

SEQ ID NO: 3631947 - DNA, 25 bp, Homo sapien
tgcaataaagcactattcataggac

SEQ ID NO: 3631948 - DNA, 25 bp, Homo sapien
tgctgatcaatctctacacttgcca

SEQ ID NO: 3631949 - DNA, 25 bp, Homo sapien
tatgtaagtacaatgtccagaagtt

SEQ ID NO: 3631950 - DNA, 25 bp, Homo sapien
tcaaacaagtgtgtggcaagtcagg

SEQ ID NO: 3631951 - DNA, 25 bp, Homo sapien
ttgaagtgagagaagcctattgcca

SEQ ID NO: 3631952 - DNA, 25 bp, Homo sapien
caagtgtgtggcaagtcaggtgttt

SEQ ID NO: 3631953 - DNA, 25 bp, Homo sapien
gcctattgccattatctctgaatga

SEQ ID NO: 3631954 - DNA, 25 bp, Homo sapien
gaaaactcgagctcgttgtccgatt

SEQ ID NO: 3631955 - DNA, 25 bp, Homo sapien
gctgatggcaaagctgtcgctgtgc

SEQ ID NO: 3631956 - DNA, 25 bp, Homo sapien
ttgtccgattcatgagcctggcctc

SEQ ID NO: 3631957 - DNA, 25 bp, Homo sapien
cttgcttttctgcacggccgcgagg

SEQ ID NO: 3631958 - DNA, 25 bp, Homo sapien
ccgcggtccacagctgacgctggga

SEQ ID NO: 3631959 - DNA, 25 bp, Homo sapien
cagtgcctgaattcccgttctgcaa

SEQ ID NO: 3631960 - DNA, 25 bp, Homo sapien
tgtaatcggagagcagaaatcttcc

SEQ ID NO: 3631961 - DNA, 25 bp, Homo sapien
cattttattatgtgtgtcgcccaaa

SEQ ID NO: 3631962 - DNA, 25 bp, Homo sapien
agcacaattccaggaagcgcacggg

SEQ ID NO: 3631963 - DNA, 25 bp, Homo sapien
tgagatctccccttgtatcagcaag

SEQ ID NO: 3631964 - DNA, 25 bp, Homo sapien
atcagcaagtgtgactcatggcttc

SEQ ID NO: 3631965 - DNA, 25 bp, Homo sapien
acgaggcccgttcctcctgctgaga

SEQ ID NO: 3631966 - DNA, 25 bp, Homo sapien
tgtgtcttaggatctgctgtgcagg

SEQ ID NO: 3631967 - DNA, 25 bp, Homo sapien
gtggctcagccagagtggcaccacc

SEQ ID NO: 3631968 - DNA, 25 bp, Homo sapien
ccactgccctggtggctcagccaga

SEQ ID NO: 3631969 - DNA, 25 bp, Homo sapien
tacacggggaagacagacccgcctc

SEQ ID NO: 3631970 - DNA, 25 bp, Homo sapien
ggcaccaccagtgggcagctgagtg

SEQ ID NO: 3631971 - DNA, 25 bp, Homo sapien
tgcctgaaccagagctgtcaaccag

SEQ ID NO: 3631972 - DNA, 25 bp, Homo sapien
aacgcacggtcaagagagccttctc

SEQ ID NO: 3631973 - DNA, 25 bp, Homo sapien
ttcaacacatcctacaaacgcacgg

SEQ ID NO: 3631974 - DNA, 25 bp, Homo sapien
caagagagccttctccgtgggtacc

SEQ ID NO: 3631975 - DNA, 25 bp, Homo sapien
cattccaggacaacatccaaactaa

SEQ ID NO: 3631976 - DNA, 25 bp, Homo sapien
catccaaactaaacatggcattttc

SEQ ID NO: 3631977 - DNA, 25 bp, Homo sapien
cccatggaccaaataaggacgctga

SEQ ID NO: 3631978 - DNA, 25 bp, Homo sapien
cataacgctctaggaggatctagca

SEQ ID NO: 3631979 - DNA, 25 bp, Homo sapien
tctgtccaaagaacgcttcgtgctg

SEQ ID NO: 3631980 - DNA, 25 bp, Homo sapien
catctcagaatcgaaagcaggtgct

SEQ ID NO: 3631981 - DNA, 25 bp, Homo sapien
acattcatggcaggcgttctgtcca

SEQ ID NO: 3631982 - DNA, 25 bp, Homo sapien
ggaccatgtgggatgcatctcagaa

SEQ ID NO: 3631983 - DNA, 25 bp, Homo sapien
cttcacttagataaaccaccctggg

SEQ ID NO: 3631984 - DNA, 25 bp, Homo sapien
ctgaacgcctctcgctgggagtcaa

SEQ ID NO: 3631985 - DNA, 25 bp, Homo sapien
cgggctgtccctgccaagatttggg

SEQ ID NO: 3631986 - DNA, 25 bp, Homo sapien
gagagagcatagcttacgggcaacc

SEQ ID NO: 3631987 - DNA, 25 bp, Homo sapien
gcacagccctcggacgtggacatca

SEQ ID NO: 3631988 - DNA, 25 bp, Homo sapien
caaacgtcctcttcgccttggaagg

SEQ ID NO: 3631989 - DNA, 25 bp, Homo sapien
cataggagacctgacttccatttgc

SEQ ID NO: 3631990 - DNA, 25 bp, Homo sapien
acaaaatccatatttcaactccatt

SEQ ID NO: 3631991 - DNA, 25 bp, Homo sapien
tggagaagcagacgccgacgctgca

SEQ ID NO: 3631992 - DNA, 25 bp, Homo sapien
tgcatcacagtggacagtggccttg

SEQ ID NO: 3631993 - DNA, 25 bp, Homo sapien
tgtggacggtttcgcttcagtgaca

SEQ ID NO: 3631994 - DNA, 25 bp, Homo sapien
ttcgtgccagtgaagtccgtgggct

SEQ ID NO: 3631995 - DNA, 25 bp, Homo sapien
tccttggttagatgcacacctagat

SEQ ID NO: 3631996 - DNA, 25 bp, Homo sapien
tcttgcccaattgatctggctagca

SEQ ID NO: 3631997 - DNA, 25 bp, Homo sapien
ctggctagcacttccggtactaggt

SEQ ID NO: 3631998 - DNA, 25 bp, Homo sapien
tgttgtccacaaagagagattgact

SEQ ID NO: 3631999 - DNA, 25 bp, Homo sapien
gcagctcttgcagctcaatgggagc

SEQ ID NO: 3632000 - DNA, 25 bp, Homo sapien
ctcttgcagctcaatgggagctgtc

SEQ ID NO: 3632001 - DNA, 25 bp, Homo sapien
cagctcttgcagctcaatgggagct

SEQ ID NO: 3632002 - DNA, 25 bp, Homo sapien
ttgcagctcaatgggagctgtcatg

SEQ ID NO: 3632003 - DNA, 25 bp, Homo sapien
tgaaggatcatctgaaggccaactc

SEQ ID NO: 3632004 - DNA, 25 bp, Homo sapien
gatactggcattgctcatccttggg

SEQ ID NO: 3632005 - DNA, 25 bp, Homo sapien
gaaaagcagatgaaccctgtgtggc

SEQ ID NO: 3632006 - DNA, 25 bp, Homo sapien
cctgcaatgtagttccaccagctgg

SEQ ID NO: 3632007 - DNA, 25 bp, Homo sapien
gtttccctcttactcagtggttcag

SEQ ID NO: 3632008 - DNA, 25 bp, Homo sapien
ggcttttcaaaccacgtcagatcct

SEQ ID NO: 3632009 - DNA, 25 bp, Homo sapien
gatcctccacttgcacgtcgtcttg

SEQ ID NO: 3632010 - DNA, 25 bp, Homo sapien
ggttcagcctgttcccattctacag

SEQ ID NO: 3632011 - DNA, 25 bp, Homo sapien
gccacagggattaggacttaaacca

SEQ ID NO: 3632012 - DNA, 25 bp, Homo sapien
caccatcgtattggagaagggccca

SEQ ID NO: 3632013 - DNA, 25 bp, Homo sapien
gcaaagacgctatcaccaaagaagg

SEQ ID NO: 3632014 - DNA, 25 bp, Homo sapien
tattctctctcatcgacaggactgg

SEQ ID NO: 3632015 - DNA, 25 bp, Homo sapien
tgggccttgatgactctgcttcagt

SEQ ID NO: 3632016 - DNA, 25 bp, Homo sapien
gggctctgccttgcctcctggtggc

SEQ ID NO: 3632017 - DNA, 25 bp, Homo sapien
gactctgcttcagttgctggaccat

SEQ ID NO: 3632018 - DNA, 25 bp, Homo sapien
gctctgcctgggccttgatgactct

SEQ ID NO: 3632019 - DNA, 25 bp, Homo sapien
ggaatgcacgatcccctagtgccag

SEQ ID NO: 3632020 - DNA, 25 bp, Homo sapien
tgggaatgcacgatcccctagtgcc

SEQ ID NO: 3632021 - DNA, 25 bp, Homo sapien
ggccagtgggaatgcacgatcccct

SEQ ID NO: 3632022 - DNA, 25 bp, Homo sapien
cagtgggaatgcacgatcccctagt

SEQ ID NO: 3632023 - DNA, 25 bp, Homo sapien
taacagtgccaaaccgtatctggag

SEQ ID NO: 3632024 - DNA, 25 bp, Homo sapien
gggagccgagtcatctaacagtgcc

SEQ ID NO: 3632025 - DNA, 25 bp, Homo sapien
tcctgaaaacatcgctgctgtggtg

SEQ ID NO: 3632026 - DNA, 25 bp, Homo sapien
cagaggaaagcggagctcactgccc

SEQ ID NO: 3632027 - DNA, 25 bp, Homo sapien
tgtgaggtcgggtcatcatttcttt

SEQ ID NO: 3632028 - DNA, 25 bp, Homo sapien
tcatcatttctttgatgacgactcc

SEQ ID NO: 3632029 - DNA, 25 bp, Homo sapien
tcatttctttgatgacgactcccat

SEQ ID NO: 3632030 - DNA, 25 bp, Homo sapien
taggcatgtgaggtcgggtcatcat

SEQ ID NO: 3632031 - DNA, 25 bp, Homo sapien
ggaaggcaggtatagagtgaaggcc

SEQ ID NO: 3632032 - DNA, 25 bp, Homo sapien
ctggaaggcaggtatagagtgaagg

SEQ ID NO: 3632033 - DNA, 25 bp, Homo sapien
gaaggcaggtatagagtgaaggcct

SEQ ID NO: 3632034 - DNA, 25 bp, Homo sapien
tggaaggcaggtatagagtgaaggc

SEQ ID NO: 3632035 - DNA, 25 bp, Homo sapien
aagtcctcgcaggatcacaaaggcc

SEQ ID NO: 3632036 - DNA, 25 bp, Homo sapien
gaaagagctcctgtttacaaagtga

SEQ ID NO: 3632037 - DNA, 25 bp, Homo sapien
gatctccagaggtctctaaacagcc

SEQ ID NO: 3632038 - DNA, 25 bp, Homo sapien
aggacccagactcctacaggcggtg

SEQ ID NO: 3632039 - DNA, 25 bp, Homo sapien
gagatctctgaacagcctcagggca

SEQ ID NO: 3632040 - DNA, 25 bp, Homo sapien
tgcaccccgtgtgctcaaaggagcg

SEQ ID NO: 3632041 - DNA, 25 bp, Homo sapien
cagtgctaccatcggtgtgtggcca

SEQ ID NO: 3632042 - DNA, 25 bp, Homo sapien
tgcttcaataaaggccccggcagca

SEQ ID NO: 3632043 - DNA, 25 bp, Homo sapien
ttctgcagccagtcccgaaaagagc

SEQ ID NO: 3632044 - DNA, 25 bp, Homo sapien
ctctgtgcattgtccgagaccacct

SEQ ID NO: 3632045 - DNA, 25 bp, Homo sapien
gggtcttccacaccgagtctctgtg

SEQ ID NO: 3632046 - DNA, 25 bp, Homo sapien
cgaaaagagcaggacacgcctgtgg

SEQ ID NO: 3632047 - DNA, 25 bp, Homo sapien
tccatgtctgaagcttccaggaggc

SEQ ID NO: 3632048 - DNA, 25 bp, Homo sapien
caatcaatttgtcatggtccagtgt

SEQ ID NO: 3632049 - DNA, 25 bp, Homo sapien
ccctgtaatgtaggtcaaacttgga

SEQ ID NO: 3632050 - DNA, 25 bp, Homo sapien
cagtgtgtgctcatgaccgacttgc

SEQ ID NO: 3632051 - DNA, 25 bp, Homo sapien
tatccagtgacacacgtcaagagga

SEQ ID NO: 3632052 - DNA, 25 bp, Homo sapien
gactggctccatgatctgtaaaaag

SEQ ID NO: 3632053 - DNA, 25 bp, Homo sapien
tgcttggaaaagtagagaactgccc

SEQ ID NO: 3632054 - DNA, 25 bp, Homo sapien
tctatacatgaacgtgaccctgcaa

SEQ ID NO: 3632055 - DNA, 25 bp, Homo sapien
tcttcttctccttccaggacacaca

SEQ ID NO: 3632056 - DNA, 25 bp, Homo sapien
ttcttcttctccttccaggacacac

SEQ ID NO: 3632057 - DNA, 25 bp, Homo sapien
ttcttctccttccaggacacacaca

SEQ ID NO: 3632058 - DNA, 25 bp, Homo sapien
tcttctccttccaggacacacacat

SEQ ID NO: 3632059 - DNA, 25 bp, Homo sapien
tggactgcagggagctgtccacaga

SEQ ID NO: 3632060 - DNA, 25 bp, Homo sapien
ctgtagctttggactgcagggagct

SEQ ID NO: 3632061 - DNA, 25 bp, Homo sapien
ctttggactgcagggagctgtccac

SEQ ID NO: 3632062 - DNA, 25 bp, Homo sapien
tagctttggactgcagggagctgtc

SEQ ID NO: 3632063 - DNA, 25 bp, Homo sapien
tcgaggttcatcctgtcctcgtgga

SEQ ID NO: 3632064 - DNA, 25 bp, Homo sapien
cctcgaggttcatcctgtcctcgtg

SEQ ID NO: 3632065 - DNA, 25 bp, Homo sapien
ctcgaggttcatcctgtcctcgtgg

SEQ ID NO: 3632066 - DNA, 25 bp, Homo sapien
ccccatggtcctaagagcataagcc

SEQ ID NO: 3632067 - DNA, 25 bp, Homo sapien
ggcgattcatgcctctcttgcagtt

SEQ ID NO: 3632068 - DNA, 25 bp, Homo sapien
catgtgtggcctgcaagagatgcat

SEQ ID NO: 3632069 - DNA, 25 bp, Homo sapien
tggtcctaagagcataagccctggt

SEQ ID NO: 3632070 - DNA, 25 bp, Homo sapien
ctgaaggagggtcttagcatctgta

SEQ ID NO: 3632071 - DNA, 25 bp, Homo sapien
tcactgaaggagggtcttagcatct

SEQ ID NO: 3632072 - DNA, 25 bp, Homo sapien
aaggagggtcttagcatctgtatgg

SEQ ID NO: 3632073 - DNA, 25 bp, Homo sapien
catctgtatggggagttcgtccctc

SEQ ID NO: 3632074 - DNA, 25 bp, Homo sapien
cgatgcatctacaccagcctgagtg

SEQ ID NO: 3632075 - DNA, 25 bp, Homo sapien
tggccgacgatgcatctacaccagc

SEQ ID NO: 3632076 - DNA, 25 bp, Homo sapien
cagcctgagtggatggccgctgcat

SEQ ID NO: 3632077 - DNA, 25 bp, Homo sapien
aaagcacgggcctggccgacgatgc

SEQ ID NO: 3632078 - DNA, 25 bp, Homo sapien
ctgtagtactgtgagggccatagga

SEQ ID NO: 3632079 - DNA, 25 bp, Homo sapien
ctcatcagaaagaacaatacaattt

SEQ ID NO: 3632080 - DNA, 25 bp, Homo sapien
gtagtactgtgagggccataggact

SEQ ID NO: 3632081 - DNA, 25 bp, Homo sapien
cccacaagataagtggtcgctgtag

SEQ ID NO: 3632082 - DNA, 25 bp, Homo sapien
ctgtgatcgtcatgcaggttgtggt

SEQ ID NO: 3632083 - DNA, 25 bp, Homo sapien
gggctgtgatcgtcatgcaggttgt

SEQ ID NO: 3632084 - DNA, 25 bp, Homo sapien
tgatcgtcatgcaggttgtggttac

SEQ ID NO: 3632085 - DNA, 25 bp, Homo sapien
ttgatggggctgtgatcgtcatgca

SEQ ID NO: 3632086 - DNA, 25 bp, Homo sapien
ctaggattgtgagtaagagcacacc

SEQ ID NO: 3632087 - DNA, 25 bp, Homo sapien
ggccacaggactggtactaggattg

SEQ ID NO: 3632088 - DNA, 25 bp, Homo sapien
gagtaagagcacacctttccaggtg

SEQ ID NO: 3632089 - DNA, 25 bp, Homo sapien
cccacaagataagtggtctctgtag

SEQ ID NO: 3632090 - DNA, 25 bp, Homo sapien
tgggtcagcgttcctgcccaaacac

SEQ ID NO: 3632091 - DNA, 25 bp, Homo sapien
caaacaccagttagctgtcttggat

SEQ ID NO: 3632092 - DNA, 25 bp, Homo sapien
tggtgaaggaggcagtctagtatgg

SEQ ID NO: 3632093 - DNA, 25 bp, Homo sapien
tctagtatggtggttagatctctgg

SEQ ID NO: 3632094 - DNA, 25 bp, Homo sapien
tctccaaggccagtcatgtataggg

SEQ ID NO: 3632095 - DNA, 25 bp, Homo sapien
cagaatgaggcttatccctgaggct

SEQ ID NO: 3632096 - DNA, 25 bp, Homo sapien
ccctgaggctgcttggaaattgaca

SEQ ID NO: 3632097 - DNA, 25 bp, Homo sapien
tattggctcatagacccagatggga

SEQ ID NO: 3632098 - DNA, 25 bp, Homo sapien
ctgctcttgtggtagcccagactag

SEQ ID NO: 3632099 - DNA, 25 bp, Homo sapien
aaaatgctgctcttgtggtagccca

SEQ ID NO: 3632100 - DNA, 25 bp, Homo sapien
gtcgcttaagaagggcggactctgc

SEQ ID NO: 3632101 - DNA, 25 bp, Homo sapien
cccccatacgctggtgccacaacat

SEQ ID NO: 3632102 - DNA, 25 bp, Homo sapien
ctctcggctccttggggggcctcct

SEQ ID NO: 3632103 - DNA, 25 bp, Homo sapien
cgggtccttctctcggctccttggg

SEQ ID NO: 3632104 - DNA, 25 bp, Homo sapien
tctctcggctccttggggggcctcc

SEQ ID NO: 3632105 - DNA, 25 bp, Homo sapien
ttctctcggctccttggggggcctc

SEQ ID NO: 3632106 - DNA, 25 bp, Homo sapien
tcccatactgcgcttgcagctggag

SEQ ID NO: 3632107 - DNA, 25 bp, Homo sapien
gatgaagacccaaatccttaacgtg

SEQ ID NO: 3632108 - DNA, 25 bp, Homo sapien
gtccctcttgtgtctaaactgctta

SEQ ID NO: 3632109 - DNA, 25 bp, Homo sapien
ttaacgtggcgatgaggccccacgc

SEQ ID NO: 3632110 - DNA, 25 bp, Homo sapien
cctgtttgacagaagctcagtggtc

SEQ ID NO: 3632111 - DNA, 25 bp, Homo sapien
tggatctgcctgtttgacagaagct

SEQ ID NO: 3632112 - DNA, 25 bp, Homo sapien
ttgttggtggatctgcctgtttgac

SEQ ID NO: 3632113 - DNA, 25 bp, Homo sapien
tttgacagaagctcagtggtctgag

SEQ ID NO: 3632114 - DNA, 25 bp, Homo sapien
agggcacctggcctgcggggctgca

SEQ ID NO: 3632115 - DNA, 25 bp, Homo sapien
ttcaccctggtttttctcctggtca

SEQ ID NO: 3632116 - DNA, 25 bp, Homo sapien
tggtcagacccagggcacctggcct

SEQ ID NO: 3632117 - DNA, 25 bp, Homo sapien
ttttctcctggtcagacccagggca

SEQ ID NO: 3632118 - DNA, 25 bp, Homo sapien
gccgaatatattcccgctagaagct

SEQ ID NO: 3632119 - DNA, 25 bp, Homo sapien
ggtgaataagactgtccactgccca

SEQ ID NO: 3632120 - DNA, 25 bp, Homo sapien
ggagtatttcaagggtccagcacag

SEQ ID NO: 3632121 - DNA, 25 bp, Homo sapien
ctagaagctgaaggcgaaaaggtga

SEQ ID NO: 3632122 - DNA, 25 bp, Homo sapien
accataggccataactcctaattga

SEQ ID NO: 3632123 - DNA, 25 bp, Homo sapien
caccataggccataactcctaattg

SEQ ID NO: 3632124 - DNA, 25 bp, Homo sapien
cacaccataggccataactcctaat

SEQ ID NO: 3632125 - DNA, 25 bp, Homo sapien
atacacaccataggccataactcct

SEQ ID NO: 3632126 - DNA, 25 bp, Homo sapien
gtgtttgctatcttgacccaaatct

SEQ ID NO: 3632127 - DNA, 25 bp, Homo sapien
tgatatatgaaggtgtttgctatct

SEQ ID NO: 3632128 - DNA, 25 bp, Homo sapien
ttgatatatgaaggtgtttgctatc

SEQ ID NO: 3632129 - DNA, 25 bp, Homo sapien
ggtgtttgctatcttgacccaaatc

SEQ ID NO: 3632130 - DNA, 25 bp, Homo sapien
ctcgtcatcactgtggcgttctcct

SEQ ID NO: 3632131 - DNA, 25 bp, Homo sapien
tgttcgagaggagtcctcgtcatca

SEQ ID NO: 3632132 - DNA, 25 bp, Homo sapien
ctatggagtgggagtgctctgtgtt

SEQ ID NO: 3632133 - DNA, 25 bp, Homo sapien
cgtcatcactgtggcgttctcctgg

SEQ ID NO: 3632134 - DNA, 25 bp, Homo sapien
taagcaggttcagcgtcatccagaa

SEQ ID NO: 3632135 - DNA, 25 bp, Homo sapien
tcaaagctctgaaactactcctggg

SEQ ID NO: 3632136 - DNA, 25 bp, Homo sapien
tctacttgagcaggtctaggaaagc

SEQ ID NO: 3632137 - DNA, 25 bp, Homo sapien
agtgtccttagatcacgtgcctgca

SEQ ID NO: 3632138 - DNA, 25 bp, Homo sapien
tgtctctgatgtcgctaagctgctg

SEQ ID NO: 3632139 - DNA, 25 bp, Homo sapien
gcgacacgcttgaaaacatcacagt

SEQ ID NO: 3632140 - DNA, 25 bp, Homo sapien
tgcagaaccggagacagatacaatg

SEQ ID NO: 3632141 - DNA, 25 bp, Homo sapien
tatttttagatccaggcaagccccg

SEQ ID NO: 3632142 - DNA, 25 bp, Homo sapien
ccttgaaagaatggagggaaaagct

SEQ ID NO: 3632143 - DNA, 25 bp, Homo sapien
gaatggagggaaaagcttctcctgc

SEQ ID NO: 3632144 - DNA, 25 bp, Homo sapien
gaaagaatggagggaaaagcttctc

SEQ ID NO: 3632145 - DNA, 25 bp, Homo sapien
aagaatggagggaaaagcttctcct

SEQ ID NO: 3632146 - DNA, 25 bp, Homo sapien
ggttgtggtaagccgagattgggcc

SEQ ID NO: 3632147 - DNA, 25 bp, Homo sapien
tggtaagccgagattgggccacttc

SEQ ID NO: 3632148 - DNA, 25 bp, Homo sapien
tgtggtaagccgagattgggccact

SEQ ID NO: 3632149 - DNA, 25 bp, Homo sapien
ggtaagccgagattgggccacttca

SEQ ID NO: 3632150 - DNA, 25 bp, Homo sapien
tcaaaggcctggcccaaaataggag

SEQ ID NO: 3632151 - DNA, 25 bp, Homo sapien
caaaggcctggcccaaaataggagc

SEQ ID NO: 3632152 - DNA, 25 bp, Homo sapien
ggctcaggacgctgcccctcaaagg

SEQ ID NO: 3632153 - DNA, 25 bp, Homo sapien
aaaataggagctgataatctggcat

SEQ ID NO: 3632154 - DNA, 25 bp, Homo sapien
tactcactcagcgtgcctgcttggc

SEQ ID NO: 3632155 - DNA, 25 bp, Homo sapien
cagcgtgcctgcttggcgaatctca

SEQ ID NO: 3632156 - DNA, 25 bp, Homo sapien
tgctaaccaggtatctgtactcact

SEQ ID NO: 3632157 - DNA, 25 bp, Homo sapien
atctcagctgagtcagttacaacag

SEQ ID NO: 3632158 - DNA, 25 bp, Homo sapien
gcctagcgcaattctcctttgccta

SEQ ID NO: 3632159 - DNA, 25 bp, Homo sapien
gaaggccctgagctgtagcctagcg

SEQ ID NO: 3632160 - DNA, 25 bp, Homo sapien
tgtagcctagcgcaattctcctttg

SEQ ID NO: 3632161 - DNA, 25 bp, Homo sapien
ccctgagctgtagcctagcgcaatt

SEQ ID NO: 3632162 - DNA, 25 bp, Homo sapien
cagcaaaactgaacagcaatgcagc

SEQ ID NO: 3632163 - DNA, 25 bp, Homo sapien
attaaaacagatagcttcaataaca

SEQ ID NO: 3632164 - DNA, 25 bp, Homo sapien
gagtacacataagaacaccattgat

SEQ ID NO: 3632165 - DNA, 25 bp, Homo sapien
gcagcagctgatttctcttttgcca

SEQ ID NO: 3632166 - DNA, 25 bp, Homo sapien
tgatagaaatgctgggattggggag

SEQ ID NO: 3632167 - DNA, 25 bp, Homo sapien
tttcctgatagaaatgctgggattg

SEQ ID NO: 3632168 - DNA, 25 bp, Homo sapien
cctgatagaaatgctgggattgggg

SEQ ID NO: 3632169 - DNA, 25 bp, Homo sapien
tcctgatagaaatgctgggattggg

SEQ ID NO: 3632170 - DNA, 25 bp, Homo sapien
ccatcaaggtccctgggcccatact

SEQ ID NO: 3632171 - DNA, 25 bp, Homo sapien
catcaaggtccctgggcccatactt

SEQ ID NO: 3632172 - DNA, 25 bp, Homo sapien
caagagaaggacttagcagaatgcg

SEQ ID NO: 3632173 - DNA, 25 bp, Homo sapien
gacttagcagaatgcgtggtccaag

SEQ ID NO: 3632174 - DNA, 25 bp, Homo sapien
aatgcgtggtccaagagaagctctc

SEQ ID NO: 3632175 - DNA, 25 bp, Homo sapien
ctcatacaagagaaggacttagcag

SEQ ID NO: 3632176 - DNA, 25 bp, Homo sapien
cctccttcttaagagatgggctgcg

SEQ ID NO: 3632177 - DNA, 25 bp, Homo sapien
cttcttaagagatgggctgcgtccc

SEQ ID NO: 3632178 - DNA, 25 bp, Homo sapien
agagcctccttcttaagagatgggc

SEQ ID NO: 3632179 - DNA, 25 bp, Homo sapien
taagagatgggctgcgtccctgagc

SEQ ID NO: 3632180 - DNA, 25 bp, Homo sapien
cagtgtctaatttgggagcgggacc

SEQ ID NO: 3632181 - DNA, 25 bp, Homo sapien
atgtgctgcatccatggtcttgtcc

SEQ ID NO: 3632182 - DNA, 25 bp, Homo sapien
agtgatccattatctccagtgtcta

SEQ ID NO: 3632183 - DNA, 25 bp, Homo sapien
tgttaggtgggttagagaccactga

SEQ ID NO: 3632184 - DNA, 25 bp, Homo sapien
ctttcaacagagtcaatgatgactt

SEQ ID NO: 3632185 - DNA, 25 bp, Homo sapien
gatgactttatcttggtgtactttt

SEQ ID NO: 3632186 - DNA, 25 bp, Homo sapien
catttctttcaacagagtcaatgat

SEQ ID NO: 3632187 - DNA, 25 bp, Homo sapien
tgatgactttatcttggtgtacttt

SEQ ID NO: 3632188 - DNA, 25 bp, Homo sapien
tttcctttcgcatttgcagaatgta

SEQ ID NO: 3632189 - DNA, 25 bp, Homo sapien
ggcactgagcagatacccatttctt

SEQ ID NO: 3632190 - DNA, 25 bp, Homo sapien
gatactctctgaaatcggcactgag

SEQ ID NO: 3632191 - DNA, 25 bp, Homo sapien
gaaaagctttgtagatactctctga

SEQ ID NO: 3632192 - DNA, 25 bp, Homo sapien
aacccctccgagtcttcagtgcagt

SEQ ID NO: 3632193 - DNA, 25 bp, Homo sapien
tcaacccctccgagtcttcagtgca

SEQ ID NO: 3632194 - DNA, 25 bp, Homo sapien
cccctccgagtcttcagtgcagtat

SEQ ID NO: 3632195 - DNA, 25 bp, Homo sapien
acccctccgagtcttcagtgcagta

SEQ ID NO: 3632196 - DNA, 25 bp, Homo sapien
gataagaatcgctgaagaaacgcgg

SEQ ID NO: 3632197 - DNA, 25 bp, Homo sapien
tcctgagcgtatgcacagaaaaccc

SEQ ID NO: 3632198 - DNA, 25 bp, Homo sapien
tgtcccgcacaaccggatgggtgtg

SEQ ID NO: 3632199 - DNA, 25 bp, Homo sapien
aggtgtctgaatttgcgtggctcca

SEQ ID NO: 3632200 - DNA, 25 bp, Homo sapien
gatgcctgaaagtatggaagcacca

SEQ ID NO: 3632201 - DNA, 25 bp, Homo sapien
ttatcccagggcgacacgtttcaag

SEQ ID NO: 3632202 - DNA, 25 bp, Homo sapien
gagtgtccggtatgacctccctgaa

SEQ ID NO: 3632203 - DNA, 25 bp, Homo sapien
taccatagaatactcagggtagagc

SEQ ID NO: 3632204 - DNA, 25 bp, Homo sapien
atggtcagcgtgcccattccacgtc

SEQ ID NO: 3632205 - DNA, 25 bp, Homo sapien
tgatggtcagcgtgcccattccacg

SEQ ID NO: 3632206 - DNA, 25 bp, Homo sapien
ttgcagtcgtgaccatgatggtcag

SEQ ID NO: 3632207 - DNA, 25 bp, Homo sapien
gcagtcgtgaccatgatggtcagcg

SEQ ID NO: 3632208 - DNA, 25 bp, Homo sapien
agacacagccaattaacccacgcag

SEQ ID NO: 3632209 - DNA, 25 bp, Homo sapien
ggttgcacagggcagtcgtcatcat

SEQ ID NO: 3632210 - DNA, 25 bp, Homo sapien
ccttgtgcaggggtgaccctcagac

SEQ ID NO: 3632211 - DNA, 25 bp, Homo sapien
cccatctgagtaaaagagtgcttgc

SEQ ID NO: 3632212 - DNA, 25 bp, Homo sapien
tgttaagatgtgtgcccagactagg

SEQ ID NO: 3632213 - DNA, 25 bp, Homo sapien
tttgctttactgtgtggaccaggac

SEQ ID NO: 3632214 - DNA, 25 bp, Homo sapien
gaaccagcttcttagtgtgacaaca

SEQ ID NO: 3632215 - DNA, 25 bp, Homo sapien
tctacttgaggtggcttaagcgctc

SEQ ID NO: 3632216 - DNA, 25 bp, Homo sapien
tccagttccgcagctagagctgggc

SEQ ID NO: 3632217 - DNA, 25 bp, Homo sapien
ctgcacaacgacaaacttgagtgtt

SEQ ID NO: 3632218 - DNA, 25 bp, Homo sapien
gcagctagagctgggcctaccttcc

SEQ ID NO: 3632219 - DNA, 25 bp, Homo sapien
agcctgctccagttccgcagctaga

SEQ ID NO: 3632220 - DNA, 25 bp, Homo sapien
tctccaaggactgacaaaaacaacc

SEQ ID NO: 3632221 - DNA, 25 bp, Homo sapien
tgcatcaaatactcttctccaagga

SEQ ID NO: 3632222 - DNA, 25 bp, Homo sapien
tccctgaatgcatcaaatactcttc

SEQ ID NO: 3632223 - DNA, 25 bp, Homo sapien
caaccccccggctgtgggcacagta

SEQ ID NO: 3632224 - DNA, 25 bp, Homo sapien
ccgaattggcataccacggcgtgga

SEQ ID NO: 3632225 - DNA, 25 bp, Homo sapien
ggctggactcggacacactaaggtt

SEQ ID NO: 3632226 - DNA, 25 bp, Homo sapien
ggtaccgtacctgtcaatgcctgtg

SEQ ID NO: 3632227 - DNA, 25 bp, Homo sapien
taagagtaagctaaccacagggatt

SEQ ID NO: 3632228 - DNA, 25 bp, Homo sapien
tacaaaaagtcatgcatggtctggg

SEQ ID NO: 3632229 - DNA, 25 bp, Homo sapien
ccatccgggcctggcaatatacaat

SEQ ID NO: 3632230 - DNA, 25 bp, Homo sapien
cagaaaggcattgtgcaacacagga

SEQ ID NO: 3632231 - DNA, 25 bp, Homo sapien
taatggtgccttacgcaagcgatcc

SEQ ID NO: 3632232 - DNA, 25 bp, Homo sapien
ttgtggttagcaagactgcaagaga

SEQ ID NO: 3632233 - DNA, 25 bp, Homo sapien
cttgtggttagcaagactgcaagag

SEQ ID NO: 3632234 - DNA, 25 bp, Homo sapien
gagcggcgcctaagcctttgccgtg

SEQ ID NO: 3632235 - DNA, 25 bp, Homo sapien
tactgaccgtatgatgaggccaact

SEQ ID NO: 3632236 - DNA, 25 bp, Homo sapien
gccgtgagcatgcacactgagaatg

SEQ ID NO: 3632237 - DNA, 25 bp, Homo sapien
tatgttgaggatctattactgaccg

SEQ ID NO: 3632238 - DNA, 25 bp, Homo sapien
gatcctgtaggctaaaaggcttcca

SEQ ID NO: 3632239 - DNA, 25 bp, Homo sapien
tagcacccgtggtgcatggtatgtg

SEQ ID NO: 3632240 - DNA, 25 bp, Homo sapien
taaaaaggtcctgtaagaagcggca

SEQ ID NO: 3632241 - DNA, 25 bp, Homo sapien
gcgtgttccagccaaagcatgccgt

SEQ ID NO: 3632242 - DNA, 25 bp, Homo sapien
gatgggaacctaacttcttctgtgc

SEQ ID NO: 3632243 - DNA, 25 bp, Homo sapien
ctggcaagggatgggaacctaactt

SEQ ID NO: 3632244 - DNA, 25 bp, Homo sapien
aggtgagggcgctggtccagaacac

SEQ ID NO: 3632245 - DNA, 25 bp, Homo sapien
agaacactggcaagggatgggaacc

SEQ ID NO: 3632246 - DNA, 25 bp, Homo sapien
ccagggttgagtaggtgtgcagggc

SEQ ID NO: 3632247 - DNA, 25 bp, Homo sapien
gaaggaaggcatgcagtttcctatg

SEQ ID NO: 3632248 - DNA, 25 bp, Homo sapien
tgcagggcacattcgaaggaaggca

SEQ ID NO: 3632249 - DNA, 25 bp, Homo sapien
ggccttgggaatgtgatgaccaggg

SEQ ID NO: 3632250 - DNA, 25 bp, Homo sapien
gatgagttaaccaggcacttccgaa

SEQ ID NO: 3632251 - DNA, 25 bp, Homo sapien
catgggaagggtgtgagtggcgttt

SEQ ID NO: 3632252 - DNA, 25 bp, Homo sapien
ttccgaaagcacaccggggccaagc

SEQ ID NO: 3632253 - DNA, 25 bp, Homo sapien
agtggcgttttgcaagaagtgatga

SEQ ID NO: 3632254 - DNA, 25 bp, Homo sapien
taactttgatgacagcaccatgggc

SEQ ID NO: 3632255 - DNA, 25 bp, Homo sapien
tagaacgtccctgaggaaactgcag

SEQ ID NO: 3632256 - DNA, 25 bp, Homo sapien
tgtgtgttaccgatgccagaagcca

SEQ ID NO: 3632257 - DNA, 25 bp, Homo sapien
ttccgtctgcgggtcagtgaagtca

SEQ ID NO: 3632258 - DNA, 25 bp, Homo sapien
gtgggaccggcctgctctgtaagca

SEQ ID NO: 3632259 - DNA, 25 bp, Homo sapien
tggtcagggcagacaaatcctcact

SEQ ID NO: 3632260 - DNA, 25 bp, Homo sapien
taaatgaaactcaagggtcaggaca

SEQ ID NO: 3632261 - DNA, 25 bp, Homo sapien
taagcagcagcattgatcagcgagt

SEQ ID NO: 3632262 - DNA, 25 bp, Homo sapien
ccccattggcgaagttttggtcagc

SEQ ID NO: 3632263 - DNA, 25 bp, Homo sapien
catcagcccgagcttttgttacaac

SEQ ID NO: 3632264 - DNA, 25 bp, Homo sapien
tcgggaaaattgagctcctctgtca

SEQ ID NO: 3632265 - DNA, 25 bp, Homo sapien
agcgaatcctctgacagctccgagg

SEQ ID NO: 3632266 - DNA, 25 bp, Homo sapien
aaacataggcggtctgggctacaca

SEQ ID NO: 3632267 - DNA, 25 bp, Homo sapien
aagggcctgcacttgggaacggcat

SEQ ID NO: 3632268 - DNA, 25 bp, Homo sapien
tgcccctgaatacagacagctgctg

SEQ ID NO: 3632269 - DNA, 25 bp, Homo sapien
cagaacacgctgtgtgccgtgcagt

SEQ ID NO: 3632270 - DNA, 25 bp, Homo sapien
ccgcctgcgattggccggagctgac

SEQ ID NO: 3632271 - DNA, 25 bp, Homo sapien
tcgccgcctgcgattggccggagct

SEQ ID NO: 3632272 - DNA, 25 bp, Homo sapien
gtgtcgccgcctgcgattggccgga

SEQ ID NO: 3632273 - DNA, 25 bp, Homo sapien
tgcgattggccggagctgacatcat

SEQ ID NO: 3632274 - DNA, 25 bp, Homo sapien
aaaatgctctggttcgagtctcgac

SEQ ID NO: 3632275 - DNA, 25 bp, Homo sapien
gcgctaattactgagagaaccctgc

SEQ ID NO: 3632276 - DNA, 25 bp, Homo sapien
gggccaaggtcacaagcgctaatta

SEQ ID NO: 3632277 - DNA, 25 bp, Homo sapien
caatgggcgcttgggcaaatctgtg

SEQ ID NO: 3632278 - DNA, 25 bp, Homo sapien
ctataggaatgtggatttattaaaa

SEQ ID NO: 3632279 - DNA, 25 bp, Homo sapien
taattgtcccaaagataaaatggga

SEQ ID NO: 3632280 - DNA, 25 bp, Homo sapien
tataggaatgtggatttattaaaaa

SEQ ID NO: 3632281 - DNA, 25 bp, Homo sapien
tctataggaatgtggatttattaaa

SEQ ID NO: 3632282 - DNA, 25 bp, Homo sapien
caggcgcccgaaacacctgaaggga

SEQ ID NO: 3632283 - DNA, 25 bp, Homo sapien
tccacctcactgacaagaaaaactc

SEQ ID NO: 3632284 - DNA, 25 bp, Homo sapien
ctattaaagagcaagggccacaggc

SEQ ID NO: 3632285 - DNA, 25 bp, Homo sapien
gccataagagaacattgcttccacc

SEQ ID NO: 3632286 - DNA, 25 bp, Homo sapien
atcctcaggatccacagtgagagca

SEQ ID NO: 3632287 - DNA, 25 bp, Homo sapien
ggagaccagtgtggaatcctcagga

SEQ ID NO: 3632288 - DNA, 25 bp, Homo sapien
tccacagtgagagcaccggatggtt

SEQ ID NO: 3632289 - DNA, 25 bp, Homo sapien
gcaggatccatagcgcccagggaga

SEQ ID NO: 3632290 - DNA, 25 bp, Homo sapien
ccaagaagttctacgtaggtcctca

SEQ ID NO: 3632291 - DNA, 25 bp, Homo sapien
tccaaggcactggaatagaaggccc

SEQ ID NO: 3632292 - DNA, 25 bp, Homo sapien
tgtaaaatatacgagagctgaaggg

SEQ ID NO: 3632293 - DNA, 25 bp, Homo sapien
gaccagctgtcctcgtcagagtcaa

SEQ ID NO: 3632294 - DNA, 25 bp, Homo sapien
tccagcaggatttggggtgttccag

SEQ ID NO: 3632295 - DNA, 25 bp, Homo sapien
gatttggggtgttccaggctcttta

SEQ ID NO: 3632296 - DNA, 25 bp, Homo sapien
agcttccagcaggatttggggtgtt

SEQ ID NO: 3632297 - DNA, 25 bp, Homo sapien
cttccagcaggatttggggtgttcc

SEQ ID NO: 3632298 - DNA, 25 bp, Homo sapien
tgagcatacacttccacaaaacctg

SEQ ID NO: 3632299 - DNA, 25 bp, Homo sapien
gtttggtccacacaccagagctttg

SEQ ID NO: 3632300 - DNA, 25 bp, Homo sapien
actaggctagcttgtgtttggtcca

SEQ ID NO: 3632301 - DNA, 25 bp, Homo sapien
cagagctttggcaccacagagacaa

SEQ ID NO: 3632302 - DNA, 25 bp, Homo sapien
tcttgggtatgaacgagtgtgcttg

SEQ ID NO: 3632303 - DNA, 25 bp, Homo sapien
aactccagcatctcatgaactagtg

SEQ ID NO: 3632304 - DNA, 25 bp, Homo sapien
cagcatctcatgaactagtggccac

SEQ ID NO: 3632305 - DNA, 25 bp, Homo sapien
tagtggccacagtagccacgagacc

SEQ ID NO: 3632306 - DNA, 25 bp, Homo sapien
caacagcgtttatgagcacagcagc

SEQ ID NO: 3632307 - DNA, 25 bp, Homo sapien
cggatctcgagtgttctgtgcagta

SEQ ID NO: 3632308 - DNA, 25 bp, Homo sapien
tttggacaaagaccgtggagaagcc

SEQ ID NO: 3632309 - DNA, 25 bp, Homo sapien
gaaaggctgctaatcatttgccagg

SEQ ID NO: 3632310 - DNA, 25 bp, Homo sapien
gaaattattcactcttggcctagag

SEQ ID NO: 3632311 - DNA, 25 bp, Homo sapien
gaaagccgtgtagcattctcagaaa

SEQ ID NO: 3632312 - DNA, 25 bp, Homo sapien
tcgttactttcacccatatatggct

SEQ ID NO: 3632313 - DNA, 25 bp, Homo sapien
tccctgttgtgtgcaaaaatctcct

SEQ ID NO: 3632314 - DNA, 25 bp, Homo sapien
tcctgtcacctctgaaagctcaaaa

SEQ ID NO: 3632315 - DNA, 25 bp, Homo sapien
tagtgggttggaccactggtcacca

SEQ ID NO: 3632316 - DNA, 25 bp, Homo sapien
tctacttcccccatagtgggttgga

SEQ ID NO: 3632317 - DNA, 25 bp, Homo sapien
tgtcacctctgaaagctcaaaacca

SEQ ID NO: 3632318 - DNA, 25 bp, Homo sapien
ctgtctgacgttctccttctgcaag

SEQ ID NO: 3632319 - DNA, 25 bp, Homo sapien
tccccgacagaaaggtgctgacgct

SEQ ID NO: 3632320 - DNA, 25 bp, Homo sapien
tgttgttctcatcacggtcacactc

SEQ ID NO: 3632321 - DNA, 25 bp, Homo sapien
gaagaccgtgtggaagcactgttgt

SEQ ID NO: 3632322 - DNA, 25 bp, Homo sapien
agcaaaaggctccatatcgtcccca

SEQ ID NO: 3632323 - DNA, 25 bp, Homo sapien
cgcgtcagccgtgagattggaagaa

SEQ ID NO: 3632324 - DNA, 25 bp, Homo sapien
gcctgcgcgtcagccgtgagattgg

SEQ ID NO: 3632325 - DNA, 25 bp, Homo sapien
aaggctccatatcgtccccatcggg

SEQ ID NO: 3632326 - DNA, 25 bp, Homo sapien
ttggcagctggagttcacatggctt

SEQ ID NO: 3632327 - DNA, 25 bp, Homo sapien
tgcattgtacgtgggttagctcctt

SEQ ID NO: 3632328 - DNA, 25 bp, Homo sapien
aaataaataatgtgccccagactgc

SEQ ID NO: 3632329 - DNA, 25 bp, Homo sapien
agtgaacctttcttagtcctgggtg

SEQ ID NO: 3632330 - DNA, 25 bp, Homo sapien
gtctcagacagagggatcaggtgtt

SEQ ID NO: 3632331 - DNA, 25 bp, Homo sapien
aaccgcccagcttccttctcaggaa

SEQ ID NO: 3632332 - DNA, 25 bp, Homo sapien
tgtgtctcagacagagggatcaggt

SEQ ID NO: 3632333 - DNA, 25 bp, Homo sapien
atccatgtgtctcagacagagggat

SEQ ID NO: 3632334 - DNA, 25 bp, Homo sapien
gacggtgacaagtgtggtcctatca

SEQ ID NO: 3632335 - DNA, 25 bp, Homo sapien
aaccgcctctggatgaggtggagac

SEQ ID NO: 3632336 - DNA, 25 bp, Homo sapien
ctatcacatgaaggacagtcataca

SEQ ID NO: 3632337 - DNA, 25 bp, Homo sapien
tccattgagggagcatttattaacc

SEQ ID NO: 3632338 - DNA, 25 bp, Homo sapien
ttacacataatgaaaacttgtttga

SEQ ID NO: 3632339 - DNA, 25 bp, Homo sapien
tacacataatgaaaacttgtttgac

SEQ ID NO: 3632340 - DNA, 25 bp, Homo sapien
acacataatgaaaacttgtttgaca

SEQ ID NO: 3632341 - DNA, 25 bp, Homo sapien
tgggaagactttcgctaagtgacat

SEQ ID NO: 3632342 - DNA, 25 bp, Homo sapien
gacacacgctcatgttgcttggcaa

SEQ ID NO: 3632343 - DNA, 25 bp, Homo sapien
cagcattttaagactgaccgggtca

SEQ ID NO: 3632344 - DNA, 25 bp, Homo sapien
ggcaatgaaacaccggcgcctaaat

SEQ ID NO: 3632345 - DNA, 25 bp, Homo sapien
tgctccctcccttgaacaatgcttg

SEQ ID NO: 3632346 - DNA, 25 bp, Homo sapien
agctgtgtcccaagcggccaagctc

SEQ ID NO: 3632347 - DNA, 25 bp, Homo sapien
cacactgagtgcatcgggcatagcg

SEQ ID NO: 3632348 - DNA, 25 bp, Homo sapien
tctttgcagaatggaggctcacagc

SEQ ID NO: 3632349 - DNA, 25 bp, Homo sapien
gctggctggcaggacgaagggctca

SEQ ID NO: 3632350 - DNA, 25 bp, Homo sapien
gctgcagtcagtgtgctggctggca

SEQ ID NO: 3632351 - DNA, 25 bp, Homo sapien
ctggctggcaggacgaagggctcac

SEQ ID NO: 3632352 - DNA, 25 bp, Homo sapien
tgcagctgcagtcagtgtgctggct

SEQ ID NO: 3632353 - DNA, 25 bp, Homo sapien
tgatcgctgactcgcactgtggtgc

SEQ ID NO: 3632354 - DNA, 25 bp, Homo sapien
ccagtttccatgcagtgagagttca

SEQ ID NO: 3632355 - DNA, 25 bp, Homo sapien
tgagagttcatgttcaccagcagag

SEQ ID NO: 3632356 - DNA, 25 bp, Homo sapien
catatcctgaatgggttgccaggcc

SEQ ID NO: 3632357 - DNA, 25 bp, Homo sapien
gccccaggggacatgctgtcaccat

SEQ ID NO: 3632358 - DNA, 25 bp, Homo sapien
ccgctggactcgttgtaagggcccg

SEQ ID NO: 3632359 - DNA, 25 bp, Homo sapien
aggaagaaaccgctggactcgttgt

SEQ ID NO: 3632360 - DNA, 25 bp, Homo sapien
tcatgaggctgtggtcgcattggcc

SEQ ID NO: 3632361 - DNA, 25 bp, Homo sapien
gatgcccctcagaagtgacaaaagg

SEQ ID NO: 3632362 - DNA, 25 bp, Homo sapien
tgacaaaagggtgcagaattactcc

SEQ ID NO: 3632363 - DNA, 25 bp, Homo sapien
tatccagggatgctagcaccagagc

SEQ ID NO: 3632364 - DNA, 25 bp, Homo sapien
gaagttagggtcacctgatggccat

SEQ ID NO: 3632365 - DNA, 25 bp, Homo sapien
ttgcatggtggtctggaatacttgc

SEQ ID NO: 3632366 - DNA, 25 bp, Homo sapien
tctttgctgctggtcgagttctctg

SEQ ID NO: 3632367 - DNA, 25 bp, Homo sapien
tcttgaaccagactaatacgacttc

SEQ ID NO: 3632368 - DNA, 25 bp, Homo sapien
gttctctgacaacctgaaacaagtg

SEQ ID NO: 3632369 - DNA, 25 bp, Homo sapien
gcgctctccagagccaccccctcct

SEQ ID NO: 3632370 - DNA, 25 bp, Homo sapien
gagccaccccctcctcctcctctct

SEQ ID NO: 3632371 - DNA, 25 bp, Homo sapien
tgcgctctccagagccaccccctcc

SEQ ID NO: 3632372 - DNA, 25 bp, Homo sapien
ctgcgctctccagagccaccccctc

SEQ ID NO: 3632373 - DNA, 25 bp, Homo sapien
ggagagagccatgtgtgggatgaag

SEQ ID NO: 3632374 - DNA, 25 bp, Homo sapien
gagagagccatgtgtgggatgaagg

SEQ ID NO: 3632375 - DNA, 25 bp, Homo sapien
aacaactatgtcttccctttgcatc

SEQ ID NO: 3632376 - DNA, 25 bp, Homo sapien
aaacaactatgtcttccctttgcat

SEQ ID NO: 3632377 - DNA, 25 bp, Homo sapien
gaaacaactatgtcttccctttgca

SEQ ID NO: 3632378 - DNA, 25 bp, Homo sapien
cagttttaacaaggtcaagtagact

SEQ ID NO: 3632379 - DNA, 25 bp, Homo sapien
tcagttttaacaaggtcaagtagac

SEQ ID NO: 3632380 - DNA, 25 bp, Homo sapien
gtcagttttaacaaggtcaagtaga

SEQ ID NO: 3632381 - DNA, 25 bp, Homo sapien
agctggccgcttcctttttcaaagg

SEQ ID NO: 3632382 - DNA, 25 bp, Homo sapien
gcattagaaagctggccgcttcctt

SEQ ID NO: 3632383 - DNA, 25 bp, Homo sapien
atcttccatggccaccaagccagca

SEQ ID NO: 3632384 - DNA, 25 bp, Homo sapien
ccatggccaccaagccagcattaga

SEQ ID NO: 3632385 - DNA, 25 bp, Homo sapien
ggaacaagggcggttggaggatgag

SEQ ID NO: 3632386 - DNA, 25 bp, Homo sapien
agctctccacaggaacaagggcggt

SEQ ID NO: 3632387 - DNA, 25 bp, Homo sapien
tctccacaggaacaagggcggttgg

SEQ ID NO: 3632388 - DNA, 25 bp, Homo sapien
ctccacaggaacaagggcggttgga

SEQ ID NO: 3632389 - DNA, 25 bp, Homo sapien
tccagttaccaccttgaactctctt

SEQ ID NO: 3632390 - DNA, 25 bp, Homo sapien
ccagttaccaccttgaactctcttt

SEQ ID NO: 3632391 - DNA, 25 bp, Homo sapien
ctctgctgtatcctccagttaccac

SEQ ID NO: 3632392 - DNA, 25 bp, Homo sapien
ctgctgtatcctccagttaccacct

SEQ ID NO: 3632393 - DNA, 25 bp, Homo sapien
ctgttccctacacatcactccctgc

SEQ ID NO: 3632394 - DNA, 25 bp, Homo sapien
tcctgtagtctggatcctgttttat

SEQ ID NO: 3632395 - DNA, 25 bp, Homo sapien
tttcccacgacttcaacctcttctg

SEQ ID NO: 3632396 - DNA, 25 bp, Homo sapien
tctgtttcacttcgtcttcctcctt

SEQ ID NO: 3632397 - DNA, 25 bp, Homo sapien
tttggttaggaggttagcactgatg

SEQ ID NO: 3632398 - DNA, 25 bp, Homo sapien
aagtttggttaggaggttagcactg

SEQ ID NO: 3632399 - DNA, 25 bp, Homo sapien
ttagcactgatgatgcgaaaaatgg

SEQ ID NO: 3632400 - DNA, 25 bp, Homo sapien
tgatgatgcgaaaaatggtcaagat

SEQ ID NO: 3632401 - DNA, 25 bp, Homo sapien
agcattgcttccttcttcccgcgca

SEQ ID NO: 3632402 - DNA, 25 bp, Homo sapien
tctacccgaagctgcctaaacagct

SEQ ID NO: 3632403 - DNA, 25 bp, Homo sapien
gctgcctaaacagctcccgagggga

SEQ ID NO: 3632404 - DNA, 25 bp, Homo sapien
ccatctctacccgaagctgcctaaa

SEQ ID NO: 3632405 - DNA, 25 bp, Homo sapien
tgataactcagtcagaaactcctct

SEQ ID NO: 3632406 - DNA, 25 bp, Homo sapien
tggtatgaacccaacataggagaga

SEQ ID NO: 3632407 - DNA, 25 bp, Homo sapien
tgggccttcaagaaccacatacgaa

SEQ ID NO: 3632408 - DNA, 25 bp, Homo sapien
gacttgtgttctcctggactctgga

SEQ ID NO: 3632409 - DNA, 25 bp, Homo sapien
gctcttccctgatgtgggtcatcca

SEQ ID NO: 3632410 - DNA, 25 bp, Homo sapien
tctatccttatttggtccattacat

SEQ ID NO: 3632411 - DNA, 25 bp, Homo sapien
tgtctcaacttctatccttatttgg

SEQ ID NO: 3632412 - DNA, 25 bp, Homo sapien
cttcacaggcagcaaaatgtgctaa

SEQ ID NO: 3632413 - DNA, 25 bp, Homo sapien
ctgctgccgctgatgtgaaaggcgg

SEQ ID NO: 3632414 - DNA, 25 bp, Homo sapien
aaggcggtccgtgatgttggtgctc

SEQ ID NO: 3632415 - DNA, 25 bp, Homo sapien
ctgccgctgatgtgaaaggcggtcc

SEQ ID NO: 3632416 - DNA, 25 bp, Homo sapien
ggtccgtgatgttggtgctctccct

SEQ ID NO: 3632417 - DNA, 25 bp, Homo sapien
ttcctgtttagaacgatgcagaggg

SEQ ID NO: 3632418 - DNA, 25 bp, Homo sapien
gaagccaaatgtgcagaggtcagga

SEQ ID NO: 3632419 - DNA, 25 bp, Homo sapien
ggagaaatggtgctatttcaaaggg

SEQ ID NO: 3632420 - DNA, 25 bp, Homo sapien
gaagccagacaacgctgggatttcc

SEQ ID NO: 3632421 - DNA, 25 bp, Homo sapien
caccccgtccctgtgccccgcctgg

SEQ ID NO: 3632422 - DNA, 25 bp, Homo sapien
gcccctcctgcaccccgtccctgtg

SEQ ID NO: 3632423 - DNA, 25 bp, Homo sapien
gcatggcaggtgtgacagccggcag

SEQ ID NO: 3632424 - DNA, 25 bp, Homo sapien
gcaggtgtgacagccggcagggccc

SEQ ID NO: 3632425 - DNA, 25 bp, Homo sapien
gaggctcctggaggtttgtgaagcc

SEQ ID NO: 3632426 - DNA, 25 bp, Homo sapien
gaagaggctcctggaggtttgtgaa

SEQ ID NO: 3632427 - DNA, 25 bp, Homo sapien
gctcctggaggtttgtgaagcccac

SEQ ID NO: 3632428 - DNA, 25 bp, Homo sapien
agaagaggctcctggaggtttgtga

SEQ ID NO: 3632429 - DNA, 25 bp, Homo sapien
gtttgtatttgtcagtgcccccaga

SEQ ID NO: 3632430 - DNA, 25 bp, Homo sapien
tctggacaatgtacggattggctgg

SEQ ID NO: 3632431 - DNA, 25 bp, Homo sapien
aaatgtatcctgactccgagctggg

SEQ ID NO: 3632432 - DNA, 25 bp, Homo sapien
gaaattgccctggatgtcctctttc

SEQ ID NO: 3632433 - DNA, 25 bp, Homo sapien
catctccattctggacggcatccat

SEQ ID NO: 3632434 - DNA, 25 bp, Homo sapien
ttgattctcgggtggatgctcccag

SEQ ID NO: 3632435 - DNA, 25 bp, Homo sapien
catggttccatccacgtggtaattc

SEQ ID NO: 3632436 - DNA, 25 bp, Homo sapien
tccccagaatgatccacagtgttga

SEQ ID NO: 3632437 - DNA, 25 bp, Homo sapien
ggctcttaggatcagcatggttcca

SEQ ID NO: 3632438 - DNA, 25 bp, Homo sapien
cgctctgtaacaagcgccccttggg

SEQ ID NO: 3632439 - DNA, 25 bp, Homo sapien
tattgatgttccttcctaacggttg

SEQ ID NO: 3632440 - DNA, 25 bp, Homo sapien
cggttgttagcagcagttaaatcca

SEQ ID NO: 3632441 - DNA, 25 bp, Homo sapien
ggaaggagttgtctcacaggcttgc

SEQ ID NO: 3632442 - DNA, 25 bp, Homo sapien
gctccgcattgagttctgtgaagcg

SEQ ID NO: 3632443 - DNA, 25 bp, Homo sapien
cactctcaaaactctgtcgggggat

SEQ ID NO: 3632444 - DNA, 25 bp, Homo sapien
tgaagcgtgggcagatcggactttc

SEQ ID NO: 3632445 - DNA, 25 bp, Homo sapien
ggcagatcggactttcactctcaaa

SEQ ID NO: 3632446 - DNA, 25 bp, Homo sapien
catcttggttgaaaacaatagcatc

SEQ ID NO: 3632447 - DNA, 25 bp, Homo sapien
ccagtagcagctctctaaagaggga

SEQ ID NO: 3632448 - DNA, 25 bp, Homo sapien
tcaatgtctgatctttccgctcatc

SEQ ID NO: 3632449 - DNA, 25 bp, Homo sapien
ggaaagtgatggtgccgaccgctcc

SEQ ID NO: 3632450 - DNA, 25 bp, Homo sapien
tgaagcacatctaaacaacacaagc

SEQ ID NO: 3632451 - DNA, 25 bp, Homo sapien
taactaaatagatgatgttcaggca

SEQ ID NO: 3632452 - DNA, 25 bp, Homo sapien
ctaactaaatagatgatgttcaggc

SEQ ID NO: 3632453 - DNA, 25 bp, Homo sapien
gagatctgaagcacatctaaacaac

SEQ ID NO: 3632454 - DNA, 25 bp, Homo sapien
ttcaaaaatagattggatccaagaa

SEQ ID NO: 3632455 - DNA, 25 bp, Homo sapien
caaaaatagattggatccaagaaaa

SEQ ID NO: 3632456 - DNA, 25 bp, Homo sapien
caaacagttgtttgcttttgcgctc

SEQ ID NO: 3632457 - DNA, 25 bp, Homo sapien
acagttgtttgcttttgcgctcttc

SEQ ID NO: 3632458 - DNA, 25 bp, Homo sapien
accccttagcgcctgcagagaagtc

SEQ ID NO: 3632459 - DNA, 25 bp, Homo sapien
cgcaggtcccgtgggtacataacca

SEQ ID NO: 3632460 - DNA, 25 bp, Homo sapien
tctgcgactgcacgcacaggtatgc

SEQ ID NO: 3632461 - DNA, 25 bp, Homo sapien
caagttggccacaagcaccgtgagt

SEQ ID NO: 3632462 - DNA, 25 bp, Homo sapien
tcataacttcatcgcctccagaggc

SEQ ID NO: 3632463 - DNA, 25 bp, Homo sapien
cagcaaggcctgaagtgaaattggc

SEQ ID NO: 3632464 - DNA, 25 bp, Homo sapien
tttctgcatcatagacagccctgcc

SEQ ID NO: 3632465 - DNA, 25 bp, Homo sapien
tcaggacagtaaggaggctcagcaa

SEQ ID NO: 3632466 - DNA, 25 bp, Homo sapien
gatttttctcgcatgtggctggcta

SEQ ID NO: 3632467 - DNA, 25 bp, Homo sapien
cttcagatttttctcgcatgtggct

SEQ ID NO: 3632468 - DNA, 25 bp, Homo sapien
ttttctcgcatgtggctggctactc

SEQ ID NO: 3632469 - DNA, 25 bp, Homo sapien
tcagatttttctcgcatgtggctgg

SEQ ID NO: 3632470 - DNA, 25 bp, Homo sapien
aggctctccatgagtcccgccaggg

SEQ ID NO: 3632471 - DNA, 25 bp, Homo sapien
catgggcctctttacctccaataac

SEQ ID NO: 3632472 - DNA, 25 bp, Homo sapien
ccaaacgctgctaccagaatgtcag

SEQ ID NO: 3632473 - DNA, 25 bp, Homo sapien
ttctgtgactccaaacgctgctacc

SEQ ID NO: 3632474 - DNA, 25 bp, Homo sapien
tagagcctaccgagaaagggccaaa

SEQ ID NO: 3632475 - DNA, 25 bp, Homo sapien
tgaaaagccctgtagtgagtgaacc

SEQ ID NO: 3632476 - DNA, 25 bp, Homo sapien
tgtgacagtagcacacaagggcttc

SEQ ID NO: 3632477 - DNA, 25 bp, Homo sapien
cagttagcaaaagtgaccgtccata

SEQ ID NO: 3632478 - DNA, 25 bp, Homo sapien
tgttagccccaatttagtgccacct

SEQ ID NO: 3632479 - DNA, 25 bp, Homo sapien
ctggtcatcctccaacgtgccaagc

SEQ ID NO: 3632480 - DNA, 25 bp, Homo sapien
gcccatcgctgttagccccaattta

SEQ ID NO: 3632481 - DNA, 25 bp, Homo sapien
aaaatctctgataatcgcccatcgc

SEQ ID NO: 3632482 - DNA, 25 bp, Homo sapien
caaaccaaccagaggaggtagcact

SEQ ID NO: 3632483 - DNA, 25 bp, Homo sapien
tcctccagggtaaggaagatcttcc

SEQ ID NO: 3632484 - DNA, 25 bp, Homo sapien
tgcgcgcttagtcaacacaggatgt

SEQ ID NO: 3632485 - DNA, 25 bp, Homo sapien
cacaggatgtggaagacggtaccag

SEQ ID NO: 3632486 - DNA, 25 bp, Homo sapien
gaacacagttggcagcaagggcctg

SEQ ID NO: 3632487 - DNA, 25 bp, Homo sapien
gcaaactggaacacagttggcagca

SEQ ID NO: 3632488 - DNA, 25 bp, Homo sapien
actggaacacagttggcagcaaggg

SEQ ID NO: 3632489 - DNA, 25 bp, Homo sapien
acacagttggcagcaagggcctggt

SEQ ID NO: 3632490 - DNA, 25 bp, Homo sapien
tgtttttctatagaggacccctgtc

SEQ ID NO: 3632491 - DNA, 25 bp, Homo sapien
taaaggaacccagtagtgtactcgc

SEQ ID NO: 3632492 - DNA, 25 bp, Homo sapien
catttcctaaaaagcgacttgcggc

SEQ ID NO: 3632493 - DNA, 25 bp, Homo sapien
gacaaagcctggaacgctggagatt

SEQ ID NO: 3632494 - DNA, 25 bp, Homo sapien
ggcgctgggactttggctgtttcta

SEQ ID NO: 3632495 - DNA, 25 bp, Homo sapien
tgtttctatttgcatcctgaatagc

SEQ ID NO: 3632496 - DNA, 25 bp, Homo sapien
agccacagcgcacgcctggttcagc

SEQ ID NO: 3632497 - DNA, 25 bp, Homo sapien
tagcatcaacacagtaaaatgcacg

SEQ ID NO: 3632498 - DNA, 25 bp, Homo sapien
ctttttgtgaggtagaaggagagaa

SEQ ID NO: 3632499 - DNA, 25 bp, Homo sapien
aggaagaagacaggctgtttgtctc

SEQ ID NO: 3632500 - DNA, 25 bp, Homo sapien
aagaagacaggctgtttgtctcttc

SEQ ID NO: 3632501 - DNA, 25 bp, Homo sapien
cttggttcctggttcgtgatccttg

SEQ ID NO: 3632502 - DNA, 25 bp, Homo sapien
acggcatcaggggtgttcgcagatc

SEQ ID NO: 3632503 - DNA, 25 bp, Homo sapien
gacatctcctgtagagtgactaggc

SEQ ID NO: 3632504 - DNA, 25 bp, Homo sapien
gcttctctgcaggatgtgacaccca

SEQ ID NO: 3632505 - DNA, 25 bp, Homo sapien
ttatctgatcccctgtgacatctcc

SEQ ID NO: 3632506 - DNA, 25 bp, Homo sapien
caaagtgagggttttaaagctctgt

SEQ ID NO: 3632507 - DNA, 25 bp, Homo sapien
cttggtggattcaggccttgaggac

SEQ ID NO: 3632508 - DNA, 25 bp, Homo sapien
ggcacttctggaacaatcagcttgg

SEQ ID NO: 3632509 - DNA, 25 bp, Homo sapien
ggagaacccgtctgaggaagaccgc

SEQ ID NO: 3632510 - DNA, 25 bp, Homo sapien
gactcaaagcctatgagggattcaa

SEQ ID NO: 3632511 - DNA, 25 bp, Homo sapien
ctgaagtgttccgtcagggaaccct

SEQ ID NO: 3632512 - DNA, 25 bp, Homo sapien
aagattgtaaagaggcctgagatga

SEQ ID NO: 3632513 - DNA, 25 bp, Homo sapien
aaggccctgaagtgttccgtcaggg

SEQ ID NO: 3632514 - DNA, 25 bp, Homo sapien
agattgtaaagaggcctgagatgaa

SEQ ID NO: 3632515 - DNA, 25 bp, Homo sapien
aggctgacctcccttccttctgata

SEQ ID NO: 3632516 - DNA, 25 bp, Homo sapien
ggccccgtgcggctgcctcttgctc

SEQ ID NO: 3632517 - DNA, 25 bp, Homo sapien
gacctcccttccttctgataaatta

SEQ ID NO: 3632518 - DNA, 25 bp, Homo sapien
gctgacctcccttccttctgataaa

SEQ ID NO: 3632519 - DNA, 25 bp, Homo sapien
caagatgcaagaagttgaagtatcc

SEQ ID NO: 3632520 - DNA, 25 bp, Homo sapien
atctccacatgcctccaggctgcag

SEQ ID NO: 3632521 - DNA, 25 bp, Homo sapien
tcccctagcgtgctctgttactgca

SEQ ID NO: 3632522 - DNA, 25 bp, Homo sapien
gaagttgaagtatcccctagcgtgc

SEQ ID NO: 3632523 - DNA, 25 bp, Homo sapien
tttttagggactctcttttccatgc

SEQ ID NO: 3632524 - DNA, 25 bp, Homo sapien
cacacaacctcggtgggaaggatag

SEQ ID NO: 3632525 - DNA, 25 bp, Homo sapien
tctttccaaaagaaggcggctctcc

SEQ ID NO: 3632526 - DNA, 25 bp, Homo sapien
aaataatctcggcatcttctcagca

SEQ ID NO: 3632527 - DNA, 25 bp, Homo sapien
gaatgcttagttaggccatgcctta

SEQ ID NO: 3632528 - DNA, 25 bp, Homo sapien
ggcaacattgtagaagcatgaagct

SEQ ID NO: 3632529 - DNA, 25 bp, Homo sapien
gaagctgcaagggatctcaaaacca

SEQ ID NO: 3632530 - DNA, 25 bp, Homo sapien
ttttccaagctgccaaggcaacatt

SEQ ID NO: 3632531 - DNA, 25 bp, Homo sapien
gccaaggcaacattgtagaagcatg

SEQ ID NO: 3632532 - DNA, 25 bp, Homo sapien
tgagcccacggaaacactattgatc

SEQ ID NO: 3632533 - DNA, 25 bp, Homo sapien
aagaacaaacaggtcaactgagccc

SEQ ID NO: 3632534 - DNA, 25 bp, Homo sapien
gaaacactattgatcctgtgctgtg

SEQ ID NO: 3632535 - DNA, 25 bp, Homo sapien
aacaggtcaactgagcccacggaaa

SEQ ID NO: 3632536 - DNA, 25 bp, Homo sapien
caggaggtccttggtaacatttcag

SEQ ID NO: 3632537 - DNA, 25 bp, Homo sapien
tttcgtgaactaaggcacccagacc

SEQ ID NO: 3632538 - DNA, 25 bp, Homo sapien
tgaaagcggttgttctaaaatctgg

SEQ ID NO: 3632539 - DNA, 25 bp, Homo sapien
tctggatccccaaaatctggtaggg

SEQ ID NO: 3632540 - DNA, 25 bp, Homo sapien
gttcccaagggctcctctctcagca

SEQ ID NO: 3632541 - DNA, 25 bp, Homo sapien
tttgttcccaagggctcctctctca

SEQ ID NO: 3632542 - DNA, 25 bp, Homo sapien
tctctcagcagtgggctggcaccct

SEQ ID NO: 3632543 - DNA, 25 bp, Homo sapien
gtggttctgggtagcttttcttggc

SEQ ID NO: 3632544 - DNA, 25 bp, Homo sapien
cagtttggaacttggatgtgggagc

SEQ ID NO: 3632545 - DNA, 25 bp, Homo sapien
tttggaacttggatgtgggagccat

SEQ ID NO: 3632546 - DNA, 25 bp, Homo sapien
gtgggagccatggagggcctcctca

SEQ ID NO: 3632547 - DNA, 25 bp, Homo sapien
tgggagccatggagggcctcctcac

SEQ ID NO: 3632548 - DNA, 25 bp, Homo sapien
gagtacagcaaccagtgtaagaaga

SEQ ID NO: 3632549 - DNA, 25 bp, Homo sapien
gtttgtaagagtacagcaaccagtg

SEQ ID NO: 3632550 - DNA, 25 bp, Homo sapien
aggatgtttgtaagagtacagcaac

SEQ ID NO: 3632551 - DNA, 25 bp, Homo sapien
gcaaccagtgtaagaagaattccat

SEQ ID NO: 3632552 - DNA, 25 bp, Homo sapien
tgtgcaaaggtgaatgagactgcat

SEQ ID NO: 3632553 - DNA, 25 bp, Homo sapien
atgtgagtcctgcatccccacagtg

SEQ ID NO: 3632554 - DNA, 25 bp, Homo sapien
tgtggtgttgccagcattaagatgt

SEQ ID NO: 3632555 - DNA, 25 bp, Homo sapien
atttgtaaaagatgtggtgttgcca

SEQ ID NO: 3632556 - DNA, 25 bp, Homo sapien
ggttgtcagtgctgcgccctggtct

SEQ ID NO: 3632557 - DNA, 25 bp, Homo sapien
tcaggtgacgtgcaaaaccatcccg

SEQ ID NO: 3632558 - DNA, 25 bp, Homo sapien
aggtccagattctgagaagatggag

SEQ ID NO: 3632559 - DNA, 25 bp, Homo sapien
tactacgggaatccctaggtccaga

SEQ ID NO: 3632560 - DNA, 25 bp, Homo sapien
acatcaggtagctggcgtgtccctg

SEQ ID NO: 3632561 - DNA, 25 bp, Homo sapien
ggtagctggcgtgtccctgtcaagc

SEQ ID NO: 3632562 - DNA, 25 bp, Homo sapien
tgctgttaccacgtccacatcaggt

SEQ ID NO: 3632563 - DNA, 25 bp, Homo sapien
cgcccacggtctgctgttaccacgt

SEQ ID NO: 3632564 - DNA, 25 bp, Homo sapien
tgctcaatgggagtgacacaattcc

SEQ ID NO: 3632565 - DNA, 25 bp, Homo sapien
tttgctcccgattcccagattctgg

SEQ ID NO: 3632566 - DNA, 25 bp, Homo sapien
tgtgtttcaacaacctcaggcacct

SEQ ID NO: 3632567 - DNA, 25 bp, Homo sapien
gcgacctttgacagagtggtggacc

SEQ ID NO: 3632568 - DNA, 25 bp, Homo sapien
tgggcaccttccttgttgaggtccc

SEQ ID NO: 3632569 - DNA, 25 bp, Homo sapien
caccactgtgggtgtttgaacactg

SEQ ID NO: 3632570 - DNA, 25 bp, Homo sapien
ccactgtgggtgtttgaacactgga

SEQ ID NO: 3632571 - DNA, 25 bp, Homo sapien
cttgggcaccttccttgttgaggtc

SEQ ID NO: 3632572 - DNA, 25 bp, Homo sapien
caaacgtggtaccaaaggactcaca

SEQ ID NO: 3632573 - DNA, 25 bp, Homo sapien
gagaggctgaaccaagcgactgtga

SEQ ID NO: 3632574 - DNA, 25 bp, Homo sapien
ggtgtctcagacattcgtgcagcaa

SEQ ID NO: 3632575 - DNA, 25 bp, Homo sapien
tgatgagggatgatgttccccagcg

SEQ ID NO: 3632576 - DNA, 25 bp, Homo sapien
agatacactgtgcagtcctccagat

SEQ ID NO: 3632577 - DNA, 25 bp, Homo sapien
gcagtcctccagatgaagcaggaat

SEQ ID NO: 3632578 - DNA, 25 bp, Homo sapien
tgaaaatcctctctcagatacactg

SEQ ID NO: 3632579 - DNA, 25 bp, Homo sapien
cactgtgcagtcctccagatgaagc

SEQ ID NO: 3632580 - DNA, 25 bp, Homo sapien
cctgtctggctatagtaattggagg

SEQ ID NO: 3632581 - DNA, 25 bp, Homo sapien
tctccccaaggtagctgtccactgc

SEQ ID NO: 3632582 - DNA, 25 bp, Homo sapien
gctatagtaattggaggaaaggtaa

SEQ ID NO: 3632583 - DNA, 25 bp, Homo sapien
gtccccctgtctggctatagtaatt

SEQ ID NO: 3632584 - DNA, 25 bp, Homo sapien
ataggaacccacttcttcggatcct

SEQ ID NO: 3632585 - DNA, 25 bp, Homo sapien
gtgatgttaagtggcatgtccacag

SEQ ID NO: 3632586 - DNA, 25 bp, Homo sapien
tcaggtgatgttaagtggcatgtcc

SEQ ID NO: 3632587 - DNA, 25 bp, Homo sapien
cagtggagacgccagactctgatag

SEQ ID NO: 3632588 - DNA, 25 bp, Homo sapien
ttctgttcatgagagcacaccgaca

SEQ ID NO: 3632589 - DNA, 25 bp, Homo sapien
gagagcacaccgacatttgagcaat

SEQ ID NO: 3632590 - DNA, 25 bp, Homo sapien
gttcatgagagcacaccgacatttg

SEQ ID NO: 3632591 - DNA, 25 bp, Homo sapien
agcacaccgacatttgagcaatttg

SEQ ID NO: 3632592 - DNA, 25 bp, Homo sapien
aggagactcctccattgtagccgtc

SEQ ID NO: 3632593 - DNA, 25 bp, Homo sapien
actacagtgacgaccacaagcgtgg

SEQ ID NO: 3632594 - DNA, 25 bp, Homo sapien
tcctgaactggaagggttatgtccc

SEQ ID NO: 3632595 - DNA, 25 bp, Homo sapien
tcagggaacagtgccccagcacatg

SEQ ID NO: 3632596 - DNA, 25 bp, Homo sapien
gaaggtggaagccaaactcaacaca

SEQ ID NO: 3632597 - DNA, 25 bp, Homo sapien
cacgtggttgaagctggaacatgct

SEQ ID NO: 3632598 - DNA, 25 bp, Homo sapien
ccaagcacgtggttgaagctggaac

SEQ ID NO: 3632599 - DNA, 25 bp, Homo sapien
agctggtgtcgtccaagcacgtggt

SEQ ID NO: 3632600 - DNA, 25 bp, Homo sapien
aaattccaagaagtgcgattgtaca

SEQ ID NO: 3632601 - DNA, 25 bp, Homo sapien
gattgtacaatcaaacagcccacgt

SEQ ID NO: 3632602 - DNA, 25 bp, Homo sapien
gctgtacttcccaattgcattccaa

SEQ ID NO: 3632603 - DNA, 25 bp, Homo sapien
ggttacataatagcccattgtatag

SEQ ID NO: 3632604 - DNA, 25 bp, Homo sapien
ttaatatgtccatgagtagatttgg

SEQ ID NO: 3632605 - DNA, 25 bp, Homo sapien
tgtccatgagtagatttggaaagaa

SEQ ID NO: 3632606 - DNA, 25 bp, Homo sapien
tggaaagaacagtttctgtgggcat

SEQ ID NO: 3632607 - DNA, 25 bp, Homo sapien
ttctttttaatatgtccatgagtag

SEQ ID NO: 3632608 - DNA, 25 bp, Homo sapien
ctgccattcggactcttgggcctct

SEQ ID NO: 3632609 - DNA, 25 bp, Homo sapien
aggtctgccattcggactcttgggc

SEQ ID NO: 3632610 - DNA, 25 bp, Homo sapien
ttgatcaggtctgccattcggactc

SEQ ID NO: 3632611 - DNA, 25 bp, Homo sapien
tcaggtctgccattcggactcttgg

SEQ ID NO: 3632612 - DNA, 25 bp, Homo sapien
gaaggtgcagccatcgaagtctcct

SEQ ID NO: 3632613 - DNA, 25 bp, Homo sapien
tctccttctgaccccgcctggtggt

SEQ ID NO: 3632614 - DNA, 25 bp, Homo sapien
ctagttcactctcatgcagaaggtg

SEQ ID NO: 3632615 - DNA, 25 bp, Homo sapien
tctgaccccgcctggtggttctgag

SEQ ID NO: 3632616 - DNA, 25 bp, Homo sapien
cttagcaatcgtgtccgttctgatg

SEQ ID NO: 3632617 - DNA, 25 bp, Homo sapien
aattcttagcaatcgtgtccgttct

SEQ ID NO: 3632618 - DNA, 25 bp, Homo sapien
gatctgaaggaattcttagcaatcg

SEQ ID NO: 3632619 - DNA, 25 bp, Homo sapien
aaggaattcttagcaatcgtgtccg

SEQ ID NO: 3632620 - DNA, 25 bp, Homo sapien
tatcaactctcaagagaagcatctg

SEQ ID NO: 3632621 - DNA, 25 bp, Homo sapien
ccatgattcgcagggtttaggctct

SEQ ID NO: 3632622 - DNA, 25 bp, Homo sapien
ttggcccaaggacactatcaactct

SEQ ID NO: 3632623 - DNA, 25 bp, Homo sapien
aacggtgaagaagtggctccacgcc

SEQ ID NO: 3632624 - DNA, 25 bp, Homo sapien
ctgatgatgagaaacgaaaggagag

SEQ ID NO: 3632625 - DNA, 25 bp, Homo sapien
tgtcaagccgccatgtcaatgcagg

SEQ ID NO: 3632626 - DNA, 25 bp, Homo sapien
tgataggaagtatgatgtcaagccg

SEQ ID NO: 3632627 - DNA, 25 bp, Homo sapien
tgatgagaaacgaaaggagaggcca

SEQ ID NO: 3632628 - DNA, 25 bp, Homo sapien
ctcgcgtctcgggtttatccaggaa

SEQ ID NO: 3632629 - DNA, 25 bp, Homo sapien
tccagcaatgtaaatataggcggtc

SEQ ID NO: 3632630 - DNA, 25 bp, Homo sapien
tgtgtggcaactctaccgtggtgct

SEQ ID NO: 3632631 - DNA, 25 bp, Homo sapien
taggcggtcccatcaccaaagaaat

SEQ ID NO: 3632632 - DNA, 25 bp, Homo sapien
catggctgggagcatgaatatctgg

SEQ ID NO: 3632633 - DNA, 25 bp, Homo sapien
ccagaagaagggagctgacatcatg

SEQ ID NO: 3632634 - DNA, 25 bp, Homo sapien
catcatggctgggagcatgaatatc

SEQ ID NO: 3632635 - DNA, 25 bp, Homo sapien
aagaagggagctgacatcatggctg

SEQ ID NO: 3632636 - DNA, 25 bp, Homo sapien
acttgctgtgagcatctctgagagc

SEQ ID NO: 3632637 - DNA, 25 bp, Homo sapien
ccgctggtggtaggtggggtgctct

SEQ ID NO: 3632638 - DNA, 25 bp, Homo sapien
ccccagggccgctggtggtaggtgg

SEQ ID NO: 3632639 - DNA, 25 bp, Homo sapien
cgggcagacacttgctgtgagcatc

SEQ ID NO: 3632640 - DNA, 25 bp, Homo sapien
cctgacagatcccacttaacttgtt

SEQ ID NO: 3632641 - DNA, 25 bp, Homo sapien
tgacagatcccacttaacttgttta

SEQ ID NO: 3632642 - DNA, 25 bp, Homo sapien
gacagatcccacttaacttgtttat

SEQ ID NO: 3632643 - DNA, 25 bp, Homo sapien
acagatcccacttaacttgtttatc

SEQ ID NO: 3632644 - DNA, 25 bp, Homo sapien
gacaataagcagaagatgtatcctc

SEQ ID NO: 3632645 - DNA, 25 bp, Homo sapien
gaaggattaaccaacgtgtgacaat

SEQ ID NO: 3632646 - DNA, 25 bp, Homo sapien
agatgtatcctcagaatgaagggca

SEQ ID NO: 3632647 - DNA, 25 bp, Homo sapien
cagaatgaagggcagcattgtagga

SEQ ID NO: 3632648 - DNA, 25 bp, Homo sapien
tcaatgctgattgctcctgctctgc

SEQ ID NO: 3632649 - DNA, 25 bp, Homo sapien
ggcaaggcacccatacaagaggaaa

SEQ ID NO: 3632650 - DNA, 25 bp, Homo sapien
tgaatgcagtatcgagaggaaagct

SEQ ID NO: 3632651 - DNA, 25 bp, Homo sapien
ggtgaaagatcactgcacatccctg

SEQ ID NO: 3632652 - DNA, 25 bp, Homo sapien
agcatgttgggaggccgaggaaggg

SEQ ID NO: 3632653 - DNA, 25 bp, Homo sapien
agatcacttgaggccaggatttcga

SEQ ID NO: 3632654 - DNA, 25 bp, Homo sapien
gaccagcctggcccacatggagaaa

SEQ ID NO: 3632655 - DNA, 25 bp, Homo sapien
cccacatggagaaaccctgtctcta

SEQ ID NO: 3632656 - DNA, 25 bp, Homo sapien
tgaagactggagtcgctactgtggt

SEQ ID NO: 3632657 - DNA, 25 bp, Homo sapien
ttgaattttcgacagaggaggcaga

SEQ ID NO: 3632658 - DNA, 25 bp, Homo sapien
tgccatcatctcagatgaagactgg

SEQ ID NO: 3632659 - DNA, 25 bp, Homo sapien
actgcattccgcctgccttgaattt

SEQ ID NO: 3632660 - DNA, 25 bp, Homo sapien
tgatgtcggcaatacaagctcagca

SEQ ID NO: 3632661 - DNA, 25 bp, Homo sapien
tgacaagcgtccgatgatgttccca

SEQ ID NO: 3632662 - DNA, 25 bp, Homo sapien
tacaggcagtagagacttacccagg

SEQ ID NO: 3632663 - DNA, 25 bp, Homo sapien
tctttatagtgatgccggaacagct

SEQ ID NO: 3632664 - DNA, 25 bp, Homo sapien
atggagcccccgatcgcaggtctgc

SEQ ID NO: 3632665 - DNA, 25 bp, Homo sapien
catctagacagcacaagtcataggg

SEQ ID NO: 3632666 - DNA, 25 bp, Homo sapien
ccccgatcgcaggtctgcaactgaa

SEQ ID NO: 3632667 - DNA, 25 bp, Homo sapien
gatcgcaggtctgcaactgaatttt

SEQ ID NO: 3632668 - DNA, 25 bp, Homo sapien
gacttccagtcatctagagtgtgta

SEQ ID NO: 3632669 - DNA, 25 bp, Homo sapien
tccaggcatctggagtgcgtattcc

SEQ ID NO: 3632670 - DNA, 25 bp, Homo sapien
tgcgtattccgctccatcttcaggt

SEQ ID NO: 3632671 - DNA, 25 bp, Homo sapien
gagtgtgtatccctcggatccgtga

SEQ ID NO: 3632672 - DNA, 25 bp, Homo sapien
ggagtctgggatccaaattgcttcc

SEQ ID NO: 3632673 - DNA, 25 bp, Homo sapien
tgtccacgccttctgcagatgttca

SEQ ID NO: 3632674 - DNA, 25 bp, Homo sapien
gaaatgacctggaagccttttgatt

SEQ ID NO: 3632675 - DNA, 25 bp, Homo sapien
cgtaaagctgttcatctccaggagt

SEQ ID NO: 3632676 - DNA, 25 bp, Homo sapien
gatcctacaagtctaccagcagcag

SEQ ID NO: 3632677 - DNA, 25 bp, Homo sapien
gagaagggcacaccaaagtcacggt

SEQ ID NO: 3632678 - DNA, 25 bp, Homo sapien
caaagagtgagaggacgatagccca

SEQ ID NO: 3632679 - DNA, 25 bp, Homo sapien
aaagccttggctggcaacagtagca

SEQ ID NO: 3632680 - DNA, 25 bp, Homo sapien
aataatattcattgagaggcaggca

SEQ ID NO: 3632681 - DNA, 25 bp, Homo sapien
gcaggcaaagccagttagacctgct

SEQ ID NO: 3632682 - DNA, 25 bp, Homo sapien
tattcattgagaggcaggcaaagcc

SEQ ID NO: 3632683 - DNA, 25 bp, Homo sapien
caggcaaagccagttagacctgctg

SEQ ID NO: 3632684 - DNA, 25 bp, Homo sapien
caagactcaagcctttcctcgcccc

SEQ ID NO: 3632685 - DNA, 25 bp, Homo sapien
tcagcacacccataaaccttgaaat

SEQ ID NO: 3632686 - DNA, 25 bp, Homo sapien
cacccataaaccttgaaattcctct

SEQ ID NO: 3632687 - DNA, 25 bp, Homo sapien
catctagggccttgttgagttcttg

SEQ ID NO: 3632688 - DNA, 25 bp, Homo sapien
tcagattcaaggcatatgggcgtgg

SEQ ID NO: 3632689 - DNA, 25 bp, Homo sapien
tccgggatggcaatgactaggctat

SEQ ID NO: 3632690 - DNA, 25 bp, Homo sapien
cagcagggcaatctccagaggaaag

SEQ ID NO: 3632691 - DNA, 25 bp, Homo sapien
aagaggacacttcccagcgacgatg

SEQ ID NO: 3632692 - DNA, 25 bp, Homo sapien
ccgaacttggtgttctagggcccag

SEQ ID NO: 3632693 - DNA, 25 bp, Homo sapien
catctgctgaactcgagtctgaggg

SEQ ID NO: 3632694 - DNA, 25 bp, Homo sapien
ccatctgctgaactcgagtctgagg

SEQ ID NO: 3632695 - DNA, 25 bp, Homo sapien
cttggtgttctagggcccagcagca

SEQ ID NO: 3632696 - DNA, 25 bp, Homo sapien
gacgctttgctgtgatctcttgaaa

SEQ ID NO: 3632697 - DNA, 25 bp, Homo sapien
aaatccggttttatgcaatattcca

SEQ ID NO: 3632698 - DNA, 25 bp, Homo sapien
gctgtgatctcttgaaaatccggtt

SEQ ID NO: 3632699 - DNA, 25 bp, Homo sapien
agtttctttggttgccgacgctttg

SEQ ID NO: 3632700 - DNA, 25 bp, Homo sapien
tcatggctctgcgttgaggcctgtt

SEQ ID NO: 3632701 - DNA, 25 bp, Homo sapien
tccgggctgcccttgtgctagagtt

SEQ ID NO: 3632702 - DNA, 25 bp, Homo sapien
gttgctaaccatctgtctgggctca

SEQ ID NO: 3632703 - DNA, 25 bp, Homo sapien
tgaggcctgttgctaaccatctgtc

SEQ ID NO: 3632704 - DNA, 25 bp, Homo sapien
gctttgaatacaacttggagtcggt

SEQ ID NO: 3632705 - DNA, 25 bp, Homo sapien
gcaaaacgcagagcacaaagtggat

SEQ ID NO: 3632706 - DNA, 25 bp, Homo sapien
tggaacgtggcaaaacgcagagcac

SEQ ID NO: 3632707 - DNA, 25 bp, Homo sapien
gattccagtgtcgtaaaatgtcttt

SEQ ID NO: 3632708 - DNA, 25 bp, Homo sapien
gacacggtcataaatgcctctgggt

SEQ ID NO: 3632709 - DNA, 25 bp, Homo sapien
tgtaggccaacgtgtagggcccacc

SEQ ID NO: 3632710 - DNA, 25 bp, Homo sapien
ctgtctttctgtacagggatgaggt

SEQ ID NO: 3632711 - DNA, 25 bp, Homo sapien
gagagatgttcatgctgtggactgt

SEQ ID NO: 3632712 - DNA, 25 bp, Homo sapien
ccaaaatccttagcaaatgggccaa

SEQ ID NO: 3632713 - DNA, 25 bp, Homo sapien
tgttgaaaacccagcgtgtcaaagt

SEQ ID NO: 3632714 - DNA, 25 bp, Homo sapien
gcaaacattttatgactggctctca

SEQ ID NO: 3632715 - DNA, 25 bp, Homo sapien
tcctgctttgggtacgtaaaattca

SEQ ID NO: 3632716 - DNA, 25 bp, Homo sapien
tggagagacgctcagacccatagct

SEQ ID NO: 3632717 - DNA, 25 bp, Homo sapien
gccaagggcctctcggcatggcaat

SEQ ID NO: 3632718 - DNA, 25 bp, Homo sapien
ccccacctgtgctgttggagagacg

SEQ ID NO: 3632719 - DNA, 25 bp, Homo sapien
ggctggctgtcccatgtgatcaacg

SEQ ID NO: 3632720 - DNA, 25 bp, Homo sapien
tgctgtcctcagtggcctggatccg

SEQ ID NO: 3632721 - DNA, 25 bp, Homo sapien
cacagaccgtgcttgcacacacaga

SEQ ID NO: 3632722 - DNA, 25 bp, Homo sapien
tggcacccagcatgtacaccactgt

SEQ ID NO: 3632723 - DNA, 25 bp, Homo sapien
tccagcggctccttaccaatgtgtt

SEQ ID NO: 3632724 - DNA, 25 bp, Homo sapien
tcatgctgaccgctgagactgtctt

SEQ ID NO: 3632725 - DNA, 25 bp, Homo sapien
gctgaccgctgagactgtcttgcat

SEQ ID NO: 3632726 - DNA, 25 bp, Homo sapien
tctctcatgctgaccgctgagactg

SEQ ID NO: 3632727 - DNA, 25 bp, Homo sapien
actgtctctcatgctgaccgctgag

SEQ ID NO: 3632728 - DNA, 25 bp, Homo sapien
agtcacaggtcgagggtcagaaaat

SEQ ID NO: 3632729 - DNA, 25 bp, Homo sapien
acagaagaactggtaatgacatagc

SEQ ID NO: 3632730 - DNA, 25 bp, Homo sapien
ggtcgagggtcagaaaataacaaca

SEQ ID NO: 3632731 - DNA, 25 bp, Homo sapien
gtaatgacatagcacagtcgaaggg

SEQ ID NO: 3632732 - DNA, 25 bp, Homo sapien
cggtggcactgacagctataccagt

SEQ ID NO: 3632733 - DNA, 25 bp, Homo sapien
tataccagtggcactgacagctagg

SEQ ID NO: 3632734 - DNA, 25 bp, Homo sapien
cactgacagctaggagagcagtctt

SEQ ID NO: 3632735 - DNA, 25 bp, Homo sapien
tcttgagcgtctccctgccgccttg

SEQ ID NO: 3632736 - DNA, 25 bp, Homo sapien
cctgaaagtcgaggtaagagaattt

SEQ ID NO: 3632737 - DNA, 25 bp, Homo sapien
taagagaatttctgtgggccagcta

SEQ ID NO: 3632738 - DNA, 25 bp, Homo sapien
tgtgggccagctattctgcatgtgg

SEQ ID NO: 3632739 - DNA, 25 bp, Homo sapien
caagcatggagtgtttgagtgcagg

SEQ ID NO: 3632740 - DNA, 25 bp, Homo sapien
tataaattatctttctaggccggga

SEQ ID NO: 3632741 - DNA, 25 bp, Homo sapien
ggattaggctaactccataatttag

SEQ ID NO: 3632742 - DNA, 25 bp, Homo sapien
gatcaggctgactaaaacagtgaaa

SEQ ID NO: 3632743 - DNA, 25 bp, Homo sapien
aattatctttctaggccgggagcag

SEQ ID NO: 3632744 - DNA, 25 bp, Homo sapien
agaagtgtaattggcacatatttgg

SEQ ID NO: 3632745 - DNA, 25 bp, Homo sapien
tggtggagcgaaattggcagagttt

SEQ ID NO: 3632746 - DNA, 25 bp, Homo sapien
tggcagagttttcccgatccccgtg

SEQ ID NO: 3632747 - DNA, 25 bp, Homo sapien
ggcagtgttagggagaagtgtaatt

SEQ ID NO: 3632748 - DNA, 25 bp, Homo sapien
tattgagggaggtgctacagcccca

SEQ ID NO: 3632749 - DNA, 25 bp, Homo sapien
cttattgagggaggtgctacagccc

SEQ ID NO: 3632750 - DNA, 25 bp, Homo sapien
ttattgagggaggtgctacagcccc

SEQ ID NO: 3632751 - DNA, 25 bp, Homo sapien
aggccatcagtctctgtgcaaaagt

SEQ ID NO: 3632752 - DNA, 25 bp, Homo sapien
aagtcaaaatattgaccatactgca

SEQ ID NO: 3632753 - DNA, 25 bp, Homo sapien
gagccaggccatcagtctctgtgca

SEQ ID NO: 3632754 - DNA, 25 bp, Homo sapien
catcagtctctgtgcaaaagtcaaa

SEQ ID NO: 3632755 - DNA, 25 bp, Homo sapien
ctggagagcccttcacagagccgga

SEQ ID NO: 3632756 - DNA, 25 bp, Homo sapien
cctggggtctagcacgaacaggttc

SEQ ID NO: 3632757 - DNA, 25 bp, Homo sapien
tcgcccaccccttcgaggtaataca

SEQ ID NO: 3632758 - DNA, 25 bp, Homo sapien
gacctggtgcaccaacttccaggac

SEQ ID NO: 3632759 - DNA, 25 bp, Homo sapien
catggcacggtgctgagtaaggctc

SEQ ID NO: 3632760 - DNA, 25 bp, Homo sapien
tacgggctctcagggtttgcactag

SEQ ID NO: 3632761 - DNA, 25 bp, Homo sapien
tgctgtggaccctaataacaaaggg

SEQ ID NO: 3632762 - DNA, 25 bp, Homo sapien
cactaggctgaggtttccaggtaac

SEQ ID NO: 3632763 - DNA, 25 bp, Homo sapien
ttcctcatagccagatgtccattga

SEQ ID NO: 3632764 - DNA, 25 bp, Homo sapien
tgtactccctgcactaacttagcca

SEQ ID NO: 3632765 - DNA, 25 bp, Homo sapien
cacagtgggcacaccagtatgtgac

SEQ ID NO: 3632766 - DNA, 25 bp, Homo sapien
agtatgtgaccatgcacacacgggc

SEQ ID NO: 3632767 - DNA, 25 bp, Homo sapien
ttaaaccagcactagctctctctgg

SEQ ID NO: 3632768 - DNA, 25 bp, Homo sapien
taaaccagcactagctctctctggc

SEQ ID NO: 3632769 - DNA, 25 bp, Homo sapien
agcactagctctctctggccgcctt

SEQ ID NO: 3632770 - DNA, 25 bp, Homo sapien
accagcactagctctctctggccgc

SEQ ID NO: 3632771 - DNA, 25 bp, Homo sapien
caggaccagtgtaagagaaaaccca

SEQ ID NO: 3632772 - DNA, 25 bp, Homo sapien
agagaaaacccagggtacatggagc

SEQ ID NO: 3632773 - DNA, 25 bp, Homo sapien
gtacatggagccatgtttgcccagc

SEQ ID NO: 3632774 - DNA, 25 bp, Homo sapien
tgtgttcatcctcaaagcaggacca

SEQ ID NO: 3632775 - DNA, 25 bp, Homo sapien
caccaccaggtcttccgagagaata

SEQ ID NO: 3632776 - DNA, 25 bp, Homo sapien
tcatgaaggccagacagcggaagtc

SEQ ID NO: 3632777 - DNA, 25 bp, Homo sapien
caaagccaacgagcaggaagcattc

SEQ ID NO: 3632778 - DNA, 25 bp, Homo sapien
gaattgtcacaaagggaacaccgct

SEQ ID NO: 3632779 - DNA, 25 bp, Homo sapien
tcccaggtgtcttactgcagtggtc

SEQ ID NO: 3632780 - DNA, 25 bp, Homo sapien
actactgctttgtgacatataccca

SEQ ID NO: 3632781 - DNA, 25 bp, Homo sapien
ctactgctttgtgacatatacccat

SEQ ID NO: 3632782 - DNA, 25 bp, Homo sapien
cactactgctttgtgacatataccc

SEQ ID NO: 3632783 - DNA, 25 bp, Homo sapien
gaaaggtcagaagatattcccatga

SEQ ID NO: 3632784 - DNA, 25 bp, Homo sapien
ggacatcactactgccggtcatctg

SEQ ID NO: 3632785 - DNA, 25 bp, Homo sapien
tgtctgctgccacccgttatatgag

SEQ ID NO: 3632786 - DNA, 25 bp, Homo sapien
tcatctgtgacgagctggacatcac

SEQ ID NO: 3632787 - DNA, 25 bp, Homo sapien
gggaagtaaatctcgctgagctaga

SEQ ID NO: 3632788 - DNA, 25 bp, Homo sapien
ttatcgagggtgcttgtgcttttac

SEQ ID NO: 3632789 - DNA, 25 bp, Homo sapien
gctgagctagaaaaggaccacactc

SEQ ID NO: 3632790 - DNA, 25 bp, Homo sapien
gctcctcagggtttatcgagggtgc

SEQ ID NO: 3632791 - DNA, 25 bp, Homo sapien
tgggagaagtgcaacgctcaaagtc

SEQ ID NO: 3632792 - DNA, 25 bp, Homo sapien
gaagtgcaacgctcaaagtccactc

SEQ ID NO: 3632793 - DNA, 25 bp, Homo sapien
gtgtgggagaagtgcaacgctcaaa

SEQ ID NO: 3632794 - DNA, 25 bp, Homo sapien
aacgctcaaagtccactcgtaatcc

SEQ ID NO: 3632795 - DNA, 25 bp, Homo sapien
tctgccatgactggggccggaatct

SEQ ID NO: 3632796 - DNA, 25 bp, Homo sapien
tctacgtccaggagatgagtgcctc

SEQ ID NO: 3632797 - DNA, 25 bp, Homo sapien
gggccggaatctaagcctcgatgtt

SEQ ID NO: 3632798 - DNA, 25 bp, Homo sapien
taccctaatccccagagtgcatctt

SEQ ID NO: 3632799 - DNA, 25 bp, Homo sapien
ctatgaggagaagccgaacagacat

SEQ ID NO: 3632800 - DNA, 25 bp, Homo sapien
aacatgaggacgctgaaggactgtg

SEQ ID NO: 3632801 - DNA, 25 bp, Homo sapien
gcaaacgtcccatgaggatgcatga

SEQ ID NO: 3632802 - DNA, 25 bp, Homo sapien
tgcatgatagggaacatgaggacgc

SEQ ID NO: 3632803 - DNA, 25 bp, Homo sapien
ctggacaaggcaaacgtcccatgag

SEQ ID NO: 3632804 - DNA, 25 bp, Homo sapien
tcaagatttgtacagggttggctcc

SEQ ID NO: 3632805 - DNA, 25 bp, Homo sapien
tcacattgtctgtggagccccacgc

SEQ ID NO: 3632806 - DNA, 25 bp, Homo sapien
cacgtacaaaatgaggacgcccgtc

SEQ ID NO: 3632807 - DNA, 25 bp, Homo sapien
cctggcttgggagatatgtcacatt

SEQ ID NO: 3632808 - DNA, 25 bp, Homo sapien
actacactcagatttctgtgattac

SEQ ID NO: 3632809 - DNA, 25 bp, Homo sapien
ctgacgtgacaactacactcagatt

SEQ ID NO: 3632810 - DNA, 25 bp, Homo sapien
tacactcagatttctgtgattacag

SEQ ID NO: 3632811 - DNA, 25 bp, Homo sapien
ctacactcagatttctgtgattaca

SEQ ID NO: 3632812 - DNA, 25 bp, Homo sapien
ggcacttcaattttattcaccagca

SEQ ID NO: 3632813 - DNA, 25 bp, Homo sapien
aggcacttcaattttattcaccagc

SEQ ID NO: 3632814 - DNA, 25 bp, Homo sapien
cttgggaagcaatgagtaaacacat

SEQ ID NO: 3632815 - DNA, 25 bp, Homo sapien
tctccaccgtacttgccttccagta

SEQ ID NO: 3632816 - DNA, 25 bp, Homo sapien
agcctccagtggagttttggctctc

SEQ ID NO: 3632817 - DNA, 25 bp, Homo sapien
ggagagtggcaatttcccttcgatg

SEQ ID NO: 3632818 - DNA, 25 bp, Homo sapien
taaaaacacaggagagtggcaattt

SEQ ID NO: 3632819 - DNA, 25 bp, Homo sapien
aatgacggcacacaaaaccttcaga

SEQ ID NO: 3632820 - DNA, 25 bp, Homo sapien
gttcggtacttggaagctgtgaaaa

SEQ ID NO: 3632821 - DNA, 25 bp, Homo sapien
taaaaagatgtttagcagggactgt

SEQ ID NO: 3632822 - DNA, 25 bp, Homo sapien
atgataaaatgacggcacacaaaac

SEQ ID NO: 3632823 - DNA, 25 bp, Homo sapien
tccgcggctggaccacttcccccag

SEQ ID NO: 3632824 - DNA, 25 bp, Homo sapien
ttccaataagactctctgaagtgcc

SEQ ID NO: 3632825 - DNA, 25 bp, Homo sapien
aagcgcagggtgatcagatgacgat

SEQ ID NO: 3632826 - DNA, 25 bp, Homo sapien
caggcccactgactcagaagcgcag

SEQ ID NO: 3632827 - DNA, 25 bp, Homo sapien
tccaataagactctctgaagtgccc

SEQ ID NO: 3632828 - DNA, 25 bp, Homo sapien
catgatgagttgacccttccttcag

SEQ ID NO: 3632829 - DNA, 25 bp, Homo sapien
aaacatcgttcagaactatgctgcc

SEQ ID NO: 3632830 - DNA, 25 bp, Homo sapien
ccttcagtaatctgttcgtgttctg

SEQ ID NO: 3632831 - DNA, 25 bp, Homo sapien
gatattaaaacatcgttcagaacta

SEQ ID NO: 3632832 - DNA, 25 bp, Homo sapien
cacagtgctctttcttaattagact

SEQ ID NO: 3632833 - DNA, 25 bp, Homo sapien
acagtgctctttcttaattagactt

SEQ ID NO: 3632834 - DNA, 25 bp, Homo sapien
gacttgtgtccttcgagagaatccc

SEQ ID NO: 3632835 - DNA, 25 bp, Homo sapien
tgggtagcgctgacgtctgtgtcca

SEQ ID NO: 3632836 - DNA, 25 bp, Homo sapien
ttcagcatgtacagggtgtgggcca

SEQ ID NO: 3632837 - DNA, 25 bp, Homo sapien
gctgttatggctcagatgttctgga

SEQ ID NO: 3632838 - DNA, 25 bp, Homo sapien
tctctgggtttatcatgtcacgtca

SEQ ID NO: 3632839 - DNA, 25 bp, Homo sapien
tcattgtgctccctgaacaaccagc

SEQ ID NO: 3632840 - DNA, 25 bp, Homo sapien
gagcagcaccactctcgtttgcaag

SEQ ID NO: 3632841 - DNA, 25 bp, Homo sapien
acaaccagccttgatattgcccagg

SEQ ID NO: 3632842 - DNA, 25 bp, Homo sapien
tgaggtagtgaaaacggaagttaca

SEQ ID NO: 3632843 - DNA, 25 bp, Homo sapien
ggaagtgagtcatgaaaaccggaag

SEQ ID NO: 3632844 - DNA, 25 bp, Homo sapien
aaaccgaagagagtcatgaaaaaca

SEQ ID NO: 3632845 - DNA, 25 bp, Homo sapien
aacagaaataagtcacaggaaatgg

SEQ ID NO: 3632846 - DNA, 25 bp, Homo sapien
ggcctgcaaagaaagcttggtctcc

SEQ ID NO: 3632847 - DNA, 25 bp, Homo sapien
aagcacacttgatgaggcctgcaaa

SEQ ID NO: 3632848 - DNA, 25 bp, Homo sapien
cacacttgatgaggcctgcaaagaa

SEQ ID NO: 3632849 - DNA, 25 bp, Homo sapien
ctgcaaagaaagcttggtctccagg

SEQ ID NO: 3632850 - DNA, 25 bp, Homo sapien
agaacaagactgatggttttatctc

SEQ ID NO: 3632851 - DNA, 25 bp, Homo sapien
tgagaacaagactgatggttttatc

SEQ ID NO: 3632852 - DNA, 25 bp, Homo sapien
gagttgagaacaagactgatggttt

SEQ ID NO: 3632853 - DNA, 25 bp, Homo sapien
cagagttgagaacaagactgatggt

SEQ ID NO: 3632854 - DNA, 25 bp, Homo sapien
tgctagtgtagaaccagcagacttg

SEQ ID NO: 3632855 - DNA, 25 bp, Homo sapien
tctgctagtgtagaaccagcagact

SEQ ID NO: 3632856 - DNA, 25 bp, Homo sapien
gtgactttcaacctgtcccccagag

SEQ ID NO: 3632857 - DNA, 25 bp, Homo sapien
agcagacttggtgtgactttcaacc

SEQ ID NO: 3632858 - DNA, 25 bp, Homo sapien
gaaagcaaatgcctgtggacagtca

SEQ ID NO: 3632859 - DNA, 25 bp, Homo sapien
gaagttgcgactaccatgagcagga

SEQ ID NO: 3632860 - DNA, 25 bp, Homo sapien
gcagcttacactcaacaacgccgag

SEQ ID NO: 3632861 - DNA, 25 bp, Homo sapien
aaattggccactgaaggaaacggca

SEQ ID NO: 3632862 - DNA, 25 bp, Homo sapien
tgtcaacgcaccaagatctgttagg

SEQ ID NO: 3632863 - DNA, 25 bp, Homo sapien
tggcagctctgaaccaatggtagtc

SEQ ID NO: 3632864 - DNA, 25 bp, Homo sapien
gatgcataagctactactggactgg

SEQ ID NO: 3632865 - DNA, 25 bp, Homo sapien
gagggttctatcagtgcatctaggc

SEQ ID NO: 3632866 - DNA, 25 bp, Homo sapien
tgtgctccattgacctgaacctgct

SEQ ID NO: 3632867 - DNA, 25 bp, Homo sapien
gcatggggatattgcattgtattca

SEQ ID NO: 3632868 - DNA, 25 bp, Homo sapien
tctgtgtctggcaggtactgaccta

SEQ ID NO: 3632869 - DNA, 25 bp, Homo sapien
tgacctaagtgtgccttcacatgtt

SEQ ID NO: 3632870 - DNA, 25 bp, Homo sapien
tccaggagtcattagtggcacttta

SEQ ID NO: 3632871 - DNA, 25 bp, Homo sapien
tgctgtctccaggagtcattagtgg

SEQ ID NO: 3632872 - DNA, 25 bp, Homo sapien
ctgtctccaggagtcattagtggca

SEQ ID NO: 3632873 - DNA, 25 bp, Homo sapien
tctgctgtctccaggagtcattagt

SEQ ID NO: 3632874 - DNA, 25 bp, Homo sapien
agagagggaatctcaagctggccca

SEQ ID NO: 3632875 - DNA, 25 bp, Homo sapien
tggcccagatcagctgtggaataga

SEQ ID NO: 3632876 - DNA, 25 bp, Homo sapien
agatagttttgcctcctccgtgagg

SEQ ID NO: 3632877 - DNA, 25 bp, Homo sapien
gcagactctgaagacgcagttggcc

SEQ ID NO: 3632878 - DNA, 25 bp, Homo sapien
ggatccaagtctgtgtgcattcggc

SEQ ID NO: 3632879 - DNA, 25 bp, Homo sapien
cattcggcaggaacgcaggtctgta

SEQ ID NO: 3632880 - DNA, 25 bp, Homo sapien
aacgcaggtctgtaaagtgacaaca

SEQ ID NO: 3632881 - DNA, 25 bp, Homo sapien
tgtgcattcggcaggaacgcaggtc

SEQ ID NO: 3632882 - DNA, 25 bp, Homo sapien
gatgaatgcagcattccgtgaggaa

SEQ ID NO: 3632883 - DNA, 25 bp, Homo sapien
atgcagcattccgtgaggaatattt

SEQ ID NO: 3632884 - DNA, 25 bp, Homo sapien
aggatgaatgcagcattccgtgagg

SEQ ID NO: 3632885 - DNA, 25 bp, Homo sapien
gcagcattccgtgaggaatattttt

SEQ ID NO: 3632886 - DNA, 25 bp, Homo sapien
ggtagcactgcagttctcctgagga

SEQ ID NO: 3632887 - DNA, 25 bp, Homo sapien
aagggcaccgggatccttggaacag

SEQ ID NO: 3632888 - DNA, 25 bp, Homo sapien
gcagcagaaagtgcacttgctccct

SEQ ID NO: 3632889 - DNA, 25 bp, Homo sapien
tgcatttctgtcaacggccctgtaa

SEQ ID NO: 3632890 - DNA, 25 bp, Homo sapien
ggcatttcattgtatagtcctggca

SEQ ID NO: 3632891 - DNA, 25 bp, Homo sapien
cagtgacagtttgattgtgggctca

SEQ ID NO: 3632892 - DNA, 25 bp, Homo sapien
ggcaacgtgaccctaatgagaagaa

SEQ ID NO: 3632893 - DNA, 25 bp, Homo sapien
gaaaattgctggactctcacggcca

SEQ ID NO: 3632894 - DNA, 25 bp, Homo sapien
tcagcggctggcatttgagattccc

SEQ ID NO: 3632895 - DNA, 25 bp, Homo sapien
tcacaaatccagattccggtttgag

SEQ ID NO: 3632896 - DNA, 25 bp, Homo sapien
ggtttgagcacccactcatcattca

SEQ ID NO: 3632897 - DNA, 25 bp, Homo sapien
tgagattcccatcccctccggagag

SEQ ID NO: 3632898 - DNA, 25 bp, Homo sapien
taaacctatcagcttatcagagttg

SEQ ID NO: 3632899 - DNA, 25 bp, Homo sapien
ctgtgctaaacctatcagcttatca

SEQ ID NO: 3632900 - DNA, 25 bp, Homo sapien
acctatcagcttatcagagttggag

SEQ ID NO: 3632901 - DNA, 25 bp, Homo sapien
cagagttggagtgagaaaatatgac

SEQ ID NO: 3632902 - DNA, 25 bp, Homo sapien
caacatcaatcttgtcggcagcata

SEQ ID NO: 3632903 - DNA, 25 bp, Homo sapien
caatcttgtcggcagcatagagaag

SEQ ID NO: 3632904 - DNA, 25 bp, Homo sapien
cttgtcggcagcatagagaagtaaa

SEQ ID NO: 3632905 - DNA, 25 bp, Homo sapien
catcaacatcaatcttgtcggcagc

SEQ ID NO: 3632906 - DNA, 25 bp, Homo sapien
ttatctcaacatgcagcgtttaaga

SEQ ID NO: 3632907 - DNA, 25 bp, Homo sapien
tcaacatgcagcgtttaagatcctt

SEQ ID NO: 3632908 - DNA, 25 bp, Homo sapien
tccttttcactctgtgtcggattgg

SEQ ID NO: 3632909 - DNA, 25 bp, Homo sapien
tgggttcctcgtccccattcaatgt

SEQ ID NO: 3632910 - DNA, 25 bp, Homo sapien
tccctctatcccctaactgcagtgc

SEQ ID NO: 3632911 - DNA, 25 bp, Homo sapien
ggcagactcttaaatcacctgtgtt

SEQ ID NO: 3632912 - DNA, 25 bp, Homo sapien
ttcctgtgttactcatccctctatc

SEQ ID NO: 3632913 - DNA, 25 bp, Homo sapien
gcagtgcttttccaaatgtgattaa

SEQ ID NO: 3632914 - DNA, 25 bp, Homo sapien
aggcatagcttgctccaatatcttg

SEQ ID NO: 3632915 - DNA, 25 bp, Homo sapien
ctccaatatcttgagtcagaaacag

SEQ ID NO: 3632916 - DNA, 25 bp, Homo sapien
gaggcatagcttgctccaatatctt

SEQ ID NO: 3632917 - DNA, 25 bp, Homo sapien
caatatcttgagtcagaaacagaac

SEQ ID NO: 3632918 - DNA, 25 bp, Homo sapien
tcttcctcgtggctccaacagcatc

SEQ ID NO: 3632919 - DNA, 25 bp, Homo sapien
caaaagggattttcactacaaagtg

SEQ ID NO: 3632920 - DNA, 25 bp, Homo sapien
ggatgagtccagcagtacacggagt

SEQ ID NO: 3632921 - DNA, 25 bp, Homo sapien
caaagtgatgtccacgaagggttgg

SEQ ID NO: 3632922 - DNA, 25 bp, Homo sapien
cacggagttcatccatggagatgcc

SEQ ID NO: 3632923 - DNA, 25 bp, Homo sapien
tacagaatcccaaatgcggaccggg

SEQ ID NO: 3632924 - DNA, 25 bp, Homo sapien
tcagagctctgtcgtcacatgcgat

SEQ ID NO: 3632925 - DNA, 25 bp, Homo sapien
gcatagtgctggcagtaataccaca

SEQ ID NO: 3632926 - DNA, 25 bp, Homo sapien
gagagtccagaacactatgccagtg

SEQ ID NO: 3632927 - DNA, 25 bp, Homo sapien
gactggcccgttccagggtggagtg

SEQ ID NO: 3632928 - DNA, 25 bp, Homo sapien
tgactggcccgttccagggtggagt

SEQ ID NO: 3632929 - DNA, 25 bp, Homo sapien
actggcccgttccagggtggagtgg

SEQ ID NO: 3632930 - DNA, 25 bp, Homo sapien
tgcaatgagcggactgagattttat

SEQ ID NO: 3632931 - DNA, 25 bp, Homo sapien
caatgagcggactgagattttatag

SEQ ID NO: 3632932 - DNA, 25 bp, Homo sapien
gcaatgagcggactgagattttata

SEQ ID NO: 3632933 - DNA, 25 bp, Homo sapien
cttgcaatgagcggactgagatttt

SEQ ID NO: 3632934 - DNA, 25 bp, Homo sapien
aggagccaccagtctgcttctagtc

SEQ ID NO: 3632935 - DNA, 25 bp, Homo sapien
ggagccaccagtctgcttctagtcc

SEQ ID NO: 3632936 - DNA, 25 bp, Homo sapien
ttactgaatgcataatagctgcccc

SEQ ID NO: 3632937 - DNA, 25 bp, Homo sapien
tgtcctcctgatgaaaccgaagttc

SEQ ID NO: 3632938 - DNA, 25 bp, Homo sapien
tccctgtgagatgtccaaaagcttt

SEQ ID NO: 3632939 - DNA, 25 bp, Homo sapien
caaagggctccggttaccttgacag

SEQ ID NO: 3632940 - DNA, 25 bp, Homo sapien
catctggcgatcatacacatacata

SEQ ID NO: 3632941 - DNA, 25 bp, Homo sapien
acagcgccagtgactgtttcagaaa

SEQ ID NO: 3632942 - DNA, 25 bp, Homo sapien
gcaatgagcagacagtaatgagtat

SEQ ID NO: 3632943 - DNA, 25 bp, Homo sapien
gaaagatacggatagctcccatctg

SEQ ID NO: 3632944 - DNA, 25 bp, Homo sapien
ttacaggaagtgttatgaggagcat

SEQ ID NO: 3632945 - DNA, 25 bp, Homo sapien
gaaatgaattacaggaagtgttatg

SEQ ID NO: 3632946 - DNA, 25 bp, Homo sapien
tgctgaaatgaattacaggaagtgt

SEQ ID NO: 3632947 - DNA, 25 bp, Homo sapien
tgaattacaggaagtgttatgagga

SEQ ID NO: 3632948 - DNA, 25 bp, Homo sapien
ccctgaattcatgtggtggaaacca

SEQ ID NO: 3632949 - DNA, 25 bp, Homo sapien
tcaaaatagtttgcacgggccagtg

SEQ ID NO: 3632950 - DNA, 25 bp, Homo sapien
gatgcgttgatttcgccctatctca

SEQ ID NO: 3632951 - DNA, 25 bp, Homo sapien
gaaactgcatctgattgtgaccggg

SEQ ID NO: 3632952 - DNA, 25 bp, Homo sapien
ggaggcttgagtgtccttgggcttg

SEQ ID NO: 3632953 - DNA, 25 bp, Homo sapien
ttgcacagagtggattcccggggct

SEQ ID NO: 3632954 - DNA, 25 bp, Homo sapien
acagagtggattcccggggcttggt

SEQ ID NO: 3632955 - DNA, 25 bp, Homo sapien
tgcacagagtggattcccggggctt

SEQ ID NO: 3632956 - DNA, 25 bp, Homo sapien
ttttataactagaatgctttcactg

SEQ ID NO: 3632957 - DNA, 25 bp, Homo sapien
tttataactagaatgctttcactga

SEQ ID NO: 3632958 - DNA, 25 bp, Homo sapien
tattttataactagaatgctttcac

SEQ ID NO: 3632959 - DNA, 25 bp, Homo sapien
attttataactagaatgctttcact

SEQ ID NO: 3632960 - DNA, 25 bp, Homo sapien
cattctgtgcagtcttgtagactca

SEQ ID NO: 3632961 - DNA, 25 bp, Homo sapien
tcttgtagactcaatctatgtgtcc

SEQ ID NO: 3632962 - DNA, 25 bp, Homo sapien
attgacgacgggcttcttttccaag

SEQ ID NO: 3632963 - DNA, 25 bp, Homo sapien
tcaatctatgtgtccagtcattgac

SEQ ID NO: 3632964 - DNA, 25 bp, Homo sapien
tgctgatctattccagaaactggaa

SEQ ID NO: 3632965 - DNA, 25 bp, Homo sapien
gaaactggaatactctcaatcaatt

SEQ ID NO: 3632966 - DNA, 25 bp, Homo sapien
aaaggctgtcccgatccatttctcc

SEQ ID NO: 3632967 - DNA, 25 bp, Homo sapien
tcccttgcttcccacgtgcataaag

SEQ ID NO: 3632968 - DNA, 25 bp, Homo sapien
ggccttccagcgcacaccagctcat

SEQ ID NO: 3632969 - DNA, 25 bp, Homo sapien
atcaaggtcaaccttaagatcagcc

SEQ ID NO: 3632970 - DNA, 25 bp, Homo sapien
agctcatcaaggtcaaccttaagat

SEQ ID NO: 3632971 - DNA, 25 bp, Homo sapien
aggtcaaccttaagatcagccttat

SEQ ID NO: 3632972 - DNA, 25 bp, Homo sapien
cactttctgtatgcaatgtcacaat

SEQ ID NO: 3632973 - DNA, 25 bp, Homo sapien
actttctgtatgcaatgtcacaatc

SEQ ID NO: 3632974 - DNA, 25 bp, Homo sapien
ggcttgcttgtgcgtccctcccgtt

SEQ ID NO: 3632975 - DNA, 25 bp, Homo sapien
ttgcttgtgcgtccctcccgttaca

SEQ ID NO: 3632976 - DNA, 25 bp, Homo sapien
gctggtcagaggacgacctttctct

SEQ ID NO: 3632977 - DNA, 25 bp, Homo sapien
gatccaaactcgatgacagcagccc

SEQ ID NO: 3632978 - DNA, 25 bp, Homo sapien
cactggcaacatggttacacgttca

SEQ ID NO: 3632979 - DNA, 25 bp, Homo sapien
gagaccgcatcgctttcagactcta

SEQ ID NO: 3632980 - DNA, 25 bp, Homo sapien
cggaatctttattaaatgtttccat

SEQ ID NO: 3632981 - DNA, 25 bp, Homo sapien
tgccccctcggtgtcagaattatct

SEQ ID NO: 3632982 - DNA, 25 bp, Homo sapien
ccccctcggtgtcagaattatcttc

SEQ ID NO: 3632983 - DNA, 25 bp, Homo sapien
caactgccccctcggtgtcagaatt

SEQ ID NO: 3632984 - DNA, 25 bp, Homo sapien
tccagtccaactgccccctcggtgt

SEQ ID NO: 3632985 - DNA, 25 bp, Homo sapien
tcttgatgaagagctcttcccagtg

SEQ ID NO: 3632986 - DNA, 25 bp, Homo sapien
tgaccagtgtctcattaccaggcag

SEQ ID NO: 3632987 - DNA, 25 bp, Homo sapien
ctgaaacaaaatgacgccttgtggt

SEQ ID NO: 3632988 - DNA, 25 bp, Homo sapien
aaaatgacgccttgtggttgaccag

SEQ ID NO: 3632989 - DNA, 25 bp, Homo sapien
ctaatcggtgctcaatagactttgc

SEQ ID NO: 3632990 - DNA, 25 bp, Homo sapien
catacgtgtgtagttgaccattcca

SEQ ID NO: 3632991 - DNA, 25 bp, Homo sapien
ccagaggcatacgtgtgtagttgac

SEQ ID NO: 3632992 - DNA, 25 bp, Homo sapien
gtagttgaccattccacgttgccac

SEQ ID NO: 3632993 - DNA, 25 bp, Homo sapien
tgggcaccagaggcatacgtgtgta

SEQ ID NO: 3632994 - DNA, 25 bp, Homo sapien
gccagtggttatttagcttgtaact

SEQ ID NO: 3632995 - DNA, 25 bp, Homo sapien
gatgccagtggttatttagcttgta

SEQ ID NO: 3632996 - DNA, 25 bp, Homo sapien
gggtgatgccagtggttatttagct

SEQ ID NO: 3632997 - DNA, 25 bp, Homo sapien
tgatgccagtggttatttagcttgt

SEQ ID NO: 3632998 - DNA, 25 bp, Homo sapien
tctgtaggatgatgaacacggcctg

SEQ ID NO: 3632999 - DNA, 25 bp, Homo sapien
taggatgatgaacacggcctgcacc

SEQ ID NO: 3633000 - DNA, 25 bp, Homo sapien
tctctgtaggatgatgaacacggcc

SEQ ID NO: 3633001 - DNA, 25 bp, Homo sapien
cttctctgtaggatgatgaacacgg

SEQ ID NO: 3633002 - DNA, 25 bp, Homo sapien
tacacaggggccaggttcctcttct

SEQ ID NO: 3633003 - DNA, 25 bp, Homo sapien
atttccatgtcatgtttacacaggg

SEQ ID NO: 3633004 - DNA, 25 bp, Homo sapien
tcatgtttacacaggggccaggttc

SEQ ID NO: 3633005 - DNA, 25 bp, Homo sapien
gaatttccatgtcatgtttacacag

SEQ ID NO: 3633006 - DNA, 25 bp, Homo sapien
tgtcgcagtccatcatatcgcagtc

SEQ ID NO: 3633007 - DNA, 25 bp, Homo sapien
cagtccctcatatcgcaggtgatcc

SEQ ID NO: 3633008 - DNA, 25 bp, Homo sapien
accaggaccatcatgtcgcagtcca

SEQ ID NO: 3633009 - DNA, 25 bp, Homo sapien
agtccatcatatcgcagtccctcat

SEQ ID NO: 3633010 - DNA, 25 bp, Homo sapien
tgtcacgggcatctcaaatgaaaag

SEQ ID NO: 3633011 - DNA, 25 bp, Homo sapien
ggccaggtgttcagtcttcattaga

SEQ ID NO: 3633012 - DNA, 25 bp, Homo sapien
gaaaagtagcttacactggacctta

SEQ ID NO: 3633013 - DNA, 25 bp, Homo sapien
cccaaaaagtacttgctggtagcag

SEQ ID NO: 3633014 - DNA, 25 bp, Homo sapien
aatccaggagaggaacatcaacatt

SEQ ID NO: 3633015 - DNA, 25 bp, Homo sapien
gaatagggctgaactaacagggcca

SEQ ID NO: 3633016 - DNA, 25 bp, Homo sapien
caacattgaatagggctgaactaac

SEQ ID NO: 3633017 - DNA, 25 bp, Homo sapien
gaacatcaacattgaatagggctga

SEQ ID NO: 3633018 - DNA, 25 bp, Homo sapien
taagcaggtgtatctctattgggaa

SEQ ID NO: 3633019 - DNA, 25 bp, Homo sapien
tgacgtcctggagcactgtttgtca

SEQ ID NO: 3633020 - DNA, 25 bp, Homo sapien
gtgatattggcaagccccgcaggct

SEQ ID NO: 3633021 - DNA, 25 bp, Homo sapien
gcatttcgtgtttcccatttggcag

SEQ ID NO: 3633022 - DNA, 25 bp, Homo sapien
taagaccatgagctgcactcccaga

SEQ ID NO: 3633023 - DNA, 25 bp, Homo sapien
attgttgaaagggtcataagaccat

SEQ ID NO: 3633024 - DNA, 25 bp, Homo sapien
accatgagctgcactcccagatcat

SEQ ID NO: 3633025 - DNA, 25 bp, Homo sapien
tgaaagggtcataagaccatgagct

SEQ ID NO: 3633026 - DNA, 25 bp, Homo sapien
gggttagatcaaggccaagcccatt

SEQ ID NO: 3633027 - DNA, 25 bp, Homo sapien
tagtaaagagtacaacacggcttga

SEQ ID NO: 3633028 - DNA, 25 bp, Homo sapien
tcctggcaggcactccatcctgtga

SEQ ID NO: 3633029 - DNA, 25 bp, Homo sapien
tctcttaggctcagtcatggaccac

SEQ ID NO: 3633030 - DNA, 25 bp, Homo sapien
gcagaaaggttcttaacttcagtaa

SEQ ID NO: 3633031 - DNA, 25 bp, Homo sapien
cagctgacacatcacgtatttcaaa

SEQ ID NO: 3633032 - DNA, 25 bp, Homo sapien
aaggcatggcttttagcaaatccct

SEQ ID NO: 3633033 - DNA, 25 bp, Homo sapien
ttagtaattcatagggcctggtttc

SEQ ID NO: 3633034 - DNA, 25 bp, Homo sapien
aaatctgtggcatgggcttgccccg

SEQ ID NO: 3633035 - DNA, 25 bp, Homo sapien
tggcatgggcttgccccgtgcatct

SEQ ID NO: 3633036 - DNA, 25 bp, Homo sapien
catctggtaggccaccttataattc

SEQ ID NO: 3633037 - DNA, 25 bp, Homo sapien
cgtgcatctggtaggccaccttata

SEQ ID NO: 3633038 - DNA, 25 bp, Homo sapien
tatgaacttccttcctgaagttcat

SEQ ID NO: 3633039 - DNA, 25 bp, Homo sapien
tataaagcaccttataagtgggcat

SEQ ID NO: 3633040 - DNA, 25 bp, Homo sapien
tgttttataaagcaccttataagtg

SEQ ID NO: 3633041 - DNA, 25 bp, Homo sapien
tttataaagcaccttataagtgggc

SEQ ID NO: 3633042 - DNA, 25 bp, Homo sapien
ctgttttataaagcaccttataagt

SEQ ID NO: 3633043 - DNA, 25 bp, Homo sapien
tgctcaaaaaattctgggtacgtta

SEQ ID NO: 3633044 - DNA, 25 bp, Homo sapien
gctgacatcatctggccacaacttt

SEQ ID NO: 3633045 - DNA, 25 bp, Homo sapien
cgttaagccgttgtggcaattgatt

SEQ ID NO: 3633046 - DNA, 25 bp, Homo sapien
attctgggtacgttaagccgttgtg

SEQ ID NO: 3633047 - DNA, 25 bp, Homo sapien
taacgaattgcagtggccgcaggct

SEQ ID NO: 3633048 - DNA, 25 bp, Homo sapien
gaactcatattctaccatggcctga

SEQ ID NO: 3633049 - DNA, 25 bp, Homo sapien
cagatgccggcactgtggacttcca

SEQ ID NO: 3633050 - DNA, 25 bp, Homo sapien
tcagcataacttgggtcacagaaac

SEQ ID NO: 3633051 - DNA, 25 bp, Homo sapien
cagaaaagtaggaaaactgtgagcc

SEQ ID NO: 3633052 - DNA, 25 bp, Homo sapien
ctgacaggacagaaaagtaggaaaa

SEQ ID NO: 3633053 - DNA, 25 bp, Homo sapien
caggacagaaaagtaggaaaactgt

SEQ ID NO: 3633054 - DNA, 25 bp, Homo sapien
gacagaaaagtaggaaaactgtgag

SEQ ID NO: 3633055 - DNA, 25 bp, Homo sapien
caaacgtgttttccaagagcatctc

SEQ ID NO: 3633056 - DNA, 25 bp, Homo sapien
aaaatcaacctctccatcaaacgtg

SEQ ID NO: 3633057 - DNA, 25 bp, Homo sapien
tcaacctctccatcaaacgtgtttt

SEQ ID NO: 3633058 - DNA, 25 bp, Homo sapien
tctccatcaaacgtgttttccaaga

SEQ ID NO: 3633059 - DNA, 25 bp, Homo sapien
tcacatatctgccagaggacggctc

SEQ ID NO: 3633060 - DNA, 25 bp, Homo sapien
ccatgggcttctgatgcaggcgctg

SEQ ID NO: 3633061 - DNA, 25 bp, Homo sapien
tgtgtgcctgtaaagccgtctccgg

SEQ ID NO: 3633062 - DNA, 25 bp, Homo sapien
gaagtagcctctcgctcctcatagg

SEQ ID NO: 3633063 - DNA, 25 bp, Homo sapien
agcctgtgagccacggatcaggaga

SEQ ID NO: 3633064 - DNA, 25 bp, Homo sapien
gccacggatcaggagaaaacaagac

SEQ ID NO: 3633065 - DNA, 25 bp, Homo sapien
tgtgagccacggatcaggagaaaac

SEQ ID NO: 3633066 - DNA, 25 bp, Homo sapien
aaaacaagacatgtgataggcaaac

SEQ ID NO: 3633067 - DNA, 25 bp, Homo sapien
gctgctctccaaaccacgtgtgtgc

SEQ ID NO: 3633068 - DNA, 25 bp, Homo sapien
caaggcttgggaacattttggatcc

SEQ ID NO: 3633069 - DNA, 25 bp, Homo sapien
aaaatagggccgttggcatgcgctc

SEQ ID NO: 3633070 - DNA, 25 bp, Homo sapien
tgctcagcgttgtacacagttcagt

SEQ ID NO: 3633071 - DNA, 25 bp, Homo sapien
ttcggcgctgctcaagcaaaaagtg

SEQ ID NO: 3633072 - DNA, 25 bp, Homo sapien
cgctgctcaagcaaaaagtgaagga

SEQ ID NO: 3633073 - DNA, 25 bp, Homo sapien
ctttcggcgctgctcaagcaaaaag

SEQ ID NO: 3633074 - DNA, 25 bp, Homo sapien
ggcgctgctcaagcaaaaagtgaag

SEQ ID NO: 3633075 - DNA, 25 bp, Homo sapien
gtacttggcgccctgtggttttgcg

SEQ ID NO: 3633076 - DNA, 25 bp, Homo sapien
tagttttctcagtggcccacagtac

SEQ ID NO: 3633077 - DNA, 25 bp, Homo sapien
ttagttttctcagtggcccacagta

SEQ ID NO: 3633078 - DNA, 25 bp, Homo sapien
tggttttgcggcagcaggtccacct

SEQ ID NO: 3633079 - DNA, 25 bp, Homo sapien
taggaaaatcgggtattgcattttc

SEQ ID NO: 3633080 - DNA, 25 bp, Homo sapien
ggaaaatcgggtattgcattttcat

SEQ ID NO: 3633081 - DNA, 25 bp, Homo sapien
gcatttaggaaaatcgggtattgca

SEQ ID NO: 3633082 - DNA, 25 bp, Homo sapien
aatggccttcacattaggaagtgca

SEQ ID NO: 3633083 - DNA, 25 bp, Homo sapien
tagattgcttacagctctgcgtttg

SEQ ID NO: 3633084 - DNA, 25 bp, Homo sapien
atggtttgaacagccggccgcctgt

SEQ ID NO: 3633085 - DNA, 25 bp, Homo sapien
agagtaggtaggtcacagtctgttt

SEQ ID NO: 3633086 - DNA, 25 bp, Homo sapien
tacagaaaatggacgagaggtgcag

SEQ ID NO: 3633087 - DNA, 25 bp, Homo sapien
aagtcatctagacacagattgttgt

SEQ ID NO: 3633088 - DNA, 25 bp, Homo sapien
gtcatctagacacagattgttgtta

SEQ ID NO: 3633089 - DNA, 25 bp, Homo sapien
catctagacacagattgttgttatt

SEQ ID NO: 3633090 - DNA, 25 bp, Homo sapien
agtcatctagacacagattgttgtt

SEQ ID NO: 3633091 - DNA, 25 bp, Homo sapien
tgcactgaatactggcatgccccag

SEQ ID NO: 3633092 - DNA, 25 bp, Homo sapien
tcagcgatgctgcactgaatactgg

SEQ ID NO: 3633093 - DNA, 25 bp, Homo sapien
acttcaatcgatttattgtgttgtg

SEQ ID NO: 3633094 - DNA, 25 bp, Homo sapien
aaatccaaccctctggatacttcaa

SEQ ID NO: 3633095 - DNA, 25 bp, Homo sapien
gttgtttccaaaacagcttgtttca

SEQ ID NO: 3633096 - DNA, 25 bp, Homo sapien
tccaaaacagcttgtttcaggaaag

SEQ ID NO: 3633097 - DNA, 25 bp, Homo sapien
tttccaaaacagcttgtttcaggaa

SEQ ID NO: 3633098 - DNA, 25 bp, Homo sapien
tgtttccaaaacagcttgtttcagg

SEQ ID NO: 3633099 - DNA, 25 bp, Homo sapien
tgcagtggccgggtggggagaatta

SEQ ID NO: 3633100 - DNA, 25 bp, Homo sapien
ctgcagtggccgggtggggagaatt

SEQ ID NO: 3633101 - DNA, 25 bp, Homo sapien
caggaaaccagccagtccggcagtt

SEQ ID NO: 3633102 - DNA, 25 bp, Homo sapien
cagccagtccggcagttgacaggca

SEQ ID NO: 3633103 - DNA, 25 bp, Homo sapien
ggaaaccagccagtccggcagttga

SEQ ID NO: 3633104 - DNA, 25 bp, Homo sapien
aaaccagccagtccggcagttgaca

SEQ ID NO: 3633105 - DNA, 25 bp, Homo sapien
agaactcagtagtagacagcaaagt

SEQ ID NO: 3633106 - DNA, 25 bp, Homo sapien
ggagaactcagtagtagacagcaaa

SEQ ID NO: 3633107 - DNA, 25 bp, Homo sapien
gagaactcagtagtagacagcaaag

SEQ ID NO: 3633108 - DNA, 25 bp, Homo sapien
taaagataaggcctgacaaagatgc

SEQ ID NO: 3633109 - DNA, 25 bp, Homo sapien
tcagggtaatccgaagatggtcttc

SEQ ID NO: 3633110 - DNA, 25 bp, Homo sapien
tggtttcaattctcctggaataggg

SEQ ID NO: 3633111 - DNA, 25 bp, Homo sapien
gggcatttctcactaactgagctct

SEQ ID NO: 3633112 - DNA, 25 bp, Homo sapien
caggctgggtcttggaccgaccgtc

SEQ ID NO: 3633113 - DNA, 25 bp, Homo sapien
tgacattatcccacagtgatcgttc

SEQ ID NO: 3633114 - DNA, 25 bp, Homo sapien
gccacaggctgggtcttggaccgac

SEQ ID NO: 3633115 - DNA, 25 bp, Homo sapien
cagtgatcgttcaatgcagagcagc

SEQ ID NO: 3633116 - DNA, 25 bp, Homo sapien
cctccactagcagccttattaaggg

SEQ ID NO: 3633117 - DNA, 25 bp, Homo sapien
tcacatcctccactagcagccttat

SEQ ID NO: 3633118 - DNA, 25 bp, Homo sapien
acatcctccactagcagccttatta

SEQ ID NO: 3633119 - DNA, 25 bp, Homo sapien
atcctccactagcagccttattaag

SEQ ID NO: 3633120 - DNA, 25 bp, Homo sapien
tgccacccatcagtattggccaaat

SEQ ID NO: 3633121 - DNA, 25 bp, Homo sapien
tccaatttgggaggtcacttaagct

SEQ ID NO: 3633122 - DNA, 25 bp, Homo sapien
gcattaggctctaagtcttgtgacc

SEQ ID NO: 3633123 - DNA, 25 bp, Homo sapien
tccacaggatgaggcacctaactga

SEQ ID NO: 3633124 - DNA, 25 bp, Homo sapien
aaaatctgagtgcactggcaaagag

SEQ ID NO: 3633125 - DNA, 25 bp, Homo sapien
caaaatctgagtgcactggcaaaga

SEQ ID NO: 3633126 - DNA, 25 bp, Homo sapien
tacaaaatctgagtgcactggcaaa

SEQ ID NO: 3633127 - DNA, 25 bp, Homo sapien
gctacaaaatctgagtgcactggca

SEQ ID NO: 3633128 - DNA, 25 bp, Homo sapien
ggtctccctgatttatgcaatttca

SEQ ID NO: 3633129 - DNA, 25 bp, Homo sapien
tgtttcaggtctccctgatttatgc

SEQ ID NO: 3633130 - DNA, 25 bp, Homo sapien
cactgtgcttcagaagagctggtgc

SEQ ID NO: 3633131 - DNA, 25 bp, Homo sapien
tctgctctctgtgttacactgtgct

SEQ ID NO: 3633132 - DNA, 25 bp, Homo sapien
cttctctcccctgcgtttgtgtttc

SEQ ID NO: 3633133 - DNA, 25 bp, Homo sapien
ccttctctcccctgcgtttgtgttt

SEQ ID NO: 3633134 - DNA, 25 bp, Homo sapien
tcgacactaatagcttttctagaca

SEQ ID NO: 3633135 - DNA, 25 bp, Homo sapien
ggtttgtaaggtcaacattctcgac

SEQ ID NO: 3633136 - DNA, 25 bp, Homo sapien
tgcagcttgggtgaaatggccccag

SEQ ID NO: 3633137 - DNA, 25 bp, Homo sapien
aactatgatcactttaaataactgg

SEQ ID NO: 3633138 - DNA, 25 bp, Homo sapien
gtttgcaaacaggaagtgtaggtgc

SEQ ID NO: 3633139 - DNA, 25 bp, Homo sapien
ttagaggggcttcactagctgtaag

SEQ ID NO: 3633140 - DNA, 25 bp, Homo sapien
tgacaatttcattgccaacccattt

SEQ ID NO: 3633141 - DNA, 25 bp, Homo sapien
gggcttcactagctgtaagtcaaga

SEQ ID NO: 3633142 - DNA, 25 bp, Homo sapien
agaatttggactagaggcttcagga

SEQ ID NO: 3633143 - DNA, 25 bp, Homo sapien
atttggactagaggcttcaggatgc

SEQ ID NO: 3633144 - DNA, 25 bp, Homo sapien
taagctgaactccagaatttggact

SEQ ID NO: 3633145 - DNA, 25 bp, Homo sapien
cagaatttggactagaggcttcagg

SEQ ID NO: 3633146 - DNA, 25 bp, Homo sapien
gggtgttttcgtcagctcttgttgc

SEQ ID NO: 3633147 - DNA, 25 bp, Homo sapien
ttttctgaagcgtaaaataatctgg

SEQ ID NO: 3633148 - DNA, 25 bp, Homo sapien
ataatctggtatgggtgttttcgtc

SEQ ID NO: 3633149 - DNA, 25 bp, Homo sapien
gaagcgtaaaataatctggtatggg

SEQ ID NO: 3633150 - DNA, 25 bp, Homo sapien
gaatggtgtttcatcgcaacgttta

SEQ ID NO: 3633151 - DNA, 25 bp, Homo sapien
aatcatatagaacatactcttttgt

SEQ ID NO: 3633152 - DNA, 25 bp, Homo sapien
tgacttctttcaattggctttatgc

SEQ ID NO: 3633153 - DNA, 25 bp, Homo sapien
agttttgcatgttttagaacttcac

SEQ ID NO: 3633154 - DNA, 25 bp, Homo sapien
ctgcagacacagagatgacggggtc

SEQ ID NO: 3633155 - DNA, 25 bp, Homo sapien
gacacagagatgacggggtcgccat

SEQ ID NO: 3633156 - DNA, 25 bp, Homo sapien
cagacacagagatgacggggtcgcc

SEQ ID NO: 3633157 - DNA, 25 bp, Homo sapien
ctctgcagacacagagatgacgggg

SEQ ID NO: 3633158 - DNA, 25 bp, Homo sapien
ttgatcttgtgatgcaaggcaggtg

SEQ ID NO: 3633159 - DNA, 25 bp, Homo sapien
cttgatcttgtgatgcaaggcaggt

SEQ ID NO: 3633160 - DNA, 25 bp, Homo sapien
gatcttgtgatgcaaggcaggtggg

SEQ ID NO: 3633161 - DNA, 25 bp, Homo sapien
tgatcttgtgatgcaaggcaggtgg

SEQ ID NO: 3633162 - DNA, 25 bp, Homo sapien
cagtcattggctttagctggagcca

SEQ ID NO: 3633163 - DNA, 25 bp, Homo sapien
tcattggctttagctggagccagca

SEQ ID NO: 3633164 - DNA, 25 bp, Homo sapien
cattggctttagctggagccagcat

SEQ ID NO: 3633165 - DNA, 25 bp, Homo sapien
ctttccagtcattggctttagctgg

SEQ ID NO: 3633166 - DNA, 25 bp, Homo sapien
tatggtcaggataacggctctcagg

SEQ ID NO: 3633167 - DNA, 25 bp, Homo sapien
tcacttcagccaaagatgggacatt

SEQ ID NO: 3633168 - DNA, 25 bp, Homo sapien
taactgccaagtctctccgggaagc

SEQ ID NO: 3633169 - DNA, 25 bp, Homo sapien
ggctctcaggatgcgtataactgcc

SEQ ID NO: 3633170 - DNA, 25 bp, Homo sapien
gctctctcgttacgtttctgtgtgg

SEQ ID NO: 3633171 - DNA, 25 bp, Homo sapien
caggatgtattagtgactgcacaga

SEQ ID NO: 3633172 - DNA, 25 bp, Homo sapien
taaggttccaccacagattgccctg

SEQ ID NO: 3633173 - DNA, 25 bp, Homo sapien
acagattctgccttggcccacaaag

SEQ ID NO: 3633174 - DNA, 25 bp, Homo sapien
tggaagccactttactttgcagcct

SEQ ID NO: 3633175 - DNA, 25 bp, Homo sapien
tatgtatgacgcgtcaccaagtgtc

SEQ ID NO: 3633176 - DNA, 25 bp, Homo sapien
gaagcagagttagagtattgtagcc

SEQ ID NO: 3633177 - DNA, 25 bp, Homo sapien
gaccctgttagtgtgcctatggaga

SEQ ID NO: 3633178 - DNA, 25 bp, Homo sapien
cagagggcagctgcgaggttgcttc

SEQ ID NO: 3633179 - DNA, 25 bp, Homo sapien
tccagagggcagctgcgaggttgct

SEQ ID NO: 3633180 - DNA, 25 bp, Homo sapien
gagggcagctgcgaggttgcttcca

SEQ ID NO: 3633181 - DNA, 25 bp, Homo sapien
gggcagctgcgaggttgcttccaaa

SEQ ID NO: 3633182 - DNA, 25 bp, Homo sapien
caaccagtgaagctggcattccagg

SEQ ID NO: 3633183 - DNA, 25 bp, Homo sapien
ggcattccaggagaatcctctgatt

SEQ ID NO: 3633184 - DNA, 25 bp, Homo sapien
cttttggcaaaactgagtcaagaac

SEQ ID NO: 3633185 - DNA, 25 bp, Homo sapien
cctgggctcaactaaatgtggattc

SEQ ID NO: 3633186 - DNA, 25 bp, Homo sapien
gaatcctggaatgtggccctaggaa

SEQ ID NO: 3633187 - DNA, 25 bp, Homo sapien
cactggagtgttctggcatggaagt

SEQ ID NO: 3633188 - DNA, 25 bp, Homo sapien
catggaagtagtgtctcttgttgac

SEQ ID NO: 3633189 - DNA, 25 bp, Homo sapien
gttgactttaggaatcctggaatgt

SEQ ID NO: 3633190 - DNA, 25 bp, Homo sapien
caggagatcacagggctcctcgttc

SEQ ID NO: 3633191 - DNA, 25 bp, Homo sapien
tcttgaacctcaggagatcacaggg

SEQ ID NO: 3633192 - DNA, 25 bp, Homo sapien
gttcaccctgacatcttcacggcaa

SEQ ID NO: 3633193 - DNA, 25 bp, Homo sapien
cggcaacagtgctcagtttggacac

SEQ ID NO: 3633194 - DNA, 25 bp, Homo sapien
tcaacccggacttttcctgcagaat

SEQ ID NO: 3633195 - DNA, 25 bp, Homo sapien
tcatctggcctagtttcaagaacaa

SEQ ID NO: 3633196 - DNA, 25 bp, Homo sapien
taagttccatatacactgctgtgag

SEQ ID NO: 3633197 - DNA, 25 bp, Homo sapien
tattgaacaagccaactcaacccgg

SEQ ID NO: 3633198 - DNA, 25 bp, Homo sapien
tcctctggcccaaaagcagcgagag

SEQ ID NO: 3633199 - DNA, 25 bp, Homo sapien
tgagaggcactcagagggacgactc

SEQ ID NO: 3633200 - DNA, 25 bp, Homo sapien
cccaaggatgggtgagtgactgctc

SEQ ID NO: 3633201 - DNA, 25 bp, Homo sapien
tgagggtaaagcctgcaatgcctct

SEQ ID NO: 3633202 - DNA, 25 bp, Homo sapien
gggtgcatatgcgactgagggtagg

SEQ ID NO: 3633203 - DNA, 25 bp, Homo sapien
tagggcagaggtgctaggttgatgg

SEQ ID NO: 3633204 - DNA, 25 bp, Homo sapien
cagaggtgctaggttgatgggcaga

SEQ ID NO: 3633205 - DNA, 25 bp, Homo sapien
catatgcgactgagggtagggcaga

SEQ ID NO: 3633206 - DNA, 25 bp, Homo sapien
caatggctggaagcatgaacgcagg

SEQ ID NO: 3633207 - DNA, 25 bp, Homo sapien
tgacggctgacactccgacaatggc

SEQ ID NO: 3633208 - DNA, 25 bp, Homo sapien
tgaacgcagggcttcctgactggct

SEQ ID NO: 3633209 - DNA, 25 bp, Homo sapien
gctggcggcatagacgacggaattt

SEQ ID NO: 3633210 - DNA, 25 bp, Homo sapien
gccgccccgccgccccgcacgcgac

SEQ ID NO: 3633211 - DNA, 25 bp, Homo sapien
cgccccgccgccccgcacgcgacta

SEQ ID NO: 3633212 - DNA, 25 bp, Homo sapien
gccccgccgccccgcacgcgactac

SEQ ID NO: 3633213 - DNA, 25 bp, Homo sapien
ccgccgccccgccgccccgcacgcg

SEQ ID NO: 3633214 - DNA, 25 bp, Homo sapien
ttccaggagctgaggcccacggctg

SEQ ID NO: 3633215 - DNA, 25 bp, Homo sapien
ggcccacggctgggatatctcccat

SEQ ID NO: 3633216 - DNA, 25 bp, Homo sapien
ctgaggcccacggctgggatatctc

SEQ ID NO: 3633217 - DNA, 25 bp, Homo sapien
gaggcccacggctgggatatctccc

SEQ ID NO: 3633218 - DNA, 25 bp, Homo sapien
ggcatccccgctccagttctgagta

SEQ ID NO: 3633219 - DNA, 25 bp, Homo sapien
tctgaggcttggctgccgaggttcc

SEQ ID NO: 3633220 - DNA, 25 bp, Homo sapien
gagtaacttcaagggctccgcctct

SEQ ID NO: 3633221 - DNA, 25 bp, Homo sapien
gcagcaccgactccgttttaggaaa

SEQ ID NO: 3633222 - DNA, 25 bp, Homo sapien
ctcccgtgtgggaggaatacacttg

SEQ ID NO: 3633223 - DNA, 25 bp, Homo sapien
gaatacacttgctgctgtacaccac

SEQ ID NO: 3633224 - DNA, 25 bp, Homo sapien
tgtgggaggaatacacttgctgctg

SEQ ID NO: 3633225 - DNA, 25 bp, Homo sapien
ggaggaatacacttgctgctgtaca

SEQ ID NO: 3633226 - DNA, 25 bp, Homo sapien
ggtaccctgcgtcaatggcctcttt

SEQ ID NO: 3633227 - DNA, 25 bp, Homo sapien
taagcacagtcgaagtgccggtacc

SEQ ID NO: 3633228 - DNA, 25 bp, Homo sapien
tagtggcaatgaacagatcctcccg

SEQ ID NO: 3633229 - DNA, 25 bp, Homo sapien
gatcttgcaacggatccctgctcca

SEQ ID NO: 3633230 - DNA, 25 bp, Homo sapien
gaggtagaggtccaaatagttcagc

SEQ ID NO: 3633231 - DNA, 25 bp, Homo sapien
ttctgcatgctgtttccaccaagga

SEQ ID NO: 3633232 - DNA, 25 bp, Homo sapien
gacttcttatggcaggtgcaccaca

SEQ ID NO: 3633233 - DNA, 25 bp, Homo sapien
cccatgggccagtgtatgaggtaga

SEQ ID NO: 3633234 - DNA, 25 bp, Homo sapien
ctggccaggacccgtgtgaggcaga

SEQ ID NO: 3633235 - DNA, 25 bp, Homo sapien
ccaggacccgtgtgaggcagaagca

SEQ ID NO: 3633236 - DNA, 25 bp, Homo sapien
aggacccgtgtgaggcagaagcagg

SEQ ID NO: 3633237 - DNA, 25 bp, Homo sapien
ggccaggacccgtgtgaggcagaag

SEQ ID NO: 3633238 - DNA, 25 bp, Homo sapien
ggcttctgtatttcacaggtgtcaa

SEQ ID NO: 3633239 - DNA, 25 bp, Homo sapien
cagcagtcacccattccattgtagg

SEQ ID NO: 3633240 - DNA, 25 bp, Homo sapien
tggtatgtagaagactgctgagcag

SEQ ID NO: 3633241 - DNA, 25 bp, Homo sapien
taggaagaacatccctgcaagggct

SEQ ID NO: 3633242 - DNA, 25 bp, Homo sapien
cagaaggaaagttcactgcagctca

SEQ ID NO: 3633243 - DNA, 25 bp, Homo sapien
tcctgcactcgaggatgtgagaggc

SEQ ID NO: 3633244 - DNA, 25 bp, Homo sapien
gaaagttcactgcagctcatgatcc

SEQ ID NO: 3633245 - DNA, 25 bp, Homo sapien
aaccatgttgctctcgtccagaggc

SEQ ID NO: 3633246 - DNA, 25 bp, Homo sapien
tcccacgtgtccaggaagtccgtgt

SEQ ID NO: 3633247 - DNA, 25 bp, Homo sapien
cccacgtgtccaggaagtccgtgtc

SEQ ID NO: 3633248 - DNA, 25 bp, Homo sapien
ctcccacgtgtccaggaagtccgtg

SEQ ID NO: 3633249 - DNA, 25 bp, Homo sapien
ccacgtgtccaggaagtccgtgtca

SEQ ID NO: 3633250 - DNA, 25 bp, Homo sapien
acaaccttgatgtctttgaacacaa

SEQ ID NO: 3633251 - DNA, 25 bp, Homo sapien
ctctgagttcttcgggtattgattc

SEQ ID NO: 3633252 - DNA, 25 bp, Homo sapien
tctgagttcttcgggtattgattcc

SEQ ID NO: 3633253 - DNA, 25 bp, Homo sapien
tagacaaccttgatgtctttgaaca

SEQ ID NO: 3633254 - DNA, 25 bp, Homo sapien
ggtctataatgagctacccctcaaa

SEQ ID NO: 3633255 - DNA, 25 bp, Homo sapien
tacccctcaaatgtgtcaagagaac

SEQ ID NO: 3633256 - DNA, 25 bp, Homo sapien
aaaaaagtgaggtctataatgagct

SEQ ID NO: 3633257 - DNA, 25 bp, Homo sapien
aagtgaggtctataatgagctaccc

SEQ ID NO: 3633258 - DNA, 25 bp, Homo sapien
ttcaccagcccggtgatcaccaggt

SEQ ID NO: 3633259 - DNA, 25 bp, Homo sapien
caagctgttcatggttgaagtttga

SEQ ID NO: 3633260 - DNA, 25 bp, Homo sapien
gcttattcaaaagcctctcaagctg

SEQ ID NO: 3633261 - DNA, 25 bp, Homo sapien
tagtggcttgaacctcaacccaggc

SEQ ID NO: 3633262 - DNA, 25 bp, Homo sapien
ccaccaagaggacggtaagcagtca

SEQ ID NO: 3633263 - DNA, 25 bp, Homo sapien
caagaggacggtaagcagtcacgga

SEQ ID NO: 3633264 - DNA, 25 bp, Homo sapien
gaggacggtaagcagtcacggacac

SEQ ID NO: 3633265 - DNA, 25 bp, Homo sapien
gacggtaagcagtcacggacacatc

SEQ ID NO: 3633266 - DNA, 25 bp, Homo sapien
tcacagggttgtctatcaggtcaac

SEQ ID NO: 3633267 - DNA, 25 bp, Homo sapien
cagggttgtctatcaggtcaacccc

SEQ ID NO: 3633268 - DNA, 25 bp, Homo sapien
ctcttgatcacagggttgtctatca

SEQ ID NO: 3633269 - DNA, 25 bp, Homo sapien
gatcacagggttgtctatcaggtca

SEQ ID NO: 3633270 - DNA, 25 bp, Homo sapien
gatccggggatcactatcacattcc

SEQ ID NO: 3633271 - DNA, 25 bp, Homo sapien
ctctggatttgaaatcggatcaaaa

SEQ ID NO: 3633272 - DNA, 25 bp, Homo sapien
tccggggatcactatcacattcctc

SEQ ID NO: 3633273 - DNA, 25 bp, Homo sapien
tctggatttgaaatcggatcaaaat

SEQ ID NO: 3633274 - DNA, 25 bp, Homo sapien
acaaccaaaccgagccctcaggatg

SEQ ID NO: 3633275 - DNA, 25 bp, Homo sapien
ccccaatggcgatgcttgcttggca

SEQ ID NO: 3633276 - DNA, 25 bp, Homo sapien
gatgggtcaataaaccccaatggcg

SEQ ID NO: 3633277 - DNA, 25 bp, Homo sapien
gagggagcatactcctgggcacatg

SEQ ID NO: 3633278 - DNA, 25 bp, Homo sapien
ttaaaagttatagcggctgggcgcg

SEQ ID NO: 3633279 - DNA, 25 bp, Homo sapien
taggaagccttggacagatggaaat

SEQ ID NO: 3633280 - DNA, 25 bp, Homo sapien
ttggccttggctacatttaggaagc

SEQ ID NO: 3633281 - DNA, 25 bp, Homo sapien
atcatgtgactggtgttggcttggc

SEQ ID NO: 3633282 - DNA, 25 bp, Homo sapien
agcacatgttacctacatagcacag

SEQ ID NO: 3633283 - DNA, 25 bp, Homo sapien
tgtagaaaacttagtttaattcaca

SEQ ID NO: 3633284 - DNA, 25 bp, Homo sapien
gcacatgttacctacatagcacagt

SEQ ID NO: 3633285 - DNA, 25 bp, Homo sapien
acatgttacctacatagcacagtgc

SEQ ID NO: 3633286 - DNA, 25 bp, Homo sapien
taggctgaggatgttatccatatcg

SEQ ID NO: 3633287 - DNA, 25 bp, Homo sapien
gaacatggccagtcggagattcctg

SEQ ID NO: 3633288 - DNA, 25 bp, Homo sapien
tcgtgctgtgttaattcaaaatcaa

SEQ ID NO: 3633289 - DNA, 25 bp, Homo sapien
tcggagattcctgtttaggctgagg

SEQ ID NO: 3633290 - DNA, 25 bp, Homo sapien
cagacaccaatcattcaatctgtat

SEQ ID NO: 3633291 - DNA, 25 bp, Homo sapien
ttcagacaccaatcattcaatctgt

SEQ ID NO: 3633292 - DNA, 25 bp, Homo sapien
gacaccaatcattcaatctgtatat

SEQ ID NO: 3633293 - DNA, 25 bp, Homo sapien
ctattcagacaccaatcattcaatc

SEQ ID NO: 3633294 - DNA, 25 bp, Homo sapien
aatctaaaatgtgtatgataaatac

SEQ ID NO: 3633295 - DNA, 25 bp, Homo sapien
taatctaaaatgtgtatgataaata

SEQ ID NO: 3633296 - DNA, 25 bp, Homo sapien
tgtggaaaggatagtctttgtgatt

SEQ ID NO: 3633297 - DNA, 25 bp, Homo sapien
ctatgtggaaaggatagtctttgtg

SEQ ID NO: 3633298 - DNA, 25 bp, Homo sapien
gaaaggatagtctttgtgattttta

SEQ ID NO: 3633299 - DNA, 25 bp, Homo sapien
aaggatagtctttgtgatttttagt

SEQ ID NO: 3633300 - DNA, 25 bp, Homo sapien
ctgccctggcgctgtgatgacagag

SEQ ID NO: 3633301 - DNA, 25 bp, Homo sapien
gccaatagtgtctgtgcatctgggc

SEQ ID NO: 3633302 - DNA, 25 bp, Homo sapien
cacagctgccctggcgctgtgatga

SEQ ID NO: 3633303 - DNA, 25 bp, Homo sapien
gatgacagaggagggtcaacattgc

SEQ ID NO: 3633304 - DNA, 25 bp, Homo sapien
gaaacagtgtcccagacttatccca

SEQ ID NO: 3633305 - DNA, 25 bp, Homo sapien
gaaggcaaatttcactgatgactca

SEQ ID NO: 3633306 - DNA, 25 bp, Homo sapien
ctctgtagatggcttaaataactcc

SEQ ID NO: 3633307 - DNA, 25 bp, Homo sapien
tgttcagagtagaggccacacaggc

SEQ ID NO: 3633308 - DNA, 25 bp, Homo sapien
tagggcgaggctcccatgaagctct

SEQ ID NO: 3633309 - DNA, 25 bp, Homo sapien
tctgattaaactctccctggaaatt

SEQ ID NO: 3633310 - DNA, 25 bp, Homo sapien
gaaatttggtcaaaccatgacaccc

SEQ ID NO: 3633311 - DNA, 25 bp, Homo sapien
tcttttcgttttggtgacacccgca

SEQ ID NO: 3633312 - DNA, 25 bp, Homo sapien
tctgaagccagatttcccgagtcaa

SEQ ID NO: 3633313 - DNA, 25 bp, Homo sapien
taggtctggatagttgatttgcccc

SEQ ID NO: 3633314 - DNA, 25 bp, Homo sapien
cagaggcgatacgtgacagaagtgc

SEQ ID NO: 3633315 - DNA, 25 bp, Homo sapien
tccaaccgggagtgacaatgaccac

SEQ ID NO: 3633316 - DNA, 25 bp, Homo sapien
atttcccaggtgaagtaatgctggt

SEQ ID NO: 3633317 - DNA, 25 bp, Homo sapien
aatagagttttgcaggtttaatgag

SEQ ID NO: 3633318 - DNA, 25 bp, Homo sapien
tgctggtcaccattggaatagagtt

SEQ ID NO: 3633319 - DNA, 25 bp, Homo sapien
agtaatgctggtcaccattggaata

SEQ ID NO: 3633320 - DNA, 25 bp, Homo sapien
tccagccttggcagcagagcatgac

SEQ ID NO: 3633321 - DNA, 25 bp, Homo sapien
tgagttgagatagtgccactatact

SEQ ID NO: 3633322 - DNA, 25 bp, Homo sapien
cagccttggcagcagagcatgactc

SEQ ID NO: 3633323 - DNA, 25 bp, Homo sapien
gccttggcagcagagcatgactctg

SEQ ID NO: 3633324 - DNA, 25 bp, Homo sapien
catgaaagctctcgggaagatggtt

SEQ ID NO: 3633325 - DNA, 25 bp, Homo sapien
tatagggccatgctccccatgaaag

SEQ ID NO: 3633326 - DNA, 25 bp, Homo sapien
ttggtggctcccagtagcagttggc

SEQ ID NO: 3633327 - DNA, 25 bp, Homo sapien
gcctttgactagcttttggtggctc

SEQ ID NO: 3633328 - DNA, 25 bp, Homo sapien
tcataagttacaaagctctgcacag

SEQ ID NO: 3633329 - DNA, 25 bp, Homo sapien
gcaaaaacggacaaacggaatcata

SEQ ID NO: 3633330 - DNA, 25 bp, Homo sapien
actgtagccttgtacctgacctcaa

SEQ ID NO: 3633331 - DNA, 25 bp, Homo sapien
gactaataccctataagcataggca

SEQ ID NO: 3633332 - DNA, 25 bp, Homo sapien
gaattaaaactttcagtgttcatga

SEQ ID NO: 3633333 - DNA, 25 bp, Homo sapien
ccagctgaaattgctgaacttggat

SEQ ID NO: 3633334 - DNA, 25 bp, Homo sapien
ttgaaatatccccaaaaagaccagc

SEQ ID NO: 3633335 - DNA, 25 bp, Homo sapien
ttaattgatattgtttctcagcagg

SEQ ID NO: 3633336 - DNA, 25 bp, Homo sapien
tattattagatcagagtttgtcaag

SEQ ID NO: 3633337 - DNA, 25 bp, Homo sapien
tgtcaagataatctagcaggtagag

SEQ ID NO: 3633338 - DNA, 25 bp, Homo sapien
tgatcttcacttttacaatagtgat

SEQ ID NO: 3633339 - DNA, 25 bp, Homo sapien
cagactggctgagcagctatattat

SEQ ID NO: 3633340 - DNA, 25 bp, Homo sapien
taacacagccttttgacagttggtt

SEQ ID NO: 3633341 - DNA, 25 bp, Homo sapien
tcacttaacacagccttttgacagt

SEQ ID NO: 3633342 - DNA, 25 bp, Homo sapien
agaatcacttaacacagccttttga

SEQ ID NO: 3633343 - DNA, 25 bp, Homo sapien
gccttttgacagttggttagagtag

SEQ ID NO: 3633344 - DNA, 25 bp, Homo sapien
ccctgtacacgccaccaaaatgatg

SEQ ID NO: 3633345 - DNA, 25 bp, Homo sapien
tgtccctgtacacgccaccaaaatg

SEQ ID NO: 3633346 - DNA, 25 bp, Homo sapien
ctcatgtccctgtacacgccaccaa

SEQ ID NO: 3633347 - DNA, 25 bp, Homo sapien
ttcctcatgtccctgtacacgccac

SEQ ID NO: 3633348 - DNA, 25 bp, Homo sapien
ggtcccaagacaatttgaagctcct

SEQ ID NO: 3633349 - DNA, 25 bp, Homo sapien
catgatttggctaaattcctctcct

SEQ ID NO: 3633350 - DNA, 25 bp, Homo sapien
ctgcatgatttggctaaattcctct

SEQ ID NO: 3633351 - DNA, 25 bp, Homo sapien
ttgaggtcccaagacaatttgaagc

SEQ ID NO: 3633352 - DNA, 25 bp, Homo sapien
ggagcttgaaggtccatctctctag

SEQ ID NO: 3633353 - DNA, 25 bp, Homo sapien
gaaagtgctatccaggtaggtccaa

SEQ ID NO: 3633354 - DNA, 25 bp, Homo sapien
tgataactgtcagggcagagtggct

SEQ ID NO: 3633355 - DNA, 25 bp, Homo sapien
tgtgttctactgatgggcagcctag

SEQ ID NO: 3633356 - DNA, 25 bp, Homo sapien
tctcatcttccacgctggtcagagc

SEQ ID NO: 3633357 - DNA, 25 bp, Homo sapien
tttcacagtgtaagttcaggctgct

SEQ ID NO: 3633358 - DNA, 25 bp, Homo sapien
ctcagctcaactcttggttaaacat

SEQ ID NO: 3633359 - DNA, 25 bp, Homo sapien
gtaagttcaggctgctctcatcttc

SEQ ID NO: 3633360 - DNA, 25 bp, Homo sapien
tactttagtgccaggtggttggaaa

SEQ ID NO: 3633361 - DNA, 25 bp, Homo sapien
tggttggaaagtggcccatgaaata

SEQ ID NO: 3633362 - DNA, 25 bp, Homo sapien
agtggcccatgaaatagagctgctc

SEQ ID NO: 3633363 - DNA, 25 bp, Homo sapien
ctgttctgagttgcaccggtctttt

SEQ ID NO: 3633364 - DNA, 25 bp, Homo sapien
taggtcaccggaagagtacaggact

SEQ ID NO: 3633365 - DNA, 25 bp, Homo sapien
cacaagtggtttcaactgtatgcct

SEQ ID NO: 3633366 - DNA, 25 bp, Homo sapien
tattcataggtataggagggtccag

SEQ ID NO: 3633367 - DNA, 25 bp, Homo sapien
tacatggcaggatgttttgactggc

SEQ ID NO: 3633368 - DNA, 25 bp, Homo sapien
gagaaagaaggtggaggtgctacat

SEQ ID NO: 3633369 - DNA, 25 bp, Homo sapien
agagagagaaagaaggtggaggtgc

SEQ ID NO: 3633370 - DNA, 25 bp, Homo sapien
gagagagaaagaaggtggaggtgct

SEQ ID NO: 3633371 - DNA, 25 bp, Homo sapien
gagagaaagaaggtggaggtgctac

SEQ ID NO: 3633372 - DNA, 25 bp, Homo sapien
agcaagcatgtcttcacttggctgg

SEQ ID NO: 3633373 - DNA, 25 bp, Homo sapien
catgtcttcacttggctggcaggag

SEQ ID NO: 3633374 - DNA, 25 bp, Homo sapien
tgtcttcacttggctggcaggagag

SEQ ID NO: 3633375 - DNA, 25 bp, Homo sapien
caagcatgtcttcacttggctggca

SEQ ID NO: 3633376 - DNA, 25 bp, Homo sapien
tggccctaagggctcatctggttgt

SEQ ID NO: 3633377 - DNA, 25 bp, Homo sapien
gccctaagggctcatctggttgtag

SEQ ID NO: 3633378 - DNA, 25 bp, Homo sapien
cctggcttgtctgaggatcagttcc

SEQ ID NO: 3633379 - DNA, 25 bp, Homo sapien
agtggccctaagggctcatctggtt

SEQ ID NO: 3633380 - DNA, 25 bp, Homo sapien
aattaaagcacaacatactgaacaa

SEQ ID NO: 3633381 - DNA, 25 bp, Homo sapien
agagagtctgtaacttctctcatct

SEQ ID NO: 3633382 - DNA, 25 bp, Homo sapien
ttctcagaagcctgcagcacagtcc

SEQ ID NO: 3633383 - DNA, 25 bp, Homo sapien
cctctcatgcggtgttggctagggc

SEQ ID NO: 3633384 - DNA, 25 bp, Homo sapien
tctttctagatgtgagagatacctt

SEQ ID NO: 3633385 - DNA, 25 bp, Homo sapien
ggcttgtgggtgaagtcatgtctgt

SEQ ID NO: 3633386 - DNA, 25 bp, Homo sapien
gaaaaatttctaccagctatgagcc

SEQ ID NO: 3633387 - DNA, 25 bp, Homo sapien
tataggcagtggttgaacaatctca

SEQ ID NO: 3633388 - DNA, 25 bp, Homo sapien
caagagtctctaaagccttatcagg

SEQ ID NO: 3633389 - DNA, 25 bp, Homo sapien
tcatgcaagtcataaagccgacagg

SEQ ID NO: 3633390 - DNA, 25 bp, Homo sapien
gagcaatgagctggcaacgcccctg

SEQ ID NO: 3633391 - DNA, 25 bp, Homo sapien
cactgtctgctggttaaccaatggc

SEQ ID NO: 3633392 - DNA, 25 bp, Homo sapien
tgcatccagttcaaccgtttcttac

SEQ ID NO: 3633393 - DNA, 25 bp, Homo sapien
gacagaggcagtcttacacaagctg

SEQ ID NO: 3633394 - DNA, 25 bp, Homo sapien
ttctgtcactagcctggctggcaaa

SEQ ID NO: 3633395 - DNA, 25 bp, Homo sapien
tgtcactagcctggctggcaaatgt

SEQ ID NO: 3633396 - DNA, 25 bp, Homo sapien
tggcaaatgtttctttcttcctccc

SEQ ID NO: 3633397 - DNA, 25 bp, Homo sapien
tgtttctttcttcctccctcacagg

SEQ ID NO: 3633398 - DNA, 25 bp, Homo sapien
catcattcagcttcacacactgata

SEQ ID NO: 3633399 - DNA, 25 bp, Homo sapien
tgcaggcgcataggtgccaaatccc

SEQ ID NO: 3633400 - DNA, 25 bp, Homo sapien
gacaggcatgaagtgaccatcattc

SEQ ID NO: 3633401 - DNA, 25 bp, Homo sapien
tcacacactgatatttcgaatccat

SEQ ID NO: 3633402 - DNA, 25 bp, Homo sapien
tctgttcgactatacaaagaaacag

SEQ ID NO: 3633403 - DNA, 25 bp, Homo sapien
agtaaatatctgttcgactatacaa

SEQ ID NO: 3633404 - DNA, 25 bp, Homo sapien
tatctgttcgactatacaaagaaac

SEQ ID NO: 3633405 - DNA, 25 bp, Homo sapien
aaatatctgttcgactatacaaaga

SEQ ID NO: 3633406 - DNA, 25 bp, Homo sapien
atgagatcaggagatcaaggccatc

SEQ ID NO: 3633407 - DNA, 25 bp, Homo sapien
cgagctgggcggatcatgagatcag

SEQ ID NO: 3633408 - DNA, 25 bp, Homo sapien
gagatcaaggccatcctggttaaca

SEQ ID NO: 3633409 - DNA, 25 bp, Homo sapien
ggccgagctgggcggatcatgagat

SEQ ID NO: 3633410 - DNA, 25 bp, Homo sapien
agagttagttcaggcacaagtagcg

SEQ ID NO: 3633411 - DNA, 25 bp, Homo sapien
agaaaaatcactgcttgaccactag

SEQ ID NO: 3633412 - DNA, 25 bp, Homo sapien
ggaaaaattaacaggatgcaaccta

SEQ ID NO: 3633413 - DNA, 25 bp, Homo sapien
tcaggttcagtcattttttggaaaa

SEQ ID NO: 3633414 - DNA, 25 bp, Homo sapien
ttcaattgccaatttggtggcctct

SEQ ID NO: 3633415 - DNA, 25 bp, Homo sapien
caatttggtggcctctaaagcttta

SEQ ID NO: 3633416 - DNA, 25 bp, Homo sapien
ttgccaatttggtggcctctaaagc

SEQ ID NO: 3633417 - DNA, 25 bp, Homo sapien
atttggtggcctctaaagctttact

SEQ ID NO: 3633418 - DNA, 25 bp, Homo sapien
tgaagtgtagaatatgtcttctctc

SEQ ID NO: 3633419 - DNA, 25 bp, Homo sapien
tctgcaatcttgcttcggatggcca

SEQ ID NO: 3633420 - DNA, 25 bp, Homo sapien
cacactgccatctgcaatcttgctt

SEQ ID NO: 3633421 - DNA, 25 bp, Homo sapien
tcttgcttcggatggccagtccaac

SEQ ID NO: 3633422 - DNA, 25 bp, Homo sapien
tggtcggaccaactctggtcgatgg

SEQ ID NO: 3633423 - DNA, 25 bp, Homo sapien
gaccaactctggtcgatgggaattg

SEQ ID NO: 3633424 - DNA, 25 bp, Homo sapien
accaactctggtcgatgggaattgc

SEQ ID NO: 3633425 - DNA, 25 bp, Homo sapien
cggaccaactctggtcgatgggaat

SEQ ID NO: 3633426 - DNA, 25 bp, Homo sapien
attttcatcttttgggatcacttcc

SEQ ID NO: 3633427 - DNA, 25 bp, Homo sapien
catgtggcacagagatccactgtgt

SEQ ID NO: 3633428 - DNA, 25 bp, Homo sapien
cacagagatccactgtgtcaaatag

SEQ ID NO: 3633429 - DNA, 25 bp, Homo sapien
cttttgggatcacttcctcacctgg

SEQ ID NO: 3633430 - DNA, 25 bp, Homo sapien
gtgaggtgtggaagatcaagataaa

SEQ ID NO: 3633431 - DNA, 25 bp, Homo sapien
gacacagaactgtgaaagtaacaac

SEQ ID NO: 3633432 - DNA, 25 bp, Homo sapien
tgacacagaactgtgaaagtaacaa

SEQ ID NO: 3633433 - DNA, 25 bp, Homo sapien
ctccagctgcctgcggttgaagttg

SEQ ID NO: 3633434 - DNA, 25 bp, Homo sapien
tgcggttgaagttggacaccccgat

SEQ ID NO: 3633435 - DNA, 25 bp, Homo sapien
atggacttggccaatcctgcatctt

SEQ ID NO: 3633436 - DNA, 25 bp, Homo sapien
gacaggcttgtacttgagccctggc

SEQ ID NO: 3633437 - DNA, 25 bp, Homo sapien
gcccttggtcaagaagtgtgaaagc

SEQ ID NO: 3633438 - DNA, 25 bp, Homo sapien
aagaagagcagccaactaggagcgg

SEQ ID NO: 3633439 - DNA, 25 bp, Homo sapien
gaacagatatctcccataaacaggt

SEQ ID NO: 3633440 - DNA, 25 bp, Homo sapien
taagcagctgattgcatgacagact

SEQ ID NO: 3633441 - DNA, 25 bp, Homo sapien
cagtcaggactcaaggaaaagatgg

SEQ ID NO: 3633442 - DNA, 25 bp, Homo sapien
tgccccaaaggtttaagtcaatgta

SEQ ID NO: 3633443 - DNA, 25 bp, Homo sapien
gataccaaatgacatgagggcacta

SEQ ID NO: 3633444 - DNA, 25 bp, Homo sapien
ttacagaaaccttcaacaactggga

SEQ ID NO: 3633445 - DNA, 25 bp, Homo sapien
atgtcttttgacttgcagaaatcca

SEQ ID NO: 3633446 - DNA, 25 bp, Homo sapien
cacgttctgtctgatgcgctgctca

SEQ ID NO: 3633447 - DNA, 25 bp, Homo sapien
ccaaggcacaaaggactgggtcctc

SEQ ID NO: 3633448 - DNA, 25 bp, Homo sapien
gcgctgctcattgtagctcttggcc

SEQ ID NO: 3633449 - DNA, 25 bp, Homo sapien
gtagcgcagggcaatcagggctggg

SEQ ID NO: 3633450 - DNA, 25 bp, Homo sapien
tgtgaaggacactgtgcaggagacc

SEQ ID NO: 3633451 - DNA, 25 bp, Homo sapien
gtgaaggacactgtgcaggagacct

SEQ ID NO: 3633452 - DNA, 25 bp, Homo sapien
aaggacactgtgcaggagacctgag

SEQ ID NO: 3633453 - DNA, 25 bp, Homo sapien
gtgtgaaggacactgtgcaggagac

SEQ ID NO: 3633454 - DNA, 25 bp, Homo sapien
gaagcaatggttggcagctctgagc

SEQ ID NO: 3633455 - DNA, 25 bp, Homo sapien
cagctccttccaacaagaggtggtg

SEQ ID NO: 3633456 - DNA, 25 bp, Homo sapien
cctgtgctagagtagaagaaaccct

SEQ ID NO: 3633457 - DNA, 25 bp, Homo sapien
aatggactgagtttaggctgagccc

SEQ ID NO: 3633458 - DNA, 25 bp, Homo sapien
taggataagacacaacactcaccaa

SEQ ID NO: 3633459 - DNA, 25 bp, Homo sapien
gaggccagataattgctcatggaca

SEQ ID NO: 3633460 - DNA, 25 bp, Homo sapien
cacattgatctggaggcttattaca

SEQ ID NO: 3633461 - DNA, 25 bp, Homo sapien
cactcaccaaccacaagaaagaggc

SEQ ID NO: 3633462 - DNA, 25 bp, Homo sapien
caaccaagttcatcagacagtaggg

SEQ ID NO: 3633463 - DNA, 25 bp, Homo sapien
tacttaaaagattgatacgtttcca

SEQ ID NO: 3633464 - DNA, 25 bp, Homo sapien
tcattgccaattgggaacaaccaag

SEQ ID NO: 3633465 - DNA, 25 bp, Homo sapien
ttagattacatcattgccaattggg

SEQ ID NO: 3633466 - DNA, 25 bp, Homo sapien
cgcacatttctgtttaggccatcta

SEQ ID NO: 3633467 - DNA, 25 bp, Homo sapien
ttggagtcacgagagcagaggcaca

SEQ ID NO: 3633468 - DNA, 25 bp, Homo sapien
ggctgctctggaaagttccttggag

SEQ ID NO: 3633469 - DNA, 25 bp, Homo sapien
gaggcacaggttgacccatgctgac

SEQ ID NO: 3633470 - DNA, 25 bp, Homo sapien
gaaggtgcagattcagcaatgatct

SEQ ID NO: 3633471 - DNA, 25 bp, Homo sapien
gtgtgtacactagacagtagcacaa

SEQ ID NO: 3633472 - DNA, 25 bp, Homo sapien
gaagaacaagatagaagcacagatt

SEQ ID NO: 3633473 - DNA, 25 bp, Homo sapien
tggtaagacattgagcaggttggga

SEQ ID NO: 3633474 - DNA, 25 bp, Homo sapien
ggaagaacaagatagaagcacagat

SEQ ID NO: 3633475 - DNA, 25 bp, Homo sapien
ttggctcatgggcaaacatgcaaag

SEQ ID NO: 3633476 - DNA, 25 bp, Homo sapien
gaggtgggaattggaacctggccca

SEQ ID NO: 3633477 - DNA, 25 bp, Homo sapien
tggcccacaagattgacggaactgc

SEQ ID NO: 3633478 - DNA, 25 bp, Homo sapien
caagcaattccatgtgaaagaggtg

SEQ ID NO: 3633479 - DNA, 25 bp, Homo sapien
tccatattgcagaacaccaaggcca

SEQ ID NO: 3633480 - DNA, 25 bp, Homo sapien
cactgagatctccatattgcagaac

SEQ ID NO: 3633481 - DNA, 25 bp, Homo sapien
ccaaggccaagtgctcctattcgct

SEQ ID NO: 3633482 - DNA, 25 bp, Homo sapien
gatctccatattgcagaacaccaag

SEQ ID NO: 3633483 - DNA, 25 bp, Homo sapien
gaacacagaggaatagtaaacttct

SEQ ID NO: 3633484 - DNA, 25 bp, Homo sapien
tacttgttgaaatccctactgccag

SEQ ID NO: 3633485 - DNA, 25 bp, Homo sapien
gaatgaccttctatgaatcctagaa

SEQ ID NO: 3633486 - DNA, 25 bp, Homo sapien
ctaataatatccaccaaattttggg

SEQ ID NO: 3633487 - DNA, 25 bp, Homo sapien
tcattttctgactgctctagaatct

SEQ ID NO: 3633488 - DNA, 25 bp, Homo sapien
tgactccgttactagcgggtagtgc

SEQ ID NO: 3633489 - DNA, 25 bp, Homo sapien
cctgcctggaacttaacacataaaa

SEQ ID NO: 3633490 - DNA, 25 bp, Homo sapien
gaagctgccgctagtgtagatgtta

SEQ ID NO: 3633491 - DNA, 25 bp, Homo sapien
aaatggataattaggggggccagca

SEQ ID NO: 3633492 - DNA, 25 bp, Homo sapien
aatggataattaggggggccagcaa

SEQ ID NO: 3633493 - DNA, 25 bp, Homo sapien
ggctttgctgtagcttgctgaaatc

SEQ ID NO: 3633494 - DNA, 25 bp, Homo sapien
tagtcaatatcgctcatcctctaga

SEQ ID NO: 3633495 - DNA, 25 bp, Homo sapien
cacattgtgatcttctattgcagaa

SEQ ID NO: 3633496 - DNA, 25 bp, Homo sapien
cactgttaccattttgtgaggtggc

SEQ ID NO: 3633497 - DNA, 25 bp, Homo sapien
gattagctgattaacttaggtcccc

SEQ ID NO: 3633498 - DNA, 25 bp, Homo sapien
taacagctgagctcatgcaggcatt

SEQ ID NO: 3633499 - DNA, 25 bp, Homo sapien
ggtgaacttgtcatgcggaccgact

SEQ ID NO: 3633500 - DNA, 25 bp, Homo sapien
tgacgtagactctgagactccctgg

SEQ ID NO: 3633501 - DNA, 25 bp, Homo sapien
tagaaaattggcctgggctccgcct

SEQ ID NO: 3633502 - DNA, 25 bp, Homo sapien
tctttagtctccaaatcattgtgaa

SEQ ID NO: 3633503 - DNA, 25 bp, Homo sapien
cttcattttcataaacaaggagttt

SEQ ID NO: 3633504 - DNA, 25 bp, Homo sapien
gccagggacatctccttttcttcat

SEQ ID NO: 3633505 - DNA, 25 bp, Homo sapien
taattaggtgttctttagtctccaa

SEQ ID NO: 3633506 - DNA, 25 bp, Homo sapien
gggctcctgcatagtgtccttcaaa

SEQ ID NO: 3633507 - DNA, 25 bp, Homo sapien
catgtgcttcttgtaaggttctgag

SEQ ID NO: 3633508 - DNA, 25 bp, Homo sapien
cctggcatattctatgcacaaatgc

SEQ ID NO: 3633509 - DNA, 25 bp, Homo sapien
ggttctgaggacacccttgggccat

SEQ ID NO: 3633510 - DNA, 25 bp, Homo sapien
tctccactattcgtactctggtagc

SEQ ID NO: 3633511 - DNA, 25 bp, Homo sapien
ccactattcgtactctggtagccat

SEQ ID NO: 3633512 - DNA, 25 bp, Homo sapien
ggcacactttctaacacatttactc

SEQ ID NO: 3633513 - DNA, 25 bp, Homo sapien
catttactctccactattcgtactc

SEQ ID NO: 3633514 - DNA, 25 bp, Homo sapien
taaataggacagagtcgagtacatc

SEQ ID NO: 3633515 - DNA, 25 bp, Homo sapien
cattgactcatcacattcccctgaa

SEQ ID NO: 3633516 - DNA, 25 bp, Homo sapien
cattcacaacgttgaccctattggt

SEQ ID NO: 3633517 - DNA, 25 bp, Homo sapien
gcaggacatcgaagatatcattgac

SEQ ID NO: 3633518 - DNA, 25 bp, Homo sapien
tcttgtaggaagaagcacacgcagg

SEQ ID NO: 3633519 - DNA, 25 bp, Homo sapien
ccagcagtgcgagggtcagagtttc

SEQ ID NO: 3633520 - DNA, 25 bp, Homo sapien
gacaggtatttatcagtcagtgcct

SEQ ID NO: 3633521 - DNA, 25 bp, Homo sapien
gaggatgagcgatattgactagcaa

SEQ ID NO: 3633522 - DNA, 25 bp, Homo sapien
tatgctggtgactggacacatcgcc

SEQ ID NO: 3633523 - DNA, 25 bp, Homo sapien
gtaagctacagctaagcccatcggc

SEQ ID NO: 3633524 - DNA, 25 bp, Homo sapien
gcccatcggccggaaaagaaagaca

SEQ ID NO: 3633525 - DNA, 25 bp, Homo sapien
cattgcatgaggtctgccagaaggc

SEQ ID NO: 3633526 - DNA, 25 bp, Homo sapien
tacatggccctatcatgtgggcaca

SEQ ID NO: 3633527 - DNA, 25 bp, Homo sapien
tgtgggtcttctaggtacatggccc

SEQ ID NO: 3633528 - DNA, 25 bp, Homo sapien
tagtgagtacccacaccttttgaat

SEQ ID NO: 3633529 - DNA, 25 bp, Homo sapien
acgtgcccggcaattactgataatt

SEQ ID NO: 3633530 - DNA, 25 bp, Homo sapien
gaactctttgtgtacgtcataaggg

SEQ ID NO: 3633531 - DNA, 25 bp, Homo sapien
tcttctactctagcacaggagaggc

SEQ ID NO: 3633532 - DNA, 25 bp, Homo sapien
cacacgtgtgcttcttgtaaggctc

SEQ ID NO: 3633533 - DNA, 25 bp, Homo sapien
tttagtctccaactcatggcggatt

SEQ ID NO: 3633534 - DNA, 25 bp, Homo sapien
tccatcttgctcgtctgcaggtgga

SEQ ID NO: 3633535 - DNA, 25 bp, Homo sapien
tttccatcttgctcgtctgcaggtg

SEQ ID NO: 3633536 - DNA, 25 bp, Homo sapien
catcttgctcgtctgcaggtggaat

SEQ ID NO: 3633537 - DNA, 25 bp, Homo sapien
tgcttttccatcttgctcgtctgca

SEQ ID NO: 3633538 - DNA, 25 bp, Homo sapien
aatttaatgctctacattattcagc

SEQ ID NO: 3633539 - DNA, 25 bp, Homo sapien
gatcatttttgacaataatattctc

SEQ ID NO: 3633540 - DNA, 25 bp, Homo sapien
aatattctcagttcaaatttaatgc

SEQ ID NO: 3633541 - DNA, 25 bp, Homo sapien
aggagagaggggcataaaatttatt

SEQ ID NO: 3633542 - DNA, 25 bp, Homo sapien
ccttctagtggtcggagttattgag

SEQ ID NO: 3633543 - DNA, 25 bp, Homo sapien
ccaggatagggttcatggagttgct

SEQ ID NO: 3633544 - DNA, 25 bp, Homo sapien
tgcttgtgctcagaaatagcatttc

SEQ ID NO: 3633545 - DNA, 25 bp, Homo sapien
cccagctctgaaattggccgtgtct

SEQ ID NO: 3633546 - DNA, 25 bp, Homo sapien
tgtatttgatatcagttaacttgtt

SEQ ID NO: 3633547 - DNA, 25 bp, Homo sapien
gcttaatcaaaatatcttttgtagc

SEQ ID NO: 3633548 - DNA, 25 bp, Homo sapien
tattgttgtatttgatatcagttaa

SEQ ID NO: 3633549 - DNA, 25 bp, Homo sapien
aaaatatcttttgtagctcttcttt

SEQ ID NO: 3633550 - DNA, 25 bp, Homo sapien
gaacatcatttatagtgcccttatg

SEQ ID NO: 3633551 - DNA, 25 bp, Homo sapien
taaagatgacaattgacccctagag

SEQ ID NO: 3633552 - DNA, 25 bp, Homo sapien
taatgtttctagaacctcttcaagg

SEQ ID NO: 3633553 - DNA, 25 bp, Homo sapien
gatattctcccagttccagtgtcat

SEQ ID NO: 3633554 - DNA, 25 bp, Homo sapien
ttgtgactactccaagatgtgaatc

SEQ ID NO: 3633555 - DNA, 25 bp, Homo sapien
caatcagggcactgcaagttgtgac

SEQ ID NO: 3633556 - DNA, 25 bp, Homo sapien
gcactgcaagttgtgactactccaa

SEQ ID NO: 3633557 - DNA, 25 bp, Homo sapien
aagcaaatagaagcaatcagggcac

SEQ ID NO: 3633558 - DNA, 25 bp, Homo sapien
ggaaaagccatgggcattaaactcc

SEQ ID NO: 3633559 - DNA, 25 bp, Homo sapien
ggtctccatgggtgcactgtgtagc

SEQ ID NO: 3633560 - DNA, 25 bp, Homo sapien
tataaatctatcagccgcttgcaac

SEQ ID NO: 3633561 - DNA, 25 bp, Homo sapien
tatcagccgcttgcaacttcagcct

SEQ ID NO: 3633562 - DNA, 25 bp, Homo sapien
tgggtctctcgtgtttcctctttcc

SEQ ID NO: 3633563 - DNA, 25 bp, Homo sapien
gggtctctcgtgtttcctctttcca

SEQ ID NO: 3633564 - DNA, 25 bp, Homo sapien
ggtctctcgtgtttcctctttccat

SEQ ID NO: 3633565 - DNA, 25 bp, Homo sapien
gcttcgattttcactacacatcagt

SEQ ID NO: 3633566 - DNA, 25 bp, Homo sapien
tcagacaagccaggactcaagtaca

SEQ ID NO: 3633567 - DNA, 25 bp, Homo sapien
aagccaggactcaagtacaagccca

SEQ ID NO: 3633568 - DNA, 25 bp, Homo sapien
gctggaactgatcctcagacaagcc

SEQ ID NO: 3633569 - DNA, 25 bp, Homo sapien
cagtttcaatcactaactgctggaa

SEQ ID NO: 3633570 - DNA, 25 bp, Homo sapien
tgtcatagttctaccaagactgagc

SEQ ID NO: 3633571 - DNA, 25 bp, Homo sapien
tctcacagtaaaggtgccaccaagt

SEQ ID NO: 3633572 - DNA, 25 bp, Homo sapien
gcttaagttttcacgatggatgaga

SEQ ID NO: 3633573 - DNA, 25 bp, Homo sapien
tctccaaagcaacatccgtcattga

SEQ ID NO: 3633574 - DNA, 25 bp, Homo sapien
ttgctcatagtgttttcatagagtg

SEQ ID NO: 3633575 - DNA, 25 bp, Homo sapien
cttgctcatagtgttttcatagagt

SEQ ID NO: 3633576 - DNA, 25 bp, Homo sapien
cccacattgggcagccaggaatgtt

SEQ ID NO: 3633577 - DNA, 25 bp, Homo sapien
aacaccaggtcatgggggcgaggaa

SEQ ID NO: 3633578 - DNA, 25 bp, Homo sapien
cactctagcattccttcactggggt

SEQ ID NO: 3633579 - DNA, 25 bp, Homo sapien
gctctcccgccgagcttctttgaga

SEQ ID NO: 3633580 - DNA, 25 bp, Homo sapien
actgtcactcagctggctagcaaat

SEQ ID NO: 3633581 - DNA, 25 bp, Homo sapien
cactgtcactcagctggctagcaaa

SEQ ID NO: 3633582 - DNA, 25 bp, Homo sapien
catcatttagcttcaaacactgatg

SEQ ID NO: 3633583 - DNA, 25 bp, Homo sapien
cttttcaactctctgcaccaaaaac

SEQ ID NO: 3633584 - DNA, 25 bp, Homo sapien
tagacagtagtaaaaacaccaggcc

SEQ ID NO: 3633585 - DNA, 25 bp, Homo sapien
gtttttgatctgataaggagctgag

SEQ ID NO: 3633586 - DNA, 25 bp, Homo sapien
cagatttggcaatgatgtcgactgc

SEQ ID NO: 3633587 - DNA, 25 bp, Homo sapien
ctggaccacaaggttgatggaaatg

SEQ ID NO: 3633588 - DNA, 25 bp, Homo sapien
gcaaagtcctccatgttaatatttg

SEQ ID NO: 3633589 - DNA, 25 bp, Homo sapien
caaagtcctccatgttaatatttgt

SEQ ID NO: 3633590 - DNA, 25 bp, Homo sapien
tccttcttcagaagctggaaatcat

SEQ ID NO: 3633591 - DNA, 25 bp, Homo sapien
cagctccttcttcagaagctggaaa

SEQ ID NO: 3633592 - DNA, 25 bp, Homo sapien
ccagctccttcttcagaagctggaa

SEQ ID NO: 3633593 - DNA, 25 bp, Homo sapien
gctccttcttcagaagctggaaatc

SEQ ID NO: 3633594 - DNA, 25 bp, Homo sapien
aaacatgctgggagacctgacttga

SEQ ID NO: 3633595 - DNA, 25 bp, Homo sapien
taaggtggccgccagagtaagaaca

SEQ ID NO: 3633596 - DNA, 25 bp, Homo sapien
aaaaaccactgtcctcaaaatgctt

SEQ ID NO: 3633597 - DNA, 25 bp, Homo sapien
tgaaagtgttagtgtgcccaggtca

SEQ ID NO: 3633598 - DNA, 25 bp, Homo sapien
taaaaagcatctcttcacgtatttt

SEQ ID NO: 3633599 - DNA, 25 bp, Homo sapien
gcatctcttcacgtattttccccac

SEQ ID NO: 3633600 - DNA, 25 bp, Homo sapien
agcatctcttcacgtattttcccca

SEQ ID NO: 3633601 - DNA, 25 bp, Homo sapien
tttgatttggtcctcatgctctttg

SEQ ID NO: 3633602 - DNA, 25 bp, Homo sapien
catatttgatttggtcctcatgctc

SEQ ID NO: 3633603 - DNA, 25 bp, Homo sapien
tctttgtcatatttgatttggtcct

SEQ ID NO: 3633604 - DNA, 25 bp, Homo sapien
cagtactgacacgcctctaaggagt

SEQ ID NO: 3633605 - DNA, 25 bp, Homo sapien
cttcatatggttctgtgatctgggc

SEQ ID NO: 3633606 - DNA, 25 bp, Homo sapien
ttcatatggttctgtgatctgggct

SEQ ID NO: 3633607 - DNA, 25 bp, Homo sapien
tcttcatatggttctgtgatctggg

SEQ ID NO: 3633608 - DNA, 25 bp, Homo sapien
ggctggagctgctcgctgagtcatg

SEQ ID NO: 3633609 - DNA, 25 bp, Homo sapien
ttccacatgacaaattcccttggga

SEQ ID NO: 3633610 - DNA, 25 bp, Homo sapien
caatgcctggccattccttgacaaa

SEQ ID NO: 3633611 - DNA, 25 bp, Homo sapien
caatcctttatggtccgacagggtg

SEQ ID NO: 3633612 - DNA, 25 bp, Homo sapien
gaataagtgtctaccagtagatcaa

SEQ ID NO: 3633613 - DNA, 25 bp, Homo sapien
gatgattcaaagaattctgatctta

SEQ ID NO: 3633614 - DNA, 25 bp, Homo sapien
gattcaaagaattctgatcttagtt

SEQ ID NO: 3633615 - DNA, 25 bp, Homo sapien
ctgatgattcaaagaattctgatct

SEQ ID NO: 3633616 - DNA, 25 bp, Homo sapien
tgattcaaagaattctgatcttagt

SEQ ID NO: 3633617 - DNA, 25 bp, Homo sapien
gatgaatcgatttttcaaaagagat

SEQ ID NO: 3633618 - DNA, 25 bp, Homo sapien
atatttgcatccttcttgaacagtt

SEQ ID NO: 3633619 - DNA, 25 bp, Homo sapien
gaatcgatttttcaaaagagatgat

SEQ ID NO: 3633620 - DNA, 25 bp, Homo sapien
tatttgcatccttcttgaacagttg

SEQ ID NO: 3633621 - DNA, 25 bp, Homo sapien
ccctgtcacttgtctgactagcaaa

SEQ ID NO: 3633622 - DNA, 25 bp, Homo sapien
tctgccgtgataatgccccttcttt

SEQ ID NO: 3633623 - DNA, 25 bp, Homo sapien
ccaatggcatgtaggaggaggtaca

SEQ ID NO: 3633624 - DNA, 25 bp, Homo sapien
cagtcttatatggtctgtggagaaa

SEQ ID NO: 3633625 - DNA, 25 bp, Homo sapien
gctttacacactggtgtttggaatc

SEQ ID NO: 3633626 - DNA, 25 bp, Homo sapien
ttagctttacacactggtgtttgga

SEQ ID NO: 3633627 - DNA, 25 bp, Homo sapien
tagctttacacactggtgtttggaa

SEQ ID NO: 3633628 - DNA, 25 bp, Homo sapien
ctttacacactggtgtttggaatcc

SEQ ID NO: 3633629 - DNA, 25 bp, Homo sapien
taagcagtacgtgaccataggaatg

SEQ ID NO: 3633630 - DNA, 25 bp, Homo sapien
tcaaaggtttaccaaggctggagct

SEQ ID NO: 3633631 - DNA, 25 bp, Homo sapien
tattcacacacttagtagcctgagg

SEQ ID NO: 3633632 - DNA, 25 bp, Homo sapien
ccaagctgggaactagacatgaaca

SEQ ID NO: 3633633 - DNA, 25 bp, Homo sapien
gttgatcactgttatggaggtacca

SEQ ID NO: 3633634 - DNA, 25 bp, Homo sapien
tatagaagggaaacggtgcaagctc

SEQ ID NO: 3633635 - DNA, 25 bp, Homo sapien
gcatagtcattctggctacacaaca

SEQ ID NO: 3633636 - DNA, 25 bp, Homo sapien
tgagaggtagttcaggcacaagcat

SEQ ID NO: 3633637 - DNA, 25 bp, Homo sapien
tctgcaatcttgcttcggatggcca

SEQ ID NO: 3633638 - DNA, 25 bp, Homo sapien
cacactgccatctgcaatcttgctt

SEQ ID NO: 3633639 - DNA, 25 bp, Homo sapien
tcttgcttcggatggccagtccaac

SEQ ID NO: 3633640 - DNA, 25 bp, Homo sapien
tgaagtgtagaatatgtcttctctc

SEQ ID NO: 3633641 - DNA, 25 bp, Homo sapien
ttcaaaatttatgaccactggcaaa

SEQ ID NO: 3633642 - DNA, 25 bp, Homo sapien
tgaccactggcaaacatattctctt

SEQ ID NO: 3633643 - DNA, 25 bp, Homo sapien
tgcttcaaaatttatgaccactggc

SEQ ID NO: 3633644 - DNA, 25 bp, Homo sapien
caaaatttatgaccactggcaaaca

SEQ ID NO: 3633645 - DNA, 25 bp, Homo sapien
ctggtcgatgaaaagtggaccaaag

SEQ ID NO: 3633646 - DNA, 25 bp, Homo sapien
ctttagagacattggagaatgaata

SEQ ID NO: 3633647 - DNA, 25 bp, Homo sapien
catagtccaattgagctttcttcag

SEQ ID NO: 3633648 - DNA, 25 bp, Homo sapien
tgagttttccaaggctggtcggacc

SEQ ID NO: 3633649 - DNA, 25 bp, Homo sapien
ttggagaatgaataagatagaggtc

SEQ ID NO: 3633650 - DNA, 25 bp, Homo sapien
atcacatagggtcagcagaagttgg

SEQ ID NO: 3633651 - DNA, 25 bp, Homo sapien
cccagaggagttgtcttatggtgat

SEQ ID NO: 3633652 - DNA, 25 bp, Homo sapien
actgtgaatcacatagggtcagcag

SEQ ID NO: 3633653 - DNA, 25 bp, Homo sapien
ccagaggagttgtcttatggtgatg

SEQ ID NO: 3633654 - DNA, 25 bp, Homo sapien
catgagacaggtggtacaatgctcc

SEQ ID NO: 3633655 - DNA, 25 bp, Homo sapien
taatttcctctattgaagtacctct

SEQ ID NO: 3633656 - DNA, 25 bp, Homo sapien
tgaaatagaagcagtcattttaatg

SEQ ID NO: 3633657 - DNA, 25 bp, Homo sapien
ttatgtcactttattccgcccttat

SEQ ID NO: 3633658 - DNA, 25 bp, Homo sapien
caggtggtacagagatccactatgt

SEQ ID NO: 3633659 - DNA, 25 bp, Homo sapien
tcccaggtggtacagagatccacta

SEQ ID NO: 3633660 - DNA, 25 bp, Homo sapien
ggtggtacagagatccactatgtca

SEQ ID NO: 3633661 - DNA, 25 bp, Homo sapien
cccaggtggtacagagatccactat

SEQ ID NO: 3633662 - DNA, 25 bp, Homo sapien
tgacaatgaaaatagctagcagtga

SEQ ID NO: 3633663 - DNA, 25 bp, Homo sapien
ccattctttcctattgaacctggga

SEQ ID NO: 3633664 - DNA, 25 bp, Homo sapien
caaatcacggtaaatgcaagacaga

SEQ ID NO: 3633665 - DNA, 25 bp, Homo sapien
aactggatagattaatgcacaagca

SEQ ID NO: 3633666 - DNA, 25 bp, Homo sapien
ttgtgaggaattatttgtgcagttg

SEQ ID NO: 3633667 - DNA, 25 bp, Homo sapien
tgtgaggaattatttgtgcagttgg

SEQ ID NO: 3633668 - DNA, 25 bp, Homo sapien
ggggttgtgaggaattatttgtgca

SEQ ID NO: 3633669 - DNA, 25 bp, Homo sapien
ggttgtgaggaattatttgtgcagt

SEQ ID NO: 3633670 - DNA, 25 bp, Homo sapien
tgacaccccaatggacttggccaat

SEQ ID NO: 3633671 - DNA, 25 bp, Homo sapien
ctgcggttgaagtttgacaccccaa

SEQ ID NO: 3633672 - DNA, 25 bp, Homo sapien
cagctgcctgcggttgaagtttgac

SEQ ID NO: 3633673 - DNA, 25 bp, Homo sapien
gtttgacaccccaatggacttggcc

SEQ ID NO: 3633674 - DNA, 25 bp, Homo sapien
tgcagaaatctagcaatttactccg

SEQ ID NO: 3633675 - DNA, 25 bp, Homo sapien
gtctcgttgagatcccagagcacta

SEQ ID NO: 3633676 - DNA, 25 bp, Homo sapien
tactccggttgaaatacggatgaca

SEQ ID NO: 3633677 - DNA, 25 bp, Homo sapien
catcgtttgtctcgttgagatccca

SEQ ID NO: 3633678 - DNA, 25 bp, Homo sapien
cacgttctgtctgatgcgctgctca

SEQ ID NO: 3633679 - DNA, 25 bp, Homo sapien
ccaaggcacaaaggactgggtcctc

SEQ ID NO: 3633680 - DNA, 25 bp, Homo sapien
gcgctgctcattgtagctcttggcc

SEQ ID NO: 3633681 - DNA, 25 bp, Homo sapien
gtagcgcagggcaatcagggctggg

SEQ ID NO: 3633682 - DNA, 25 bp, Homo sapien
tgtgaaggacactgtgcaggagacc

SEQ ID NO: 3633683 - DNA, 25 bp, Homo sapien
gtgaaggacactgtgcaggagacct

SEQ ID NO: 3633684 - DNA, 25 bp, Homo sapien
gtgtgaaggacactgtgcaggagac

SEQ ID NO: 3633685 - DNA, 25 bp, Homo sapien
aaggacactgtgcaggagacctgag

SEQ ID NO: 3633686 - DNA, 25 bp, Homo sapien
gaaacagcgctgacattgtgcccac

SEQ ID NO: 3633687 - DNA, 25 bp, Homo sapien
caagtatattagacagtagggtgca

SEQ ID NO: 3633688 - DNA, 25 bp, Homo sapien
agtcagctctaaacactcaggtggg

SEQ ID NO: 3633689 - DNA, 25 bp, Homo sapien
ggtgggtcaatgaatagctcacgaa

SEQ ID NO: 3633690 - DNA, 25 bp, Homo sapien
ctgcagtcaactggaactcaaaaac

SEQ ID NO: 3633691 - DNA, 25 bp, Homo sapien
ctatcactgttaaaatagtggagat

SEQ ID NO: 3633692 - DNA, 25 bp, Homo sapien
tagtggagatttctgtctaggccat

SEQ ID NO: 3633693 - DNA, 25 bp, Homo sapien
catgtcctctgcagtcaactggaac

SEQ ID NO: 3633694 - DNA, 25 bp, Homo sapien
aggttgacccatgctgatccctgcc

SEQ ID NO: 3633695 - DNA, 25 bp, Homo sapien
ctatatggaacgtgcagacttggca

SEQ ID NO: 3633696 - DNA, 25 bp, Homo sapien
gaaagttccatggagtcaggagagc

SEQ ID NO: 3633697 - DNA, 25 bp, Homo sapien
gaggcacaggttgacccatgctgat

SEQ ID NO: 3633698 - DNA, 25 bp, Homo sapien
tatagggtctaatatccaaggagct

SEQ ID NO: 3633699 - DNA, 25 bp, Homo sapien
tattcctgtacatctgtcagcagag

SEQ ID NO: 3633700 - DNA, 25 bp, Homo sapien
tacctgctactgtctactgtatgca

SEQ ID NO: 3633701 - DNA, 25 bp, Homo sapien
tgtctgactagttgtagaatctgcc

SEQ ID NO: 3633702 - DNA, 25 bp, Homo sapien
tatggataattagggtggctagcaa

SEQ ID NO: 3633703 - DNA, 25 bp, Homo sapien
gaatatggataattagggtggctag

SEQ ID NO: 3633704 - DNA, 25 bp, Homo sapien
aatatggataattagggtggctagc

SEQ ID NO: 3633705 - DNA, 25 bp, Homo sapien
ctgaatatggataattagggtggct

SEQ ID NO: 3633706 - DNA, 25 bp, Homo sapien
tgactgaagtcgctaaacaggacgg

SEQ ID NO: 3633707 - DNA, 25 bp, Homo sapien
tgatatgtccagtcaccggcataga

SEQ ID NO: 3633708 - DNA, 25 bp, Homo sapien
cacacagggcttctggtagacatca

SEQ ID NO: 3633709 - DNA, 25 bp, Homo sapien
tagacatcaggcaaagccctccatg

SEQ ID NO: 3633710 - DNA, 25 bp, Homo sapien
cagaaatcctcgattgagggtggat

SEQ ID NO: 3633711 - DNA, 25 bp, Homo sapien
cttcccatatctccatgaaccagta

SEQ ID NO: 3633712 - DNA, 25 bp, Homo sapien
tatctcctatagttgaagaccaccc

SEQ ID NO: 3633713 - DNA, 25 bp, Homo sapien
gctcaagtccgctacctcattgttt

SEQ ID NO: 3633714 - DNA, 25 bp, Homo sapien
ggtactcattattcacattcagttg

SEQ ID NO: 3633715 - DNA, 25 bp, Homo sapien
ggcctccctcatgagagtgtttaga

SEQ ID NO: 3633716 - DNA, 25 bp, Homo sapien
cactaactactgaaaaggtactcat

SEQ ID NO: 3633717 - DNA, 25 bp, Homo sapien
ctgaaaggctttaagtagaaatctg

SEQ ID NO: 3633718 - DNA, 25 bp, Homo sapien
gtcttgatagatcagctcattctag

SEQ ID NO: 3633719 - DNA, 25 bp, Homo sapien
ctgtcttgatagatcagctcattct

SEQ ID NO: 3633720 - DNA, 25 bp, Homo sapien
tgtcttgatagatcagctcattcta

SEQ ID NO: 3633721 - DNA, 25 bp, Homo sapien
caagctcttcttgttcactcatggg

SEQ ID NO: 3633722 - DNA, 25 bp, Homo sapien
tgcagaccctgaacctgatagatca

SEQ ID NO: 3633723 - DNA, 25 bp, Homo sapien
taataaactggctcattcggtcttg

SEQ ID NO: 3633724 - DNA, 25 bp, Homo sapien
cgagtcatgcggctggaggctataa

SEQ ID NO: 3633725 - DNA, 25 bp, Homo sapien
ttttggttgccagagtaaagactca

SEQ ID NO: 3633726 - DNA, 25 bp, Homo sapien
taaacgtgacgttccagttgctcaa

SEQ ID NO: 3633727 - DNA, 25 bp, Homo sapien
gccttatgagactgtgaatgcattg

SEQ ID NO: 3633728 - DNA, 25 bp, Homo sapien
tggccctgtgtcaatatgactcctg

SEQ ID NO: 3633729 - DNA, 25 bp, Homo sapien
ttagattcccacacaataataacgg

SEQ ID NO: 3633730 - DNA, 25 bp, Homo sapien
acttagattcccacacaataataac

SEQ ID NO: 3633731 - DNA, 25 bp, Homo sapien
atgagacagaaagttaaaaaggata

SEQ ID NO: 3633732 - DNA, 25 bp, Homo sapien
agattcccacacaataataacggga

SEQ ID NO: 3633733 - DNA, 25 bp, Homo sapien
tgcttttgatttgcaacaccctctt

SEQ ID NO: 3633734 - DNA, 25 bp, Homo sapien
gcttttgatttgcaacaccctcttt

SEQ ID NO: 3633735 - DNA, 25 bp, Homo sapien
cctgatgaaggtgtggtcctgatga

SEQ ID NO: 3633736 - DNA, 25 bp, Homo sapien
tcctgatgaaggtgtggtcctgatg

SEQ ID NO: 3633737 - DNA, 25 bp, Homo sapien
ctgatgaaggtgtggtcctgatgat

SEQ ID NO: 3633738 - DNA, 25 bp, Homo sapien
tcttctttaattgtagtaggaatat

SEQ ID NO: 3633739 - DNA, 25 bp, Homo sapien
caagtgatggtgtattacacaggct

SEQ ID NO: 3633740 - DNA, 25 bp, Homo sapien
taatcaatggcatgtaggaggaagc

SEQ ID NO: 3633741 - DNA, 25 bp, Homo sapien
tatgtaaaacatgggcaggcagtgc

SEQ ID NO: 3633742 - DNA, 25 bp, Homo sapien
tagtggtgaccctcaataaagaaat

SEQ ID NO: 3633743 - DNA, 25 bp, Homo sapien
tctttcactaagcagatcctgtttc

SEQ ID NO: 3633744 - DNA, 25 bp, Homo sapien
ttctttcactaagcagatcctgttt

SEQ ID NO: 3633745 - DNA, 25 bp, Homo sapien
ctttcactaagcagatcctgtttcc

SEQ ID NO: 3633746 - DNA, 25 bp, Homo sapien
catcatttagctctacacgctgata

SEQ ID NO: 3633747 - DNA, 25 bp, Homo sapien
tttagctctacacgctgatatttgg

SEQ ID NO: 3633748 - DNA, 25 bp, Homo sapien
accatcatttagctctacacgctga

SEQ ID NO: 3633749 - DNA, 25 bp, Homo sapien
tctacacgctgatatttgggatcca

SEQ ID NO: 3633750 - DNA, 25 bp, Homo sapien
gtgcataggtgccaaatcccaatac

SEQ ID NO: 3633751 - DNA, 25 bp, Homo sapien
ctctggaggtgcataggtgccaaat

SEQ ID NO: 3633752 - DNA, 25 bp, Homo sapien
cataggtgccaaatcccaatacggg

SEQ ID NO: 3633753 - DNA, 25 bp, Homo sapien
aggtgccaaatcccaatacgggcat

SEQ ID NO: 3633754 - DNA, 25 bp, Homo sapien
tttggtgacctctacagctctgttc

SEQ ID NO: 3633755 - DNA, 25 bp, Homo sapien
gacctctacagctctgttcctcgga

SEQ ID NO: 3633756 - DNA, 25 bp, Homo sapien
gctaatttggtgacctctacagctc

SEQ ID NO: 3633757 - DNA, 25 bp, Homo sapien
tgacctctacagctctgttcctcgg

SEQ ID NO: 3633758 - DNA, 25 bp, Homo sapien
ttgaagtgtagaatatgtcttctct

SEQ ID NO: 3633759 - DNA, 25 bp, Homo sapien
tgaagtgtagaatatgtcttctctc

SEQ ID NO: 3633760 - DNA, 25 bp, Homo sapien
gtggttgaaagaaagtgcaccaaag

SEQ ID NO: 3633761 - DNA, 25 bp, Homo sapien
tgtggttgaaagaaagtgcaccaaa

SEQ ID NO: 3633762 - DNA, 25 bp, Homo sapien
ctgtggttgaaagaaagtgcaccaa

SEQ ID NO: 3633763 - DNA, 25 bp, Homo sapien
gttgaagttttttcagtgagctttc

SEQ ID NO: 3633764 - DNA, 25 bp, Homo sapien
catcttttggtagtggcgtctcacc

SEQ ID NO: 3633765 - DNA, 25 bp, Homo sapien
tcttttggtagtggcgtctcacctg

SEQ ID NO: 3633766 - DNA, 25 bp, Homo sapien
cttttggtagtggcgtctcacctgg

SEQ ID NO: 3633767 - DNA, 25 bp, Homo sapien
atcttttggtagtggcgtctcacct

SEQ ID NO: 3633768 - DNA, 25 bp, Homo sapien
ttccttttctgtactctgtcctcca

SEQ ID NO: 3633769 - DNA, 25 bp, Homo sapien
cttttctgtactctgtcctccaagc

SEQ ID NO: 3633770 - DNA, 25 bp, Homo sapien
gtcttccttttctgtactctgtcct

SEQ ID NO: 3633771 - DNA, 25 bp, Homo sapien
ccttttctgtactctgtcctccaag

SEQ ID NO: 3633772 - DNA, 25 bp, Homo sapien
gcctgcagttgaagtttgacacccc

SEQ ID NO: 3633773 - DNA, 25 bp, Homo sapien
tgcagttgaagtttgacaccccgat

SEQ ID NO: 3633774 - DNA, 25 bp, Homo sapien
agctgcctgcagttgaagtttgaca

SEQ ID NO: 3633775 - DNA, 25 bp, Homo sapien
gctgcctgcagttgaagtttgacac

SEQ ID NO: 3633776 - DNA, 25 bp, Homo sapien
agatagtagtttagccagttagccc

SEQ ID NO: 3633777 - DNA, 25 bp, Homo sapien
tctcaagcaactctcataaacgggt

SEQ ID NO: 3633778 - DNA, 25 bp, Homo sapien
gagtctgggtctaaatgaggcaaca

SEQ ID NO: 3633779 - DNA, 25 bp, Homo sapien
gcaggcttttctacacgaggcaggg

SEQ ID NO: 3633780 - DNA, 25 bp, Homo sapien
caaacaccaaataacaatgtggaag

SEQ ID NO: 3633781 - DNA, 25 bp, Homo sapien
agttcaaacaccaaataacaatgtg

SEQ ID NO: 3633782 - DNA, 25 bp, Homo sapien
ttcaaacaccaaataacaatgtgga

SEQ ID NO: 3633783 - DNA, 25 bp, Homo sapien
aaacaccaaataacaatgtggaagg

SEQ ID NO: 3633784 - DNA, 25 bp, Homo sapien
tcctgttaacatcaacagtccacaa

SEQ ID NO: 3633785 - DNA, 25 bp, Homo sapien
gcatatggcttctacagtgttcctc

SEQ ID NO: 3633786 - DNA, 25 bp, Homo sapien
tcttccatcctgttaacatcaacag

SEQ ID NO: 3633787 - DNA, 25 bp, Homo sapien
gaatagcagcctgtataaaacagtt

SEQ ID NO: 3633788 - DNA, 25 bp, Homo sapien
agttcttcaagtctagtttcttagc

SEQ ID NO: 3633789 - DNA, 25 bp, Homo sapien
gttcttcaagtctagtttcttagca

SEQ ID NO: 3633790 - DNA, 25 bp, Homo sapien
ttcttcaagtctagtttcttagcac

SEQ ID NO: 3633791 - DNA, 25 bp, Homo sapien
aagttcttcaagtctagtttcttag

SEQ ID NO: 3633792 - DNA, 25 bp, Homo sapien
tgtcgttgggttcccagagcactgt

SEQ ID NO: 3633793 - DNA, 25 bp, Homo sapien
atgtcgttgggttcccagagcactg

SEQ ID NO: 3633794 - DNA, 25 bp, Homo sapien
ccgctgctcattgtagctcttggcc

SEQ ID NO: 3633795 - DNA, 25 bp, Homo sapien
gtttctttgctaaggcacaaagaac

SEQ ID NO: 3633796 - DNA, 25 bp, Homo sapien
gatgttctctctgatccgctgctca

SEQ ID NO: 3633797 - DNA, 25 bp, Homo sapien
gtttgtgtttctttgctaaggcaca

SEQ ID NO: 3633798 - DNA, 25 bp, Homo sapien
gtgtgaaggacactgtgcaggagcc

SEQ ID NO: 3633799 - DNA, 25 bp, Homo sapien
gtgaaggacactgtgcaggagccct

SEQ ID NO: 3633800 - DNA, 25 bp, Homo sapien
agccctgatgcccacccaactcctc

SEQ ID NO: 3633801 - DNA, 25 bp, Homo sapien
caggagccctgatgcccacccaact

SEQ ID NO: 3633802 - DNA, 25 bp, Homo sapien
aatccatgacaacatatcgataatt

SEQ ID NO: 3633803 - DNA, 25 bp, Homo sapien
gacaacatatcgataatttctgttt

SEQ ID NO: 3633804 - DNA, 25 bp, Homo sapien
catgacaacatatcgataatttctg

SEQ ID NO: 3633805 - DNA, 25 bp, Homo sapien
tccatgacaacatatcgataatttc

SEQ ID NO: 3633806 - DNA, 25 bp, Homo sapien
tggataatcaggatggtccataaga

SEQ ID NO: 3633807 - DNA, 25 bp, Homo sapien
aatggataatcaggatggtccataa

SEQ ID NO: 3633808 - DNA, 25 bp, Homo sapien
atggataatcaggatggtccataag

SEQ ID NO: 3633809 - DNA, 25 bp, Homo sapien
ggagggatttaaccagaggctgtgt

SEQ ID NO: 3633810 - DNA, 25 bp, Homo sapien
tttctggaccatggatatatctagc

SEQ ID NO: 3633811 - DNA, 25 bp, Homo sapien
cagggccttctgctagatgtcgtgc

SEQ ID NO: 3633812 - DNA, 25 bp, Homo sapien
tatatctagctagctgaagttgcca

SEQ ID NO: 3633813 - DNA, 25 bp, Homo sapien
tcaaagtgctttggccagtagccca

SEQ ID NO: 3633814 - DNA, 25 bp, Homo sapien
ggctctcagccttaaaacgatgtgg

SEQ ID NO: 3633815 - DNA, 25 bp, Homo sapien
cactggtgtctttgatgtcctgctc

SEQ ID NO: 3633816 - DNA, 25 bp, Homo sapien
ggtcactgctgatactgggcacaca

SEQ ID NO: 3633817 - DNA, 25 bp, Homo sapien
gaaatcacccgccttgtgtgtagat

SEQ ID NO: 3633818 - DNA, 25 bp, Homo sapien
gtgtgtagatcttactgggagctgc

SEQ ID NO: 3633819 - DNA, 25 bp, Homo sapien
ttgcctgcaactctcacttgaagac

SEQ ID NO: 3633820 - DNA, 25 bp, Homo sapien
tgaagaccacatagcttcagcaagg

SEQ ID NO: 3633821 - DNA, 25 bp, Homo sapien
gatttaggaacccaagcattggtca

SEQ ID NO: 3633822 - DNA, 25 bp, Homo sapien
tcctttcaaaccctggttggtcatc

SEQ ID NO: 3633823 - DNA, 25 bp, Homo sapien
ttcaaaccctggttggtcatctggt

SEQ ID NO: 3633824 - DNA, 25 bp, Homo sapien
ctttcaaaccctggttggtcatctg

SEQ ID NO: 3633825 - DNA, 25 bp, Homo sapien
cttgaagttagcacaagtacaggga

SEQ ID NO: 3633826 - DNA, 25 bp, Homo sapien
ctgagatgaactaaaatccaccgaa

SEQ ID NO: 3633827 - DNA, 25 bp, Homo sapien
gatgaactaaaatccaccgaaggaa

SEQ ID NO: 3633828 - DNA, 25 bp, Homo sapien
aggaacttgaagttagcacaagtac

SEQ ID NO: 3633829 - DNA, 25 bp, Homo sapien
gttgtctaaacaccatcccatgaag

SEQ ID NO: 3633830 - DNA, 25 bp, Homo sapien
tacttgcgttgacctgatgatctcc

SEQ ID NO: 3633831 - DNA, 25 bp, Homo sapien
gagtccttgtcaccagagaatgttg

SEQ ID NO: 3633832 - DNA, 25 bp, Homo sapien
cctgactagggtttgggcaagaaga

SEQ ID NO: 3633833 - DNA, 25 bp, Homo sapien
aaaacaggagtgtgcaactaaagga

SEQ ID NO: 3633834 - DNA, 25 bp, Homo sapien
aaacaggagtgtgcaactaaaggaa

SEQ ID NO: 3633835 - DNA, 25 bp, Homo sapien
caggagtgtgcaactaaaggaaagc

SEQ ID NO: 3633836 - DNA, 25 bp, Homo sapien
gagtgtgcaactaaaggaaagccaa

SEQ ID NO: 3633837 - DNA, 25 bp, Homo sapien
tgtaacttagcatattggaaatttc

SEQ ID NO: 3633838 - DNA, 25 bp, Homo sapien
tagcatattggaaatttctgttgag

SEQ ID NO: 3633839 - DNA, 25 bp, Homo sapien
attggaaatttctgttgaggacatc

SEQ ID NO: 3633840 - DNA, 25 bp, Homo sapien
aattgtaacttagcatattggaaat

SEQ ID NO: 3633841 - DNA, 25 bp, Homo sapien
agtgcagttgagcaagagtccttga

SEQ ID NO: 3633842 - DNA, 25 bp, Homo sapien
gcagttgagcaagagtccttgattg

SEQ ID NO: 3633843 - DNA, 25 bp, Homo sapien
gtgggatcttccagacactgtctga

SEQ ID NO: 3633844 - DNA, 25 bp, Homo sapien
tctgttgtgaatgccaatatttttg

SEQ ID NO: 3633845 - DNA, 25 bp, Homo sapien
gcaaggatttccgaggtagctttcc

SEQ ID NO: 3633846 - DNA, 25 bp, Homo sapien
caggtacacactgttcttggagcag

SEQ ID NO: 3633847 - DNA, 25 bp, Homo sapien
gattctggccatcgtagctatggat

SEQ ID NO: 3633848 - DNA, 25 bp, Homo sapien
tggctgtggcttcccgattctggcc

SEQ ID NO: 3633849 - DNA, 25 bp, Homo sapien
tgtccgtgtagactttcgccccagc

SEQ ID NO: 3633850 - DNA, 25 bp, Homo sapien
aagtagtccagatttacagagagaa

SEQ ID NO: 3633851 - DNA, 25 bp, Homo sapien
ccgaagtagtaactgcaaaaggcat

SEQ ID NO: 3633852 - DNA, 25 bp, Homo sapien
ccccagcaaggggattatcagtaga

SEQ ID NO: 3633853 - DNA, 25 bp, Homo sapien
accccatcttgttcgtgttgtcatc

SEQ ID NO: 3633854 - DNA, 25 bp, Homo sapien
cccatcttgttcgtgttgtcatcat

SEQ ID NO: 3633855 - DNA, 25 bp, Homo sapien
caccccatcttgttcgtgttgtcat

SEQ ID NO: 3633856 - DNA, 25 bp, Homo sapien
ccccatcttgttcgtgttgtcatca

SEQ ID NO: 3633857 - DNA, 25 bp, Homo sapien
gcaatcttcaaccttagcgatggcc

SEQ ID NO: 3633858 - DNA, 25 bp, Homo sapien
gatggccagcgtgtatttgctttgt

SEQ ID NO: 3633859 - DNA, 25 bp, Homo sapien
ccaggtaactaccacctgggcaatc

SEQ ID NO: 3633860 - DNA, 25 bp, Homo sapien
ttgctgcccaggtaactaccacctg

SEQ ID NO: 3633861 - DNA, 25 bp, Homo sapien
acttcctgtgtaaccaacacctggg

SEQ ID NO: 3633862 - DNA, 25 bp, Homo sapien
ttcccatctgggccccccacgtgtc

SEQ ID NO: 3633863 - DNA, 25 bp, Homo sapien
acacctgggggatgttccttcccat

SEQ ID NO: 3633864 - DNA, 25 bp, Homo sapien
tcaacttcctgtgtaaccaacacct

SEQ ID NO: 3633865 - DNA, 25 bp, Homo sapien
tgttacaagcacagctacttctcgt

SEQ ID NO: 3633866 - DNA, 25 bp, Homo sapien
cagctctgttacaagcacagctact

SEQ ID NO: 3633867 - DNA, 25 bp, Homo sapien
aagcacagctacttctcgtaccaca

SEQ ID NO: 3633868 - DNA, 25 bp, Homo sapien
gctctgttacaagcacagctacttc

SEQ ID NO: 3633869 - DNA, 25 bp, Homo sapien
tctgaaatagactttttgcagaaat

SEQ ID NO: 3633870 - DNA, 25 bp, Homo sapien
tcgggggagcattagatgcaaatga

SEQ ID NO: 3633871 - DNA, 25 bp, Homo sapien
taacctttcctagcactcctccaca

SEQ ID NO: 3633872 - DNA, 25 bp, Homo sapien
caggtgggagaagagcctaaatgtc

SEQ ID NO: 3633873 - DNA, 25 bp, Homo sapien
ccactttattctggagcggtgctca

SEQ ID NO: 3633874 - DNA, 25 bp, Homo sapien
tcccagatgagttggaaatgcccca

SEQ ID NO: 3633875 - DNA, 25 bp, Homo sapien
tttgctgagtgctaaagcaggcctc

SEQ ID NO: 3633876 - DNA, 25 bp, Homo sapien
tcattgcatgctcaccggttcagga

SEQ ID NO: 3633877 - DNA, 25 bp, Homo sapien
ctgttctcatcccctttttctccat

SEQ ID NO: 3633878 - DNA, 25 bp, Homo sapien
ctttctgttctcatcccctttttct

SEQ ID NO: 3633879 - DNA, 25 bp, Homo sapien
tttctgttctcatcccctttttctc

SEQ ID NO: 3633880 - DNA, 25 bp, Homo sapien
ttctgttctcatcccctttttctcc

SEQ ID NO: 3633881 - DNA, 25 bp, Homo sapien
ttaaggttgtgcttctctagagtac

SEQ ID NO: 3633882 - DNA, 25 bp, Homo sapien
cagtttggaagttcttggaccacag

SEQ ID NO: 3633883 - DNA, 25 bp, Homo sapien
ggcatctcagttctaatatgtaacc

SEQ ID NO: 3633884 - DNA, 25 bp, Homo sapien
gcaaatttttctatgccactggtga

SEQ ID NO: 3633885 - DNA, 25 bp, Homo sapien
cagcatgagcatgttgttcagggat

SEQ ID NO: 3633886 - DNA, 25 bp, Homo sapien
tgagtcattggtatcttccgtggac

SEQ ID NO: 3633887 - DNA, 25 bp, Homo sapien
gcctttgtgagtcattggtatcttc

SEQ ID NO: 3633888 - DNA, 25 bp, Homo sapien
tcagcatgagcatgttgttcaggga

SEQ ID NO: 3633889 - DNA, 25 bp, Homo sapien
tgttcttggagcctgccgtcccttc

SEQ ID NO: 3633890 - DNA, 25 bp, Homo sapien
gagcaggctcatcggctcccactgg

SEQ ID NO: 3633891 - DNA, 25 bp, Homo sapien
acagagcaggctcatcggctcccac

SEQ ID NO: 3633892 - DNA, 25 bp, Homo sapien
gccgtcccttcgtcacacagagcag

SEQ ID NO: 3633893 - DNA, 25 bp, Homo sapien
ttgttcctaagtgggctgtgatatt

SEQ ID NO: 3633894 - DNA, 25 bp, Homo sapien
cctgcttctccggtattgttcctaa

SEQ ID NO: 3633895 - DNA, 25 bp, Homo sapien
ccccgtgcacgtccccatgaacttg

SEQ ID NO: 3633896 - DNA, 25 bp, Homo sapien
cctaagtgggctgtgatattccctc

SEQ ID NO: 3633897 - DNA, 25 bp, Homo sapien
gagagtggacttccctccgcagcga

SEQ ID NO: 3633898 - DNA, 25 bp, Homo sapien
ccgagagtggacttccctccgcagc

SEQ ID NO: 3633899 - DNA, 25 bp, Homo sapien
gagtggacttccctccgcagcgaaa

SEQ ID NO: 3633900 - DNA, 25 bp, Homo sapien
gtggacttccctccgcagcgaaacg

SEQ ID NO: 3633901 - DNA, 25 bp, Homo sapien
tgtaaactgtctccgaggactgact

SEQ ID NO: 3633902 - DNA, 25 bp, Homo sapien
ggactgactttcctgtgcacagctg

SEQ ID NO: 3633903 - DNA, 25 bp, Homo sapien
tgtcctcgctgctttgcaggcggcg

SEQ ID NO: 3633904 - DNA, 25 bp, Homo sapien
gcttcacaggtgtgcccgagagtga

SEQ ID NO: 3633905 - DNA, 25 bp, Homo sapien
tatatccctgttgcttaaagaccat

SEQ ID NO: 3633906 - DNA, 25 bp, Homo sapien
tcatcattggcaaggctgactgaat

SEQ ID NO: 3633907 - DNA, 25 bp, Homo sapien
cattggcaaggctgactgaatatat

SEQ ID NO: 3633908 - DNA, 25 bp, Homo sapien
ctgaatatatccctgttgcttaaag

SEQ ID NO: 3633909 - DNA, 25 bp, Homo sapien
tgcgcaggtagtggaagctcctctt

SEQ ID NO: 3633910 - DNA, 25 bp, Homo sapien
tctcagcctcagacagggcggtgtt

SEQ ID NO: 3633911 - DNA, 25 bp, Homo sapien
tgcttgggacacgtatctgtaccgg

SEQ ID NO: 3633912 - DNA, 25 bp, Homo sapien
gcaggaagtggaccggcatcagcat

SEQ ID NO: 3633913 - DNA, 25 bp, Homo sapien
atgttgaagaggaggttcatgatgt

SEQ ID NO: 3633914 - DNA, 25 bp, Homo sapien
tttgcgccatcaggtgggcattggc

SEQ ID NO: 3633915 - DNA, 25 bp, Homo sapien
acgcaggttcttggccttggcgatg

SEQ ID NO: 3633916 - DNA, 25 bp, Homo sapien
tcctcccaatttgcgccatcaggtg

SEQ ID NO: 3633917 - DNA, 25 bp, Homo sapien
tctgtgtgtacagacagagcaggag

SEQ ID NO: 3633918 - DNA, 25 bp, Homo sapien
acgctgagtacagggaggaacgtta

SEQ ID NO: 3633919 - DNA, 25 bp, Homo sapien
tgtaaaactgactgatcccacaaaa

SEQ ID NO: 3633920 - DNA, 25 bp, Homo sapien
tctgggaaggttggacaatactgca

SEQ ID NO: 3633921 - DNA, 25 bp, Homo sapien
cttttgggaatctggcctgggcttt

SEQ ID NO: 3633922 - DNA, 25 bp, Homo sapien
cagcccctcttttgggaatctggcc

SEQ ID NO: 3633923 - DNA, 25 bp, Homo sapien
agcccctcttttgggaatctggcct

SEQ ID NO: 3633924 - DNA, 25 bp, Homo sapien
ggatcgtttgattcttactgctggt

SEQ ID NO: 3633925 - DNA, 25 bp, Homo sapien
ctgctggtgaagctattccgtttct

SEQ ID NO: 3633926 - DNA, 25 bp, Homo sapien
gctgtgaaattggatcgtttgattc

SEQ ID NO: 3633927 - DNA, 25 bp, Homo sapien
gaagctattccgtttctctatcctt

SEQ ID NO: 3633928 - DNA, 25 bp, Homo sapien
gccaggcagaaagcgcctgtcagcg

SEQ ID NO: 3633929 - DNA, 25 bp, Homo sapien
ctgccaggcagaaagcgcctgtcag

SEQ ID NO: 3633930 - DNA, 25 bp, Homo sapien
ggcagaaagcgcctgtcagcggact

SEQ ID NO: 3633931 - DNA, 25 bp, Homo sapien
aaagcgcctgtcagcggactgcagc

SEQ ID NO: 3633932 - DNA, 25 bp, Homo sapien
ggcagggacgggcacgatgcccgcc

SEQ ID NO: 3633933 - DNA, 25 bp, Homo sapien
gcagggacgggcacgatgcccgcca

SEQ ID NO: 3633934 - DNA, 25 bp, Homo sapien
ccggcagggacgggcacgatgcccg

SEQ ID NO: 3633935 - DNA, 25 bp, Homo sapien
cagggacgggcacgatgcccgccag

SEQ ID NO: 3633936 - DNA, 25 bp, Homo sapien
gtgtcggccgaaggccccgtcgctc

SEQ ID NO: 3633937 - DNA, 25 bp, Homo sapien
ggctgcttctgagccgccagctcgg

SEQ ID NO: 3633938 - DNA, 25 bp, Homo sapien
ggcggcttcgcctccgcggtcgagg

SEQ ID NO: 3633939 - DNA, 25 bp, Homo sapien
gtccagctccgacccggaggtgtcg

SEQ ID NO: 3633940 - DNA, 25 bp, Homo sapien
tctaccaatggacagcattatttca

SEQ ID NO: 3633941 - DNA, 25 bp, Homo sapien
tttttctaccaatggacagcattat

SEQ ID NO: 3633942 - DNA, 25 bp, Homo sapien
ttttctaccaatggacagcattatt

SEQ ID NO: 3633943 - DNA, 25 bp, Homo sapien
ttctaccaatggacagcattatttc

SEQ ID NO: 3633944 - DNA, 25 bp, Homo sapien
ggagctgcctctccgaagggaacat

SEQ ID NO: 3633945 - DNA, 25 bp, Homo sapien
aatgtgaaggagctgcctctccgaa

SEQ ID NO: 3633946 - DNA, 25 bp, Homo sapien
gaaggagctgcctctccgaagggaa

SEQ ID NO: 3633947 - DNA, 25 bp, Homo sapien
tgtgaaggagctgcctctccgaagg

SEQ ID NO: 3633948 - DNA, 25 bp, Homo sapien
gcccttctggcaccagtagtggcaa

SEQ ID NO: 3633949 - DNA, 25 bp, Homo sapien
gcaaaactgtgtacatatctaccat

SEQ ID NO: 3633950 - DNA, 25 bp, Homo sapien
attcagcccttctggcaccagtagt

SEQ ID NO: 3633951 - DNA, 25 bp, Homo sapien
gtagtggcaaaactgtgtacatatc

SEQ ID NO: 3633952 - DNA, 25 bp, Homo sapien
cagatcaaggctgctaaggcttaca

SEQ ID NO: 3633953 - DNA, 25 bp, Homo sapien
caaggctgctaaggcttacaacatc

SEQ ID NO: 3633954 - DNA, 25 bp, Homo sapien
gatcaaggctgctaaggcttacaac

SEQ ID NO: 3633955 - DNA, 25 bp, Homo sapien
gctgctaaggcttacaacatcatca

SEQ ID NO: 3633956 - DNA, 25 bp, Homo sapien
aattgacttgctggatttgttaaaa

SEQ ID NO: 3633957 - DNA, 25 bp, Homo sapien
taaatgcaactaaaactgttttgca

SEQ ID NO: 3633958 - DNA, 25 bp, Homo sapien
cacataattcttctatgaagacact

SEQ ID NO: 3633959 - DNA, 25 bp, Homo sapien
gcaaaaatgatgttagtaattccaa

SEQ ID NO: 3633960 - DNA, 25 bp, Homo sapien
cagaggcttctgagagccgcaggca

SEQ ID NO: 3633961 - DNA, 25 bp, Homo sapien
ggcttttcttcccagagctcggcca

SEQ ID NO: 3633962 - DNA, 25 bp, Homo sapien
cctcggcagccacgtgcccatgcct

SEQ ID NO: 3633963 - DNA, 25 bp, Homo sapien
atgcctctcgccgcggtggagcaga

SEQ ID NO: 3633964 - DNA, 25 bp, Homo sapien
aaacctttccaatcaatccacaccg

SEQ ID NO: 3633965 - DNA, 25 bp, Homo sapien
tttccaatcaatccacaccgagtca

SEQ ID NO: 3633966 - DNA, 25 bp, Homo sapien
cacaccgagtcagcgctgtagcgac

SEQ ID NO: 3633967 - DNA, 25 bp, Homo sapien
aatcaatccacaccgagtcagcgct

SEQ ID NO: 3633968 - DNA, 25 bp, Homo sapien
ttgacatctaggactcgtatggtcc

SEQ ID NO: 3633969 - DNA, 25 bp, Homo sapien
gttattgacatctaggactcgtatg

SEQ ID NO: 3633970 - DNA, 25 bp, Homo sapien
catctaggactcgtatggtcctttt

SEQ ID NO: 3633971 - DNA, 25 bp, Homo sapien
taggactcgtatggtccttttaata

SEQ ID NO: 3633972 - DNA, 25 bp, Homo sapien
tgtgacaaacgtaacccgagtaaca

SEQ ID NO: 3633973 - DNA, 25 bp, Homo sapien
gctccgtggagttagaaaacattcc

SEQ ID NO: 3633974 - DNA, 25 bp, Homo sapien
cctaaacacatttcaagcttgcaca

SEQ ID NO: 3633975 - DNA, 25 bp, Homo sapien
ctgtgtacactcaagctatgctatg

SEQ ID NO: 3633976 - DNA, 25 bp, Homo sapien
cagggctaaagttcacttggaggga

SEQ ID NO: 3633977 - DNA, 25 bp, Homo sapien
taatcagactaggttagccaggcag

SEQ ID NO: 3633978 - DNA, 25 bp, Homo sapien
gcagggaacctttcaccagggctaa

SEQ ID NO: 3633979 - DNA, 25 bp, Homo sapien
cattattataggcaatctgtccaca

SEQ ID NO: 3633980 - DNA, 25 bp, Homo sapien
gctctgaaatctgactgggcacaaa

SEQ ID NO: 3633981 - DNA, 25 bp, Homo sapien
cctcacagagtaagaaatgccgaca

SEQ ID NO: 3633982 - DNA, 25 bp, Homo sapien
tatgtaataagatggcacacgctgt

SEQ ID NO: 3633983 - DNA, 25 bp, Homo sapien
tgaggacatgtgtggatgcctcccc

SEQ ID NO: 3633984 - DNA, 25 bp, Homo sapien
taaatttgccaaggacgtgacacga

SEQ ID NO: 3633985 - DNA, 25 bp, Homo sapien
tcttacaggagagattaaatttgcc

SEQ ID NO: 3633986 - DNA, 25 bp, Homo sapien
tgacacgagccagaggtcgaactct

SEQ ID NO: 3633987 - DNA, 25 bp, Homo sapien
gtttgaccaaaacgtctgacagctc

SEQ ID NO: 3633988 - DNA, 25 bp, Homo sapien
tgtttgtacagctcaaagacaacta

SEQ ID NO: 3633989 - DNA, 25 bp, Homo sapien
ccaagactatgcattataagatgca

SEQ ID NO: 3633990 - DNA, 25 bp, Homo sapien
ggaacaatattccttactagcatat

SEQ ID NO: 3633991 - DNA, 25 bp, Homo sapien
caactacaaattccaggcttctata

SEQ ID NO: 3633992 - DNA, 25 bp, Homo sapien
tggtggtgagagactccttcatggt

SEQ ID NO: 3633993 - DNA, 25 bp, Homo sapien
cttggcgggtgttgggactgttgac

SEQ ID NO: 3633994 - DNA, 25 bp, Homo sapien
ttctcttggcgggtgttgggactgt

SEQ ID NO: 3633995 - DNA, 25 bp, Homo sapien
gctggggatctgtggtcaccacgaa

SEQ ID NO: 3633996 - DNA, 25 bp, Homo sapien
atttgatgttttgaacggcatttta

SEQ ID NO: 3633997 - DNA, 25 bp, Homo sapien
ttatttgatgttttgaacggcattt

SEQ ID NO: 3633998 - DNA, 25 bp, Homo sapien
tatttgatgttttgaacggcatttt

SEQ ID NO: 3633999 - DNA, 25 bp, Homo sapien
ctaaaaacatccagcaaacatcaga

SEQ ID NO: 3634000 - DNA, 25 bp, Homo sapien
atccagcaaacatcagaggtcattc

SEQ ID NO: 3634001 - DNA, 25 bp, Homo sapien
aaacatccagcaaacatcagaggtc

SEQ ID NO: 3634002 - DNA, 25 bp, Homo sapien
taaaaacatccagcaaacatcagag

SEQ ID NO: 3634003 - DNA, 25 bp, Homo sapien
cacctcgggacatttcatatattgc

SEQ ID NO: 3634004 - DNA, 25 bp, Homo sapien
ttcttgcaagtttgagatcctcaat

SEQ ID NO: 3634005 - DNA, 25 bp, Homo sapien
tcacctcgggacatttcatatattg

SEQ ID NO: 3634006 - DNA, 25 bp, Homo sapien
tacataaaagctagcgtggattctg

SEQ ID NO: 3634007 - DNA, 25 bp, Homo sapien
cacagagagatcatgtgaggaaaac

SEQ ID NO: 3634008 - DNA, 25 bp, Homo sapien
tgaggaaaacatgagggatctatac

SEQ ID NO: 3634009 - DNA, 25 bp, Homo sapien
ggatgtgtctagacctcacctaaaa

SEQ ID NO: 3634010 - DNA, 25 bp, Homo sapien
acaactttaacatggggtcatgata

SEQ ID NO: 3634011 - DNA, 25 bp, Homo sapien
ggacaactttaacatggggtcatga

SEQ ID NO: 3634012 - DNA, 25 bp, Homo sapien
tggacaactttaacatggggtcatg

SEQ ID NO: 3634013 - DNA, 25 bp, Homo sapien
atggacaactttaacatggggtcat

SEQ ID NO: 3634014 - DNA, 25 bp, Homo sapien
gagtccagatcaccaaatatatgtg

SEQ ID NO: 3634015 - DNA, 25 bp, Homo sapien
tgtaagagtccagatcaccaaatat

SEQ ID NO: 3634016 - DNA, 25 bp, Homo sapien
cagaggtatgtaagagtccagatca

SEQ ID NO: 3634017 - DNA, 25 bp, Homo sapien
ttcatgcagaggtatgtaagagtcc

SEQ ID NO: 3634018 - DNA, 25 bp, Homo sapien
taatgacaattaagtggcacatcta

SEQ ID NO: 3634019 - DNA, 25 bp, Homo sapien
aaataggtcagcactacattagaag

SEQ ID NO: 3634020 - DNA, 25 bp, Homo sapien
tgaaaattacatgcaccgctgctct

SEQ ID NO: 3634021 - DNA, 25 bp, Homo sapien
aaaagcataaacaccattaacaggt

SEQ ID NO: 3634022 - DNA, 25 bp, Homo sapien
atgtgaccaatctgctccactgttc

SEQ ID NO: 3634023 - DNA, 25 bp, Homo sapien
catcaggcttggttgcttctcctat

SEQ ID NO: 3634024 - DNA, 25 bp, Homo sapien
gagaatgtgaccaatctgctccact

SEQ ID NO: 3634025 - DNA, 25 bp, Homo sapien
tccactgttccatcaggcttggttg

SEQ ID NO: 3634026 - DNA, 25 bp, Homo sapien
gagttgtgggatcaaatctgtctca

SEQ ID NO: 3634027 - DNA, 25 bp, Homo sapien
tatctggggtcaacaactcactaca

SEQ ID NO: 3634028 - DNA, 25 bp, Homo sapien
catattcatcagaaactgcaacatg

SEQ ID NO: 3634029 - DNA, 25 bp, Homo sapien
taacgccttatgtgtttgtagaaca

SEQ ID NO: 3634030 - DNA, 25 bp, Homo sapien
caaaatgtacagctattcttgagag

SEQ ID NO: 3634031 - DNA, 25 bp, Homo sapien
ccctgagactgtttatgtgcttggc

SEQ ID NO: 3634032 - DNA, 25 bp, Homo sapien
gcttggctattccttcactaggcta

SEQ ID NO: 3634033 - DNA, 25 bp, Homo sapien
tgaagattcatgacttctactcccc

SEQ ID NO: 3634034 - DNA, 25 bp, Homo sapien
gttatgaccgagtgcattaacaagc

SEQ ID NO: 3634035 - DNA, 25 bp, Homo sapien
tatgatgtgttcctgttatgaccga

SEQ ID NO: 3634036 - DNA, 25 bp, Homo sapien
tgtgttcctgttatgaccgagtgca

SEQ ID NO: 3634037 - DNA, 25 bp, Homo sapien
aagaaaaggtatgatgtgttcctgt

SEQ ID NO: 3634038 - DNA, 25 bp, Homo sapien
gatcaagaagagctttggctgccag

SEQ ID NO: 3634039 - DNA, 25 bp, Homo sapien
cttcgagggatatctaggaaactcc

SEQ ID NO: 3634040 - DNA, 25 bp, Homo sapien
tgaagggagactcgagacatcgctg

SEQ ID NO: 3634041 - DNA, 25 bp, Homo sapien
ggtatttgactaggcgacttcgagg

SEQ ID NO: 3634042 - DNA, 25 bp, Homo sapien
tgcacagcgtactaacgcactgggt

SEQ ID NO: 3634043 - DNA, 25 bp, Homo sapien
gatacaaaatgtgcgaagtccagca

SEQ ID NO: 3634044 - DNA, 25 bp, Homo sapien
tatagatcaagaaacagtcctagcc

SEQ ID NO: 3634045 - DNA, 25 bp, Homo sapien
gctccttattgcttagtgcacagcg

SEQ ID NO: 3634046 - DNA, 25 bp, Homo sapien
gcactttgctcgcttcgattctggg

SEQ ID NO: 3634047 - DNA, 25 bp, Homo sapien
cactcggattcacctttcttcaagt

SEQ ID NO: 3634048 - DNA, 25 bp, Homo sapien
cacagcagcactttgctcgcttcga

SEQ ID NO: 3634049 - DNA, 25 bp, Homo sapien
ttgtcgatgtaatactggcactcgg

SEQ ID NO: 3634050 - DNA, 25 bp, Homo sapien
aaaaataccattccgtgactgcact

SEQ ID NO: 3634051 - DNA, 25 bp, Homo sapien
tgaatgctctgcatcacaaagacct

SEQ ID NO: 3634052 - DNA, 25 bp, Homo sapien
catgacttgaaacactagcgttgta

SEQ ID NO: 3634053 - DNA, 25 bp, Homo sapien
cacagttttctaacacgaaggaggg

SEQ ID NO: 3634054 - DNA, 25 bp, Homo sapien
catcctgcaggtcttctaggactag

SEQ ID NO: 3634055 - DNA, 25 bp, Homo sapien
tctaggactagctcttggactggga

SEQ ID NO: 3634056 - DNA, 25 bp, Homo sapien
tgccggtaaacctggtaagagtgcc

SEQ ID NO: 3634057 - DNA, 25 bp, Homo sapien
taagagtgccgttcgttccgtgtga

SEQ ID NO: 3634058 - DNA, 25 bp, Homo sapien
tcttagatacacctgcgggtgttcg

SEQ ID NO: 3634059 - DNA, 25 bp, Homo sapien
caatggatgtaacaagtataggaca

SEQ ID NO: 3634060 - DNA, 25 bp, Homo sapien
catacaatcttaacgtgactgtcaa

SEQ ID NO: 3634061 - DNA, 25 bp, Homo sapien
aaggcctggacaactcaatggatgt

SEQ ID NO: 3634062 - DNA, 25 bp, Homo sapien
caatggccgctcgaatacagttgaa

SEQ ID NO: 3634063 - DNA, 25 bp, Homo sapien
tggaacacgtcattggcttgcagag

SEQ ID NO: 3634064 - DNA, 25 bp, Homo sapien
ttgtccctcgctcttcggatgccgg

SEQ ID NO: 3634065 - DNA, 25 bp, Homo sapien
gccacatctgtaagcgttttcatca

SEQ ID NO: 3634066 - DNA, 25 bp, Homo sapien
tataaagtaaccctatgatgctccc

SEQ ID NO: 3634067 - DNA, 25 bp, Homo sapien
gatgctccccttacgagaaaacaaa

SEQ ID NO: 3634068 - DNA, 25 bp, Homo sapien
tagcaaagaaacactggcagaattc

SEQ ID NO: 3634069 - DNA, 25 bp, Homo sapien
tccatgtaggttttgggtgccaatg

SEQ ID NO: 3634070 - DNA, 25 bp, Homo sapien
caaggcaaataagtccacgtcccct

SEQ ID NO: 3634071 - DNA, 25 bp, Homo sapien
ggcacaaccagacattttacttgaa

SEQ ID NO: 3634072 - DNA, 25 bp, Homo sapien
ttactacacgccctcaagttgagct

SEQ ID NO: 3634073 - DNA, 25 bp, Homo sapien
tagaatacatcaagccatttcatgg

SEQ ID NO: 3634074 - DNA, 25 bp, Homo sapien
tatcctatccagaaagtaacaggtg

SEQ ID NO: 3634075 - DNA, 25 bp, Homo sapien
taactattctatacaacacctctgg

SEQ ID NO: 3634076 - DNA, 25 bp, Homo sapien
gaaattaatcaggatcctttgccac

SEQ ID NO: 3634077 - DNA, 25 bp, Homo sapien
gccaccaggcaagaaaccttcaggg

SEQ ID NO: 3634078 - DNA, 25 bp, Homo sapien
cccagccaccttaggcacaggcaga

SEQ ID NO: 3634079 - DNA, 25 bp, Homo sapien
tcccagccaccttaggcacaggcag

SEQ ID NO: 3634080 - DNA, 25 bp, Homo sapien
ccagccaccttaggcacaggcagag

SEQ ID NO: 3634081 - DNA, 25 bp, Homo sapien
gctcccagccaccttaggcacaggc

SEQ ID NO: 3634082 - DNA, 25 bp, Homo sapien
tgaccttgaacttggcatcatcttt

SEQ ID NO: 3634083 - DNA, 25 bp, Homo sapien
gggagttgtcgtgaccttgaacttg

SEQ ID NO: 3634084 - DNA, 25 bp, Homo sapien
gaagcagaggctccgtcacggggag

SEQ ID NO: 3634085 - DNA, 25 bp, Homo sapien
tccgtcacggggagttgtcgtgacc

SEQ ID NO: 3634086 - DNA, 25 bp, Homo sapien
cgggcattggtggggcagagcctca

SEQ ID NO: 3634087 - DNA, 25 bp, Homo sapien
gggcattggtggggcagagcctcac

SEQ ID NO: 3634088 - DNA, 25 bp, Homo sapien
gctgagctactgagttctagaaggc

SEQ ID NO: 3634089 - DNA, 25 bp, Homo sapien
agctgagctactgagttctagaagg

SEQ ID NO: 3634090 - DNA, 25 bp, Homo sapien
tgagctactgagttctagaaggcac

SEQ ID NO: 3634091 - DNA, 25 bp, Homo sapien
ctgagctactgagttctagaaggca

SEQ ID NO: 3634092 - DNA, 25 bp, Homo sapien
cgttccttcaagacctttcctgtgg

SEQ ID NO: 3634093 - DNA, 25 bp, Homo sapien
cctttcctgtggcctgattgattgt

SEQ ID NO: 3634094 - DNA, 25 bp, Homo sapien
ctttcctgtggcctgattgattgtg

SEQ ID NO: 3634095 - DNA, 25 bp, Homo sapien
cctcgttccttcaagacctttcctg

SEQ ID NO: 3634096 - DNA, 25 bp, Homo sapien
gaaaagatggggggacctgctagga

SEQ ID NO: 3634097 - DNA, 25 bp, Homo sapien
gatggggggacctgctaggaaccat

SEQ ID NO: 3634098 - DNA, 25 bp, Homo sapien
agatggggggacctgctaggaacca

SEQ ID NO: 3634099 - DNA, 25 bp, Homo sapien
ctgaaaagatggggggacctgctag

SEQ ID NO: 3634100 - DNA, 25 bp, Homo sapien
accaggaagacccatgtgtcgggaa

SEQ ID NO: 3634101 - DNA, 25 bp, Homo sapien
catgtgtcgggaatggtggacagaa

SEQ ID NO: 3634102 - DNA, 25 bp, Homo sapien
tgctcagctgccgccgagaagacca

SEQ ID NO: 3634103 - DNA, 25 bp, Homo sapien
cgccgagaagaccacacgctgggtg

SEQ ID NO: 3634104 - DNA, 25 bp, Homo sapien
gcctgtttgggagaagcctgagatc

SEQ ID NO: 3634105 - DNA, 25 bp, Homo sapien
cagtgtcactgatgttcaattctga

SEQ ID NO: 3634106 - DNA, 25 bp, Homo sapien
tcaattctgaaagttctgcctttag

SEQ ID NO: 3634107 - DNA, 25 bp, Homo sapien
gttatctcaatagcccaatgtgcct

SEQ ID NO: 3634108 - DNA, 25 bp, Homo sapien
tgtaacataaatggccatgcaaaga

SEQ ID NO: 3634109 - DNA, 25 bp, Homo sapien
gattcccattcgaggaggtgctcag

SEQ ID NO: 3634110 - DNA, 25 bp, Homo sapien
aactgcatgagtgacggtttggaag

SEQ ID NO: 3634111 - DNA, 25 bp, Homo sapien
acagtgggtcaggtccctcgtcagt

SEQ ID NO: 3634112 - DNA, 25 bp, Homo sapien
catgcactgtgatggcacgacctgg

SEQ ID NO: 3634113 - DNA, 25 bp, Homo sapien
tgtgttggattctgcatgaaaccct

SEQ ID NO: 3634114 - DNA, 25 bp, Homo sapien
tgcttaaactagatgacaggctcct

SEQ ID NO: 3634115 - DNA, 25 bp, Homo sapien
ccctgaatagtgaaataaagcccat

SEQ ID NO: 3634116 - DNA, 25 bp, Homo sapien
ctgtggccttggcagttggacccag

SEQ ID NO: 3634117 - DNA, 25 bp, Homo sapien
ggtgagccccctacaaagagggctg

SEQ ID NO: 3634118 - DNA, 25 bp, Homo sapien
aggcttgtggccgacttggcatcag

SEQ ID NO: 3634119 - DNA, 25 bp, Homo sapien
gctccaggcttgtggccgacttggc

SEQ ID NO: 3634120 - DNA, 25 bp, Homo sapien
gcctgacagcaggaattcgctgtgc

SEQ ID NO: 3634121 - DNA, 25 bp, Homo sapien
cctccctggactcccctggagtctt

SEQ ID NO: 3634122 - DNA, 25 bp, Homo sapien
ccctggagtcttagcaaagacaaga

SEQ ID NO: 3634123 - DNA, 25 bp, Homo sapien
tggagtcttagcaaagacaagaagt

SEQ ID NO: 3634124 - DNA, 25 bp, Homo sapien
tggactcccctggagtcttagcaaa

SEQ ID NO: 3634125 - DNA, 25 bp, Homo sapien
aagccaacaggtaactgctggtttc

SEQ ID NO: 3634126 - DNA, 25 bp, Homo sapien
accaacgaccaggatgagaagccaa

SEQ ID NO: 3634127 - DNA, 25 bp, Homo sapien
tcctgcccacttgaccaacgaccag

SEQ ID NO: 3634128 - DNA, 25 bp, Homo sapien
agaagccaacaggtaactgctggtt

SEQ ID NO: 3634129 - DNA, 25 bp, Homo sapien
caagggattcggacatgtggctgac

SEQ ID NO: 3634130 - DNA, 25 bp, Homo sapien
tcatgaaggaatacagggacagtca

SEQ ID NO: 3634131 - DNA, 25 bp, Homo sapien
tggagagccccggatggcatcaggg

SEQ ID NO: 3634132 - DNA, 25 bp, Homo sapien
caggagacaggagcaccaagggatt

SEQ ID NO: 3634133 - DNA, 25 bp, Homo sapien
gaagtcccactatcattctctggtc

SEQ ID NO: 3634134 - DNA, 25 bp, Homo sapien
tcccactatcattctctggtccaca

SEQ ID NO: 3634135 - DNA, 25 bp, Homo sapien
agtcccactatcattctctggtcca

SEQ ID NO: 3634136 - DNA, 25 bp, Homo sapien
cccactatcattctctggtccacat

SEQ ID NO: 3634137 - DNA, 25 bp, Homo sapien
gccaagggctggaagatgatcagtg

SEQ ID NO: 3634138 - DNA, 25 bp, Homo sapien
gagaagcagctgtctaggccggagt

SEQ ID NO: 3634139 - DNA, 25 bp, Homo sapien
agcagctgtctaggccggagtggcc

SEQ ID NO: 3634140 - DNA, 25 bp, Homo sapien
agggccaagggctggaagatgatca

SEQ ID NO: 3634141 - DNA, 25 bp, Homo sapien
tcgtgaggttaactagcaagacagc

SEQ ID NO: 3634142 - DNA, 25 bp, Homo sapien
cctggcttgagacgctggagcttaa

SEQ ID NO: 3634143 - DNA, 25 bp, Homo sapien
gctttggagcaatccacgctggact

SEQ ID NO: 3634144 - DNA, 25 bp, Homo sapien
ctgtttagacaggagtccagggcct

SEQ ID NO: 3634145 - DNA, 25 bp, Homo sapien
tgggtggcagaagaggccactgtgg

SEQ ID NO: 3634146 - DNA, 25 bp, Homo sapien
ctcccagtgccgcagcccggctgct

SEQ ID NO: 3634147 - DNA, 25 bp, Homo sapien
gggtctccctcccagtgccgcagcc

SEQ ID NO: 3634148 - DNA, 25 bp, Homo sapien
aggccactgtggggtctccctccca

SEQ ID NO: 3634149 - DNA, 25 bp, Homo sapien
ggtcgatctcactcatcatgtcccg

SEQ ID NO: 3634150 - DNA, 25 bp, Homo sapien
gtccccatccttgtcaaacagggag

SEQ ID NO: 3634151 - DNA, 25 bp, Homo sapien
agctcgcgggtggtgatgcagccgt

SEQ ID NO: 3634152 - DNA, 25 bp, Homo sapien
tctggcccagggaccgcatgaccgt

SEQ ID NO: 3634153 - DNA, 25 bp, Homo sapien
cgtccttgtcgaacacgcggaaggc

SEQ ID NO: 3634154 - DNA, 25 bp, Homo sapien
gtgtccgcggcccggatcatctcgt

SEQ ID NO: 3634155 - DNA, 25 bp, Homo sapien
tcgtagttcacctgtccgtctccgt

SEQ ID NO: 3634156 - DNA, 25 bp, Homo sapien
ccgggtcatgacgtgtcgcagctcg

SEQ ID NO: 3634157 - DNA, 25 bp, Homo sapien
taggaacaggttacagctgacccag

SEQ ID NO: 3634158 - DNA, 25 bp, Homo sapien
gctgaatcaaccaggcgcaggagga

SEQ ID NO: 3634159 - DNA, 25 bp, Homo sapien
tccgtgtcattcagacgagcaggtg

SEQ ID NO: 3634160 - DNA, 25 bp, Homo sapien
cctgcagtgggagcgttccgtgtca

SEQ ID NO: 3634161 - DNA, 25 bp, Homo sapien
cttgcagggctagtgcaggactaac

SEQ ID NO: 3634162 - DNA, 25 bp, Homo sapien
ggactaacggctctgaattgctctt

SEQ ID NO: 3634163 - DNA, 25 bp, Homo sapien
cagcaggtcccttctcaacgtaatg

SEQ ID NO: 3634164 - DNA, 25 bp, Homo sapien
gctgccagcgtatccatttgattga

SEQ ID NO: 3634165 - DNA, 25 bp, Homo sapien
atgtggcagcagacggtgctcactg

SEQ ID NO: 3634166 - DNA, 25 bp, Homo sapien
gcagcagacggtgctcactgtggtg

SEQ ID NO: 3634167 - DNA, 25 bp, Homo sapien
gtggcagcagacggtgctcactgtg

SEQ ID NO: 3634168 - DNA, 25 bp, Homo sapien
tggcagcagacggtgctcactgtgg

SEQ ID NO: 3634169 - DNA, 25 bp, Homo sapien
tcagagtagctgatgccatgccgtg

SEQ ID NO: 3634170 - DNA, 25 bp, Homo sapien
gatgcattcatactgtgggtttggg

SEQ ID NO: 3634171 - DNA, 25 bp, Homo sapien
ggtcagcaatgctagcccggtgaga

SEQ ID NO: 3634172 - DNA, 25 bp, Homo sapien
catcacgccccgtgaggcagaagga

SEQ ID NO: 3634173 - DNA, 25 bp, Homo sapien
cacatttctctagcggaagccgtgg

SEQ ID NO: 3634174 - DNA, 25 bp, Homo sapien
gaagccgtgggtcatttttagctgg

SEQ ID NO: 3634175 - DNA, 25 bp, Homo sapien
cacgggagtcagaggcgagctttat

SEQ ID NO: 3634176 - DNA, 25 bp, Homo sapien
cccatacacgagttttgataccaca

SEQ ID NO: 3634177 - DNA, 25 bp, Homo sapien
ggaacattcccctggagggcaggac

SEQ ID NO: 3634178 - DNA, 25 bp, Homo sapien
tggaacattcccctggagggcagga

SEQ ID NO: 3634179 - DNA, 25 bp, Homo sapien
ctggaacattcccctggagggcagg

SEQ ID NO: 3634180 - DNA, 25 bp, Homo sapien
taactttgctatgcatagctcatcg

SEQ ID NO: 3634181 - DNA, 25 bp, Homo sapien
gaggacgttccagcagaacttattc

SEQ ID NO: 3634182 - DNA, 25 bp, Homo sapien
tgtgtccacagatcctggagaatga

SEQ ID NO: 3634183 - DNA, 25 bp, Homo sapien
tgaggaacaagacttaactttgcta

SEQ ID NO: 3634184 - DNA, 25 bp, Homo sapien
ggaatcttccggatccaagtggctg

SEQ ID NO: 3634185 - DNA, 25 bp, Homo sapien
ctctttagccaccaggttagtaatt

SEQ ID NO: 3634186 - DNA, 25 bp, Homo sapien
cccatgcaagtgtgtacaggaatct

SEQ ID NO: 3634187 - DNA, 25 bp, Homo sapien
tagtaattttacacccatgcaagtg

SEQ ID NO: 3634188 - DNA, 25 bp, Homo sapien
atcgtgggggaccttgtgctctctg

SEQ ID NO: 3634189 - DNA, 25 bp, Homo sapien
ccatcgtgggggaccttgtgctctc

SEQ ID NO: 3634190 - DNA, 25 bp, Homo sapien
gccatcgtgggggaccttgtgctct

SEQ ID NO: 3634191 - DNA, 25 bp, Homo sapien
ggggccatcgtgggggaccttgtgc

SEQ ID NO: 3634192 - DNA, 25 bp, Homo sapien
ccgttttcccgctgttctcaacaag

SEQ ID NO: 3634193 - DNA, 25 bp, Homo sapien
tccgttttcccgctgttctcaacaa

SEQ ID NO: 3634194 - DNA, 25 bp, Homo sapien
agcagctatggattgactggttgat

SEQ ID NO: 3634195 - DNA, 25 bp, Homo sapien
tctcaacaagcagctatggattgac

SEQ ID NO: 3634196 - DNA, 25 bp, Homo sapien
gtaaggtgtcgtgttgtgcttttgg

SEQ ID NO: 3634197 - DNA, 25 bp, Homo sapien
aaggtgtcgtgttgtgcttttggcc

SEQ ID NO: 3634198 - DNA, 25 bp, Homo sapien
taaggtgtcgtgttgtgcttttggc

SEQ ID NO: 3634199 - DNA, 25 bp, Homo sapien
cgtaaggtgtcgtgttgtgcttttg

SEQ ID NO: 3634200 - DNA, 25 bp, Homo sapien
aggataccaggagagtgcacctgag

SEQ ID NO: 3634201 - DNA, 25 bp, Homo sapien
tgagtgggacaccaggaggtggaga

SEQ ID NO: 3634202 - DNA, 25 bp, Homo sapien
gagtgggacaccaggaggtggagac

SEQ ID NO: 3634203 - DNA, 25 bp, Homo sapien
ataccaggagagtgcacctgagtgg

SEQ ID NO: 3634204 - DNA, 25 bp, Homo sapien
tgggagttttgtgcttcggttctgg

SEQ ID NO: 3634205 - DNA, 25 bp, Homo sapien
agtccagtaactggccccataaatg

SEQ ID NO: 3634206 - DNA, 25 bp, Homo sapien
gaggaattttcgtctgggtcaggga

SEQ ID NO: 3634207 - DNA, 25 bp, Homo sapien
gaaggtcataggtagcagtccagta

SEQ ID NO: 3634208 - DNA, 25 bp, Homo sapien
ctgactcagaggcaactaccacgat

SEQ ID NO: 3634209 - DNA, 25 bp, Homo sapien
tgacagcagcgttttgctgactcag

SEQ ID NO: 3634210 - DNA, 25 bp, Homo sapien
cagaggcaactaccacgatgaccct

SEQ ID NO: 3634211 - DNA, 25 bp, Homo sapien
cagacctggggcagcgacttggaca

SEQ ID NO: 3634212 - DNA, 25 bp, Homo sapien
gtaaaccagcaattgcaaggtggtg

SEQ ID NO: 3634213 - DNA, 25 bp, Homo sapien
ctggggtcacagaagtgccccagga

SEQ ID NO: 3634214 - DNA, 25 bp, Homo sapien
accagcaattgcaaggtggtgaagc

SEQ ID NO: 3634215 - DNA, 25 bp, Homo sapien
tgaagcaccaccgtggaagggcacc

SEQ ID NO: 3634216 - DNA, 25 bp, Homo sapien
ctgtgggccagcgttccacctattg

SEQ ID NO: 3634217 - DNA, 25 bp, Homo sapien
tgtgggccagcgttccacctattgt

SEQ ID NO: 3634218 - DNA, 25 bp, Homo sapien
tgtgatccgggcaattccatgtact

SEQ ID NO: 3634219 - DNA, 25 bp, Homo sapien
tctccgtgggtgagaaaacacgtga

SEQ ID NO: 3634220 - DNA, 25 bp, Homo sapien
tgagcttccaaagagcatggtggac

SEQ ID NO: 3634221 - DNA, 25 bp, Homo sapien
tccaatgacagctggtgatgacggg

SEQ ID NO: 3634222 - DNA, 25 bp, Homo sapien
agctggatgagtgtctcgcctggct

SEQ ID NO: 3634223 - DNA, 25 bp, Homo sapien
aactcctttgcgaagcaggctggtg

SEQ ID NO: 3634224 - DNA, 25 bp, Homo sapien
tggaccccgagctcttgtgagtctg

SEQ ID NO: 3634225 - DNA, 25 bp, Homo sapien
agtctgggcagcgtcacccttctgt

SEQ ID NO: 3634226 - DNA, 25 bp, Homo sapien
gtgacttcccgaaacacagggctcg

SEQ ID NO: 3634227 - DNA, 25 bp, Homo sapien
tcccgaaacacagggctcggagctt

SEQ ID NO: 3634228 - DNA, 25 bp, Homo sapien
caggggtgacttcccgaaacacagg

SEQ ID NO: 3634229 - DNA, 25 bp, Homo sapien
gctgaggccacaacacaggggtgac

SEQ ID NO: 3634230 - DNA, 25 bp, Homo sapien
gaaagctcatttggccagggttgaa

SEQ ID NO: 3634231 - DNA, 25 bp, Homo sapien
cagagtgctgatgtgtgcaccgcat

SEQ ID NO: 3634232 - DNA, 25 bp, Homo sapien
ggaactcaagcccagtgtgatcttc

SEQ ID NO: 3634233 - DNA, 25 bp, Homo sapien
cagcaggaatagcacattggagctt

SEQ ID NO: 3634234 - DNA, 25 bp, Homo sapien
ttctgaaagtcccctcttgtgtatg

SEQ ID NO: 3634235 - DNA, 25 bp, Homo sapien
tgaaagtcccctcttgtgtatgcat

SEQ ID NO: 3634236 - DNA, 25 bp, Homo sapien
ctgaaagtcccctcttgtgtatgca

SEQ ID NO: 3634237 - DNA, 25 bp, Homo sapien
tgcctttcaggaaggagcgggtttc

SEQ ID NO: 3634238 - DNA, 25 bp, Homo sapien
aaaacacaccaaggaagttcaggca

SEQ ID NO: 3634239 - DNA, 25 bp, Homo sapien
taaaacacaccaaggaagttcaggc

SEQ ID NO: 3634240 - DNA, 25 bp, Homo sapien
ctaaaacacaccaaggaagttcagg

SEQ ID NO: 3634241 - DNA, 25 bp, Homo sapien
aaacacaccaaggaagttcaggcat

SEQ ID NO: 3634242 - DNA, 25 bp, Homo sapien
gagtgcttcacagtccagctacaga

SEQ ID NO: 3634243 - DNA, 25 bp, Homo sapien
agagtgcttcacagtccagctacag

SEQ ID NO: 3634244 - DNA, 25 bp, Homo sapien
tccacatccaacgactgtcaacaag

SEQ ID NO: 3634245 - DNA, 25 bp, Homo sapien
gactgtcaacaagggctttgtcagc

SEQ ID NO: 3634246 - DNA, 25 bp, Homo sapien
agccgatggctctgattctcaatgg

SEQ ID NO: 3634247 - DNA, 25 bp, Homo sapien
ttcacgacgttgctccttctgcctg

SEQ ID NO: 3634248 - DNA, 25 bp, Homo sapien
gcctgagaatctgtaacgagcacgg

SEQ ID NO: 3634249 - DNA, 25 bp, Homo sapien
tcaatggcttctgcatagtgaatgc

SEQ ID NO: 3634250 - DNA, 25 bp, Homo sapien
ctccatggggccttcctcagctgat

SEQ ID NO: 3634251 - DNA, 25 bp, Homo sapien
catggggccttcctcagctgatcac

SEQ ID NO: 3634252 - DNA, 25 bp, Homo sapien
tggggccttcctcagctgatcactc

SEQ ID NO: 3634253 - DNA, 25 bp, Homo sapien
atggggccttcctcagctgatcact

SEQ ID NO: 3634254 - DNA, 25 bp, Homo sapien
ctttgtcctaatgctgccagccctt

SEQ ID NO: 3634255 - DNA, 25 bp, Homo sapien
gtgcccgtgactgacatgtcccctt

SEQ ID NO: 3634256 - DNA, 25 bp, Homo sapien
tgtgcccgtgactgacatgtcccct

SEQ ID NO: 3634257 - DNA, 25 bp, Homo sapien
ttgtcctaatgctgccagcccttcc

SEQ ID NO: 3634258 - DNA, 25 bp, Homo sapien
atttaaggagccaagtggtattgcc

SEQ ID NO: 3634259 - DNA, 25 bp, Homo sapien
catttaaggagccaagtggtattgc

SEQ ID NO: 3634260 - DNA, 25 bp, Homo sapien
cttagtgagtaaggaattgtgagac

SEQ ID NO: 3634261 - DNA, 25 bp, Homo sapien
tgagacttgtacagctctgacagct

SEQ ID NO: 3634262 - DNA, 25 bp, Homo sapien
gaattgtgagacttgtacagctctg

SEQ ID NO: 3634263 - DNA, 25 bp, Homo sapien
gagtaaggaattgtgagacttgtac

SEQ ID NO: 3634264 - DNA, 25 bp, Homo sapien
caataaggatgtgcatggtgctgct

SEQ ID NO: 3634265 - DNA, 25 bp, Homo sapien
tgactgcaccgaaaagccttcttgg

SEQ ID NO: 3634266 - DNA, 25 bp, Homo sapien
gagtcgggcagtgtgcatgtcttcc

SEQ ID NO: 3634267 - DNA, 25 bp, Homo sapien
tcagatgtgactcggtgtccccggt

SEQ ID NO: 3634268 - DNA, 25 bp, Homo sapien
tgtcagagtggtgagtagccactca

SEQ ID NO: 3634269 - DNA, 25 bp, Homo sapien
gagtggtgagtagccactcatacca

SEQ ID NO: 3634270 - DNA, 25 bp, Homo sapien
ccagggtacagtctgctgctgagag

SEQ ID NO: 3634271 - DNA, 25 bp, Homo sapien
tgcaaacccagggtacagtctgctg

SEQ ID NO: 3634272 - DNA, 25 bp, Homo sapien
accacatgcagccattacagacggg

SEQ ID NO: 3634273 - DNA, 25 bp, Homo sapien
ctgttgccaggtatgtgcgtggttc

SEQ ID NO: 3634274 - DNA, 25 bp, Homo sapien
tagacacgcgctcatagaatcaaat

SEQ ID NO: 3634275 - DNA, 25 bp, Homo sapien
tggttcctctcactcgctggtcctg

SEQ ID NO: 3634276 - DNA, 25 bp, Homo sapien
tttgatgtcacacagagcccggggt

SEQ ID NO: 3634277 - DNA, 25 bp, Homo sapien
cctttgatgtcacacagagcccggg

SEQ ID NO: 3634278 - DNA, 25 bp, Homo sapien
gcctttgatgtcacacagagcccgg

SEQ ID NO: 3634279 - DNA, 25 bp, Homo sapien
agcctttgatgtcacacagagcccg

SEQ ID NO: 3634280 - DNA, 25 bp, Homo sapien
ctagtcccccatccaggcgcttagg

SEQ ID NO: 3634281 - DNA, 25 bp, Homo sapien
cccatccaggcgcttaggctgggga

SEQ ID NO: 3634282 - DNA, 25 bp, Homo sapien
gagcagggggtagcacttctctcac

SEQ ID NO: 3634283 - DNA, 25 bp, Homo sapien
ggggagcagggggtagcacttctct

SEQ ID NO: 3634284 - DNA, 25 bp, Homo sapien
tccacagagtggtcccaagctttag

SEQ ID NO: 3634285 - DNA, 25 bp, Homo sapien
cttccacagagtggtcccaagcttt

SEQ ID NO: 3634286 - DNA, 25 bp, Homo sapien
ttccacagagtggtcccaagcttta

SEQ ID NO: 3634287 - DNA, 25 bp, Homo sapien
aatactggccctagggtggatcagg

SEQ ID NO: 3634288 - DNA, 25 bp, Homo sapien
ctggttcctggcagaccttgatttc

SEQ ID NO: 3634289 - DNA, 25 bp, Homo sapien
cagtgtgcacagctaaacgcaacca

SEQ ID NO: 3634290 - DNA, 25 bp, Homo sapien
tggactgttccatgaccgtcaaggc

SEQ ID NO: 3634291 - DNA, 25 bp, Homo sapien
cattgacacaaggtgcgtcagagct

SEQ ID NO: 3634292 - DNA, 25 bp, Homo sapien
gaccacccacatgttggagcctctt

SEQ ID NO: 3634293 - DNA, 25 bp, Homo sapien
tgccacaagccctttgccagacact

SEQ ID NO: 3634294 - DNA, 25 bp, Homo sapien
ggcactcagggcatcggcggcactc

SEQ ID NO: 3634295 - DNA, 25 bp, Homo sapien
agccccgctgaagcatcttcacatt

SEQ ID NO: 3634296 - DNA, 25 bp, Homo sapien
gggacaagcacctccaagatgaggg

SEQ ID NO: 3634297 - DNA, 25 bp, Homo sapien
gcagcagccccgctgaagcatcttc

SEQ ID NO: 3634298 - DNA, 25 bp, Homo sapien
aaactgtgggatgccagacagggac

SEQ ID NO: 3634299 - DNA, 25 bp, Homo sapien
actgtcctcacgactgatgcatcca

SEQ ID NO: 3634300 - DNA, 25 bp, Homo sapien
cttcactgtcctcacgactgatgca

SEQ ID NO: 3634301 - DNA, 25 bp, Homo sapien
ctactgccgcatccgcggcccttca

SEQ ID NO: 3634302 - DNA, 25 bp, Homo sapien
catccgcggcccttcactgtcctca

SEQ ID NO: 3634303 - DNA, 25 bp, Homo sapien
tgctgacggatgaacgcagagttct

SEQ ID NO: 3634304 - DNA, 25 bp, Homo sapien
gttttaggacatcttagtatcttgg

SEQ ID NO: 3634305 - DNA, 25 bp, Homo sapien
atcttggtgtcttgccatccggccc

SEQ ID NO: 3634306 - DNA, 25 bp, Homo sapien
tcctgctccgggttcgttttgtaga

SEQ ID NO: 3634307 - DNA, 25 bp, Homo sapien
catcctgtgacttctcttaaattta

SEQ ID NO: 3634308 - DNA, 25 bp, Homo sapien
atcctgtgacttctcttaaatttaa

SEQ ID NO: 3634309 - DNA, 25 bp, Homo sapien
tcctgtgacttctcttaaatttaac

SEQ ID NO: 3634310 - DNA, 25 bp, Homo sapien
tacagggggccaggtgattccatca

SEQ ID NO: 3634311 - DNA, 25 bp, Homo sapien
gtgattccatcacccggaacctcga

SEQ ID NO: 3634312 - DNA, 25 bp, Homo sapien
ccacactggctgaggaagttctggc

SEQ ID NO: 3634313 - DNA, 25 bp, Homo sapien
cacactggctgaggaagttctggct

SEQ ID NO: 3634314 - DNA, 25 bp, Homo sapien
gtgtcatctagaaggcccctgctcc

SEQ ID NO: 3634315 - DNA, 25 bp, Homo sapien
ggtgtcatctagaaggcccctgctc

SEQ ID NO: 3634316 - DNA, 25 bp, Homo sapien
agaagccttgggcctcgccaagctg

SEQ ID NO: 3634317 - DNA, 25 bp, Homo sapien
caggtccatttgcaccctcctggtg

SEQ ID NO: 3634318 - DNA, 25 bp, Homo sapien
ggacagcctagatcggcctgcgtcc

SEQ ID NO: 3634319 - DNA, 25 bp, Homo sapien
cctcctggtgtttagcgtttggcca

SEQ ID NO: 3634320 - DNA, 25 bp, Homo sapien
tctgagtcgttggtgcgcagacgtc

SEQ ID NO: 3634321 - DNA, 25 bp, Homo sapien
caggcacaggtttgtggtctgagtc

SEQ ID NO: 3634322 - DNA, 25 bp, Homo sapien
tgcgcagacgtcctgaactccattg

SEQ ID NO: 3634323 - DNA, 25 bp, Homo sapien
acgtcctgaactccattggccctga

SEQ ID NO: 3634324 - DNA, 25 bp, Homo sapien
aaagcccctactgtggcttgggctt

SEQ ID NO: 3634325 - DNA, 25 bp, Homo sapien
agggctccccactggatgcggcctg

SEQ ID NO: 3634326 - DNA, 25 bp, Homo sapien
aatgatgtcgcctttggatccctgg

SEQ ID NO: 3634327 - DNA, 25 bp, Homo sapien
gtcgcctttggatccctgggcatct

SEQ ID NO: 3634328 - DNA, 25 bp, Homo sapien
ttgccatcaatgatgtcgcctttgg

SEQ ID NO: 3634329 - DNA, 25 bp, Homo sapien
gtctccaagccagagtggtggcaaa

SEQ ID NO: 3634330 - DNA, 25 bp, Homo sapien
tcatgacgagtccagagtgagccca

SEQ ID NO: 3634331 - DNA, 25 bp, Homo sapien
cagaaagcacttcatgacgagtcca

SEQ ID NO: 3634332 - DNA, 25 bp, Homo sapien
tctccaagccagagtggtggcaaac

SEQ ID NO: 3634333 - DNA, 25 bp, Homo sapien
ccgtgtgtggatcaacaacagctgc

SEQ ID NO: 3634334 - DNA, 25 bp, Homo sapien
cacaattgtagctgtcctttagggc

SEQ ID NO: 3634335 - DNA, 25 bp, Homo sapien
tgccacaattgtagctgtcctttag

SEQ ID NO: 3634336 - DNA, 25 bp, Homo sapien
tctggcccgtgtgtggatcaacaac

SEQ ID NO: 3634337 - DNA, 25 bp, Homo sapien
tgttccccacacaagggagtcatcc

SEQ ID NO: 3634338 - DNA, 25 bp, Homo sapien
tttattcatggtgtggtgtagatga

SEQ ID NO: 3634339 - DNA, 25 bp, Homo sapien
gagtgaatatgcaactatctgagtg

SEQ ID NO: 3634340 - DNA, 25 bp, Homo sapien
tctgagtgtgttccccacacaaggg

SEQ ID NO: 3634341 - DNA, 25 bp, Homo sapien
tgatcccgctactgatcattatggg

SEQ ID NO: 3634342 - DNA, 25 bp, Homo sapien
ttgatcctgcgaggtcaccatatgg

SEQ ID NO: 3634343 - DNA, 25 bp, Homo sapien
gtgtggacccctgatctgtgtagtg

SEQ ID NO: 3634344 - DNA, 25 bp, Homo sapien
cattatgggtgtttagacttgctcc

SEQ ID NO: 3634345 - DNA, 25 bp, Homo sapien
ctgggagagactttgatcataaaag

SEQ ID NO: 3634346 - DNA, 25 bp, Homo sapien
ggattttgcctacgagcctctagga

SEQ ID NO: 3634347 - DNA, 25 bp, Homo sapien
gatcataaaaggcaagatttggcca

SEQ ID NO: 3634348 - DNA, 25 bp, Homo sapien
tccggagagcgtgggattttgccta

SEQ ID NO: 3634349 - DNA, 25 bp, Homo sapien
tccctccgttcttggtgtgaatcca

SEQ ID NO: 3634350 - DNA, 25 bp, Homo sapien
tgtgaatccaaatcccgaagcttgt

SEQ ID NO: 3634351 - DNA, 25 bp, Homo sapien
tccaggtgtgcggttgttgtgcaca

SEQ ID NO: 3634352 - DNA, 25 bp, Homo sapien
ttgtgcacacggacttcatggctgg

SEQ ID NO: 3634353 - DNA, 25 bp, Homo sapien
aaggtcaaccctcccctgtacacag

SEQ ID NO: 3634354 - DNA, 25 bp, Homo sapien
agctcttgctgtcctacggggccaa

SEQ ID NO: 3634355 - DNA, 25 bp, Homo sapien
cctcgggcagcatcgagtgtgtgaa

SEQ ID NO: 3634356 - DNA, 25 bp, Homo sapien
gatgctcgcaacatcgacggcagca

SEQ ID NO: 3634357 - DNA, 25 bp, Homo sapien
cacctggaggatgtaaacgtttcac

SEQ ID NO: 3634358 - DNA, 25 bp, Homo sapien
caattgcatgatcacggatggtgcc

SEQ ID NO: 3634359 - DNA, 25 bp, Homo sapien
catgtcagcagagaaggatgtgcaa

SEQ ID NO: 3634360 - DNA, 25 bp, Homo sapien
gctgcaacagctgatcgagagcggc

SEQ ID NO: 3634361 - DNA, 25 bp, Homo sapien
gagtccctgtcaccagacatgatcg

SEQ ID NO: 3634362 - DNA, 25 bp, Homo sapien
tgtcaccagacatgatcgcagttgt

SEQ ID NO: 3634363 - DNA, 25 bp, Homo sapien
caccagacatgatcgcagttgtcat

SEQ ID NO: 3634364 - DNA, 25 bp, Homo sapien
ccctgtcaccagacatgatcgcagt

SEQ ID NO: 3634365 - DNA, 25 bp, Homo sapien
gagcaaccacgtggataccagcatc

SEQ ID NO: 3634366 - DNA, 25 bp, Homo sapien
cagtcagactttataattggtttta

SEQ ID NO: 3634367 - DNA, 25 bp, Homo sapien
tggttttagtaactccttccattca

SEQ ID NO: 3634368 - DNA, 25 bp, Homo sapien
cacgtggataccagcatcttcttgg

SEQ ID NO: 3634369 - DNA, 25 bp, Homo sapien
catttaaggtccgtgaccataagct

SEQ ID NO: 3634370 - DNA, 25 bp, Homo sapien
ggtccgtgaccataagctgtccttc

SEQ ID NO: 3634371 - DNA, 25 bp, Homo sapien
tgtccttcccgattcttttcacctg

SEQ ID NO: 3634372 - DNA, 25 bp, Homo sapien
taaggtccgtgaccataagctgtcc

SEQ ID NO: 3634373 - DNA, 25 bp, Homo sapien
gtaaacaggaggagccatagtgtgt

SEQ ID NO: 3634374 - DNA, 25 bp, Homo sapien
ggagccatagtgtgtaacaccgtga

SEQ ID NO: 3634375 - DNA, 25 bp, Homo sapien
tagtgtgtaacaccgtgaccctgac

SEQ ID NO: 3634376 - DNA, 25 bp, Homo sapien
caggaggagccatagtgtgtaacac

SEQ ID NO: 3634377 - DNA, 25 bp, Homo sapien
gagagaacgttctgaagcacgtgtc

SEQ ID NO: 3634378 - DNA, 25 bp, Homo sapien
tctgcagtagatacataggtgacat

SEQ ID NO: 3634379 - DNA, 25 bp, Homo sapien
tccttctcaaggtgacgtctgccgt

SEQ ID NO: 3634380 - DNA, 25 bp, Homo sapien
tagccagtaaggtcgtatcgtgggt

SEQ ID NO: 3634381 - DNA, 25 bp, Homo sapien
gactggtagggtaataatgacagca

SEQ ID NO: 3634382 - DNA, 25 bp, Homo sapien
aggactggtagggtaataatgacag

SEQ ID NO: 3634383 - DNA, 25 bp, Homo sapien
gggtaataatgacagcaatgatcct

SEQ ID NO: 3634384 - DNA, 25 bp, Homo sapien
acaggactggtagggtaataatgac

SEQ ID NO: 3634385 - DNA, 25 bp, Homo sapien
cacttgggcccaacgagtggggctc

SEQ ID NO: 3634386 - DNA, 25 bp, Homo sapien
gctgcttttatggttgcagtccctg

SEQ ID NO: 3634387 - DNA, 25 bp, Homo sapien
tgaggagatactggcaaaccagctg

SEQ ID NO: 3634388 - DNA, 25 bp, Homo sapien
gatgactgaggagatactggcaaac

SEQ ID NO: 3634389 - DNA, 25 bp, Homo sapien
tccctggtggcatttgagaatgctc

SEQ ID NO: 3634390 - DNA, 25 bp, Homo sapien
tgtccctggtggcatttgagaatgc

SEQ ID NO: 3634391 - DNA, 25 bp, Homo sapien
cctggtggcatttgagaatgctctt

SEQ ID NO: 3634392 - DNA, 25 bp, Homo sapien
tggtggcatttgagaatgctctttg

SEQ ID NO: 3634393 - DNA, 25 bp, Homo sapien
ttaatcagaaacacagctctatcgc

SEQ ID NO: 3634394 - DNA, 25 bp, Homo sapien
cactagggtagcagtccagggcatt

SEQ ID NO: 3634395 - DNA, 25 bp, Homo sapien
cagttgagtgagatctttgctgagg

SEQ ID NO: 3634396 - DNA, 25 bp, Homo sapien
gaagatcctccgtgtttaatcagaa

SEQ ID NO: 3634397 - DNA, 25 bp, Homo sapien
agggtcccagtggtgccgcgcatcc

SEQ ID NO: 3634398 - DNA, 25 bp, Homo sapien
gagcctgggaaacgcccacggtgct

SEQ ID NO: 3634399 - DNA, 25 bp, Homo sapien
cgcgagcccacggtaagagctaaac

SEQ ID NO: 3634400 - DNA, 25 bp, Homo sapien
gcgcatcccagacgggctctcatgt

SEQ ID NO: 3634401 - DNA, 25 bp, Homo sapien
ccagatgggactcaaagacttagca

SEQ ID NO: 3634402 - DNA, 25 bp, Homo sapien
ttagaaaagaatgaactgagctcct

SEQ ID NO: 3634403 - DNA, 25 bp, Homo sapien
ttggtagaaagtggcaaaaaggctc

SEQ ID NO: 3634404 - DNA, 25 bp, Homo sapien
aaaaaggctctaaatgcccagtgca

SEQ ID NO: 3634405 - DNA, 25 bp, Homo sapien
tcacgggcaagaggcaaccccggga

SEQ ID NO: 3634406 - DNA, 25 bp, Homo sapien
acgtgggaagcaccagtcgccggct

SEQ ID NO: 3634407 - DNA, 25 bp, Homo sapien
gctctgtctcccgtcagggtcacgg

SEQ ID NO: 3634408 - DNA, 25 bp, Homo sapien
tcgccgcgggcgctgacagggacgc

SEQ ID NO: 3634409 - DNA, 25 bp, Homo sapien
caagatgacacggttaggatctccc

SEQ ID NO: 3634410 - DNA, 25 bp, Homo sapien
tgcaaacccgaagacggaaacttca

SEQ ID NO: 3634411 - DNA, 25 bp, Homo sapien
ttatcagcatatccctgaggacgca

SEQ ID NO: 3634412 - DNA, 25 bp, Homo sapien
ggcgacgcaaacgaaacgcctcaga

SEQ ID NO: 3634413 - DNA, 25 bp, Homo sapien
catgaccacctgaagcactgtttat

SEQ ID NO: 3634414 - DNA, 25 bp, Homo sapien
tgctggctagcatggagataaaaac

SEQ ID NO: 3634415 - DNA, 25 bp, Homo sapien
cacatcttttgagcgagtgaacata

SEQ ID NO: 3634416 - DNA, 25 bp, Homo sapien
ttacatgggcgaaagaaaagagagc

SEQ ID NO: 3634417 - DNA, 25 bp, Homo sapien
ttattacacagatacgctttgtcag

SEQ ID NO: 3634418 - DNA, 25 bp, Homo sapien
aacaggtaagagtaaacaatgctag

SEQ ID NO: 3634419 - DNA, 25 bp, Homo sapien
taacatgtactgacaaaaagcatat

SEQ ID NO: 3634420 - DNA, 25 bp, Homo sapien
gaaaagggagatgtacatattctct

SEQ ID NO: 3634421 - DNA, 25 bp, Homo sapien
gaatattccttctcctaatgaggga

SEQ ID NO: 3634422 - DNA, 25 bp, Homo sapien
tgcacaagggtaaagtaggtgcccc

SEQ ID NO: 3634423 - DNA, 25 bp, Homo sapien
cacgcaaaatgtcctgggcacagat

SEQ ID NO: 3634424 - DNA, 25 bp, Homo sapien
gtctatttcaccatgccaaggaggg

SEQ ID NO: 3634425 - DNA, 25 bp, Homo sapien
tatatccagtaggagacaaattacc

SEQ ID NO: 3634426 - DNA, 25 bp, Homo sapien
ggatgaggtcccttcccaataagcc

SEQ ID NO: 3634427 - DNA, 25 bp, Homo sapien
gcattgcccagaagaaagcctaatt

SEQ ID NO: 3634428 - DNA, 25 bp, Homo sapien
aaatttaatcaaacggaggtgcagg

SEQ ID NO: 3634429 - DNA, 25 bp, Homo sapien
tgtgtctctgctccgccggcagccc

SEQ ID NO: 3634430 - DNA, 25 bp, Homo sapien
ctgtgtctctgctccgccggcagcc

SEQ ID NO: 3634431 - DNA, 25 bp, Homo sapien
taaaacgttactagacagaataggc

SEQ ID NO: 3634432 - DNA, 25 bp, Homo sapien
gggtctccttcgcactcagcgctgt

SEQ ID NO: 3634433 - DNA, 25 bp, Homo sapien
taacagtcacctccgtgggtgagcc

SEQ ID NO: 3634434 - DNA, 25 bp, Homo sapien
ataggcccattttctcgggtctcct

SEQ ID NO: 3634435 - DNA, 25 bp, Homo sapien
tgccaaagcttctctccccacaccc

SEQ ID NO: 3634436 - DNA, 25 bp, Homo sapien
gccaaagcttctctccccacaccct

SEQ ID NO: 3634437 - DNA, 25 bp, Homo sapien
aaagcttctctccccacaccctcac

SEQ ID NO: 3634438 - DNA, 25 bp, Homo sapien
cctgccaaagcttctctccccacac

SEQ ID NO: 3634439 - DNA, 25 bp, Homo sapien
agccttcgggtaccatacaaaagtg

SEQ ID NO: 3634440 - DNA, 25 bp, Homo sapien
tacaaaagtgtctttcatcaccagg

SEQ ID NO: 3634441 - DNA, 25 bp, Homo sapien
gggtaccatacaaaagtgtctttca

SEQ ID NO: 3634442 - DNA, 25 bp, Homo sapien
gtgtctttcatcaccagggctctgc

SEQ ID NO: 3634443 - DNA, 25 bp, Homo sapien
tgtagtcctaagtagcagccagtta

SEQ ID NO: 3634444 - DNA, 25 bp, Homo sapien
gcatttcccgtaagtcaaaacagag

SEQ ID NO: 3634445 - DNA, 25 bp, Homo sapien
tgtctgttcaccaaagtccccaggg

SEQ ID NO: 3634446 - DNA, 25 bp, Homo sapien
tcacggcacgcacaaagggagtaaa

SEQ ID NO: 3634447 - DNA, 25 bp, Homo sapien
gactttcattctatggcaggcgacc

SEQ ID NO: 3634448 - DNA, 25 bp, Homo sapien
cacgtaagcctgatagtttggaagc

SEQ ID NO: 3634449 - DNA, 25 bp, Homo sapien
aaatgtaatctggttcaggagggcc

SEQ ID NO: 3634450 - DNA, 25 bp, Homo sapien
tgttaaatactgtgccatgggctgg

SEQ ID NO: 3634451 - DNA, 25 bp, Homo sapien
cagtagttctccgtaacttctatgc

SEQ ID NO: 3634452 - DNA, 25 bp, Homo sapien
tttcctataaacagagtcatacagc

SEQ ID NO: 3634453 - DNA, 25 bp, Homo sapien
cagcacgcggtccttcatgattggc

SEQ ID NO: 3634454 - DNA, 25 bp, Homo sapien
agtatatccacagaattgtgcttag

SEQ ID NO: 3634455 - DNA, 25 bp, Homo sapien
tttctacttttatgatctttgccat

SEQ ID NO: 3634456 - DNA, 25 bp, Homo sapien
gtaaaactgatatatgcatgcatct

SEQ ID NO: 3634457 - DNA, 25 bp, Homo sapien
aaactgggcaaaagtcatcagacac

SEQ ID NO: 3634458 - DNA, 25 bp, Homo sapien
aatgaagttgagctgaaagccccaa

SEQ ID NO: 3634459 - DNA, 25 bp, Homo sapien
tgaaaattagacctcaatgaagttg

SEQ ID NO: 3634460 - DNA, 25 bp, Homo sapien
ggcttgtgccctctgatattactgc

SEQ ID NO: 3634461 - DNA, 25 bp, Homo sapien
gctaggcctaggtttcactacttaa

SEQ ID NO: 3634462 - DNA, 25 bp, Homo sapien
tgctacagaacaactaaaacggagg

SEQ ID NO: 3634463 - DNA, 25 bp, Homo sapien
tgagccatactgtgtagtcaagttc

SEQ ID NO: 3634464 - DNA, 25 bp, Homo sapien
ctcagaattcttgacatagtcctgt

SEQ ID NO: 3634465 - DNA, 25 bp, Homo sapien
cagaattcttgacatagtcctgttc

SEQ ID NO: 3634466 - DNA, 25 bp, Homo sapien
tcagaattcttgacatagtcctgtt

SEQ ID NO: 3634467 - DNA, 25 bp, Homo sapien
gaattcttgacatagtcctgttctc

SEQ ID NO: 3634468 - DNA, 25 bp, Homo sapien
agagaatgtagctgggagggtggtc

SEQ ID NO: 3634469 - DNA, 25 bp, Homo sapien
aagagagaatgtagctgggagggtg

SEQ ID NO: 3634470 - DNA, 25 bp, Homo sapien
taagagagaatgtagctgggagggt

SEQ ID NO: 3634471 - DNA, 25 bp, Homo sapien
tgtctcgatcttctctaagagagaa

SEQ ID NO: 3634472 - DNA, 25 bp, Homo sapien
gcattactcaaaacaaactggcaaa

SEQ ID NO: 3634473 - DNA, 25 bp, Homo sapien
ggtttcccaaatacatggtcagaga

SEQ ID NO: 3634474 - DNA, 25 bp, Homo sapien
taatctgtactgctagcctaaacac

SEQ ID NO: 3634475 - DNA, 25 bp, Homo sapien
gtaagtcattaataggtaggcacag

SEQ ID NO: 3634476 - DNA, 25 bp, Homo sapien
gagaggcacgtttcctaattgagaa

SEQ ID NO: 3634477 - DNA, 25 bp, Homo sapien
taattgagaattaccgactggatcc

SEQ ID NO: 3634478 - DNA, 25 bp, Homo sapien
gaactgagcctaatgacctacggac

SEQ ID NO: 3634479 - DNA, 25 bp, Homo sapien
catacccatgtgagatagctttgag

SEQ ID NO: 3634480 - DNA, 25 bp, Homo sapien
agagtctgaactcaaggacactgtc

SEQ ID NO: 3634481 - DNA, 25 bp, Homo sapien
gaagtatggaggagtgaaactgccc

SEQ ID NO: 3634482 - DNA, 25 bp, Homo sapien
tgctcagatgaagagtccaagtaag

SEQ ID NO: 3634483 - DNA, 25 bp, Homo sapien
aaaaccatgctcagatgaagagtcc

SEQ ID NO: 3634484 - DNA, 25 bp, Homo sapien
tcttcctgagtataactacttgctt

SEQ ID NO: 3634485 - DNA, 25 bp, Homo sapien
cagaagaaacccgtaagtgtcttga

SEQ ID NO: 3634486 - DNA, 25 bp, Homo sapien
tgcttttcagtatcaaacagaagaa

SEQ ID NO: 3634487 - DNA, 25 bp, Homo sapien
gaagttcttcctgagtataactact

SEQ ID NO: 3634488 - DNA, 25 bp, Homo sapien
tttggctggatcacccagagtggta

SEQ ID NO: 3634489 - DNA, 25 bp, Homo sapien
cccagagtggtaacagcactgctgc

SEQ ID NO: 3634490 - DNA, 25 bp, Homo sapien
agcactgctgccaacacggagtcca

SEQ ID NO: 3634491 - DNA, 25 bp, Homo sapien
ggagtccacactgacataccaattt

SEQ ID NO: 3634492 - DNA, 25 bp, Homo sapien
cattgtgacaatttagaagagattc

SEQ ID NO: 3634493 - DNA, 25 bp, Homo sapien
gaagagattctcaagacaataccaa

SEQ ID NO: 3634494 - DNA, 25 bp, Homo sapien
cacattccatagttgccaagttcgg

SEQ ID NO: 3634495 - DNA, 25 bp, Homo sapien
taccaatctcttgacactgaaaaat

SEQ ID NO: 3634496 - DNA, 25 bp, Homo sapien
aattagttatgcatggtgatgtgtg

SEQ ID NO: 3634497 - DNA, 25 bp, Homo sapien
gaaccaaggagtcgaaggttgcaga

SEQ ID NO: 3634498 - DNA, 25 bp, Homo sapien
accaaggagtcgaaggttgcagaga

SEQ ID NO: 3634499 - DNA, 25 bp, Homo sapien
cagagcgaaactccgtaccccgcca

SEQ ID NO: 3634500 - DNA, 25 bp, Homo sapien
aaatgaagcaaataatgcaatgtgt

SEQ ID NO: 3634501 - DNA, 25 bp, Homo sapien
tgaggcaactctttcgaaacataag

SEQ ID NO: 3634502 - DNA, 25 bp, Homo sapien
aactgatacagtggaagagagcgct

SEQ ID NO: 3634503 - DNA, 25 bp, Homo sapien
taagaataagtcactcaggtaggga

SEQ ID NO: 3634504 - DNA, 25 bp, Homo sapien
tctgtggtcagaagcttgggttcca

SEQ ID NO: 3634505 - DNA, 25 bp, Homo sapien
aagacagtcggagtatttggaaatg

SEQ ID NO: 3634506 - DNA, 25 bp, Homo sapien
cttgaatgaagacagtcggagtatt

SEQ ID NO: 3634507 - DNA, 25 bp, Homo sapien
ccatgataccatggtcttgaatgaa

SEQ ID NO: 3634508 - DNA, 25 bp, Homo sapien
caacataaccagatttcccatgata

SEQ ID NO: 3634509 - DNA, 25 bp, Homo sapien
tttaaaaagtagctctgacaggtga

SEQ ID NO: 3634510 - DNA, 25 bp, Homo sapien
tggatagctaactttggtgagaact

SEQ ID NO: 3634511 - DNA, 25 bp, Homo sapien
gctaggctgataaccaaagaattta

SEQ ID NO: 3634512 - DNA, 25 bp, Homo sapien
ttctaggtagcacatgaagctgtga

SEQ ID NO: 3634513 - DNA, 25 bp, Homo sapien
gcctctccctccgcttttttgagaa

SEQ ID NO: 3634514 - DNA, 25 bp, Homo sapien
tggcctctccctccgcttttttgag

SEQ ID NO: 3634515 - DNA, 25 bp, Homo sapien
tctccctccgcttttttgagaacaa

SEQ ID NO: 3634516 - DNA, 25 bp, Homo sapien
ctggcctctccctccgcttttttga

SEQ ID NO: 3634517 - DNA, 25 bp, Homo sapien
tagtattttcagacacgtggcaatc

SEQ ID NO: 3634518 - DNA, 25 bp, Homo sapien
tgactcgtcttgttagaaaccttgt

SEQ ID NO: 3634519 - DNA, 25 bp, Homo sapien
ccagaagatggcttagtatagttag

SEQ ID NO: 3634520 - DNA, 25 bp, Homo sapien
tcaaaggcacgaaaatgactcgtct

SEQ ID NO: 3634521 - DNA, 25 bp, Homo sapien
gatctgtctgggtcgttcaataacg

SEQ ID NO: 3634522 - DNA, 25 bp, Homo sapien
gattccctgtatcgaaaagctacaa

SEQ ID NO: 3634523 - DNA, 25 bp, Homo sapien
tcaataacggtgttgcctgaaagtt

SEQ ID NO: 3634524 - DNA, 25 bp, Homo sapien
gcttttatgagctggtggtgccata

SEQ ID NO: 3634525 - DNA, 25 bp, Homo sapien
ttggaatcattgcaccgtaagtgga

SEQ ID NO: 3634526 - DNA, 25 bp, Homo sapien
taagtggaccaaagagctatatcac

SEQ ID NO: 3634527 - DNA, 25 bp, Homo sapien
ctatatcacatagcatacggtcttg

SEQ ID NO: 3634528 - DNA, 25 bp, Homo sapien
catagcatacggtcttgaacaatta

SEQ ID NO: 3634529 - DNA, 25 bp, Homo sapien
catatttaaaatctagttcctgcgg

SEQ ID NO: 3634530 - DNA, 25 bp, Homo sapien
caagtaattctgttttctgaaggca

SEQ ID NO: 3634531 - DNA, 25 bp, Homo sapien
tttcaaggaagacactttcattaca

SEQ ID NO: 3634532 - DNA, 25 bp, Homo sapien
gcagcctctggtagtctttttttca

SEQ ID NO: 3634533 - DNA, 25 bp, Homo sapien
attgaagcacaaatcttgaaaacag

SEQ ID NO: 3634534 - DNA, 25 bp, Homo sapien
caaattgaagcacaaatcttgaaaa

SEQ ID NO: 3634535 - DNA, 25 bp, Homo sapien
tttccccttgtctgtttgacagttc

SEQ ID NO: 3634536 - DNA, 25 bp, Homo sapien
cagttctacctcatacaaattgaag

SEQ ID NO: 3634537 - DNA, 25 bp, Homo sapien
tgtatctatgctgtagatgctaccc

SEQ ID NO: 3634538 - DNA, 25 bp, Homo sapien
ctctggggcaatagtagtacttcat

SEQ ID NO: 3634539 - DNA, 25 bp, Homo sapien
gtacttcataatgcctgcaccacct

SEQ ID NO: 3634540 - DNA, 25 bp, Homo sapien
tccagtgtatctatgctgtagatgc

SEQ ID NO: 3634541 - DNA, 25 bp, Homo sapien
aggaaaaattcaactgaaggaatat

SEQ ID NO: 3634542 - DNA, 25 bp, Homo sapien
ctggttctgatagtaaggctgatga

SEQ ID NO: 3634543 - DNA, 25 bp, Homo sapien
cctcgatcttctaagcatttgatga

SEQ ID NO: 3634544 - DNA, 25 bp, Homo sapien
aatgaaaaaccctcgatcttctaag

SEQ ID NO: 3634545 - DNA, 25 bp, Homo sapien
ttctgatagtaaggctgatgatgta

SEQ ID NO: 3634546 - DNA, 25 bp, Homo sapien
ataaatgtaacccatgcagacccat

SEQ ID NO: 3634547 - DNA, 25 bp, Homo sapien
ctgttgacaggggtgaacgaaataa

SEQ ID NO: 3634548 - DNA, 25 bp, Homo sapien
taaatgtaacccatgcagacccatc

SEQ ID NO: 3634549 - DNA, 25 bp, Homo sapien
aaatgtaacccatgcagacccatct

SEQ ID NO: 3634550 - DNA, 25 bp, Homo sapien
cagtagaatacaagaagggtaggca

SEQ ID NO: 3634551 - DNA, 25 bp, Homo sapien
tagtgaagccgagtttgacagatag

SEQ ID NO: 3634552 - DNA, 25 bp, Homo sapien
taagcataggagtctaaggtgagca

SEQ ID NO: 3634553 - DNA, 25 bp, Homo sapien
tgtgagctgccgtgactggtcaact

SEQ ID NO: 3634554 - DNA, 25 bp, Homo sapien
atatacacacgtattaaacatctga

SEQ ID NO: 3634555 - DNA, 25 bp, Homo sapien
gagtcataactaaggaaaatccagc

SEQ ID NO: 3634556 - DNA, 25 bp, Homo sapien
gaatcaagtcaaaaccactgggcag

SEQ ID NO: 3634557 - DNA, 25 bp, Homo sapien
tttctagcagggcacaattaagggt

SEQ ID NO: 3634558 - DNA, 25 bp, Homo sapien
tgaggagcaacactcaatgaagggc

SEQ ID NO: 3634559 - DNA, 25 bp, Homo sapien
tcaatggaaaaactctcttctttgc

SEQ ID NO: 3634560 - DNA, 25 bp, Homo sapien
taacttaagagttgttggagagtcc

SEQ ID NO: 3634561 - DNA, 25 bp, Homo sapien
tggagagtccgagctgttgtctgct

SEQ ID NO: 3634562 - DNA, 25 bp, Homo sapien
tgcactctcagatttgacgctggac

SEQ ID NO: 3634563 - DNA, 25 bp, Homo sapien
catgctggccttcctcttaggctgc

SEQ ID NO: 3634564 - DNA, 25 bp, Homo sapien
taaaggattagaaactctgccccag

SEQ ID NO: 3634565 - DNA, 25 bp, Homo sapien
caagacagcagagggatcgaataca

SEQ ID NO: 3634566 - DNA, 25 bp, Homo sapien
gaagatattcccaagtactcccagg

SEQ ID NO: 3634567 - DNA, 25 bp, Homo sapien
aagattagacaaccaagacccaggg

SEQ ID NO: 3634568 - DNA, 25 bp, Homo sapien
ttcttcacaggtggcttagcccttg

SEQ ID NO: 3634569 - DNA, 25 bp, Homo sapien
ggttttctgtacaaactgtgcagtc

SEQ ID NO: 3634570 - DNA, 25 bp, Homo sapien
tatatttactctctgtttttgtgga

SEQ ID NO: 3634571 - DNA, 25 bp, Homo sapien
ccttggaacagttttgactggagat

SEQ ID NO: 3634572 - DNA, 25 bp, Homo sapien
gaagatcattgtgagccgctgtggt

SEQ ID NO: 3634573 - DNA, 25 bp, Homo sapien
ttagggcctgggagtcatagttgac

SEQ ID NO: 3634574 - DNA, 25 bp, Homo sapien
cagagcttaatgctagatcggctaa

SEQ ID NO: 3634575 - DNA, 25 bp, Homo sapien
gaacagtgaagatttctagcctcag

SEQ ID NO: 3634576 - DNA, 25 bp, Homo sapien
gaagattttttcacacgggcagacg

SEQ ID NO: 3634577 - DNA, 25 bp, Homo sapien
gacggtggtcgatccttgggcttca

SEQ ID NO: 3634578 - DNA, 25 bp, Homo sapien
taacggagtcatcacagctaagcac

SEQ ID NO: 3634579 - DNA, 25 bp, Homo sapien
caaaaggccgggctgatgccgaaat

SEQ ID NO: 3634580 - DNA, 25 bp, Homo sapien
gatcacggaaggatacttcagcagc

SEQ ID NO: 3634581 - DNA, 25 bp, Homo sapien
cagcatgagccctggaaatttcgtt

SEQ ID NO: 3634582 - DNA, 25 bp, Homo sapien
gctgtgttctacaacctttcgggaa

SEQ ID NO: 3634583 - DNA, 25 bp, Homo sapien
gaagcaagcagttaggatcacggaa

SEQ ID NO: 3634584 - DNA, 25 bp, Homo sapien
gatgctgcccaaacccaagcaatat

SEQ ID NO: 3634585 - DNA, 25 bp, Homo sapien
tgaccccgggtataggaacactgtc

SEQ ID NO: 3634586 - DNA, 25 bp, Homo sapien
gctgcccaaacccaagcaatattat

SEQ ID NO: 3634587 - DNA, 25 bp, Homo sapien
ctgcccaaacccaagcaatattatt

SEQ ID NO: 3634588 - DNA, 25 bp, Homo sapien
cacacgtgtgcctttcaagtacagg

SEQ ID NO: 3634589 - DNA, 25 bp, Homo sapien
gactgtagtcttagtgaaatgcaaa

SEQ ID NO: 3634590 - DNA, 25 bp, Homo sapien
tagtgcctatcatgctagaatcctc

SEQ ID NO: 3634591 - DNA, 25 bp, Homo sapien
gaaagagtgctcaactcaacacatg

SEQ ID NO: 3634592 - DNA, 25 bp, Homo sapien
cccgggtttaagtgactctctgcct

SEQ ID NO: 3634593 - DNA, 25 bp, Homo sapien
ctgcctcccgggtttaagtgactct

SEQ ID NO: 3634594 - DNA, 25 bp, Homo sapien
cctcccgggtttaagtgactctctg

SEQ ID NO: 3634595 - DNA, 25 bp, Homo sapien
tcccgggtttaagtgactctctgcc

SEQ ID NO: 3634596 - DNA, 25 bp, Homo sapien
tctgtcctgcaactactagagaggg

SEQ ID NO: 3634597 - DNA, 25 bp, Homo sapien
tggttccgggttaatcactgcacac

SEQ ID NO: 3634598 - DNA, 25 bp, Homo sapien
ttcaagggtgccgtacacagagctc

SEQ ID NO: 3634599 - DNA, 25 bp, Homo sapien
taaaggttgtacgttcatcagcagt

SEQ ID NO: 3634600 - DNA, 25 bp, Homo sapien
tactggaggttcaggactagacgct

SEQ ID NO: 3634601 - DNA, 25 bp, Homo sapien
ccttctgaagataggccgaggagac

SEQ ID NO: 3634602 - DNA, 25 bp, Homo sapien
taaaatgcatggagtcacagcctga

SEQ ID NO: 3634603 - DNA, 25 bp, Homo sapien
gcatccctgtgtagaataagctcca

SEQ ID NO: 3634604 - DNA, 25 bp, Homo sapien
tcaatttctacgtgctctgtggcta

SEQ ID NO: 3634605 - DNA, 25 bp, Homo sapien
gatggctttgcgttcaccttttaga

SEQ ID NO: 3634606 - DNA, 25 bp, Homo sapien
tgttgacacatcttgcagcgtgtgg

SEQ ID NO: 3634607 - DNA, 25 bp, Homo sapien
tattttggtagggaccagcacaaag

SEQ ID NO: 3634608 - DNA, 25 bp, Homo sapien
tttctttaccgcagcagtccagtgc

SEQ ID NO: 3634609 - DNA, 25 bp, Homo sapien
tagtgcatgtcggaattcacaccga

SEQ ID NO: 3634610 - DNA, 25 bp, Homo sapien
agcaggtctagatcagaatctccag

SEQ ID NO: 3634611 - DNA, 25 bp, Homo sapien
ttcaacgacgactcatagccatctg

SEQ ID NO: 3634612 - DNA, 25 bp, Homo sapien
tatagagaagttggcgtaagtcctg

SEQ ID NO: 3634613 - DNA, 25 bp, Homo sapien
tcggatttggacgtaaggcggcaca

SEQ ID NO: 3634614 - DNA, 25 bp, Homo sapien
taagtcctgaggatcccgtggagat

SEQ ID NO: 3634615 - DNA, 25 bp, Homo sapien
cagatactccaggtctaaagtgttc

SEQ ID NO: 3634616 - DNA, 25 bp, Homo sapien
ggatctgactccacaactgttacca

SEQ ID NO: 3634617 - DNA, 25 bp, Homo sapien
ggaaagcaccaatggagatctgggt

SEQ ID NO: 3634618 - DNA, 25 bp, Homo sapien
gcaaattggtgcacacgtctatgat

SEQ ID NO: 3634619 - DNA, 25 bp, Homo sapien
tgtcttcataggaggctgaccgtcc

SEQ ID NO: 3634620 - DNA, 25 bp, Homo sapien
tagtcattgccctaattctggaaca

SEQ ID NO: 3634621 - DNA, 25 bp, Homo sapien
tatgggcatgtctacactggtaact

SEQ ID NO: 3634622 - DNA, 25 bp, Homo sapien
tagtatgcagataaagactaagctg

SEQ ID NO: 3634623 - DNA, 25 bp, Homo sapien
aaataatacgtaagacgtggctggc

SEQ ID NO: 3634624 - DNA, 25 bp, Homo sapien
gctgacatctgaatggagctttctg

SEQ ID NO: 3634625 - DNA, 25 bp, Homo sapien
ggtagatactaaacaggactgctga

SEQ ID NO: 3634626 - DNA, 25 bp, Homo sapien
tagatactaaacaggactgctgaca

SEQ ID NO: 3634627 - DNA, 25 bp, Homo sapien
ctgaggtagatactaaacaggactg

SEQ ID NO: 3634628 - DNA, 25 bp, Homo sapien
caatggagtttcacgttaaggcagt

SEQ ID NO: 3634629 - DNA, 25 bp, Homo sapien
gactcaaaataggagccaccttgca

SEQ ID NO: 3634630 - DNA, 25 bp, Homo sapien
gagctgtgactctagcaacaatgga

SEQ ID NO: 3634631 - DNA, 25 bp, Homo sapien
catctctggcggtctagtggttagg

SEQ ID NO: 3634632 - DNA, 25 bp, Homo sapien
ctgaggttcaatttctgtatggcct

SEQ ID NO: 3634633 - DNA, 25 bp, Homo sapien
tgtggaaagcttgacagaagtgctg

SEQ ID NO: 3634634 - DNA, 25 bp, Homo sapien
gatgattagtgtatcattctctctg

SEQ ID NO: 3634635 - DNA, 25 bp, Homo sapien
caatttctgtatggcctcctttcct

SEQ ID NO: 3634636 - DNA, 25 bp, Homo sapien
ttggtgccagcaccgacgactgcct

SEQ ID NO: 3634637 - DNA, 25 bp, Homo sapien
gactgcctgctgatgacggcaggtt

SEQ ID NO: 3634638 - DNA, 25 bp, Homo sapien
agcaccgacgactgcctgctgatga

SEQ ID NO: 3634639 - DNA, 25 bp, Homo sapien
tgatgacggcaggtttatgcaccca

SEQ ID NO: 3634640 - DNA, 25 bp, Homo sapien
tgttacagcttctagtatcttgtca

SEQ ID NO: 3634641 - DNA, 25 bp, Homo sapien
tcatctgatatcacaaagcctcctg

SEQ ID NO: 3634642 - DNA, 25 bp, Homo sapien
tgatcaagaacatctccagggctgt

SEQ ID NO: 3634643 - DNA, 25 bp, Homo sapien
cacgaaacagttcttggtaggtgtg

SEQ ID NO: 3634644 - DNA, 25 bp, Homo sapien
tccctgtagtgaagcaaccacttcc

SEQ ID NO: 3634645 - DNA, 25 bp, Homo sapien
ttttccctgtagtgaagcaaccact

SEQ ID NO: 3634646 - DNA, 25 bp, Homo sapien
ttccctgtagtgaagcaaccacttc

SEQ ID NO: 3634647 - DNA, 25 bp, Homo sapien
tattttccctgtagtgaagcaacca

SEQ ID NO: 3634648 - DNA, 25 bp, Homo sapien
gaaaatggatgcacctaacagtgcc

SEQ ID NO: 3634649 - DNA, 25 bp, Homo sapien
tacccaaagccctagaagtgctaga

SEQ ID NO: 3634650 - DNA, 25 bp, Homo sapien
taaatgtgcttctctacttaccgaa

SEQ ID NO: 3634651 - DNA, 25 bp, Homo sapien
gaagtccgctgtgaatggtcatacc

SEQ ID NO: 3634652 - DNA, 25 bp, Homo sapien
tttgcaatgactgataaccacctag

SEQ ID NO: 3634653 - DNA, 25 bp, Homo sapien
cattctaagagggacatcatgcatc

SEQ ID NO: 3634654 - DNA, 25 bp, Homo sapien
tacctacgaccaatcaagccatgtg

SEQ ID NO: 3634655 - DNA, 25 bp, Homo sapien
tatacttctcataccttgtgggcag

SEQ ID NO: 3634656 - DNA, 25 bp, Homo sapien
tgatgatcgagagtcacactggtga

SEQ ID NO: 3634657 - DNA, 25 bp, Homo sapien
gcaaacctggcatcaatatgctgaa

SEQ ID NO: 3634658 - DNA, 25 bp, Homo sapien
cactggtgataatgaagcaattcaa

SEQ ID NO: 3634659 - DNA, 25 bp, Homo sapien
tgaatttgcaggtttagcaaacatt

SEQ ID NO: 3634660 - DNA, 25 bp, Homo sapien
aactttgacattcctagagctgacc

SEQ ID NO: 3634661 - DNA, 25 bp, Homo sapien
gatgccaagccatttagatacctga

SEQ ID NO: 3634662 - DNA, 25 bp, Homo sapien
gaactgacttacatacataggagga

SEQ ID NO: 3634663 - DNA, 25 bp, Homo sapien
taactgagtaaaatgcgcctgtgaa

SEQ ID NO: 3634664 - DNA, 25 bp, Homo sapien
tgttctgccacccaggttacagtgc

SEQ ID NO: 3634665 - DNA, 25 bp, Homo sapien
ccacacctgccaacttctgtagaga

SEQ ID NO: 3634666 - DNA, 25 bp, Homo sapien
caccacacctgccaacttctgtaga

SEQ ID NO: 3634667 - DNA, 25 bp, Homo sapien
acatcaccacacctgccaacttctg

SEQ ID NO: 3634668 - DNA, 25 bp, Homo sapien
tctgtaacaaggattccactatttt

SEQ ID NO: 3634669 - DNA, 25 bp, Homo sapien
atctgtaacaaggattccactattt

SEQ ID NO: 3634670 - DNA, 25 bp, Homo sapien
acaaggattccactattttcaaaga

SEQ ID NO: 3634671 - DNA, 25 bp, Homo sapien
gtaacaaggattccactattttcaa

SEQ ID NO: 3634672 - DNA, 25 bp, Homo sapien
caatagctactcctaaatggagctg

SEQ ID NO: 3634673 - DNA, 25 bp, Homo sapien
tttataagcgggatgctctaatggg

SEQ ID NO: 3634674 - DNA, 25 bp, Homo sapien
gggaaaacgcctatgcattctaagg

SEQ ID NO: 3634675 - DNA, 25 bp, Homo sapien
cattatgttctgtactgacgatcca

SEQ ID NO: 3634676 - DNA, 25 bp, Homo sapien
gacgatccaagttaacagcaagtga

SEQ ID NO: 3634677 - DNA, 25 bp, Homo sapien
catgttcacaagttttccaaaggga

SEQ ID NO: 3634678 - DNA, 25 bp, Homo sapien
taaaacaatatctagcactgcaacc

SEQ ID NO: 3634679 - DNA, 25 bp, Homo sapien
acctttaaaacagagcataatgtgc

SEQ ID NO: 3634680 - DNA, 25 bp, Homo sapien
tgcaacccaaagctaacagacaact

SEQ ID NO: 3634681 - DNA, 25 bp, Homo sapien
tacaaaaaccgttgctccaaataga

SEQ ID NO: 3634682 - DNA, 25 bp, Homo sapien
aaccgttgctccaaatagataccgt

SEQ ID NO: 3634683 - DNA, 25 bp, Homo sapien
cacattagttacaaaaaccgttgct

SEQ ID NO: 3634684 - DNA, 25 bp, Homo sapien
ttgctccaaatagataccgtgtatc

SEQ ID NO: 3634685 - DNA, 25 bp, Homo sapien
cctctggaagcttactgttctgcta

SEQ ID NO: 3634686 - DNA, 25 bp, Homo sapien
ccaggcccaaaggatagaagtgtag

SEQ ID NO: 3634687 - DNA, 25 bp, Homo sapien
gatagaagtgtaggtttcctctgga

SEQ ID NO: 3634688 - DNA, 25 bp, Homo sapien
gaacactccagataagtcaatttct

SEQ ID NO: 3634689 - DNA, 25 bp, Homo sapien
ttaacctgttactcggtgtacttga

SEQ ID NO: 3634690 - DNA, 25 bp, Homo sapien
taagtgtccctgtaaaggccaggtg

SEQ ID NO: 3634691 - DNA, 25 bp, Homo sapien
cagcaccatcttggaatgacaacca

SEQ ID NO: 3634692 - DNA, 25 bp, Homo sapien
ttcccatgcaaaggcccaagctggg

SEQ ID NO: 3634693 - DNA, 25 bp, Homo sapien
tattaggtccaacctgaaaggtgca

SEQ ID NO: 3634694 - DNA, 25 bp, Homo sapien
gaaaacttccggatgctgtcccaaa

SEQ ID NO: 3634695 - DNA, 25 bp, Homo sapien
caagttgtctgtgtcggtatcccaa

SEQ ID NO: 3634696 - DNA, 25 bp, Homo sapien
caacaccgggcagtagtttccagaa

SEQ ID NO: 3634697 - DNA, 25 bp, Homo sapien
ggagtatttactggcacagcgctct

SEQ ID NO: 3634698 - DNA, 25 bp, Homo sapien
gaagccacgcctgagatacaaaaga

SEQ ID NO: 3634699 - DNA, 25 bp, Homo sapien
gatgcactacacttgacccgcttta

SEQ ID NO: 3634700 - DNA, 25 bp, Homo sapien
taaagcgggtcaagtgtagtgcatc

SEQ ID NO: 3634701 - DNA, 25 bp, Homo sapien
tgattgcaagggtcacagctgccgt

SEQ ID NO: 3634702 - DNA, 25 bp, Homo sapien
caaacattgggataccgacacagac

SEQ ID NO: 3634703 - DNA, 25 bp, Homo sapien
tgtcaaatgttatggcagggcccaa

SEQ ID NO: 3634704 - DNA, 25 bp, Homo sapien
catagggagtcatttggagaaagcc

SEQ ID NO: 3634705 - DNA, 25 bp, Homo sapien
tctggaaactactgcccggtgttgg

SEQ ID NO: 3634706 - DNA, 25 bp, Homo sapien
tgggaacatcgaagggttacaaaca

SEQ ID NO: 3634707 - DNA, 25 bp, Homo sapien
gattaagtccagtccctttgttcta

SEQ ID NO: 3634708 - DNA, 25 bp, Homo sapien
caaacaactggctaagacaaataag

SEQ ID NO: 3634709 - DNA, 25 bp, Homo sapien
tatacagatagctcttacctgtccc

SEQ ID NO: 3634710 - DNA, 25 bp, Homo sapien
acatcgaagggttacaaacaactgg

SEQ ID NO: 3634711 - DNA, 25 bp, Homo sapien
tacctgtcccataaagcctgattac

SEQ ID NO: 3634712 - DNA, 25 bp, Homo sapien
tagaacaaagggactggacttaatc

SEQ ID NO: 3634713 - DNA, 25 bp, Homo sapien
cttatttgtcttagccagttgtttg

SEQ ID NO: 3634714 - DNA, 25 bp, Homo sapien
tttatgggacaggtaagagctatct

SEQ ID NO: 3634715 - DNA, 25 bp, Homo sapien
tgtttgtaacccttcgatgttccca

SEQ ID NO: 3634716 - DNA, 25 bp, Homo sapien
aatcacaaaagatgatctgtagaac

SEQ ID NO: 3634717 - DNA, 25 bp, Homo sapien
ggtaatcaggctttatgggacaggt

SEQ ID NO: 3634718 - DNA, 25 bp, Homo sapien
cgtatggaccaatgaaacgaggaga

SEQ ID NO: 3634719 - DNA, 25 bp, Homo sapien
tctacccgatcttttacgtagctgg

SEQ ID NO: 3634720 - DNA, 25 bp, Homo sapien
caagttcatattggttcccaaggga

SEQ ID NO: 3634721 - DNA, 25 bp, Homo sapien
tacagcgagcaatctataacaaagc

SEQ ID NO: 3634722 - DNA, 25 bp, Homo sapien
gacactgaagcggacaaggatatag

SEQ ID NO: 3634723 - DNA, 25 bp, Homo sapien
agtcatttcaacaaaccgtcctggg

SEQ ID NO: 3634724 - DNA, 25 bp, Homo sapien
cccaggacggtttgttgaaatgact

SEQ ID NO: 3634725 - DNA, 25 bp, Homo sapien
gccaggtgatcagagttatttgcat

SEQ ID NO: 3634726 - DNA, 25 bp, Homo sapien
ccttgggaaccaatatgaacttgag

SEQ ID NO: 3634727 - DNA, 25 bp, Homo sapien
ttatagattgctcgctgtaagcagc

SEQ ID NO: 3634728 - DNA, 25 bp, Homo sapien
ccaagtcaatcgaaagtcaggtgag

SEQ ID NO: 3634729 - DNA, 25 bp, Homo sapien
tgaccccagctacgtaaaagatcgg

SEQ ID NO: 3634730 - DNA, 25 bp, Homo sapien
taaatggtccaatagaaaaggagct

SEQ ID NO: 3634731 - DNA, 25 bp, Homo sapien
caactcaaggctgaaaagggcagac

SEQ ID NO: 3634732 - DNA, 25 bp, Homo sapien
agtcagagttatggagcttgccgcc

SEQ ID NO: 3634733 - DNA, 25 bp, Homo sapien
aagggcagacttctaaatggtccaa

SEQ ID NO: 3634734 - DNA, 25 bp, Homo sapien
taaacaactcaaggctgaaaagggc

SEQ ID NO: 3634735 - DNA, 25 bp, Homo sapien
aaagaaaataaacaactcaaggctg

SEQ ID NO: 3634736 - DNA, 25 bp, Homo sapien
tcagccttgagttgtttattttctt

SEQ ID NO: 3634737 - DNA, 25 bp, Homo sapien
gtctgcccttttcagccttgagttg

SEQ ID NO: 3634738 - DNA, 25 bp, Homo sapien
tattggaccatttagaagtctgccc

SEQ ID NO: 3634739 - DNA, 25 bp, Homo sapien
gctccttttctattggaccatttag

SEQ ID NO: 3634740 - DNA, 25 bp, Homo sapien
gcccttttcagccttgagttgttta

SEQ ID NO: 3634741 - DNA, 25 bp, Homo sapien
ggcggcaagctccataactctgact

SEQ ID NO: 3634742 - DNA, 25 bp, Homo sapien
acttccccttatggagctgaggata

SEQ ID NO: 3634743 - DNA, 25 bp, Homo sapien
ccttatggagctgaggatattctga

SEQ ID NO: 3634744 - DNA, 25 bp, Homo sapien
agtttgcagcaaataccaggaaagc

SEQ ID NO: 3634745 - DNA, 25 bp, Homo sapien
cttccccttatggagctgaggatat

SEQ ID NO: 3634746 - DNA, 25 bp, Homo sapien
ttccccttatggagctgaggatatt

SEQ ID NO: 3634747 - DNA, 25 bp, Homo sapien
cagaacttccccttatggagctgag

SEQ ID NO: 3634748 - DNA, 25 bp, Homo sapien
gctttcctggtatttgctgcaaact

SEQ ID NO: 3634749 - DNA, 25 bp, Homo sapien
gatggaaaatccaagggaggaagat

SEQ ID NO: 3634750 - DNA, 25 bp, Homo sapien
tatcctcagctccataaggggaagt

SEQ ID NO: 3634751 - DNA, 25 bp, Homo sapien
aatatcctcagctccataaggggaa

SEQ ID NO: 3634752 - DNA, 25 bp, Homo sapien
cttggctttcctggtatttgctgca

SEQ ID NO: 3634753 - DNA, 25 bp, Homo sapien
tcagaatatcctcagctccataagg

SEQ ID NO: 3634754 - DNA, 25 bp, Homo sapien
catggcacccggctactatcgggag

SEQ ID NO: 3634755 - DNA, 25 bp, Homo sapien
ggctactatcgggagcttttcagag

SEQ ID NO: 3634756 - DNA, 25 bp, Homo sapien
tggttcctgacttggcatcacctgc

SEQ ID NO: 3634757 - DNA, 25 bp, Homo sapien
gagtgtatggctaaccctgcaagca

SEQ ID NO: 3634758 - DNA, 25 bp, Homo sapien
caagcagggcatctcagtgtggttc

SEQ ID NO: 3634759 - DNA, 25 bp, Homo sapien
gagcttctgagttagtaggtctgag

SEQ ID NO: 3634760 - DNA, 25 bp, Homo sapien
tgaaaagctcccgatagtagccggg

SEQ ID NO: 3634761 - DNA, 25 bp, Homo sapien
agggttagccatacactctgaaaag

SEQ ID NO: 3634762 - DNA, 25 bp, Homo sapien
tgcttgcagggttagccatacactc

SEQ ID NO: 3634763 - DNA, 25 bp, Homo sapien
cctcagacctactaactcagaagct

SEQ ID NO: 3634764 - DNA, 25 bp, Homo sapien
ggaaccacactgagatgccctgctt

SEQ ID NO: 3634765 - DNA, 25 bp, Homo sapien
gcaggtgatgccaagtcaggaacca

SEQ ID NO: 3634766 - DNA, 25 bp, Homo sapien
gtcaggtgcgaaagcatttgacgga

SEQ ID NO: 3634767 - DNA, 25 bp, Homo sapien
gcatttgacggacaagttttgaaaa

SEQ ID NO: 3634768 - DNA, 25 bp, Homo sapien
tcaattccaattctacagatgctca

SEQ ID NO: 3634769 - DNA, 25 bp, Homo sapien
ggcttttagcaatccatcaccaacc

SEQ ID NO: 3634770 - DNA, 25 bp, Homo sapien
gaacttggcttttagcaatccatca

SEQ ID NO: 3634771 - DNA, 25 bp, Homo sapien
gcgaaggtcaggtgcgaaagcattt

SEQ ID NO: 3634772 - DNA, 25 bp, Homo sapien
tcccctaagaattgggttggtgatg

SEQ ID NO: 3634773 - DNA, 25 bp, Homo sapien
aaatgctttcgcacctgaccttcgc

SEQ ID NO: 3634774 - DNA, 25 bp, Homo sapien
tgatggattgctaaaagccaagttc

SEQ ID NO: 3634775 - DNA, 25 bp, Homo sapien
ggttggtgatggattgctaaaagcc

SEQ ID NO: 3634776 - DNA, 25 bp, Homo sapien
gagcatctgtagaattggaattgag

SEQ ID NO: 3634777 - DNA, 25 bp, Homo sapien
tttcaaaacttgtccgtcaaatgct

SEQ ID NO: 3634778 - DNA, 25 bp, Homo sapien
cgaggcggaataggaaatgcaaccg

SEQ ID NO: 3634779 - DNA, 25 bp, Homo sapien
gccgaggcggaataggaaatgcaac

SEQ ID NO: 3634780 - DNA, 25 bp, Homo sapien
ctccgcctcgggtgctggtttccaa

SEQ ID NO: 3634781 - DNA, 25 bp, Homo sapien
gaataggaaatgcaaccgcgaggcc

SEQ ID NO: 3634782 - DNA, 25 bp, Homo sapien
ggaataggaaatgcaaccgcgaggc

SEQ ID NO: 3634783 - DNA, 25 bp, Homo sapien
cgcctcgggtgctggtttccaaccg

SEQ ID NO: 3634784 - DNA, 25 bp, Homo sapien
gcctcgcggttgcatttcctattcc

SEQ ID NO: 3634785 - DNA, 25 bp, Homo sapien
gttgcatttcctattccgcctcggc

SEQ ID NO: 3634786 - DNA, 25 bp, Homo sapien
ggttgcatttcctattccgcctcgg

SEQ ID NO: 3634787 - DNA, 25 bp, Homo sapien
ggcctcgcggttgcatttcctattc

SEQ ID NO: 3634788 - DNA, 25 bp, Homo sapien
ttggaaaccagcacccgaggcggag

SEQ ID NO: 3634789 - DNA, 25 bp, Homo sapien
cggttggaaaccagcacccgaggcg

SEQ ID NO: 3634790 - DNA, 25 bp, Homo sapien
acggcagaacgagacccccgaggag

SEQ ID NO: 3634791 - DNA, 25 bp, Homo sapien
tacggctgacggcagaacgagaccc

SEQ ID NO: 3634792 - DNA, 25 bp, Homo sapien
gtcccgaaaactacggctgacggca

SEQ ID NO: 3634793 - DNA, 25 bp, Homo sapien
tcccgaaaactacggctgacggcag

SEQ ID NO: 3634794 - DNA, 25 bp, Homo sapien
gaaaactacggctgacggcagaacg

SEQ ID NO: 3634795 - DNA, 25 bp, Homo sapien
aactacggctgacggcagaacgaga

SEQ ID NO: 3634796 - DNA, 25 bp, Homo sapien
gggtctcgttctgccgtcagccgta

SEQ ID NO: 3634797 - DNA, 25 bp, Homo sapien
tcgttctgccgtcagccgtagtttt

SEQ ID NO: 3634798 - DNA, 25 bp, Homo sapien
tgccgtcagccgtagttttcgggac

SEQ ID NO: 3634799 - DNA, 25 bp, Homo sapien
gttctgccgtcagccgtagttttcg

SEQ ID NO: 3634800 - DNA, 25 bp, Homo sapien
tctcgttctgccgtcagccgtagtt

SEQ ID NO: 3634801 - DNA, 25 bp, Homo sapien
tcctcgggggtctcgttctgccgtc

SEQ ID NO: 3634802 - DNA, 25 bp, Homo sapien
ggatcgccgcccttggactttgagc

SEQ ID NO: 3634803 - DNA, 25 bp, Homo sapien
acgtgtcctttttcccgctctgtgc

SEQ ID NO: 3634804 - DNA, 25 bp, Homo sapien
tgtgccctccttgtttagtgcgttg

SEQ ID NO: 3634805 - DNA, 25 bp, Homo sapien
ggcgctcccggcactctaattggtt

SEQ ID NO: 3634806 - DNA, 25 bp, Homo sapien
gaagagttcggaaatcacacgtgtc

SEQ ID NO: 3634807 - DNA, 25 bp, Homo sapien
attggtaggaggaaaagcggcttct

SEQ ID NO: 3634808 - DNA, 25 bp, Homo sapien
gcacagagcgggaaaaaggacacgt

SEQ ID NO: 3634809 - DNA, 25 bp, Homo sapien
tacagccctcggtaggtgcagatcg

SEQ ID NO: 3634810 - DNA, 25 bp, Homo sapien
ggatcagctaccacgtttacagcgg

SEQ ID NO: 3634811 - DNA, 25 bp, Homo sapien
taaccaattagagtgccgggagcgc

SEQ ID NO: 3634812 - DNA, 25 bp, Homo sapien
ggtgcagatcggcttcccaatgaaa

SEQ ID NO: 3634813 - DNA, 25 bp, Homo sapien
caacgcactaaacaaggagggcaca

SEQ ID NO: 3634814 - DNA, 25 bp, Homo sapien
aggaatctctggcttcattgaggac

SEQ ID NO: 3634815 - DNA, 25 bp, Homo sapien
gaagatttggcattcaagaactcct

SEQ ID NO: 3634816 - DNA, 25 bp, Homo sapien
gaccccacgaaagcctaagcaggtg

SEQ ID NO: 3634817 - DNA, 25 bp, Homo sapien
taagcaggtgaatttcgtaaagacg

SEQ ID NO: 3634818 - DNA, 25 bp, Homo sapien
cagcacgtgataaatctgcagagtc

SEQ ID NO: 3634819 - DNA, 25 bp, Homo sapien
gaaaacctgtgctttcagcacgtga

SEQ ID NO: 3634820 - DNA, 25 bp, Homo sapien
gactctgcagatttatcacgtgctg

SEQ ID NO: 3634821 - DNA, 25 bp, Homo sapien
tcaacgtctttacgaaattcacctg

SEQ ID NO: 3634822 - DNA, 25 bp, Homo sapien
aattcacctgcttaggctttcgtgg

SEQ ID NO: 3634823 - DNA, 25 bp, Homo sapien
caatgaagccagagattcctaagag

SEQ ID NO: 3634824 - DNA, 25 bp, Homo sapien
ggagttcttgaatgccaaatcttca

SEQ ID NO: 3634825 - DNA, 25 bp, Homo sapien
tcacgtgctgaaagcacaggttttc

SEQ ID NO: 3634826 - DNA, 25 bp, Homo sapien
gatagaccgaacttgctcatattta

SEQ ID NO: 3634827 - DNA, 25 bp, Homo sapien
gatatgttatattggaccatggatc

SEQ ID NO: 3634828 - DNA, 25 bp, Homo sapien
cagagcctgccttgatagaccgaac

SEQ ID NO: 3634829 - DNA, 25 bp, Homo sapien
gaattagtgcacagttgaccataca

SEQ ID NO: 3634830 - DNA, 25 bp, Homo sapien
gaccatacaactgattatgcaacag

SEQ ID NO: 3634831 - DNA, 25 bp, Homo sapien
caacagtgagtgtaactgacttttc

SEQ ID NO: 3634832 - DNA, 25 bp, Homo sapien
gatccatggtccaatataacatatc

SEQ ID NO: 3634833 - DNA, 25 bp, Homo sapien
cactgttgcataatcagttgtatgg

SEQ ID NO: 3634834 - DNA, 25 bp, Homo sapien
gaaaagtcagttacactcactgttg

SEQ ID NO: 3634835 - DNA, 25 bp, Homo sapien
caagttcggtctatcaaggcaggct

SEQ ID NO: 3634836 - DNA, 25 bp, Homo sapien
taaatatgagcaagttcggtctatc

SEQ ID NO: 3634837 - DNA, 25 bp, Homo sapien
gtatggtcaactgtgcactaattca

SEQ ID NO: 3634838 - DNA, 25 bp, Homo sapien
taagaacaacaagactagcattcag

SEQ ID NO: 3634839 - DNA, 25 bp, Homo sapien
ttcaccaactactgataagaacaac

SEQ ID NO: 3634840 - DNA, 25 bp, Homo sapien
caaaactgtgactattccagtaaaa

SEQ ID NO: 3634841 - DNA, 25 bp, Homo sapien
tccagtaaaacaggcgcatttgttc

SEQ ID NO: 3634842 - DNA, 25 bp, Homo sapien
atcccggaccgctccgtccctgagg

SEQ ID NO: 3634843 - DNA, 25 bp, Homo sapien
cggaaccgcggcttctcccacgcgg

SEQ ID NO: 3634844 - DNA, 25 bp, Homo sapien
gtgttcagtcccgaatcacgtacgg

SEQ ID NO: 3634845 - DNA, 25 bp, Homo sapien
acggcggacgccagcgctctcggat

SEQ ID NO: 3634846 - DNA, 25 bp, Homo sapien
cccagcgtcccccggcagcgagctc

SEQ ID NO: 3634847 - DNA, 25 bp, Homo sapien
ccagcgtcccccggcagcgagctcc

SEQ ID NO: 3634848 - DNA, 25 bp, Homo sapien
ccgccggccgctcagcccagcgtcc

SEQ ID NO: 3634849 - DNA, 25 bp, Homo sapien
gccgccggccgctcagcccagcgtc

SEQ ID NO: 3634850 - DNA, 25 bp, Homo sapien
actccctgccacgtctgcggcctca

SEQ ID NO: 3634851 - DNA, 25 bp, Homo sapien
cactccctgccacgtctgcggcctc

SEQ ID NO: 3634852 - DNA, 25 bp, Homo sapien
tccctgccacgtctgcggcctcacg

SEQ ID NO: 3634853 - DNA, 25 bp, Homo sapien
cctgccacgtctgcggcctcacgca

SEQ ID NO: 3634854 - DNA, 25 bp, Homo sapien
gttcagtgagcgccctggcctcccc

SEQ ID NO: 3634855 - DNA, 25 bp, Homo sapien
gctcccgaccgagttcagtgagcgc

SEQ ID NO: 3634856 - DNA, 25 bp, Homo sapien
cacctgcccacggcccggacggccg

SEQ ID NO: 3634857 - DNA, 25 bp, Homo sapien
gggccgctcccgaccgagttcagtg

SEQ ID NO: 3634858 - DNA, 25 bp, Homo sapien
cagagggcagcgaaaaatgacttgc

SEQ ID NO: 3634859 - DNA, 25 bp, Homo sapien
tgcccaaggtcaaaacgtcagagta

SEQ ID NO: 3634860 - DNA, 25 bp, Homo sapien
gtagacgggaaagcctggcctccta

SEQ ID NO: 3634861 - DNA, 25 bp, Homo sapien
gcagagaagctaccgatgacacagg

SEQ ID NO: 3634862 - DNA, 25 bp, Homo sapien
taaaaccctactgatgcctcatagg

SEQ ID NO: 3634863 - DNA, 25 bp, Homo sapien
gaaagtcactgacttggttaggcct

SEQ ID NO: 3634864 - DNA, 25 bp, Homo sapien
cactgacttggttaggcctccactt

SEQ ID NO: 3634865 - DNA, 25 bp, Homo sapien
catagggttgtcttcggaccacaga

SEQ ID NO: 3634866 - DNA, 25 bp, Homo sapien
gcaaagctggtacttggactagttc

SEQ ID NO: 3634867 - DNA, 25 bp, Homo sapien
tcattttaccacagcggcagacgct

SEQ ID NO: 3634868 - DNA, 25 bp, Homo sapien
tctgctcatgagtaaaacggactta

SEQ ID NO: 3634869 - DNA, 25 bp, Homo sapien
tccagaggctatccacatcactgtt

SEQ ID NO: 3634870 - DNA, 25 bp, Homo sapien
cacaactacttttacgtatctgcta

SEQ ID NO: 3634871 - DNA, 25 bp, Homo sapien
aagagaaagatcactacttatggtc

SEQ ID NO: 3634872 - DNA, 25 bp, Homo sapien
gaaagatcactacttatggtctaga

SEQ ID NO: 3634873 - DNA, 25 bp, Homo sapien
ccacaactacttttacgtatctgct

SEQ ID NO: 3634874 - DNA, 25 bp, Homo sapien
gagacagcactcgtgtatgacagcc

SEQ ID NO: 3634875 - DNA, 25 bp, Homo sapien
cttggagacagcactcgtgtatgac

SEQ ID NO: 3634876 - DNA, 25 bp, Homo sapien
gcactcgtgtatgacagccaacaag

SEQ ID NO: 3634877 - DNA, 25 bp, Homo sapien
tgggctgggctttccgttctatgtt

SEQ ID NO: 3634878 - DNA, 25 bp, Homo sapien
atggtgccaacacaagaacccgggt

SEQ ID NO: 3634879 - DNA, 25 bp, Homo sapien
agtaagctcaatctccccgggatcc

SEQ ID NO: 3634880 - DNA, 25 bp, Homo sapien
taaatgctgtagacccgaaatggaa

SEQ ID NO: 3634881 - DNA, 25 bp, Homo sapien
ggtattcactgacgcagagccaggc

SEQ ID NO: 3634882 - DNA, 25 bp, Homo sapien
gccatgattaagctggggctcagag

SEQ ID NO: 3634883 - DNA, 25 bp, Homo sapien
aaagcaatcctacaattgtgccatg

SEQ ID NO: 3634884 - DNA, 25 bp, Homo sapien
caatcctacaattgtgccatgatta

SEQ ID NO: 3634885 - DNA, 25 bp, Homo sapien
ctcaaagcaatcctacaattgtgcc

SEQ ID NO: 3634886 - DNA, 25 bp, Homo sapien
ggccctgcgcaatgtagcccattat

SEQ ID NO: 3634887 - DNA, 25 bp, Homo sapien
gtagcccattatcacatgactcagg

SEQ ID NO: 3634888 - DNA, 25 bp, Homo sapien
acatgactcaggcacttgacaggtc

SEQ ID NO: 3634889 - DNA, 25 bp, Homo sapien
ggcacttgacaggtccaatggcagc

SEQ ID NO: 3634890 - DNA, 25 bp, Homo sapien
gccctggtcagtttcccacatgcct

SEQ ID NO: 3634891 - DNA, 25 bp, Homo sapien
tcctgcagtcgcagagtgagaactg

SEQ ID NO: 3634892 - DNA, 25 bp, Homo sapien
gttcaaaatagaagagcctccagca

SEQ ID NO: 3634893 - DNA, 25 bp, Homo sapien
tggatgtcgccttaccgctgggtgc

SEQ ID NO: 3634894 - DNA, 25 bp, Homo sapien
caggacatccttagaagccgggtgt

SEQ ID NO: 3634895 - DNA, 25 bp, Homo sapien
cttacaagaactctgctacggggaa

SEQ ID NO: 3634896 - DNA, 25 bp, Homo sapien
tgaggtcccccgatggagatgagac

SEQ ID NO: 3634897 - DNA, 25 bp, Homo sapien
tcccctgaacgagtccttacaagaa

SEQ ID NO: 3634898 - DNA, 25 bp, Homo sapien
ggagatgagacccttatcagtctcc

SEQ ID NO: 3634899 - DNA, 25 bp, Homo sapien
ggattataataacctgccatgctga

SEQ ID NO: 3634900 - DNA, 25 bp, Homo sapien
cattgagggtgacaacacctatctc

SEQ ID NO: 3634901 - DNA, 25 bp, Homo sapien
cacctatctctaaatctatgtcaac

SEQ ID NO: 3634902 - DNA, 25 bp, Homo sapien
tatatgtaagtactcaagccaccca

SEQ ID NO: 3634903 - DNA, 25 bp, Homo sapien
aggtatattcatcgccaaagccttg

SEQ ID NO: 3634904 - DNA, 25 bp, Homo sapien
tgcaggagaagacccacacttggca

SEQ ID NO: 3634905 - DNA, 25 bp, Homo sapien
cccacacttggcaggtatattcatc

SEQ ID NO: 3634906 - DNA, 25 bp, Homo sapien
ggtgcaggagaagacccacacttgg

SEQ ID NO: 3634907 - DNA, 25 bp, Homo sapien
tacacgctttacacttaatgttccc

SEQ ID NO: 3634908 - DNA, 25 bp, Homo sapien
tgtatctctggtctcagagagaggt

SEQ ID NO: 3634909 - DNA, 25 bp, Homo sapien
tcctctgcaattacacgctttacac

SEQ ID NO: 3634910 - DNA, 25 bp, Homo sapien
ctctggtctcagagagaggtgctgt

SEQ ID NO: 3634911 - DNA, 25 bp, Homo sapien
taactctgtatgtagatagcgtggg

SEQ ID NO: 3634912 - DNA, 25 bp, Homo sapien
cggttctaggaagtgataaggtcac

SEQ ID NO: 3634913 - DNA, 25 bp, Homo sapien
tgtactcaacgttcatgtccctgaa

SEQ ID NO: 3634914 - DNA, 25 bp, Homo sapien
cacccgcaaggtgacggtatgaagt

SEQ ID NO: 3634915 - DNA, 25 bp, Homo sapien
tgtaagatctagctacctccttatg

SEQ ID NO: 3634916 - DNA, 25 bp, Homo sapien
ccttatggcatgaaacactaaaatg

SEQ ID NO: 3634917 - DNA, 25 bp, Homo sapien
tgtgtaaccaagactctccatgctt

SEQ ID NO: 3634918 - DNA, 25 bp, Homo sapien
tctgcatctgttactgcatgtaaga

SEQ ID NO: 3634919 - DNA, 25 bp, Homo sapien
atcaaaagtatttaagaatcggcta

SEQ ID NO: 3634920 - DNA, 25 bp, Homo sapien
cactagtggatatactgaggtttgg

SEQ ID NO: 3634921 - DNA, 25 bp, Homo sapien
caaaagtatttaagaatcggctata

SEQ ID NO: 3634922 - DNA, 25 bp, Homo sapien
aaaaaagaagttgtcactagtggat

SEQ ID NO: 3634923 - DNA, 25 bp, Homo sapien
cagccaagtgactccgagccaaatg

SEQ ID NO: 3634924 - DNA, 25 bp, Homo sapien
agatgcttccgcttaaaccgtctca

SEQ ID NO: 3634925 - DNA, 25 bp, Homo sapien
tgttctcggtttaggatagagacca

SEQ ID NO: 3634926 - DNA, 25 bp, Homo sapien
tgtccatctttgaccgaagggctgg

SEQ ID NO: 3634927 - DNA, 25 bp, Homo sapien
catggacctagtgacagattggaca

SEQ ID NO: 3634928 - DNA, 25 bp, Homo sapien
caaggttactgtagtagtccaggtc

SEQ ID NO: 3634929 - DNA, 25 bp, Homo sapien
cctaggtgacaaagagctcaggatg

SEQ ID NO: 3634930 - DNA, 25 bp, Homo sapien
tctgaagtcaaggagcaaggttact

SEQ ID NO: 3634931 - DNA, 25 bp, Homo sapien
tactaagcaccaatgattctgagac

SEQ ID NO: 3634932 - DNA, 25 bp, Homo sapien
ccctgcgcccagcttttatttgtat

SEQ ID NO: 3634933 - DNA, 25 bp, Homo sapien
taaaaagtcgggactcagaattctc

SEQ ID NO: 3634934 - DNA, 25 bp, Homo sapien
cagacttttcaggaacatagggaac

SEQ ID NO: 3634935 - DNA, 25 bp, Homo sapien
gcgtatgccaccatgcctagctcat

SEQ ID NO: 3634936 - DNA, 25 bp, Homo sapien
ttattttttagatggaatcccactc

SEQ ID NO: 3634937 - DNA, 25 bp, Homo sapien
ggcgtatgccaccatgcctagctca

SEQ ID NO: 3634938 - DNA, 25 bp, Homo sapien
ttttagatggaatcccactctgtcg

SEQ ID NO: 3634939 - DNA, 25 bp, Homo sapien
tgcttgcctgctaggaagaactcag

SEQ ID NO: 3634940 - DNA, 25 bp, Homo sapien
cttgcctgctaggaagaactcaggg

SEQ ID NO: 3634941 - DNA, 25 bp, Homo sapien
gtcattggtgcacggctgcttgcct

SEQ ID NO: 3634942 - DNA, 25 bp, Homo sapien
attggtgcacggctgcttgcctgct

SEQ ID NO: 3634943 - DNA, 25 bp, Homo sapien
caagtggcacaccaagctcaggttc

SEQ ID NO: 3634944 - DNA, 25 bp, Homo sapien
gcaaggtcccaagaagcccatagta

SEQ ID NO: 3634945 - DNA, 25 bp, Homo sapien
gtcggtttcaccagactccgcagag

SEQ ID NO: 3634946 - DNA, 25 bp, Homo sapien
tccaatagaggtcttccaccgggag

SEQ ID NO: 3634947 - DNA, 25 bp, Homo sapien
tgaacaacactatggactaagcggg

SEQ ID NO: 3634948 - DNA, 25 bp, Homo sapien
tgttggaaactaggagaactgggtc

SEQ ID NO: 3634949 - DNA, 25 bp, Homo sapien
taagcgggctgaacgaacatataca

SEQ ID NO: 3634950 - DNA, 25 bp, Homo sapien
ttaaacaacatacccttgcccaggc

SEQ ID NO: 3634951 - DNA, 25 bp, Homo sapien
caggtatcgatggtacagcttcttc

SEQ ID NO: 3634952 - DNA, 25 bp, Homo sapien
aggtatcgatggtacagcttcttcc

SEQ ID NO: 3634953 - DNA, 25 bp, Homo sapien
cagttagacaggatgccgtccactt

SEQ ID NO: 3634954 - DNA, 25 bp, Homo sapien
gtatgaggttcagcacacacaggtc

SEQ ID NO: 3634955 - DNA, 25 bp, Homo sapien
tctatgccacagttagacaggatgc

SEQ ID NO: 3634956 - DNA, 25 bp, Homo sapien
cgtatgaggttcagcacacacaggt

SEQ ID NO: 3634957 - DNA, 25 bp, Homo sapien
ataagcactgatgtacaaggaagac

SEQ ID NO: 3634958 - DNA, 25 bp, Homo sapien
gaagacttcaaagacgccttcttta

SEQ ID NO: 3634959 - DNA, 25 bp, Homo sapien
gagtagggtgaccataagcactgat

SEQ ID NO: 3634960 - DNA, 25 bp, Homo sapien
tgtacaaggaagacttcaaagacgc

SEQ ID NO: 3634961 - DNA, 25 bp, Homo sapien
cactcggagagcacttagtggtggc

SEQ ID NO: 3634962 - DNA, 25 bp, Homo sapien
acagcaccctctcgggatccacact

SEQ ID NO: 3634963 - DNA, 25 bp, Homo sapien
gatccacactcggagagcacttagt

SEQ ID NO: 3634964 - DNA, 25 bp, Homo sapien
cctctcgggatccacactcggagag

SEQ ID NO: 3634965 - DNA, 25 bp, Homo sapien
tgcttcaaagcattcagagattaaa

SEQ ID NO: 3634966 - DNA, 25 bp, Homo sapien
taaagtcatcctcaattgaactgaa

SEQ ID NO: 3634967 - DNA, 25 bp, Homo sapien
gaatcaccagtacactttcctccag

SEQ ID NO: 3634968 - DNA, 25 bp, Homo sapien
tgaaataacatgccgccttctcccg

SEQ ID NO: 3634969 - DNA, 25 bp, Homo sapien
gagaagattcctcaaccaaatggga

SEQ ID NO: 3634970 - DNA, 25 bp, Homo sapien
cattgtgtgactatagcaagacccc

SEQ ID NO: 3634971 - DNA, 25 bp, Homo sapien
cagaggttgcacgtagcttcgaaga

SEQ ID NO: 3634972 - DNA, 25 bp, Homo sapien
caaccatcctgtgaaagaagaccca

SEQ ID NO: 3634973 - DNA, 25 bp, Homo sapien
gccacgggtccagctgctggctaca

SEQ ID NO: 3634974 - DNA, 25 bp, Homo sapien
gtctggactgaatccaaactttcca

SEQ ID NO: 3634975 - DNA, 25 bp, Homo sapien
gtcaggaaagccgagccacgggtcc

SEQ ID NO: 3634976 - DNA, 25 bp, Homo sapien
tggttaatacgaatcacagcaggaa

SEQ ID NO: 3634977 - DNA, 25 bp, Homo sapien
tccctcatggcgtagagaagcacgg

SEQ ID NO: 3634978 - DNA, 25 bp, Homo sapien
agaagcacggctatgcagtacaggg

SEQ ID NO: 3634979 - DNA, 25 bp, Homo sapien
cagggtctcggtgacatctggcatg

SEQ ID NO: 3634980 - DNA, 25 bp, Homo sapien
gaggcagaagagcagtcgctggatg

SEQ ID NO: 3634981 - DNA, 25 bp, Homo sapien
taaaatcagccttagtggtatctcg

SEQ ID NO: 3634982 - DNA, 25 bp, Homo sapien
caggtgctaacactgctaagtggca

SEQ ID NO: 3634983 - DNA, 25 bp, Homo sapien
tggtatctcgcagccgctcagaact

SEQ ID NO: 3634984 - DNA, 25 bp, Homo sapien
gaactgcacgttcataaggcgctct

SEQ ID NO: 3634985 - DNA, 25 bp, Homo sapien
tcactcagacactacctgctcagag

SEQ ID NO: 3634986 - DNA, 25 bp, Homo sapien
gggcctgtaagatccctcaactgtc

SEQ ID NO: 3634987 - DNA, 25 bp, Homo sapien
tgctcagagaagctttttccacccc

SEQ ID NO: 3634988 - DNA, 25 bp, Homo sapien
cacagttgtgaaacggcggttcctc

SEQ ID NO: 3634989 - DNA, 25 bp, Homo sapien
cagaggcacaggacatcgtcagact

SEQ ID NO: 3634990 - DNA, 25 bp, Homo sapien
gaaaacagtaggctccaagtcacca

SEQ ID NO: 3634991 - DNA, 25 bp, Homo sapien
tcaccaagagggaccaaagatgaca

SEQ ID NO: 3634992 - DNA, 25 bp, Homo sapien
gatgacaaagttcaatcagcagagg

SEQ ID NO: 3634993 - DNA, 25 bp, Homo sapien
tctttaacttttgtggcctgagtgc

SEQ ID NO: 3634994 - DNA, 25 bp, Homo sapien
cagacagatggctcctctttaactt

SEQ ID NO: 3634995 - DNA, 25 bp, Homo sapien
gatataggcaatagaaaatgttgta

SEQ ID NO: 3634996 - DNA, 25 bp, Homo sapien
gcaggaattctcctgaagatatagg

SEQ ID NO: 3634997 - DNA, 25 bp, Homo sapien
cacctggagaggttccatcttgtga

SEQ ID NO: 3634998 - DNA, 25 bp, Homo sapien
ttcagaatcagctgttgttcatgtg

SEQ ID NO: 3634999 - DNA, 25 bp, Homo sapien
ggagaggttccatcttgtgattcag

SEQ ID NO: 3635000 - DNA, 25 bp, Homo sapien
tgttcatgtgtaagttggatggttt

SEQ ID NO: 3635001 - DNA, 25 bp, Homo sapien
tagcaaatagcacgagcaaaggctg

SEQ ID NO: 3635002 - DNA, 25 bp, Homo sapien
taaaagccaatctaaggcaggccct

SEQ ID NO: 3635003 - DNA, 25 bp, Homo sapien
acctcgtgaacctgatgtgggctcc

SEQ ID NO: 3635004 - DNA, 25 bp, Homo sapien
aaaggcagaaaaccaccacctcgtg

SEQ ID NO: 3635005 - DNA, 25 bp, Homo sapien
accagcgttgaggtcttcccagtgc

SEQ ID NO: 3635006 - DNA, 25 bp, Homo sapien
tctctgcatacttgaccagcgttga

SEQ ID NO: 3635007 - DNA, 25 bp, Homo sapien
gcatacttgaccagcgttgaggtct

SEQ ID NO: 3635008 - DNA, 25 bp, Homo sapien
tacttgaccagcgttgaggtcttcc

SEQ ID NO: 3635009 - DNA, 25 bp, Homo sapien
ctttgcgatgctcttgttgaatgtc

SEQ ID NO: 3635010 - DNA, 25 bp, Homo sapien
cctatgtgcccgtaggccatggagt

SEQ ID NO: 3635011 - DNA, 25 bp, Homo sapien
gccatggagtggaaggttttgcaga

SEQ ID NO: 3635012 - DNA, 25 bp, Homo sapien
ggaagacgcgttcggcctgctttgc

SEQ ID NO: 3635013 - DNA, 25 bp, Homo sapien
gaaaacagtaagacgcgaccgtgcc

SEQ ID NO: 3635014 - DNA, 25 bp, Homo sapien
taagctcacatgtgatcgtcacggg

SEQ ID NO: 3635015 - DNA, 25 bp, Homo sapien
caagaaaagcctacaactgatcagg

SEQ ID NO: 3635016 - DNA, 25 bp, Homo sapien
tgagaacacccctcttggcaagacg

SEQ ID NO: 3635017 - DNA, 25 bp, Homo sapien
ccagaataggaaccagctttcggca

SEQ ID NO: 3635018 - DNA, 25 bp, Homo sapien
ctttcaggactcacatgtaccaacc

SEQ ID NO: 3635019 - DNA, 25 bp, Homo sapien
tcacatgtaccaacccagaatagga

SEQ ID NO: 3635020 - DNA, 25 bp, Homo sapien
cagctttcggcagacactgctattc

SEQ ID NO: 3635021 - DNA, 25 bp, Homo sapien
cacaagcttggctcttatgaatcca

SEQ ID NO: 3635022 - DNA, 25 bp, Homo sapien
ccttcagcaaggacggagttgacca

SEQ ID NO: 3635023 - DNA, 25 bp, Homo sapien
aataggcacgtgatcaatggtcagc

SEQ ID NO: 3635024 - DNA, 25 bp, Homo sapien
aatggtcagctcttcgtcagccgag

SEQ ID NO: 3635025 - DNA, 25 bp, Homo sapien
gaagtaaagcatatggtaacccaga

SEQ ID NO: 3635026 - DNA, 25 bp, Homo sapien
taaatgggaggactattccgaggct

SEQ ID NO: 3635027 - DNA, 25 bp, Homo sapien
tcttataaactgaggcgggtcgttc

SEQ ID NO: 3635028 - DNA, 25 bp, Homo sapien
tgtcaactcccatacagcagtggag

SEQ ID NO: 3635029 - DNA, 25 bp, Homo sapien
cccagcttccgcatgttatcccaga

SEQ ID NO: 3635030 - DNA, 25 bp, Homo sapien
cgtcatgagtcatctggtgcgcctc

SEQ ID NO: 3635031 - DNA, 25 bp, Homo sapien
ggcggctcgcttcaaggacaccatt

SEQ ID NO: 3635032 - DNA, 25 bp, Homo sapien
catctggtgcgcctcttctgtgcac

SEQ ID NO: 3635033 - DNA, 25 bp, Homo sapien
gtcaaaagaggccagcgaaggcttg

SEQ ID NO: 3635034 - DNA, 25 bp, Homo sapien
cacaaagatggcgtcaaaagaggcc

SEQ ID NO: 3635035 - DNA, 25 bp, Homo sapien
gcgaaggcttgctcagctgccagag

SEQ ID NO: 3635036 - DNA, 25 bp, Homo sapien
cgaaggcttgctcagctgccagagt

SEQ ID NO: 3635037 - DNA, 25 bp, Homo sapien
tgtgaacagggcgttgaccgcaccc

SEQ ID NO: 3635038 - DNA, 25 bp, Homo sapien
ttgaccgcaccccggaaggtataga

SEQ ID NO: 3635039 - DNA, 25 bp, Homo sapien
ccggaaggtatagatctgctggtgc

SEQ ID NO: 3635040 - DNA, 25 bp, Homo sapien
gctggtgcgggtcccctacaaagat

SEQ ID NO: 3635041 - DNA, 25 bp, Homo sapien
taagctatttccacaccaaaccgaa

SEQ ID NO: 3635042 - DNA, 25 bp, Homo sapien
tgcaaacatccaagatagtagctcc

SEQ ID NO: 3635043 - DNA, 25 bp, Homo sapien
tagctcccacataagctatttccac

SEQ ID NO: 3635044 - DNA, 25 bp, Homo sapien
ttcctgactctcttgcaaacatcca

SEQ ID NO: 3635045 - DNA, 25 bp, Homo sapien
ccgtacggcctcatcaaacacgttg

SEQ ID NO: 3635046 - DNA, 25 bp, Homo sapien
gcgttggtccgggacaacaaggcca

SEQ ID NO: 3635047 - DNA, 25 bp, Homo sapien
aacaaggccacttgcccctttgcgt

SEQ ID NO: 3635048 - DNA, 25 bp, Homo sapien
ccctttgcgtcacctctaatgccac

SEQ ID NO: 3635049 - DNA, 25 bp, Homo sapien
tacattttaacaggtcagctcctgg

SEQ ID NO: 3635050 - DNA, 25 bp, Homo sapien
ggccccacatagaagacagacacaa

SEQ ID NO: 3635051 - DNA, 25 bp, Homo sapien
tacagaacgtctctaggtccagatt

SEQ ID NO: 3635052 - DNA, 25 bp, Homo sapien
caaccaggtgtgtgatcacgtgtaa

SEQ ID NO: 3635053 - DNA, 25 bp, Homo sapien
aagcagaaagcgcaaggctgccacg

SEQ ID NO: 3635054 - DNA, 25 bp, Homo sapien
gaaatggatcttgagtgacacccaa

SEQ ID NO: 3635055 - DNA, 25 bp, Homo sapien
acaggcggcaagcaggaaacttcat

SEQ ID NO: 3635056 - DNA, 25 bp, Homo sapien
cacgtggcctgaacactcacaggga

SEQ ID NO: 3635057 - DNA, 25 bp, Homo sapien
caatgattctgtccaatccaaatga

SEQ ID NO: 3635058 - DNA, 25 bp, Homo sapien
ggatccaaatatcaatgattctgtc

SEQ ID NO: 3635059 - DNA, 25 bp, Homo sapien
ctgaagaaggatccaaatatcaatg

SEQ ID NO: 3635060 - DNA, 25 bp, Homo sapien
tgtccaatccaaatgatttaatccc

SEQ ID NO: 3635061 - DNA, 25 bp, Homo sapien
cctgtcacttgggtgcgtccttcca

SEQ ID NO: 3635062 - DNA, 25 bp, Homo sapien
actagctcgcccttctctggaggga

SEQ ID NO: 3635063 - DNA, 25 bp, Homo sapien
tctttctcgtccctgtcacttgggt

SEQ ID NO: 3635064 - DNA, 25 bp, Homo sapien
ttgggtgcgtccttccaatgcacca

SEQ ID NO: 3635065 - DNA, 25 bp, Homo sapien
gaaaagcgctatagaaatgctcgac

SEQ ID NO: 3635066 - DNA, 25 bp, Homo sapien
tgcacgttcctaagcagctgcgcaa

SEQ ID NO: 3635067 - DNA, 25 bp, Homo sapien
tcaacgtataaattggcccaggcag

SEQ ID NO: 3635068 - DNA, 25 bp, Homo sapien
tacctatgaaaacaggaggcccgag

SEQ ID NO: 3635069 - DNA, 25 bp, Homo sapien
taaagccttctttgtgcacccatct

SEQ ID NO: 3635070 - DNA, 25 bp, Homo sapien
gatcttggcttcaagctccttgtcc

SEQ ID NO: 3635071 - DNA, 25 bp, Homo sapien
ggtcacatacctcttgaagccacta

SEQ ID NO: 3635072 - DNA, 25 bp, Homo sapien
tacttttcaacaactgcgatcttgg

SEQ ID NO: 3635073 - DNA, 25 bp, Homo sapien
accatctgttcctcctcttaggggg

SEQ ID NO: 3635074 - DNA, 25 bp, Homo sapien
cagcagaagaccatctgttcctcct

SEQ ID NO: 3635075 - DNA, 25 bp, Homo sapien
acagcagaagaccatctgttcctcc

SEQ ID NO: 3635076 - DNA, 25 bp, Homo sapien
atctgttcctcctcttagggggaag

SEQ ID NO: 3635077 - DNA, 25 bp, Homo sapien
cccaccgtctggatctaacacatga

SEQ ID NO: 3635078 - DNA, 25 bp, Homo sapien
tctcggaatcacatcccagaggaca

SEQ ID NO: 3635079 - DNA, 25 bp, Homo sapien
aattagttgcaggagagttaacgcc

SEQ ID NO: 3635080 - DNA, 25 bp, Homo sapien
cattgtacgggcttgaaagtagaac

SEQ ID NO: 3635081 - DNA, 25 bp, Homo sapien
tgaactcgaacatttcttgcctcag

SEQ ID NO: 3635082 - DNA, 25 bp, Homo sapien
tcaaagggaaagaaacaagatgaca

SEQ ID NO: 3635083 - DNA, 25 bp, Homo sapien
caaagggaaagaaacaagatgacaa

SEQ ID NO: 3635084 - DNA, 25 bp, Homo sapien
ggaaagaaacaagatgacaaaaaca

SEQ ID NO: 3635085 - DNA, 25 bp, Homo sapien
aagaaacaagatgacaaaaacatac

SEQ ID NO: 3635086 - DNA, 25 bp, Homo sapien
gataaaaacacagcacacgttagat

SEQ ID NO: 3635087 - DNA, 25 bp, Homo sapien
aaaacacagcacacgttagatggtg

SEQ ID NO: 3635088 - DNA, 25 bp, Homo sapien
aaaaacacagcacacgttagatggt

SEQ ID NO: 3635089 - DNA, 25 bp, Homo sapien
ctaggataaaaacacagcacacgtt

SEQ ID NO: 3635090 - DNA, 25 bp, Homo sapien
aaacatgcacagtgtcaaactccag

SEQ ID NO: 3635091 - DNA, 25 bp, Homo sapien
tatgccgggcacaaggcactttcac

SEQ ID NO: 3635092 - DNA, 25 bp, Homo sapien
gcaggttatgccgggcacaaggcac

SEQ ID NO: 3635093 - DNA, 25 bp, Homo sapien
caactctgaagtgcggaagctgggg

SEQ ID NO: 3635094 - DNA, 25 bp, Homo sapien
tcaaagtctgatggcgaagaacctg

SEQ ID NO: 3635095 - DNA, 25 bp, Homo sapien
agtttttccagaagtgccctaccag

SEQ ID NO: 3635096 - DNA, 25 bp, Homo sapien
caaggccgtgcaaaggaagcattcc

SEQ ID NO: 3635097 - DNA, 25 bp, Homo sapien
ccatccaacaaacaacaaggccgtg

SEQ ID NO: 3635098 - DNA, 25 bp, Homo sapien
gcaatagcactgatgctaaaagtac

SEQ ID NO: 3635099 - DNA, 25 bp, Homo sapien
atagcactgatgctaaaagtacaaa

SEQ ID NO: 3635100 - DNA, 25 bp, Homo sapien
agcaatagcactgatgctaaaagta

SEQ ID NO: 3635101 - DNA, 25 bp, Homo sapien
caatagcactgatgctaaaagtaca

SEQ ID NO: 3635102 - DNA, 25 bp, Homo sapien
tggtcatgatgagacgcttcttggc

SEQ ID NO: 3635103 - DNA, 25 bp, Homo sapien
cgcttcttggctcgagttactgcaa

SEQ ID NO: 3635104 - DNA, 25 bp, Homo sapien
aatgttttccaatgatttggtcatg

SEQ ID NO: 3635105 - DNA, 25 bp, Homo sapien
ctgcaacatacagtaaattccattc

SEQ ID NO: 3635106 - DNA, 25 bp, Homo sapien
caaaggccaggtgcctgaacactta

SEQ ID NO: 3635107 - DNA, 25 bp, Homo sapien
ggctgggtgcacaaaaccttcctgg

SEQ ID NO: 3635108 - DNA, 25 bp, Homo sapien
aatgccatttcaaaagggactaaag

SEQ ID NO: 3635109 - DNA, 25 bp, Homo sapien
tactctccccggcaaggatgtgttc

SEQ ID NO: 3635110 - DNA, 25 bp, Homo sapien
gagtccgaaatctttactgcctggc

SEQ ID NO: 3635111 - DNA, 25 bp, Homo sapien
taagctgttgcactcggtgaagccc

SEQ ID NO: 3635112 - DNA, 25 bp, Homo sapien
gttcactaatgtactgtcaacaggg

SEQ ID NO: 3635113 - DNA, 25 bp, Homo sapien
gaaacattcctatggccaagtcagc

SEQ ID NO: 3635114 - DNA, 25 bp, Homo sapien
gagggagtcccgtacagctctctat

SEQ ID NO: 3635115 - DNA, 25 bp, Homo sapien
gaatgacccagtttatgcaatgaga

SEQ ID NO: 3635116 - DNA, 25 bp, Homo sapien
tgtgacgaggcaaagcacgaagccc

SEQ ID NO: 3635117 - DNA, 25 bp, Homo sapien
gacgctctgtaggacgaatgaccca

SEQ ID NO: 3635118 - DNA, 25 bp, Homo sapien
aaataaaagagtgattcccatggct

SEQ ID NO: 3635119 - DNA, 25 bp, Homo sapien
gaacactatgcagctgaccaagagg

SEQ ID NO: 3635120 - DNA, 25 bp, Homo sapien
tgacaaagcaaagtacacaacagtg

SEQ ID NO: 3635121 - DNA, 25 bp, Homo sapien
cacaacagtgtatctgaaatgctac

SEQ ID NO: 3635122 - DNA, 25 bp, Homo sapien
gggacttcctcgcaggacccctgag

SEQ ID NO: 3635123 - DNA, 25 bp, Homo sapien
ttcccacaaataggcagtttttctg

SEQ ID NO: 3635124 - DNA, 25 bp, Homo sapien
aaaatgcatgcagcaaccaactgac

SEQ ID NO: 3635125 - DNA, 25 bp, Homo sapien
tctaacaaggtcttacagccttaaa

SEQ ID NO: 3635126 - DNA, 25 bp, Homo sapien
caacccacggtgaaatagcttctcg

SEQ ID NO: 3635127 - DNA, 25 bp, Homo sapien
tgtagaggactcagtcacagcgctc

SEQ ID NO: 3635128 - DNA, 25 bp, Homo sapien
caagccgtttttgacgcagttacca

SEQ ID NO: 3635129 - DNA, 25 bp, Homo sapien
tctcgtttacacgtgtccaaggaca

SEQ ID NO: 3635130 - DNA, 25 bp, Homo sapien
acgttgcttgtcagctctgcttgca

SEQ ID NO: 3635131 - DNA, 25 bp, Homo sapien
ccacgcctgtttttaagacgttgct

SEQ ID NO: 3635132 - DNA, 25 bp, Homo sapien
acggtgtcaacagggatggcattgt

SEQ ID NO: 3635133 - DNA, 25 bp, Homo sapien
ggcagcttcttcatggtaaggacgg

SEQ ID NO: 3635134 - DNA, 25 bp, Homo sapien
ctcatatgaaaagcccctaataaag

SEQ ID NO: 3635135 - DNA, 25 bp, Homo sapien
tcttgtgcctctcatatgaaaagcc

SEQ ID NO: 3635136 - DNA, 25 bp, Homo sapien
tgaaaagcccctaataaaggatcac

SEQ ID NO: 3635137 - DNA, 25 bp, Homo sapien
gcctctcatatgaaaagcccctaat

SEQ ID NO: 3635138 - DNA, 25 bp, Homo sapien
agcctcccagacctgcggcttcagc

SEQ ID NO: 3635139 - DNA, 25 bp, Homo sapien
taagcgtgtatcacaacccagcctc

SEQ ID NO: 3635140 - DNA, 25 bp, Homo sapien
tttatccagtcaagataaagaacca

SEQ ID NO: 3635141 - DNA, 25 bp, Homo sapien
accaagaaaagctgcgctgggaccc

SEQ ID NO: 3635142 - DNA, 25 bp, Homo sapien
gacaagagagagagctaaggggaac

SEQ ID NO: 3635143 - DNA, 25 bp, Homo sapien
aagagagagagctaaggggaacaac

SEQ ID NO: 3635144 - DNA, 25 bp, Homo sapien
tgtggtgatggacaagagagagagc

SEQ ID NO: 3635145 - DNA, 25 bp, Homo sapien
ctgtggtgatggacaagagagagag

SEQ ID NO: 3635146 - DNA, 25 bp, Homo sapien
acaggagtggcagaggtagcccccc

SEQ ID NO: 3635147 - DNA, 25 bp, Homo sapien
cgccaggggcccgatgcgctgctcc

SEQ ID NO: 3635148 - DNA, 25 bp, Homo sapien
tgcgctgctccgcacaggagtggca

SEQ ID NO: 3635149 - DNA, 25 bp, Homo sapien
ccgatgcgctgctccgcacaggagt

SEQ ID NO: 3635150 - DNA, 25 bp, Homo sapien
gttctccacagtgcgctccatggcg

SEQ ID NO: 3635151 - DNA, 25 bp, Homo sapien
ctcatgccggggcagtacgatgttc

SEQ ID NO: 3635152 - DNA, 25 bp, Homo sapien
atgttctccacagtgcgctccatgg

SEQ ID NO: 3635153 - DNA, 25 bp, Homo sapien
ccggggcagtacgatgttctccaca

SEQ ID NO: 3635154 - DNA, 25 bp, Homo sapien
ggtgcctgtttaattgaaatcttgt

SEQ ID NO: 3635155 - DNA, 25 bp, Homo sapien
agaaagtgctgtgggtgaacccaga

SEQ ID NO: 3635156 - DNA, 25 bp, Homo sapien
gtcctcggcaagctgctctgcactg

SEQ ID NO: 3635157 - DNA, 25 bp, Homo sapien
tctgcactgcggagaacgtgcgcct

SEQ ID NO: 3635158 - DNA, 25 bp, Homo sapien
tacaagtggaaacctcttcaccgtc

SEQ ID NO: 3635159 - DNA, 25 bp, Homo sapien
tctgtagttttgctggctgactggc

SEQ ID NO: 3635160 - DNA, 25 bp, Homo sapien
taagctggacactgactaccgctgc

SEQ ID NO: 3635161 - DNA, 25 bp, Homo sapien
gcgtgtgcctggagaacgcctctta

SEQ ID NO: 3635162 - DNA, 25 bp, Homo sapien
aagggagagggtgtttcatcgatga

SEQ ID NO: 3635163 - DNA, 25 bp, Homo sapien
ggtgtttcatcgatgaccctctccc

SEQ ID NO: 3635164 - DNA, 25 bp, Homo sapien
gagagggtgtttcatcgatgaccct

SEQ ID NO: 3635165 - DNA, 25 bp, Homo sapien
gggtgtttcatcgatgaccctctcc

SEQ ID NO: 3635166 - DNA, 25 bp, Homo sapien
cacttgctgtcgttcagtgagaatt

SEQ ID NO: 3635167 - DNA, 25 bp, Homo sapien
ggaggcacttgctgtcgttcagtga

SEQ ID NO: 3635168 - DNA, 25 bp, Homo sapien
tgcagggggcctatctggaggcact

SEQ ID NO: 3635169 - DNA, 25 bp, Homo sapien
tgctgtcgttcagtgagaattggag

SEQ ID NO: 3635170 - DNA, 25 bp, Homo sapien
taattatagctgatcttgtctggca

SEQ ID NO: 3635171 - DNA, 25 bp, Homo sapien
tcgtgggagtcatatcagtgttgct

SEQ ID NO: 3635172 - DNA, 25 bp, Homo sapien
gactttacgaaagcttgtccaactc

SEQ ID NO: 3635173 - DNA, 25 bp, Homo sapien
caaacacttgtccactgcattccag

SEQ ID NO: 3635174 - DNA, 25 bp, Homo sapien
gagtccagcggtgtcctgtggagct

SEQ ID NO: 3635175 - DNA, 25 bp, Homo sapien
aaagcgaaagcgaatgcgactggcg

SEQ ID NO: 3635176 - DNA, 25 bp, Homo sapien
acggatctgtcaccgctttgcacct

SEQ ID NO: 3635177 - DNA, 25 bp, Homo sapien
ctgagtcacggatctgtcaccgctt

SEQ ID NO: 3635178 - DNA, 25 bp, Homo sapien
gatgactttgcccactctcttcgca

SEQ ID NO: 3635179 - DNA, 25 bp, Homo sapien
tcaagtggatccgagccgcagagag

SEQ ID NO: 3635180 - DNA, 25 bp, Homo sapien
actggaggtcccagagcacgacgag

SEQ ID NO: 3635181 - DNA, 25 bp, Homo sapien
acaccggaccgagtgcacactggag

SEQ ID NO: 3635182 - DNA, 25 bp, Homo sapien
cagggccgcggagggagaccaggaa

SEQ ID NO: 3635183 - DNA, 25 bp, Homo sapien
gcggagcagctggaggcgaccagcg

SEQ ID NO: 3635184 - DNA, 25 bp, Homo sapien
cgctcacaaccgagcgcagggccgc

SEQ ID NO: 3635185 - DNA, 25 bp, Homo sapien
tggaggcgaccagcgccgggcgagg

SEQ ID NO: 3635186 - DNA, 25 bp, Homo sapien
tgtgagattttaagaggcaatgacc

SEQ ID NO: 3635187 - DNA, 25 bp, Homo sapien
tgcacttgggagcttacagacccgg

SEQ ID NO: 3635188 - DNA, 25 bp, Homo sapien
gagatgtctcgtcctgtccaatgtc

SEQ ID NO: 3635189 - DNA, 25 bp, Homo sapien
tgtcaccgctagacctgagaatctg

SEQ ID NO: 3635190 - DNA, 25 bp, Homo sapien
ggtactttaacacaatcaatgctag

SEQ ID NO: 3635191 - DNA, 25 bp, Homo sapien
gtatacatgctatgcttagcctgca

SEQ ID NO: 3635192 - DNA, 25 bp, Homo sapien
aggcagtaggctcatggatatccac

SEQ ID NO: 3635193 - DNA, 25 bp, Homo sapien
tattccctaccagttgactcaatag

SEQ ID NO: 3635194 - DNA, 25 bp, Homo sapien
ttcctaataggcttcttttgctttg

SEQ ID NO: 3635195 - DNA, 25 bp, Homo sapien
gcagagctctgtgacgatgacccgc

SEQ ID NO: 3635196 - DNA, 25 bp, Homo sapien
tctgtgacgatgacccgccagagat

SEQ ID NO: 3635197 - DNA, 25 bp, Homo sapien
ctggggcctcttgagttcctaatag

SEQ ID NO: 3635198 - DNA, 25 bp, Homo sapien
ggtggctctccgtcactgtcacttg

SEQ ID NO: 3635199 - DNA, 25 bp, Homo sapien
gatgttacccttcagctgcatacag

SEQ ID NO: 3635200 - DNA, 25 bp, Homo sapien
gacaaggcaaaagctcccaagggat

SEQ ID NO: 3635201 - DNA, 25 bp, Homo sapien
tgcgattgccaaggcgtcagccaga

SEQ ID NO: 3635202 - DNA, 25 bp, Homo sapien
gtcgaacactcgaaaggagagagca

SEQ ID NO: 3635203 - DNA, 25 bp, Homo sapien
ttgaaatccaagacatagaagctgc

SEQ ID NO: 3635204 - DNA, 25 bp, Homo sapien
caggaggactacaaatgcctggctt

SEQ ID NO: 3635205 - DNA, 25 bp, Homo sapien
aatctgtcgccgtttgtcctgggtg

SEQ ID NO: 3635206 - DNA, 25 bp, Homo sapien
tggcttccccgacaatgaaaccagg

SEQ ID NO: 3635207 - DNA, 25 bp, Homo sapien
catgcgtgacatctcgctggctggg

SEQ ID NO: 3635208 - DNA, 25 bp, Homo sapien
ccggagttaaagttgacgtcagcct

SEQ ID NO: 3635209 - DNA, 25 bp, Homo sapien
tattacgtcaccaagtaaagggcaa

SEQ ID NO: 3635210 - DNA, 25 bp, Homo sapien
gaaggcaagatacggatcaggagta

SEQ ID NO: 3635211 - DNA, 25 bp, Homo sapien
tggagtcccagtgcttttgtcctga

SEQ ID NO: 3635212 - DNA, 25 bp, Homo sapien
gtattgacatcctgtgccagtagag

SEQ ID NO: 3635213 - DNA, 25 bp, Homo sapien
tggccggatgagctcgctggcccat

SEQ ID NO: 3635214 - DNA, 25 bp, Homo sapien
gacttttgtgtatcaatgcacccaa

SEQ ID NO: 3635215 - DNA, 25 bp, Homo sapien
gcacggtcagggttgagcgactttt

SEQ ID NO: 3635216 - DNA, 25 bp, Homo sapien
cagctctgaagaagtactgcctggc

SEQ ID NO: 3635217 - DNA, 25 bp, Homo sapien
gctctgaagaagtactgcctggcag

SEQ ID NO: 3635218 - DNA, 25 bp, Homo sapien
tgaggcatgttgcttgaggtcacag

SEQ ID NO: 3635219 - DNA, 25 bp, Homo sapien
aaaagagagaattccctcaggaaat

SEQ ID NO: 3635220 - DNA, 25 bp, Homo sapien
tcacagggaatagaattagcaggaa

SEQ ID NO: 3635221 - DNA, 25 bp, Homo sapien
tcctcttcttgcccaaggatgagca

SEQ ID NO: 3635222 - DNA, 25 bp, Homo sapien
tccttggtctgtcaagagagcctga

SEQ ID NO: 3635223 - DNA, 25 bp, Homo sapien
cacggggaccccagtttatgcctca

SEQ ID NO: 3635224 - DNA, 25 bp, Homo sapien
ttggtctgtcaagagagcctgaaat

SEQ ID NO: 3635225 - DNA, 25 bp, Homo sapien
tctgtcaagagagcctgaaatagca

SEQ ID NO: 3635226 - DNA, 25 bp, Homo sapien
gaagggagttgaatcttgggttcca

SEQ ID NO: 3635227 - DNA, 25 bp, Homo sapien
ccccaggtagatggttccaagaagg

SEQ ID NO: 3635228 - DNA, 25 bp, Homo sapien
tccgggaaggctgatgggcatccct

SEQ ID NO: 3635229 - DNA, 25 bp, Homo sapien
tgctcacgttcatcatggtgcctgg

SEQ ID NO: 3635230 - DNA, 25 bp, Homo sapien
atcctccggcgcgatgccaaaaaga

SEQ ID NO: 3635231 - DNA, 25 bp, Homo sapien
aaaagaggctgacggcaactgggcc

SEQ ID NO: 3635232 - DNA, 25 bp, Homo sapien
ggtgacagcccaggcggaccgatct

SEQ ID NO: 3635233 - DNA, 25 bp, Homo sapien
gcagagaaagacctccgcttcactg

SEQ ID NO: 3635234 - DNA, 25 bp, Homo sapien
actcattaagggcaaaagctttgct

SEQ ID NO: 3635235 - DNA, 25 bp, Homo sapien
acaaaatgggtctgcttttgcaccc

SEQ ID NO: 3635236 - DNA, 25 bp, Homo sapien
tgagatcctgggcaatccgtgacaa

SEQ ID NO: 3635237 - DNA, 25 bp, Homo sapien
gctttgctacagcttcagtatgaga

SEQ ID NO: 3635238 - DNA, 25 bp, Homo sapien
gcaggctctctgcaaccgcttcagt

SEQ ID NO: 3635239 - DNA, 25 bp, Homo sapien
gaaagcaaagggttatctcctgttc

SEQ ID NO: 3635240 - DNA, 25 bp, Homo sapien
ctgttcggattttggctctgagacc

SEQ ID NO: 3635241 - DNA, 25 bp, Homo sapien
ggttatctcctgttcggattttggc

SEQ ID NO: 3635242 - DNA, 25 bp, Homo sapien
tcgctgagtcctcagggcgctcggc

SEQ ID NO: 3635243 - DNA, 25 bp, Homo sapien
ggcactccgcggaaacccgccagcg

SEQ ID NO: 3635244 - DNA, 25 bp, Homo sapien
cccttcgctgagtcctcagggcgct

SEQ ID NO: 3635245 - DNA, 25 bp, Homo sapien
gcggggtcagggagcgcgggctgcc

SEQ ID NO: 3635246 - DNA, 25 bp, Homo sapien
cggcccgcccggccgactctgccca

SEQ ID NO: 3635247 - DNA, 25 bp, Homo sapien
ggcccgcccggccgactctgcccat

SEQ ID NO: 3635248 - DNA, 25 bp, Homo sapien
aaccggctccgagccccagagaggg

SEQ ID NO: 3635249 - DNA, 25 bp, Homo sapien
cagacaatttcgtcaggatgcggtg

SEQ ID NO: 3635250 - DNA, 25 bp, Homo sapien
gggctactcggttctggtgaccaga

SEQ ID NO: 3635251 - DNA, 25 bp, Homo sapien
gagaagaaacgctcttcagcaccaa

SEQ ID NO: 3635252 - DNA, 25 bp, Homo sapien
aaacgccaacgtctgcactcccagt

SEQ ID NO: 3635253 - DNA, 25 bp, Homo sapien
ctgagaaacgccaacgtctgcactc

SEQ ID NO: 3635254 - DNA, 25 bp, Homo sapien
gagaaacgccaacgtctgcactccc

SEQ ID NO: 3635255 - DNA, 25 bp, Homo sapien
aacgccaacgtctgcactcccagtt

SEQ ID NO: 3635256 - DNA, 25 bp, Homo sapien
ggtcggacgtgagcgctgaaacacc

SEQ ID NO: 3635257 - DNA, 25 bp, Homo sapien
caagaggcgaagctcaaagactgcc

SEQ ID NO: 3635258 - DNA, 25 bp, Homo sapien
gggttagggctgcattcctgtcccg

SEQ ID NO: 3635259 - DNA, 25 bp, Homo sapien
gggcagaacctcattccacctgcat

SEQ ID NO: 3635260 - DNA, 25 bp, Homo sapien
gactcaacataagcatgacctcctc

SEQ ID NO: 3635261 - DNA, 25 bp, Homo sapien
tctctcaagagaggtccttccagac

SEQ ID NO: 3635262 - DNA, 25 bp, Homo sapien
cgtttctcaaatcaacccgggcctg

SEQ ID NO: 3635263 - DNA, 25 bp, Homo sapien
cagaccccacttgcgtttctcaaat

SEQ ID NO: 3635264 - DNA, 25 bp, Homo sapien
aaagaatatggcaagaccgggccca

SEQ ID NO: 3635265 - DNA, 25 bp, Homo sapien
agaatatggcaagaccgggcccagt

SEQ ID NO: 3635266 - DNA, 25 bp, Homo sapien
aagaatatggcaagaccgggcccag

SEQ ID NO: 3635267 - DNA, 25 bp, Homo sapien
ccttggcaagttatgctgcctattg

SEQ ID NO: 3635268 - DNA, 25 bp, Homo sapien
ttgtttcacacagcggtttcttcct

SEQ ID NO: 3635269 - DNA, 25 bp, Homo sapien
gaacattgttaagtggctctattaa

SEQ ID NO: 3635270 - DNA, 25 bp, Homo sapien
tgttagtgcacctatttaaatcaca

SEQ ID NO: 3635271 - DNA, 25 bp, Homo sapien
gagcaacaacatgaccccaaagtag

SEQ ID NO: 3635272 - DNA, 25 bp, Homo sapien
taaacaatgcgactttctgggaaat

SEQ ID NO: 3635273 - DNA, 25 bp, Homo sapien
agaacattccacaccaggccgggtg

SEQ ID NO: 3635274 - DNA, 25 bp, Homo sapien
gcggtgtctcgcacctctaatacca

SEQ ID NO: 3635275 - DNA, 25 bp, Homo sapien
gtccaggacctttcagcaacagagg

SEQ ID NO: 3635276 - DNA, 25 bp, Homo sapien
aaaggtccaggacctttcagcaaca

SEQ ID NO: 3635277 - DNA, 25 bp, Homo sapien
aggtccaggacctttcagcaacaga

SEQ ID NO: 3635278 - DNA, 25 bp, Homo sapien
ggtggggattaaagaatgcacaatt

SEQ ID NO: 3635279 - DNA, 25 bp, Homo sapien
cactcctaggtcatcgtacagggac

SEQ ID NO: 3635280 - DNA, 25 bp, Homo sapien
ctcctaggtcatcgtacagggacat

SEQ ID NO: 3635281 - DNA, 25 bp, Homo sapien
tccactcctaggtcatcgtacaggg

SEQ ID NO: 3635282 - DNA, 25 bp, Homo sapien
ggtctccactcctaggtcatcgtac

SEQ ID NO: 3635283 - DNA, 25 bp, Homo sapien
cagcccagctgctacatgcggtgga

SEQ ID NO: 3635284 - DNA, 25 bp, Homo sapien
atgactggggcgaggactgtacttt

SEQ ID NO: 3635285 - DNA, 25 bp, Homo sapien
gctacatgcggtggagtgtccacaa

SEQ ID NO: 3635286 - DNA, 25 bp, Homo sapien
gaggagccacctcgcttcaggtcaa

SEQ ID NO: 3635287 - DNA, 25 bp, Homo sapien
gtctctgtcgttcctctctttggcg

SEQ ID NO: 3635288 - DNA, 25 bp, Homo sapien
ctgtctctgtcgttcctctctttgg

SEQ ID NO: 3635289 - DNA, 25 bp, Homo sapien
tctttggcgcttcactactttctca

SEQ ID NO: 3635290 - DNA, 25 bp, Homo sapien
ctctctttggcgcttcactactttc

SEQ ID NO: 3635291 - DNA, 25 bp, Homo sapien
catcagaatctggatctggtctcct

SEQ ID NO: 3635292 - DNA, 25 bp, Homo sapien
ggatctggtctccttgcaaacccac

SEQ ID NO: 3635293 - DNA, 25 bp, Homo sapien
ctctctcgctcataatcttcatctt

SEQ ID NO: 3635294 - DNA, 25 bp, Homo sapien
cttgcaaacccacttgcttcatgtc

SEQ ID NO: 3635295 - DNA, 25 bp, Homo sapien
taagacatatttgttcatgccttac

SEQ ID NO: 3635296 - DNA, 25 bp, Homo sapien
gaaaaagcacatagtggaattgcac

SEQ ID NO: 3635297 - DNA, 25 bp, Homo sapien
tgtttaagacatatttgttcatgcc

SEQ ID NO: 3635298 - DNA, 25 bp, Homo sapien
aagaaaaagcacatagtggaattgc

SEQ ID NO: 3635299 - DNA, 25 bp, Homo sapien
aaaggaggacctgctacttcagatg

SEQ ID NO: 3635300 - DNA, 25 bp, Homo sapien
tgccagactcccaaacgactatgac

SEQ ID NO: 3635301 - DNA, 25 bp, Homo sapien
gatgacctcctgctacatatgaaca

SEQ ID NO: 3635302 - DNA, 25 bp, Homo sapien
taaaggaggtttccgatgccagact

SEQ ID NO: 3635303 - DNA, 25 bp, Homo sapien
tttctctaccagagaagtgggtggg

SEQ ID NO: 3635304 - DNA, 25 bp, Homo sapien
tgggtggggcaatggcagctccgcc

SEQ ID NO: 3635305 - DNA, 25 bp, Homo sapien
ggggcaatggcagctccgcccatac

SEQ ID NO: 3635306 - DNA, 25 bp, Homo sapien
tttgtctttctctaccagagaagtg

SEQ ID NO: 3635307 - DNA, 25 bp, Homo sapien
tccctctacgctcaggaaacctggg

SEQ ID NO: 3635308 - DNA, 25 bp, Homo sapien
gcaggcttgcaggccgtttccctct

SEQ ID NO: 3635309 - DNA, 25 bp, Homo sapien
aggccgtttccctctacgctcagga

SEQ ID NO: 3635310 - DNA, 25 bp, Homo sapien
ggcttgcaggccgtttccctctacg

SEQ ID NO: 3635311 - DNA, 25 bp, Homo sapien
gttttggcaacgcaatgacacgcaa

SEQ ID NO: 3635312 - DNA, 25 bp, Homo sapien
tcatggcccacaaaggtgtccgagg

SEQ ID NO: 3635313 - DNA, 25 bp, Homo sapien
tcagagcctggcgtagaaaggtctc

SEQ ID NO: 3635314 - DNA, 25 bp, Homo sapien
tgttctaaggagatacaatctggcc

SEQ ID NO: 3635315 - DNA, 25 bp, Homo sapien
tttggaagactgtgatcgaggtctt

SEQ ID NO: 3635316 - DNA, 25 bp, Homo sapien
ctcggtctgtcttgttcctcgtaca

SEQ ID NO: 3635317 - DNA, 25 bp, Homo sapien
ggttggagatctcggtctgtcttgt

SEQ ID NO: 3635318 - DNA, 25 bp, Homo sapien
ttggaagactgtgatcgaggtcttg

SEQ ID NO: 3635319 - DNA, 25 bp, Homo sapien
tgtgatactgcttcatgggacagcc

SEQ ID NO: 3635320 - DNA, 25 bp, Homo sapien
aacttgtagttagaatgaccccgag

SEQ ID NO: 3635321 - DNA, 25 bp, Homo sapien
tatgctggcaaacatgtcaacttgt

SEQ ID NO: 3635322 - DNA, 25 bp, Homo sapien
ggacagccgtctcacaggatcaaag

SEQ ID NO: 3635323 - DNA, 25 bp, Homo sapien
tcatttgaacaagctattctagggc

SEQ ID NO: 3635324 - DNA, 25 bp, Homo sapien
tagggcttaagccacaaaatcccgc

SEQ ID NO: 3635325 - DNA, 25 bp, Homo sapien
gcttcaactggaactgcacctacat

SEQ ID NO: 3635326 - DNA, 25 bp, Homo sapien
ttaatggtagagctgaaactggacc

SEQ ID NO: 3635327 - DNA, 25 bp, Homo sapien
gaagccgtacttctgcatgatcttg

SEQ ID NO: 3635328 - DNA, 25 bp, Homo sapien
agtgctcaggccctgctcatgcttc

SEQ ID NO: 3635329 - DNA, 25 bp, Homo sapien
ggtcttctccactgacaaggcagtg

SEQ ID NO: 3635330 - DNA, 25 bp, Homo sapien
tgatcttgccgccacgcttgctggt

SEQ ID NO: 3635331 - DNA, 25 bp, Homo sapien
tgcatcatatgaacaggacggcctg

SEQ ID NO: 3635332 - DNA, 25 bp, Homo sapien
ctgtgttctagtgatggcagggcca

SEQ ID NO: 3635333 - DNA, 25 bp, Homo sapien
tgacacatgaggatcaagactggcc

SEQ ID NO: 3635334 - DNA, 25 bp, Homo sapien
caaaacggaagtggcagtgcatcat

SEQ ID NO: 3635335 - DNA, 25 bp, Homo sapien
gagcaaacgttcaaggtcacgggcc

SEQ ID NO: 3635336 - DNA, 25 bp, Homo sapien
tgtcctaggcatctacacaattggt

SEQ ID NO: 3635337 - DNA, 25 bp, Homo sapien
cacaattggtctctgagcgaaaaca

SEQ ID NO: 3635338 - DNA, 25 bp, Homo sapien
cagataacctcacaagtcgggacaa

SEQ ID NO: 3635339 - DNA, 25 bp, Homo sapien
agaccactttagtaggacacttaag

SEQ ID NO: 3635340 - DNA, 25 bp, Homo sapien
taagaccactttagtaggacactta

SEQ ID NO: 3635341 - DNA, 25 bp, Homo sapien
ttagtaagaccactttagtaggaca

SEQ ID NO: 3635342 - DNA, 25 bp, Homo sapien
agtaagaccactttagtaggacact

SEQ ID NO: 3635343 - DNA, 25 bp, Homo sapien
cacacaaatctaggcaggcagagag

SEQ ID NO: 3635344 - DNA, 25 bp, Homo sapien
acacacaaatctaggcaggcagaga

SEQ ID NO: 3635345 - DNA, 25 bp, Homo sapien
acacacacaaatctaggcaggcaga

SEQ ID NO: 3635346 - DNA, 25 bp, Homo sapien
gtgggatctgcccaaagtattattt

SEQ ID NO: 3635347 - DNA, 25 bp, Homo sapien
ggatctgcccaaagtattatttgca

SEQ ID NO: 3635348 - DNA, 25 bp, Homo sapien
tttgcaaaagtatcattttcagttt

SEQ ID NO: 3635349 - DNA, 25 bp, Homo sapien
tatttgcaaaagtatcattttcagt

SEQ ID NO: 3635350 - DNA, 25 bp, Homo sapien
gttctcaatcccaaacgacataatg

SEQ ID NO: 3635351 - DNA, 25 bp, Homo sapien
gcatctatgcaagcaccaaaatgta

SEQ ID NO: 3635352 - DNA, 25 bp, Homo sapien
cactgtacttagcaaagagacttac

SEQ ID NO: 3635353 - DNA, 25 bp, Homo sapien
tataacttacaaacacctagcagag

SEQ ID NO: 3635354 - DNA, 25 bp, Homo sapien
catccacctctcccgcaccaaccat

SEQ ID NO: 3635355 - DNA, 25 bp, Homo sapien
ggtttcaacttccaagtcttcatcc

SEQ ID NO: 3635356 - DNA, 25 bp, Homo sapien
atatcacacattttccaactttgcc

SEQ ID NO: 3635357 - DNA, 25 bp, Homo sapien
ttcaaatatcacacattttccaact

SEQ ID NO: 3635358 - DNA, 25 bp, Homo sapien
gaacacagggctaggcagtctctga

SEQ ID NO: 3635359 - DNA, 25 bp, Homo sapien
tactgagcacgctagaatcaaggtc

SEQ ID NO: 3635360 - DNA, 25 bp, Homo sapien
tgttcgtttcaaagcgcagcccata

SEQ ID NO: 3635361 - DNA, 25 bp, Homo sapien
gagaagtacaaataaccaacgcctg

SEQ ID NO: 3635362 - DNA, 25 bp, Homo sapien
gcttcatcatcaggggcaccaggaa

SEQ ID NO: 3635363 - DNA, 25 bp, Homo sapien
gattcaactctctcaaattctaaaa

SEQ ID NO: 3635364 - DNA, 25 bp, Homo sapien
ctttaattgctgattcaactctctc

SEQ ID NO: 3635365 - DNA, 25 bp, Homo sapien
taaaaatatccgtactgcttcatca

SEQ ID NO: 3635366 - DNA, 25 bp, Homo sapien
caggtatcctataagataaaggttt

SEQ ID NO: 3635367 - DNA, 25 bp, Homo sapien
gacagttaatacaggtatcctataa

SEQ ID NO: 3635368 - DNA, 25 bp, Homo sapien
taaagattaaggctgtaaattcaac

SEQ ID NO: 3635369 - DNA, 25 bp, Homo sapien
aacaaaagacagttaatacaggtat

SEQ ID NO: 3635370 - DNA, 25 bp, Homo sapien
aatccaagaccctgaatttgtccaa

SEQ ID NO: 3635371 - DNA, 25 bp, Homo sapien
tccaagaccctgaatttgtccaaat

SEQ ID NO: 3635372 - DNA, 25 bp, Homo sapien
caaatccaagaccctgaatttgtcc

SEQ ID NO: 3635373 - DNA, 25 bp, Homo sapien
aaatccaagaccctgaatttgtcca

SEQ ID NO: 3635374 - DNA, 25 bp, Homo sapien
tatatcttagaagtccttccaagag

SEQ ID NO: 3635375 - DNA, 25 bp, Homo sapien
gatgactcgtgctctagttcttaaa

SEQ ID NO: 3635376 - DNA, 25 bp, Homo sapien
gcagttcatttaaggatcaccggag

SEQ ID NO: 3635377 - DNA, 25 bp, Homo sapien
ttggtatgcaacagccatggaggct

SEQ ID NO: 3635378 - DNA, 25 bp, Homo sapien
gaattaccatgaaatctaacaaaaa

SEQ ID NO: 3635379 - DNA, 25 bp, Homo sapien
cttgagaattaccatgaaatctaac

SEQ ID NO: 3635380 - DNA, 25 bp, Homo sapien
atgtcatcaactcaggagtaataat

SEQ ID NO: 3635381 - DNA, 25 bp, Homo sapien
agcacttgagaattaccatgaaatc

SEQ ID NO: 3635382 - DNA, 25 bp, Homo sapien
ttagtaacttgcaggctttattaaa

SEQ ID NO: 3635383 - DNA, 25 bp, Homo sapien
gtaacttgcaggctttattaaaaga

SEQ ID NO: 3635384 - DNA, 25 bp, Homo sapien
taatttaatataaccccatgtccca

SEQ ID NO: 3635385 - DNA, 25 bp, Homo sapien
taacttgcaggctttattaaaagaa

SEQ ID NO: 3635386 - DNA, 25 bp, Homo sapien
cattttcacctttggcacactgcca

SEQ ID NO: 3635387 - DNA, 25 bp, Homo sapien
ggcacactgccaagatgatacttta

SEQ ID NO: 3635388 - DNA, 25 bp, Homo sapien
aagcatcattttcacctttggcaca

SEQ ID NO: 3635389 - DNA, 25 bp, Homo sapien
tcacctttggcacactgccaagatg

SEQ ID NO: 3635390 - DNA, 25 bp, Homo sapien
cgtttttctacgactggagtcacta

SEQ ID NO: 3635391 - DNA, 25 bp, Homo sapien
tacgactggagtcactaagaatttc

SEQ ID NO: 3635392 - DNA, 25 bp, Homo sapien
ttttctacgactggagtcactaaga

SEQ ID NO: 3635393 - DNA, 25 bp, Homo sapien
agacgtttttctacgactggagtca

SEQ ID NO: 3635394 - DNA, 25 bp, Homo sapien
tacagtttacttggccaacgtggat

SEQ ID NO: 3635395 - DNA, 25 bp, Homo sapien
tacagtctgatttagcctacggcaa

SEQ ID NO: 3635396 - DNA, 25 bp, Homo sapien
gccgcttaggaaagtcacatgcagt

SEQ ID NO: 3635397 - DNA, 25 bp, Homo sapien
ttatgtctccaaaccaagtccatgg

SEQ ID NO: 3635398 - DNA, 25 bp, Homo sapien
ttttattcaataaaataataccaca

SEQ ID NO: 3635399 - DNA, 25 bp, Homo sapien
tcataaaactcaattttattcaata

SEQ ID NO: 3635400 - DNA, 25 bp, Homo sapien
aacttgcaggagatttagaaattat

SEQ ID NO: 3635401 - DNA, 25 bp, Homo sapien
tattcgactatcagaaattcattat

SEQ ID NO: 3635402 - DNA, 25 bp, Homo sapien
tcaagtactaacttgcaggagattt

SEQ ID NO: 3635403 - DNA, 25 bp, Homo sapien
ttagaaattattcgactatcagaaa

SEQ ID NO: 3635404 - DNA, 25 bp, Homo sapien
cctcattctgcaagtgtgggctgag

SEQ ID NO: 3635405 - DNA, 25 bp, Homo sapien
tgtagtcgacgcagtcctcattctg

SEQ ID NO: 3635406 - DNA, 25 bp, Homo sapien
ctgagtggaagaggcagtaagaagc

SEQ ID NO: 3635407 - DNA, 25 bp, Homo sapien
ggtggaggcgggatgttgggattct

SEQ ID NO: 3635408 - DNA, 25 bp, Homo sapien
ccggacagaatgatggcacttaggt

SEQ ID NO: 3635409 - DNA, 25 bp, Homo sapien
ctcaccggacagaatgatggcactt

SEQ ID NO: 3635410 - DNA, 25 bp, Homo sapien
caccggacagaatgatggcacttag

SEQ ID NO: 3635411 - DNA, 25 bp, Homo sapien
cggacagaatgatggcacttaggtg

SEQ ID NO: 3635412 - DNA, 25 bp, Homo sapien
gcaccgggccccagttcaaggttga

SEQ ID NO: 3635413 - DNA, 25 bp, Homo sapien
cagttcaaggttgaaaccagggaca

SEQ ID NO: 3635414 - DNA, 25 bp, Homo sapien
caaggttgaaaccagggacacagga

SEQ ID NO: 3635415 - DNA, 25 bp, Homo sapien
gttcaaggttgaaaccagggacaca

SEQ ID NO: 3635416 - DNA, 25 bp, Homo sapien
tatccggtaaagaaacaacgatgtc

SEQ ID NO: 3635417 - DNA, 25 bp, Homo sapien
ctgaagttgcttattgaccgggaca

SEQ ID NO: 3635418 - DNA, 25 bp, Homo sapien
tttccagggttaagagagacttatc

SEQ ID NO: 3635419 - DNA, 25 bp, Homo sapien
caacgatgtcattaccagcaagtct

SEQ ID NO: 3635420 - DNA, 25 bp, Homo sapien
tcaaaagtatgagttggtttcacac

SEQ ID NO: 3635421 - DNA, 25 bp, Homo sapien
cccagaaattagtctcagtctcctg

SEQ ID NO: 3635422 - DNA, 25 bp, Homo sapien
ccaagtggttgctttctactgcatt

SEQ ID NO: 3635423 - DNA, 25 bp, Homo sapien
tactgcattgcgctcctggaatcct

SEQ ID NO: 3635424 - DNA, 25 bp, Homo sapien
ggaatcctggaatacgctgctgaat

SEQ ID NO: 3635425 - DNA, 25 bp, Homo sapien
ccccagagccgtcaagcacgctcag

SEQ ID NO: 3635426 - DNA, 25 bp, Homo sapien
cagagccgtcaagcacgctcagctg

SEQ ID NO: 3635427 - DNA, 25 bp, Homo sapien
gaggaccccagagccgtcaagcacg

SEQ ID NO: 3635428 - DNA, 25 bp, Homo sapien
gacagtgtcacaggggagacggagg

SEQ ID NO: 3635429 - DNA, 25 bp, Homo sapien
tgtgttgattgtcccgccgtcctgg

SEQ ID NO: 3635430 - DNA, 25 bp, Homo sapien
agaagaagaagagcgttgtgttgat

SEQ ID NO: 3635431 - DNA, 25 bp, Homo sapien
tagagtccgggaaaggctcttgcca

SEQ ID NO: 3635432 - DNA, 25 bp, Homo sapien
catcccttccttcataaggaacgag

SEQ ID NO: 3635433 - DNA, 25 bp, Homo sapien
tggtcatcgcgggtgtcctccacca

SEQ ID NO: 3635434 - DNA, 25 bp, Homo sapien
gcctccccttggactgctatcggat

SEQ ID NO: 3635435 - DNA, 25 bp, Homo sapien
actgctatcggatctaaagaggcta

SEQ ID NO: 3635436 - DNA, 25 bp, Homo sapien
cccttggactgctatcggatctaaa

SEQ ID NO: 3635437 - DNA, 25 bp, Homo sapien
tccttggagtttgccagaaggctgg

SEQ ID NO: 3635438 - DNA, 25 bp, Homo sapien
tgggggatctgggatgggtctgagt

SEQ ID NO: 3635439 - DNA, 25 bp, Homo sapien
tgagtccctgctgggtcccttccta

SEQ ID NO: 3635440 - DNA, 25 bp, Homo sapien
gggatctgggatgggtctgagtccc

SEQ ID NO: 3635441 - DNA, 25 bp, Homo sapien
cacatctccgatgtgagagtccaga

SEQ ID NO: 3635442 - DNA, 25 bp, Homo sapien
cccgcgtgtggtgtggatccgcctc

SEQ ID NO: 3635443 - DNA, 25 bp, Homo sapien
agagccgttcccactaccgggctgt

SEQ ID NO: 3635444 - DNA, 25 bp, Homo sapien
acatccccgacgtgagtgtccagag

SEQ ID NO: 3635445 - DNA, 25 bp, Homo sapien
acagcttccggttgccctcattgca

SEQ ID NO: 3635446 - DNA, 25 bp, Homo sapien
tggagttctctccagttcgtaggct

SEQ ID NO: 3635447 - DNA, 25 bp, Homo sapien
ctccagttcgtaggctgacggctcc

SEQ ID NO: 3635448 - DNA, 25 bp, Homo sapien
tccggttgccctcattgcaggaaga

SEQ ID NO: 3635449 - DNA, 25 bp, Homo sapien
gtgggcacggtccctctggttttca

SEQ ID NO: 3635450 - DNA, 25 bp, Homo sapien
ctggtcagggaaacggcggggatcg

SEQ ID NO: 3635451 - DNA, 25 bp, Homo sapien
tgggcacggtccctctggttttcag

SEQ ID NO: 3635452 - DNA, 25 bp, Homo sapien
ggattgaacaacgaactcgccacag

SEQ ID NO: 3635453 - DNA, 25 bp, Homo sapien
gatccatgcggcgatagaacagggc

SEQ ID NO: 3635454 - DNA, 25 bp, Homo sapien
gatttgctgagccatccgggattga

SEQ ID NO: 3635455 - DNA, 25 bp, Homo sapien
tcagccaactaggatcgatgtcagt

SEQ ID NO: 3635456 - DNA, 25 bp, Homo sapien
gaggaagccactgtcgggtgggacg

SEQ ID NO: 3635457 - DNA, 25 bp, Homo sapien
tagcctgctatcgttcgtgggtaat

SEQ ID NO: 3635458 - DNA, 25 bp, Homo sapien
tgccagttggcttgggacacagctg

SEQ ID NO: 3635459 - DNA, 25 bp, Homo sapien
tctttggaagggagatgacgccacg

SEQ ID NO: 3635460 - DNA, 25 bp, Homo sapien
gggccggcccgcgacacccagacag

SEQ ID NO: 3635461 - DNA, 25 bp, Homo sapien
gacaggacgacgtccaagcggcagc

SEQ ID NO: 3635462 - DNA, 25 bp, Homo sapien
ttcctgaagggcatcgcgccggggg

SEQ ID NO: 3635463 - DNA, 25 bp, Homo sapien
acacccagacaggacgacgtccaag

SEQ ID NO: 3635464 - DNA, 25 bp, Homo sapien
tagcaagtgcccaatctagagaatg

SEQ ID NO: 3635465 - DNA, 25 bp, Homo sapien
gaatgaatgccgtggtacacaacca

SEQ ID NO: 3635466 - DNA, 25 bp, Homo sapien
tacctagcgtgtgctggtgcatagc

SEQ ID NO: 3635467 - DNA, 25 bp, Homo sapien
caggtgcaatatgaggtctaagtcc

SEQ ID NO: 3635468 - DNA, 25 bp, Homo sapien
gcgtccctccattgtggttcccaaa

SEQ ID NO: 3635469 - DNA, 25 bp, Homo sapien
ggttcccaaagttagtcatgatatg

SEQ ID NO: 3635470 - DNA, 25 bp, Homo sapien
gttcttgcagaggaagaactgcccc

SEQ ID NO: 3635471 - DNA, 25 bp, Homo sapien
gatatgcatgactttcctctccgtg

SEQ ID NO: 3635472 - DNA, 25 bp, Homo sapien
tctgaaggtggaacgtacaaaaatc

SEQ ID NO: 3635473 - DNA, 25 bp, Homo sapien
tgctattcccttgtccctctgaagg

SEQ ID NO: 3635474 - DNA, 25 bp, Homo sapien
gctgtctgaagacattgttatagga

SEQ ID NO: 3635475 - DNA, 25 bp, Homo sapien
ccttgtccctctgaaggtggaacgt

SEQ ID NO: 3635476 - DNA, 25 bp, Homo sapien
ctcttggaccgagcacacagctttg

SEQ ID NO: 3635477 - DNA, 25 bp, Homo sapien
caaatcaaccctgacgattactggg

SEQ ID NO: 3635478 - DNA, 25 bp, Homo sapien
gccaaatcaaccctgacgattactg

SEQ ID NO: 3635479 - DNA, 25 bp, Homo sapien
gtcatcctcttggaccgagcacaca

SEQ ID NO: 3635480 - DNA, 25 bp, Homo sapien
tcacactttgtgagtgactgcaaag

SEQ ID NO: 3635481 - DNA, 25 bp, Homo sapien
aatgggatcctcatattgctggtaa

SEQ ID NO: 3635482 - DNA, 25 bp, Homo sapien
tgcaaaggatccctccacagataac

SEQ ID NO: 3635483 - DNA, 25 bp, Homo sapien
gttacctttacaaatgatccaaaca

SEQ ID NO: 3635484 - DNA, 25 bp, Homo sapien
gtcatcgccattctccattctcgat

SEQ ID NO: 3635485 - DNA, 25 bp, Homo sapien
gtgccttgttaacaatatgtttgca

SEQ ID NO: 3635486 - DNA, 25 bp, Homo sapien
aatatgtttgcaggcagtatgcttg

SEQ ID NO: 3635487 - DNA, 25 bp, Homo sapien
tatgtttgcaggcagtatgcttggt

SEQ ID NO: 3635488 - DNA, 25 bp, Homo sapien
taactgtagccccaaccctatgctc

SEQ ID NO: 3635489 - DNA, 25 bp, Homo sapien
gtagccccaaccctatgctcacaga

SEQ ID NO: 3635490 - DNA, 25 bp, Homo sapien
aactgtagccccaaccctatgctca

SEQ ID NO: 3635491 - DNA, 25 bp, Homo sapien
ctgtagccccaaccctatgctcaca

SEQ ID NO: 3635492 - DNA, 25 bp, Homo sapien
aagacgcaagaaactccattttgat

SEQ ID NO: 3635493 - DNA, 25 bp, Homo sapien
gaagacgcaagaaactccattttga

SEQ ID NO: 3635494 - DNA, 25 bp, Homo sapien
ctatgcagaaaaggaagacgcaaga

SEQ ID NO: 3635495 - DNA, 25 bp, Homo sapien
tgcagaaaaggaagacgcaagaaac

SEQ ID NO: 3635496 - DNA, 25 bp, Homo sapien
ttttctggtccgttaaactcatgca

SEQ ID NO: 3635497 - DNA, 25 bp, Homo sapien
ggtcgtagcaatggccaagttgtca

SEQ ID NO: 3635498 - DNA, 25 bp, Homo sapien
taagggctcaaacagacctgcaaat

SEQ ID NO: 3635499 - DNA, 25 bp, Homo sapien
tgcaaatacactcggcacctgcgag

SEQ ID NO: 3635500 - DNA, 25 bp, Homo sapien
agtgggtctactctgcatttatggg

SEQ ID NO: 3635501 - DNA, 25 bp, Homo sapien
gccttcaccatcagcgcagcaagtt

SEQ ID NO: 3635502 - DNA, 25 bp, Homo sapien
caggtctgagcattcgtgccccttg

SEQ ID NO: 3635503 - DNA, 25 bp, Homo sapien
catttatgggtgacgccagtctcct

SEQ ID NO: 3635504 - DNA, 25 bp, Homo sapien
tttgcacctcaatgaccccatggat

SEQ ID NO: 3635505 - DNA, 25 bp, Homo sapien
gaagcaattagcgttctctctcgtt

SEQ ID NO: 3635506 - DNA, 25 bp, Homo sapien
tgcccaggataaagtgactagtcaa

SEQ ID NO: 3635507 - DNA, 25 bp, Homo sapien
gactagtcaagctatggaggcttta

SEQ ID NO: 3635508 - DNA, 25 bp, Homo sapien
gaacaagaatctgcatctgaacgcc

SEQ ID NO: 3635509 - DNA, 25 bp, Homo sapien
ctctcaatggagtacggcggcaaaa

SEQ ID NO: 3635510 - DNA, 25 bp, Homo sapien
catttgagcttgagaagcgcgggct

SEQ ID NO: 3635511 - DNA, 25 bp, Homo sapien
cgtggctctgagctgagatatccaa

SEQ ID NO: 3635512 - DNA, 25 bp, Homo sapien
ctgatcccagcaaacgagtgagcca

SEQ ID NO: 3635513 - DNA, 25 bp, Homo sapien
aagcacagccgcatgcctgatggga

SEQ ID NO: 3635514 - DNA, 25 bp, Homo sapien
gagaatgcgtcagagtatctgtccc

SEQ ID NO: 3635515 - DNA, 25 bp, Homo sapien
tgggaccaagaagcaaatcgatacc

SEQ ID NO: 3635516 - DNA, 25 bp, Homo sapien
aaggccagcgaagtgtcctgtctgc

SEQ ID NO: 3635517 - DNA, 25 bp, Homo sapien
caccgagtgacaagtatgaggccag

SEQ ID NO: 3635518 - DNA, 25 bp, Homo sapien
cacttaatcattcagcaccccggtt

SEQ ID NO: 3635519 - DNA, 25 bp, Homo sapien
aagccctgtggtcttggataagtca

SEQ ID NO: 3635520 - DNA, 25 bp, Homo sapien
gagacgctgggcagataaagcccgc

SEQ ID NO: 3635521 - DNA, 25 bp, Homo sapien
taagcccatatcagccgcatgtcct

SEQ ID NO: 3635522 - DNA, 25 bp, Homo sapien
aaaggtcctgtcatcaccaagactg

SEQ ID NO: 3635523 - DNA, 25 bp, Homo sapien
tcctgactagggtcttcatgccagc

SEQ ID NO: 3635524 - DNA, 25 bp, Homo sapien
caaaagcagcgcagcgcagatgagt

SEQ ID NO: 3635525 - DNA, 25 bp, Homo sapien
tgtgtgacctcggaccaataactga

SEQ ID NO: 3635526 - DNA, 25 bp, Homo sapien
ttgggctcttgtcggcttcgccctc

SEQ ID NO: 3635527 - DNA, 25 bp, Homo sapien
cccttatttggatttgtgtggctca

SEQ ID NO: 3635528 - DNA, 25 bp, Homo sapien
aacagaatcctagtggagctggagg

SEQ ID NO: 3635529 - DNA, 25 bp, Homo sapien
ttttcactgccacctaccatggtgc

SEQ ID NO: 3635530 - DNA, 25 bp, Homo sapien
tcctagtggagctggaggtgtttta

SEQ ID NO: 3635531 - DNA, 25 bp, Homo sapien
gagctggaggtgttttagagataat

SEQ ID NO: 3635532 - DNA, 25 bp, Homo sapien
tccccgcaaatgcagggaggcaaca

SEQ ID NO: 3635533 - DNA, 25 bp, Homo sapien
caaatgcagggaggcaacatagcct

SEQ ID NO: 3635534 - DNA, 25 bp, Homo sapien
cctgccagcttcagtcgtggcggca

SEQ ID NO: 3635535 - DNA, 25 bp, Homo sapien
tttcactttcgagacaacttttcag

SEQ ID NO: 3635536 - DNA, 25 bp, Homo sapien
gcttggtgactcagtctccctgggt

SEQ ID NO: 3635537 - DNA, 25 bp, Homo sapien
gtgactcagtctccctgggtacact

SEQ ID NO: 3635538 - DNA, 25 bp, Homo sapien
ttggtgactcagtctccctgggtac

SEQ ID NO: 3635539 - DNA, 25 bp, Homo sapien
tggtgactcagtctccctgggtaca

SEQ ID NO: 3635540 - DNA, 25 bp, Homo sapien
gatcctcctggaagtgaaccacgtt

SEQ ID NO: 3635541 - DNA, 25 bp, Homo sapien
ccaagagaattctgcggggagcccc

SEQ ID NO: 3635542 - DNA, 25 bp, Homo sapien
gggagccccccgaatactctctgct

SEQ ID NO: 3635543 - DNA, 25 bp, Homo sapien
ttctcccccaagagaattctgcggg

SEQ ID NO: 3635544 - DNA, 25 bp, Homo sapien
actagactggcttagtctctgcgcc

SEQ ID NO: 3635545 - DNA, 25 bp, Homo sapien
tagtctctgcgcctacatctttctc

SEQ ID NO: 3635546 - DNA, 25 bp, Homo sapien
agcagggcccgaacaaaagcaggca

SEQ ID NO: 3635547 - DNA, 25 bp, Homo sapien
ttggattgaaaaatcctgggtgtgt

SEQ ID NO: 3635548 - DNA, 25 bp, Homo sapien
agcataaccttgattggtaaaacaa

SEQ ID NO: 3635549 - DNA, 25 bp, Homo sapien
tgacagacagagatataagattcct

SEQ ID NO: 3635550 - DNA, 25 bp, Homo sapien
cctcagatgatttatctaagtaaat

SEQ ID NO: 3635551 - DNA, 25 bp, Homo sapien
tttatttatgacagacagagatata

SEQ ID NO: 3635552 - DNA, 25 bp, Homo sapien
ctctaatacgatgattcttttacag

SEQ ID NO: 3635553 - DNA, 25 bp, Homo sapien
ggcccttcagaaaacgctcccaata

SEQ ID NO: 3635554 - DNA, 25 bp, Homo sapien
cgctcccaataacgtaaatgttcct

SEQ ID NO: 3635555 - DNA, 25 bp, Homo sapien
cgtaaatgttcctctaatacgatga

SEQ ID NO: 3635556 - DNA, 25 bp, Homo sapien
tagataacgcatctgacagcggtca

SEQ ID NO: 3635557 - DNA, 25 bp, Homo sapien
gcggtcagctcttagggcacaggga

SEQ ID NO: 3635558 - DNA, 25 bp, Homo sapien
tgaactttcgcagaccgggcacttt

SEQ ID NO: 3635559 - DNA, 25 bp, Homo sapien
cagcagcggcacatcattcatctct

SEQ ID NO: 3635560 - DNA, 25 bp, Homo sapien
tgctgaatcccttagaaacctggac

SEQ ID NO: 3635561 - DNA, 25 bp, Homo sapien
ggctgctccctgataatacccgtga

SEQ ID NO: 3635562 - DNA, 25 bp, Homo sapien
tccaggtaaggacatgggccaggct

SEQ ID NO: 3635563 - DNA, 25 bp, Homo sapien
tatcgccccgagtagaagaatgaat

SEQ ID NO: 3635564 - DNA, 25 bp, Homo sapien
cctttagggccatggagccccaata

SEQ ID NO: 3635565 - DNA, 25 bp, Homo sapien
ctcctttagggccatggagccccaa

SEQ ID NO: 3635566 - DNA, 25 bp, Homo sapien
tttagggccatggagccccaatact

SEQ ID NO: 3635567 - DNA, 25 bp, Homo sapien
ttagggccatggagccccaatactc

SEQ ID NO: 3635568 - DNA, 25 bp, Homo sapien
ttttaaagagtccgggctggccgca

SEQ ID NO: 3635569 - DNA, 25 bp, Homo sapien
cgcagacgcgtacgtcagcctcggg

SEQ ID NO: 3635570 - DNA, 25 bp, Homo sapien
gcgggccgcattccttgggtcccag

SEQ ID NO: 3635571 - DNA, 25 bp, Homo sapien
ggcgggccgcattccttgggtccca

SEQ ID NO: 3635572 - DNA, 25 bp, Homo sapien
tctccggcttggctgggatgccccg

SEQ ID NO: 3635573 - DNA, 25 bp, Homo sapien
ctcctctccggcttggctgggatgc

SEQ ID NO: 3635574 - DNA, 25 bp, Homo sapien
ctgctgctcgcctcctctccggctt

SEQ ID NO: 3635575 - DNA, 25 bp, Homo sapien
ggcttggctgggatgccccgcgcac

SEQ ID NO: 3635576 - DNA, 25 bp, Homo sapien
cgctcggaaagctctgggatgctcg

SEQ ID NO: 3635577 - DNA, 25 bp, Homo sapien
gggctcgacgtgtgctgcgagggta

SEQ ID NO: 3635578 - DNA, 25 bp, Homo sapien
tgtgctgcgagggtagcgaggctgg

SEQ ID NO: 3635579 - DNA, 25 bp, Homo sapien
ggctcgtccgctcggaaagctctgg

SEQ ID NO: 3635580 - DNA, 25 bp, Homo sapien
ggagaggggggcgtgcgccggcgcg

SEQ ID NO: 3635581 - DNA, 25 bp, Homo sapien
gcgcggccgggcgtttcctgcgctg

SEQ ID NO: 3635582 - DNA, 25 bp, Homo sapien
tgcgctgccaggggaaacgtgcttt

SEQ ID NO: 3635583 - DNA, 25 bp, Homo sapien
ccgagatcccgacgctggcaggaga

SEQ ID NO: 3635584 - DNA, 25 bp, Homo sapien
cagatcttctgcactcggctctgcg

SEQ ID NO: 3635585 - DNA, 25 bp, Homo sapien
ccacgggcacccagatcttctgcac

SEQ ID NO: 3635586 - DNA, 25 bp, Homo sapien
ggctctgcgtcagttccaacggcat

SEQ ID NO: 3635587 - DNA, 25 bp, Homo sapien
tctgcactcggctctgcgtcagttc

SEQ ID NO: 3635588 - DNA, 25 bp, Homo sapien
ctgggcaaaaccgcaccaggcggct

SEQ ID NO: 3635589 - DNA, 25 bp, Homo sapien
gggcaaaaccgcaccaggcggctcc

SEQ ID NO: 3635590 - DNA, 25 bp, Homo sapien
tgggcaaaaccgcaccaggcggctc

SEQ ID NO: 3635591 - DNA, 25 bp, Homo sapien
ctcaggcgccttcggatgacccgaa

SEQ ID NO: 3635592 - DNA, 25 bp, Homo sapien
gacccgaagccacctcgagagtttg

SEQ ID NO: 3635593 - DNA, 25 bp, Homo sapien
agagtttgcacctggatcccacggt

SEQ ID NO: 3635594 - DNA, 25 bp, Homo sapien
gtagtagccgggcaaccctgcctgc

SEQ ID NO: 3635595 - DNA, 25 bp, Homo sapien
tacccgtgagacagaggctacttgg

SEQ ID NO: 3635596 - DNA, 25 bp, Homo sapien
gactaaacacccgaattgaatctgg

SEQ ID NO: 3635597 - DNA, 25 bp, Homo sapien
ctcagccgtgggatacagtgacaca

SEQ ID NO: 3635598 - DNA, 25 bp, Homo sapien
cattagtgtacaacggagactgcct

SEQ ID NO: 3635599 - DNA, 25 bp, Homo sapien
gacgccaatccagttgaggtagcga

SEQ ID NO: 3635600 - DNA, 25 bp, Homo sapien
gagttggtcagctttggcccacagg

SEQ ID NO: 3635601 - DNA, 25 bp, Homo sapien
tgaggtagcgagtcagcttcttgga

SEQ ID NO: 3635602 - DNA, 25 bp, Homo sapien
ggaggcccaccatgacgatgacggt

SEQ ID NO: 3635603 - DNA, 25 bp, Homo sapien
agctcacaccgggaccataggatcg

SEQ ID NO: 3635604 - DNA, 25 bp, Homo sapien
gaacagtctggatgatcgagcagga

SEQ ID NO: 3635605 - DNA, 25 bp, Homo sapien
aggccaaccacaccgacttgaatga

SEQ ID NO: 3635606 - DNA, 25 bp, Homo sapien
cataggatcgaccaaaggaagagcc

SEQ ID NO: 3635607 - DNA, 25 bp, Homo sapien
tcctcattgtcggggcggaagaagt

SEQ ID NO: 3635608 - DNA, 25 bp, Homo sapien
cggcgatactccccgacgttgaaca

SEQ ID NO: 3635609 - DNA, 25 bp, Homo sapien
cggaagaagttgtaggagctgtact

SEQ ID NO: 3635610 - DNA, 25 bp, Homo sapien
tgcttcacagcctcccggcgatact

SEQ ID NO: 3635611 - DNA, 25 bp, Homo sapien
tctctcaaggcagctaaggcacatt

SEQ ID NO: 3635612 - DNA, 25 bp, Homo sapien
tgtcccccttctttcgccaggtagc

SEQ ID NO: 3635613 - DNA, 25 bp, Homo sapien
acatctctcaaggcagctaaggcac

SEQ ID NO: 3635614 - DNA, 25 bp, Homo sapien
tctcaaggcagctaaggcacattgc

SEQ ID NO: 3635615 - DNA, 25 bp, Homo sapien
caggccggtgaggacaccctcatgg

SEQ ID NO: 3635616 - DNA, 25 bp, Homo sapien
gacaccgagccggctacattgcctg

SEQ ID NO: 3635617 - DNA, 25 bp, Homo sapien
caccgagccggctacattgcctgga

SEQ ID NO: 3635618 - DNA, 25 bp, Homo sapien
cccaggccggtgaggacaccctcat

SEQ ID NO: 3635619 - DNA, 25 bp, Homo sapien
tcctctctctagtagtattggtggc

SEQ ID NO: 3635620 - DNA, 25 bp, Homo sapien
tgaaggatcatgtgtctcctctctc

SEQ ID NO: 3635621 - DNA, 25 bp, Homo sapien
tctttggcaaaatgaaggatcatgt

SEQ ID NO: 3635622 - DNA, 25 bp, Homo sapien
tctcctctctctagtagtattggtg

SEQ ID NO: 3635623 - DNA, 25 bp, Homo sapien
aggccacaactgtagggtcgtcgca

SEQ ID NO: 3635624 - DNA, 25 bp, Homo sapien
catgatattggaggccacaactgta

SEQ ID NO: 3635625 - DNA, 25 bp, Homo sapien
caactgtagggtcgtcgcacaccga

SEQ ID NO: 3635626 - DNA, 25 bp, Homo sapien
tattggaggccacaactgtagggtc

SEQ ID NO: 3635627 - DNA, 25 bp, Homo sapien
gcagtctttgtaatccgggctggag

SEQ ID NO: 3635628 - DNA, 25 bp, Homo sapien
cagtctttgtaatccgggctggaga

SEQ ID NO: 3635629 - DNA, 25 bp, Homo sapien
agttgcagtctttgtaatccgggct

SEQ ID NO: 3635630 - DNA, 25 bp, Homo sapien
ttgcagtctttgtaatccgggctgg

SEQ ID NO: 3635631 - DNA, 25 bp, Homo sapien
gcttcatagcaactgatcctcttca

SEQ ID NO: 3635632 - DNA, 25 bp, Homo sapien
ctgtcgcatttgtcggggtcgaggg

SEQ ID NO: 3635633 - DNA, 25 bp, Homo sapien
tgtcgcatttgtcggggtcgagggg

SEQ ID NO: 3635634 - DNA, 25 bp, Homo sapien
ttcatagcaactgatcctcttcatg

SEQ ID NO: 3635635 - DNA, 25 bp, Homo sapien
gtcaatcaccttgatcagcgacaag

SEQ ID NO: 3635636 - DNA, 25 bp, Homo sapien
aggttgtgctcgttctcgccgtgcc

SEQ ID NO: 3635637 - DNA, 25 bp, Homo sapien
tacgcggctgcacgtggatgttcat

SEQ ID NO: 3635638 - DNA, 25 bp, Homo sapien
caggtagtacacgatgcggctctgg

SEQ ID NO: 3635639 - DNA, 25 bp, Homo sapien
agggggaccactgattccagatgcc

SEQ ID NO: 3635640 - DNA, 25 bp, Homo sapien
tggagggggaccactgattccagat

SEQ ID NO: 3635641 - DNA, 25 bp, Homo sapien
gaccactgattccagatgcccgcag

SEQ ID NO: 3635642 - DNA, 25 bp, Homo sapien
ctgattccagatgcccgcagctcct

SEQ ID NO: 3635643 - DNA, 25 bp, Homo sapien
tccactgctcgtagggcagccgcag

SEQ ID NO: 3635644 - DNA, 25 bp, Homo sapien
ctggatggtgctcttcagctggctg

SEQ ID NO: 3635645 - DNA, 25 bp, Homo sapien
tccacgaacttgctcagagcactgg

SEQ ID NO: 3635646 - DNA, 25 bp, Homo sapien
cgatctcattgagcgccttccactg

SEQ ID NO: 3635647 - DNA, 25 bp, Homo sapien
caggggtgtctagggcctcttggga

SEQ ID NO: 3635648 - DNA, 25 bp, Homo sapien
ggcctcttgggaagccgccccatgc

SEQ ID NO: 3635649 - DNA, 25 bp, Homo sapien
aagccgccccatgcccgagggtgag

SEQ ID NO: 3635650 - DNA, 25 bp, Homo sapien
ttgggaagccgccccatgcccgagg

SEQ ID NO: 3635651 - DNA, 25 bp, Homo sapien
ggtagcggtaatagtacttgtcctg

SEQ ID NO: 3635652 - DNA, 25 bp, Homo sapien
tcccgcagcgcatactcctcagggt

SEQ ID NO: 3635653 - DNA, 25 bp, Homo sapien
aggtgtccctgatctcctcgtaggt

SEQ ID NO: 3635654 - DNA, 25 bp, Homo sapien
tccctgatctcctcgtaggtcagct

SEQ ID NO: 3635655 - DNA, 25 bp, Homo sapien
caccgtgcacggggaagcacagacg

SEQ ID NO: 3635656 - DNA, 25 bp, Homo sapien
gaggcaacagcgtcctcagccacag

SEQ ID NO: 3635657 - DNA, 25 bp, Homo sapien
agccacccgggcaccgtgcacgggg

SEQ ID NO: 3635658 - DNA, 25 bp, Homo sapien
agaggaggcaacagcgtcctcagcc

SEQ ID NO: 3635659 - DNA, 25 bp, Homo sapien
ctggccacagactgcatcagaccgg

SEQ ID NO: 3635660 - DNA, 25 bp, Homo sapien
ggccagagagccacgcaaaatcaat

SEQ ID NO: 3635661 - DNA, 25 bp, Homo sapien
agactgcatcagaccggccagagag

SEQ ID NO: 3635662 - DNA, 25 bp, Homo sapien
ccacgtgagctcagggcactcggga

SEQ ID NO: 3635663 - DNA, 25 bp, Homo sapien
tcactggctccaagcgctggaccag

SEQ ID NO: 3635664 - DNA, 25 bp, Homo sapien
gctccagctccatgatcactggctc

SEQ ID NO: 3635665 - DNA, 25 bp, Homo sapien
cactggctccaagcgctggaccagg

SEQ ID NO: 3635666 - DNA, 25 bp, Homo sapien
agtaggcaagcaggcagcgcaggac

SEQ ID NO: 3635667 - DNA, 25 bp, Homo sapien
ctcttatccaggaagtaggcaagca

SEQ ID NO: 3635668 - DNA, 25 bp, Homo sapien
ctgcactcttatccaggaagtaggc

SEQ ID NO: 3635669 - DNA, 25 bp, Homo sapien
ttatccaggaagtaggcaagcaggc

SEQ ID NO: 3635670 - DNA, 25 bp, Homo sapien
tgcggctgaccccccgccgagtgcc

SEQ ID NO: 3635671 - DNA, 25 bp, Homo sapien
tgaccccccgccgagtgccagtccc

SEQ ID NO: 3635672 - DNA, 25 bp, Homo sapien
ccctccatcccggggccacgacctg

SEQ ID NO: 3635673 - DNA, 25 bp, Homo sapien
atcccggggccacgacctgcccgag

SEQ ID NO: 3635674 - DNA, 25 bp, Homo sapien
acaggcgtcagtttcaggacggtgt

SEQ ID NO: 3635675 - DNA, 25 bp, Homo sapien
cataagcgacaggcgtcagtttcag

SEQ ID NO: 3635676 - DNA, 25 bp, Homo sapien
taagcgacaggcgtcagtttcagga

SEQ ID NO: 3635677 - DNA, 25 bp, Homo sapien
cgacaggcgtcagtttcaggacggt

SEQ ID NO: 3635678 - DNA, 25 bp, Homo sapien
cagggggacagggcttggcaggggt

SEQ ID NO: 3635679 - DNA, 25 bp, Homo sapien
ttcagggggacagggcttggcaggg

SEQ ID NO: 3635680 - DNA, 25 bp, Homo sapien
tcagggggacagggcttggcagggg

SEQ ID NO: 3635681 - DNA, 25 bp, Homo sapien
cttcagggggacagggcttggcagg

SEQ ID NO: 3635682 - DNA, 25 bp, Homo sapien
cagaggaagctgctgttaaagggac

SEQ ID NO: 3635683 - DNA, 25 bp, Homo sapien
ttaaagggacagcaccgcttacagc

SEQ ID NO: 3635684 - DNA, 25 bp, Homo sapien
cacggccacaagaagctactgtggc

SEQ ID NO: 3635685 - DNA, 25 bp, Homo sapien
ccacggccacaagaagctactgtgg

SEQ ID NO: 3635686 - DNA, 25 bp, Homo sapien
tctcccggtgtgtgcagacggactc

SEQ ID NO: 3635687 - DNA, 25 bp, Homo sapien
tgtgcagacggactccacgttcagg

SEQ ID NO: 3635688 - DNA, 25 bp, Homo sapien
gacctctcccggtgtgtgcagacgg

SEQ ID NO: 3635689 - DNA, 25 bp, Homo sapien
ccggtgtgtgcagacggactccacg

SEQ ID NO: 3635690 - DNA, 25 bp, Homo sapien
atggccaggatgaggcttggggcct

SEQ ID NO: 3635691 - DNA, 25 bp, Homo sapien
ccaggatgaggcttggggcctccac

SEQ ID NO: 3635692 - DNA, 25 bp, Homo sapien
tagggctatcgtgtgatgatggcca

SEQ ID NO: 3635693 - DNA, 25 bp, Homo sapien
ggatgaggcttggggcctccactca

SEQ ID NO: 3635694 - DNA, 25 bp, Homo sapien
gggcctcctgagcgcccatcaccca

SEQ ID NO: 3635695 - DNA, 25 bp, Homo sapien
cggggcctcctgagcgcccatcacc

SEQ ID NO: 3635696 - DNA, 25 bp, Homo sapien
cccggggcctcctgagcgcccatca

SEQ ID NO: 3635697 - DNA, 25 bp, Homo sapien
gccccggggcctcctgagcgcccat

SEQ ID NO: 3635698 - DNA, 25 bp, Homo sapien
tccagcctggggaacagactgagac

SEQ ID NO: 3635699 - DNA, 25 bp, Homo sapien
gcagtgagccgtgactgcgccaccg

SEQ ID NO: 3635700 - DNA, 25 bp, Homo sapien
tgagccgtgactgcgccaccgcact

SEQ ID NO: 3635701 - DNA, 25 bp, Homo sapien
ccagcctggggaacagactgagacc

SEQ ID NO: 3635702 - DNA, 25 bp, Homo sapien
ctagcacagtgttgtacttttggca

SEQ ID NO: 3635703 - DNA, 25 bp, Homo sapien
gacagaaagtcacgctcggtctaag

SEQ ID NO: 3635704 - DNA, 25 bp, Homo sapien
ctgtttcgggaacgccatgacagaa

SEQ ID NO: 3635705 - DNA, 25 bp, Homo sapien
gagaaaggtctgactagtactagca

SEQ ID NO: 3635706 - DNA, 25 bp, Homo sapien
tcctcggatggtaccaaaggattcc

SEQ ID NO: 3635707 - DNA, 25 bp, Homo sapien
tcggatggtaccaaaggattcccca

SEQ ID NO: 3635708 - DNA, 25 bp, Homo sapien
atgggggcaattccctcccatgccc

SEQ ID NO: 3635709 - DNA, 25 bp, Homo sapien
ccttcctcggatggtaccaaaggat

SEQ ID NO: 3635710 - DNA, 25 bp, Homo sapien
accatgggctgctgagtgtgcggtg

SEQ ID NO: 3635711 - DNA, 25 bp, Homo sapien
ggaccatgggctgctgagtgtgcgg

SEQ ID NO: 3635712 - DNA, 25 bp, Homo sapien
agggaccatgggctgctgagtgtgc

SEQ ID NO: 3635713 - DNA, 25 bp, Homo sapien
ggaccacgggccagggaccatgggc

SEQ ID NO: 3635714 - DNA, 25 bp, Homo sapien
agctgttgatgcgaggctttttggt

SEQ ID NO: 3635715 - DNA, 25 bp, Homo sapien
catgctcctcaaagctgttgatgcg

SEQ ID NO: 3635716 - DNA, 25 bp, Homo sapien
catgagcgggttaggtcccttcttt

SEQ ID NO: 3635717 - DNA, 25 bp, Homo sapien
gggtgacactattgcgtctcatgag

SEQ ID NO: 3635718 - DNA, 25 bp, Homo sapien
cacgaacgtgaacgggtcttggaca

SEQ ID NO: 3635719 - DNA, 25 bp, Homo sapien
ccaggatcttaacttcggagggtgc

SEQ ID NO: 3635720 - DNA, 25 bp, Homo sapien
cagtcacggttgtcaccagcaagga

SEQ ID NO: 3635721 - DNA, 25 bp, Homo sapien
tcctcagaaaggaggcgaacgcagt

SEQ ID NO: 3635722 - DNA, 25 bp, Homo sapien
aggccaaatgagcaagcaggaagaa

SEQ ID NO: 3635723 - DNA, 25 bp, Homo sapien
cagcgatgatcggagagatacttac

SEQ ID NO: 3635724 - DNA, 25 bp, Homo sapien
caagcagcagcgatgatcggagaga

SEQ ID NO: 3635725 - DNA, 25 bp, Homo sapien
agtgcaagcagcagcgatgatcgga

SEQ ID NO: 3635726 - DNA, 25 bp, Homo sapien
atttccaaagccagtcattcttttc

SEQ ID NO: 3635727 - DNA, 25 bp, Homo sapien
tttcagcatctcaggctgcattcct

SEQ ID NO: 3635728 - DNA, 25 bp, Homo sapien
cagagcaccaggtccggacagttgt

SEQ ID NO: 3635729 - DNA, 25 bp, Homo sapien
gacagttgttcgtccccatcttact

SEQ ID NO: 3635730 - DNA, 25 bp, Homo sapien
ttactgggaaaccaagatcacaggg

SEQ ID NO: 3635731 - DNA, 25 bp, Homo sapien
gtgatctctcgatcccaagcagccg

SEQ ID NO: 3635732 - DNA, 25 bp, Homo sapien
tgagaaaatgtgacagacagttcgt

SEQ ID NO: 3635733 - DNA, 25 bp, Homo sapien
aaactttgagaaaatgtgacagaca

SEQ ID NO: 3635734 - DNA, 25 bp, Homo sapien
cacagttagtaaggagaaaactttg

SEQ ID NO: 3635735 - DNA, 25 bp, Homo sapien
cagttagtaaggagaaaactttgag

SEQ ID NO: 3635736 - DNA, 25 bp, Homo sapien
gaacatgacgcaagataaccccaga

SEQ ID NO: 3635737 - DNA, 25 bp, Homo sapien
tcctcatatctagggagagccccag

SEQ ID NO: 3635738 - DNA, 25 bp, Homo sapien
gacgcgagccatgcaacggagaatt

SEQ ID NO: 3635739 - DNA, 25 bp, Homo sapien
taacaacctcggcatggagacagat

SEQ ID NO: 3635740 - DNA, 25 bp, Homo sapien
ggaggagtcagcgctgctccgggag

SEQ ID NO: 3635741 - DNA, 25 bp, Homo sapien
cctggaggagtcagcgctgctccgg

SEQ ID NO: 3635742 - DNA, 25 bp, Homo sapien
cataagtcacacataggaggctccc

SEQ ID NO: 3635743 - DNA, 25 bp, Homo sapien
tgtccaagttcgttcccatgaggcg

SEQ ID NO: 3635744 - DNA, 25 bp, Homo sapien
caggatacgttttgcctcgggcgga

SEQ ID NO: 3635745 - DNA, 25 bp, Homo sapien
taactttcagcaactaggagcctgc

SEQ ID NO: 3635746 - DNA, 25 bp, Homo sapien
cttaggcccaggttcaggagacaga

SEQ ID NO: 3635747 - DNA, 25 bp, Homo sapien
gagggcaaggcattcaacacacact

SEQ ID NO: 3635748 - DNA, 25 bp, Homo sapien
gctgccctgctctccgggatcttag

SEQ ID NO: 3635749 - DNA, 25 bp, Homo sapien
tctgcaagctgaatgaacgcctcac

SEQ ID NO: 3635750 - DNA, 25 bp, Homo sapien
catgatggcgcacactaagtaatcc

SEQ ID NO: 3635751 - DNA, 25 bp, Homo sapien
aggccccagaaggaaaacgtctcag

SEQ ID NO: 3635752 - DNA, 25 bp, Homo sapien
gccttgggcgacctagcaagacact

SEQ ID NO: 3635753 - DNA, 25 bp, Homo sapien
tagctgacacattgcactcctaaag

SEQ ID NO: 3635754 - DNA, 25 bp, Homo sapien
tcttatcagttagccgtagctgcca

SEQ ID NO: 3635755 - DNA, 25 bp, Homo sapien
gccatatccggcatcctagaacatt

SEQ ID NO: 3635756 - DNA, 25 bp, Homo sapien
tcactgtgtcaatgggagaccctca

SEQ ID NO: 3635757 - DNA, 25 bp, Homo sapien
taaagggattgcatagagggtcttc

SEQ ID NO: 3635758 - DNA, 25 bp, Homo sapien
gggaaatcacaacaataacagtgaa

SEQ ID NO: 3635759 - DNA, 25 bp, Homo sapien
gggtgaatatatttccagggaaatc

SEQ ID NO: 3635760 - DNA, 25 bp, Homo sapien
tatatttccagggaaatcacaacaa

SEQ ID NO: 3635761 - DNA, 25 bp, Homo sapien
ctccaatccaaggtgagtccaggaa

SEQ ID NO: 3635762 - DNA, 25 bp, Homo sapien
acacacaaatattccacctgcctga

SEQ ID NO: 3635763 - DNA, 25 bp, Homo sapien
tatatggctagggtacaaagtcttg

SEQ ID NO: 3635764 - DNA, 25 bp, Homo sapien
gaccatcagctacccatttctccca

SEQ ID NO: 3635765 - DNA, 25 bp, Homo sapien
ttgagtttgactgtttcggattcca

SEQ ID NO: 3635766 - DNA, 25 bp, Homo sapien
ggtgtctgcaacctggcctggtgac

SEQ ID NO: 3635767 - DNA, 25 bp, Homo sapien
gccacctaggaagaagactaacagt

SEQ ID NO: 3635768 - DNA, 25 bp, Homo sapien
cacttccctgatgcatggccattga

SEQ ID NO: 3635769 - DNA, 25 bp, Homo sapien
tgggacaaatccagctcctttaggg

SEQ ID NO: 3635770 - DNA, 25 bp, Homo sapien
gattgagtggatacctcagaaaggg

SEQ ID NO: 3635771 - DNA, 25 bp, Homo sapien
gattagattgagtggatacctcaga

SEQ ID NO: 3635772 - DNA, 25 bp, Homo sapien
ggaaggagtacattgtggattagat

SEQ ID NO: 3635773 - DNA, 25 bp, Homo sapien
ttgtggattagattgagtggatacc

SEQ ID NO: 3635774 - DNA, 25 bp, Homo sapien
tcagcagctcaggttaattggtctc

SEQ ID NO: 3635775 - DNA, 25 bp, Homo sapien
tcagccaggtatcattaggagccgc

SEQ ID NO: 3635776 - DNA, 25 bp, Homo sapien
ggttgtatgggaactcgaagcacta

SEQ ID NO: 3635777 - DNA, 25 bp, Homo sapien
cacagcataagggaagcttctcaga

SEQ ID NO: 3635778 - DNA, 25 bp, Homo sapien
tgctcataaaatctgaatgtctcca

SEQ ID NO: 3635779 - DNA, 25 bp, Homo sapien
ctgctcataaaatctgaatgtctcc

SEQ ID NO: 3635780 - DNA, 25 bp, Homo sapien
gctcataaaatctgaatgtctccat

SEQ ID NO: 3635781 - DNA, 25 bp, Homo sapien
tcttaggatgaccattagaattaga

SEQ ID NO: 3635782 - DNA, 25 bp, Homo sapien
gattacaatgtggacaataatacac

SEQ ID NO: 3635783 - DNA, 25 bp, Homo sapien
tatgttgtacttcaccataaaaaga

SEQ ID NO: 3635784 - DNA, 25 bp, Homo sapien
tgtttggcgataaattatagaacca

SEQ ID NO: 3635785 - DNA, 25 bp, Homo sapien
tcacacagataacagaccccggaat

SEQ ID NO: 3635786 - DNA, 25 bp, Homo sapien
atcacacagataacagaccccggaa

SEQ ID NO: 3635787 - DNA, 25 bp, Homo sapien
catcacacagataacagaccccgga

SEQ ID NO: 3635788 - DNA, 25 bp, Homo sapien
tcatcacacagataacagaccccgg

SEQ ID NO: 3635789 - DNA, 25 bp, Homo sapien
gacctgtagtcagctgtcttcactc

SEQ ID NO: 3635790 - DNA, 25 bp, Homo sapien
tgtcgcaccggcccacaacaaaaat

SEQ ID NO: 3635791 - DNA, 25 bp, Homo sapien
tgagattatgggaatgagctgtcgc

SEQ ID NO: 3635792 - DNA, 25 bp, Homo sapien
ggactgggtcctttgaggctgcggg

SEQ ID NO: 3635793 - DNA, 25 bp, Homo sapien
atagttccttaggctgtacagaaag

SEQ ID NO: 3635794 - DNA, 25 bp, Homo sapien
attggctcatagttccttaggctgt

SEQ ID NO: 3635795 - DNA, 25 bp, Homo sapien
ttcattggctcatagttccttaggc

SEQ ID NO: 3635796 - DNA, 25 bp, Homo sapien
ggtttcattggctcatagttcctta

SEQ ID NO: 3635797 - DNA, 25 bp, Homo sapien
gagacagttcccacaggagctcaga

SEQ ID NO: 3635798 - DNA, 25 bp, Homo sapien
ggagctcagaaacgtcctccacgta

SEQ ID NO: 3635799 - DNA, 25 bp, Homo sapien
tacctgtgccacgaccacaggatgc

SEQ ID NO: 3635800 - DNA, 25 bp, Homo sapien
aacgtcttgcttccctccaacggtg

SEQ ID NO: 3635801 - DNA, 25 bp, Homo sapien
aaaagtatcctcgatcacttgacac

SEQ ID NO: 3635802 - DNA, 25 bp, Homo sapien
tcaaaagtatcctcgatcacttgac

SEQ ID NO: 3635803 - DNA, 25 bp, Homo sapien
aagtatcctcgatcacttgacacac

SEQ ID NO: 3635804 - DNA, 25 bp, Homo sapien
aaagtatcctcgatcacttgacaca

SEQ ID NO: 3635805 - DNA, 25 bp, Homo sapien
tctttttccgcaccaacagatccgg

SEQ ID NO: 3635806 - DNA, 25 bp, Homo sapien
gatccggtatgtcttcagggagcac

SEQ ID NO: 3635807 - DNA, 25 bp, Homo sapien
gatgcaccagcatgggttttaggct

SEQ ID NO: 3635808 - DNA, 25 bp, Homo sapien
cgttagagatccatctggaaggcca

SEQ ID NO: 3635809 - DNA, 25 bp, Homo sapien
ggttcgtctagagcagcaacacaac

SEQ ID NO: 3635810 - DNA, 25 bp, Homo sapien
gaagctggttcgtctagagcagcaa

SEQ ID NO: 3635811 - DNA, 25 bp, Homo sapien
agacaggaatagaagctggttcgtc

SEQ ID NO: 3635812 - DNA, 25 bp, Homo sapien
gcagcaacacaaccaacgttgaaaa

SEQ ID NO: 3635813 - DNA, 25 bp, Homo sapien
ttcccgtttcggagcagttctggcc

SEQ ID NO: 3635814 - DNA, 25 bp, Homo sapien
taaaggttgcataggcacagagaga

SEQ ID NO: 3635815 - DNA, 25 bp, Homo sapien
gaaaagctggctttgacttttcaag

SEQ ID NO: 3635816 - DNA, 25 bp, Homo sapien
gcagctcatgctgctaaaggttgca

SEQ ID NO: 3635817 - DNA, 25 bp, Homo sapien
ctgtggcaccagacggtggagcctc

SEQ ID NO: 3635818 - DNA, 25 bp, Homo sapien
gagcctcagattctcaatcgggaca

SEQ ID NO: 3635819 - DNA, 25 bp, Homo sapien
tcaatcgggacaatacagacaacca

SEQ ID NO: 3635820 - DNA, 25 bp, Homo sapien
gacggtggagcctcagattctcaat

SEQ ID NO: 3635821 - DNA, 25 bp, Homo sapien
aaacaccagcgcagagactcgcgat

SEQ ID NO: 3635822 - DNA, 25 bp, Homo sapien
taaacaccagcgcagagactcgcga

SEQ ID NO: 3635823 - DNA, 25 bp, Homo sapien
ttggctgagataaaacctgccttgt

SEQ ID NO: 3635824 - DNA, 25 bp, Homo sapien
ccaccttggctgagataaaacctgc

SEQ ID NO: 3635825 - DNA, 25 bp, Homo sapien
tagaccttaggatcttgaaatgccc

SEQ ID NO: 3635826 - DNA, 25 bp, Homo sapien
aatgccccttttcctgctacgatag

SEQ ID NO: 3635827 - DNA, 25 bp, Homo sapien
cattttacatgaccacacagggaca

SEQ ID NO: 3635828 - DNA, 25 bp, Homo sapien
tgatttggtcaaaaagccctgttcc

SEQ ID NO: 3635829 - DNA, 25 bp, Homo sapien
catggatgggcaaggggtcctcccc

SEQ ID NO: 3635830 - DNA, 25 bp, Homo sapien
aggaggagccctgcacccatgcctt

SEQ ID NO: 3635831 - DNA, 25 bp, Homo sapien
ctatgggtgcatggatgggcaaggg

SEQ ID NO: 3635832 - DNA, 25 bp, Homo sapien
catgccttcccagaaagaggagtgc

SEQ ID NO: 3635833 - DNA, 25 bp, Homo sapien
tggggcttctaccaacagaaggaag

SEQ ID NO: 3635834 - DNA, 25 bp, Homo sapien
ggaggagccagttacagtgatccaa

SEQ ID NO: 3635835 - DNA, 25 bp, Homo sapien
gatggttgtcctcatcacggaggag

SEQ ID NO: 3635836 - DNA, 25 bp, Homo sapien
ggtggtgtatgctccaatctcccca

SEQ ID NO: 3635837 - DNA, 25 bp, Homo sapien
gagagtcacggtggagctccttact

SEQ ID NO: 3635838 - DNA, 25 bp, Homo sapien
gagctccttactggtaactccatat

SEQ ID NO: 3635839 - DNA, 25 bp, Homo sapien
acacttcctcgtcggggcaacggag

SEQ ID NO: 3635840 - DNA, 25 bp, Homo sapien
ttggatggagccagaaacgttttca

SEQ ID NO: 3635841 - DNA, 25 bp, Homo sapien
tcaatagttgttgcgcagtgctcag

SEQ ID NO: 3635842 - DNA, 25 bp, Homo sapien
gacactgcggtaactggaaatccct

SEQ ID NO: 3635843 - DNA, 25 bp, Homo sapien
agaggcctgcccaaatgttacccgg

SEQ ID NO: 3635844 - DNA, 25 bp, Homo sapien
ttagccaagtgcgacggagaaggac

SEQ ID NO: 3635845 - DNA, 25 bp, Homo sapien
cactgtggtcgttcccattaaccag

SEQ ID NO: 3635846 - DNA, 25 bp, Homo sapien
ctccaggggtccaacaggcgcctga

SEQ ID NO: 3635847 - DNA, 25 bp, Homo sapien
gatgcccactgtggtcgttcccatt

SEQ ID NO: 3635848 - DNA, 25 bp, Homo sapien
tcgttcccattaaccaggctccagg

SEQ ID NO: 3635849 - DNA, 25 bp, Homo sapien
gttctcaaccgtgctggcgtactga

SEQ ID NO: 3635850 - DNA, 25 bp, Homo sapien
ggcttcatatgtgaagttcgcgttg

SEQ ID NO: 3635851 - DNA, 25 bp, Homo sapien
tgacgccgtgcctgacacatgagag

SEQ ID NO: 3635852 - DNA, 25 bp, Homo sapien
agttcgcgttgaacaatagttctca

SEQ ID NO: 3635853 - DNA, 25 bp, Homo sapien
gaggactcatccccatttgcagaag

SEQ ID NO: 3635854 - DNA, 25 bp, Homo sapien
aggactcatccccatttgcagaagg

SEQ ID NO: 3635855 - DNA, 25 bp, Homo sapien
caaaattatattacatggggtggct

SEQ ID NO: 3635856 - DNA, 25 bp, Homo sapien
gtcttaatcaatgtaggctgctata

SEQ ID NO: 3635857 - DNA, 25 bp, Homo sapien
ctgtcttaatcaatgtaggctgcta

SEQ ID NO: 3635858 - DNA, 25 bp, Homo sapien
aaattatattacatggggtggctta

SEQ ID NO: 3635859 - DNA, 25 bp, Homo sapien
ggcactaaaacttatgggctgggcg

SEQ ID NO: 3635860 - DNA, 25 bp, Homo sapien
aaaaggcactaaaacttatgggctg

SEQ ID NO: 3635861 - DNA, 25 bp, Homo sapien
gtcatcagtagctggatatgaatcc

SEQ ID NO: 3635862 - DNA, 25 bp, Homo sapien
gtttggtcatcagtagctggatatg

SEQ ID NO: 3635863 - DNA, 25 bp, Homo sapien
cctcgggacataggatacctgctca

SEQ ID NO: 3635864 - DNA, 25 bp, Homo sapien
gagtgtccaatgctcctagacctgt

SEQ ID NO: 3635865 - DNA, 25 bp, Homo sapien
gggtgattgcgatatcccttccatc

SEQ ID NO: 3635866 - DNA, 25 bp, Homo sapien
gcatgagtttccattgagtgtccaa

SEQ ID NO: 3635867 - DNA, 25 bp, Homo sapien
tgcaaagtttgcaagtgccgtggaa

SEQ ID NO: 3635868 - DNA, 25 bp, Homo sapien
taagtaattactattgctaccatga

SEQ ID NO: 3635869 - DNA, 25 bp, Homo sapien
tgccgtggaagtggcagttgccaat

SEQ ID NO: 3635870 - DNA, 25 bp, Homo sapien
ctaagtaattactattgctaccatg

SEQ ID NO: 3635871 - DNA, 25 bp, Homo sapien
tataccctattatgcacaatatgag

SEQ ID NO: 3635872 - DNA, 25 bp, Homo sapien
atgcacaatatgagcaagatctgca

SEQ ID NO: 3635873 - DNA, 25 bp, Homo sapien
caatatgagcaagatctgcagaaat

SEQ ID NO: 3635874 - DNA, 25 bp, Homo sapien
tttataccctattatgcacaatatg

SEQ ID NO: 3635875 - DNA, 25 bp, Homo sapien
gttggagcgcagtagcacgatctcg

SEQ ID NO: 3635876 - DNA, 25 bp, Homo sapien
ctgcctcccaggttcaagtgattct

SEQ ID NO: 3635877 - DNA, 25 bp, Homo sapien
acccaggttggagcgcagtagcacg

SEQ ID NO: 3635878 - DNA, 25 bp, Homo sapien
ttgagagtcttgcttggtcacccag

SEQ ID NO: 3635879 - DNA, 25 bp, Homo sapien
tatttaaattgtgtagccgcagtgc

SEQ ID NO: 3635880 - DNA, 25 bp, Homo sapien
ggataacccatgacaagccagccta

SEQ ID NO: 3635881 - DNA, 25 bp, Homo sapien
caaaagtctttacctggaagcccat

SEQ ID NO: 3635882 - DNA, 25 bp, Homo sapien
tgtggagtggagataacaaggctca

SEQ ID NO: 3635883 - DNA, 25 bp, Homo sapien
gaatactccactggtctctgagcaa

SEQ ID NO: 3635884 - DNA, 25 bp, Homo sapien
tagcacgattctgggctttgcaaca

SEQ ID NO: 3635885 - DNA, 25 bp, Homo sapien
tacctaacagatgactgggcattgc

SEQ ID NO: 3635886 - DNA, 25 bp, Homo sapien
tatgcttgctacacagaatacaggg

SEQ ID NO: 3635887 - DNA, 25 bp, Homo sapien
gacacaagacagattggcatacctg

SEQ ID NO: 3635888 - DNA, 25 bp, Homo sapien
aaccctctgttagtatgtggacaca

SEQ ID NO: 3635889 - DNA, 25 bp, Homo sapien
taaaccctatttatgcaaggacagg

SEQ ID NO: 3635890 - DNA, 25 bp, Homo sapien
cagtaccagggttcagacatttcca

SEQ ID NO: 3635891 - DNA, 25 bp, Homo sapien
aacagaaaaagtcgagcttttctct

SEQ ID NO: 3635892 - DNA, 25 bp, Homo sapien
cctgtcctactcctgatacgacaat

SEQ ID NO: 3635893 - DNA, 25 bp, Homo sapien
ggactaggatttcacctgcatctaa

SEQ ID NO: 3635894 - DNA, 25 bp, Homo sapien
ctcctgatacgacaatgtatccagg

SEQ ID NO: 3635895 - DNA, 25 bp, Homo sapien
gaaggcaattaagcctgatttcctc

SEQ ID NO: 3635896 - DNA, 25 bp, Homo sapien
tgaaggcaattaagcctgatttcct

SEQ ID NO: 3635897 - DNA, 25 bp, Homo sapien
ctagagtaagatattgatctgttta

SEQ ID NO: 3635898 - DNA, 25 bp, Homo sapien
tagagtaagatattgatctgtttac

SEQ ID NO: 3635899 - DNA, 25 bp, Homo sapien
tccttgtcccaaggaccaagtttga

SEQ ID NO: 3635900 - DNA, 25 bp, Homo sapien
ctccttgtcccaaggaccaagtttg

SEQ ID NO: 3635901 - DNA, 25 bp, Homo sapien
accgtttgtccaaaacagctccttg

SEQ ID NO: 3635902 - DNA, 25 bp, Homo sapien
tttgtccaaaacagctccttgtccc

SEQ ID NO: 3635903 - DNA, 25 bp, Homo sapien
ctcagccggcatgggattgcatctt

SEQ ID NO: 3635904 - DNA, 25 bp, Homo sapien
ctgcaagctcagccggcatgggatt

SEQ ID NO: 3635905 - DNA, 25 bp, Homo sapien
caagctcagccggcatgggattgca

SEQ ID NO: 3635906 - DNA, 25 bp, Homo sapien
gccggcatgggattgcatcttctct

SEQ ID NO: 3635907 - DNA, 25 bp, Homo sapien
agatgacggaagaaggcgcgcctct

SEQ ID NO: 3635908 - DNA, 25 bp, Homo sapien
gacttttgctgggagcaagcactgt

SEQ ID NO: 3635909 - DNA, 25 bp, Homo sapien
gcgcctctgcgagttggtgaaagaa

SEQ ID NO: 3635910 - DNA, 25 bp, Homo sapien
taagacaagaagacgggcatctggg

SEQ ID NO: 3635911 - DNA, 25 bp, Homo sapien
tttaacccctgacgacaatctctga

SEQ ID NO: 3635912 - DNA, 25 bp, Homo sapien
cactctactgcggatgaagctttga

SEQ ID NO: 3635913 - DNA, 25 bp, Homo sapien
caagtttgtttctgtacagcaccca

SEQ ID NO: 3635914 - DNA, 25 bp, Homo sapien
tttggaaatggagtaggcgccaccc

SEQ ID NO: 3635915 - DNA, 25 bp, Homo sapien
gggccagtctcttcgatgccggtcc

SEQ ID NO: 3635916 - DNA, 25 bp, Homo sapien
cagtgcgggggccagtctcttcgat

SEQ ID NO: 3635917 - DNA, 25 bp, Homo sapien
tgtcccccttctaggggacgcagtg

SEQ ID NO: 3635918 - DNA, 25 bp, Homo sapien
agtctcttcgatgccggtcctctca

SEQ ID NO: 3635919 - DNA, 25 bp, Homo sapien
ggtttgtcagttgcctaaggtccaa

SEQ ID NO: 3635920 - DNA, 25 bp, Homo sapien
caggagctgagggtaattctcttca

SEQ ID NO: 3635921 - DNA, 25 bp, Homo sapien
gatgccttgtagagtccaaagctga

SEQ ID NO: 3635922 - DNA, 25 bp, Homo sapien
ccaaagctgactgtctgggactagt

SEQ ID NO: 3635923 - DNA, 25 bp, Homo sapien
tgagcatctatgttgtgcacggcac

SEQ ID NO: 3635924 - DNA, 25 bp, Homo sapien
gatgaagggcttttagtacccactc

SEQ ID NO: 3635925 - DNA, 25 bp, Homo sapien
gcacggcactatgctagcttctgta

SEQ ID NO: 3635926 - DNA, 25 bp, Homo sapien
gctgaaaacaggcaaccgagataaa

SEQ ID NO: 3635927 - DNA, 25 bp, Homo sapien
tgagacctccaagtaaatgcatgag

SEQ ID NO: 3635928 - DNA, 25 bp, Homo sapien
ggtcctctcgcccttactgctgtta

SEQ ID NO: 3635929 - DNA, 25 bp, Homo sapien
tgtcaccagctaagatagactgtgt

SEQ ID NO: 3635930 - DNA, 25 bp, Homo sapien
tgttaccctagtgcagaacatgagc

SEQ ID NO: 3635931 - DNA, 25 bp, Homo sapien
cagaggaaccacaaaatcgacggca

SEQ ID NO: 3635932 - DNA, 25 bp, Homo sapien
taagccctggtttgggtcaaatgta

SEQ ID NO: 3635933 - DNA, 25 bp, Homo sapien
gaatattcaacaggtgcatccagct

SEQ ID NO: 3635934 - DNA, 25 bp, Homo sapien
ccacagagccggaaagtatgcagat

SEQ ID NO: 3635935 - DNA, 25 bp, Homo sapien
gagcaaggcgacagttttcccaggt

SEQ ID NO: 3635936 - DNA, 25 bp, Homo sapien
tagctgaggcatcttatggaaagcc

SEQ ID NO: 3635937 - DNA, 25 bp, Homo sapien
tgaacccttgggaatacatcgagca

SEQ ID NO: 3635938 - DNA, 25 bp, Homo sapien
tgagaaatggatttggtccgccagc

SEQ ID NO: 3635939 - DNA, 25 bp, Homo sapien
tctgggaacatgttgggaatgacct

SEQ ID NO: 3635940 - DNA, 25 bp, Homo sapien
cagctctgccgtttatcaacagggc

SEQ ID NO: 3635941 - DNA, 25 bp, Homo sapien
cctttcttgggaggacagttacctg

SEQ ID NO: 3635942 - DNA, 25 bp, Homo sapien
aagagcgcacctgttgaataccaga

SEQ ID NO: 3635943 - DNA, 25 bp, Homo sapien
cgtctttggatattctacaacgtga

SEQ ID NO: 3635944 - DNA, 25 bp, Homo sapien
taattagcagcctcaagtgggacca

SEQ ID NO: 3635945 - DNA, 25 bp, Homo sapien
ccatatgactaagggccaaagaaca

SEQ ID NO: 3635946 - DNA, 25 bp, Homo sapien
gaagattagttttcatgcacatgca

SEQ ID NO: 3635947 - DNA, 25 bp, Homo sapien
tcttttgagcaatgaggtacgtgat

SEQ ID NO: 3635948 - DNA, 25 bp, Homo sapien
tcaagaagacatggataggcagggt

SEQ ID NO: 3635949 - DNA, 25 bp, Homo sapien
caatcctgttcacatgtctggtgga

SEQ ID NO: 3635950 - DNA, 25 bp, Homo sapien
tctggtggaacccagagcgacctct

SEQ ID NO: 3635951 - DNA, 25 bp, Homo sapien
cattcaagattcgaagtggtcccct

SEQ ID NO: 3635952 - DNA, 25 bp, Homo sapien
aagtgttcgccagccccatgtagct

SEQ ID NO: 3635953 - DNA, 25 bp, Homo sapien
cccctggcgggaacgttagatctat

SEQ ID NO: 3635954 - DNA, 25 bp, Homo sapien
tactggaaagcgtgtacatagcgtc

SEQ ID NO: 3635955 - DNA, 25 bp, Homo sapien
ccagcttagaataggagtcgtcctt

SEQ ID NO: 3635956 - DNA, 25 bp, Homo sapien
ggcaaaggtccaccacgtcaagtgc

SEQ ID NO: 3635957 - DNA, 25 bp, Homo sapien
ttctttgctttgcatcagcgccggg

SEQ ID NO: 3635958 - DNA, 25 bp, Homo sapien
gtcaagtgccacgagttcactgcca

SEQ ID NO: 3635959 - DNA, 25 bp, Homo sapien
ctggaatgttacagcaggtactcag

SEQ ID NO: 3635960 - DNA, 25 bp, Homo sapien
acagcaggtactcagagctggtcct

SEQ ID NO: 3635961 - DNA, 25 bp, Homo sapien
gtcctcctccatcccttgcccatct

SEQ ID NO: 3635962 - DNA, 25 bp, Homo sapien
ggaatgttacagcaggtactcagag

SEQ ID NO: 3635963 - DNA, 25 bp, Homo sapien
aatctgcggacactacagaaaagac

SEQ ID NO: 3635964 - DNA, 25 bp, Homo sapien
gcaaagtattatgtcccatctgtgg

SEQ ID NO: 3635965 - DNA, 25 bp, Homo sapien
gggttgccataaaacaaatctgcgg

SEQ ID NO: 3635966 - DNA, 25 bp, Homo sapien
tatttccagcctagttccaggtaaa

SEQ ID NO: 3635967 - DNA, 25 bp, Homo sapien
tatagggtccccataataattcact

SEQ ID NO: 3635968 - DNA, 25 bp, Homo sapien
acctgtatagggtccccataataat

SEQ ID NO: 3635969 - DNA, 25 bp, Homo sapien
ctaatgtagaaattgtgtatataac

SEQ ID NO: 3635970 - DNA, 25 bp, Homo sapien
tatagtactatagtctaatgtagaa

SEQ ID NO: 3635971 - DNA, 25 bp, Homo sapien
tcagcttgcctgatgtgatattgtc

SEQ ID NO: 3635972 - DNA, 25 bp, Homo sapien
ttcagcttgcctgatgtgatattgt

SEQ ID NO: 3635973 - DNA, 25 bp, Homo sapien
tttcagcttgcctgatgtgatattg

SEQ ID NO: 3635974 - DNA, 25 bp, Homo sapien
tccttgcagaacagccactgtcaaa

SEQ ID NO: 3635975 - DNA, 25 bp, Homo sapien
ctgtcaaaacacgtctcattaattc

SEQ ID NO: 3635976 - DNA, 25 bp, Homo sapien
tttccgtggtcccacagcatcctgt

SEQ ID NO: 3635977 - DNA, 25 bp, Homo sapien
tctgacacatcgattttctttccct

SEQ ID NO: 3635978 - DNA, 25 bp, Homo sapien
tccccatctgagctattaattctat

SEQ ID NO: 3635979 - DNA, 25 bp, Homo sapien
cccatctgagctattaattctatag

SEQ ID NO: 3635980 - DNA, 25 bp, Homo sapien
ctgtccccatctgagctattaattc

SEQ ID NO: 3635981 - DNA, 25 bp, Homo sapien
tgtccccatctgagctattaattct

SEQ ID NO: 3635982 - DNA, 25 bp, Homo sapien
cttagagtaagagtgtctgggacat

SEQ ID NO: 3635983 - DNA, 25 bp, Homo sapien
tctcctgctcgtggacttagagtaa

SEQ ID NO: 3635984 - DNA, 25 bp, Homo sapien
ccttttgacatcttcgatgatcaag

SEQ ID NO: 3635985 - DNA, 25 bp, Homo sapien
ctgggacatccaggtatatactatt

SEQ ID NO: 3635986 - DNA, 25 bp, Homo sapien
cagattgtgggtgattacaacattt

SEQ ID NO: 3635987 - DNA, 25 bp, Homo sapien
gcagattgtgggtgattacaacatt

SEQ ID NO: 3635988 - DNA, 25 bp, Homo sapien
caaaataataccagcagattgtggg

SEQ ID NO: 3635989 - DNA, 25 bp, Homo sapien
agattgtgggtgattacaacatttt

SEQ ID NO: 3635990 - DNA, 25 bp, Homo sapien
tgtgggagatccaacacataagccc

SEQ ID NO: 3635991 - DNA, 25 bp, Homo sapien
tttgcacagttttgtgggttgtggg

SEQ ID NO: 3635992 - DNA, 25 bp, Homo sapien
ttttgtgggttgtgggagatccaac

SEQ ID NO: 3635993 - DNA, 25 bp, Homo sapien
tccaacacataagccctcttggcta

SEQ ID NO: 3635994 - DNA, 25 bp, Homo sapien
tggtgtgctcttcctcactgagcac

SEQ ID NO: 3635995 - DNA, 25 bp, Homo sapien
cttgacgcccctgttttgggtggtg

SEQ ID NO: 3635996 - DNA, 25 bp, Homo sapien
cctgttttgggtggtgtgctcttcc

SEQ ID NO: 3635997 - DNA, 25 bp, Homo sapien
gagtccctggccccaacttgacgcc

SEQ ID NO: 3635998 - DNA, 25 bp, Homo sapien
aggttaagaaagtggagcccaggct

SEQ ID NO: 3635999 - DNA, 25 bp, Homo sapien
tctattcatgggatcaaaggttaag

SEQ ID NO: 3636000 - DNA, 25 bp, Homo sapien
ggaaccagccatgtctctattcatg

SEQ ID NO: 3636001 - DNA, 25 bp, Homo sapien
tctgacgccaagttcatgggaacca

SEQ ID NO: 3636002 - DNA, 25 bp, Homo sapien
gtccctgatgcttgtcaaattgttc

SEQ ID NO: 3636003 - DNA, 25 bp, Homo sapien
cccatctttctgtccctgatgcttg

SEQ ID NO: 3636004 - DNA, 25 bp, Homo sapien
actgcgccccatctttctgtccctg

SEQ ID NO: 3636005 - DNA, 25 bp, Homo sapien
tctttctgtccctgatgcttgtcaa

SEQ ID NO: 3636006 - DNA, 25 bp, Homo sapien
tggaggcagtaagccccaagagagc

SEQ ID NO: 3636007 - DNA, 25 bp, Homo sapien
tccaaaccatccccggtgaggaagc

SEQ ID NO: 3636008 - DNA, 25 bp, Homo sapien
tgctcctggaggcagtaagccccaa

SEQ ID NO: 3636009 - DNA, 25 bp, Homo sapien
gaggcacaatgaagggtgtttcagc

SEQ ID NO: 3636010 - DNA, 25 bp, Homo sapien
cagccaggaaggatgcgcggtgcat

SEQ ID NO: 3636011 - DNA, 25 bp, Homo sapien
cccagccaggaaggatgcgcggtgc

SEQ ID NO: 3636012 - DNA, 25 bp, Homo sapien
ccagccaggaaggatgcgcggtgca

SEQ ID NO: 3636013 - DNA, 25 bp, Homo sapien
catcagccaaacaaggccctgtcat

SEQ ID NO: 3636014 - DNA, 25 bp, Homo sapien
ctgctcagagcatcagccaaacaag

SEQ ID NO: 3636015 - DNA, 25 bp, Homo sapien
cagagcatcagccaaacaaggccct

SEQ ID NO: 3636016 - DNA, 25 bp, Homo sapien
gagcatcagccaaacaaggccctgt

SEQ ID NO: 3636017 - DNA, 25 bp, Homo sapien
taaacagacaaatctccccgatgaa

SEQ ID NO: 3636018 - DNA, 25 bp, Homo sapien
tcacaacaggaagggctggcacctt

SEQ ID NO: 3636019 - DNA, 25 bp, Homo sapien
agagacagctctctcagtgtcgtgg

SEQ ID NO: 3636020 - DNA, 25 bp, Homo sapien
ttttggtggaaacataaagccatcc

SEQ ID NO: 3636021 - DNA, 25 bp, Homo sapien
tttctacgggttcattttgtcctga

SEQ ID NO: 3636022 - DNA, 25 bp, Homo sapien
gatggttccatgatgcgctgcctcc

SEQ ID NO: 3636023 - DNA, 25 bp, Homo sapien
ttttgtcctgatggttccatgatgc

SEQ ID NO: 3636024 - DNA, 25 bp, Homo sapien
tgtcctgatggttccatgatgcgct

SEQ ID NO: 3636025 - DNA, 25 bp, Homo sapien
tttcctttccggtatctccagatgc

SEQ ID NO: 3636026 - DNA, 25 bp, Homo sapien
gagcgtccacctcaatccctctctc

SEQ ID NO: 3636027 - DNA, 25 bp, Homo sapien
tgccaggtccgtggctcaatgtatt

SEQ ID NO: 3636028 - DNA, 25 bp, Homo sapien
tccagatgccaggtccgtggctcaa

SEQ ID NO: 3636029 - DNA, 25 bp, Homo sapien
cactgaccggggcatttatgaggct

SEQ ID NO: 3636030 - DNA, 25 bp, Homo sapien
gggtccagcactgaccggggcattt

SEQ ID NO: 3636031 - DNA, 25 bp, Homo sapien
tgaccggggcatttatgaggctgcc

SEQ ID NO: 3636032 - DNA, 25 bp, Homo sapien
gtccagcactgaccggggcatttat

SEQ ID NO: 3636033 - DNA, 25 bp, Homo sapien
tgagcataatcatcaagccgggagc

SEQ ID NO: 3636034 - DNA, 25 bp, Homo sapien
aaaggctgaaaaaccgcatggaact

SEQ ID NO: 3636035 - DNA, 25 bp, Homo sapien
ctgaagcgtgcgtctctctgctgaa

SEQ ID NO: 3636036 - DNA, 25 bp, Homo sapien
tgctaagatccagtcggcttggctg

SEQ ID NO: 3636037 - DNA, 25 bp, Homo sapien
ttcactttcgactgaatatcttcac

SEQ ID NO: 3636038 - DNA, 25 bp, Homo sapien
gccaaagtgattgcatgcctttaaa

SEQ ID NO: 3636039 - DNA, 25 bp, Homo sapien
tttcgactgaatatcttcactcttg

SEQ ID NO: 3636040 - DNA, 25 bp, Homo sapien
tatcttcactcttgagccaaagtga

SEQ ID NO: 3636041 - DNA, 25 bp, Homo sapien
catagtaggcatgcagtagacctcc

SEQ ID NO: 3636042 - DNA, 25 bp, Homo sapien
tgcagtagagctcagtcatagtagg

SEQ ID NO: 3636043 - DNA, 25 bp, Homo sapien
tagagctcagtcatagtaggcatgc

SEQ ID NO: 3636044 - DNA, 25 bp, Homo sapien
agtcatagtaggcatgcagtagacc

SEQ ID NO: 3636045 - DNA, 25 bp, Homo sapien
tcctagggctgtagttaatgtgtcc

SEQ ID NO: 3636046 - DNA, 25 bp, Homo sapien
catttcaagctcctagggctgtagt

SEQ ID NO: 3636047 - DNA, 25 bp, Homo sapien
tagttaatgtgtcctgtcataacca

SEQ ID NO: 3636048 - DNA, 25 bp, Homo sapien
tggatacatttcaagctcctagggc

SEQ ID NO: 3636049 - DNA, 25 bp, Homo sapien
gggtccttttcgcatccagaccagg

SEQ ID NO: 3636050 - DNA, 25 bp, Homo sapien
gaatattttgtagctgttttgaggg

SEQ ID NO: 3636051 - DNA, 25 bp, Homo sapien
gatgtctaggattccccctgattcg

SEQ ID NO: 3636052 - DNA, 25 bp, Homo sapien
tgggagacaaggttgagtgcattag

SEQ ID NO: 3636053 - DNA, 25 bp, Homo sapien
ttggtcatcagtgtgttcctcccct

SEQ ID NO: 3636054 - DNA, 25 bp, Homo sapien
cagtaatcgaggacaggtggtcgct

SEQ ID NO: 3636055 - DNA, 25 bp, Homo sapien
tcctggccagtgtcgtctgcttggt

SEQ ID NO: 3636056 - DNA, 25 bp, Homo sapien
atattaggaacccatgaggttgtcc

SEQ ID NO: 3636057 - DNA, 25 bp, Homo sapien
ttcctgcaaccagatgtgccgtgag

SEQ ID NO: 3636058 - DNA, 25 bp, Homo sapien
accagatgtgccgtgagcacacatg

SEQ ID NO: 3636059 - DNA, 25 bp, Homo sapien
gtgccgtgagcacacatgcatcctg

SEQ ID NO: 3636060 - DNA, 25 bp, Homo sapien
tgacttcctgcaaccagatgtgccg

SEQ ID NO: 3636061 - DNA, 25 bp, Homo sapien
caaattcaggatgccgtagctctgt

SEQ ID NO: 3636062 - DNA, 25 bp, Homo sapien
cagtgtctacacataggctgatgag

SEQ ID NO: 3636063 - DNA, 25 bp, Homo sapien
gcttccctgagaaagtacaagtttc

SEQ ID NO: 3636064 - DNA, 25 bp, Homo sapien
aaacacgccgctctgcaaattcagg

SEQ ID NO: 3636065 - DNA, 25 bp, Homo sapien
agtgacctgcgattttcttctacac

SEQ ID NO: 3636066 - DNA, 25 bp, Homo sapien
tttcagtgacctgcgattttcttct

SEQ ID NO: 3636067 - DNA, 25 bp, Homo sapien
aaaatgtcaatatccaggcaagact

SEQ ID NO: 3636068 - DNA, 25 bp, Homo sapien
aaatgtcaatatccaggcaagactc

SEQ ID NO: 3636069 - DNA, 25 bp, Homo sapien
cttttccttctcacctgaacgaaag

SEQ ID NO: 3636070 - DNA, 25 bp, Homo sapien
gggtttctgggacgcaggtcgcacg

SEQ ID NO: 3636071 - DNA, 25 bp, Homo sapien
caggtcgcacgggatgcgggatgct

SEQ ID NO: 3636072 - DNA, 25 bp, Homo sapien
atgcgggatgctggcgaccttagcc

SEQ ID NO: 3636073 - DNA, 25 bp, Homo sapien
tggagcgccgtttcgttttcagttg

SEQ ID NO: 3636074 - DNA, 25 bp, Homo sapien
tccagttcgcagctgggcgacaagt

SEQ ID NO: 3636075 - DNA, 25 bp, Homo sapien
gctctttccacccaatctgctggag

SEQ ID NO: 3636076 - DNA, 25 bp, Homo sapien
tgtttacaagccctttctagcgtga

SEQ ID NO: 3636077 - DNA, 25 bp, Homo sapien
tgcagcttcaagcacagtaaagttg

SEQ ID NO: 3636078 - DNA, 25 bp, Homo sapien
gtcccaccttggcaattgtgtataa

SEQ ID NO: 3636079 - DNA, 25 bp, Homo sapien
tgtgtataaaacgacaatgtgcaga

SEQ ID NO: 3636080 - DNA, 25 bp, Homo sapien
aaacgacaatgtgcagatacaggaa

SEQ ID NO: 3636081 - DNA, 25 bp, Homo sapien
tagctgttatccgtttgccatttct

SEQ ID NO: 3636082 - DNA, 25 bp, Homo sapien
catcttctaggcacagtagctgtta

SEQ ID NO: 3636083 - DNA, 25 bp, Homo sapien
cttctttgcactgtaacaggatccg

SEQ ID NO: 3636084 - DNA, 25 bp, Homo sapien
tcttctttgcactgtaacaggatcc

SEQ ID NO: 3636085 - DNA, 25 bp, Homo sapien
gccacgtttatataactaagagaca

SEQ ID NO: 3636086 - DNA, 25 bp, Homo sapien
acgtttatataactaagagacagtg

SEQ ID NO: 3636087 - DNA, 25 bp, Homo sapien
cagccacgtttatataactaagaga

SEQ ID NO: 3636088 - DNA, 25 bp, Homo sapien
gcagccacgtttatataactaagag

SEQ ID NO: 3636089 - DNA, 25 bp, Homo sapien
tccgggagcagacacataggatttc

SEQ ID NO: 3636090 - DNA, 25 bp, Homo sapien
aagaaaagcaaagtcgtgtcctggg

SEQ ID NO: 3636091 - DNA, 25 bp, Homo sapien
tattccaggaaacatcagggcagaa

SEQ ID NO: 3636092 - DNA, 25 bp, Homo sapien
gaagtgaactgaatagggcggctac

SEQ ID NO: 3636093 - DNA, 25 bp, Homo sapien
cctaaatcccatatagaaggaagga

SEQ ID NO: 3636094 - DNA, 25 bp, Homo sapien
tgtatcatagcctacttcctcctga

SEQ ID NO: 3636095 - DNA, 25 bp, Homo sapien
tgcaagacgtggtctccatgggaga

SEQ ID NO: 3636096 - DNA, 25 bp, Homo sapien
tgtccttgttaagtaacactgtcct

SEQ ID NO: 3636097 - DNA, 25 bp, Homo sapien
catgtctttatttagggtaggccac

SEQ ID NO: 3636098 - DNA, 25 bp, Homo sapien
aagtatcagtggtttggtggccaaa

SEQ ID NO: 3636099 - DNA, 25 bp, Homo sapien
tcatcaaatagtgcaaactggtttc

SEQ ID NO: 3636100 - DNA, 25 bp, Homo sapien
tcttctgggtactctggtgagccac

SEQ ID NO: 3636101 - DNA, 25 bp, Homo sapien
atccaagctgtgaatttaaaatacc

SEQ ID NO: 3636102 - DNA, 25 bp, Homo sapien
tgtttgtgcctatcaactttgaccc

SEQ ID NO: 3636103 - DNA, 25 bp, Homo sapien
tccggcttgaaaatctaaagttgga

SEQ ID NO: 3636104 - DNA, 25 bp, Homo sapien
cagggtttagagctattttctggca

SEQ ID NO: 3636105 - DNA, 25 bp, Homo sapien
gtgtcaagcagtcccctaccgttta

SEQ ID NO: 3636106 - DNA, 25 bp, Homo sapien
gggtcaactggactggtgtcaagca

SEQ ID NO: 3636107 - DNA, 25 bp, Homo sapien
tgtaatagtaattgacaccgaggaa

SEQ ID NO: 3636108 - DNA, 25 bp, Homo sapien
gaaatcatggatttgagggtcaact

SEQ ID NO: 3636109 - DNA, 25 bp, Homo sapien
tccacagccataactaaaaccagat

SEQ ID NO: 3636110 - DNA, 25 bp, Homo sapien
gcatctctgtattggtagtggtaac

SEQ ID NO: 3636111 - DNA, 25 bp, Homo sapien
actgatgttacaattagcatctctg

SEQ ID NO: 3636112 - DNA, 25 bp, Homo sapien
acaaattgtacccatagaatttcca

SEQ ID NO: 3636113 - DNA, 25 bp, Homo sapien
gctggttctacccttagaatccaga

SEQ ID NO: 3636114 - DNA, 25 bp, Homo sapien
tttagaaatacttggactgactagt

SEQ ID NO: 3636115 - DNA, 25 bp, Homo sapien
gaaacaggccagaagcatatcctgt

SEQ ID NO: 3636116 - DNA, 25 bp, Homo sapien
ggactgactagttttatgctggttc

SEQ ID NO: 3636117 - DNA, 25 bp, Homo sapien
taagtgactcacacaacaggtgcac

SEQ ID NO: 3636118 - DNA, 25 bp, Homo sapien
tgtgctgcctctacgtagtgatagg

SEQ ID NO: 3636119 - DNA, 25 bp, Homo sapien
gagtaccactagaagcaaatagcag

SEQ ID NO: 3636120 - DNA, 25 bp, Homo sapien
cagcagatgagccaatccaaggtga

SEQ ID NO: 3636121 - DNA, 25 bp, Homo sapien
cagtagctactctcatgactttcca

SEQ ID NO: 3636122 - DNA, 25 bp, Homo sapien
caaagtggacctacctattacctat

SEQ ID NO: 3636123 - DNA, 25 bp, Homo sapien
ttttactggaattgacacatgcaga

SEQ ID NO: 3636124 - DNA, 25 bp, Homo sapien
tacacagctagatgaacttttccaa

SEQ ID NO: 3636125 - DNA, 25 bp, Homo sapien
tgccagtgaaaagctgaaggtgtag

SEQ ID NO: 3636126 - DNA, 25 bp, Homo sapien
ggtgtctgccagtgaaaagctgaag

SEQ ID NO: 3636127 - DNA, 25 bp, Homo sapien
gaggggatggtatctcagcagccac

SEQ ID NO: 3636128 - DNA, 25 bp, Homo sapien
acaggtgtctgccagtgaaaagctg

SEQ ID NO: 3636129 - DNA, 25 bp, Homo sapien
ccggggaggatctgtgatctgcttc

SEQ ID NO: 3636130 - DNA, 25 bp, Homo sapien
tagcctgctctcatcttggggtaaa

SEQ ID NO: 3636131 - DNA, 25 bp, Homo sapien
catcttggggtaaacgtgtatccgg

SEQ ID NO: 3636132 - DNA, 25 bp, Homo sapien
tgtatccggggaggatctgtgatct

SEQ ID NO: 3636133 - DNA, 25 bp, Homo sapien
taagctcttcccttttgcttcagga

SEQ ID NO: 3636134 - DNA, 25 bp, Homo sapien
ttaagctcttcccttttgcttcagg

SEQ ID NO: 3636135 - DNA, 25 bp, Homo sapien
agctcttcccttttgcttcaggaaa

SEQ ID NO: 3636136 - DNA, 25 bp, Homo sapien
aattaagctcttcccttttgcttca

SEQ ID NO: 3636137 - DNA, 25 bp, Homo sapien
tgcaagcttcgtggagactgagctc

SEQ ID NO: 3636138 - DNA, 25 bp, Homo sapien
tcgcagaaagaggactctgtgaccc

SEQ ID NO: 3636139 - DNA, 25 bp, Homo sapien
gggtcatacacaacatcgcagaaag

SEQ ID NO: 3636140 - DNA, 25 bp, Homo sapien
tgagctccccgaccttttagagatc

SEQ ID NO: 3636141 - DNA, 25 bp, Homo sapien
gataaagcaattgtacgggtttcca

SEQ ID NO: 3636142 - DNA, 25 bp, Homo sapien
cttagtagcatttcaaaggagggac

SEQ ID NO: 3636143 - DNA, 25 bp, Homo sapien
ctaatggtgagttgatgcgtctttc

SEQ ID NO: 3636144 - DNA, 25 bp, Homo sapien
tccaggtaagaggttcacacaatct

SEQ ID NO: 3636145 - DNA, 25 bp, Homo sapien
caagaccttggcgaaacaggagaga

SEQ ID NO: 3636146 - DNA, 25 bp, Homo sapien
gagagatgaggtatccaaatccttt

SEQ ID NO: 3636147 - DNA, 25 bp, Homo sapien
aaagcagtccatctcctattgatag

SEQ ID NO: 3636148 - DNA, 25 bp, Homo sapien
tgtaaatcgctttaaatcaaagcag

SEQ ID NO: 3636149 - DNA, 25 bp, Homo sapien
acaaaccacaatgaagagggctggg

SEQ ID NO: 3636150 - DNA, 25 bp, Homo sapien
aaggagtagggacttggaagtcatt

SEQ ID NO: 3636151 - DNA, 25 bp, Homo sapien
taactctgtgttctacaaacacaaa

SEQ ID NO: 3636152 - DNA, 25 bp, Homo sapien
aaacacaaaccacaatgaagagggc

SEQ ID NO: 3636153 - DNA, 25 bp, Homo sapien
cactataaatcttactcaagggagt

SEQ ID NO: 3636154 - DNA, 25 bp, Homo sapien
gaagctaacatcaggagcattccac

SEQ ID NO: 3636155 - DNA, 25 bp, Homo sapien
tccactataaatcttactcaaggga

SEQ ID NO: 3636156 - DNA, 25 bp, Homo sapien
ctgcgtgaagaagctaacatcagga

SEQ ID NO: 3636157 - DNA, 25 bp, Homo sapien
gccacccccactgatcagatcttgc

SEQ ID NO: 3636158 - DNA, 25 bp, Homo sapien
gccagctggcgccacccccactgat

SEQ ID NO: 3636159 - DNA, 25 bp, Homo sapien
tggcgccacccccactgatcagatc

SEQ ID NO: 3636160 - DNA, 25 bp, Homo sapien
agagcttgcagcacccgccagctgg

SEQ ID NO: 3636161 - DNA, 25 bp, Homo sapien
cagcccaccctgactaatgtatttt

SEQ ID NO: 3636162 - DNA, 25 bp, Homo sapien
tcagcccaccctgactaatgtattt

SEQ ID NO: 3636163 - DNA, 25 bp, Homo sapien
actcagcccaccctgactaatgtat

SEQ ID NO: 3636164 - DNA, 25 bp, Homo sapien
ctcagcccaccctgactaatgtatt

SEQ ID NO: 3636165 - DNA, 25 bp, Homo sapien
ccacattcgtgtcacggtccagcat

SEQ ID NO: 3636166 - DNA, 25 bp, Homo sapien
aatggccacattcgtgtcacggtcc

SEQ ID NO: 3636167 - DNA, 25 bp, Homo sapien
ggaaatggccacattcgtgtcacgg

SEQ ID NO: 3636168 - DNA, 25 bp, Homo sapien
tggccacattcgtgtcacggtccag

SEQ ID NO: 3636169 - DNA, 25 bp, Homo sapien
aaggaaactgctacctgagctgagt

SEQ ID NO: 3636170 - DNA, 25 bp, Homo sapien
cacagatagtgtccagtctaactgc

SEQ ID NO: 3636171 - DNA, 25 bp, Homo sapien
tgaatctggacacaagaccccactc

SEQ ID NO: 3636172 - DNA, 25 bp, Homo sapien
tgccccattgccctatagtaaaaac

SEQ ID NO: 3636173 - DNA, 25 bp, Homo sapien
tagtaaattggctagcacaggctta

SEQ ID NO: 3636174 - DNA, 25 bp, Homo sapien
ggttcagggtcagatacatggtcac

SEQ ID NO: 3636175 - DNA, 25 bp, Homo sapien
tgtcctttcgggctcagcttaccag

SEQ ID NO: 3636176 - DNA, 25 bp, Homo sapien
gggcagtgacccttcgttttcatct

SEQ ID NO: 3636177 - DNA, 25 bp, Homo sapien
aatattgatggagatgattctgggc

SEQ ID NO: 3636178 - DNA, 25 bp, Homo sapien
ggccaggagactatggtggctggga

SEQ ID NO: 3636179 - DNA, 25 bp, Homo sapien
ccctctttccaagatgggcttgtct

SEQ ID NO: 3636180 - DNA, 25 bp, Homo sapien
catcttgagaagattgggccaggag

SEQ ID NO: 3636181 - DNA, 25 bp, Homo sapien
tcagcaggaatggtggagtaaaaac

SEQ ID NO: 3636182 - DNA, 25 bp, Homo sapien
ccaggcagtgttgcaagcagtttat

SEQ ID NO: 3636183 - DNA, 25 bp, Homo sapien
taggctacccatgtagtcccatggt

SEQ ID NO: 3636184 - DNA, 25 bp, Homo sapien
tcagaaggagttgaaggatgtcagc

SEQ ID NO: 3636185 - DNA, 25 bp, Homo sapien
gatggaaattttgactgctaatgtc

SEQ ID NO: 3636186 - DNA, 25 bp, Homo sapien
aatattgaaggaggagaaccgaggt

SEQ ID NO: 3636187 - DNA, 25 bp, Homo sapien
tattgtataagaaacactgccccag

SEQ ID NO: 3636188 - DNA, 25 bp, Homo sapien
tgtttcccagactccgacaatgtca

SEQ ID NO: 3636189 - DNA, 25 bp, Homo sapien
gaattttgacggtgcaatctggatg

SEQ ID NO: 3636190 - DNA, 25 bp, Homo sapien
taatttcgctgaccttgaagtcagg

SEQ ID NO: 3636191 - DNA, 25 bp, Homo sapien
caacgcaacgggaacaaatgagagt

SEQ ID NO: 3636192 - DNA, 25 bp, Homo sapien
ggcgcatgatgatcgctgatgacga

SEQ ID NO: 3636193 - DNA, 25 bp, Homo sapien
gcctgcctcggcctcctgaagtgct

SEQ ID NO: 3636194 - DNA, 25 bp, Homo sapien
caaacttccaacctctggtgatccg

SEQ ID NO: 3636195 - DNA, 25 bp, Homo sapien
agccactgtgcttggcctttttttt

SEQ ID NO: 3636196 - DNA, 25 bp, Homo sapien
gggattataggtgtgagccactgtg

SEQ ID NO: 3636197 - DNA, 25 bp, Homo sapien
tgggtgacacttgtccttttcctgg

SEQ ID NO: 3636198 - DNA, 25 bp, Homo sapien
ccggtctagccttgtagccggtgcg

SEQ ID NO: 3636199 - DNA, 25 bp, Homo sapien
cattctattgagcaaggaaaagtca

SEQ ID NO: 3636200 - DNA, 25 bp, Homo sapien
gcaagtggagatatgcgagcccccg

SEQ ID NO: 3636201 - DNA, 25 bp, Homo sapien
gacaaaagtccattggagcccacag

SEQ ID NO: 3636202 - DNA, 25 bp, Homo sapien
gggccaccacacaagggctaatgta

SEQ ID NO: 3636203 - DNA, 25 bp, Homo sapien
tgaaaactacggaaccagctggtgg

SEQ ID NO: 3636204 - DNA, 25 bp, Homo sapien
taatgtaatacaactggcgccaggt

SEQ ID NO: 3636205 - DNA, 25 bp, Homo sapien
gccgtcctggaaagcaccgtctgtt

SEQ ID NO: 3636206 - DNA, 25 bp, Homo sapien
ggttcctatcccagcccttacagag

SEQ ID NO: 3636207 - DNA, 25 bp, Homo sapien
tggagtctgaagtcccgcagttggt

SEQ ID NO: 3636208 - DNA, 25 bp, Homo sapien
cacaccggcacgtagaggacattat

SEQ ID NO: 3636209 - DNA, 25 bp, Homo sapien
tctgtgttgctttgaaggatccctg

SEQ ID NO: 3636210 - DNA, 25 bp, Homo sapien
ttagaaatcatgtcccacgtagggt

SEQ ID NO: 3636211 - DNA, 25 bp, Homo sapien
gattactgggtctaaatggcacagg

SEQ ID NO: 3636212 - DNA, 25 bp, Homo sapien
ccatgagcttaaggcaggaagttaa

SEQ ID NO: 3636213 - DNA, 25 bp, Homo sapien
ttccacgtgtttcacctcctgtttc

SEQ ID NO: 3636214 - DNA, 25 bp, Homo sapien
tctgtgtggcactgtcgtgaacagg

SEQ ID NO: 3636215 - DNA, 25 bp, Homo sapien
gcatcatacttagctcctctgtgat

SEQ ID NO: 3636216 - DNA, 25 bp, Homo sapien
tcatcaggccactgacagttctgac

SEQ ID NO: 3636217 - DNA, 25 bp, Homo sapien
gtaggaaagctgataatgcagccct

SEQ ID NO: 3636218 - DNA, 25 bp, Homo sapien
taggaaagctgataatgcagccctc

SEQ ID NO: 3636219 - DNA, 25 bp, Homo sapien
agtaggaaagctgataatgcagccc

SEQ ID NO: 3636220 - DNA, 25 bp, Homo sapien
cggtttcctgtgatgatcaacagtc

SEQ ID NO: 3636221 - DNA, 25 bp, Homo sapien
gccctgacttgaccggatggtcccg

SEQ ID NO: 3636222 - DNA, 25 bp, Homo sapien
ggatggtcccggtttcctgtgatga

SEQ ID NO: 3636223 - DNA, 25 bp, Homo sapien
agcagagatgccctgacttgaccgg

SEQ ID NO: 3636224 - DNA, 25 bp, Homo sapien
tatctggttcaatgtgcagctgctc

SEQ ID NO: 3636225 - DNA, 25 bp, Homo sapien
tgcaggaggtgttaggaccttaacc

SEQ ID NO: 3636226 - DNA, 25 bp, Homo sapien
ccttaaccttccatcatccctggga

SEQ ID NO: 3636227 - DNA, 25 bp, Homo sapien
tgtgatcctaaaataatgttccaga

SEQ ID NO: 3636228 - DNA, 25 bp, Homo sapien
agcccacccttgtgataatgaccat

SEQ ID NO: 3636229 - DNA, 25 bp, Homo sapien
tggaagcccacccttgtgataatga

SEQ ID NO: 3636230 - DNA, 25 bp, Homo sapien
catggaagcccacccttgtgataat

SEQ ID NO: 3636231 - DNA, 25 bp, Homo sapien
ttcatggaagcccacccttgtgata

SEQ ID NO: 3636232 - DNA, 25 bp, Homo sapien
gtacgactacaccacttataaattg

SEQ ID NO: 3636233 - DNA, 25 bp, Homo sapien
aacgtgttacccatgatcttatcca

SEQ ID NO: 3636234 - DNA, 25 bp, Homo sapien
ggagatttggtatacaacgtgttac

SEQ ID NO: 3636235 - DNA, 25 bp, Homo sapien
gactatcatatatactcctgtacga

SEQ ID NO: 3636236 - DNA, 25 bp, Homo sapien
ctgactttccaggttgattataatc

SEQ ID NO: 3636237 - DNA, 25 bp, Homo sapien
ccccatgctccttgggagctaaaac

SEQ ID NO: 3636238 - DNA, 25 bp, Homo sapien
ctccttgggagctaaaactgacttt

SEQ ID NO: 3636239 - DNA, 25 bp, Homo sapien
caggttgattataatcacaccttcc

SEQ ID NO: 3636240 - DNA, 25 bp, Homo sapien
ctgcagatactcgtgattttatttt

SEQ ID NO: 3636241 - DNA, 25 bp, Homo sapien
tatttttgagatgctttcagtatca

SEQ ID NO: 3636242 - DNA, 25 bp, Homo sapien
tttttgagatgctttcagtatcatt

SEQ ID NO: 3636243 - DNA, 25 bp, Homo sapien
tttatttttgagatgctttcagtat

SEQ ID NO: 3636244 - DNA, 25 bp, Homo sapien
tgttccagtccagtctcatagtgat

SEQ ID NO: 3636245 - DNA, 25 bp, Homo sapien
gcatgtgctaagacccagtgtggcg

SEQ ID NO: 3636246 - DNA, 25 bp, Homo sapien
gcggaaggaactgctgtttgttgtt

SEQ ID NO: 3636247 - DNA, 25 bp, Homo sapien
tagacttaagaggttgatcccatat

SEQ ID NO: 3636248 - DNA, 25 bp, Homo sapien
gatggcattctccaaaggcgaagca

SEQ ID NO: 3636249 - DNA, 25 bp, Homo sapien
tccagcagctgaagggaagtctttt

SEQ ID NO: 3636250 - DNA, 25 bp, Homo sapien
catcgggtcatgtctgggcaaaaag

SEQ ID NO: 3636251 - DNA, 25 bp, Homo sapien
gaaggctactgaggtaatccggaca

SEQ ID NO: 3636252 - DNA, 25 bp, Homo sapien
tcttggcggatgaaaaactcactca

SEQ ID NO: 3636253 - DNA, 25 bp, Homo sapien
catcactagcaagagcaaaagctgc

SEQ ID NO: 3636254 - DNA, 25 bp, Homo sapien
tgctccgagtcttgtttttagaacc

SEQ ID NO: 3636255 - DNA, 25 bp, Homo sapien
tcttgtttttagaacctggtcgaca

SEQ ID NO: 3636256 - DNA, 25 bp, Homo sapien
tcctggccctgcatcactagcaaga

SEQ ID NO: 3636257 - DNA, 25 bp, Homo sapien
gattatgctgacaatagccattagg

SEQ ID NO: 3636258 - DNA, 25 bp, Homo sapien
ccatgtgaaggaaagtttactgcgg

SEQ ID NO: 3636259 - DNA, 25 bp, Homo sapien
tgttcctgctgtcaattagcataaa

SEQ ID NO: 3636260 - DNA, 25 bp, Homo sapien
agagaattctgataccctgttggaa

SEQ ID NO: 3636261 - DNA, 25 bp, Homo sapien
gtggcctgagttcccttcagcatct

SEQ ID NO: 3636262 - DNA, 25 bp, Homo sapien
tcgaagtggcctgagttcccttcag

SEQ ID NO: 3636263 - DNA, 25 bp, Homo sapien
tgtcgaagtggcctgagttcccttc

SEQ ID NO: 3636264 - DNA, 25 bp, Homo sapien
gaagtggcctgagttcccttcagca

SEQ ID NO: 3636265 - DNA, 25 bp, Homo sapien
cttctgatgtcacccggagagtact

SEQ ID NO: 3636266 - DNA, 25 bp, Homo sapien
acaggcatatatctattcaaccagg

SEQ ID NO: 3636267 - DNA, 25 bp, Homo sapien
caggtcttgtcaaggttcactgaca

SEQ ID NO: 3636268 - DNA, 25 bp, Homo sapien
actgtggtctagagaggtgacttgc

SEQ ID NO: 3636269 - DNA, 25 bp, Homo sapien
gacgtcaagttcacggatcatgtga

SEQ ID NO: 3636270 - DNA, 25 bp, Homo sapien
catgtgatcgtaaacagacatcaag

SEQ ID NO: 3636271 - DNA, 25 bp, Homo sapien
cggatcatgtgatcgtaaacagaca

SEQ ID NO: 3636272 - DNA, 25 bp, Homo sapien
ggctgccctgatgacgtcaagttca

SEQ ID NO: 3636273 - DNA, 25 bp, Homo sapien
ggaaactacgatgccaatatgcaat

SEQ ID NO: 3636274 - DNA, 25 bp, Homo sapien
agttcccttgcgcatgtgcttagat

SEQ ID NO: 3636275 - DNA, 25 bp, Homo sapien
tgcttagattggaaactacgatgcc

SEQ ID NO: 3636276 - DNA, 25 bp, Homo sapien
gccaatatgcaattctttgtcttag

SEQ ID NO: 3636277 - DNA, 25 bp, Homo sapien
cttggtaaccggtggagcgcctatc

SEQ ID NO: 3636278 - DNA, 25 bp, Homo sapien
actgtgtacacactaatttcaatgc

SEQ ID NO: 3636279 - DNA, 25 bp, Homo sapien
ccttggtaaccggtggagcgcctat

SEQ ID NO: 3636280 - DNA, 25 bp, Homo sapien
cactaatttcaatgctagaagaaga

SEQ ID NO: 3636281 - DNA, 25 bp, Homo sapien
atattctgatcatctgcgagaggac

SEQ ID NO: 3636282 - DNA, 25 bp, Homo sapien
catctgcgagaggacagagctctgg

SEQ ID NO: 3636283 - DNA, 25 bp, Homo sapien
cattcccaagttctgtgtccagcag

SEQ ID NO: 3636284 - DNA, 25 bp, Homo sapien
ttctgatcatctgcgagaggacaga

SEQ ID NO: 3636285 - DNA, 25 bp, Homo sapien
gaaaacatctggcatagccccaaat

SEQ ID NO: 3636286 - DNA, 25 bp, Homo sapien
gcatagccccaaatgatattttggc

SEQ ID NO: 3636287 - DNA, 25 bp, Homo sapien
acatctggcatagccccaaatgata

SEQ ID NO: 3636288 - DNA, 25 bp, Homo sapien
ttctgacctggtgggaaaacatctg

SEQ ID NO: 3636289 - DNA, 25 bp, Homo sapien
cgggaaaggtgcatggccagagcag

SEQ ID NO: 3636290 - DNA, 25 bp, Homo sapien
aattcagtccagaggcctttgatgg

SEQ ID NO: 3636291 - DNA, 25 bp, Homo sapien
caggaagttgtcaaattcagtccag

SEQ ID NO: 3636292 - DNA, 25 bp, Homo sapien
caggggcgggaaaggtgcatggcca

SEQ ID NO: 3636293 - DNA, 25 bp, Homo sapien
tcatttcttcattgagaagatccat

SEQ ID NO: 3636294 - DNA, 25 bp, Homo sapien
ttcatttcttcattgagaagatcca

SEQ ID NO: 3636295 - DNA, 25 bp, Homo sapien
cgtgtccttattcatttcttcattg

SEQ ID NO: 3636296 - DNA, 25 bp, Homo sapien
ttattcatttcttcattgagaagat

SEQ ID NO: 3636297 - DNA, 25 bp, Homo sapien
gctttctctaacacaggcaatgacc

SEQ ID NO: 3636298 - DNA, 25 bp, Homo sapien
tccattttatcccttgacctgtgtt

SEQ ID NO: 3636299 - DNA, 25 bp, Homo sapien
taacacaggcaatgaccttactgcc

SEQ ID NO: 3636300 - DNA, 25 bp, Homo sapien
tatcccttgacctgtgtttttaatc

SEQ ID NO: 3636301 - DNA, 25 bp, Homo sapien
ctcttcgtcttgcattcagggcctg

SEQ ID NO: 3636302 - DNA, 25 bp, Homo sapien
gctctgcatgccacgagagtcatcg

SEQ ID NO: 3636303 - DNA, 25 bp, Homo sapien
agggcctgccctacatatccaatct

SEQ ID NO: 3636304 - DNA, 25 bp, Homo sapien
aatctcatctaaatccatcacctgc

SEQ ID NO: 3636305 - DNA, 25 bp, Homo sapien
catctatgggcgtctgtcagcatct

SEQ ID NO: 3636306 - DNA, 25 bp, Homo sapien
tctccgagtcgagacacatagggag

SEQ ID NO: 3636307 - DNA, 25 bp, Homo sapien
gggacaaacagctcaagagccatcc

SEQ ID NO: 3636308 - DNA, 25 bp, Homo sapien
cagctctttccaacgatccttcggg

SEQ ID NO: 3636309 - DNA, 25 bp, Homo sapien
tgcctccaacagtgcaagagagcct

SEQ ID NO: 3636310 - DNA, 25 bp, Homo sapien
gagagcctctgtcaagagaccatgg

SEQ ID NO: 3636311 - DNA, 25 bp, Homo sapien
cccgtttgggaactgatgacaggat

SEQ ID NO: 3636312 - DNA, 25 bp, Homo sapien
gaccatggcattcctcccgtttggg

SEQ ID NO: 3636313 - DNA, 25 bp, Homo sapien
caagatatttcacgagtaactggat

SEQ ID NO: 3636314 - DNA, 25 bp, Homo sapien
tctgagagaacaagatatttcacga

SEQ ID NO: 3636315 - DNA, 25 bp, Homo sapien
aagtcagcacacagccgccggttga

SEQ ID NO: 3636316 - DNA, 25 bp, Homo sapien
cacagccgccggttgattctctgag

SEQ ID NO: 3636317 - DNA, 25 bp, Homo sapien
ctggctcccagaatggagtctttac

SEQ ID NO: 3636318 - DNA, 25 bp, Homo sapien
gaatggagtctttacatttaaccat

SEQ ID NO: 3636319 - DNA, 25 bp, Homo sapien
tgcactggctcccagaatggagtct

SEQ ID NO: 3636320 - DNA, 25 bp, Homo sapien
cccagaatggagtctttacatttaa

SEQ ID NO: 3636321 - DNA, 25 bp, Homo sapien
cctctgaagggagatccgcaaatcc

SEQ ID NO: 3636322 - DNA, 25 bp, Homo sapien
tcagaatgaaacacggcatttgtac

SEQ ID NO: 3636323 - DNA, 25 bp, Homo sapien
ggcatttgtactctcccttgtccac

SEQ ID NO: 3636324 - DNA, 25 bp, Homo sapien
ggcctctgaagggagatccgcaaat

SEQ ID NO: 3636325 - DNA, 25 bp, Homo sapien
ttgtctgcatgccaatggcaggagc

SEQ ID NO: 3636326 - DNA, 25 bp, Homo sapien
catcctcgttgctgggaacaatctt

SEQ ID NO: 3636327 - DNA, 25 bp, Homo sapien
tacttgtctgcatgccaatggcagg

SEQ ID NO: 3636328 - DNA, 25 bp, Homo sapien
ctgtgtgggacatcctcgttgctgg

SEQ ID NO: 3636329 - DNA, 25 bp, Homo sapien
cgtcaataactgtagatgaaaactg

SEQ ID NO: 3636330 - DNA, 25 bp, Homo sapien
tctaagactttgcactatccatgat

SEQ ID NO: 3636331 - DNA, 25 bp, Homo sapien
aaaaccgtcaataactgtagatgaa

SEQ ID NO: 3636332 - DNA, 25 bp, Homo sapien
ttggaaggctttgattgatgtgtgt

SEQ ID NO: 3636333 - DNA, 25 bp, Homo sapien
tggtgccacgtgaccttgaccttgc

SEQ ID NO: 3636334 - DNA, 25 bp, Homo sapien
aactgatggtgccacgtgaccttga

SEQ ID NO: 3636335 - DNA, 25 bp, Homo sapien
gtgtgatagaactgatggtgccacg

SEQ ID NO: 3636336 - DNA, 25 bp, Homo sapien
cgtgaccttgaccttgctatgccca

SEQ ID NO: 3636337 - DNA, 25 bp, Homo sapien
tcctgagtcgtgccagatggggtca

SEQ ID NO: 3636338 - DNA, 25 bp, Homo sapien
aggtacagaggcagatacaagagca

SEQ ID NO: 3636339 - DNA, 25 bp, Homo sapien
ctggcttggtcccaggtacagaggc

SEQ ID NO: 3636340 - DNA, 25 bp, Homo sapien
tacagaggcagatacaagagcatcc

SEQ ID NO: 3636341 - DNA, 25 bp, Homo sapien
tttgatgcctccatacaactgcacc

SEQ ID NO: 3636342 - DNA, 25 bp, Homo sapien
catttgatgcctccatacaactgca

SEQ ID NO: 3636343 - DNA, 25 bp, Homo sapien
caaggtcatttgatgcctccataca

SEQ ID NO: 3636344 - DNA, 25 bp, Homo sapien
gtcatttgatgcctccatacaactg

SEQ ID NO: 3636345 - DNA, 25 bp, Homo sapien
gacacgaggctttgaatcctcagtg

SEQ ID NO: 3636346 - DNA, 25 bp, Homo sapien
gagtccagacacgaggctttgaatc

SEQ ID NO: 3636347 - DNA, 25 bp, Homo sapien
gtccagacacgaggctttgaatcct

SEQ ID NO: 3636348 - DNA, 25 bp, Homo sapien
tcagtggggactgatttgtgacagc

SEQ ID NO: 3636349 - DNA, 25 bp, Homo sapien
ggcccagtgcgatgcctctgaacct

SEQ ID NO: 3636350 - DNA, 25 bp, Homo sapien
gctagcgaaatgcactccacatagg

SEQ ID NO: 3636351 - DNA, 25 bp, Homo sapien
taaccacttcactggtctgcttggg

SEQ ID NO: 3636352 - DNA, 25 bp, Homo sapien
cataggtgccggtttcccgcctgtt

SEQ ID NO: 3636353 - DNA, 25 bp, Homo sapien
cacgccggcatgtgcagtctgacgg

SEQ ID NO: 3636354 - DNA, 25 bp, Homo sapien
ggaaaggcgtaaatcagaaaccagc

SEQ ID NO: 3636355 - DNA, 25 bp, Homo sapien
taaatagcgctctctgttcccagtt

SEQ ID NO: 3636356 - DNA, 25 bp, Homo sapien
ccagaatgcttataaatagcgctct

SEQ ID NO: 3636357 - DNA, 25 bp, Homo sapien
ctctttccgggtgagaaggataatt

SEQ ID NO: 3636358 - DNA, 25 bp, Homo sapien
ggataatttttgactgcagcatcaa

SEQ ID NO: 3636359 - DNA, 25 bp, Homo sapien
gaaggataatttttgactgcagcat

SEQ ID NO: 3636360 - DNA, 25 bp, Homo sapien
gtctctttccgggtgagaaggataa

SEQ ID NO: 3636361 - DNA, 25 bp, Homo sapien
tatcactgtcttgtttgcctgtacc

SEQ ID NO: 3636362 - DNA, 25 bp, Homo sapien
ctatcactgtcttgtttgcctgtac

SEQ ID NO: 3636363 - DNA, 25 bp, Homo sapien
gtctgggcattagtgtgcccatgga

SEQ ID NO: 3636364 - DNA, 25 bp, Homo sapien
actggctggcccccggtttctggct

SEQ ID NO: 3636365 - DNA, 25 bp, Homo sapien
ccatggatgtggtcctgtcgcttcc

SEQ ID NO: 3636366 - DNA, 25 bp, Homo sapien
gtgcccatggatgtggtcctgtcgc

SEQ ID NO: 3636367 - DNA, 25 bp, Homo sapien
caagctgtaggccttaggactcaga

SEQ ID NO: 3636368 - DNA, 25 bp, Homo sapien
cagtgattgtcttgtgctttttatc

SEQ ID NO: 3636369 - DNA, 25 bp, Homo sapien
ccagcatatctgtttaatccagagg

SEQ ID NO: 3636370 - DNA, 25 bp, Homo sapien
gctggttcgtggtcccagtgattgt

SEQ ID NO: 3636371 - DNA, 25 bp, Homo sapien
tcttttctcagaaataaaggacagg

SEQ ID NO: 3636372 - DNA, 25 bp, Homo sapien
gagccttctccttaactcgaattag

SEQ ID NO: 3636373 - DNA, 25 bp, Homo sapien
cgaattagatgcaccattaatcttt

SEQ ID NO: 3636374 - DNA, 25 bp, Homo sapien
gctgaaataacttgcgcctcctgcc

SEQ ID NO: 3636375 - DNA, 25 bp, Homo sapien
cattcacaagggcatttagcattgc

SEQ ID NO: 3636376 - DNA, 25 bp, Homo sapien
gcattgctgcaattcttggatctaa

SEQ ID NO: 3636377 - DNA, 25 bp, Homo sapien
ggatctaatgtccttagggagttgg

SEQ ID NO: 3636378 - DNA, 25 bp, Homo sapien
gagttggatgcttgttctaatgtgc

SEQ ID NO: 3636379 - DNA, 25 bp, Homo sapien
ccttagaggatccttttaaactcat

SEQ ID NO: 3636380 - DNA, 25 bp, Homo sapien
cctttttgttcacactccacatgct

SEQ ID NO: 3636381 - DNA, 25 bp, Homo sapien
atctctgttgctctcaactcccttt

SEQ ID NO: 3636382 - DNA, 25 bp, Homo sapien
tccacaactggtcccgttctctctc

SEQ ID NO: 3636383 - DNA, 25 bp, Homo sapien
ttgcttgagaatctttgctgtgaca

SEQ ID NO: 3636384 - DNA, 25 bp, Homo sapien
gaccagtgtcattattgcttgagaa

SEQ ID NO: 3636385 - DNA, 25 bp, Homo sapien
tccaaatgaccagtgtcattattgc

SEQ ID NO: 3636386 - DNA, 25 bp, Homo sapien
gaatctttgctgtgacatagaagac

SEQ ID NO: 3636387 - DNA, 25 bp, Homo sapien
aggctacagcttgccagaaacgtca

SEQ ID NO: 3636388 - DNA, 25 bp, Homo sapien
attctttttgtcagctccatatttc

SEQ ID NO: 3636389 - DNA, 25 bp, Homo sapien
tgaggctacagcttgccagaaacgt

SEQ ID NO: 3636390 - DNA, 25 bp, Homo sapien
ctttttgtcagctccatatttcttc

SEQ ID NO: 3636391 - DNA, 25 bp, Homo sapien
gatcctccaagccagagcgtcctat

SEQ ID NO: 3636392 - DNA, 25 bp, Homo sapien
gagcgtcctatgtgtgatacccttg

SEQ ID NO: 3636393 - DNA, 25 bp, Homo sapien
tgtgtgatacccttgcgagaactca

SEQ ID NO: 3636394 - DNA, 25 bp, Homo sapien
ccaagccagagcgtcctatgtgtga

SEQ ID NO: 3636395 - DNA, 25 bp, Homo sapien
gcaatctggtacctgtttgctggca

SEQ ID NO: 3636396 - DNA, 25 bp, Homo sapien
tcgctaccagaaatcacagcatcat

SEQ ID NO: 3636397 - DNA, 25 bp, Homo sapien
tgcaatgacttaggaccagactgga

SEQ ID NO: 3636398 - DNA, 25 bp, Homo sapien
ggaatagcaggattgcaatctggta

SEQ ID NO: 3636399 - DNA, 25 bp, Homo sapien
gattcgttgcgaggtattttgcaac

SEQ ID NO: 3636400 - DNA, 25 bp, Homo sapien
caatgcccagttgcgggtttccttt

SEQ ID NO: 3636401 - DNA, 25 bp, Homo sapien
cggattcgttgcgaggtattttgca

SEQ ID NO: 3636402 - DNA, 25 bp, Homo sapien
attccaatgcccagttgcgggtttc

SEQ ID NO: 3636403 - DNA, 25 bp, Homo sapien
ttataagcaattagggacccaaatc

SEQ ID NO: 3636404 - DNA, 25 bp, Homo sapien
tataggcattaagcaataagttccc

SEQ ID NO: 3636405 - DNA, 25 bp, Homo sapien
ccgcagaatgagagcatccactcta

SEQ ID NO: 3636406 - DNA, 25 bp, Homo sapien
gccatgccacagttaatactcaata

SEQ ID NO: 3636407 - DNA, 25 bp, Homo sapien
gaaagcagaatgttagcggagcacc

SEQ ID NO: 3636408 - DNA, 25 bp, Homo sapien
gcgtattgacggctcagaagagaaa

SEQ ID NO: 3636409 - DNA, 25 bp, Homo sapien
gcggagcacctaataggacacaact

SEQ ID NO: 3636410 - DNA, 25 bp, Homo sapien
tgtctcatgtttggcggaagtctcc

SEQ ID NO: 3636411 - DNA, 25 bp, Homo sapien
tcttcccctgtgattagtcggcttg

SEQ ID NO: 3636412 - DNA, 25 bp, Homo sapien
cataagaagcccgtagaaagcggtt

SEQ ID NO: 3636413 - DNA, 25 bp, Homo sapien
cagaggtgactctgcaggaacgcgc

SEQ ID NO: 3636414 - DNA, 25 bp, Homo sapien
ccagaagctttggataatctggttc

SEQ ID NO: 3636415 - DNA, 25 bp, Homo sapien
tttatttacgaatgaggaccctgag

SEQ ID NO: 3636416 - DNA, 25 bp, Homo sapien
cctttatttacgaatgaggaccctg

SEQ ID NO: 3636417 - DNA, 25 bp, Homo sapien
ttatttacgaatgaggaccctgaga

SEQ ID NO: 3636418 - DNA, 25 bp, Homo sapien
ctttatttacgaatgaggaccctga

SEQ ID NO: 3636419 - DNA, 25 bp, Homo sapien
atttaggaaggccacacgcagagcg

SEQ ID NO: 3636420 - DNA, 25 bp, Homo sapien
ctgcaaggatctggagagaaccccg

SEQ ID NO: 3636421 - DNA, 25 bp, Homo sapien
cctcttcagcgggtggaaaatttct

SEQ ID NO: 3636422 - DNA, 25 bp, Homo sapien
gaaaatttctgacagccaggcaagg

SEQ ID NO: 3636423 - DNA, 25 bp, Homo sapien
gagatgagagaagggtggtgtgagg

SEQ ID NO: 3636424 - DNA, 25 bp, Homo sapien
agtgaggaagggctcctcatcacca

SEQ ID NO: 3636425 - DNA, 25 bp, Homo sapien
gtaaactgaggtccttcttcagaga

SEQ ID NO: 3636426 - DNA, 25 bp, Homo sapien
tcagaagtgaggaagggctcctcat

SEQ ID NO: 3636427 - DNA, 25 bp, Homo sapien
cagctgacttggattcccatggaaa

SEQ ID NO: 3636428 - DNA, 25 bp, Homo sapien
agctgacttggattcccatggaaat

SEQ ID NO: 3636429 - DNA, 25 bp, Homo sapien
gctgacttggattcccatggaaata

SEQ ID NO: 3636430 - DNA, 25 bp, Homo sapien
tgacttggattcccatggaaatatg

SEQ ID NO: 3636431 - DNA, 25 bp, Homo sapien
tggcaagggggcacatagaagccat

SEQ ID NO: 3636432 - DNA, 25 bp, Homo sapien
ctggcaagggggcacatagaagcca

SEQ ID NO: 3636433 - DNA, 25 bp, Homo sapien
gaagagtcctggttgcttcttaggg

SEQ ID NO: 3636434 - DNA, 25 bp, Homo sapien
gctttgcgtttctcagcttcccatg

SEQ ID NO: 3636435 - DNA, 25 bp, Homo sapien
tcctgacagattatgatggctttgc

SEQ ID NO: 3636436 - DNA, 25 bp, Homo sapien
aaatgggaaagcctcttagtgccac

SEQ ID NO: 3636437 - DNA, 25 bp, Homo sapien
cagaggagcttcctcgaggagacac

SEQ ID NO: 3636438 - DNA, 25 bp, Homo sapien
tgtagacaagtgcttttttgggcag

SEQ ID NO: 3636439 - DNA, 25 bp, Homo sapien
tataccaagatgcatggggtccaga

SEQ ID NO: 3636440 - DNA, 25 bp, Homo sapien
gaagggagaccttagctcatcttgg

SEQ ID NO: 3636441 - DNA, 25 bp, Homo sapien
tctgagtcacgtttatttaaaatgc

SEQ ID NO: 3636442 - DNA, 25 bp, Homo sapien
agaaagcacttgatctgattttggg

SEQ ID NO: 3636443 - DNA, 25 bp, Homo sapien
tgacgaccatatgttctgaattgtc

SEQ ID NO: 3636444 - DNA, 25 bp, Homo sapien
cagggatagttcaacacggacacac

SEQ ID NO: 3636445 - DNA, 25 bp, Homo sapien
tcagaaaagatagcgtctgataatc

SEQ ID NO: 3636446 - DNA, 25 bp, Homo sapien
tatcggcctggcaatttgcttgaag

SEQ ID NO: 3636447 - DNA, 25 bp, Homo sapien
tgataaggtatactggtgacaacat

SEQ ID NO: 3636448 - DNA, 25 bp, Homo sapien
aactcaaccgaaataaatataggct

SEQ ID NO: 3636449 - DNA, 25 bp, Homo sapien
gagtccactccgaagagatggcaaa

SEQ ID NO: 3636450 - DNA, 25 bp, Homo sapien
gattcttgtacactttttggcctga

SEQ ID NO: 3636451 - DNA, 25 bp, Homo sapien
cctgatatgagagccctgaaaaacc

SEQ ID NO: 3636452 - DNA, 25 bp, Homo sapien
cactggtgctcgatggattcttgta

SEQ ID NO: 3636453 - DNA, 25 bp, Homo sapien
gagaaagcaaccgaagccatggagg

SEQ ID NO: 3636454 - DNA, 25 bp, Homo sapien
gagtggccagttaccctcatgggca

SEQ ID NO: 3636455 - DNA, 25 bp, Homo sapien
tcccaacctagaggagaggagtggc

SEQ ID NO: 3636456 - DNA, 25 bp, Homo sapien
aagcaagttttagttcctggagcaa

SEQ ID NO: 3636457 - DNA, 25 bp, Homo sapien
tcaaaggcacggagagggaagtctc

SEQ ID NO: 3636458 - DNA, 25 bp, Homo sapien
gggaagtctctacacatagggtcaa

SEQ ID NO: 3636459 - DNA, 25 bp, Homo sapien
caaaagcaataagcaagaaccgccc

SEQ ID NO: 3636460 - DNA, 25 bp, Homo sapien
gaaagtcaagctcgacccatcagag

SEQ ID NO: 3636461 - DNA, 25 bp, Homo sapien
ccaaactcgtagtggataaaactgc

SEQ ID NO: 3636462 - DNA, 25 bp, Homo sapien
caagggaaaatgtagccgtgaagca

SEQ ID NO: 3636463 - DNA, 25 bp, Homo sapien
gcagcgcgtgtgtgtgcttcgtcac

SEQ ID NO: 3636464 - DNA, 25 bp, Homo sapien
tctgcagtttgtcctctgacctggc

SEQ ID NO: 3636465 - DNA, 25 bp, Homo sapien
cttgccagttatggttgtatctgcc

SEQ ID NO: 3636466 - DNA, 25 bp, Homo sapien
tatatggcatcaaatacttggagtg

SEQ ID NO: 3636467 - DNA, 25 bp, Homo sapien
tagcaaatgataactcctgagcctc

SEQ ID NO: 3636468 - DNA, 25 bp, Homo sapien
tatagagcacctactcttgccagtt

SEQ ID NO: 3636469 - DNA, 25 bp, Homo sapien
ggtagggcgatggagcctctgcctt

SEQ ID NO: 3636470 - DNA, 25 bp, Homo sapien
tgcaagcctgtttcacgtgacgtgt

SEQ ID NO: 3636471 - DNA, 25 bp, Homo sapien
cgtgttccgttgttgaaatgacacc

SEQ ID NO: 3636472 - DNA, 25 bp, Homo sapien
cctgcaagcctgtttcacgtgacgt

SEQ ID NO: 3636473 - DNA, 25 bp, Homo sapien
ttcacgtgacgtgttccgttgttga

SEQ ID NO: 3636474 - DNA, 25 bp, Homo sapien
tgtagaatgttaagcaggtggtccc

SEQ ID NO: 3636475 - DNA, 25 bp, Homo sapien
cactgtgagatcacaccggaggcat

SEQ ID NO: 3636476 - DNA, 25 bp, Homo sapien
tggcccacatgagcgtccagtcgat

SEQ ID NO: 3636477 - DNA, 25 bp, Homo sapien
aggacctggcatgcacactgtgaga

SEQ ID NO: 3636478 - DNA, 25 bp, Homo sapien
agaaccgtcagaacccgtctctgct

SEQ ID NO: 3636479 - DNA, 25 bp, Homo sapien
tcctggctgacgaatgatgccgtta

SEQ ID NO: 3636480 - DNA, 25 bp, Homo sapien
ttattcacccaagtcggaagccacg

SEQ ID NO: 3636481 - DNA, 25 bp, Homo sapien
tgctcttctccgtgaacgtcctggc

SEQ ID NO: 3636482 - DNA, 25 bp, Homo sapien
ttccatcccctgcaaaacatctcca

SEQ ID NO: 3636483 - DNA, 25 bp, Homo sapien
ctgcaaaacatctccacgtggcagc

SEQ ID NO: 3636484 - DNA, 25 bp, Homo sapien
cctttccatcccctgcaaaacatct

SEQ ID NO: 3636485 - DNA, 25 bp, Homo sapien
tcccctgcaaaacatctccacgtgg

SEQ ID NO: 3636486 - DNA, 25 bp, Homo sapien
tcgcacacggatctgagtgcccgcg

SEQ ID NO: 3636487 - DNA, 25 bp, Homo sapien
catggcctcgcacacggatctgagt

SEQ ID NO: 3636488 - DNA, 25 bp, Homo sapien
atggcctcgcacacggatctgagtg

SEQ ID NO: 3636489 - DNA, 25 bp, Homo sapien
cggatctgagtgcccgcgcccatgg

SEQ ID NO: 3636490 - DNA, 25 bp, Homo sapien
caagtgtgtttgaggagcagtatgg

SEQ ID NO: 3636491 - DNA, 25 bp, Homo sapien
ggtccgctacgtgtgtagtttctga

SEQ ID NO: 3636492 - DNA, 25 bp, Homo sapien
ggatcccataagtccgtagaatttc

SEQ ID NO: 3636493 - DNA, 25 bp, Homo sapien
tgcaaggcaggtccgctacgtgtgt

SEQ ID NO: 3636494 - DNA, 25 bp, Homo sapien
tctggcacctgcagcggactctcct

SEQ ID NO: 3636495 - DNA, 25 bp, Homo sapien
tgagtcagtgggcttaaattcatcg

SEQ ID NO: 3636496 - DNA, 25 bp, Homo sapien
ggcttaaattcatcggccagccgcc

SEQ ID NO: 3636497 - DNA, 25 bp, Homo sapien
tcagtgggcttaaattcatcggcca

SEQ ID NO: 3636498 - DNA, 25 bp, Homo sapien
tcttgcagacatcattcagtcgagg

SEQ ID NO: 3636499 - DNA, 25 bp, Homo sapien
cagtgttggtctcgtttctcttgca

SEQ ID NO: 3636500 - DNA, 25 bp, Homo sapien
tgctgcgtcagcactggctcagtgt

SEQ ID NO: 3636501 - DNA, 25 bp, Homo sapien
tcttgtcgatgtaagatgcgtgtgc

SEQ ID NO: 3636502 - DNA, 25 bp, Homo sapien
ttactatgactgtactctgctgggc

SEQ ID NO: 3636503 - DNA, 25 bp, Homo sapien
ctttactatgactgtactctgctgg

SEQ ID NO: 3636504 - DNA, 25 bp, Homo sapien
tactatgactgtactctgctgggct

SEQ ID NO: 3636505 - DNA, 25 bp, Homo sapien
ctatgactgtactctgctgggcttt

SEQ ID NO: 3636506 - DNA, 25 bp, Homo sapien
catccgttaccgcattattggcaga

SEQ ID NO: 3636507 - DNA, 25 bp, Homo sapien
cagcattgctaagtgattgagctca

SEQ ID NO: 3636508 - DNA, 25 bp, Homo sapien
tgtgtagacttagagggtgcagcat

SEQ ID NO: 3636509 - DNA, 25 bp, Homo sapien
tgtccacaggagtttccccatccgt

SEQ ID NO: 3636510 - DNA, 25 bp, Homo sapien
aatccacattcgctctctgtacagt

SEQ ID NO: 3636511 - DNA, 25 bp, Homo sapien
tcggatgctagcaagtcaatgttgg

SEQ ID NO: 3636512 - DNA, 25 bp, Homo sapien
ggtgtgtgttaatccacattcgctc

SEQ ID NO: 3636513 - DNA, 25 bp, Homo sapien
tggtttagttgtgatggcgcctcac

SEQ ID NO: 3636514 - DNA, 25 bp, Homo sapien
gaagtcggtatcgatggaggataat

SEQ ID NO: 3636515 - DNA, 25 bp, Homo sapien
tggttaacatcgataacatcgcatg

SEQ ID NO: 3636516 - DNA, 25 bp, Homo sapien
taacatcgataacatcgcatggaag

SEQ ID NO: 3636517 - DNA, 25 bp, Homo sapien
taacatcgcatggaagtcggtatcg

SEQ ID NO: 3636518 - DNA, 25 bp, Homo sapien
gccagagacatgagttgctgctgac

SEQ ID NO: 3636519 - DNA, 25 bp, Homo sapien
agagacatgagttgctgctgactca

SEQ ID NO: 3636520 - DNA, 25 bp, Homo sapien
ctgccagagacatgagttgctgctg

SEQ ID NO: 3636521 - DNA, 25 bp, Homo sapien
ccagagacatgagttgctgctgact

SEQ ID NO: 3636522 - DNA, 25 bp, Homo sapien
cttggcagtgggcactttccagtgg

SEQ ID NO: 3636523 - DNA, 25 bp, Homo sapien
aagctctctgtgtttactggcctcc

SEQ ID NO: 3636524 - DNA, 25 bp, Homo sapien
tcccacttgtggcagagcacgtaga

SEQ ID NO: 3636525 - DNA, 25 bp, Homo sapien
gctgttattagatccagtccaggct

SEQ ID NO: 3636526 - DNA, 25 bp, Homo sapien
ggcacaaatgtaagtgtgaatttcc

SEQ ID NO: 3636527 - DNA, 25 bp, Homo sapien
caggtctgcagtgtagactggcagc

SEQ ID NO: 3636528 - DNA, 25 bp, Homo sapien
tgtagactggcacaaatgtaagtgt

SEQ ID NO: 3636529 - DNA, 25 bp, Homo sapien
cgggtctgcagtgtagactggcaca

SEQ ID NO: 3636530 - DNA, 25 bp, Homo sapien
tccgaagattctgagagactgcagg

SEQ ID NO: 3636531 - DNA, 25 bp, Homo sapien
tgagcatccgaagattctgagagac

SEQ ID NO: 3636532 - DNA, 25 bp, Homo sapien
tcattgctgagcatccgaagattct

SEQ ID NO: 3636533 - DNA, 25 bp, Homo sapien
tgctgagcatccgaagattctgaga

SEQ ID NO: 3636534 - DNA, 25 bp, Homo sapien
gttctgcagagtacgtgctccccta

SEQ ID NO: 3636535 - DNA, 25 bp, Homo sapien
tcctgttgccattcccgtttcttta

SEQ ID NO: 3636536 - DNA, 25 bp, Homo sapien
agaagtccagttcgttgaatacccg

SEQ ID NO: 3636537 - DNA, 25 bp, Homo sapien
tgaaagcatggttctgcagagtacg

SEQ ID NO: 3636538 - DNA, 25 bp, Homo sapien
tgtcctgcccttacaaaaacgatga

SEQ ID NO: 3636539 - DNA, 25 bp, Homo sapien
gaagccgacagttgtggtggccaat

SEQ ID NO: 3636540 - DNA, 25 bp, Homo sapien
cactgttagcatgatattgaccgac

SEQ ID NO: 3636541 - DNA, 25 bp, Homo sapien
cagctgtggcaaatcattgaccctt

SEQ ID NO: 3636542 - DNA, 25 bp, Homo sapien
cttggaacctcctgaattgtacact

SEQ ID NO: 3636543 - DNA, 25 bp, Homo sapien
ggctgtaagacttcggattctttca

SEQ ID NO: 3636544 - DNA, 25 bp, Homo sapien
gatttccctagcctcactggtttct

SEQ ID NO: 3636545 - DNA, 25 bp, Homo sapien
taaataggctgtaagacttcggatt

SEQ ID NO: 3636546 - DNA, 25 bp, Homo sapien
tgggaaggctcaggtccctcaggga

SEQ ID NO: 3636547 - DNA, 25 bp, Homo sapien
gatgggtggttcatctggggctagg

SEQ ID NO: 3636548 - DNA, 25 bp, Homo sapien
aaggaacttctgttcgttgcaggca

SEQ ID NO: 3636549 - DNA, 25 bp, Homo sapien
gctgatttgcacatgacgttcttta

SEQ ID NO: 3636550 - DNA, 25 bp, Homo sapien
taaagacgctaataactgcctcatg

SEQ ID NO: 3636551 - DNA, 25 bp, Homo sapien
tccccgagactttcagtgaaggaac

SEQ ID NO: 3636552 - DNA, 25 bp, Homo sapien
gtaaatggcccaacttggagctgca

SEQ ID NO: 3636553 - DNA, 25 bp, Homo sapien
aaagtgtgccactaactgccgatgg

SEQ ID NO: 3636554 - DNA, 25 bp, Homo sapien
tggtgttccgcgaatttgccggccc

SEQ ID NO: 3636555 - DNA, 25 bp, Homo sapien
ctctggtttgtcctgtggaggcagc

SEQ ID NO: 3636556 - DNA, 25 bp, Homo sapien
taggtgacttctggggagcccatgt

SEQ ID NO: 3636557 - DNA, 25 bp, Homo sapien
ctggggagcccatgtcaagaaatac

SEQ ID NO: 3636558 - DNA, 25 bp, Homo sapien
gacttctggggagcccatgtcaaga

SEQ ID NO: 3636559 - DNA, 25 bp, Homo sapien
tctggggagcccatgtcaagaaata

SEQ ID NO: 3636560 - DNA, 25 bp, Homo sapien
agcatctgtagagaggcgtggctct

SEQ ID NO: 3636561 - DNA, 25 bp, Homo sapien
tagcatctgtagagaggcgtggctc

SEQ ID NO: 3636562 - DNA, 25 bp, Homo sapien
gcatctgtagagaggcgtggctctc

SEQ ID NO: 3636563 - DNA, 25 bp, Homo sapien
ctagcatctgtagagaggcgtggct

SEQ ID NO: 3636564 - DNA, 25 bp, Homo sapien
gcatatttaggtcttttggtcttta

SEQ ID NO: 3636565 - DNA, 25 bp, Homo sapien
agggcatatttaggtcttttggtct

SEQ ID NO: 3636566 - DNA, 25 bp, Homo sapien
gtgtaccgaatcaacatgtgacatt

SEQ ID NO: 3636567 - DNA, 25 bp, Homo sapien
gtaccgaatcaacatgtgacatttg

SEQ ID NO: 3636568 - DNA, 25 bp, Homo sapien
ctgtgtaccgaatcaacatgtgaca

SEQ ID NO: 3636569 - DNA, 25 bp, Homo sapien
taccgaatcaacatgtgacatttgg

SEQ ID NO: 3636570 - DNA, 25 bp, Homo sapien
tggtttgggcatttcccctctggcg

SEQ ID NO: 3636571 - DNA, 25 bp, Homo sapien
acagcatgatgtgtccttgtcggag

SEQ ID NO: 3636572 - DNA, 25 bp, Homo sapien
tcagcgcctggcattcatgcccggt

SEQ ID NO: 3636573 - DNA, 25 bp, Homo sapien
tgcccggttttgcaccttgttctgg

SEQ ID NO: 3636574 - DNA, 25 bp, Homo sapien
actgctctgagcctttctaactgcc

SEQ ID NO: 3636575 - DNA, 25 bp, Homo sapien
gcactgctctgagcctttctaactg

SEQ ID NO: 3636576 - DNA, 25 bp, Homo sapien
tctgagcctttctaactgccctagc

SEQ ID NO: 3636577 - DNA, 25 bp, Homo sapien
gctctgagcctttctaactgcccta

SEQ ID NO: 3636578 - DNA, 25 bp, Homo sapien
atggctttggggtacgctcactgcc

SEQ ID NO: 3636579 - DNA, 25 bp, Homo sapien
ggggtacgctcactgccttttctag

SEQ ID NO: 3636580 - DNA, 25 bp, Homo sapien
ctgccttttctagcccagctggctg

SEQ ID NO: 3636581 - DNA, 25 bp, Homo sapien
tggctggatcccttggccgtagcat

SEQ ID NO: 3636582 - DNA, 25 bp, Homo sapien
tcctgaaggagcagtgctttccaag

SEQ ID NO: 3636583 - DNA, 25 bp, Homo sapien
aaggagcagtgctttccaagccctg

SEQ ID NO: 3636584 - DNA, 25 bp, Homo sapien
gggcacgaggacaaagccctctcct

SEQ ID NO: 3636585 - DNA, 25 bp, Homo sapien
cctctcctgaaggagcagtgctttc

SEQ ID NO: 3636586 - DNA, 25 bp, Homo sapien
gagaggaataaaaccatgtggcttc

SEQ ID NO: 3636587 - DNA, 25 bp, Homo sapien
ggccagtcctctgagtaggctcaca

SEQ ID NO: 3636588 - DNA, 25 bp, Homo sapien
cctgcccatggatttagtgtgggcc

SEQ ID NO: 3636589 - DNA, 25 bp, Homo sapien
ctattttcgaatgatgagaggaata

SEQ ID NO: 3636590 - DNA, 25 bp, Homo sapien
atgtgaaaggtgagtcaatgaaaac

SEQ ID NO: 3636591 - DNA, 25 bp, Homo sapien
gaaagctatgtgaaaggtgagtcaa

SEQ ID NO: 3636592 - DNA, 25 bp, Homo sapien
gagagagagaaagcggggaggccgt

SEQ ID NO: 3636593 - DNA, 25 bp, Homo sapien
gctatgtgaaaggtgagtcaatgaa

SEQ ID NO: 3636594 - DNA, 25 bp, Homo sapien
tctaatggtacgttgcctggcttgg

SEQ ID NO: 3636595 - DNA, 25 bp, Homo sapien
tctcaggaatagagacactccctca

SEQ ID NO: 3636596 - DNA, 25 bp, Homo sapien
cattgggttaaatcttactggtgac

SEQ ID NO: 3636597 - DNA, 25 bp, Homo sapien
tcagtgcacacagtaagtcatggtg

SEQ ID NO: 3636598 - DNA, 25 bp, Homo sapien
tcaactcttcattggcacactcaac

SEQ ID NO: 3636599 - DNA, 25 bp, Homo sapien
tcagccatgagctgttcaaagccat

SEQ ID NO: 3636600 - DNA, 25 bp, Homo sapien
cacactcaactaaaaactggagctc

SEQ ID NO: 3636601 - DNA, 25 bp, Homo sapien
gaacttcatatgctcgttacccgac

SEQ ID NO: 3636602 - DNA, 25 bp, Homo sapien
aaatgaccgtggcaggttccctgcc

SEQ ID NO: 3636603 - DNA, 25 bp, Homo sapien
tgcagaaatgaccgtggcaggttcc

SEQ ID NO: 3636604 - DNA, 25 bp, Homo sapien
cagaaatgaccgtggcaggttccct

SEQ ID NO: 3636605 - DNA, 25 bp, Homo sapien
gaggctgcagaaatgaccgtggcag

SEQ ID NO: 3636606 - DNA, 25 bp, Homo sapien
tgagactgtgttgggatgaaattcc

SEQ ID NO: 3636607 - DNA, 25 bp, Homo sapien
cagaacaggtttgattgatgccggg

SEQ ID NO: 3636608 - DNA, 25 bp, Homo sapien
gctgagcattccatcacacgtgcca

SEQ ID NO: 3636609 - DNA, 25 bp, Homo sapien
catttggagatcgagcagaacaggt

SEQ ID NO: 3636610 - DNA, 25 bp, Homo sapien
tttttgcatcggcatcttcagtcca

SEQ ID NO: 3636611 - DNA, 25 bp, Homo sapien
gacatttgtggtctcatgctgaggg

SEQ ID NO: 3636612 - DNA, 25 bp, Homo sapien
ccactgtcctcagttggtgatggac

SEQ ID NO: 3636613 - DNA, 25 bp, Homo sapien
cagtccatcaaatactgtccttgaa

SEQ ID NO: 3636614 - DNA, 25 bp, Homo sapien
ttactgaagaaggtaaaagtgcggc

SEQ ID NO: 3636615 - DNA, 25 bp, Homo sapien
gtaaaagtgcggcttacatggtcat

SEQ ID NO: 3636616 - DNA, 25 bp, Homo sapien
tcgagtgatttactgaagaaggtaa

SEQ ID NO: 3636617 - DNA, 25 bp, Homo sapien
aagattcactgagtaatcgagtgat

SEQ ID NO: 3636618 - DNA, 25 bp, Homo sapien
tgacgtagtcatcgcggatttgcac

SEQ ID NO: 3636619 - DNA, 25 bp, Homo sapien
cagggccgacttctggtgtgacgta

SEQ ID NO: 3636620 - DNA, 25 bp, Homo sapien
aaaggcttcgatttacgagccgcca

SEQ ID NO: 3636621 - DNA, 25 bp, Homo sapien
atcattaccacgtgcgggcagctgc

SEQ ID NO: 3636622 - DNA, 25 bp, Homo sapien
tcttctggatgtattgtgtctagtg

SEQ ID NO: 3636623 - DNA, 25 bp, Homo sapien
tggctaataagaacaacccggacac

SEQ ID NO: 3636624 - DNA, 25 bp, Homo sapien
gagcaacttccagccaggaatgaaa

SEQ ID NO: 3636625 - DNA, 25 bp, Homo sapien
ttccttaaggttgaaatcagcattc

SEQ ID NO: 3636626 - DNA, 25 bp, Homo sapien
gtttcatgccgatgtcttcttccca

SEQ ID NO: 3636627 - DNA, 25 bp, Homo sapien
ttgtgcctccttcggcccaggactg

SEQ ID NO: 3636628 - DNA, 25 bp, Homo sapien
ttctcctcttcgcaggtggccacgg

SEQ ID NO: 3636629 - DNA, 25 bp, Homo sapien
caggactgagtttcatgccgatgtc

SEQ ID NO: 3636630 - DNA, 25 bp, Homo sapien
ggaggcaaacccagtgttctttagc

SEQ ID NO: 3636631 - DNA, 25 bp, Homo sapien
tgagatatttggttctgggaccagc

SEQ ID NO: 3636632 - DNA, 25 bp, Homo sapien
tctgaactgactcgcgatgataggt

SEQ ID NO: 3636633 - DNA, 25 bp, Homo sapien
tactcatcccacgtacaggaggagg

SEQ ID NO: 3636634 - DNA, 25 bp, Homo sapien
tattttccctgagtgatcactggag

SEQ ID NO: 3636635 - DNA, 25 bp, Homo sapien
tttccttcagttgcacacccttctc

SEQ ID NO: 3636636 - DNA, 25 bp, Homo sapien
tccacattcccggtattttccctga

SEQ ID NO: 3636637 - DNA, 25 bp, Homo sapien
tcccggtattttccctgagtgatca

SEQ ID NO: 3636638 - DNA, 25 bp, Homo sapien
tgcggttggacggacagacttgctt

SEQ ID NO: 3636639 - DNA, 25 bp, Homo sapien
agccacttgtccttgctggcagcca

SEQ ID NO: 3636640 - DNA, 25 bp, Homo sapien
tgtccttcgtgggattccaggtaca

SEQ ID NO: 3636641 - DNA, 25 bp, Homo sapien
cttgcttttagcagccacttgtcct

SEQ ID NO: 3636642 - DNA, 25 bp, Homo sapien
gcaccaggccttgagttctatttaa

SEQ ID NO: 3636643 - DNA, 25 bp, Homo sapien
gatttattaatagccatattcatgg

SEQ ID NO: 3636644 - DNA, 25 bp, Homo sapien
tctgtagtgtctagttagaggcaaa

SEQ ID NO: 3636645 - DNA, 25 bp, Homo sapien
ggcaaatgggtaatgaggagtcata

SEQ ID NO: 3636646 - DNA, 25 bp, Homo sapien
tgtagtatttaattgggtattgtaa

SEQ ID NO: 3636647 - DNA, 25 bp, Homo sapien
agacctgttgtgttgtagtatttaa

SEQ ID NO: 3636648 - DNA, 25 bp, Homo sapien
ttgatgcaaagacctgttgtgttgt

SEQ ID NO: 3636649 - DNA, 25 bp, Homo sapien
gcaaagacctgttgtgttgtagtat

SEQ ID NO: 3636650 - DNA, 25 bp, Homo sapien
cctgacatgcttgagtgggagatga

SEQ ID NO: 3636651 - DNA, 25 bp, Homo sapien
cttccctgacatgcttgagtgggag

SEQ ID NO: 3636652 - DNA, 25 bp, Homo sapien
ttgcttggggcacttaaaggccagg

SEQ ID NO: 3636653 - DNA, 25 bp, Homo sapien
ctgaggacagtgttgcttggggcac

SEQ ID NO: 3636654 - DNA, 25 bp, Homo sapien
tattgaaagatagccaaccctggaa

SEQ ID NO: 3636655 - DNA, 25 bp, Homo sapien
ttaagactgactgaactgtgctgtg

SEQ ID NO: 3636656 - DNA, 25 bp, Homo sapien
tcaacttcatagaagccgacagctg

SEQ ID NO: 3636657 - DNA, 25 bp, Homo sapien
tacggtgaagcttgggatttggtcc

SEQ ID NO: 3636658 - DNA, 25 bp, Homo sapien
tggagaccagctcgcagtttcgctt

SEQ ID NO: 3636659 - DNA, 25 bp, Homo sapien
gcgtttgtggtgtccgagaatcccg

SEQ ID NO: 3636660 - DNA, 25 bp, Homo sapien
attccaagaaggcaaggcgaggctc

SEQ ID NO: 3636661 - DNA, 25 bp, Homo sapien
tggaaagcctgggagaccgttctca

SEQ ID NO: 3636662 - DNA, 25 bp, Homo sapien
agcccggccgaccaccgctctggca

SEQ ID NO: 3636663 - DNA, 25 bp, Homo sapien
ggagcccggccgaccaccgctctgg

SEQ ID NO: 3636664 - DNA, 25 bp, Homo sapien
gcccggccgaccaccgctctggcac

SEQ ID NO: 3636665 - DNA, 25 bp, Homo sapien
gagcccggccgaccaccgctctggc

SEQ ID NO: 3636666 - DNA, 25 bp, Homo sapien
ccgtggaagcggatgtacagttgat

SEQ ID NO: 3636667 - DNA, 25 bp, Homo sapien
gacaagcgcaatttgctccaaggcc

SEQ ID NO: 3636668 - DNA, 25 bp, Homo sapien
tctgtgctgcgaagctgcagtttca

SEQ ID NO: 3636669 - DNA, 25 bp, Homo sapien
cgaaacccgcgattttgcacgaggc

SEQ ID NO: 3636670 - DNA, 25 bp, Homo sapien
ttaggaaccctctcggcgcatcgga

SEQ ID NO: 3636671 - DNA, 25 bp, Homo sapien
tggcgggcatggaggccgggcagtc

SEQ ID NO: 3636672 - DNA, 25 bp, Homo sapien
aagaaattgtcccttgctcggctta

SEQ ID NO: 3636673 - DNA, 25 bp, Homo sapien
gcgcatcggagaggggcatcttctt

SEQ ID NO: 3636674 - DNA, 25 bp, Homo sapien
cacgtagggtcgaggcgaggggttg

SEQ ID NO: 3636675 - DNA, 25 bp, Homo sapien
gacaagcacgtagggtcgaggcgag

SEQ ID NO: 3636676 - DNA, 25 bp, Homo sapien
caagcacgtagggtcgaggcgaggg

SEQ ID NO: 3636677 - DNA, 25 bp, Homo sapien
cggctctgggagacaagcacgtagg

SEQ ID NO: 3636678 - DNA, 25 bp, Homo sapien
tgtcaaagagaaccaccccgaatgt

SEQ ID NO: 3636679 - DNA, 25 bp, Homo sapien
gatttgacgtgacaaactgcggaca

SEQ ID NO: 3636680 - DNA, 25 bp, Homo sapien
tattgggtgcaatcgggctgcagac

SEQ ID NO: 3636681 - DNA, 25 bp, Homo sapien
gaaacgcaactgtcgtgtgtgcctg

SEQ ID NO: 3636682 - DNA, 25 bp, Homo sapien
aaaccgtggagagtgtctggagccc

SEQ ID NO: 3636683 - DNA, 25 bp, Homo sapien
gctagagtttaaagtgcgccgcgcg

SEQ ID NO: 3636684 - DNA, 25 bp, Homo sapien
tcagctcggcagatcctttgggtgg

SEQ ID NO: 3636685 - DNA, 25 bp, Homo sapien
gcaggatcttcccatactggcggcg

SEQ ID NO: 3636686 - DNA, 25 bp, Homo sapien
tggtaaacaagcctggagagagcgc

SEQ ID NO: 3636687 - DNA, 25 bp, Homo sapien
ctggttgcagctcacgtctccacga

SEQ ID NO: 3636688 - DNA, 25 bp, Homo sapien
tgcagaaggaaattacgttctcccc

SEQ ID NO: 3636689 - DNA, 25 bp, Homo sapien
gaaagaatgtttcgtgcacaatgat

SEQ ID NO: 3636690 - DNA, 25 bp, Homo sapien
gattcgaatggccagacaattgagg

SEQ ID NO: 3636691 - DNA, 25 bp, Homo sapien
gaaggtacgtcgaattcctctctcc

SEQ ID NO: 3636692 - DNA, 25 bp, Homo sapien
ccagacaattgaggaaggtacgtcg

SEQ ID NO: 3636693 - DNA, 25 bp, Homo sapien
caattgaggaaggtacgtcgaattc

SEQ ID NO: 3636694 - DNA, 25 bp, Homo sapien
tcctctgggctgattccgctacatt

SEQ ID NO: 3636695 - DNA, 25 bp, Homo sapien
tctgggctgattccgctacattcat

SEQ ID NO: 3636696 - DNA, 25 bp, Homo sapien
accttcctctgggctgattccgcta

SEQ ID NO: 3636697 - DNA, 25 bp, Homo sapien
cttcctctgggctgattccgctaca

SEQ ID NO: 3636698 - DNA, 25 bp, Homo sapien
cctgtcgttctcttgtgattgctaa

SEQ ID NO: 3636699 - DNA, 25 bp, Homo sapien
tgaaagccggagcaacatgggaaga

SEQ ID NO: 3636700 - DNA, 25 bp, Homo sapien
tattgcaggcgcgatctgaaagccg

SEQ ID NO: 3636701 - DNA, 25 bp, Homo sapien
tgattgctaacagttccacgcggca

SEQ ID NO: 3636702 - DNA, 25 bp, Homo sapien
agctcattgagcagttccagaaaag

SEQ ID NO: 3636703 - DNA, 25 bp, Homo sapien
tgaggtgtgctcctctgtgacctcc

SEQ ID NO: 3636704 - DNA, 25 bp, Homo sapien
caagtctgaatctcaggctgggttc

SEQ ID NO: 3636705 - DNA, 25 bp, Homo sapien
tcaggctgggttccctcaatgaggt

SEQ ID NO: 3636706 - DNA, 25 bp, Homo sapien
ttatcagtaggtgaaacagaactgt

SEQ ID NO: 3636707 - DNA, 25 bp, Homo sapien
gaccatttatcagtaggtgaaacag

SEQ ID NO: 3636708 - DNA, 25 bp, Homo sapien
ctggaaagtgaacgaccatttatca

SEQ ID NO: 3636709 - DNA, 25 bp, Homo sapien
aagtgaacgaccatttatcagtagg

SEQ ID NO: 3636710 - DNA, 25 bp, Homo sapien
tcaaataaggttccccagtgagtct

SEQ ID NO: 3636711 - DNA, 25 bp, Homo sapien
tggccaatttgctgcgaatacgcat

SEQ ID NO: 3636712 - DNA, 25 bp, Homo sapien
caccgtgaagatgaaccgtggttca

SEQ ID NO: 3636713 - DNA, 25 bp, Homo sapien
tcgatcgtctgatgcacggcgctct

SEQ ID NO: 3636714 - DNA, 25 bp, Homo sapien
gcgcataccgattagaaggctgcat

SEQ ID NO: 3636715 - DNA, 25 bp, Homo sapien
gacaccggagaccagtaaagcgcat

SEQ ID NO: 3636716 - DNA, 25 bp, Homo sapien
gctgtttagtagacaccggagacca

SEQ ID NO: 3636717 - DNA, 25 bp, Homo sapien
ggccataagcgtttctgagttctac

SEQ ID NO: 3636718 - DNA, 25 bp, Homo sapien
agattgcaaattggaaacagggcga

SEQ ID NO: 3636719 - DNA, 25 bp, Homo sapien
ctgaagattgcaaattggaaacagg

SEQ ID NO: 3636720 - DNA, 25 bp, Homo sapien
tggaaacagggcgagtctccacgat

SEQ ID NO: 3636721 - DNA, 25 bp, Homo sapien
acagggcgagtctccacgataacat

SEQ ID NO: 3636722 - DNA, 25 bp, Homo sapien
tgctgaatggcaggcgcatggccac

SEQ ID NO: 3636723 - DNA, 25 bp, Homo sapien
gacactgcaagccatgagtcctttg

SEQ ID NO: 3636724 - DNA, 25 bp, Homo sapien
gtgttcagcgcctcacctcggatga

SEQ ID NO: 3636725 - DNA, 25 bp, Homo sapien
ccttgtctggacttgcaggagagaa

SEQ ID NO: 3636726 - DNA, 25 bp, Homo sapien
gaacacgctgttctgatttggctgc

SEQ ID NO: 3636727 - DNA, 25 bp, Homo sapien
gcccgtgaatgattgcgtttgccga

SEQ ID NO: 3636728 - DNA, 25 bp, Homo sapien
cgtttgccgaaacgcgtcaccagaa

SEQ ID NO: 3636729 - DNA, 25 bp, Homo sapien
gttgcaatgaaggtagaatccacag

SEQ ID NO: 3636730 - DNA, 25 bp, Homo sapien
cagggccagttgttcctgccgagag

SEQ ID NO: 3636731 - DNA, 25 bp, Homo sapien
ttcctgccgagaggcataaatcagc

SEQ ID NO: 3636732 - DNA, 25 bp, Homo sapien
ccagttgttcctgccgagaggcata

SEQ ID NO: 3636733 - DNA, 25 bp, Homo sapien
gataggggggcaacccatgggctcc

SEQ ID NO: 3636734 - DNA, 25 bp, Homo sapien
tcgagggaaggagggagactggtgg

SEQ ID NO: 3636735 - DNA, 25 bp, Homo sapien
ctcgagggaaggagggagactggtg

SEQ ID NO: 3636736 - DNA, 25 bp, Homo sapien
cgagggaaggagggagactggtggc

SEQ ID NO: 3636737 - DNA, 25 bp, Homo sapien
gacacgcaaccataaacacttgagt

SEQ ID NO: 3636738 - DNA, 25 bp, Homo sapien
tgagtcctgtccagaagccggtatt

SEQ ID NO: 3636739 - DNA, 25 bp, Homo sapien
cacttgagtgtgaacgcttccgtca

SEQ ID NO: 3636740 - DNA, 25 bp, Homo sapien
gtattggaaacgcagacatccctgt

SEQ ID NO: 3636741 - DNA, 25 bp, Homo sapien
ttcaagagatgccaaaactcccact

SEQ ID NO: 3636742 - DNA, 25 bp, Homo sapien
cacttccaccccatttgttctagaa

SEQ ID NO: 3636743 - DNA, 25 bp, Homo sapien
aatttcaagagatgccaaaactccc

SEQ ID NO: 3636744 - DNA, 25 bp, Homo sapien
caagagatgccaaaactcccacttc

SEQ ID NO: 3636745 - DNA, 25 bp, Homo sapien
caattcgccagatgacaacacgtca

SEQ ID NO: 3636746 - DNA, 25 bp, Homo sapien
ttgcttcgccacaccaacaaatggg

SEQ ID NO: 3636747 - DNA, 25 bp, Homo sapien
aataggaaccccacaattcgccaga

SEQ ID NO: 3636748 - DNA, 25 bp, Homo sapien
cgtataaatttggagagctagagta

SEQ ID NO: 3636749 - DNA, 25 bp, Homo sapien
catgtgaattcgaggctctatgcag

SEQ ID NO: 3636750 - DNA, 25 bp, Homo sapien
aattcgaggctctatgcagcgtcca

SEQ ID NO: 3636751 - DNA, 25 bp, Homo sapien
gaggctctatgcagcgtccatagcc

SEQ ID NO: 3636752 - DNA, 25 bp, Homo sapien
ctaatcatgtgaattcgaggctcta

SEQ ID NO: 3636753 - DNA, 25 bp, Homo sapien
tgagtggccagaactgacaaggttg

SEQ ID NO: 3636754 - DNA, 25 bp, Homo sapien
agctgagaattaagggcagcgtctg

SEQ ID NO: 3636755 - DNA, 25 bp, Homo sapien
gcagaagcgatgagctgagaattaa

SEQ ID NO: 3636756 - DNA, 25 bp, Homo sapien
tcagagtgccgcttgagtggccaga

SEQ ID NO: 3636757 - DNA, 25 bp, Homo sapien
tcctcttttctaagaggaagacaac

SEQ ID NO: 3636758 - DNA, 25 bp, Homo sapien
tcttttctaagaggaagacaactac

SEQ ID NO: 3636759 - DNA, 25 bp, Homo sapien
ctcttttctaagaggaagacaacta

SEQ ID NO: 3636760 - DNA, 25 bp, Homo sapien
cttttctaagaggaagacaactact

SEQ ID NO: 3636761 - DNA, 25 bp, Homo sapien
taacgggccgatgaaggctggtcag

SEQ ID NO: 3636762 - DNA, 25 bp, Homo sapien
tgagcagtgagtgggtaacgggccg

SEQ ID NO: 3636763 - DNA, 25 bp, Homo sapien
ggccgatgaaggctggtcagggtgt

SEQ ID NO: 3636764 - DNA, 25 bp, Homo sapien
ctgttcagagtggagttgagcagtg

SEQ ID NO: 3636765 - DNA, 25 bp, Homo sapien
tcaattatcagaaaggagccggtga

SEQ ID NO: 3636766 - DNA, 25 bp, Homo sapien
agtctgctgcttccgggtaacccag

SEQ ID NO: 3636767 - DNA, 25 bp, Homo sapien
ccggtgactgacagcggagtctgct

SEQ ID NO: 3636768 - DNA, 25 bp, Homo sapien
agtcttttgactacgagctcttccc

SEQ ID NO: 3636769 - DNA, 25 bp, Homo sapien
gacatagacgttggtgtccacctgc

SEQ ID NO: 3636770 - DNA, 25 bp, Homo sapien
cccagagagtagtgcgtagaggccc

SEQ ID NO: 3636771 - DNA, 25 bp, Homo sapien
cacgcagtcataggaagcaggctct

SEQ ID NO: 3636772 - DNA, 25 bp, Homo sapien
tacaggtcaaggtaccggaaggctc

SEQ ID NO: 3636773 - DNA, 25 bp, Homo sapien
caggaccagaaaaataagcctctct

SEQ ID NO: 3636774 - DNA, 25 bp, Homo sapien
ccaggaccagaaaaataagcctctc

SEQ ID NO: 3636775 - DNA, 25 bp, Homo sapien
tcttctgcagtaacttgtgcatttt

SEQ ID NO: 3636776 - DNA, 25 bp, Homo sapien
aggaccagaaaaataagcctctctt

SEQ ID NO: 3636777 - DNA, 25 bp, Homo sapien
cacggggtccaatttcccacattgg

SEQ ID NO: 3636778 - DNA, 25 bp, Homo sapien
atctacccgatgagactgacagtcc

SEQ ID NO: 3636779 - DNA, 25 bp, Homo sapien
tcccacattggctcttcggtacttt

SEQ ID NO: 3636780 - DNA, 25 bp, Homo sapien
tcttccacgtagtatttccttggtg

SEQ ID NO: 3636781 - DNA, 25 bp, Homo sapien
atgccttcccttccggtgcagcatt

SEQ ID NO: 3636782 - DNA, 25 bp, Homo sapien
tcttcaacgatgtcagtgtctccaa

SEQ ID NO: 3636783 - DNA, 25 bp, Homo sapien
tcccaggagagcctttgctatgctg

SEQ ID NO: 3636784 - DNA, 25 bp, Homo sapien
gtgcagcattgtgcgatcccaggag

SEQ ID NO: 3636785 - DNA, 25 bp, Homo sapien
gaaggcgtctctccgatctgtgcag

SEQ ID NO: 3636786 - DNA, 25 bp, Homo sapien
tactcagataccacaaatccctggg

SEQ ID NO: 3636787 - DNA, 25 bp, Homo sapien
ggctcttcgcttaggtgtccaggca

SEQ ID NO: 3636788 - DNA, 25 bp, Homo sapien
gtttctaaatccgagcagcacgtca

SEQ ID NO: 3636789 - DNA, 25 bp, Homo sapien
accaagtgagctatagcaaattttc

SEQ ID NO: 3636790 - DNA, 25 bp, Homo sapien
tttaccaagtgagctatagcaaatt

SEQ ID NO: 3636791 - DNA, 25 bp, Homo sapien
taccaagtgagctatagcaaatttt

SEQ ID NO: 3636792 - DNA, 25 bp, Homo sapien
tacagacagtttagtaggggtttca

SEQ ID NO: 3636793 - DNA, 25 bp, Homo sapien
gaggagcttccaacattaaatcaac

SEQ ID NO: 3636794 - DNA, 25 bp, Homo sapien
ggaaaaccatgaggcctatgtgtga

SEQ ID NO: 3636795 - DNA, 25 bp, Homo sapien
catggtcccttccttggaggagctt

SEQ ID NO: 3636796 - DNA, 25 bp, Homo sapien
gatcttagggttgttccacctggaa

SEQ ID NO: 3636797 - DNA, 25 bp, Homo sapien
caactgagcactcccgtgagatgtc

SEQ ID NO: 3636798 - DNA, 25 bp, Homo sapien
cagggagactaactttacggtgacg

SEQ ID NO: 3636799 - DNA, 25 bp, Homo sapien
tatatcaaggctctgtcggtgctac

SEQ ID NO: 3636800 - DNA, 25 bp, Homo sapien
gaaatacccaacacctactgtgaga

SEQ ID NO: 3636801 - DNA, 25 bp, Homo sapien
aggcccaaacactcagaacaccctg

SEQ ID NO: 3636802 - DNA, 25 bp, Homo sapien
caggactttccctttcggatcttgg

SEQ ID NO: 3636803 - DNA, 25 bp, Homo sapien
cggaggtgagaatccctgaggccca

SEQ ID NO: 3636804 - DNA, 25 bp, Homo sapien
ggcctgcgctcatgtactggcctgg

SEQ ID NO: 3636805 - DNA, 25 bp, Homo sapien
tcaacgttatcaccagttctgagta

SEQ ID NO: 3636806 - DNA, 25 bp, Homo sapien
ttcccatcagccctgtcaacgttat

SEQ ID NO: 3636807 - DNA, 25 bp, Homo sapien
ctggaactccagtagaattgctgat

SEQ ID NO: 3636808 - DNA, 25 bp, Homo sapien
taaggagcagtggtgaactttgttc

SEQ ID NO: 3636809 - DNA, 25 bp, Homo sapien
catcagcaggccacgatatccatct

SEQ ID NO: 3636810 - DNA, 25 bp, Homo sapien
tgtaaagaagctattccccgctgaa

SEQ ID NO: 3636811 - DNA, 25 bp, Homo sapien
tcaagaaatgtctggacctgggctc

SEQ ID NO: 3636812 - DNA, 25 bp, Homo sapien
gaatgtctacttcaatcaagaaatg

SEQ ID NO: 3636813 - DNA, 25 bp, Homo sapien
tagtcagtgcttcgacagccaagag

SEQ ID NO: 3636814 - DNA, 25 bp, Homo sapien
ttcaggaagctatgccaggacacag

SEQ ID NO: 3636815 - DNA, 25 bp, Homo sapien
ttcagttcactaggacaggcacgct

SEQ ID NO: 3636816 - DNA, 25 bp, Homo sapien
taacacgacgtcctattgctgggca

SEQ ID NO: 3636817 - DNA, 25 bp, Homo sapien
ccttgatccttaaacaggggctgtc

SEQ ID NO: 3636818 - DNA, 25 bp, Homo sapien
cagcttggcccctagatggtgacca

SEQ ID NO: 3636819 - DNA, 25 bp, Homo sapien
agggaaatcccagactggcactgcc

SEQ ID NO: 3636820 - DNA, 25 bp, Homo sapien
gtgaccatctgtctaggccctcagt

SEQ ID NO: 3636821 - DNA, 25 bp, Homo sapien
aagtcgaggcgatgctgccagcctg

SEQ ID NO: 3636822 - DNA, 25 bp, Homo sapien
cctgctgtgagacagtccgatgaac

SEQ ID NO: 3636823 - DNA, 25 bp, Homo sapien
ggtccagcctggaaactatagcacc

SEQ ID NO: 3636824 - DNA, 25 bp, Homo sapien
gaactctgataaacccggaggcacc

SEQ ID NO: 3636825 - DNA, 25 bp, Homo sapien
aattcctgtccccatgcggtagggc

SEQ ID NO: 3636826 - DNA, 25 bp, Homo sapien
tcccagctgggaccaattgcttcag

SEQ ID NO: 3636827 - DNA, 25 bp, Homo sapien
gggcctgctagggttacagctgaac

SEQ ID NO: 3636828 - DNA, 25 bp, Homo sapien
cagctgaacagacgggtaagaaagg

SEQ ID NO: 3636829 - DNA, 25 bp, Homo sapien
ctggcctgctggctcatgtcgacca

SEQ ID NO: 3636830 - DNA, 25 bp, Homo sapien
cagagtgcagggcaaagggcgatgg

SEQ ID NO: 3636831 - DNA, 25 bp, Homo sapien
tgctggctcatgtcgaccagggcac

SEQ ID NO: 3636832 - DNA, 25 bp, Homo sapien
tcatgtcgaccagggcacctggtac

SEQ ID NO: 3636833 - DNA, 25 bp, Homo sapien
agcgctacccaggtgaacgaagcca

SEQ ID NO: 3636834 - DNA, 25 bp, Homo sapien
tacccaggtgaacgaagccacttcg

SEQ ID NO: 3636835 - DNA, 25 bp, Homo sapien
cggtcagcagcgctacccaggtgaa

SEQ ID NO: 3636836 - DNA, 25 bp, Homo sapien
cgaagccacttcgaatccagcactg

SEQ ID NO: 3636837 - DNA, 25 bp, Homo sapien
aaggtagactcgagatggggcctgg

SEQ ID NO: 3636838 - DNA, 25 bp, Homo sapien
gggaaggtagactcgagatggggcc

SEQ ID NO: 3636839 - DNA, 25 bp, Homo sapien
ggcagccagcgagaaagaaaggagg

SEQ ID NO: 3636840 - DNA, 25 bp, Homo sapien
gaaggtagactcgagatggggcctg

SEQ ID NO: 3636841 - DNA, 25 bp, Homo sapien
ctgcgctgtgctgggaacacgctct

SEQ ID NO: 3636842 - DNA, 25 bp, Homo sapien
tttctccctgtcagttatcctgcgc

SEQ ID NO: 3636843 - DNA, 25 bp, Homo sapien
ctgtcagttatcctgcgctgtgctg

SEQ ID NO: 3636844 - DNA, 25 bp, Homo sapien
ctgtgctgggaacacgctctggttt

SEQ ID NO: 3636845 - DNA, 25 bp, Homo sapien
accacaggtcggctccaagttcatg

SEQ ID NO: 3636846 - DNA, 25 bp, Homo sapien
aaatcattgtgagctggaaggacgg

SEQ ID NO: 3636847 - DNA, 25 bp, Homo sapien
cccacagtggaaaagccttggccgg

SEQ ID NO: 3636848 - DNA, 25 bp, Homo sapien
acatctcgtaatcagcagctttcgg

SEQ ID NO: 3636849 - DNA, 25 bp, Homo sapien
tatattacaagctgaacgggacaac

SEQ ID NO: 3636850 - DNA, 25 bp, Homo sapien
aaacagacataggacacaaaggagg

SEQ ID NO: 3636851 - DNA, 25 bp, Homo sapien
tggcactcctacctccggttctgag

SEQ ID NO: 3636852 - DNA, 25 bp, Homo sapien
acgggacaacagatgcttagaacca

SEQ ID NO: 3636853 - DNA, 25 bp, Homo sapien
tgtgcttcaacattgatgggcagcc

SEQ ID NO: 3636854 - DNA, 25 bp, Homo sapien
gatcacagggactctggtaagttct

SEQ ID NO: 3636855 - DNA, 25 bp, Homo sapien
tcacagggactctggtaagttctac

SEQ ID NO: 3636856 - DNA, 25 bp, Homo sapien
atgggcagcccggggacatcctcag

SEQ ID NO: 3636857 - DNA, 25 bp, Homo sapien
agatcctctcaagggcccgtgtcag

SEQ ID NO: 3636858 - DNA, 25 bp, Homo sapien
cagatcctctcaagggcccgtgtca

SEQ ID NO: 3636859 - DNA, 25 bp, Homo sapien
ctctcaagggcccgtgtcagggatg

SEQ ID NO: 3636860 - DNA, 25 bp, Homo sapien
atcctctcaagggcccgtgtcaggg

SEQ ID NO: 3636861 - DNA, 25 bp, Homo sapien
tgctgtacgtgcaagttcctaaagc

SEQ ID NO: 3636862 - DNA, 25 bp, Homo sapien
gagctgtggatatagagtccgcaca

SEQ ID NO: 3636863 - DNA, 25 bp, Homo sapien
taaagccagggacatcccggagatg

SEQ ID NO: 3636864 - DNA, 25 bp, Homo sapien
gctgctgtgctgtacgtgcaagttc

SEQ ID NO: 3636865 - DNA, 25 bp, Homo sapien
catttagcgactacctaccggtggt

SEQ ID NO: 3636866 - DNA, 25 bp, Homo sapien
ccgagagccaaagcgtctgagttcc

SEQ ID NO: 3636867 - DNA, 25 bp, Homo sapien
tttagcatttaaaggtggcaccgag

SEQ ID NO: 3636868 - DNA, 25 bp, Homo sapien
tgagagctaatgtgcaacatggccc

SEQ ID NO: 3636869 - DNA, 25 bp, Homo sapien
tggctttcaaaatcaaattcatgca

SEQ ID NO: 3636870 - DNA, 25 bp, Homo sapien
tatattgttctttccccactgtcaa

SEQ ID NO: 3636871 - DNA, 25 bp, Homo sapien
caaatattaatttccacgtccttca

SEQ ID NO: 3636872 - DNA, 25 bp, Homo sapien
ctgtcaaagccttttccacccttgt

SEQ ID NO: 3636873 - DNA, 25 bp, Homo sapien
cagacttcgtagtaccacgttatat

SEQ ID NO: 3636874 - DNA, 25 bp, Homo sapien
tcaggcttcgttgtaccgcgtcgta

SEQ ID NO: 3636875 - DNA, 25 bp, Homo sapien
tagtaccgcactgtatctaatcagg

SEQ ID NO: 3636876 - DNA, 25 bp, Homo sapien
taatcagccttcatagataccacat

SEQ ID NO: 3636877 - DNA, 25 bp, Homo sapien
aatcacagagggtgttttccgtagg

SEQ ID NO: 3636878 - DNA, 25 bp, Homo sapien
cagagggtgttttccgtaggaagct

SEQ ID NO: 3636879 - DNA, 25 bp, Homo sapien
ccttcctcacatcgtgtagaaagta

SEQ ID NO: 3636880 - DNA, 25 bp, Homo sapien
cacagagggtgttttccgtaggaag

SEQ ID NO: 3636881 - DNA, 25 bp, Homo sapien
gaaccacgtcttcaggcatagcaga

SEQ ID NO: 3636882 - DNA, 25 bp, Homo sapien
gggcccagtcctcgtcagatattga

SEQ ID NO: 3636883 - DNA, 25 bp, Homo sapien
gacacagtgcttggttgaacattaa

SEQ ID NO: 3636884 - DNA, 25 bp, Homo sapien
catagcagatatcgggcttgagtcc

SEQ ID NO: 3636885 - DNA, 25 bp, Homo sapien
gacagttttgccaagctccccaaag

SEQ ID NO: 3636886 - DNA, 25 bp, Homo sapien
cacttcttcctactgaaccaagttc

SEQ ID NO: 3636887 - DNA, 25 bp, Homo sapien
gaaccaagttcaaaggaacagcaga

SEQ ID NO: 3636888 - DNA, 25 bp, Homo sapien
aacagcagaggagtacagttcgctt

SEQ ID NO: 3636889 - DNA, 25 bp, Homo sapien
gcagatgaaaaagcacgtgagtctt

SEQ ID NO: 3636890 - DNA, 25 bp, Homo sapien
catttatggggatttcgaagcctga

SEQ ID NO: 3636891 - DNA, 25 bp, Homo sapien
gaagcctgatacttcagaaagaaag

SEQ ID NO: 3636892 - DNA, 25 bp, Homo sapien
gatgaaaaagcacgtgagtcttttc

SEQ ID NO: 3636893 - DNA, 25 bp, Homo sapien
gaaacagactttcagtccaagactt

SEQ ID NO: 3636894 - DNA, 25 bp, Homo sapien
gcctgctatcttccgctttaatagg

SEQ ID NO: 3636895 - DNA, 25 bp, Homo sapien
gagacctgtactccatgggaattat

SEQ ID NO: 3636896 - DNA, 25 bp, Homo sapien
tacattggagatggctaagggacaa

SEQ ID NO: 3636897 - DNA, 25 bp, Homo sapien
gatgatttccaaaagatctagagcc

SEQ ID NO: 3636898 - DNA, 25 bp, Homo sapien
tatatttctatttgctggttacgtc

SEQ ID NO: 3636899 - DNA, 25 bp, Homo sapien
tctgggcaatcacaattttgtataa

SEQ ID NO: 3636900 - DNA, 25 bp, Homo sapien
gttacgtctcagaggtgtccaaatg

SEQ ID NO: 3636901 - DNA, 25 bp, Homo sapien
ggttctctgccaccaattgaaattt

SEQ ID NO: 3636902 - DNA, 25 bp, Homo sapien
tgatatctccggttctctgccacca

SEQ ID NO: 3636903 - DNA, 25 bp, Homo sapien
gatatctccggttctctgccaccaa

SEQ ID NO: 3636904 - DNA, 25 bp, Homo sapien
tctccggttctctgccaccaattga

SEQ ID NO: 3636905 - DNA, 25 bp, Homo sapien
taagaaaatctagcagaaggcatct

SEQ ID NO: 3636906 - DNA, 25 bp, Homo sapien
gaaaatctagcagaaggcatcttaa

SEQ ID NO: 3636907 - DNA, 25 bp, Homo sapien
aaatctagcagaaggcatcttaaca

SEQ ID NO: 3636908 - DNA, 25 bp, Homo sapien
aatctagcagaaggcatcttaacac

SEQ ID NO: 3636909 - DNA, 25 bp, Homo sapien
ccactgtgctgagtcgtgtactctt

SEQ ID NO: 3636910 - DNA, 25 bp, Homo sapien
gagtcgtgtactctttaagggacta

SEQ ID NO: 3636911 - DNA, 25 bp, Homo sapien
gctgctgagcagttgtgtgagtttc

SEQ ID NO: 3636912 - DNA, 25 bp, Homo sapien
aaattgagcattatggtgtgaaggc

SEQ ID NO: 3636913 - DNA, 25 bp, Homo sapien
ttcttccgattctcctggaaggctt

SEQ ID NO: 3636914 - DNA, 25 bp, Homo sapien
tcttccgattctcctggaaggcttc

SEQ ID NO: 3636915 - DNA, 25 bp, Homo sapien
cttccgattctcctggaaggcttct

SEQ ID NO: 3636916 - DNA, 25 bp, Homo sapien
cactttgctctggatcatggtggtg

SEQ ID NO: 3636917 - DNA, 25 bp, Homo sapien
tggtggtggccatccgagaagtaat

SEQ ID NO: 3636918 - DNA, 25 bp, Homo sapien
caaacacgacattctgaggctgcgg

SEQ ID NO: 3636919 - DNA, 25 bp, Homo sapien
tatagctataaagagttacttgatc

SEQ ID NO: 3636920 - DNA, 25 bp, Homo sapien
ttctccttaatagagctcctaaatg

SEQ ID NO: 3636921 - DNA, 25 bp, Homo sapien
aagccagccgtcttgccttttgctc

SEQ ID NO: 3636922 - DNA, 25 bp, Homo sapien
tctggcctgtgcataaagagctcgg

SEQ ID NO: 3636923 - DNA, 25 bp, Homo sapien
tcctaaatgtcttgccgtccacagt

SEQ ID NO: 3636924 - DNA, 25 bp, Homo sapien
gagaggaaaccgtcattgagaggca

SEQ ID NO: 3636925 - DNA, 25 bp, Homo sapien
gtcattgagaggcaagggcaagcct

SEQ ID NO: 3636926 - DNA, 25 bp, Homo sapien
aaaccgtcattgagaggcaagggca

SEQ ID NO: 3636927 - DNA, 25 bp, Homo sapien
gtaggagaggaaaccgtcattgaga

SEQ ID NO: 3636928 - DNA, 25 bp, Homo sapien
ttgaagagggacctttaggcgaata

SEQ ID NO: 3636929 - DNA, 25 bp, Homo sapien
ccattggttgaagagggacctttag

SEQ ID NO: 3636930 - DNA, 25 bp, Homo sapien
acctttaggcgaatagaaactgcag

SEQ ID NO: 3636931 - DNA, 25 bp, Homo sapien
aactgcagtgcctaattctaacatc

SEQ ID NO: 3636932 - DNA, 25 bp, Homo sapien
cccactgcagatattgttgtcacag

SEQ ID NO: 3636933 - DNA, 25 bp, Homo sapien
acggtgtccgcttttgtgttgctgc

SEQ ID NO: 3636934 - DNA, 25 bp, Homo sapien
ctgctgtctctgacagaactggtac

SEQ ID NO: 3636935 - DNA, 25 bp, Homo sapien
tcctgcatgaggctgacggtgtccg

SEQ ID NO: 3636936 - DNA, 25 bp, Homo sapien
aaaaagatgagcatggcctcgtgca

SEQ ID NO: 3636937 - DNA, 25 bp, Homo sapien
actgcacttcactctatccagggtg

SEQ ID NO: 3636938 - DNA, 25 bp, Homo sapien
gttgtggatagtcagcttgcgatat

SEQ ID NO: 3636939 - DNA, 25 bp, Homo sapien
gatgttgcacaatcagcctaaggga

SEQ ID NO: 3636940 - DNA, 25 bp, Homo sapien
ctctaagtgtttggccagccgtcca

SEQ ID NO: 3636941 - DNA, 25 bp, Homo sapien
gaagttttccatatcaagagcgctg

SEQ ID NO: 3636942 - DNA, 25 bp, Homo sapien
gatcctgtgctcataggagcccagc

SEQ ID NO: 3636943 - DNA, 25 bp, Homo sapien
cacctcctggtagtgaagttcgaac

SEQ ID NO: 3636944 - DNA, 25 bp, Homo sapien
taccacgggattcatggcattgagg

SEQ ID NO: 3636945 - DNA, 25 bp, Homo sapien
cacggtatgtgctaggagtggccca

SEQ ID NO: 3636946 - DNA, 25 bp, Homo sapien
tagactctgatagtgaactgatgcc

SEQ ID NO: 3636947 - DNA, 25 bp, Homo sapien
tttcaattcacgcaaaagcacggta

SEQ ID NO: 3636948 - DNA, 25 bp, Homo sapien
tgtgtcgggaacatgaagaaatctc

SEQ ID NO: 3636949 - DNA, 25 bp, Homo sapien
gaaatggccttcaaatgtgtcggga

SEQ ID NO: 3636950 - DNA, 25 bp, Homo sapien
tcagtccctgtggttcgataaccca

SEQ ID NO: 3636951 - DNA, 25 bp, Homo sapien
tgaccggaacaccatcgaaatggcc

SEQ ID NO: 3636952 - DNA, 25 bp, Homo sapien
ggagctgcccaatggacgttctgaa

SEQ ID NO: 3636953 - DNA, 25 bp, Homo sapien
aaggacatgccagggcttttgcagg

SEQ ID NO: 3636954 - DNA, 25 bp, Homo sapien
ctagaaagaacggtgacatcagagc

SEQ ID NO: 3636955 - DNA, 25 bp, Homo sapien
tgaatccccgcgatatcggtggacc

SEQ ID NO: 3636956 - DNA, 25 bp, Homo sapien
tcttctcttttcacgtcatacagca

SEQ ID NO: 3636957 - DNA, 25 bp, Homo sapien
tattctctgctgtgctaccgtgggc

SEQ ID NO: 3636958 - DNA, 25 bp, Homo sapien
tctcccggcagttagggcatattct

SEQ ID NO: 3636959 - DNA, 25 bp, Homo sapien
atctaccgcagtctcccggcagtta

SEQ ID NO: 3636960 - DNA, 25 bp, Homo sapien
cagtagaaccagagccggtgtgcac

SEQ ID NO: 3636961 - DNA, 25 bp, Homo sapien
tctctgcagctagaaacacttgccc

SEQ ID NO: 3636962 - DNA, 25 bp, Homo sapien
ttggcacgagcttggcagtagaacc

SEQ ID NO: 3636963 - DNA, 25 bp, Homo sapien
tagaaaccacccataggcctgggag

SEQ ID NO: 3636964 - DNA, 25 bp, Homo sapien
ccactcacatcgatgacaaagagga

SEQ ID NO: 3636965 - DNA, 25 bp, Homo sapien
tttgggaattgggtccaggttgtca

SEQ ID NO: 3636966 - DNA, 25 bp, Homo sapien
gtttcattttaactccccacatgga

SEQ ID NO: 3636967 - DNA, 25 bp, Homo sapien
cacatggagccactcacatcgatga

SEQ ID NO: 3636968 - DNA, 25 bp, Homo sapien
tgaggtcatccaatatggtcttcat

SEQ ID NO: 3636969 - DNA, 25 bp, Homo sapien
gcaacctgtgtttttgtagctgaaa

SEQ ID NO: 3636970 - DNA, 25 bp, Homo sapien
caatatacctcttggcatctgcaac

SEQ ID NO: 3636971 - DNA, 25 bp, Homo sapien
ccaagttcgaatgttctggttgaaa

SEQ ID NO: 3636972 - DNA, 25 bp, Homo sapien
caaaatgaagattgcccgtaggagt

SEQ ID NO: 3636973 - DNA, 25 bp, Homo sapien
gtctaacagtcccaagttattggct

SEQ ID NO: 3636974 - DNA, 25 bp, Homo sapien
tgcccgtaggagtgcttcgttgatg

SEQ ID NO: 3636975 - DNA, 25 bp, Homo sapien
aaccaaaatgatcagcgagacggag

SEQ ID NO: 3636976 - DNA, 25 bp, Homo sapien
aaagtgtttgtcgtgagaaggttga

SEQ ID NO: 3636977 - DNA, 25 bp, Homo sapien
aagtgtttgtcgtgagaaggttgaa

SEQ ID NO: 3636978 - DNA, 25 bp, Homo sapien
gtgtttgtcgtgagaaggttgaagt

SEQ ID NO: 3636979 - DNA, 25 bp, Homo sapien
gaaagtgtttgtcgtgagaaggttg

SEQ ID NO: 3636980 - DNA, 25 bp, Homo sapien
ggtgatgtccgaaaggaaaggaatg

SEQ ID NO: 3636981 - DNA, 25 bp, Homo sapien
gttggtgatgtccgaaaggaaagga

SEQ ID NO: 3636982 - DNA, 25 bp, Homo sapien
ctaaagttggtgatgtccgaaagga

SEQ ID NO: 3636983 - DNA, 25 bp, Homo sapien
aagttggtgatgtccgaaaggaaag

SEQ ID NO: 3636984 - DNA, 25 bp, Homo sapien
tgcccaaactgaacaaggagatatt

SEQ ID NO: 3636985 - DNA, 25 bp, Homo sapien
cttaagctgggaagacgtgtcctgg

SEQ ID NO: 3636986 - DNA, 25 bp, Homo sapien
taaatcctttgtgcaattccatggt

SEQ ID NO: 3636987 - DNA, 25 bp, Homo sapien
catggttttcattggacagtctctt

SEQ ID NO: 3636988 - DNA, 25 bp, Homo sapien
tgaactgaacattccggagcaatgg

SEQ ID NO: 3636989 - DNA, 25 bp, Homo sapien
gggatagttgaactgaacattccgg

SEQ ID NO: 3636990 - DNA, 25 bp, Homo sapien
ttccggagcaatggagtggagacct

SEQ ID NO: 3636991 - DNA, 25 bp, Homo sapien
gagtggagacctggttgtagaattt

SEQ ID NO: 3636992 - DNA, 25 bp, Homo sapien
ttagcagggtcaaattttcctgcca

SEQ ID NO: 3636993 - DNA, 25 bp, Homo sapien
gataacgctctctatttgatccaat

SEQ ID NO: 3636994 - DNA, 25 bp, Homo sapien
cgaagtcgccgtgataacgctctct

SEQ ID NO: 3636995 - DNA, 25 bp, Homo sapien
ttgatccaatttagcagggtcaaat

SEQ ID NO: 3636996 - DNA, 25 bp, Homo sapien
gatggttagataggcccacagtttc

SEQ ID NO: 3636997 - DNA, 25 bp, Homo sapien
gaaaatcctgcaagtcgtccatctg

SEQ ID NO: 3636998 - DNA, 25 bp, Homo sapien
gtttcctggtgaaatcgggatctgc

SEQ ID NO: 3636999 - DNA, 25 bp, Homo sapien
gggtctccaagactaactgcgtgtt

SEQ ID NO: 3637000 - DNA, 25 bp, Homo sapien
agcctcgttctcgatcaccagcgag

SEQ ID NO: 3637001 - DNA, 25 bp, Homo sapien
tcttgtaattcttctcttggcggca

SEQ ID NO: 3637002 - DNA, 25 bp, Homo sapien
acatctgcaggatcgatcttgtaat

SEQ ID NO: 3637003 - DNA, 25 bp, Homo sapien
ccagcgaggtcagcggagtcacaat

SEQ ID NO: 3637004 - DNA, 25 bp, Homo sapien
cgttggtgaaggattggcccaagac

SEQ ID NO: 3637005 - DNA, 25 bp, Homo sapien
gtggcgtggactctagcacctgaga

SEQ ID NO: 3637006 - DNA, 25 bp, Homo sapien
actttgctgccgtaatacagggccc

SEQ ID NO: 3637007 - DNA, 25 bp, Homo sapien
cagcatggagatcacgggcgttggt

SEQ ID NO: 3637008 - DNA, 25 bp, Homo sapien
aagtctgcgactacacaaggaagcc

SEQ ID NO: 3637009 - DNA, 25 bp, Homo sapien
ccagagaggttgtcaatggaaaggc

SEQ ID NO: 3637010 - DNA, 25 bp, Homo sapien
agctccccgtctcacatgctgtggg

SEQ ID NO: 3637011 - DNA, 25 bp, Homo sapien
caaagaaattgacaacggagggcaa

SEQ ID NO: 3637012 - DNA, 25 bp, Homo sapien
tttcaaacactcaagtcaggctggg

SEQ ID NO: 3637013 - DNA, 25 bp, Homo sapien
taggcatacaacctggagaaccagc

SEQ ID NO: 3637014 - DNA, 25 bp, Homo sapien
tattccaggcagtcaagaaagccgc

SEQ ID NO: 3637015 - DNA, 25 bp, Homo sapien
acaattctaggaccaacaggagcca

SEQ ID NO: 3637016 - DNA, 25 bp, Homo sapien
tgttgtacaaagtgctaccagcaat

SEQ ID NO: 3637017 - DNA, 25 bp, Homo sapien
gagcaagttacttgtggccccaaaa

SEQ ID NO: 3637018 - DNA, 25 bp, Homo sapien
agacgggagtgttgtacaaagtgct

SEQ ID NO: 3637019 - DNA, 25 bp, Homo sapien
tgaaggagcaagttacttgtggccc

SEQ ID NO: 3637020 - DNA, 25 bp, Homo sapien
gacgtttgccgctgttaactgagac

SEQ ID NO: 3637021 - DNA, 25 bp, Homo sapien
gcacggattccccactcatgcatgg

SEQ ID NO: 3637022 - DNA, 25 bp, Homo sapien
acttctgcatggttcgtgggactcc

SEQ ID NO: 3637023 - DNA, 25 bp, Homo sapien
catgcatggctgcagacgtttgccg

SEQ ID NO: 3637024 - DNA, 25 bp, Homo sapien
tgagtcaatattgaaacaaatgttc

SEQ ID NO: 3637025 - DNA, 25 bp, Homo sapien
tcagaaaccaggttgaggatttttc

SEQ ID NO: 3637026 - DNA, 25 bp, Homo sapien
ctgagtcaatattgaaacaaatgtt

SEQ ID NO: 3637027 - DNA, 25 bp, Homo sapien
tctgagtcaatattgaaacaaatgt

SEQ ID NO: 3637028 - DNA, 25 bp, Homo sapien
gacaaggagaatgtgctagaaccat

SEQ ID NO: 3637029 - DNA, 25 bp, Homo sapien
gctcagggtgatggtctcagtgctg

SEQ ID NO: 3637030 - DNA, 25 bp, Homo sapien
ctagaaccatggctcagggtgatgg

SEQ ID NO: 3637031 - DNA, 25 bp, Homo sapien
ttggcaccaacaagctgaccgttga

SEQ ID NO: 3637032 - DNA, 25 bp, Homo sapien
tgattcgtgacttgagccgtgtcgg

SEQ ID NO: 3637033 - DNA, 25 bp, Homo sapien
tctgattcgtgacttgagccgtgtc

SEQ ID NO: 3637034 - DNA, 25 bp, Homo sapien
ctctgattcgtgacttgagccgtgt

SEQ ID NO: 3637035 - DNA, 25 bp, Homo sapien
attcgtgacttgagccgtgtcggac

SEQ ID NO: 3637036 - DNA, 25 bp, Homo sapien
caatcatggcgtttggagctcactc

SEQ ID NO: 3637037 - DNA, 25 bp, Homo sapien
tgggaagcttctacgcagaggacac

SEQ ID NO: 3637038 - DNA, 25 bp, Homo sapien
tctaagcgcttgcaacagtttatag

SEQ ID NO: 3637039 - DNA, 25 bp, Homo sapien
gattaacagaaactcattgggaagc

SEQ ID NO: 3637040 - DNA, 25 bp, Homo sapien
tccaaacacgatgaagtaaaacaga

SEQ ID NO: 3637041 - DNA, 25 bp, Homo sapien
tagtccgtgggctttaggtgagaac

SEQ ID NO: 3637042 - DNA, 25 bp, Homo sapien
aaagtcaacattgacgggatgcttc

SEQ ID NO: 3637043 - DNA, 25 bp, Homo sapien
tctttatccagggtgatagttacca

SEQ ID NO: 3637044 - DNA, 25 bp, Homo sapien
gctaaagaattagagcggccccacc

SEQ ID NO: 3637045 - DNA, 25 bp, Homo sapien
gtcagatggtcaatagacactttac

SEQ ID NO: 3637046 - DNA, 25 bp, Homo sapien
actgtcaaccaaagctgctaaagaa

SEQ ID NO: 3637047 - DNA, 25 bp, Homo sapien
agcggccccacccttgtcagatggt

SEQ ID NO: 3637048 - DNA, 25 bp, Homo sapien
tgttatcacagacctcctaaatggg

SEQ ID NO: 3637049 - DNA, 25 bp, Homo sapien
taagtaaatcgagcaccctgatggc

SEQ ID NO: 3637050 - DNA, 25 bp, Homo sapien
gagtatagctcagatcacaggaaaa

SEQ ID NO: 3637051 - DNA, 25 bp, Homo sapien
tatacatgaggttggtctagtggat

SEQ ID NO: 3637052 - DNA, 25 bp, Homo sapien
tcctccctccaggatttctagggtg

SEQ ID NO: 3637053 - DNA, 25 bp, Homo sapien
cctccctccaggatttctagggtgg

SEQ ID NO: 3637054 - DNA, 25 bp, Homo sapien
tggtgatgatcagcttctgcccctt

SEQ ID NO: 3637055 - DNA, 25 bp, Homo sapien
tatctttggttcctgcatgaactgg

SEQ ID NO: 3637056 - DNA, 25 bp, Homo sapien
gtatctttggttcctgcatgaactg

SEQ ID NO: 3637057 - DNA, 25 bp, Homo sapien
gtagagctgaggcacgaagtaatcc

SEQ ID NO: 3637058 - DNA, 25 bp, Homo sapien
taaggccgtttgagaaagctgtaga

SEQ ID NO: 3637059 - DNA, 25 bp, Homo sapien
cactgttgtgcacaaaccagcaggt

SEQ ID NO: 3637060 - DNA, 25 bp, Homo sapien
gaagtaatccttgtaatgcccgtca

SEQ ID NO: 3637061 - DNA, 25 bp, Homo sapien
ttaattattcaaaccgaagaatatc

SEQ ID NO: 3637062 - DNA, 25 bp, Homo sapien
caggggaaagatgtatattaatata

SEQ ID NO: 3637063 - DNA, 25 bp, Homo sapien
gacaggggaaagatgtatattaata

SEQ ID NO: 3637064 - DNA, 25 bp, Homo sapien
gaagaatatctgcaaaagtgacagg

SEQ ID NO: 3637065 - DNA, 25 bp, Homo sapien
aacagagttaatgctaaaatctcac

SEQ ID NO: 3637066 - DNA, 25 bp, Homo sapien
atttctataaagagatgggagtctc

SEQ ID NO: 3637067 - DNA, 25 bp, Homo sapien
tcaaaagggtatcataggtgagcac

SEQ ID NO: 3637068 - DNA, 25 bp, Homo sapien
ggtagtgctatttacctcttcagca

SEQ ID NO: 3637069 - DNA, 25 bp, Homo sapien
tagaacatcatataactgttggaca

SEQ ID NO: 3637070 - DNA, 25 bp, Homo sapien
ctgaataaatactatgcaaggtaat

SEQ ID NO: 3637071 - DNA, 25 bp, Homo sapien
gagatgtttgggataagaaaagaga

SEQ ID NO: 3637072 - DNA, 25 bp, Homo sapien
tctgccttaagttaatagaacatca

SEQ ID NO: 3637073 - DNA, 25 bp, Homo sapien
ccatcatacccaggccaaacaaaat

SEQ ID NO: 3637074 - DNA, 25 bp, Homo sapien
ttctattgactgcacaaaactcagc

SEQ ID NO: 3637075 - DNA, 25 bp, Homo sapien
cagcctctttcgcatgacattcggg

SEQ ID NO: 3637076 - DNA, 25 bp, Homo sapien
aaactcagcctctttcgcatgacat

SEQ ID NO: 3637077 - DNA, 25 bp, Homo sapien
ttggtagcccaggctcgtgtacagt

SEQ ID NO: 3637078 - DNA, 25 bp, Homo sapien
gaagccaataatgtttggtagtact

SEQ ID NO: 3637079 - DNA, 25 bp, Homo sapien
tagtattctttataggtgatcttgt

SEQ ID NO: 3637080 - DNA, 25 bp, Homo sapien
tatctcatatagcatcatataagga

SEQ ID NO: 3637081 - DNA, 25 bp, Homo sapien
tcatcatgcaggctctacccttgtg

SEQ ID NO: 3637082 - DNA, 25 bp, Homo sapien
caagattcgatcaaaagcaatagac

SEQ ID NO: 3637083 - DNA, 25 bp, Homo sapien
gcagacatgcagtctgtaacaccca

SEQ ID NO: 3637084 - DNA, 25 bp, Homo sapien
tataaccatagtatatgtcatcaac

SEQ ID NO: 3637085 - DNA, 25 bp, Homo sapien
ctgaaggtcggtcaggcaggcctca

SEQ ID NO: 3637086 - DNA, 25 bp, Homo sapien
ctcagcgcgcatgcgccgaagctcc

SEQ ID NO: 3637087 - DNA, 25 bp, Homo sapien
gccctgctgaaggtcggtcaggcag

SEQ ID NO: 3637088 - DNA, 25 bp, Homo sapien
gtcaggcaggcctcagcgcgcatgc

SEQ ID NO: 3637089 - DNA, 25 bp, Homo sapien
gacagcccagcgacacccgcgcgag

SEQ ID NO: 3637090 - DNA, 25 bp, Homo sapien
aggtccaggccgacagcccagcgac

SEQ ID NO: 3637091 - DNA, 25 bp, Homo sapien
ggtccaggccgacagcccagcgaca

SEQ ID NO: 3637092 - DNA, 25 bp, Homo sapien
cagcgacacccgcgcgagagaacat

SEQ ID NO: 3637093 - DNA, 25 bp, Homo sapien
ctgccccgtgcccaagctcttccat

SEQ ID NO: 3637094 - DNA, 25 bp, Homo sapien
tcccttgcggtcctgccgatcttcc

SEQ ID NO: 3637095 - DNA, 25 bp, Homo sapien
caagctcttccatcccttgcggtcc

SEQ ID NO: 3637096 - DNA, 25 bp, Homo sapien
gtcctgccgatcttcccgcaagctg

SEQ ID NO: 3637097 - DNA, 25 bp, Homo sapien
tccagcactacagggtttcaaaggg

SEQ ID NO: 3637098 - DNA, 25 bp, Homo sapien
tgttgcagcacccagcaaagcgtct

SEQ ID NO: 3637099 - DNA, 25 bp, Homo sapien
ttagctgagggaactcaagaccgcc

SEQ ID NO: 3637100 - DNA, 25 bp, Homo sapien
aaagcgtctgcaacacgggaggtgc

SEQ ID NO: 3637101 - DNA, 25 bp, Homo sapien
gattgtggttccgatttaagctcct

SEQ ID NO: 3637102 - DNA, 25 bp, Homo sapien
gcaccagcagtgaaggaatacatga

SEQ ID NO: 3637103 - DNA, 25 bp, Homo sapien
taagctcctaacagtagttgtcttg

SEQ ID NO: 3637104 - DNA, 25 bp, Homo sapien
tccaaagggattaaggtcaggatta

SEQ ID NO: 3637105 - DNA, 25 bp, Homo sapien
tgggacagacactgagtaacctgcc

SEQ ID NO: 3637106 - DNA, 25 bp, Homo sapien
gaaatgccatctccttatcggtatc

SEQ ID NO: 3637107 - DNA, 25 bp, Homo sapien
tgccgtctgaatgcagcccttcagg

SEQ ID NO: 3637108 - DNA, 25 bp, Homo sapien
gcccttcagggctggctacagagtc

SEQ ID NO: 3637109 - DNA, 25 bp, Homo sapien
atagttccattatacaagaaaaact

SEQ ID NO: 3637110 - DNA, 25 bp, Homo sapien
ccccataaagaaacaatctatcaaa

SEQ ID NO: 3637111 - DNA, 25 bp, Homo sapien
caatctatcaaatacaggactcaga

SEQ ID NO: 3637112 - DNA, 25 bp, Homo sapien
acaatctatcaaatacaggactcag

SEQ ID NO: 3637113 - DNA, 25 bp, Homo sapien
ttcaaagttgccatatttcgaactt

SEQ ID NO: 3637114 - DNA, 25 bp, Homo sapien
tcaaagttgccatatttcgaacttg

SEQ ID NO: 3637115 - DNA, 25 bp, Homo sapien
aaagttgccatatttcgaacttgaa

SEQ ID NO: 3637116 - DNA, 25 bp, Homo sapien
caaagttgccatatttcgaacttga

SEQ ID NO: 3637117 - DNA, 25 bp, Homo sapien
cagaacatagctgtctcaggtgtcc

SEQ ID NO: 3637118 - DNA, 25 bp, Homo sapien
ggtattgaaagttgccttaaccaca

SEQ ID NO: 3637119 - DNA, 25 bp, Homo sapien
gctactacttaggacaagcaaatgg

SEQ ID NO: 3637120 - DNA, 25 bp, Homo sapien
caaatacacaatgggctaaagcagt

SEQ ID NO: 3637121 - DNA, 25 bp, Homo sapien
gcctgggtgatagaatgaggctcca

SEQ ID NO: 3637122 - DNA, 25 bp, Homo sapien
agcctgggtgatagaatgaggctcc

SEQ ID NO: 3637123 - DNA, 25 bp, Homo sapien
gaaaaatagaagtactgtgttaaga

SEQ ID NO: 3637124 - DNA, 25 bp, Homo sapien
agtactgtgttaagacaaaggaatt

SEQ ID NO: 3637125 - DNA, 25 bp, Homo sapien
aaaatagaagtactgtgttaagaca

SEQ ID NO: 3637126 - DNA, 25 bp, Homo sapien
tagaagtactgtgttaagacaaagg

SEQ ID NO: 3637127 - DNA, 25 bp, Homo sapien
ttctggatgtttttgatggacttta

SEQ ID NO: 3637128 - DNA, 25 bp, Homo sapien
tctggatgtttttgatggactttag

SEQ ID NO: 3637129 - DNA, 25 bp, Homo sapien
tggatgtttttgatggactttagtc

SEQ ID NO: 3637130 - DNA, 25 bp, Homo sapien
tttctggatgtttttgatggacttt

SEQ ID NO: 3637131 - DNA, 25 bp, Homo sapien
gctcgggcatattttgctgccgcta

SEQ ID NO: 3637132 - DNA, 25 bp, Homo sapien
ctcagctcgggcatattttgctgcc

SEQ ID NO: 3637133 - DNA, 25 bp, Homo sapien
cagctcgggcatattttgctgccgc

SEQ ID NO: 3637134 - DNA, 25 bp, Homo sapien
cgggcatattttgctgccgctacca

SEQ ID NO: 3637135 - DNA, 25 bp, Homo sapien
ttcttttagatagcctcaactcagg

SEQ ID NO: 3637136 - DNA, 25 bp, Homo sapien
gataagacagcatgatcataaaaaa

SEQ ID NO: 3637137 - DNA, 25 bp, Homo sapien
ctgcatgatcttctttactatcaaa

SEQ ID NO: 3637138 - DNA, 25 bp, Homo sapien
gacagctgtcagttgagatactgag

SEQ ID NO: 3637139 - DNA, 25 bp, Homo sapien
ctttcccagctgctgttagtgtagc

SEQ ID NO: 3637140 - DNA, 25 bp, Homo sapien
acacagtcctcgatctgaggacaca

SEQ ID NO: 3637141 - DNA, 25 bp, Homo sapien
tctgaggacacaccaataaggaggt

SEQ ID NO: 3637142 - DNA, 25 bp, Homo sapien
ccagctgctgttagtgtagcaacct

SEQ ID NO: 3637143 - DNA, 25 bp, Homo sapien
tcctcagatgcctcatttggcttaa

SEQ ID NO: 3637144 - DNA, 25 bp, Homo sapien
gagaagatttattcgtgcttacatc

SEQ ID NO: 3637145 - DNA, 25 bp, Homo sapien
tatgatccggatgaagaagcaaagg

SEQ ID NO: 3637146 - DNA, 25 bp, Homo sapien
ggccctgaagaatataccttgttat

SEQ ID NO: 3637147 - DNA, 25 bp, Homo sapien
tataagaaaagcaagagctcacata

SEQ ID NO: 3637148 - DNA, 25 bp, Homo sapien
ctataagaaaagcaagagctcacat

SEQ ID NO: 3637149 - DNA, 25 bp, Homo sapien
ataagaaaagcaagagctcacatag

SEQ ID NO: 3637150 - DNA, 25 bp, Homo sapien
tttcttcccacttctttgaatgcca

SEQ ID NO: 3637151 - DNA, 25 bp, Homo sapien
gcatctccaaaagtggggggctttc

SEQ ID NO: 3637152 - DNA, 25 bp, Homo sapien
cacttctttgaatgccaccagaaac

SEQ ID NO: 3637153 - DNA, 25 bp, Homo sapien
caccagaaactggtcagaatgagtc

SEQ ID NO: 3637154 - DNA, 25 bp, Homo sapien
gatgatggagccttcatcaaattca

SEQ ID NO: 3637155 - DNA, 25 bp, Homo sapien
tcatatccagaatttagtaattcaa

SEQ ID NO: 3637156 - DNA, 25 bp, Homo sapien
ttcatatccagaatttagtaattca

SEQ ID NO: 3637157 - DNA, 25 bp, Homo sapien
gctttgatttctaaatctgtcttgc

SEQ ID NO: 3637158 - DNA, 25 bp, Homo sapien
aaagctttgatttctaaatctgtct

SEQ ID NO: 3637159 - DNA, 25 bp, Homo sapien
aaaagctttgatttctaaatctgtc

SEQ ID NO: 3637160 - DNA, 25 bp, Homo sapien
aaaaaagctttgatttctaaatctg

SEQ ID NO: 3637161 - DNA, 25 bp, Homo sapien
agcacttgcaacggtattaagggaa

SEQ ID NO: 3637162 - DNA, 25 bp, Homo sapien
cagcacttgcaacggtattaaggga

SEQ ID NO: 3637163 - DNA, 25 bp, Homo sapien
ttgacactgtctgccttagtgtaca

SEQ ID NO: 3637164 - DNA, 25 bp, Homo sapien
ccccaaatcatttgctatagctacc

SEQ ID NO: 3637165 - DNA, 25 bp, Homo sapien
tgtctgccttagtgtacaaatctct

SEQ ID NO: 3637166 - DNA, 25 bp, Homo sapien
tatagctaccaccagatatcttgac

SEQ ID NO: 3637167 - DNA, 25 bp, Homo sapien
gaagtcaagagatggcacttctcag

SEQ ID NO: 3637168 - DNA, 25 bp, Homo sapien
tgatgaacctcaatagatactgact

SEQ ID NO: 3637169 - DNA, 25 bp, Homo sapien
ttattgtagttagaggtcccaaaca

SEQ ID NO: 3637170 - DNA, 25 bp, Homo sapien
tgcaaagccagtttctagctacgct

SEQ ID NO: 3637171 - DNA, 25 bp, Homo sapien
caacttagtcatttgattactgaag

SEQ ID NO: 3637172 - DNA, 25 bp, Homo sapien
cgtcagcatcaatatcgtcatagat

SEQ ID NO: 3637173 - DNA, 25 bp, Homo sapien
gcatcaatatcgtcatagatactca

SEQ ID NO: 3637174 - DNA, 25 bp, Homo sapien
gatgatgttggccagattgtattct

SEQ ID NO: 3637175 - DNA, 25 bp, Homo sapien
gcagcacgtcagcatcaatatcgtc

SEQ ID NO: 3637176 - DNA, 25 bp, Homo sapien
gcagcaccagagataatttcaatca

SEQ ID NO: 3637177 - DNA, 25 bp, Homo sapien
tgcagcaccagagataatttcaatc

SEQ ID NO: 3637178 - DNA, 25 bp, Homo sapien
ttaccacatctttatagcctaagag

SEQ ID NO: 3637179 - DNA, 25 bp, Homo sapien
tctgaaggcgacaatctacaattac

SEQ ID NO: 3637180 - DNA, 25 bp, Homo sapien
cacatcccattcctaatcctttaga

SEQ ID NO: 3637181 - DNA, 25 bp, Homo sapien
ttaagcatccaaacaagcagacaca

SEQ ID NO: 3637182 - DNA, 25 bp, Homo sapien
attttttcggtgaagggccacacag

SEQ ID NO: 3637183 - DNA, 25 bp, Homo sapien
aaatagtggcttttcaggctgcagc

SEQ ID NO: 3637184 - DNA, 25 bp, Homo sapien
tattctgcactctgtgggtcacacg

SEQ ID NO: 3637185 - DNA, 25 bp, Homo sapien
tggccgcgagaaagagtgacgaatc

SEQ ID NO: 3637186 - DNA, 25 bp, Homo sapien
gggttagtcctaacacagctgtgct

SEQ ID NO: 3637187 - DNA, 25 bp, Homo sapien
tagcgaggctgatggatccaactaa

SEQ ID NO: 3637188 - DNA, 25 bp, Homo sapien
taacagagagagtatcctaaccaag

SEQ ID NO: 3637189 - DNA, 25 bp, Homo sapien
cattcacgaaggaggtatgtaccag

SEQ ID NO: 3637190 - DNA, 25 bp, Homo sapien
cttcagaatgtggttccttcccgca

SEQ ID NO: 3637191 - DNA, 25 bp, Homo sapien
tgtcacacttaagatccaagaacaa

SEQ ID NO: 3637192 - DNA, 25 bp, Homo sapien
gctttgtcacacttaagatccaaga

SEQ ID NO: 3637193 - DNA, 25 bp, Homo sapien
gttccttcccgcaggctttgtcaca

SEQ ID NO: 3637194 - DNA, 25 bp, Homo sapien
tggcactgcatagctaagtttttgt

SEQ ID NO: 3637195 - DNA, 25 bp, Homo sapien
gttacagagcatgcaaacccattca

SEQ ID NO: 3637196 - DNA, 25 bp, Homo sapien
taggctggtcctcaattttgcagaa

SEQ ID NO: 3637197 - DNA, 25 bp, Homo sapien
cctaacattcgtttgtcaagagcaa

SEQ ID NO: 3637198 - DNA, 25 bp, Homo sapien
caggtcaagaagcaatccatgctag

SEQ ID NO: 3637199 - DNA, 25 bp, Homo sapien
tacttggacctcgaatactatggtt

SEQ ID NO: 3637200 - DNA, 25 bp, Homo sapien
taggctggcaactaatacttggacc

SEQ ID NO: 3637201 - DNA, 25 bp, Homo sapien
catgctcatgcaagtaggcaagact

SEQ ID NO: 3637202 - DNA, 25 bp, Homo sapien
tgtctgaggatggaacttgattttc

SEQ ID NO: 3637203 - DNA, 25 bp, Homo sapien
cttgtctgaggatggaacttgattt

SEQ ID NO: 3637204 - DNA, 25 bp, Homo sapien
ctcttgtctgaggatggaacttgat

SEQ ID NO: 3637205 - DNA, 25 bp, Homo sapien
gtctgaggatggaacttgattttca

SEQ ID NO: 3637206 - DNA, 25 bp, Homo sapien
ccagagaccataaagtgtgacaacc

SEQ ID NO: 3637207 - DNA, 25 bp, Homo sapien
caggtgctcccgtgagttggctgct

SEQ ID NO: 3637208 - DNA, 25 bp, Homo sapien
aaaagtccactagcgttgcccaggt

SEQ ID NO: 3637209 - DNA, 25 bp, Homo sapien
tgctactgtgaagtggcccatccat

SEQ ID NO: 3637210 - DNA, 25 bp, Homo sapien
ggcagcagtaagctaaaaacaaaat

SEQ ID NO: 3637211 - DNA, 25 bp, Homo sapien
tacaaatatcttgctgtcttcagta

SEQ ID NO: 3637212 - DNA, 25 bp, Homo sapien
tcttcagtaattcaaataatggagg

SEQ ID NO: 3637213 - DNA, 25 bp, Homo sapien
gaacagtttcttcggacaaaggcag

SEQ ID NO: 3637214 - DNA, 25 bp, Homo sapien
cagatttatcttgcctttctcgttc

SEQ ID NO: 3637215 - DNA, 25 bp, Homo sapien
ctttccagatttatcttgcctttct

SEQ ID NO: 3637216 - DNA, 25 bp, Homo sapien
tccagatttatcttgcctttctcgt

SEQ ID NO: 3637217 - DNA, 25 bp, Homo sapien
agatttatcttgcctttctcgttct

SEQ ID NO: 3637218 - DNA, 25 bp, Homo sapien
caggtaagcccacacccctctgatt

SEQ ID NO: 3637219 - DNA, 25 bp, Homo sapien
aggtaagcccacacccctctgattg

SEQ ID NO: 3637220 - DNA, 25 bp, Homo sapien
agaccctcatgtgcaggtctgagcc

SEQ ID NO: 3637221 - DNA, 25 bp, Homo sapien
tatttggtggcatgatgcagaccct

SEQ ID NO: 3637222 - DNA, 25 bp, Homo sapien
ctgctgaactcgtccttgtaccatc

SEQ ID NO: 3637223 - DNA, 25 bp, Homo sapien
tgaactcgtccttgtaccatcagaa

SEQ ID NO: 3637224 - DNA, 25 bp, Homo sapien
gagacacttcttggtttgaggaaca

SEQ ID NO: 3637225 - DNA, 25 bp, Homo sapien
tcagagacacttcttggtttgagga

SEQ ID NO: 3637226 - DNA, 25 bp, Homo sapien
acacttcttggtttgaggaacagct

SEQ ID NO: 3637227 - DNA, 25 bp, Homo sapien
gacacttcttggtttgaggaacagc

SEQ ID NO: 3637228 - DNA, 25 bp, Homo sapien
cgaaaacgccagtgttttagaggca

SEQ ID NO: 3637229 - DNA, 25 bp, Homo sapien
cagtgttttagaggcaaacgaggga

SEQ ID NO: 3637230 - DNA, 25 bp, Homo sapien
cagcggtgacgaaaacgccagtgtt

SEQ ID NO: 3637231 - DNA, 25 bp, Homo sapien
ggacagcggtgacgaaaacgccagt

SEQ ID NO: 3637232 - DNA, 25 bp, Homo sapien
agcataagccgaatgccgagcgcgg

SEQ ID NO: 3637233 - DNA, 25 bp, Homo sapien
ccttgggagcggaacgattcctcgg

SEQ ID NO: 3637234 - DNA, 25 bp, Homo sapien
ccgagcgcggcgatgagaaagctcc

SEQ ID NO: 3637235 - DNA, 25 bp, Homo sapien
gattcctcgggatcgcctctgaggc

SEQ ID NO: 3637236 - DNA, 25 bp, Homo sapien
gccagaccttagcagggtccccgat

SEQ ID NO: 3637237 - DNA, 25 bp, Homo sapien
cagaccttagcagggtccccgattc

SEQ ID NO: 3637238 - DNA, 25 bp, Homo sapien
accttagcagggtccccgattcatc

SEQ ID NO: 3637239 - DNA, 25 bp, Homo sapien
cccgccgccagaccttagcagggtc

SEQ ID NO: 3637240 - DNA, 25 bp, Homo sapien
cccgctgcgtggacgccaccgcagc

SEQ ID NO: 3637241 - DNA, 25 bp, Homo sapien
ccgctgcgtggacgccaccgcagcc

SEQ ID NO: 3637242 - DNA, 25 bp, Homo sapien
gcaggcgctgagctgcaccgagtcc

SEQ ID NO: 3637243 - DNA, 25 bp, Homo sapien
agagctcagagtaccgatggcagcc

SEQ ID NO: 3637244 - DNA, 25 bp, Homo sapien
agctgctgcagatagcgctgcagca

SEQ ID NO: 3637245 - DNA, 25 bp, Homo sapien
gagaccctcaacaacgacctggagt

SEQ ID NO: 3637246 - DNA, 25 bp, Homo sapien
cccagaatctatagcctacagccat

SEQ ID NO: 3637247 - DNA, 25 bp, Homo sapien
tagtgtgctgtgctgacaaagtcaa

SEQ ID NO: 3637248 - DNA, 25 bp, Homo sapien
caaagaaggcttagatcataaaagt

SEQ ID NO: 3637249 - DNA, 25 bp, Homo sapien
tcatcaaataagtagtgtgctgtgc

SEQ ID NO: 3637250 - DNA, 25 bp, Homo sapien
ttacaaagaaggcttagatcataaa

SEQ ID NO: 3637251 - DNA, 25 bp, Homo sapien
gctaacaggaaatgacggaatttgg

SEQ ID NO: 3637252 - DNA, 25 bp, Homo sapien
catcagctggaaagcttcaccaaca

SEQ ID NO: 3637253 - DNA, 25 bp, Homo sapien
gaaggtgacaggctcaatgttgtga

SEQ ID NO: 3637254 - DNA, 25 bp, Homo sapien
gaagtacattgttcttgctaacagg

SEQ ID NO: 3637255 - DNA, 25 bp, Homo sapien
tgtttccagtataaagccatggcat

SEQ ID NO: 3637256 - DNA, 25 bp, Homo sapien
ccagtataaagccatggcattcaac

SEQ ID NO: 3637257 - DNA, 25 bp, Homo sapien
cactgtttccagtataaagccatgg

SEQ ID NO: 3637258 - DNA, 25 bp, Homo sapien
taaagccatggcattcaactcatgg

SEQ ID NO: 3637259 - DNA, 25 bp, Homo sapien
accacagactctgatagctgggact

SEQ ID NO: 3637260 - DNA, 25 bp, Homo sapien
ccaccacagactctgatagctggga

SEQ ID NO: 3637261 - DNA, 25 bp, Homo sapien
tcccaccacagactctgatagctgg

SEQ ID NO: 3637262 - DNA, 25 bp, Homo sapien
atcctcccaccacagactctgatag

SEQ ID NO: 3637263 - DNA, 25 bp, Homo sapien
gaaggggtaccgctccaaactcatc

SEQ ID NO: 3637264 - DNA, 25 bp, Homo sapien
aggaccagtcatgcccatccagaat

SEQ ID NO: 3637265 - DNA, 25 bp, Homo sapien
tgacaggaccagtcatgcccatcca

SEQ ID NO: 3637266 - DNA, 25 bp, Homo sapien
tgctgaagaactgcaattggccacc

SEQ ID NO: 3637267 - DNA, 25 bp, Homo sapien
caggacagagcctcgctgagaggac

SEQ ID NO: 3637268 - DNA, 25 bp, Homo sapien
gacagagcctcgctgagaggacaca

SEQ ID NO: 3637269 - DNA, 25 bp, Homo sapien
tctctgccaggacagagcctcgctg

SEQ ID NO: 3637270 - DNA, 25 bp, Homo sapien
tgccaggacagagcctcgctgagag

SEQ ID NO: 3637271 - DNA, 25 bp, Homo sapien
gaaatgctattccagggagactgct

SEQ ID NO: 3637272 - DNA, 25 bp, Homo sapien
gcccaacaataagcgattggctaag

SEQ ID NO: 3637273 - DNA, 25 bp, Homo sapien
cattacggcactgtaaactgataca

SEQ ID NO: 3637274 - DNA, 25 bp, Homo sapien
gactgctgggacactggtgtaatca

SEQ ID NO: 3637275 - DNA, 25 bp, Homo sapien
cacgcccagtgtaaagaactatttc

SEQ ID NO: 3637276 - DNA, 25 bp, Homo sapien
ccactgtagaggaatcggattgagc

SEQ ID NO: 3637277 - DNA, 25 bp, Homo sapien
cctatctaggtttgatcagaatgcc

SEQ ID NO: 3637278 - DNA, 25 bp, Homo sapien
tggttttgctccctttcatatcaga

SEQ ID NO: 3637279 - DNA, 25 bp, Homo sapien
acatttaccagagcaccagtgagtg

SEQ ID NO: 3637280 - DNA, 25 bp, Homo sapien
ccagtgagtgggaccgtctttaagt

SEQ ID NO: 3637281 - DNA, 25 bp, Homo sapien
tggtcactgctcctaggcttctgct

SEQ ID NO: 3637282 - DNA, 25 bp, Homo sapien
aagccatttttcgaaggagcccttg

SEQ ID NO: 3637283 - DNA, 25 bp, Homo sapien
caaatggagggcgtctaaggttctt

SEQ ID NO: 3637284 - DNA, 25 bp, Homo sapien
gtggacagccctatctcagacttga

SEQ ID NO: 3637285 - DNA, 25 bp, Homo sapien
taataagttatctgggaaacggcca

SEQ ID NO: 3637286 - DNA, 25 bp, Homo sapien
cacaatgggcagatgaaccgtatcc

SEQ ID NO: 3637287 - DNA, 25 bp, Homo sapien
gagaactcggatgtcttcccttggg

SEQ ID NO: 3637288 - DNA, 25 bp, Homo sapien
taaatttgcacctgcagtgactaat

SEQ ID NO: 3637289 - DNA, 25 bp, Homo sapien
cgttcatctctcaaattttacccta

SEQ ID NO: 3637290 - DNA, 25 bp, Homo sapien
tctaaaattacatgacaggttcctc

SEQ ID NO: 3637291 - DNA, 25 bp, Homo sapien
tctgctttatgacgtaccctaagga

SEQ ID NO: 3637292 - DNA, 25 bp, Homo sapien
tatgacgtaccctaaggacaaggga

SEQ ID NO: 3637293 - DNA, 25 bp, Homo sapien
ctttatgacgtaccctaaggacaag

SEQ ID NO: 3637294 - DNA, 25 bp, Homo sapien
ccatctgctttatgacgtaccctaa

SEQ ID NO: 3637295 - DNA, 25 bp, Homo sapien
taaaacctgcaatggcctctcgagg

SEQ ID NO: 3637296 - DNA, 25 bp, Homo sapien
cctaagtgctcaatacaaatgtgcc

SEQ ID NO: 3637297 - DNA, 25 bp, Homo sapien
cattttaatcaaggaactaggacag

SEQ ID NO: 3637298 - DNA, 25 bp, Homo sapien
cactattccccacctgaagaagcag

SEQ ID NO: 3637299 - DNA, 25 bp, Homo sapien
atatatttaggccagaacagaaatt

SEQ ID NO: 3637300 - DNA, 25 bp, Homo sapien
tatatttaggccagaacagaaattc

SEQ ID NO: 3637301 - DNA, 25 bp, Homo sapien
acagaaattctaaaataatgaaata

SEQ ID NO: 3637302 - DNA, 25 bp, Homo sapien
aattctaaaataatgaaatactcac

SEQ ID NO: 3637303 - DNA, 25 bp, Homo sapien
tcgaggaggaacaattatgacagca

SEQ ID NO: 3637304 - DNA, 25 bp, Homo sapien
ttccagaaaggatgtcacatgctta

SEQ ID NO: 3637305 - DNA, 25 bp, Homo sapien
taatgttgtggtcatgttttgggcc

SEQ ID NO: 3637306 - DNA, 25 bp, Homo sapien
tgaacagttacatgatacatacagc

SEQ ID NO: 3637307 - DNA, 25 bp, Homo sapien
gaaggacagcatccgttttcagtgg

SEQ ID NO: 3637308 - DNA, 25 bp, Homo sapien
gctacttttcaactggaggccaaca

SEQ ID NO: 3637309 - DNA, 25 bp, Homo sapien
taatattgcattaggaccaccacac

SEQ ID NO: 3637310 - DNA, 25 bp, Homo sapien
ttcgtgcccgctggctctggaagga

SEQ ID NO: 3637311 - DNA, 25 bp, Homo sapien
gccaagttgcaaagtacgcgtctac

SEQ ID NO: 3637312 - DNA, 25 bp, Homo sapien
tgcaaagtacgcgtctactcaaagg

SEQ ID NO: 3637313 - DNA, 25 bp, Homo sapien
agttgcaaagtacgcgtctactcaa

SEQ ID NO: 3637314 - DNA, 25 bp, Homo sapien
caaagtacgcgtctactcaaaggac

SEQ ID NO: 3637315 - DNA, 25 bp, Homo sapien
agaacagccagtgtggaagtccacc

SEQ ID NO: 3637316 - DNA, 25 bp, Homo sapien
cccctagaaatagaaggtgtcttgc

SEQ ID NO: 3637317 - DNA, 25 bp, Homo sapien
ttttaatgcgttaactagggcacag

SEQ ID NO: 3637318 - DNA, 25 bp, Homo sapien
tgaaagttggaaggagaactcaagc

SEQ ID NO: 3637319 - DNA, 25 bp, Homo sapien
taatgaatcactagttctgtttcgg

SEQ ID NO: 3637320 - DNA, 25 bp, Homo sapien
actggctgaccaaccaaaaatactg

SEQ ID NO: 3637321 - DNA, 25 bp, Homo sapien
tcggattcttggaaatttcaaagta

SEQ ID NO: 3637322 - DNA, 25 bp, Homo sapien
gatggatagatagactaactgacca

SEQ ID NO: 3637323 - DNA, 25 bp, Homo sapien
cagcatagatgtggcaggccaaggt

SEQ ID NO: 3637324 - DNA, 25 bp, Homo sapien
actcagcagcatagatgtggcaggc

SEQ ID NO: 3637325 - DNA, 25 bp, Homo sapien
caggccaaggtgttcgtgccaggac

SEQ ID NO: 3637326 - DNA, 25 bp, Homo sapien
gccaaggtgttcgtgccaggaccat

SEQ ID NO: 3637327 - DNA, 25 bp, Homo sapien
ccttgtttccaagtacactggactc

SEQ ID NO: 3637328 - DNA, 25 bp, Homo sapien
tgcggcccttgtttccaagtacact

SEQ ID NO: 3637329 - DNA, 25 bp, Homo sapien
gacgcaccgtgaaacttctcagaca

SEQ ID NO: 3637330 - DNA, 25 bp, Homo sapien
tgctccaactcagacgcaccgtgaa

SEQ ID NO: 3637331 - DNA, 25 bp, Homo sapien
accctctgtgctgcctcaagaggag

SEQ ID NO: 3637332 - DNA, 25 bp, Homo sapien
acttcactagctcctgccctcttgg

SEQ ID NO: 3637333 - DNA, 25 bp, Homo sapien
gcttttccagcttcaacccaccctc

SEQ ID NO: 3637334 - DNA, 25 bp, Homo sapien
agattcagtccccatcgactcctgc

SEQ ID NO: 3637335 - DNA, 25 bp, Homo sapien
ttgaatcggtatctaaaagaggacc

SEQ ID NO: 3637336 - DNA, 25 bp, Homo sapien
taagcatgtagctagatctgaagtc

SEQ ID NO: 3637337 - DNA, 25 bp, Homo sapien
tccctaaagaggcacaagtatctgc

SEQ ID NO: 3637338 - DNA, 25 bp, Homo sapien
cagtttataggtgacgcagtatacc

SEQ ID NO: 3637339 - DNA, 25 bp, Homo sapien
aaaacagtataaagactacagcatt

SEQ ID NO: 3637340 - DNA, 25 bp, Homo sapien
tatgagggggactaacaatgtatac

SEQ ID NO: 3637341 - DNA, 25 bp, Homo sapien
gaaaaactcattacagaatatgagg

SEQ ID NO: 3637342 - DNA, 25 bp, Homo sapien
aatgtcattaagcatacacagtcag

SEQ ID NO: 3637343 - DNA, 25 bp, Homo sapien
catgcatggttttgctattggagag

SEQ ID NO: 3637344 - DNA, 25 bp, Homo sapien
tacagatattaaagttccaccccac

SEQ ID NO: 3637345 - DNA, 25 bp, Homo sapien
ggatatagaatgttagcctccaaca

SEQ ID NO: 3637346 - DNA, 25 bp, Homo sapien
tgttcacataccaggaatcgaggat

SEQ ID NO: 3637347 - DNA, 25 bp, Homo sapien
ccactgtaaaattaaagcctagatc

SEQ ID NO: 3637348 - DNA, 25 bp, Homo sapien
gcctagatctaaaatgagcagaaag

SEQ ID NO: 3637349 - DNA, 25 bp, Homo sapien
ttttatacagataagcaatgtgaac

SEQ ID NO: 3637350 - DNA, 25 bp, Homo sapien
tgagcagaaagagtactccatattc

SEQ ID NO: 3637351 - DNA, 25 bp, Homo sapien
tttaaggcagtaggctattatatcc

SEQ ID NO: 3637352 - DNA, 25 bp, Homo sapien
tatatccaactataaggatttaggc

SEQ ID NO: 3637353 - DNA, 25 bp, Homo sapien
ctagtcttgctcatttaatattaag

SEQ ID NO: 3637354 - DNA, 25 bp, Homo sapien
atattaagtggaacacaggctgggc

SEQ ID NO: 3637355 - DNA, 25 bp, Homo sapien
aaactccatgaatctttaggcaggg

SEQ ID NO: 3637356 - DNA, 25 bp, Homo sapien
attggctaccttaggcgaggcccgc

SEQ ID NO: 3637357 - DNA, 25 bp, Homo sapien
tgataaccatcaagagtccacctcc

SEQ ID NO: 3637358 - DNA, 25 bp, Homo sapien
gagacatgagttttcaagccttccc

SEQ ID NO: 3637359 - DNA, 25 bp, Homo sapien
tacagttgtttatcggagttatcca

SEQ ID NO: 3637360 - DNA, 25 bp, Homo sapien
tatccaggattaggaaactataagc

SEQ ID NO: 3637361 - DNA, 25 bp, Homo sapien
tatcaaaggcatggactgtgtctta

SEQ ID NO: 3637362 - DNA, 25 bp, Homo sapien
aaatctccacggctgtttctaactt

SEQ ID NO: 3637363 - DNA, 25 bp, Homo sapien
ggtgatcttccgaacacgcaaatct

SEQ ID NO: 3637364 - DNA, 25 bp, Homo sapien
cttccgaacacgcaaatctgagctt

SEQ ID NO: 3637365 - DNA, 25 bp, Homo sapien
acacgcaaatctgagcttgtggttc

SEQ ID NO: 3637366 - DNA, 25 bp, Homo sapien
cgaacacgcaaatctgagcttgtgg

SEQ ID NO: 3637367 - DNA, 25 bp, Homo sapien
cgaggccgcttcatggctggcagtt

SEQ ID NO: 3637368 - DNA, 25 bp, Homo sapien
tttagtgcttaatagccgaggccgc

SEQ ID NO: 3637369 - DNA, 25 bp, Homo sapien
tcttccaagggaacctgcatggctt

SEQ ID NO: 3637370 - DNA, 25 bp, Homo sapien
aactggagccaacattggcggctcg

SEQ ID NO: 3637371 - DNA, 25 bp, Homo sapien
tgtcctggagagctagttttagtct

SEQ ID NO: 3637372 - DNA, 25 bp, Homo sapien
tgactgggcggttttaggtgattta

SEQ ID NO: 3637373 - DNA, 25 bp, Homo sapien
acagtttttggtgatcgaataggac

SEQ ID NO: 3637374 - DNA, 25 bp, Homo sapien
gacttccgaccattgctggtgactg

SEQ ID NO: 3637375 - DNA, 25 bp, Homo sapien
ctcttgggactcttggggctcttgg

SEQ ID NO: 3637376 - DNA, 25 bp, Homo sapien
ggcgtttcaggtctcacaggtgttt

SEQ ID NO: 3637377 - DNA, 25 bp, Homo sapien
tttggggaatgtgagtcgtgacctt

SEQ ID NO: 3637378 - DNA, 25 bp, Homo sapien
ctgttgggcgtttcaggtctcacag

SEQ ID NO: 3637379 - DNA, 25 bp, Homo sapien
gaaaattcgaaaggatctggctctc

SEQ ID NO: 3637380 - DNA, 25 bp, Homo sapien
gagtagtacactccgggcctgaaat

SEQ ID NO: 3637381 - DNA, 25 bp, Homo sapien
tatcggaacttgaggttccaccgga

SEQ ID NO: 3637382 - DNA, 25 bp, Homo sapien
caatcacagcatcgatagaggcctc

SEQ ID NO: 3637383 - DNA, 25 bp, Homo sapien
ttccggaagcactggcaacaaagat

SEQ ID NO: 3637384 - DNA, 25 bp, Homo sapien
gctggggctttcatcttatcttctc

SEQ ID NO: 3637385 - DNA, 25 bp, Homo sapien
aaacttgtagggatctgcctcttcc

SEQ ID NO: 3637386 - DNA, 25 bp, Homo sapien
ttgtttccctgccagtttccttgtc

SEQ ID NO: 3637387 - DNA, 25 bp, Homo sapien
tggactctgtgcttcgagggactga

SEQ ID NO: 3637388 - DNA, 25 bp, Homo sapien
tcaggtggactctgtgcttcgaggg

SEQ ID NO: 3637389 - DNA, 25 bp, Homo sapien
gcttcgagggactgagcctttgcct

SEQ ID NO: 3637390 - DNA, 25 bp, Homo sapien
actctgtgcttcgagggactgagcc

SEQ ID NO: 3637391 - DNA, 25 bp, Homo sapien
agcaaaactgatccaagaacatgta

SEQ ID NO: 3637392 - DNA, 25 bp, Homo sapien
ctgctccatagcccagcaaaactga

SEQ ID NO: 3637393 - DNA, 25 bp, Homo sapien
gctccatagcccagcaaaactgatc

SEQ ID NO: 3637394 - DNA, 25 bp, Homo sapien
aactgatccaagaacatgtatcttt

SEQ ID NO: 3637395 - DNA, 25 bp, Homo sapien
catatggaaccgcatttcaggtgta

SEQ ID NO: 3637396 - DNA, 25 bp, Homo sapien
tcttgcttgccgatctgggtcagtg

SEQ ID NO: 3637397 - DNA, 25 bp, Homo sapien
taggaaaattctcggaccatatgga

SEQ ID NO: 3637398 - DNA, 25 bp, Homo sapien
tttggtgccttacataaagctgctc

SEQ ID NO: 3637399 - DNA, 25 bp, Homo sapien
gatttagcttcttcgccacacacct

SEQ ID NO: 3637400 - DNA, 25 bp, Homo sapien
gggcaccaactgataaagctctaac

SEQ ID NO: 3637401 - DNA, 25 bp, Homo sapien
ggatttagcttcttcgccacacacc

SEQ ID NO: 3637402 - DNA, 25 bp, Homo sapien
acacctcagggcaccaactgataaa

SEQ ID NO: 3637403 - DNA, 25 bp, Homo sapien
atgaactatttaagacttcctcatc

SEQ ID NO: 3637404 - DNA, 25 bp, Homo sapien
agacttcctcatctttctgtgttat

SEQ ID NO: 3637405 - DNA, 25 bp, Homo sapien
ttatgaactatttaagacttcctca

SEQ ID NO: 3637406 - DNA, 25 bp, Homo sapien
taagacttcctcatctttctgtgtt

SEQ ID NO: 3637407 - DNA, 25 bp, Homo sapien
tcttggccagcaccgactcggagag

SEQ ID NO: 3637408 - DNA, 25 bp, Homo sapien
ccagagcgactggttccacttttat

SEQ ID NO: 3637409 - DNA, 25 bp, Homo sapien
taatctggggataactggactcggg

SEQ ID NO: 3637410 - DNA, 25 bp, Homo sapien
caccgactcggagagttaatctggg

SEQ ID NO: 3637411 - DNA, 25 bp, Homo sapien
ctgtgagcaccaagaatcacaacag

SEQ ID NO: 3637412 - DNA, 25 bp, Homo sapien
ttcacgggggctgataacggaggcc

SEQ ID NO: 3637413 - DNA, 25 bp, Homo sapien
ggaagcggggcttcgccagggactg

SEQ ID NO: 3637414 - DNA, 25 bp, Homo sapien
ggctgctgaagcgaagtccttcacg

SEQ ID NO: 3637415 - DNA, 25 bp, Homo sapien
cacactggcggaaataatgctgggt

SEQ ID NO: 3637416 - DNA, 25 bp, Homo sapien
aaatggaggcactggtctcatcacc

SEQ ID NO: 3637417 - DNA, 25 bp, Homo sapien
gaagttacaagatgctgagagtcca

SEQ ID NO: 3637418 - DNA, 25 bp, Homo sapien
taaaaattgctgaaatacacacggc

SEQ ID NO: 3637419 - DNA, 25 bp, Homo sapien
ctgagacggagccagcaccaaggac

SEQ ID NO: 3637420 - DNA, 25 bp, Homo sapien
catagtaagttctcgtccagagctt

SEQ ID NO: 3637421 - DNA, 25 bp, Homo sapien
tcatacttctagacggtgctttgct

SEQ ID NO: 3637422 - DNA, 25 bp, Homo sapien
aattgcatagtaagttctcgtccag

SEQ ID NO: 3637423 - DNA, 25 bp, Homo sapien
tctctctgaagtatccctttttctc

SEQ ID NO: 3637424 - DNA, 25 bp, Homo sapien
tgcgagggcgccggcttggcctcgg

SEQ ID NO: 3637425 - DNA, 25 bp, Homo sapien
gtcttcggcctgttctgcgagggcg

SEQ ID NO: 3637426 - DNA, 25 bp, Homo sapien
tcggcctgttctgcgagggcgccgg

SEQ ID NO: 3637427 - DNA, 25 bp, Homo sapien
cttcggcctgttctgcgagggcgcc

SEQ ID NO: 3637428 - DNA, 25 bp, Homo sapien
cgcagggctgacgagcatggggccg

SEQ ID NO: 3637429 - DNA, 25 bp, Homo sapien
cagggctgacgagcatggggccggg

SEQ ID NO: 3637430 - DNA, 25 bp, Homo sapien
gcacgggcgcagggctgacgagcat

SEQ ID NO: 3637431 - DNA, 25 bp, Homo sapien
gcgcagggctgacgagcatggggcc

SEQ ID NO: 3637432 - DNA, 25 bp, Homo sapien
ggtgctgaccgtctcagtcaccacg

SEQ ID NO: 3637433 - DNA, 25 bp, Homo sapien
cgtctcagtcaccacgctgcgcacg

SEQ ID NO: 3637434 - DNA, 25 bp, Homo sapien
gtaggtgctgaccgtctcagtcacc

SEQ ID NO: 3637435 - DNA, 25 bp, Homo sapien
ccacgctgcgcacgggggctttggc

SEQ ID NO: 3637436 - DNA, 25 bp, Homo sapien
ttgtctcgatctgaaaacgtctcca

SEQ ID NO: 3637437 - DNA, 25 bp, Homo sapien
tgtctcgatctgaaaacgtctccat

SEQ ID NO: 3637438 - DNA, 25 bp, Homo sapien
catgatcagcgtcatcactgtttta

SEQ ID NO: 3637439 - DNA, 25 bp, Homo sapien
tgttaaccgaataaacaggcatatt

SEQ ID NO: 3637440 - DNA, 25 bp, Homo sapien
agtagatcagcacttcattaatgcc

SEQ ID NO: 3637441 - DNA, 25 bp, Homo sapien
ctgatgtttgcaaagcggaagcggc

SEQ ID NO: 3637442 - DNA, 25 bp, Homo sapien
cagtggtaccagtcatcgcagtcgt

SEQ ID NO: 3637443 - DNA, 25 bp, Homo sapien
caggcttgttacacccagggcagat

SEQ ID NO: 3637444 - DNA, 25 bp, Homo sapien
catgggactcccatcgtcaggcttg

SEQ ID NO: 3637445 - DNA, 25 bp, Homo sapien
gcagtcgtcacacccaatcatggga

SEQ ID NO: 3637446 - DNA, 25 bp, Homo sapien
tccttcttcttgttcgcacacttgg

SEQ ID NO: 3637447 - DNA, 25 bp, Homo sapien
acacttggggcagaaccactgcatc

SEQ ID NO: 3637448 - DNA, 25 bp, Homo sapien
gggggtgcagtcatgattccaacac

SEQ ID NO: 3637449 - DNA, 25 bp, Homo sapien
ccactgcatctcttctgggggtgca

SEQ ID NO: 3637450 - DNA, 25 bp, Homo sapien
tcgggagtgaacaatccaggtgcgc

SEQ ID NO: 3637451 - DNA, 25 bp, Homo sapien
gagtttccttctgtcgcactgccac

SEQ ID NO: 3637452 - DNA, 25 bp, Homo sapien
gatgtgacggcagacttgcaccagc

SEQ ID NO: 3637453 - DNA, 25 bp, Homo sapien
tgggttctttatccacaggcatctg

SEQ ID NO: 3637454 - DNA, 25 bp, Homo sapien
tctaatacctcaatgaaaaggccct

SEQ ID NO: 3637455 - DNA, 25 bp, Homo sapien
gatgaaatgtacaagcagtgagaag

SEQ ID NO: 3637456 - DNA, 25 bp, Homo sapien
cagttgaggcagtttgtacattatc

SEQ ID NO: 3637457 - DNA, 25 bp, Homo sapien
tgcacaaaagcaaacaggacatgat

SEQ ID NO: 3637458 - DNA, 25 bp, Homo sapien
cagcacatgggcctacactgggatt

SEQ ID NO: 3637459 - DNA, 25 bp, Homo sapien
gaagaggtcgactccatttccactg

SEQ ID NO: 3637460 - DNA, 25 bp, Homo sapien
aatgacaccctgtgctccgaagagg

SEQ ID NO: 3637461 - DNA, 25 bp, Homo sapien
tctggcctcttgaacaacgagggca

SEQ ID NO: 3637462 - DNA, 25 bp, Homo sapien
catgaaatagcaagggacaacaaac

SEQ ID NO: 3637463 - DNA, 25 bp, Homo sapien
attactaatccctcgagctctccag

SEQ ID NO: 3637464 - DNA, 25 bp, Homo sapien
catgaactggatttaggaaagcaac

SEQ ID NO: 3637465 - DNA, 25 bp, Homo sapien
gttttattattgcaaagaccattta

SEQ ID NO: 3637466 - DNA, 25 bp, Homo sapien
gtttccccctgcatttggtcttcca

SEQ ID NO: 3637467 - DNA, 25 bp, Homo sapien
gtcttccattgatgctacgtttgat

SEQ ID NO: 3637468 - DNA, 25 bp, Homo sapien
tgcagctgtaattagctgatgagca

SEQ ID NO: 3637469 - DNA, 25 bp, Homo sapien
tctttaatatcacaggattcccgat

SEQ ID NO: 3637470 - DNA, 25 bp, Homo sapien
tttatcctggggcaatgaaactgct

SEQ ID NO: 3637471 - DNA, 25 bp, Homo sapien
gtagaaagtgatggcccatgttgtg

SEQ ID NO: 3637472 - DNA, 25 bp, Homo sapien
taatacatcacaatgaatctgatgg

SEQ ID NO: 3637473 - DNA, 25 bp, Homo sapien
gggataatttattgcatctaataca

SEQ ID NO: 3637474 - DNA, 25 bp, Homo sapien
cgaggtggagaattataaacgactc

SEQ ID NO: 3637475 - DNA, 25 bp, Homo sapien
tggagaattataaacgactctttcc

SEQ ID NO: 3637476 - DNA, 25 bp, Homo sapien
ttaaaatattagacgaggtggagaa

SEQ ID NO: 3637477 - DNA, 25 bp, Homo sapien
tattagacgaggtggagaattataa

SEQ ID NO: 3637478 - DNA, 25 bp, Homo sapien
ttgacagcttgcacccaacctgttg

SEQ ID NO: 3637479 - DNA, 25 bp, Homo sapien
gagagggatttatgatttgccaagc

SEQ ID NO: 3637480 - DNA, 25 bp, Homo sapien
ttcttggcgcgttttgaggacccag

SEQ ID NO: 3637481 - DNA, 25 bp, Homo sapien
agtggcagagccacgttcttggcgc

SEQ ID NO: 3637482 - DNA, 25 bp, Homo sapien
gcagctcgctcccgagggccagctg

SEQ ID NO: 3637483 - DNA, 25 bp, Homo sapien
ctgggcagctcgctcccgagggcca

SEQ ID NO: 3637484 - DNA, 25 bp, Homo sapien
gctcgctcccgagggccagctgttt

SEQ ID NO: 3637485 - DNA, 25 bp, Homo sapien
tgggcagctcgctcccgagggccag

SEQ ID NO: 3637486 - DNA, 25 bp, Homo sapien
tgtctctgccactcgggcccccgtt

SEQ ID NO: 3637487 - DNA, 25 bp, Homo sapien
ggtgtctccattttaatagaggcca

SEQ ID NO: 3637488 - DNA, 25 bp, Homo sapien
gcttgctttgccttcggtgtgggaa

SEQ ID NO: 3637489 - DNA, 25 bp, Homo sapien
agaaagacaataaccgcccagagac

SEQ ID NO: 3637490 - DNA, 25 bp, Homo sapien
gagacgtttaattcgattccctgcg

SEQ ID NO: 3637491 - DNA, 25 bp, Homo sapien
ggcgatcaacctggacgcctgggac

SEQ ID NO: 3637492 - DNA, 25 bp, Homo sapien
taaggggctggcgatcaacctggac

SEQ ID NO: 3637493 - DNA, 25 bp, Homo sapien
tggacgcctgggaccttgggagcaa

SEQ ID NO: 3637494 - DNA, 25 bp, Homo sapien
gggctggcgatcaacctggacgcct

SEQ ID NO: 3637495 - DNA, 25 bp, Homo sapien
tgggcctcggcctggtctagcgagt

SEQ ID NO: 3637496 - DNA, 25 bp, Homo sapien
ggcctcggcctggtctagcgagtcc

SEQ ID NO: 3637497 - DNA, 25 bp, Homo sapien
tcggcctggtctagcgagtcccctt

SEQ ID NO: 3637498 - DNA, 25 bp, Homo sapien
cctcggcctggtctagcgagtcccc

SEQ ID NO: 3637499 - DNA, 25 bp, Homo sapien
aataaaagatctcgaaggcccttct

SEQ ID NO: 3637500 - DNA, 25 bp, Homo sapien
tcacagccacgcgtaagaccaaaag

SEQ ID NO: 3637501 - DNA, 25 bp, Homo sapien
cgtcagaaacgctgcggatgccagg

SEQ ID NO: 3637502 - DNA, 25 bp, Homo sapien
ggagacctcagagccgaagagagaa

SEQ ID NO: 3637503 - DNA, 25 bp, Homo sapien
tgaaaaatgcttctccgcgcgtcaa

SEQ ID NO: 3637504 - DNA, 25 bp, Homo sapien
cggaaacctctccataaacaaggag

SEQ ID NO: 3637505 - DNA, 25 bp, Homo sapien
tgctgtctaacattcaccggaaacc

SEQ ID NO: 3637506 - DNA, 25 bp, Homo sapien
caaggagaaacgaatgcacacgcat

SEQ ID NO: 3637507 - DNA, 25 bp, Homo sapien
catttttgctaagaagcccgggatt

SEQ ID NO: 3637508 - DNA, 25 bp, Homo sapien
cctgggccagccaggctgcccgcat

SEQ ID NO: 3637509 - DNA, 25 bp, Homo sapien
cactcgtctctcctgggccagccag

SEQ ID NO: 3637510 - DNA, 25 bp, Homo sapien
ctctcctgggccagccaggctgccc

SEQ ID NO: 3637511 - DNA, 25 bp, Homo sapien
tctcctgggccagccaggctgcccg

SEQ ID NO: 3637512 - DNA, 25 bp, Homo sapien
ttccatatataggacagaaagaaag

SEQ ID NO: 3637513 - DNA, 25 bp, Homo sapien
gagcccacttggtctcccgttatta

SEQ ID NO: 3637514 - DNA, 25 bp, Homo sapien
ggcggcccagttaagaggcatcgat

SEQ ID NO: 3637515 - DNA, 25 bp, Homo sapien
agaggcatcgattttcctttcattc

SEQ ID NO: 3637516 - DNA, 25 bp, Homo sapien
tagaagaagccgtccctgaaagtaa

SEQ ID NO: 3637517 - DNA, 25 bp, Homo sapien
ggagtcctcaccttcttaaatctga

SEQ ID NO: 3637518 - DNA, 25 bp, Homo sapien
ttcatgcggtgaaggaacaacaaca

SEQ ID NO: 3637519 - DNA, 25 bp, Homo sapien
tagtggaaacgtgaatcttcctggt

SEQ ID NO: 3637520 - DNA, 25 bp, Homo sapien
ctgagagcttaatttggggttttat

SEQ ID NO: 3637521 - DNA, 25 bp, Homo sapien
tggggctgagagcttaatttggggt

SEQ ID NO: 3637522 - DNA, 25 bp, Homo sapien
gctgagagcttaatttggggtttta

SEQ ID NO: 3637523 - DNA, 25 bp, Homo sapien
cgatggggctgagagcttaatttgg

SEQ ID NO: 3637524 - DNA, 25 bp, Homo sapien
ctggagggaccaatcagcgggcgag

SEQ ID NO: 3637525 - DNA, 25 bp, Homo sapien
tgcaccgcccgctcggtcctttgag

SEQ ID NO: 3637526 - DNA, 25 bp, Homo sapien
ggctgtggccgagccgcgattggtc

SEQ ID NO: 3637527 - DNA, 25 bp, Homo sapien
tccgccccgcgggttccaacctgca

SEQ ID NO: 3637528 - DNA, 25 bp, Homo sapien
acgctctgcgcaatgggcaccccgg

SEQ ID NO: 3637529 - DNA, 25 bp, Homo sapien
ccggctcccggcgtttctcccacag

SEQ ID NO: 3637530 - DNA, 25 bp, Homo sapien
gtcaaggaaaccagccctcggtctg

SEQ ID NO: 3637531 - DNA, 25 bp, Homo sapien
tggtcgggactccacggcgaccttc

SEQ ID NO: 3637532 - DNA, 25 bp, Homo sapien
ccccagagtgaacacgcttcagctg

SEQ ID NO: 3637533 - DNA, 25 bp, Homo sapien
gtcatcggataaaggggagatgcct

SEQ ID NO: 3637534 - DNA, 25 bp, Homo sapien
ggagcgtccgcgtcaattttgttgt

SEQ ID NO: 3637535 - DNA, 25 bp, Homo sapien
tttcccgagccttctgcgctctcaa

SEQ ID NO: 3637536 - DNA, 25 bp, Homo sapien
tctgaaagtatcaagacggcgccag

SEQ ID NO: 3637537 - DNA, 25 bp, Homo sapien
tctttctgaaagtatcaagacggcg

SEQ ID NO: 3637538 - DNA, 25 bp, Homo sapien
cggcggcgtacgacctgctcggtca

SEQ ID NO: 3637539 - DNA, 25 bp, Homo sapien
tcagattgcgttgctcgctctgtct

SEQ ID NO: 3637540 - DNA, 25 bp, Homo sapien
aaattgatttaggtcctcccaagtg

SEQ ID NO: 3637541 - DNA, 25 bp, Homo sapien
gaccgtcctctcagcccctagaaaa

SEQ ID NO: 3637542 - DNA, 25 bp, Homo sapien
cgacttggagggcaagtccctccct

SEQ ID NO: 3637543 - DNA, 25 bp, Homo sapien
tgatttaggtcctcccaagtggttg

SEQ ID NO: 3637544 - DNA, 25 bp, Homo sapien
gagcgcggggacacggccgcggagc

SEQ ID NO: 3637545 - DNA, 25 bp, Homo sapien
tggagtggcacaacctcccctcgcg

SEQ ID NO: 3637546 - DNA, 25 bp, Homo sapien
ctggatgagcccctgagttgctgga

SEQ ID NO: 3637547 - DNA, 25 bp, Homo sapien
ccagcgcacccgagacccgcacggg

SEQ ID NO: 3637548 - DNA, 25 bp, Homo sapien
cgttgaatgatttgctttcggtggg

SEQ ID NO: 3637549 - DNA, 25 bp, Homo sapien
gaggcggagtccctcctcgggtcac

SEQ ID NO: 3637550 - DNA, 25 bp, Homo sapien
tccaaaaactgggtacggcagaata

SEQ ID NO: 3637551 - DNA, 25 bp, Homo sapien
gggcgacgactctgcaattctgcga

SEQ ID NO: 3637552 - DNA, 25 bp, Homo sapien
cctcggctgtgctcgcgccctctcg

SEQ ID NO: 3637553 - DNA, 25 bp, Homo sapien
acccagcgcggctggtccgccgtca

SEQ ID NO: 3637554 - DNA, 25 bp, Homo sapien
cccgggtggtgcgtgtccgggtgct

SEQ ID NO: 3637555 - DNA, 25 bp, Homo sapien
ggtgctgcccgttgagcacggcggg

SEQ ID NO: 3637556 - DNA, 25 bp, Homo sapien
agcgcggctggtccgccgtcacctc

SEQ ID NO: 3637557 - DNA, 25 bp, Homo sapien
tagggcgggacgtggttgccttgac

SEQ ID NO: 3637558 - DNA, 25 bp, Homo sapien
tggtgggtcggagggtacctctgca

SEQ ID NO: 3637559 - DNA, 25 bp, Homo sapien
tggccctgaccgagtttccgtagta

SEQ ID NO: 3637560 - DNA, 25 bp, Homo sapien
tgaccgtcgatgttaaaaagcacat

SEQ ID NO: 3637561 - DNA, 25 bp, Homo sapien
gaagagccgggttccagccgtgctt

SEQ ID NO: 3637562 - DNA, 25 bp, Homo sapien
gaggcgcctgctgcgactctttcaa

SEQ ID NO: 3637563 - DNA, 25 bp, Homo sapien
tttcaaaacacactctcgcgacgag

SEQ ID NO: 3637564 - DNA, 25 bp, Homo sapien
tttgtaaatgaaccaggaacggcag

SEQ ID NO: 3637565 - DNA, 25 bp, Homo sapien
caagaaaattctgtgcagccgggaa

SEQ ID NO: 3637566 - DNA, 25 bp, Homo sapien
tgctgatccgcacagaacgtgggca

SEQ ID NO: 3637567 - DNA, 25 bp, Homo sapien
tatgtcatccgtgtcaaggcaggct

SEQ ID NO: 3637568 - DNA, 25 bp, Homo sapien
tgtttaaaacctggcgacagcaggg

SEQ ID NO: 3637569 - DNA, 25 bp, Homo sapien
tttgccgccgtccagccagggtagg

SEQ ID NO: 3637570 - DNA, 25 bp, Homo sapien
gaggctccacccagggcggtcatgc

SEQ ID NO: 3637571 - DNA, 25 bp, Homo sapien
cctggacttgcatccgaagccggtg

SEQ ID NO: 3637572 - DNA, 25 bp, Homo sapien
aagagtccggagctgtactcgggca

SEQ ID NO: 3637573 - DNA, 25 bp, Homo sapien
ggtgtgctgttctcggttttcacga

SEQ ID NO: 3637574 - DNA, 25 bp, Homo sapien
tgccaggtgtgctgttctcggtttt

SEQ ID NO: 3637575 - DNA, 25 bp, Homo sapien
gcttctcgaaacttcccctccacac

SEQ ID NO: 3637576 - DNA, 25 bp, Homo sapien
ccaggtgtgctgttctcggttttca

SEQ ID NO: 3637577 - DNA, 25 bp, Homo sapien
gtgacaagaaccacagagcggcgag

SEQ ID NO: 3637578 - DNA, 25 bp, Homo sapien
gacacctctctcttaggtgacaaga

SEQ ID NO: 3637579 - DNA, 25 bp, Homo sapien
gcggcgaggcctcttgacattcaac

SEQ ID NO: 3637580 - DNA, 25 bp, Homo sapien
aaatgcctcttgctccgccttggcc

SEQ ID NO: 3637581 - DNA, 25 bp, Homo sapien
gcctctggtctgtcacttcagcaaa

SEQ ID NO: 3637582 - DNA, 25 bp, Homo sapien
tcttgattcactcggcaaggttgcc

SEQ ID NO: 3637583 - DNA, 25 bp, Homo sapien
aaggttgccattgcctcctatgggc

SEQ ID NO: 3637584 - DNA, 25 bp, Homo sapien
agcaacggttacctcttcaacaagg

SEQ ID NO: 3637585 - DNA, 25 bp, Homo sapien
ggaaggaaaacacgcaggaaagctg

SEQ ID NO: 3637586 - DNA, 25 bp, Homo sapien
aggaaaacacgcaggaaagctgaca

SEQ ID NO: 3637587 - DNA, 25 bp, Homo sapien
gaaggaaaacacgcaggaaagctga

SEQ ID NO: 3637588 - DNA, 25 bp, Homo sapien
aaggaaaacacgcaggaaagctgac

SEQ ID NO: 3637589 - DNA, 25 bp, Homo sapien
tgaggggccggttctgtccgttcat

SEQ ID NO: 3637590 - DNA, 25 bp, Homo sapien
gttcattttgtgatagagcccgcag

SEQ ID NO: 3637591 - DNA, 25 bp, Homo sapien
gaggttgccccacagttcacacact

SEQ ID NO: 3637592 - DNA, 25 bp, Homo sapien
gttgcacaggtagtgtcccgtgcca

SEQ ID NO: 3637593 - DNA, 25 bp, Homo sapien
acgattggaggctatcctgtcaatt

SEQ ID NO: 3637594 - DNA, 25 bp, Homo sapien
gctgtccttccggaagagaggaaat

SEQ ID NO: 3637595 - DNA, 25 bp, Homo sapien
attggaggctatcctgtcaatttcc

SEQ ID NO: 3637596 - DNA, 25 bp, Homo sapien
gattggaggctatcctgtcaatttc

SEQ ID NO: 3637597 - DNA, 25 bp, Homo sapien
gttgtggtggtctgacagttcgcac

SEQ ID NO: 3637598 - DNA, 25 bp, Homo sapien
ggtggtctgacagttcgcacaggac

SEQ ID NO: 3637599 - DNA, 25 bp, Homo sapien
ctcctccagagtgtggttgtggtgg

SEQ ID NO: 3637600 - DNA, 25 bp, Homo sapien
agttcgcacaggacgtccctgctct

SEQ ID NO: 3637601 - DNA, 25 bp, Homo sapien
ctgttcttgctgatcccagtccact

SEQ ID NO: 3637602 - DNA, 25 bp, Homo sapien
gagccctgttcttgctgatcccagt

SEQ ID NO: 3637603 - DNA, 25 bp, Homo sapien
aagcgagccctgttcttgctgatcc

SEQ ID NO: 3637604 - DNA, 25 bp, Homo sapien
gttcttgctgatcccagtccactta

SEQ ID NO: 3637605 - DNA, 25 bp, Homo sapien
tttgccaaagtcaggttggccaaga

SEQ ID NO: 3637606 - DNA, 25 bp, Homo sapien
cccggactttgccaaagtcaggttg

SEQ ID NO: 3637607 - DNA, 25 bp, Homo sapien
tcagccccggactttgccaaagtca

SEQ ID NO: 3637608 - DNA, 25 bp, Homo sapien
gactttgccaaagtcaggttggcca

SEQ ID NO: 3637609 - DNA, 25 bp, Homo sapien
aataaccacctatggggtgcaaagc

SEQ ID NO: 3637610 - DNA, 25 bp, Homo sapien
tgactctccacttctaaccagacaa

SEQ ID NO: 3637611 - DNA, 25 bp, Homo sapien
ccaacagcagctgcaatggttgcaa

SEQ ID NO: 3637612 - DNA, 25 bp, Homo sapien
ttctaaccagacaaacagccaacca

SEQ ID NO: 3637613 - DNA, 25 bp, Homo sapien
gaccgccccggatcagggatctgtt

SEQ ID NO: 3637614 - DNA, 25 bp, Homo sapien
tacagttaccagattacagccccgt

SEQ ID NO: 3637615 - DNA, 25 bp, Homo sapien
ctctaggtggttaaggctgtctgcc

SEQ ID NO: 3637616 - DNA, 25 bp, Homo sapien
ggctctcgcacaccaagaagggttc

SEQ ID NO: 3637617 - DNA, 25 bp, Homo sapien
catttttcggtttctggtctggatg

SEQ ID NO: 3637618 - DNA, 25 bp, Homo sapien
ggacaggctggatggcgggtgcatc

SEQ ID NO: 3637619 - DNA, 25 bp, Homo sapien
ttttcggtttctggtctggatgcct

SEQ ID NO: 3637620 - DNA, 25 bp, Homo sapien
ggcgtgggcgtggtcagcatgtggc

SEQ ID NO: 3637621 - DNA, 25 bp, Homo sapien
aatgcaagtcgaaagggactgcagg

SEQ ID NO: 3637622 - DNA, 25 bp, Homo sapien
cctgcaaaaatgcaagtcgaaaggg

SEQ ID NO: 3637623 - DNA, 25 bp, Homo sapien
ggccctgtgagcatcgagcagggct

SEQ ID NO: 3637624 - DNA, 25 bp, Homo sapien
aaagggactgcagggactctcgctg

SEQ ID NO: 3637625 - DNA, 25 bp, Homo sapien
ttacagctacccagatgcaataaag

SEQ ID NO: 3637626 - DNA, 25 bp, Homo sapien
gattcagtggttggaacacagacac

SEQ ID NO: 3637627 - DNA, 25 bp, Homo sapien
tcagaatggcttattcacagatggg

SEQ ID NO: 3637628 - DNA, 25 bp, Homo sapien
ttttcacagcactagagaccctgtt

SEQ ID NO: 3637629 - DNA, 25 bp, Homo sapien
acaactgtggccagtgaaaggaaac

SEQ ID NO: 3637630 - DNA, 25 bp, Homo sapien
ttgtccatttgaatatcagacctag

SEQ ID NO: 3637631 - DNA, 25 bp, Homo sapien
tgaatatcagacctagtttcttctt

SEQ ID NO: 3637632 - DNA, 25 bp, Homo sapien
aactgtggccagtgaaaggaaacaa

SEQ ID NO: 3637633 - DNA, 25 bp, Homo sapien
catgtaggcctagaaaaaggctctc

SEQ ID NO: 3637634 - DNA, 25 bp, Homo sapien
gaacggtaacactgattgcccagaa

SEQ ID NO: 3637635 - DNA, 25 bp, Homo sapien
tctgaaaccctcaacggcaactggt

SEQ ID NO: 3637636 - DNA, 25 bp, Homo sapien
tttgcagaggccaacagctttgaac

SEQ ID NO: 3637637 - DNA, 25 bp, Homo sapien
gacatgcacgctggtagctcataca

SEQ ID NO: 3637638 - DNA, 25 bp, Homo sapien
tgcaggaatagggacaagacagatg

SEQ ID NO: 3637639 - DNA, 25 bp, Homo sapien
gcagtgatcactaacacagaacacg

SEQ ID NO: 3637640 - DNA, 25 bp, Homo sapien
gatgccgccggactcttagaagcta

SEQ ID NO: 3637641 - DNA, 25 bp, Homo sapien
gaagagctcggccaccacgtggata

SEQ ID NO: 3637642 - DNA, 25 bp, Homo sapien
gccaccacgtggatacgatgtcatt

SEQ ID NO: 3637643 - DNA, 25 bp, Homo sapien
gctagagctaccagattctagaaga

SEQ ID NO: 3637644 - DNA, 25 bp, Homo sapien
ctttctctgaaattagctagagcta

SEQ ID NO: 3637645 - DNA, 25 bp, Homo sapien
cctggctcaggatcatcgggttggc

SEQ ID NO: 3637646 - DNA, 25 bp, Homo sapien
tcgggttggcgatggcgggaaagcc

SEQ ID NO: 3637647 - DNA, 25 bp, Homo sapien
cgggttggcgatggcgggaaagcca

SEQ ID NO: 3637648 - DNA, 25 bp, Homo sapien
gctcctggctcaggatcatcgggtt

SEQ ID NO: 3637649 - DNA, 25 bp, Homo sapien
aaatttatcaaagacgggccagctc

SEQ ID NO: 3637650 - DNA, 25 bp, Homo sapien
ttatcaaagacgggccagctcatgt

SEQ ID NO: 3637651 - DNA, 25 bp, Homo sapien
atttatcaaagacgggccagctcat

SEQ ID NO: 3637652 - DNA, 25 bp, Homo sapien
atcaaagacgggccagctcatgtgc

SEQ ID NO: 3637653 - DNA, 25 bp, Homo sapien
agcggcagcgaagtgaatcaagctc

SEQ ID NO: 3637654 - DNA, 25 bp, Homo sapien
cggtgctggccagagcggcagcgaa

SEQ ID NO: 3637655 - DNA, 25 bp, Homo sapien
ctgacggtgagcggtgctggccaga

SEQ ID NO: 3637656 - DNA, 25 bp, Homo sapien
gccagagcggcagcgaagtgaatca

SEQ ID NO: 3637657 - DNA, 25 bp, Homo sapien
gcaacagggcctgcgtcatgaacag

SEQ ID NO: 3637658 - DNA, 25 bp, Homo sapien
ggagtgagctgactctggactctat

SEQ ID NO: 3637659 - DNA, 25 bp, Homo sapien
cctcctttgtggatgtgcgacgtaa

SEQ ID NO: 3637660 - DNA, 25 bp, Homo sapien
tctataaggaaaccgtgcaacaggg

SEQ ID NO: 3637661 - DNA, 25 bp, Homo sapien
atggaaagcagagacacctaatccc

SEQ ID NO: 3637662 - DNA, 25 bp, Homo sapien
ggaaagcagagacacctaatcccca

SEQ ID NO: 3637663 - DNA, 25 bp, Homo sapien
agcagagacacctaatccccaaact

SEQ ID NO: 3637664 - DNA, 25 bp, Homo sapien
gagacacctaatccccaaacttcat

SEQ ID NO: 3637665 - DNA, 25 bp, Homo sapien
tagaggaccgtgctgatggaaaaag

SEQ ID NO: 3637666 - DNA, 25 bp, Homo sapien
tcctttcacctttggccagccagct

SEQ ID NO: 3637667 - DNA, 25 bp, Homo sapien
attgatagacgcctctttttctcct

SEQ ID NO: 3637668 - DNA, 25 bp, Homo sapien
tggaaaaagtggattgatagacgcc

SEQ ID NO: 3637669 - DNA, 25 bp, Homo sapien
ttctcagtcctaagccaatacagca

SEQ ID NO: 3637670 - DNA, 25 bp, Homo sapien
tctcacaatctaggacaggcccttg

SEQ ID NO: 3637671 - DNA, 25 bp, Homo sapien
tgggtaactccgacacatcccagag

SEQ ID NO: 3637672 - DNA, 25 bp, Homo sapien
gctgagagcagatataccaacagtc

SEQ ID NO: 3637673 - DNA, 25 bp, Homo sapien
aataccaaaatttgtcactatgtgg

SEQ ID NO: 3637674 - DNA, 25 bp, Homo sapien
tggaagatggaagtaaatctaactt

SEQ ID NO: 3637675 - DNA, 25 bp, Homo sapien
tgtaacaggggcccaataccattgt

SEQ ID NO: 3637676 - DNA, 25 bp, Homo sapien
aaaatttgtcactatgtgggggcca

SEQ ID NO: 3637677 - DNA, 25 bp, Homo sapien
tacgggctcctatttgcatcagggt

SEQ ID NO: 3637678 - DNA, 25 bp, Homo sapien
cgtggagcaggacttggaacagctc

SEQ ID NO: 3637679 - DNA, 25 bp, Homo sapien
gtaaggatcagttgacgagggccca

SEQ ID NO: 3637680 - DNA, 25 bp, Homo sapien
tcagacttagcgtggagcaggactt

SEQ ID NO: 3637681 - DNA, 25 bp, Homo sapien
gggtggtcacaaaataggccgccat

SEQ ID NO: 3637682 - DNA, 25 bp, Homo sapien
taggccgccatggacaacatattct

SEQ ID NO: 3637683 - DNA, 25 bp, Homo sapien
caagctataattaccatcgtattcc

SEQ ID NO: 3637684 - DNA, 25 bp, Homo sapien
tatcaatactccctccgccaaagat

SEQ ID NO: 3637685 - DNA, 25 bp, Homo sapien
catccgacatgtgactaacctgatc

SEQ ID NO: 3637686 - DNA, 25 bp, Homo sapien
tgtagccatccgacatgtgactaac

SEQ ID NO: 3637687 - DNA, 25 bp, Homo sapien
ttttgtagccatccgacatgtgact

SEQ ID NO: 3637688 - DNA, 25 bp, Homo sapien
gccatccgacatgtgactaacctga

SEQ ID NO: 3637689 - DNA, 25 bp, Homo sapien
ccaggtggccttagctctttgcaca

SEQ ID NO: 3637690 - DNA, 25 bp, Homo sapien
caggtggccttagctctttgcacag

SEQ ID NO: 3637691 - DNA, 25 bp, Homo sapien
tgcaagacgggccaggtggccttag

SEQ ID NO: 3637692 - DNA, 25 bp, Homo sapien
ccaccacgagtcaacacttccctgg

SEQ ID NO: 3637693 - DNA, 25 bp, Homo sapien
gccgtctgttgtacatggtcgctaa

SEQ ID NO: 3637694 - DNA, 25 bp, Homo sapien
cacttccctggtggggtcgccgtct

SEQ ID NO: 3637695 - DNA, 25 bp, Homo sapien
tgttgtacatggtcgctaatgcatc

SEQ ID NO: 3637696 - DNA, 25 bp, Homo sapien
cctggtgagttgtcgcctggcttga

SEQ ID NO: 3637697 - DNA, 25 bp, Homo sapien
cagagcaatggggcccaagcctggt

SEQ ID NO: 3637698 - DNA, 25 bp, Homo sapien
aagcctggtgagttgtcgcctggct

SEQ ID NO: 3637699 - DNA, 25 bp, Homo sapien
gagttgtcgcctggcttgatcccca

SEQ ID NO: 3637700 - DNA, 25 bp, Homo sapien
tctttctcgaatggtgtcaacgagg

SEQ ID NO: 3637701 - DNA, 25 bp, Homo sapien
ctaagcttcggttcctgccacagga

SEQ ID NO: 3637702 - DNA, 25 bp, Homo sapien
gaggctttgcattccgtgcagcaag

SEQ ID NO: 3637703 - DNA, 25 bp, Homo sapien
cagcaagatgactaaagcagaggga

SEQ ID NO: 3637704 - DNA, 25 bp, Homo sapien
gtagacaggttagcccaccacagca

SEQ ID NO: 3637705 - DNA, 25 bp, Homo sapien
agcccaggtagacaggttagcccac

SEQ ID NO: 3637706 - DNA, 25 bp, Homo sapien
gggctaccaagaggaagcccaggta

SEQ ID NO: 3637707 - DNA, 25 bp, Homo sapien
ggaagcccaggtagacaggttagcc

SEQ ID NO: 3637708 - DNA, 25 bp, Homo sapien
cagatcagagttttgggaactgtca

SEQ ID NO: 3637709 - DNA, 25 bp, Homo sapien
tgggaactgtcaaagtcctgtttcc

SEQ ID NO: 3637710 - DNA, 25 bp, Homo sapien
actgtcaaagtcctgtttccttcct

SEQ ID NO: 3637711 - DNA, 25 bp, Homo sapien
cagagttttgggaactgtcaaagtc

SEQ ID NO: 3637712 - DNA, 25 bp, Homo sapien
taaaggaatctaagtggcgtcctga

SEQ ID NO: 3637713 - DNA, 25 bp, Homo sapien
cgcctcccacagtgggtaaaggaat

SEQ ID NO: 3637714 - DNA, 25 bp, Homo sapien
gaaaaagaacgctcgtcctgtgaca

SEQ ID NO: 3637715 - DNA, 25 bp, Homo sapien
gtcctgagcgctgccttcccatgag

SEQ ID NO: 3637716 - DNA, 25 bp, Homo sapien
tgctgatctctgtctaaccaggtgg

SEQ ID NO: 3637717 - DNA, 25 bp, Homo sapien
caggtggcagcatgtgtcagtcttc

SEQ ID NO: 3637718 - DNA, 25 bp, Homo sapien
gaaacagctgcagtttgctgatctc

SEQ ID NO: 3637719 - DNA, 25 bp, Homo sapien
tcttgtgatttcacgagagagaaac

SEQ ID NO: 3637720 - DNA, 25 bp, Homo sapien
gcaaacccattagctgtctctgagg

SEQ ID NO: 3637721 - DNA, 25 bp, Homo sapien
taagcacgcacctaggagtgaaatg

SEQ ID NO: 3637722 - DNA, 25 bp, Homo sapien
gtagagacagcgtatcactccgttg

SEQ ID NO: 3637723 - DNA, 25 bp, Homo sapien
tcttcggaaaggcatagctctacca

SEQ ID NO: 3637724 - DNA, 25 bp, Homo sapien
atcagttgaggtagggtccctggta

SEQ ID NO: 3637725 - DNA, 25 bp, Homo sapien
tcactcctgctgaatgtattgcttt

SEQ ID NO: 3637726 - DNA, 25 bp, Homo sapien
ttgaggtagggtccctggtattctg

SEQ ID NO: 3637727 - DNA, 25 bp, Homo sapien
ttgtttctgttggttgtcactcctg

SEQ ID NO: 3637728 - DNA, 25 bp, Homo sapien
tacctggacactcgctaggactctt

SEQ ID NO: 3637729 - DNA, 25 bp, Homo sapien
aggagagggaacctatacctggaca

SEQ ID NO: 3637730 - DNA, 25 bp, Homo sapien
tcgctaggactctttctatcactct

SEQ ID NO: 3637731 - DNA, 25 bp, Homo sapien
gagagggaacctatacctggacact

SEQ ID NO: 3637732 - DNA, 25 bp, Homo sapien
tagccttgctacacttctcaggtcc

SEQ ID NO: 3637733 - DNA, 25 bp, Homo sapien
tctgaaaaaacatagccttgctaca

SEQ ID NO: 3637734 - DNA, 25 bp, Homo sapien
cccagctccttgaccaaaaagatgg

SEQ ID NO: 3637735 - DNA, 25 bp, Homo sapien
tcccagctccttgaccaaaaagatg

SEQ ID NO: 3637736 - DNA, 25 bp, Homo sapien
ttacaacaatcgacaagatattctt

SEQ ID NO: 3637737 - DNA, 25 bp, Homo sapien
tacaacaatcgacaagatattcttt

SEQ ID NO: 3637738 - DNA, 25 bp, Homo sapien
agatattcttttatttagactttcg

SEQ ID NO: 3637739 - DNA, 25 bp, Homo sapien
tcttttatttagactttcgtcatta

SEQ ID NO: 3637740 - DNA, 25 bp, Homo sapien
ttcaggacagcagcccacctgtgtg

SEQ ID NO: 3637741 - DNA, 25 bp, Homo sapien
cttcaggacagcagcccacctgtgt

SEQ ID NO: 3637742 - DNA, 25 bp, Homo sapien
tcaggacagcagcccacctgtgtgg

SEQ ID NO: 3637743 - DNA, 25 bp, Homo sapien
tcttcaggacagcagcccacctgtg

SEQ ID NO: 3637744 - DNA, 25 bp, Homo sapien
tcgttctttagcctgctcgctggcc

SEQ ID NO: 3637745 - DNA, 25 bp, Homo sapien
gctgcagattgcttcagaccccgga

SEQ ID NO: 3637746 - DNA, 25 bp, Homo sapien
gatcaacgtgcgtctgactattccg

SEQ ID NO: 3637747 - DNA, 25 bp, Homo sapien
aacatcagcgggcacgctaaggcac

SEQ ID NO: 3637748 - DNA, 25 bp, Homo sapien
tgccgcggacgctgtgcgcatcctt

SEQ ID NO: 3637749 - DNA, 25 bp, Homo sapien
cagtgcttggactcacagattcgca

SEQ ID NO: 3637750 - DNA, 25 bp, Homo sapien
ttgagggttggtgccgcggacgctg

SEQ ID NO: 3637751 - DNA, 25 bp, Homo sapien
gcttggactcacagattcgcattcg

SEQ ID NO: 3637752 - DNA, 25 bp, Homo sapien
tttctcggattgaatctgaagcatc

SEQ ID NO: 3637753 - DNA, 25 bp, Homo sapien
tacctttctcggattgaatctgaag

SEQ ID NO: 3637754 - DNA, 25 bp, Homo sapien
tataaactctgcagtgatacctttc

SEQ ID NO: 3637755 - DNA, 25 bp, Homo sapien
gcagtgatacctttctcggattgaa

SEQ ID NO: 3637756 - DNA, 25 bp, Homo sapien
tctgggagacagactcctactcctt

SEQ ID NO: 3637757 - DNA, 25 bp, Homo sapien
gggagatcgattccgccttctggga

SEQ ID NO: 3637758 - DNA, 25 bp, Homo sapien
ttctacttttgggagatcgattccg

SEQ ID NO: 3637759 - DNA, 25 bp, Homo sapien
tttgggagatcgattccgccttctg

SEQ ID NO: 3637760 - DNA, 25 bp, Homo sapien
cttgctcggatgcctttctcggcgg

SEQ ID NO: 3637761 - DNA, 25 bp, Homo sapien
tgctcggatgcctttctcggcggga

SEQ ID NO: 3637762 - DNA, 25 bp, Homo sapien
tcggatgcctttctcggcgggagaa

SEQ ID NO: 3637763 - DNA, 25 bp, Homo sapien
ctcggatgcctttctcggcgggaga

SEQ ID NO: 3637764 - DNA, 25 bp, Homo sapien
tcttagaccttttgggagattttga

SEQ ID NO: 3637765 - DNA, 25 bp, Homo sapien
ccttccacatagacagatatcctcg

SEQ ID NO: 3637766 - DNA, 25 bp, Homo sapien
gacagatatcctcgtatccacagga

SEQ ID NO: 3637767 - DNA, 25 bp, Homo sapien
tcagatcctttctaccctcataagt

SEQ ID NO: 3637768 - DNA, 25 bp, Homo sapien
aggagcccatttggactaaagccaa

SEQ ID NO: 3637769 - DNA, 25 bp, Homo sapien
tagctgcccacatgttctacacgat

SEQ ID NO: 3637770 - DNA, 25 bp, Homo sapien
gccagggctgtaacctaatgctatg

SEQ ID NO: 3637771 - DNA, 25 bp, Homo sapien
tatgaattctcatgggagacagctc

SEQ ID NO: 3637772 - DNA, 25 bp, Homo sapien
tctacacgatcgcaacaggaggtac

SEQ ID NO: 3637773 - DNA, 25 bp, Homo sapien
agaaacactgtctttgccgatgccc

SEQ ID NO: 3637774 - DNA, 25 bp, Homo sapien
taactctcctgcgatgtgcataagg

SEQ ID NO: 3637775 - DNA, 25 bp, Homo sapien
ctgacagctctggaagaataacggg

SEQ ID NO: 3637776 - DNA, 25 bp, Homo sapien
taagagtatgccgaagccaatttac

SEQ ID NO: 3637777 - DNA, 25 bp, Homo sapien
tggtactaactgttttacacgtagc

SEQ ID NO: 3637778 - DNA, 25 bp, Homo sapien
ggacgagaactgcatgctgtttgca

SEQ ID NO: 3637779 - DNA, 25 bp, Homo sapien
ccctggacgagaactgcatgctgtt

SEQ ID NO: 3637780 - DNA, 25 bp, Homo sapien
acacgtagcacccaaacagaaagtg

SEQ ID NO: 3637781 - DNA, 25 bp, Homo sapien
ttactcttcgcaagtaattacttct

SEQ ID NO: 3637782 - DNA, 25 bp, Homo sapien
tttactcttcgcaagtaattacttc

SEQ ID NO: 3637783 - DNA, 25 bp, Homo sapien
tatctaaacttgaaggtgatgagcc

SEQ ID NO: 3637784 - DNA, 25 bp, Homo sapien
ctaaacttgaaggtgatgagccaat

SEQ ID NO: 3637785 - DNA, 25 bp, Homo sapien
taacattccaacaactatctaaact

SEQ ID NO: 3637786 - DNA, 25 bp, Homo sapien
cataacattccaacaactatctaaa

SEQ ID NO: 3637787 - DNA, 25 bp, Homo sapien
tcttgccactgggactttttcggca

SEQ ID NO: 3637788 - DNA, 25 bp, Homo sapien
ggactttttcggcatctggttcata

SEQ ID NO: 3637789 - DNA, 25 bp, Homo sapien
cactgggactttttcggcatctggt

SEQ ID NO: 3637790 - DNA, 25 bp, Homo sapien
ggcatctggttcataacatttctcg

SEQ ID NO: 3637791 - DNA, 25 bp, Homo sapien
tacttgtagcggggatctctgagta

SEQ ID NO: 3637792 - DNA, 25 bp, Homo sapien
tatacttgtagcggggatctctgag

SEQ ID NO: 3637793 - DNA, 25 bp, Homo sapien
acttgtagcggggatctctgagtac

SEQ ID NO: 3637794 - DNA, 25 bp, Homo sapien
ttatacttgtagcggggatctctga

SEQ ID NO: 3637795 - DNA, 25 bp, Homo sapien
caactttggatcagatgtagctttc

SEQ ID NO: 3637796 - DNA, 25 bp, Homo sapien
gctttcccagtggttcttatgccag

SEQ ID NO: 3637797 - DNA, 25 bp, Homo sapien
ctgctgacaacaactttggatcaga

SEQ ID NO: 3637798 - DNA, 25 bp, Homo sapien
tggatcagatgtagctttcccagtg

SEQ ID NO: 3637799 - DNA, 25 bp, Homo sapien
tcccctggatttgacaattccgatg

SEQ ID NO: 3637800 - DNA, 25 bp, Homo sapien
agtgaggggcttagatccttggttc

SEQ ID NO: 3637801 - DNA, 25 bp, Homo sapien
aaaacgtgtgcttgttcagggcatc

SEQ ID NO: 3637802 - DNA, 25 bp, Homo sapien
gatgagttggtctcaaaaacgtgtg

SEQ ID NO: 3637803 - DNA, 25 bp, Homo sapien
aaacaaggtgactgtgggacatccc

SEQ ID NO: 3637804 - DNA, 25 bp, Homo sapien
caaggatttcacgagaacagccacc

SEQ ID NO: 3637805 - DNA, 25 bp, Homo sapien
gcatgattcatcagcactgcgggct

SEQ ID NO: 3637806 - DNA, 25 bp, Homo sapien
tcaatggctgatacacaagagcagg

SEQ ID NO: 3637807 - DNA, 25 bp, Homo sapien
tatttcctaagagaaaatgcttggg

SEQ ID NO: 3637808 - DNA, 25 bp, Homo sapien
tcctaagagaaaatgcttgggaggg

SEQ ID NO: 3637809 - DNA, 25 bp, Homo sapien
acagatatttcctaagagaaaatgc

SEQ ID NO: 3637810 - DNA, 25 bp, Homo sapien
gatatttcctaagagaaaatgcttg

SEQ ID NO: 3637811 - DNA, 25 bp, Homo sapien
tactctctcctctgctggccacaag

SEQ ID NO: 3637812 - DNA, 25 bp, Homo sapien
ccagactggccctcactcctactct

SEQ ID NO: 3637813 - DNA, 25 bp, Homo sapien
actcctactctctcctctgctggcc

SEQ ID NO: 3637814 - DNA, 25 bp, Homo sapien
ttatcccagactggccctcactcct

SEQ ID NO: 3637815 - DNA, 25 bp, Homo sapien
cttagtgactaactgagaggtgttt

SEQ ID NO: 3637816 - DNA, 25 bp, Homo sapien
aaaacttcgccctcatctctgggtg

SEQ ID NO: 3637817 - DNA, 25 bp, Homo sapien
tctgggtgatgtcagccccataaat

SEQ ID NO: 3637818 - DNA, 25 bp, Homo sapien
gagcttggtgcatctttaacagttc

SEQ ID NO: 3637819 - DNA, 25 bp, Homo sapien
atttctaggcccccacgtggagatt

SEQ ID NO: 3637820 - DNA, 25 bp, Homo sapien
agatttctaggcccccacgtggaga

SEQ ID NO: 3637821 - DNA, 25 bp, Homo sapien
gatttctaggcccccacgtggagat

SEQ ID NO: 3637822 - DNA, 25 bp, Homo sapien
tcccacactcgtccatcaccatggg

SEQ ID NO: 3637823 - DNA, 25 bp, Homo sapien
cctcccacactcgtccatcaccatg

SEQ ID NO: 3637824 - DNA, 25 bp, Homo sapien
cacactcgtccatcaccatgggcat

SEQ ID NO: 3637825 - DNA, 25 bp, Homo sapien
ccacactcgtccatcaccatgggca

SEQ ID NO: 3637826 - DNA, 25 bp, Homo sapien
cattggagttgtctattgcttggtc

SEQ ID NO: 3637827 - DNA, 25 bp, Homo sapien
ctaattcccctttaatgcagcacgc

SEQ ID NO: 3637828 - DNA, 25 bp, Homo sapien
taatgcagcacgctctttcttttct

SEQ ID NO: 3637829 - DNA, 25 bp, Homo sapien
tcttctcctacattggagttgtcta

SEQ ID NO: 3637830 - DNA, 25 bp, Homo sapien
aagcttggatcaggtgctgccgcca

SEQ ID NO: 3637831 - DNA, 25 bp, Homo sapien
tcctgaggcagatgccactcggaat

SEQ ID NO: 3637832 - DNA, 25 bp, Homo sapien
ggcagtggaaaaactccatgtcttc

SEQ ID NO: 3637833 - DNA, 25 bp, Homo sapien
tggataccaaaatatggcagtggaa

SEQ ID NO: 3637834 - DNA, 25 bp, Homo sapien
agtctaagcaccaccactggagatg

SEQ ID NO: 3637835 - DNA, 25 bp, Homo sapien
gacagtgcatggttctctgtcctaa

SEQ ID NO: 3637836 - DNA, 25 bp, Homo sapien
tggagatgccatcaactcttctgtt

SEQ ID NO: 3637837 - DNA, 25 bp, Homo sapien
catggttctctgtcctaagtctaag

SEQ ID NO: 3637838 - DNA, 25 bp, Homo sapien
ctatgccaagcagcaggtgagttac

SEQ ID NO: 3637839 - DNA, 25 bp, Homo sapien
gccagtgacaccaaggagcaggccc

SEQ ID NO: 3637840 - DNA, 25 bp, Homo sapien
ggatcaccgggaagatgccactcta

SEQ ID NO: 3637841 - DNA, 25 bp, Homo sapien
ctcccagctttagggtttgccagtg

SEQ ID NO: 3637842 - DNA, 25 bp, Homo sapien
agggcttcagactcgtatgacacca

SEQ ID NO: 3637843 - DNA, 25 bp, Homo sapien
gtatgacaccaccaggggaagagaa

SEQ ID NO: 3637844 - DNA, 25 bp, Homo sapien
gcttcagactcgtatgacaccacca

SEQ ID NO: 3637845 - DNA, 25 bp, Homo sapien
cagggcttcagactcgtatgacacc

SEQ ID NO: 3637846 - DNA, 25 bp, Homo sapien
ttcagggttggcagaattcgctctt

SEQ ID NO: 3637847 - DNA, 25 bp, Homo sapien
cagaaacgtctcttctttatctaaa

SEQ ID NO: 3637848 - DNA, 25 bp, Homo sapien
tttatctaaaatccggttcctgtgc

SEQ ID NO: 3637849 - DNA, 25 bp, Homo sapien
gagctaagccaaaacgtgggttcag

SEQ ID NO: 3637850 - DNA, 25 bp, Homo sapien
agtttcatgagcacgtgacttttca

SEQ ID NO: 3637851 - DNA, 25 bp, Homo sapien
tgagtttcatgagcacgtgactttt

SEQ ID NO: 3637852 - DNA, 25 bp, Homo sapien
tgtcatgagtttcatgagcacgtga

SEQ ID NO: 3637853 - DNA, 25 bp, Homo sapien
catgagtttcatgagcacgtgactt

SEQ ID NO: 3637854 - DNA, 25 bp, Homo sapien
aaaacgtcagtgtccttctctagca

SEQ ID NO: 3637855 - DNA, 25 bp, Homo sapien
aagcatggcaccgagaagctggtcc

SEQ ID NO: 3637856 - DNA, 25 bp, Homo sapien
tagtgtcacagatgaaaagcatggc

SEQ ID NO: 3637857 - DNA, 25 bp, Homo sapien
gtttagtcacccaccgatataggca

SEQ ID NO: 3637858 - DNA, 25 bp, Homo sapien
acagggcagactctcgaggagagcc

SEQ ID NO: 3637859 - DNA, 25 bp, Homo sapien
gctttagcagaaccactgctttgca

SEQ ID NO: 3637860 - DNA, 25 bp, Homo sapien
gcaaaaggacacttatcacacaaat

SEQ ID NO: 3637861 - DNA, 25 bp, Homo sapien
aatctctgacaagtacatggcaaaa

SEQ ID NO: 3637862 - DNA, 25 bp, Homo sapien
ataatcactgccctcacttgctccc

SEQ ID NO: 3637863 - DNA, 25 bp, Homo sapien
aatcactgccctcacttgctcccat

SEQ ID NO: 3637864 - DNA, 25 bp, Homo sapien
taatcactgccctcacttgctccca

SEQ ID NO: 3637865 - DNA, 25 bp, Homo sapien
taccagctctatctttttcatcatc

SEQ ID NO: 3637866 - DNA, 25 bp, Homo sapien
ctaaattatcagaataggcctggaa

SEQ ID NO: 3637867 - DNA, 25 bp, Homo sapien
ggcctggaatatgcctccaatcttg

SEQ ID NO: 3637868 - DNA, 25 bp, Homo sapien
tcatcatccaatagcccaatcaagg

SEQ ID NO: 3637869 - DNA, 25 bp, Homo sapien
cgtcctaatgatgtgctgattgaaa

SEQ ID NO: 3637870 - DNA, 25 bp, Homo sapien
tgaatggtttttgtgaaagccggga

SEQ ID NO: 3637871 - DNA, 25 bp, Homo sapien
aatgatgtgctgattgaaattaaag

SEQ ID NO: 3637872 - DNA, 25 bp, Homo sapien
tcattggcgtcctaatgatgtgctg

SEQ ID NO: 3637873 - DNA, 25 bp, Homo sapien
cgttgaaggggcatgagaggacgct

SEQ ID NO: 3637874 - DNA, 25 bp, Homo sapien
gcgttgaaggggcatgagaggacgc

SEQ ID NO: 3637875 - DNA, 25 bp, Homo sapien
agttgccgcgtgaacaatgatgcca

SEQ ID NO: 3637876 - DNA, 25 bp, Homo sapien
gcatgaggcacaataccgacggctt

SEQ ID NO: 3637877 - DNA, 25 bp, Homo sapien
accaagcttttgcacaacgaggtgc

SEQ ID NO: 3637878 - DNA, 25 bp, Homo sapien
aacgaggtgcagcacagttgccgcg

SEQ ID NO: 3637879 - DNA, 25 bp, Homo sapien
agaaatgatcccaaaccgagcctcc

SEQ ID NO: 3637880 - DNA, 25 bp, Homo sapien
gcaaacagaaatgatcccaaaccga

SEQ ID NO: 3637881 - DNA, 25 bp, Homo sapien
aaacagaaatgatcccaaaccgagc

SEQ ID NO: 3637882 - DNA, 25 bp, Homo sapien
aacagaaatgatcccaaaccgagcc

SEQ ID NO: 3637883 - DNA, 25 bp, Homo sapien
cttcttcatccattgaaatgccaga

SEQ ID NO: 3637884 - DNA, 25 bp, Homo sapien
ctctgctgattgcatgccaaggttg

SEQ ID NO: 3637885 - DNA, 25 bp, Homo sapien
agagcctttaagtctaatctcctgg

SEQ ID NO: 3637886 - DNA, 25 bp, Homo sapien
tttaagtctaatctcctgggccagc

SEQ ID NO: 3637887 - DNA, 25 bp, Homo sapien
caaccggaatatagcaatttgtctc

SEQ ID NO: 3637888 - DNA, 25 bp, Homo sapien
cctgccagataatatactgattgta

SEQ ID NO: 3637889 - DNA, 25 bp, Homo sapien
tgatatatcaaaaccacaaccggaa

SEQ ID NO: 3637890 - DNA, 25 bp, Homo sapien
caagctgacgattccagttacaggt

SEQ ID NO: 3637891 - DNA, 25 bp, Homo sapien
tacaatgtaccgcataaggccacag

SEQ ID NO: 3637892 - DNA, 25 bp, Homo sapien
aagggagcccttatgatttcactgg

SEQ ID NO: 3637893 - DNA, 25 bp, Homo sapien
tgtcaaaatatggagtgcgggccct

SEQ ID NO: 3637894 - DNA, 25 bp, Homo sapien
taaaccaggatcagtcaagctagcc

SEQ ID NO: 3637895 - DNA, 25 bp, Homo sapien
ccatagttgcttcatgtagtcaatc

SEQ ID NO: 3637896 - DNA, 25 bp, Homo sapien
gggagtggagccttccatagttgct

SEQ ID NO: 3637897 - DNA, 25 bp, Homo sapien
tgtagtcaatctctacctctacggc

SEQ ID NO: 3637898 - DNA, 25 bp, Homo sapien
tagtcaatctctacctctacggcca

SEQ ID NO: 3637899 - DNA, 25 bp, Homo sapien
atagggtaggggatggaggtggttg

SEQ ID NO: 3637900 - DNA, 25 bp, Homo sapien
ggtaggggatggaggtggttgttca

SEQ ID NO: 3637901 - DNA, 25 bp, Homo sapien
taggggatggaggtggttgttcagg

SEQ ID NO: 3637902 - DNA, 25 bp, Homo sapien
gggatggaggtggttgttcaggcat

SEQ ID NO: 3637903 - DNA, 25 bp, Homo sapien
tggggcacccatgggaagccctgca

SEQ ID NO: 3637904 - DNA, 25 bp, Homo sapien
gcacccatgggaagccctgcacctc

SEQ ID NO: 3637905 - DNA, 25 bp, Homo sapien
tgatggggcacccatgggaagccct

SEQ ID NO: 3637906 - DNA, 25 bp, Homo sapien
gggcacccatgggaagccctgcacc

SEQ ID NO: 3637907 - DNA, 25 bp, Homo sapien
cttctttcgagcacagagcattggg

SEQ ID NO: 3637908 - DNA, 25 bp, Homo sapien
gcaacaacatggaaactgccttggt

SEQ ID NO: 3637909 - DNA, 25 bp, Homo sapien
tttttccttctttcgagcacagagc

SEQ ID NO: 3637910 - DNA, 25 bp, Homo sapien
cattggggtacttaatgcggcatcc

SEQ ID NO: 3637911 - DNA, 25 bp, Homo sapien
gctccacggcaaaatacaaggcatc

SEQ ID NO: 3637912 - DNA, 25 bp, Homo sapien
tgcacagatgacatcatcacttggc

SEQ ID NO: 3637913 - DNA, 25 bp, Homo sapien
ttttccatgtaaacagggcctgatt

SEQ ID NO: 3637914 - DNA, 25 bp, Homo sapien
caaggcatctaagccagttgagtgg

SEQ ID NO: 3637915 - DNA, 25 bp, Homo sapien
cagcatccatttgtaaggctattga

SEQ ID NO: 3637916 - DNA, 25 bp, Homo sapien
cacataaaaacactgcgtgaagagg

SEQ ID NO: 3637917 - DNA, 25 bp, Homo sapien
ccatttgtaaggctattgaaggaca

SEQ ID NO: 3637918 - DNA, 25 bp, Homo sapien
acataaaaacactgcgtgaagaggc

SEQ ID NO: 3637919 - DNA, 25 bp, Homo sapien
agcttctccacagttacgaccatca

SEQ ID NO: 3637920 - DNA, 25 bp, Homo sapien
tgtggtacctaggagggagggtagc

SEQ ID NO: 3637921 - DNA, 25 bp, Homo sapien
tagcagtctacacccaagaatgatt

SEQ ID NO: 3637922 - DNA, 25 bp, Homo sapien
gattcagaaactgcttgaagccata

SEQ ID NO: 3637923 - DNA, 25 bp, Homo sapien
cattgcaactctggttctaaaggaa

SEQ ID NO: 3637924 - DNA, 25 bp, Homo sapien
acagcaagcttgcaaaagagctggg

SEQ ID NO: 3637925 - DNA, 25 bp, Homo sapien
ctgattaaccacaaattcagtctgg

SEQ ID NO: 3637926 - DNA, 25 bp, Homo sapien
tgtctcaagccaaaccattgcaact

SEQ ID NO: 3637927 - DNA, 25 bp, Homo sapien
agcaggcacgggctcgggagtgcag

SEQ ID NO: 3637928 - DNA, 25 bp, Homo sapien
caggcacgggctcgggagtgcagag

SEQ ID NO: 3637929 - DNA, 25 bp, Homo sapien
ggctcgggagtgcagagctcagcat

SEQ ID NO: 3637930 - DNA, 25 bp, Homo sapien
agcaaactccaagccggctgcagca

SEQ ID NO: 3637931 - DNA, 25 bp, Homo sapien
agccagattctcacattcgaatcca

SEQ ID NO: 3637932 - DNA, 25 bp, Homo sapien
aatattcatcattaagggtgtgagc

SEQ ID NO: 3637933 - DNA, 25 bp, Homo sapien
cattcgaatccaagctttgccactt

SEQ ID NO: 3637934 - DNA, 25 bp, Homo sapien
tctcacattcgaatccaagctttgc

SEQ ID NO: 3637935 - DNA, 25 bp, Homo sapien
ctgctaaaggtcagatactttccag

SEQ ID NO: 3637936 - DNA, 25 bp, Homo sapien
gctaaaggtcagatactttccagtg

SEQ ID NO: 3637937 - DNA, 25 bp, Homo sapien
gatactttccagtgacaagtttcac

SEQ ID NO: 3637938 - DNA, 25 bp, Homo sapien
ttccagtgacaagtttcacagctga

SEQ ID NO: 3637939 - DNA, 25 bp, Homo sapien
tattggtactacgacagctgtcaga

SEQ ID NO: 3637940 - DNA, 25 bp, Homo sapien
tactacgacagctgtcagaaggcct

SEQ ID NO: 3637941 - DNA, 25 bp, Homo sapien
ggctgaagataacttggcaggactt

SEQ ID NO: 3637942 - DNA, 25 bp, Homo sapien
tggcaggacttattggtactacgac

SEQ ID NO: 3637943 - DNA, 25 bp, Homo sapien
tagactccgagccttggtattcttc

SEQ ID NO: 3637944 - DNA, 25 bp, Homo sapien
tggtattcttccaccaaaagtctag

SEQ ID NO: 3637945 - DNA, 25 bp, Homo sapien
aaagtctagtttgggggcctctgct

SEQ ID NO: 3637946 - DNA, 25 bp, Homo sapien
caaaagtctagtttgggggcctctg

SEQ ID NO: 3637947 - DNA, 25 bp, Homo sapien
ggtttgactcgattccactgacttc

SEQ ID NO: 3637948 - DNA, 25 bp, Homo sapien
gactcgattccactgacttccataa

SEQ ID NO: 3637949 - DNA, 25 bp, Homo sapien
gtgcccagggaatggtttgactcga

SEQ ID NO: 3637950 - DNA, 25 bp, Homo sapien
cagggaatggtttgactcgattcca

SEQ ID NO: 3637951 - DNA, 25 bp, Homo sapien
tcaggagatacaagtgggaatgttt

SEQ ID NO: 3637952 - DNA, 25 bp, Homo sapien
ctcctcagtctgaaaactcttcgag

SEQ ID NO: 3637953 - DNA, 25 bp, Homo sapien
cagtctgaaaactcttcgagggtaa

SEQ ID NO: 3637954 - DNA, 25 bp, Homo sapien
ctcagtctgaaaactcttcgagggt

SEQ ID NO: 3637955 - DNA, 25 bp, Homo sapien
tcctcagtctgaaaactcttcgagg

SEQ ID NO: 3637956 - DNA, 25 bp, Homo sapien
acaacagcagcgttcgttgatctca

SEQ ID NO: 3637957 - DNA, 25 bp, Homo sapien
tcgttgatctcaccccactgttgac

SEQ ID NO: 3637958 - DNA, 25 bp, Homo sapien
taaataacaacagcagcgttcgttg

SEQ ID NO: 3637959 - DNA, 25 bp, Homo sapien
agcagcgttcgttgatctcacccca

SEQ ID NO: 3637960 - DNA, 25 bp, Homo sapien
ccccagtggttcgtgggctgctctt

SEQ ID NO: 3637961 - DNA, 25 bp, Homo sapien
cccagtggttcgtgggctgctcttc

SEQ ID NO: 3637962 - DNA, 25 bp, Homo sapien
cagtggttcgtgggctgctcttctc

SEQ ID NO: 3637963 - DNA, 25 bp, Homo sapien
ccagtggttcgtgggctgctcttct

SEQ ID NO: 3637964 - DNA, 25 bp, Homo sapien
caaggcaaagacattgccattcata

SEQ ID NO: 3637965 - DNA, 25 bp, Homo sapien
tcaaggcaaagacattgccattcat

SEQ ID NO: 3637966 - DNA, 25 bp, Homo sapien
cttcaaggcaaagacattgccattc

SEQ ID NO: 3637967 - DNA, 25 bp, Homo sapien
aaggcaaagacattgccattcatac

SEQ ID NO: 3637968 - DNA, 25 bp, Homo sapien
gagggcactaggtttgtcctttatg

SEQ ID NO: 3637969 - DNA, 25 bp, Homo sapien
gacgtacatgagcacctggtgtcaa

SEQ ID NO: 3637970 - DNA, 25 bp, Homo sapien
tttggacgtacatgagcacctggtg

SEQ ID NO: 3637971 - DNA, 25 bp, Homo sapien
tggacgtacatgagcacctggtgtc

SEQ ID NO: 3637972 - DNA, 25 bp, Homo sapien
tttttggacgtacatgagcacctgg

SEQ ID NO: 3637973 - DNA, 25 bp, Homo sapien
ctttttggagatttaggtctgggat

SEQ ID NO: 3637974 - DNA, 25 bp, Homo sapien
agatttaggtctgggatgatgagac

SEQ ID NO: 3637975 - DNA, 25 bp, Homo sapien
ttaggtctgggatgatgagactcac

SEQ ID NO: 3637976 - DNA, 25 bp, Homo sapien
tttggagatttaggtctgggatgat

SEQ ID NO: 3637977 - DNA, 25 bp, Homo sapien
cattggatgcttgactcagagcaga

SEQ ID NO: 3637978 - DNA, 25 bp, Homo sapien
cattataactgtaatgctttgtagc

SEQ ID NO: 3637979 - DNA, 25 bp, Homo sapien
gacaatggttccatcattataactg

SEQ ID NO: 3637980 - DNA, 25 bp, Homo sapien
tgcttgactcagagcagacaatggt

SEQ ID NO: 3637981 - DNA, 25 bp, Homo sapien
gagccttcatggcttgcctttctcc

SEQ ID NO: 3637982 - DNA, 25 bp, Homo sapien
tcctgaggtcacagttttgtcccaa

SEQ ID NO: 3637983 - DNA, 25 bp, Homo sapien
tgatggcatcctgggctaggtttct

SEQ ID NO: 3637984 - DNA, 25 bp, Homo sapien
aaaatctcaccttggttcagagccg

SEQ ID NO: 3637985 - DNA, 25 bp, Homo sapien
ctttcacgctgtaggggtgacatga

SEQ ID NO: 3637986 - DNA, 25 bp, Homo sapien
tcttggtgtctttcacgctgtaggg

SEQ ID NO: 3637987 - DNA, 25 bp, Homo sapien
tgtctttcacgctgtaggggtgaca

SEQ ID NO: 3637988 - DNA, 25 bp, Homo sapien
gtgtctttcacgctgtaggggtgac

SEQ ID NO: 3637989 - DNA, 25 bp, Homo sapien
ctcttcaagccccaccatgctcttt

SEQ ID NO: 3637990 - DNA, 25 bp, Homo sapien
gccctcagtcctttcagttagacat

SEQ ID NO: 3637991 - DNA, 25 bp, Homo sapien
ctcttttcacactcccacatctttg

SEQ ID NO: 3637992 - DNA, 25 bp, Homo sapien
tttatatcactctcacctgccttgc

SEQ ID NO: 3637993 - DNA, 25 bp, Homo sapien
cagtgttccgtctctcagttggaga

SEQ ID NO: 3637994 - DNA, 25 bp, Homo sapien
gtggaattcttagctggctacaggg

SEQ ID NO: 3637995 - DNA, 25 bp, Homo sapien
gaattcttagctggctacagggcac

SEQ ID NO: 3637996 - DNA, 25 bp, Homo sapien
gcacttcagtgttccgtctctcagt

SEQ ID NO: 3637997 - DNA, 25 bp, Homo sapien
ttctaccagccagtgctaaactgtg

SEQ ID NO: 3637998 - DNA, 25 bp, Homo sapien
gctttagcaggatagctgcggacct

SEQ ID NO: 3637999 - DNA, 25 bp, Homo sapien
cacccctcatatacagctttagcag

SEQ ID NO: 3638000 - DNA, 25 bp, Homo sapien
accctcggcaaaaggctgcctgctt

SEQ ID NO: 3638001 - DNA, 25 bp, Homo sapien
tcatggctcagttccataccgcatg

SEQ ID NO: 3638002 - DNA, 25 bp, Homo sapien
agagcgggacatgtcacctggggtg

SEQ ID NO: 3638003 - DNA, 25 bp, Homo sapien
tggctcagttccataccgcatggca

SEQ ID NO: 3638004 - DNA, 25 bp, Homo sapien
ctcagttccataccgcatggcaggg

SEQ ID NO: 3638005 - DNA, 25 bp, Homo sapien
ggcatacttagaacactcctaggga

SEQ ID NO: 3638006 - DNA, 25 bp, Homo sapien
gattgccaatttgagagcccaggca

SEQ ID NO: 3638007 - DNA, 25 bp, Homo sapien
aaaattccccaacaatgagattgcc

SEQ ID NO: 3638008 - DNA, 25 bp, Homo sapien
tctctatacaggcttagagcaggct

SEQ ID NO: 3638009 - DNA, 25 bp, Homo sapien
ctgcactccggctgtattttgtata

SEQ ID NO: 3638010 - DNA, 25 bp, Homo sapien
tgcactccggctgtattttgtatat

SEQ ID NO: 3638011 - DNA, 25 bp, Homo sapien
gcactccggctgtattttgtatata

SEQ ID NO: 3638012 - DNA, 25 bp, Homo sapien
actgcactccggctgtattttgtat

SEQ ID NO: 3638013 - DNA, 25 bp, Homo sapien
gctaccgatgctgagagactgctgg

SEQ ID NO: 3638014 - DNA, 25 bp, Homo sapien
tgttctacagaagaccattagctgc

SEQ ID NO: 3638015 - DNA, 25 bp, Homo sapien
tagctccctaatgaggctaccgatg

SEQ ID NO: 3638016 - DNA, 25 bp, Homo sapien
tattgtttcaacttatgttctacag

SEQ ID NO: 3638017 - DNA, 25 bp, Homo sapien
tgagaaggtccccagatcattccta

SEQ ID NO: 3638018 - DNA, 25 bp, Homo sapien
gaaaagaagcactgcacagcatgtg

SEQ ID NO: 3638019 - DNA, 25 bp, Homo sapien
gacacagaaagtatccgttgtttgg

SEQ ID NO: 3638020 - DNA, 25 bp, Homo sapien
tctggatggctcctcttaggatgaa

SEQ ID NO: 3638021 - DNA, 25 bp, Homo sapien
cacgctgatgttgagcgatcgcagc

SEQ ID NO: 3638022 - DNA, 25 bp, Homo sapien
tgggaacgtgaagtccagctgtgca

SEQ ID NO: 3638023 - DNA, 25 bp, Homo sapien
cggtgcgcaggctcagaagcaatgc

SEQ ID NO: 3638024 - DNA, 25 bp, Homo sapien
gatcgcagccgtttttggaggaaga

SEQ ID NO: 3638025 - DNA, 25 bp, Homo sapien
ttaattacagtgaccaacagccgcc

SEQ ID NO: 3638026 - DNA, 25 bp, Homo sapien
cacgtctttgcataggtgcatcaca

SEQ ID NO: 3638027 - DNA, 25 bp, Homo sapien
cgcgttcataagaccgagtaggcac

SEQ ID NO: 3638028 - DNA, 25 bp, Homo sapien
gcatcacagaacaccactcttcagg

SEQ ID NO: 3638029 - DNA, 25 bp, Homo sapien
tcctcgtactgtggcctcagtctgt

SEQ ID NO: 3638030 - DNA, 25 bp, Homo sapien
gaatcaaggacagtcgacaacaaag

SEQ ID NO: 3638031 - DNA, 25 bp, Homo sapien
gctgggaacgtatttgagattatct

SEQ ID NO: 3638032 - DNA, 25 bp, Homo sapien
cccattcactgccttggtgctaaga

SEQ ID NO: 3638033 - DNA, 25 bp, Homo sapien
tgaatacaaagtcctggtttgtccg

SEQ ID NO: 3638034 - DNA, 25 bp, Homo sapien
ctcttccttgaagctgaatacaaag

SEQ ID NO: 3638035 - DNA, 25 bp, Homo sapien
tgtccgtgaacctgcagatgtgaag

SEQ ID NO: 3638036 - DNA, 25 bp, Homo sapien
cctggtttgtccgtgaacctgcaga

SEQ ID NO: 3638037 - DNA, 25 bp, Homo sapien
caagagtggcccctgcataggtggc

SEQ ID NO: 3638038 - DNA, 25 bp, Homo sapien
ccaagagtggcccctgcataggtgg

SEQ ID NO: 3638039 - DNA, 25 bp, Homo sapien
agagtggcccctgcataggtggcat

SEQ ID NO: 3638040 - DNA, 25 bp, Homo sapien
aagagtggcccctgcataggtggca

SEQ ID NO: 3638041 - DNA, 25 bp, Homo sapien
ggcagggaagccactaagtaagtag

SEQ ID NO: 3638042 - DNA, 25 bp, Homo sapien
agtaggtatatgcagtagatactgc

SEQ ID NO: 3638043 - DNA, 25 bp, Homo sapien
tcagaaaggaccagggataaatgac

SEQ ID NO: 3638044 - DNA, 25 bp, Homo sapien
cagggataaatgaccaggcagggaa

SEQ ID NO: 3638045 - DNA, 25 bp, Homo sapien
atcccagaaccagccaagtctgcct

SEQ ID NO: 3638046 - DNA, 25 bp, Homo sapien
ctatgatgcccttgatgggtggtct

SEQ ID NO: 3638047 - DNA, 25 bp, Homo sapien
tgatgcccttgatgggtggtctcca

SEQ ID NO: 3638048 - DNA, 25 bp, Homo sapien
gcctgaagaggcagaatccatgcca

SEQ ID NO: 3638049 - DNA, 25 bp, Homo sapien
tagttgtgatccaggtcttcattcc

SEQ ID NO: 3638050 - DNA, 25 bp, Homo sapien
gatccaggtcttcattccacccgaa

SEQ ID NO: 3638051 - DNA, 25 bp, Homo sapien
caggtcttcattccacccgaattct

SEQ ID NO: 3638052 - DNA, 25 bp, Homo sapien
gacagtagttgtgatccaggtcttc

SEQ ID NO: 3638053 - DNA, 25 bp, Homo sapien
cttgcaggtggttcataaaaaagtc

SEQ ID NO: 3638054 - DNA, 25 bp, Homo sapien
tgtgcctgagataaggcctcatcca

SEQ ID NO: 3638055 - DNA, 25 bp, Homo sapien
ctgccttgagctcccataaaacatg

SEQ ID NO: 3638056 - DNA, 25 bp, Homo sapien
gaacagggaaggttacatgtgtgcc

SEQ ID NO: 3638057 - DNA, 25 bp, Homo sapien
tttacatcattagggattgccaggg

SEQ ID NO: 3638058 - DNA, 25 bp, Homo sapien
gggcaagtctctacaggaatctttg

SEQ ID NO: 3638059 - DNA, 25 bp, Homo sapien
tgccagggggcaagtctctacagga

SEQ ID NO: 3638060 - DNA, 25 bp, Homo sapien
tcttggagtaggtctttacatcatt

SEQ ID NO: 3638061 - DNA, 25 bp, Homo sapien
gaggacttggtatctctgccttgcc

SEQ ID NO: 3638062 - DNA, 25 bp, Homo sapien
caaccgtagttgaggagatggacat

SEQ ID NO: 3638063 - DNA, 25 bp, Homo sapien
caatgaggatagagtcaaccgtagt

SEQ ID NO: 3638064 - DNA, 25 bp, Homo sapien
gaatagttacactggccgtaggagc

SEQ ID NO: 3638065 - DNA, 25 bp, Homo sapien
agagagaaaaacgtctttaatatgt

SEQ ID NO: 3638066 - DNA, 25 bp, Homo sapien
cacaagagagaaaaacgtctttaat

SEQ ID NO: 3638067 - DNA, 25 bp, Homo sapien
cgtctttaatatgtttaaaacatgt

SEQ ID NO: 3638068 - DNA, 25 bp, Homo sapien
acgtctttaatatgtttaaaacatg

SEQ ID NO: 3638069 - DNA, 25 bp, Homo sapien
gaacattcaaaatgcaacaacgcat

SEQ ID NO: 3638070 - DNA, 25 bp, Homo sapien
tgaacattcaaaatgcaacaacgca

SEQ ID NO: 3638071 - DNA, 25 bp, Homo sapien
aacaaagggatatgttctcaatggc

SEQ ID NO: 3638072 - DNA, 25 bp, Homo sapien
caaagggatatgttctcaatggcaa

SEQ ID NO: 3638073 - DNA, 25 bp, Homo sapien
acaaagggatatgttctcaatggca

SEQ ID NO: 3638074 - DNA, 25 bp, Homo sapien
catcgtatttaacaagagcaatgaa

SEQ ID NO: 3638075 - DNA, 25 bp, Homo sapien
tgaggggccctttaggaccacaggc

SEQ ID NO: 3638076 - DNA, 25 bp, Homo sapien
gagataatccagcttatcagctgtg

SEQ ID NO: 3638077 - DNA, 25 bp, Homo sapien
tattgccatgggctactacttggtc

SEQ ID NO: 3638078 - DNA, 25 bp, Homo sapien
ttagtcaagtcttagtttgactaac

SEQ ID NO: 3638079 - DNA, 25 bp, Homo sapien
caccctcgagttatgcctgcctctt

SEQ ID NO: 3638080 - DNA, 25 bp, Homo sapien
tcaccctcgagttatgcctgcctct

SEQ ID NO: 3638081 - DNA, 25 bp, Homo sapien
gcatgtgcatgccttgagaatgagt

SEQ ID NO: 3638082 - DNA, 25 bp, Homo sapien
cagtaagacaacgtcaaagcaacaa

SEQ ID NO: 3638083 - DNA, 25 bp, Homo sapien
atgagtttctggaagggttcaacat

SEQ ID NO: 3638084 - DNA, 25 bp, Homo sapien
taaaagcgacatgttcacacaagca

SEQ ID NO: 3638085 - DNA, 25 bp, Homo sapien
tatcatgtttgttctgcatcatgtg

SEQ ID NO: 3638086 - DNA, 25 bp, Homo sapien
catcatgtggattgctgttccatct

SEQ ID NO: 3638087 - DNA, 25 bp, Homo sapien
aaatgataatttcagcctgacttcc

SEQ ID NO: 3638088 - DNA, 25 bp, Homo sapien
cagtatctaccttcgcccataacat

SEQ ID NO: 3638089 - DNA, 25 bp, Homo sapien
agatcttcatgagcagccgctgcca

SEQ ID NO: 3638090 - DNA, 25 bp, Homo sapien
gatcttcatgagcagccgctgccat

SEQ ID NO: 3638091 - DNA, 25 bp, Homo sapien
tatacatatcgagtcacaaaggctg

SEQ ID NO: 3638092 - DNA, 25 bp, Homo sapien
tctctgcctttgtggaaattacagg

SEQ ID NO: 3638093 - DNA, 25 bp, Homo sapien
ggaggagttcggatgaaaatataca

SEQ ID NO: 3638094 - DNA, 25 bp, Homo sapien
aggctgccaaaaggtaagtacggag

SEQ ID NO: 3638095 - DNA, 25 bp, Homo sapien
tggccattccgtgaacattttgtaa

SEQ ID NO: 3638096 - DNA, 25 bp, Homo sapien
ggccattccgtgaacattttgtaac

SEQ ID NO: 3638097 - DNA, 25 bp, Homo sapien
tctggccattccgtgaacattttgt

SEQ ID NO: 3638098 - DNA, 25 bp, Homo sapien
atttctggccattccgtgaacattt

SEQ ID NO: 3638099 - DNA, 25 bp, Homo sapien
atggtggtgacgactgcctgcaatt

SEQ ID NO: 3638100 - DNA, 25 bp, Homo sapien
agtctatggtggtgacgactgcctg

SEQ ID NO: 3638101 - DNA, 25 bp, Homo sapien
tctatggtggtgacgactgcctgca

SEQ ID NO: 3638102 - DNA, 25 bp, Homo sapien
tatggtggtgacgactgcctgcaat

SEQ ID NO: 3638103 - DNA, 25 bp, Homo sapien
agtgctcaaggtcccacccgtggct

SEQ ID NO: 3638104 - DNA, 25 bp, Homo sapien
aaggtgacccgatgagtgctcaagg

SEQ ID NO: 3638105 - DNA, 25 bp, Homo sapien
acccgatgagtgctcaaggtcccac

SEQ ID NO: 3638106 - DNA, 25 bp, Homo sapien
cgaaggtgacccgatgagtgctcaa

SEQ ID NO: 3638107 - DNA, 25 bp, Homo sapien
gaaccagatggagaggattccttca

SEQ ID NO: 3638108 - DNA, 25 bp, Homo sapien
cagtctagccagctccactttgcag

SEQ ID NO: 3638109 - DNA, 25 bp, Homo sapien
ggcttgttccaatgttagctcctca

SEQ ID NO: 3638110 - DNA, 25 bp, Homo sapien
tccagccgcctagcaaggtgcattg

SEQ ID NO: 3638111 - DNA, 25 bp, Homo sapien
tcttggcttgataccctctctcgag

SEQ ID NO: 3638112 - DNA, 25 bp, Homo sapien
ctggccagagtggagcatttgaagg

SEQ ID NO: 3638113 - DNA, 25 bp, Homo sapien
gcatagactggatgagactcataca

SEQ ID NO: 3638114 - DNA, 25 bp, Homo sapien
gcctggaggtcagcatagactggat

SEQ ID NO: 3638115 - DNA, 25 bp, Homo sapien
ctggtgggtgttctcgtagtaacac

SEQ ID NO: 3638116 - DNA, 25 bp, Homo sapien
gcttgttctaaaagttgttgatact

SEQ ID NO: 3638117 - DNA, 25 bp, Homo sapien
ttgcttgttctaaaagttgttgata

SEQ ID NO: 3638118 - DNA, 25 bp, Homo sapien
tgcttgttctaaaagttgttgatac

SEQ ID NO: 3638119 - DNA, 25 bp, Homo sapien
cttgttctaaaagttgttgatactt

SEQ ID NO: 3638120 - DNA, 25 bp, Homo sapien
gaaggttgattccttaagtatgttc

SEQ ID NO: 3638121 - DNA, 25 bp, Homo sapien
gaaatcacattggaaggttgattcc

SEQ ID NO: 3638122 - DNA, 25 bp, Homo sapien
cattggaaggttgattccttaagta

SEQ ID NO: 3638123 - DNA, 25 bp, Homo sapien
acagaaatcacattggaaggttgat

SEQ ID NO: 3638124 - DNA, 25 bp, Homo sapien
tgtcatagagatgcatgtcaacaac

SEQ ID NO: 3638125 - DNA, 25 bp, Homo sapien
tgggtatctcccttttgtcatagag

SEQ ID NO: 3638126 - DNA, 25 bp, Homo sapien
tgaatgacagccacgtaggagaagt

SEQ ID NO: 3638127 - DNA, 25 bp, Homo sapien
ggaagagtggagtgtgattcaccaa

SEQ ID NO: 3638128 - DNA, 25 bp, Homo sapien
aacaatggcagaaaccagtctctgc

SEQ ID NO: 3638129 - DNA, 25 bp, Homo sapien
agtctctgctgtcttgcaaccacca

SEQ ID NO: 3638130 - DNA, 25 bp, Homo sapien
caaaaacaatggcagaaaccagtct

SEQ ID NO: 3638131 - DNA, 25 bp, Homo sapien
cagtctctgctgtcttgcaaccacc

SEQ ID NO: 3638132 - DNA, 25 bp, Homo sapien
ccttgttcctttgcctttgtgcctt

SEQ ID NO: 3638133 - DNA, 25 bp, Homo sapien
tcctttgcctttgtgccttgctcct

SEQ ID NO: 3638134 - DNA, 25 bp, Homo sapien
tgttcctttgcctttgtgccttgct

SEQ ID NO: 3638135 - DNA, 25 bp, Homo sapien
ctttgcctttgtgccttgctcctct

SEQ ID NO: 3638136 - DNA, 25 bp, Homo sapien
cagaacataagaaaggccaaaacct

SEQ ID NO: 3638137 - DNA, 25 bp, Homo sapien
ggccaaaaccttgttgctatgaaaa

SEQ ID NO: 3638138 - DNA, 25 bp, Homo sapien
agtggcattaagtcctgctcaaggc

SEQ ID NO: 3638139 - DNA, 25 bp, Homo sapien
taagtggcattaagtcctgctcaag

SEQ ID NO: 3638140 - DNA, 25 bp, Homo sapien
ggctgttagcttctgacctctctat

SEQ ID NO: 3638141 - DNA, 25 bp, Homo sapien
tccttctgacccaatggactccttg

SEQ ID NO: 3638142 - DNA, 25 bp, Homo sapien
gacagtcttagaaggcaacagccaa

SEQ ID NO: 3638143 - DNA, 25 bp, Homo sapien
tagacaaccttattatggtaattgc

SEQ ID NO: 3638144 - DNA, 25 bp, Homo sapien
cggtccgttatggaacacttgacac

SEQ ID NO: 3638145 - DNA, 25 bp, Homo sapien
ccccagagcggtccgttatggaaca

SEQ ID NO: 3638146 - DNA, 25 bp, Homo sapien
tgacacttcttaaatcgactagcag

SEQ ID NO: 3638147 - DNA, 25 bp, Homo sapien
ttaaatcgactagcagcactttctc

SEQ ID NO: 3638148 - DNA, 25 bp, Homo sapien
ctccaagacttgtgatatgagacac

SEQ ID NO: 3638149 - DNA, 25 bp, Homo sapien
cctctccaagacttgtgatatgaga

SEQ ID NO: 3638150 - DNA, 25 bp, Homo sapien
tccctctccaagacttgtgatatga

SEQ ID NO: 3638151 - DNA, 25 bp, Homo sapien
caagacttgtgatatgagacacatc

SEQ ID NO: 3638152 - DNA, 25 bp, Homo sapien
tcctcatcaagagttgtacagagct

SEQ ID NO: 3638153 - DNA, 25 bp, Homo sapien
gggactgacgtttccaggtcacagt

SEQ ID NO: 3638154 - DNA, 25 bp, Homo sapien
tctctgtggcctaatctgtacaggc

SEQ ID NO: 3638155 - DNA, 25 bp, Homo sapien
cagagcttatgctgtgggactgacg

SEQ ID NO: 3638156 - DNA, 25 bp, Homo sapien
tcaatggtgtcttcatcaaacctag

SEQ ID NO: 3638157 - DNA, 25 bp, Homo sapien
tggtgtcttcatcaaacctagacat

SEQ ID NO: 3638158 - DNA, 25 bp, Homo sapien
aatggtgtcttcatcaaacctagac

SEQ ID NO: 3638159 - DNA, 25 bp, Homo sapien
ttgctcaatggtgtcttcatcaaac

SEQ ID NO: 3638160 - DNA, 25 bp, Homo sapien
gacctagccttgatactataatgca

SEQ ID NO: 3638161 - DNA, 25 bp, Homo sapien
tgtggccatgctggttcgtgaccta

SEQ ID NO: 3638162 - DNA, 25 bp, Homo sapien
ctataatgcaggaagtccatattga

SEQ ID NO: 3638163 - DNA, 25 bp, Homo sapien
ccgtagacaaatcttggaagccagg

SEQ ID NO: 3638164 - DNA, 25 bp, Homo sapien
gcatattcctccagatagaacaccc

SEQ ID NO: 3638165 - DNA, 25 bp, Homo sapien
acacagggtcatccaaaaacagtga

SEQ ID NO: 3638166 - DNA, 25 bp, Homo sapien
caaagatcttgtccatcgcatattc

SEQ ID NO: 3638167 - DNA, 25 bp, Homo sapien
tttcgactaggttcctggagtccac

SEQ ID NO: 3638168 - DNA, 25 bp, Homo sapien
caggcatgatgtttttggtgaaacc

SEQ ID NO: 3638169 - DNA, 25 bp, Homo sapien
ttttggtgaaaccatgccaggcatg

SEQ ID NO: 3638170 - DNA, 25 bp, Homo sapien
ccaggcatgggagcaagctctttac

SEQ ID NO: 3638171 - DNA, 25 bp, Homo sapien
tttcttcacagttcaggcatgatgt

SEQ ID NO: 3638172 - DNA, 25 bp, Homo sapien
tcactggcagtgatcgtgtacttag

SEQ ID NO: 3638173 - DNA, 25 bp, Homo sapien
ttcactggcagtgatcgtgtactta

SEQ ID NO: 3638174 - DNA, 25 bp, Homo sapien
tttcactggcagtgatcgtgtactt

SEQ ID NO: 3638175 - DNA, 25 bp, Homo sapien
cttgtttttaatcttccacggatgg

SEQ ID NO: 3638176 - DNA, 25 bp, Homo sapien
gcacttgtttttaatcttccacgga

SEQ ID NO: 3638177 - DNA, 25 bp, Homo sapien
ctgcacttgtttttaatcttccacg

SEQ ID NO: 3638178 - DNA, 25 bp, Homo sapien
cacttgtttttaatcttccacggat

SEQ ID NO: 3638179 - DNA, 25 bp, Homo sapien
aacactctcccacaagccgtaatgg

SEQ ID NO: 3638180 - DNA, 25 bp, Homo sapien
caagccgtaatggaagtttcccatt

SEQ ID NO: 3638181 - DNA, 25 bp, Homo sapien
ctcccacaagccgtaatggaagttt

SEQ ID NO: 3638182 - DNA, 25 bp, Homo sapien
cacaagccgtaatggaagtttccca

SEQ ID NO: 3638183 - DNA, 25 bp, Homo sapien
tttcctcaacaatgaaatcttcttg

SEQ ID NO: 3638184 - DNA, 25 bp, Homo sapien
tcaacaatgaaatcttcttgtaagt

SEQ ID NO: 3638185 - DNA, 25 bp, Homo sapien
acaatgaaatcttcttgtaagtcac

SEQ ID NO: 3638186 - DNA, 25 bp, Homo sapien
tcctcaacaatgaaatcttcttgta

SEQ ID NO: 3638187 - DNA, 25 bp, Homo sapien
tgttgtgaacaccaacttcaatggg

SEQ ID NO: 3638188 - DNA, 25 bp, Homo sapien
tcaatgggagtaacttggagctgca

SEQ ID NO: 3638189 - DNA, 25 bp, Homo sapien
tccgcagtgagatgtcaactgcatc

SEQ ID NO: 3638190 - DNA, 25 bp, Homo sapien
catcacaaatggtgttgtgaacacc

SEQ ID NO: 3638191 - DNA, 25 bp, Homo sapien
tgtttccaggtgcaaaggcaagaca

SEQ ID NO: 3638192 - DNA, 25 bp, Homo sapien
cacattggaatctttcgaaaaggaa

SEQ ID NO: 3638193 - DNA, 25 bp, Homo sapien
gaacaaatcatcatgcttgctgttg

SEQ ID NO: 3638194 - DNA, 25 bp, Homo sapien
gaatcctgctaataagctcagaagc

SEQ ID NO: 3638195 - DNA, 25 bp, Homo sapien
ccttctttagaattggagttgcttc

SEQ ID NO: 3638196 - DNA, 25 bp, Homo sapien
aggaacaccttctttagaattggag

SEQ ID NO: 3638197 - DNA, 25 bp, Homo sapien
gaattggagttgcttcttttgtgag

SEQ ID NO: 3638198 - DNA, 25 bp, Homo sapien
ctaaggaacaccttctttagaattg

SEQ ID NO: 3638199 - DNA, 25 bp, Homo sapien
agcagaatctgatgtgtttcagtca

SEQ ID NO: 3638200 - DNA, 25 bp, Homo sapien
gcagaatctgatgtgtttcagtcat

SEQ ID NO: 3638201 - DNA, 25 bp, Homo sapien
aagcagaatctgatgtgtttcagtc

SEQ ID NO: 3638202 - DNA, 25 bp, Homo sapien
taagcagaatctgatgtgtttcagt

SEQ ID NO: 3638203 - DNA, 25 bp, Homo sapien
tatgtgcttaagctcgttcatttgc

SEQ ID NO: 3638204 - DNA, 25 bp, Homo sapien
ttctacgtgtaatatgtgcttaagc

SEQ ID NO: 3638205 - DNA, 25 bp, Homo sapien
tgtaatatgtgcttaagctcgttca

SEQ ID NO: 3638206 - DNA, 25 bp, Homo sapien
gcttaagctcgttcatttgcatttc

SEQ ID NO: 3638207 - DNA, 25 bp, Homo sapien
gaactattccaagacccaggaaagc

SEQ ID NO: 3638208 - DNA, 25 bp, Homo sapien
caagacccaggaaagcgaatttcca

SEQ ID NO: 3638209 - DNA, 25 bp, Homo sapien
tattccaagacccaggaaagcgaat

SEQ ID NO: 3638210 - DNA, 25 bp, Homo sapien
tccaagacccaggaaagcgaatttc

SEQ ID NO: 3638211 - DNA, 25 bp, Homo sapien
tcagcttcgttggaggagtagacat

SEQ ID NO: 3638212 - DNA, 25 bp, Homo sapien
tagcatcgtaaggaagtcatctccc

SEQ ID NO: 3638213 - DNA, 25 bp, Homo sapien
gagtagacatgaaggctgttataca

SEQ ID NO: 3638214 - DNA, 25 bp, Homo sapien
tgtttgacttaaatccctcctggtg

SEQ ID NO: 3638215 - DNA, 25 bp, Homo sapien
catgaggtatgacaaagacagttct

SEQ ID NO: 3638216 - DNA, 25 bp, Homo sapien
tttccaaaccacgtcccacattcta

SEQ ID NO: 3638217 - DNA, 25 bp, Homo sapien
cattctattaatgcttctccccatt

SEQ ID NO: 3638218 - DNA, 25 bp, Homo sapien
atctttctgcatgaggtatgacaaa

SEQ ID NO: 3638219 - DNA, 25 bp, Homo sapien
aagactagagatagagtcatcacac

SEQ ID NO: 3638220 - DNA, 25 bp, Homo sapien
gatagagtcatcacacagatttcct

SEQ ID NO: 3638221 - DNA, 25 bp, Homo sapien
tagagatagagtcatcacacagatt

SEQ ID NO: 3638222 - DNA, 25 bp, Homo sapien
gactagagatagagtcatcacacag

SEQ ID NO: 3638223 - DNA, 25 bp, Homo sapien
agatccacaattagtgccacctctt

SEQ ID NO: 3638224 - DNA, 25 bp, Homo sapien
ttcaagatccacaattagtgccacc

SEQ ID NO: 3638225 - DNA, 25 bp, Homo sapien
caagatccacaattagtgccacctc

SEQ ID NO: 3638226 - DNA, 25 bp, Homo sapien
ttttcaagatccacaattagtgcca

SEQ ID NO: 3638227 - DNA, 25 bp, Homo sapien
tcgaatcctattttgtcctggcagt

SEQ ID NO: 3638228 - DNA, 25 bp, Homo sapien
tctcatctggattgttacttcctcg

SEQ ID NO: 3638229 - DNA, 25 bp, Homo sapien
ggattgttacttcctcgaatcctat

SEQ ID NO: 3638230 - DNA, 25 bp, Homo sapien
tacttcctcgaatcctattttgtcc

SEQ ID NO: 3638231 - DNA, 25 bp, Homo sapien
taaccaagagtaacaccaacgacag

SEQ ID NO: 3638232 - DNA, 25 bp, Homo sapien
gcccctgtgttcctgtgtcgtaaca

SEQ ID NO: 3638233 - DNA, 25 bp, Homo sapien
agttattcaacttctggaggagcag

SEQ ID NO: 3638234 - DNA, 25 bp, Homo sapien
gcagaatgacacctgggaaaataat

SEQ ID NO: 3638235 - DNA, 25 bp, Homo sapien
gcttagcatttacaagtatagaaga

SEQ ID NO: 3638236 - DNA, 25 bp, Homo sapien
caagtatagaagaacacttatttgc

SEQ ID NO: 3638237 - DNA, 25 bp, Homo sapien
tgctattctctccaggttactctcg

SEQ ID NO: 3638238 - DNA, 25 bp, Homo sapien
cgtagacaatctgggcacattcctc

SEQ ID NO: 3638239 - DNA, 25 bp, Homo sapien
ccaggtcatcagtaccttcacagct

SEQ ID NO: 3638240 - DNA, 25 bp, Homo sapien
gtcatcagtaccttcacagctgcac

SEQ ID NO: 3638241 - DNA, 25 bp, Homo sapien
attctctgtccaggtcatcagtacc

SEQ ID NO: 3638242 - DNA, 25 bp, Homo sapien
catttggcagcagcattctctgtcc

SEQ ID NO: 3638243 - DNA, 25 bp, Homo sapien
ctgtgtaaagtactctggagggctg

SEQ ID NO: 3638244 - DNA, 25 bp, Homo sapien
tcaactgcaggtgatgaactgtagg

SEQ ID NO: 3638245 - DNA, 25 bp, Homo sapien
caactgcaggtgatgaactgtaggt

SEQ ID NO: 3638246 - DNA, 25 bp, Homo sapien
taaagtactctggagggctggcttt

SEQ ID NO: 3638247 - DNA, 25 bp, Homo sapien
ttctcctctctcccgacattctgca

SEQ ID NO: 3638248 - DNA, 25 bp, Homo sapien
tgggagggcgattgccttctcctct

SEQ ID NO: 3638249 - DNA, 25 bp, Homo sapien
cttctcctctctcccgacattctgc

SEQ ID NO: 3638250 - DNA, 25 bp, Homo sapien
ggctgggagggcgattgccttctcc

SEQ ID NO: 3638251 - DNA, 25 bp, Homo sapien
tgcatctccatgagcccctgagaag

SEQ ID NO: 3638252 - DNA, 25 bp, Homo sapien
cttggatacttcacttttctcttta

SEQ ID NO: 3638253 - DNA, 25 bp, Homo sapien
cttcacttttctctttatcctccat

SEQ ID NO: 3638254 - DNA, 25 bp, Homo sapien
tacttcacttttctctttatcctcc

SEQ ID NO: 3638255 - DNA, 25 bp, Homo sapien
gatacttcacttttctctttatcct

SEQ ID NO: 3638256 - DNA, 25 bp, Homo sapien
gtgcacctgcaatcgcaggcgctcg

SEQ ID NO: 3638257 - DNA, 25 bp, Homo sapien
gcgtgcacctgcaatcgcaggcgct

SEQ ID NO: 3638258 - DNA, 25 bp, Homo sapien
tgcacctgcaatcgcaggcgctcgg

SEQ ID NO: 3638259 - DNA, 25 bp, Homo sapien
cggcgtgcacctgcaatcgcaggcg

SEQ ID NO: 3638260 - DNA, 25 bp, Homo sapien
gataaattggttctaaggacactca

SEQ ID NO: 3638261 - DNA, 25 bp, Homo sapien
tctctggatggcagggtcgtctcat

SEQ ID NO: 3638262 - DNA, 25 bp, Homo sapien
catgggatcgtgtcgaacttaggca

SEQ ID NO: 3638263 - DNA, 25 bp, Homo sapien
aagtccaaagtgtcttgaaggctga

SEQ ID NO: 3638264 - DNA, 25 bp, Homo sapien
tattgctggctgagactgtcctttc

SEQ ID NO: 3638265 - DNA, 25 bp, Homo sapien
gagaattgatattgctggctgagac

SEQ ID NO: 3638266 - DNA, 25 bp, Homo sapien
tgatattgctggctgagactgtcct

SEQ ID NO: 3638267 - DNA, 25 bp, Homo sapien
ttctgagaattgatattgctggctg

SEQ ID NO: 3638268 - DNA, 25 bp, Homo sapien
gggctaaccaggctcagccggttca

SEQ ID NO: 3638269 - DNA, 25 bp, Homo sapien
cttatacaatgaatcaagggctaac

SEQ ID NO: 3638270 - DNA, 25 bp, Homo sapien
ttcagagtttggtgccgtggctaaa

SEQ ID NO: 3638271 - DNA, 25 bp, Homo sapien
tgccgtggctaaagagaaagaatct

SEQ ID NO: 3638272 - DNA, 25 bp, Homo sapien
tggacttggcaggagtccagttcag

SEQ ID NO: 3638273 - DNA, 25 bp, Homo sapien
ttgcaaaatcggtttgtggacttgg

SEQ ID NO: 3638274 - DNA, 25 bp, Homo sapien
caggttgttcatcttcatcgttttt

SEQ ID NO: 3638275 - DNA, 25 bp, Homo sapien
aaaatcggtttgtggacttggcagg

SEQ ID NO: 3638276 - DNA, 25 bp, Homo sapien
gctgtccaatactcttcaaaagtgt

SEQ ID NO: 3638277 - DNA, 25 bp, Homo sapien
aaaatagctgtccaatactcttcaa

SEQ ID NO: 3638278 - DNA, 25 bp, Homo sapien
atagctgtccaatactcttcaaaag

SEQ ID NO: 3638279 - DNA, 25 bp, Homo sapien
tcaaaatagctgtccaatactcttc

SEQ ID NO: 3638280 - DNA, 25 bp, Homo sapien
gatgcaatttcaaggtgtttctgga

SEQ ID NO: 3638281 - DNA, 25 bp, Homo sapien
tcttgtacatatggtgtcaggcgcc

SEQ ID NO: 3638282 - DNA, 25 bp, Homo sapien
tcaaaggtaacaaattatcgtaggc

SEQ ID NO: 3638283 - DNA, 25 bp, Homo sapien
tctacaataacaagaagaggagtga

SEQ ID NO: 3638284 - DNA, 25 bp, Homo sapien
cattttgccgtaacttggcttcttg

SEQ ID NO: 3638285 - DNA, 25 bp, Homo sapien
cttactatcccattttgccgtaact

SEQ ID NO: 3638286 - DNA, 25 bp, Homo sapien
ttgccgtaacttggcttcttgttgg

SEQ ID NO: 3638287 - DNA, 25 bp, Homo sapien
ctatcccattttgccgtaacttggc

SEQ ID NO: 3638288 - DNA, 25 bp, Homo sapien
ggggaagatcaaacataaatttctg

SEQ ID NO: 3638289 - DNA, 25 bp, Homo sapien
cataaatttctgttccaaaagtaca

SEQ ID NO: 3638290 - DNA, 25 bp, Homo sapien
cggggaagatcaaacataaatttct

SEQ ID NO: 3638291 - DNA, 25 bp, Homo sapien
ttctgttccaaaagtacaatgtgat

SEQ ID NO: 3638292 - DNA, 25 bp, Homo sapien
ctccactcccgttacactttttgtg

SEQ ID NO: 3638293 - DNA, 25 bp, Homo sapien
ccactcccgttacactttttgtgtg

SEQ ID NO: 3638294 - DNA, 25 bp, Homo sapien
cactcccgttacactttttgtgtga

SEQ ID NO: 3638295 - DNA, 25 bp, Homo sapien
ctgatgtagttcctctcttgaagca

SEQ ID NO: 3638296 - DNA, 25 bp, Homo sapien
ttagaacccaatgcaaggagctccc

SEQ ID NO: 3638297 - DNA, 25 bp, Homo sapien
gacagctgggactgaactgcttaga

SEQ ID NO: 3638298 - DNA, 25 bp, Homo sapien
aatgcaaggagctcccttaattctc

SEQ ID NO: 3638299 - DNA, 25 bp, Homo sapien
attaaccactgcacaagtcagctgg

SEQ ID NO: 3638300 - DNA, 25 bp, Homo sapien
cacaagtcagctggggattctcctt

SEQ ID NO: 3638301 - DNA, 25 bp, Homo sapien
ctgaatccaagctgctggagcagcc

SEQ ID NO: 3638302 - DNA, 25 bp, Homo sapien
tctgaatccaagctgctggagcagc

SEQ ID NO: 3638303 - DNA, 25 bp, Homo sapien
tcctcacagaatacaggtagacaca

SEQ ID NO: 3638304 - DNA, 25 bp, Homo sapien
ttccccaacagtctagataaactct

SEQ ID NO: 3638305 - DNA, 25 bp, Homo sapien
gataaactctctcctgatccatctt

SEQ ID NO: 3638306 - DNA, 25 bp, Homo sapien
tcctgtgtagctgaaggaatcgcaa

SEQ ID NO: 3638307 - DNA, 25 bp, Homo sapien
catccaagagggcagtgaagagtca

SEQ ID NO: 3638308 - DNA, 25 bp, Homo sapien
taaggtagtttgataggagctcgca

SEQ ID NO: 3638309 - DNA, 25 bp, Homo sapien
catttgtgaaccctacagagtgaag

SEQ ID NO: 3638310 - DNA, 25 bp, Homo sapien
ggtcaatgatttccccgagtccagg

SEQ ID NO: 3638311 - DNA, 25 bp, Homo sapien
gagttggtgacagcataatgggaaa

SEQ ID NO: 3638312 - DNA, 25 bp, Homo sapien
ggaaaactaatcagagatcatgagg

SEQ ID NO: 3638313 - DNA, 25 bp, Homo sapien
ttttactgcaacaacctaacaggaa

SEQ ID NO: 3638314 - DNA, 25 bp, Homo sapien
gtatatcagtcagggactaatcagg

SEQ ID NO: 3638315 - DNA, 25 bp, Homo sapien
aagagtgacaggaagcatgaaatcc

SEQ ID NO: 3638316 - DNA, 25 bp, Homo sapien
tcagcagtacaggataacaaagatg

SEQ ID NO: 3638317 - DNA, 25 bp, Homo sapien
gacggttagctccagtgaccttatg

SEQ ID NO: 3638318 - DNA, 25 bp, Homo sapien
cttgataccctcagaaagatgtcct

SEQ ID NO: 3638319 - DNA, 25 bp, Homo sapien
gaatcttacagctgatgctaccttc

SEQ ID NO: 3638320 - DNA, 25 bp, Homo sapien
gcgtttcaaagttcgcagtttgtat

SEQ ID NO: 3638321 - DNA, 25 bp, Homo sapien
ttcaaagttcgcagtttgtattctg

SEQ ID NO: 3638322 - DNA, 25 bp, Homo sapien
tcaacagcgtttcaaagttcgcagt

SEQ ID NO: 3638323 - DNA, 25 bp, Homo sapien
tctctgagccattttgtttcttcat

SEQ ID NO: 3638324 - DNA, 25 bp, Homo sapien
tgcattctctgagccattttgtttc

SEQ ID NO: 3638325 - DNA, 25 bp, Homo sapien
tgctgcattctctgagccattttgt

SEQ ID NO: 3638326 - DNA, 25 bp, Homo sapien
attctctgagccattttgtttcttc

SEQ ID NO: 3638327 - DNA, 25 bp, Homo sapien
ggcgaactctctcatattggttaat

SEQ ID NO: 3638328 - DNA, 25 bp, Homo sapien
ctgaccactttttcagaatgctgct

SEQ ID NO: 3638329 - DNA, 25 bp, Homo sapien
ctctgaccactttttcagaatgctg

SEQ ID NO: 3638330 - DNA, 25 bp, Homo sapien
tgctgtcttggcgaactctctcata

SEQ ID NO: 3638331 - DNA, 25 bp, Homo sapien
tgtctctttcgcacatttactgcag

SEQ ID NO: 3638332 - DNA, 25 bp, Homo sapien
cagtccagacctttcaacgctgtga

SEQ ID NO: 3638333 - DNA, 25 bp, Homo sapien
ctggtttttccacgtgtgtcaacca

SEQ ID NO: 3638334 - DNA, 25 bp, Homo sapien
gacctttcaacgctgtgaccctggt

SEQ ID NO: 3638335 - DNA, 25 bp, Homo sapien
tccccagctgtcatctctatatatg

SEQ ID NO: 3638336 - DNA, 25 bp, Homo sapien
tatatatgcccccttggaaggctct

SEQ ID NO: 3638337 - DNA, 25 bp, Homo sapien
aaggctctatcatccgtgtttctgg

SEQ ID NO: 3638338 - DNA, 25 bp, Homo sapien
taaattcaggtatttctcaaggatc

SEQ ID NO: 3638339 - DNA, 25 bp, Homo sapien
taactcctcggtattccgactgtta

SEQ ID NO: 3638340 - DNA, 25 bp, Homo sapien
tcggtattccgactgttattcttcc

SEQ ID NO: 3638341 - DNA, 25 bp, Homo sapien
ctttactcagtggtgagcagcagtt

SEQ ID NO: 3638342 - DNA, 25 bp, Homo sapien
tgaaatctctacctaactcctcggt

SEQ ID NO: 3638343 - DNA, 25 bp, Homo sapien
tcatagccaattggatgcaccatag

SEQ ID NO: 3638344 - DNA, 25 bp, Homo sapien
gctgttcttaggagagtcatagcca

SEQ ID NO: 3638345 - DNA, 25 bp, Homo sapien
tctagttctgtcaagctcactccgg

SEQ ID NO: 3638346 - DNA, 25 bp, Homo sapien
gcaactctgtggcaatgaggccttt

SEQ ID NO: 3638347 - DNA, 25 bp, Homo sapien
accagtctttggtgaaggctagaac

SEQ ID NO: 3638348 - DNA, 25 bp, Homo sapien
gtctttggtgaaggctagaactcta

SEQ ID NO: 3638349 - DNA, 25 bp, Homo sapien
tgtataccagtctttggtgaaggct

SEQ ID NO: 3638350 - DNA, 25 bp, Homo sapien
tggtgaaggctagaactctaaacat

SEQ ID NO: 3638351 - DNA, 25 bp, Homo sapien
tgaggaagtttccaacactcaaagc

SEQ ID NO: 3638352 - DNA, 25 bp, Homo sapien
tgcaacccacagcaaagattggtag

SEQ ID NO: 3638353 - DNA, 25 bp, Homo sapien
gactgcaagccttagaggaatagcc

SEQ ID NO: 3638354 - DNA, 25 bp, Homo sapien
taagcgaggcatcgacacagacaaa

SEQ ID NO: 3638355 - DNA, 25 bp, Homo sapien
atgtttacaggtctgtcattatgcc

SEQ ID NO: 3638356 - DNA, 25 bp, Homo sapien
tattcgtggcattcttgccgaaaaa

SEQ ID NO: 3638357 - DNA, 25 bp, Homo sapien
aggaagtgtgatgctgtgtccggaa

SEQ ID NO: 3638358 - DNA, 25 bp, Homo sapien
ccccattgtgtattcgtggcattct

SEQ ID NO: 3638359 - DNA, 25 bp, Homo sapien
gcaagggtatggtttcagctggcat

SEQ ID NO: 3638360 - DNA, 25 bp, Homo sapien
cagagtaggtcctgtcatgaggcaa

SEQ ID NO: 3638361 - DNA, 25 bp, Homo sapien
gcatgatctataccccagagtaggt

SEQ ID NO: 3638362 - DNA, 25 bp, Homo sapien
cttttttgaggaagccattgcagga

SEQ ID NO: 3638363 - DNA, 25 bp, Homo sapien
tgctacgtggtccactaaacctgat

SEQ ID NO: 3638364 - DNA, 25 bp, Homo sapien
gaagcattgctacgtggtccactaa

SEQ ID NO: 3638365 - DNA, 25 bp, Homo sapien
ctaatagcgaagcattgctacgtgg

SEQ ID NO: 3638366 - DNA, 25 bp, Homo sapien
tagcgaagcattgctacgtggtcca

SEQ ID NO: 3638367 - DNA, 25 bp, Homo sapien
tgttctgtggcatttgtacaatcaa

SEQ ID NO: 3638368 - DNA, 25 bp, Homo sapien
gttctgtggcatttgtacaatcaac

SEQ ID NO: 3638369 - DNA, 25 bp, Homo sapien
ttctgtggcatttgtacaatcaaca

SEQ ID NO: 3638370 - DNA, 25 bp, Homo sapien
tctgtggcatttgtacaatcaacat

SEQ ID NO: 3638371 - DNA, 25 bp, Homo sapien
cttctcccttccctacatccctcat

SEQ ID NO: 3638372 - DNA, 25 bp, Homo sapien
ttctccttctcccttccctacatcc

SEQ ID NO: 3638373 - DNA, 25 bp, Homo sapien
tccttctcccttccctacatccctc

SEQ ID NO: 3638374 - DNA, 25 bp, Homo sapien
ctccttctcccttccctacatccct

SEQ ID NO: 3638375 - DNA, 25 bp, Homo sapien
gcatttgtgtcgttgtcctgaaaca

SEQ ID NO: 3638376 - DNA, 25 bp, Homo sapien
gctgagctaccacttgcttctgaag

SEQ ID NO: 3638377 - DNA, 25 bp, Homo sapien
gaggagtcgtgctgccattagatac

SEQ ID NO: 3638378 - DNA, 25 bp, Homo sapien
cagggctggtcagtagctgagctac

SEQ ID NO: 3638379 - DNA, 25 bp, Homo sapien
tcaaagtcgtaaatgaaacagccat

SEQ ID NO: 3638380 - DNA, 25 bp, Homo sapien
aactccatgatgttacctttattac

SEQ ID NO: 3638381 - DNA, 25 bp, Homo sapien
tgggctctgtggctttttagaatcc

SEQ ID NO: 3638382 - DNA, 25 bp, Homo sapien
gtggctttttagaatcccacagata

SEQ ID NO: 3638383 - DNA, 25 bp, Homo sapien
aaggctgcagcttgtaactccatga

SEQ ID NO: 3638384 - DNA, 25 bp, Homo sapien
taagcgaaagctccactgatgtata

SEQ ID NO: 3638385 - DNA, 25 bp, Homo sapien
atgggccctcacctaagcgaaagct

SEQ ID NO: 3638386 - DNA, 25 bp, Homo sapien
tcacctaagcgaaagctccactgat

SEQ ID NO: 3638387 - DNA, 25 bp, Homo sapien
catatgggccctcacctaagcgaaa

SEQ ID NO: 3638388 - DNA, 25 bp, Homo sapien
taaggtagagcgtgtctggtgccct

SEQ ID NO: 3638389 - DNA, 25 bp, Homo sapien
gaggtaaaaacgctttgagtcgaca

SEQ ID NO: 3638390 - DNA, 25 bp, Homo sapien
tatggctccacataaggtagagcgt

SEQ ID NO: 3638391 - DNA, 25 bp, Homo sapien
tccatcctcttgtacttaggtatgg

SEQ ID NO: 3638392 - DNA, 25 bp, Homo sapien
tgatgacctttattgctagggcagg

SEQ ID NO: 3638393 - DNA, 25 bp, Homo sapien
ggagccagtgtgatttgaccagtct

SEQ ID NO: 3638394 - DNA, 25 bp, Homo sapien
tctgtaatggtctcaatggattccc

SEQ ID NO: 3638395 - DNA, 25 bp, Homo sapien
aaagctgactccatgctactgatga

SEQ ID NO: 3638396 - DNA, 25 bp, Homo sapien
actatttctatagacctcattcttt

SEQ ID NO: 3638397 - DNA, 25 bp, Homo sapien
acaagatgttcaattgattctatag

SEQ ID NO: 3638398 - DNA, 25 bp, Homo sapien
tagagcaacataaatcttggttatc

SEQ ID NO: 3638399 - DNA, 25 bp, Homo sapien
caattgattctatagagcaacataa

SEQ ID NO: 3638400 - DNA, 25 bp, Homo sapien
gagcaacataaatcttggttatcat

SEQ ID NO: 3638401 - DNA, 25 bp, Homo sapien
gaaacatacagggatgataggattc

SEQ ID NO: 3638402 - DNA, 25 bp, Homo sapien
acatacagggatgataggattcttg

SEQ ID NO: 3638403 - DNA, 25 bp, Homo sapien
gggaaacatacagggatgataggat

SEQ ID NO: 3638404 - DNA, 25 bp, Homo sapien
acaggggaaacatacagggatgata

SEQ ID NO: 3638405 - DNA, 25 bp, Homo sapien
ggctgcaaagctgggtcattgtctt

SEQ ID NO: 3638406 - DNA, 25 bp, Homo sapien
aggctgcaaagctgggtcattgtct

SEQ ID NO: 3638407 - DNA, 25 bp, Homo sapien
gatatctgaagataacaacagttcc

SEQ ID NO: 3638408 - DNA, 25 bp, Homo sapien
gatcttggattcctcacctaaaaat

SEQ ID NO: 3638409 - DNA, 25 bp, Homo sapien
tcatcagggcatcttataaaacttt

SEQ ID NO: 3638410 - DNA, 25 bp, Homo sapien
taacttggagtacatcttagggaca

SEQ ID NO: 3638411 - DNA, 25 bp, Homo sapien
taggaacgtgcactgacaacacacc

SEQ ID NO: 3638412 - DNA, 25 bp, Homo sapien
aataaaacagtaataggaacgtgca

SEQ ID NO: 3638413 - DNA, 25 bp, Homo sapien
tgttacacagtcctcttgagcactg

SEQ ID NO: 3638414 - DNA, 25 bp, Homo sapien
cctattgctgagatatggaaaataa

SEQ ID NO: 3638415 - DNA, 25 bp, Homo sapien
ctaaataggtctctgcagttacttc

SEQ ID NO: 3638416 - DNA, 25 bp, Homo sapien
gctgactaaataggtctctgcagtt

SEQ ID NO: 3638417 - DNA, 25 bp, Homo sapien
gaagctgactaaataggtctctgca

SEQ ID NO: 3638418 - DNA, 25 bp, Homo sapien
cttgggtaactcagaagctgactaa

SEQ ID NO: 3638419 - DNA, 25 bp, Homo sapien
tgaggcagtggcatcaactgccaga

SEQ ID NO: 3638420 - DNA, 25 bp, Homo sapien
tgaggctggttgttcttgggatttc

SEQ ID NO: 3638421 - DNA, 25 bp, Homo sapien
tctactttaattgtcttcttgttga

SEQ ID NO: 3638422 - DNA, 25 bp, Homo sapien
tgtataccccttaattggattctac

SEQ ID NO: 3638423 - DNA, 25 bp, Homo sapien
aatgtataccccttaattggattct

SEQ ID NO: 3638424 - DNA, 25 bp, Homo sapien
aaaagtgagatcaggcattctcttc

SEQ ID NO: 3638425 - DNA, 25 bp, Homo sapien
agtaaaaagtgagatcaggcattct

SEQ ID NO: 3638426 - DNA, 25 bp, Homo sapien
ttgaaagtaaaaagtgagatcaggc

SEQ ID NO: 3638427 - DNA, 25 bp, Homo sapien
tgaaagtaaaaagtgagatcaggca

SEQ ID NO: 3638428 - DNA, 25 bp, Homo sapien
actcgtcgctgcttccacaacttcc

SEQ ID NO: 3638429 - DNA, 25 bp, Homo sapien
gaccctcaaaccacactcgtcgctg

SEQ ID NO: 3638430 - DNA, 25 bp, Homo sapien
ccacaacttcctatgtagatttgtt

SEQ ID NO: 3638431 - DNA, 25 bp, Homo sapien
tcaaaccacactcgtcgctgcttcc

SEQ ID NO: 3638432 - DNA, 25 bp, Homo sapien
cagccatttcatgaacttcagattc

SEQ ID NO: 3638433 - DNA, 25 bp, Homo sapien
aaaagtgtatgggacgatccataag

SEQ ID NO: 3638434 - DNA, 25 bp, Homo sapien
gatccataagatattgtctgcggta

SEQ ID NO: 3638435 - DNA, 25 bp, Homo sapien
tctgcggtattttggaaacagccct

SEQ ID NO: 3638436 - DNA, 25 bp, Homo sapien
tcttttttgacaactggtaccagtg

SEQ ID NO: 3638437 - DNA, 25 bp, Homo sapien
cagtgcttggagcaaggaccgtagc

SEQ ID NO: 3638438 - DNA, 25 bp, Homo sapien
acaatcctcattcctgtcaggtgga

SEQ ID NO: 3638439 - DNA, 25 bp, Homo sapien
gaccgtagcagcgatgtaacaatcc

SEQ ID NO: 3638440 - DNA, 25 bp, Homo sapien
gagcaggcagctctaactgttgaga

SEQ ID NO: 3638441 - DNA, 25 bp, Homo sapien
tagtagagcactgctttgtagagca

SEQ ID NO: 3638442 - DNA, 25 bp, Homo sapien
gaaaatatgaagattccaagttagg

SEQ ID NO: 3638443 - DNA, 25 bp, Homo sapien
tacatgtatatttaggaaagtcact

SEQ ID NO: 3638444 - DNA, 25 bp, Homo sapien
ggctatatcttgttttgggactaaa

SEQ ID NO: 3638445 - DNA, 25 bp, Homo sapien
actacccaagagctcacccgtgttt

SEQ ID NO: 3638446 - DNA, 25 bp, Homo sapien
cagtgcagcttggaaagccttgcaa

SEQ ID NO: 3638447 - DNA, 25 bp, Homo sapien
gtttgcttgttagttgtgcaaaaac

SEQ ID NO: 3638448 - DNA, 25 bp, Homo sapien
gacttgggttgtgcatcttctcaca

SEQ ID NO: 3638449 - DNA, 25 bp, Homo sapien
tcaaaaccgtctgctgggtcgttcc

SEQ ID NO: 3638450 - DNA, 25 bp, Homo sapien
ggaaagctctggtccccatgatcaa

SEQ ID NO: 3638451 - DNA, 25 bp, Homo sapien
gtttcaatagaatacaaccatgacc

SEQ ID NO: 3638452 - DNA, 25 bp, Homo sapien
gctgggtcgttcctatttgtttcaa

SEQ ID NO: 3638453 - DNA, 25 bp, Homo sapien
ttgcagccagcatgttttcttctgt

SEQ ID NO: 3638454 - DNA, 25 bp, Homo sapien
ttttctatatctcttacgaatcttt

SEQ ID NO: 3638455 - DNA, 25 bp, Homo sapien
aaatcttctgccgttttttctatat

SEQ ID NO: 3638456 - DNA, 25 bp, Homo sapien
gttcattgcagccagcatgttttct

SEQ ID NO: 3638457 - DNA, 25 bp, Homo sapien
tacatatcatcagactctcccaggc

SEQ ID NO: 3638458 - DNA, 25 bp, Homo sapien
cacgtgttcttacacggatgtctga

SEQ ID NO: 3638459 - DNA, 25 bp, Homo sapien
tgtgttgcttcaccacctcacgtgt

SEQ ID NO: 3638460 - DNA, 25 bp, Homo sapien
caatatgattgtgcgtcagagtctg

SEQ ID NO: 3638461 - DNA, 25 bp, Homo sapien
cattttgtgactgtccatatcttca

SEQ ID NO: 3638462 - DNA, 25 bp, Homo sapien
ttgtagttacaagtggctatggtgg

SEQ ID NO: 3638463 - DNA, 25 bp, Homo sapien
aaaagaacgaagagaagaacatctt

SEQ ID NO: 3638464 - DNA, 25 bp, Homo sapien
gcagggttttgcccctaaaagagca

SEQ ID NO: 3638465 - DNA, 25 bp, Homo sapien
tgaccacttcgaaaagaaactccac

SEQ ID NO: 3638466 - DNA, 25 bp, Homo sapien
aaagctgttgatgaccacttcgaaa

SEQ ID NO: 3638467 - DNA, 25 bp, Homo sapien
ttttttgatccagctgccgtggaag

SEQ ID NO: 3638468 - DNA, 25 bp, Homo sapien
ccactttgactctgaattgcagcag

SEQ ID NO: 3638469 - DNA, 25 bp, Homo sapien
taatacgggaagatgtatcaccagc

SEQ ID NO: 3638470 - DNA, 25 bp, Homo sapien
gaaagccgtcccagctgtcttgggc

SEQ ID NO: 3638471 - DNA, 25 bp, Homo sapien
taccctcctgcattaagaaagccgt

SEQ ID NO: 3638472 - DNA, 25 bp, Homo sapien
ccatagaccgtatcagggcctgttt

SEQ ID NO: 3638473 - DNA, 25 bp, Homo sapien
tggtgattgttatacagtagtttac

SEQ ID NO: 3638474 - DNA, 25 bp, Homo sapien
atggtgattgttatacagtagttta

SEQ ID NO: 3638475 - DNA, 25 bp, Homo sapien
tcagtgtgcagagaacttgagtgcg

SEQ ID NO: 3638476 - DNA, 25 bp, Homo sapien
taggctatacattggagaatgcacg

SEQ ID NO: 3638477 - DNA, 25 bp, Homo sapien
tttttgacccaaagctaggctatac

SEQ ID NO: 3638478 - DNA, 25 bp, Homo sapien
gaatgcacggtgttgtatttcagcc

SEQ ID NO: 3638479 - DNA, 25 bp, Homo sapien
gcacagagcaaaacctaaatggcct

SEQ ID NO: 3638480 - DNA, 25 bp, Homo sapien
tgcttcaaggcctcacaagagtctc

SEQ ID NO: 3638481 - DNA, 25 bp, Homo sapien
taaggcagcctaatgtgatagaata

SEQ ID NO: 3638482 - DNA, 25 bp, Homo sapien
taacgcaaactgaaaatggcttact

SEQ ID NO: 3638483 - DNA, 25 bp, Homo sapien
ggagatcagccctacacgttttgtg

SEQ ID NO: 3638484 - DNA, 25 bp, Homo sapien
gactctacatatctaaacccgacag

SEQ ID NO: 3638485 - DNA, 25 bp, Homo sapien
ggtgcctccatagggaagacgccat

SEQ ID NO: 3638486 - DNA, 25 bp, Homo sapien
aacaacaaatgtgcgctcctggctg

SEQ ID NO: 3638487 - DNA, 25 bp, Homo sapien
gtcaggtcccctaggttcaattcga

SEQ ID NO: 3638488 - DNA, 25 bp, Homo sapien
acttgtaccatttccagcccagggc

SEQ ID NO: 3638489 - DNA, 25 bp, Homo sapien
tatggagcaaaacatgtcaggtccc

SEQ ID NO: 3638490 - DNA, 25 bp, Homo sapien
tgacctggcggacaacagcaatgaa

SEQ ID NO: 3638491 - DNA, 25 bp, Homo sapien
cagaaagttgcatctctaggactgg

SEQ ID NO: 3638492 - DNA, 25 bp, Homo sapien
ctgtaccatagccagaaagttgcat

SEQ ID NO: 3638493 - DNA, 25 bp, Homo sapien
atctctaggactggagccaaagcca

SEQ ID NO: 3638494 - DNA, 25 bp, Homo sapien
tagccagaaagttgcatctctagga

SEQ ID NO: 3638495 - DNA, 25 bp, Homo sapien
tctgaggcccagctgttatgagatc

SEQ ID NO: 3638496 - DNA, 25 bp, Homo sapien
atcttcatgtgggactctgaggccc

SEQ ID NO: 3638497 - DNA, 25 bp, Homo sapien
caccgtgtcgtaggcactgttccaa

SEQ ID NO: 3638498 - DNA, 25 bp, Homo sapien
gttaacaagcaggtcactccatcag

SEQ ID NO: 3638499 - DNA, 25 bp, Homo sapien
aaatcaagccatgtaacatatgctt

SEQ ID NO: 3638500 - DNA, 25 bp, Homo sapien
tcaagccatgtaacatatgctttac

SEQ ID NO: 3638501 - DNA, 25 bp, Homo sapien
caacatgttctaacagatacataca

SEQ ID NO: 3638502 - DNA, 25 bp, Homo sapien
gctttacctggcataagtattattt

SEQ ID NO: 3638503 - DNA, 25 bp, Homo sapien
aaaagaattgatgtgtctggataga

SEQ ID NO: 3638504 - DNA, 25 bp, Homo sapien
gaaactcaggactcattccaatatg

SEQ ID NO: 3638505 - DNA, 25 bp, Homo sapien
ggcagttccactttatcaggctgga

SEQ ID NO: 3638506 - DNA, 25 bp, Homo sapien
tagctcatttgtctgcggcagttcc

SEQ ID NO: 3638507 - DNA, 25 bp, Homo sapien
taagtgatcgtcaacctacttgctt

SEQ ID NO: 3638508 - DNA, 25 bp, Homo sapien
ataataacattacaccttgggtttg

SEQ ID NO: 3638509 - DNA, 25 bp, Homo sapien
gggtagtttttataatgtcacacag

SEQ ID NO: 3638510 - DNA, 25 bp, Homo sapien
tgtcacacagagatcatcaatcaag

SEQ ID NO: 3638511 - DNA, 25 bp, Homo sapien
gctgatctcaacaatagcgtcacca

SEQ ID NO: 3638512 - DNA, 25 bp, Homo sapien
aatagcgtcaccataaagatgaatg

SEQ ID NO: 3638513 - DNA, 25 bp, Homo sapien
ctcaacaatagcgtcaccataaaga

SEQ ID NO: 3638514 - DNA, 25 bp, Homo sapien
tgctgatctcaacaatagcgtcacc

SEQ ID NO: 3638515 - DNA, 25 bp, Homo sapien
ctgatccaaatgttgtggttctctg

SEQ ID NO: 3638516 - DNA, 25 bp, Homo sapien
tctgatccaaatgttgtggttctct

SEQ ID NO: 3638517 - DNA, 25 bp, Homo sapien
gatccaaatgttgtggttctctgac

SEQ ID NO: 3638518 - DNA, 25 bp, Homo sapien
tgatccaaatgttgtggttctctga

SEQ ID NO: 3638519 - DNA, 25 bp, Homo sapien
ggcatgttgatcagagggtagctac

SEQ ID NO: 3638520 - DNA, 25 bp, Homo sapien
cttactgttcatacagaatggtgag

SEQ ID NO: 3638521 - DNA, 25 bp, Homo sapien
taaaggactattggccatgcagctg

SEQ ID NO: 3638522 - DNA, 25 bp, Homo sapien
ttaaaagtgcaaggaaggcatgttg

SEQ ID NO: 3638523 - DNA, 25 bp, Homo sapien
ttattcatcaatgggatctatttca

SEQ ID NO: 3638524 - DNA, 25 bp, Homo sapien
catcaatgggatctatttcaatgac

SEQ ID NO: 3638525 - DNA, 25 bp, Homo sapien
attcatcaatgggatctatttcaat

SEQ ID NO: 3638526 - DNA, 25 bp, Homo sapien
tttcaatgacatattctattatcat

SEQ ID NO: 3638527 - DNA, 25 bp, Homo sapien
agttctttgcaactaggagtatcac

SEQ ID NO: 3638528 - DNA, 25 bp, Homo sapien
aggctggtgattgtgtttagttgtc

SEQ ID NO: 3638529 - DNA, 25 bp, Homo sapien
tagttgtcttggtcctcctcgaagg

SEQ ID NO: 3638530 - DNA, 25 bp, Homo sapien
taattgttgagtcctttgctctatc

SEQ ID NO: 3638531 - DNA, 25 bp, Homo sapien
ggaagccttatttgcagaactgata

SEQ ID NO: 3638532 - DNA, 25 bp, Homo sapien
tactagcagagtcagttgaagcttg

SEQ ID NO: 3638533 - DNA, 25 bp, Homo sapien
cacttgaacgaaacatgaggacttg

SEQ ID NO: 3638534 - DNA, 25 bp, Homo sapien
gacctgtagagatgccacttgaacg

SEQ ID NO: 3638535 - DNA, 25 bp, Homo sapien
tcatcttgagagtgactactagcag

SEQ ID NO: 3638536 - DNA, 25 bp, Homo sapien
caaaactgacagcaagatcaattac

SEQ ID NO: 3638537 - DNA, 25 bp, Homo sapien
ttaatgcacactcacaaaactgaca

SEQ ID NO: 3638538 - DNA, 25 bp, Homo sapien
cacaaaactgacagcaagatcaatt

SEQ ID NO: 3638539 - DNA, 25 bp, Homo sapien
aatgcacactcacaaaactgacagc

SEQ ID NO: 3638540 - DNA, 25 bp, Homo sapien
gggcgctctattatctacgacttcg

SEQ ID NO: 3638541 - DNA, 25 bp, Homo sapien
tctttatctagaatccggcttggca

SEQ ID NO: 3638542 - DNA, 25 bp, Homo sapien
tatctacgacttcgctgaggcgctc

SEQ ID NO: 3638543 - DNA, 25 bp, Homo sapien
catctaggaacccactgatgggctc

SEQ ID NO: 3638544 - DNA, 25 bp, Homo sapien
catctaggaacccactgacgggctc

SEQ ID NO: 3638545 - DNA, 25 bp, Homo sapien
gagccgctctgtatctaggatcccg

SEQ ID NO: 3638546 - DNA, 25 bp, Homo sapien
caggcgctgtgtatctgggattcgc

SEQ ID NO: 3638547 - DNA, 25 bp, Homo sapien
ggctctgtatcgagaatcccgctga

SEQ ID NO: 3638548 - DNA, 25 bp, Homo sapien
caacagcagggctttatcagcacgc

SEQ ID NO: 3638549 - DNA, 25 bp, Homo sapien
gaatgttacccatagacaacagcag

SEQ ID NO: 3638550 - DNA, 25 bp, Homo sapien
tcccttgtttgcaacgacagcagca

SEQ ID NO: 3638551 - DNA, 25 bp, Homo sapien
tacatgcaagatcagtaaatggagc

SEQ ID NO: 3638552 - DNA, 25 bp, Homo sapien
cctggaatttcacagctgtgcatgc

SEQ ID NO: 3638553 - DNA, 25 bp, Homo sapien
gcccctatgttgaactgccagactg

SEQ ID NO: 3638554 - DNA, 25 bp, Homo sapien
cctgaacagcttccatacttcctgg

SEQ ID NO: 3638555 - DNA, 25 bp, Homo sapien
cagcttggagactacgagcccctat

SEQ ID NO: 3638556 - DNA, 25 bp, Homo sapien
tctagctaagacaaggtggctggac

SEQ ID NO: 3638557 - DNA, 25 bp, Homo sapien
tctattggaaaaaggtgccacctag

SEQ ID NO: 3638558 - DNA, 25 bp, Homo sapien
taagctcactaagaaaggcacgttg

SEQ ID NO: 3638559 - DNA, 25 bp, Homo sapien
tgagataggccgagagctaggcttc

SEQ ID NO: 3638560 - DNA, 25 bp, Homo sapien
tggtggatttttcggagctccgatt

SEQ ID NO: 3638561 - DNA, 25 bp, Homo sapien
atttggtggatttttcggagctccg

SEQ ID NO: 3638562 - DNA, 25 bp, Homo sapien
tggatttttcggagctccgattttc

SEQ ID NO: 3638563 - DNA, 25 bp, Homo sapien
tttggtggatttttcggagctccga

SEQ ID NO: 3638564 - DNA, 25 bp, Homo sapien
tcaaagcgttggtagcagagattaa

SEQ ID NO: 3638565 - DNA, 25 bp, Homo sapien
cagacacctaaaggatgccttttat

SEQ ID NO: 3638566 - DNA, 25 bp, Homo sapien
catttccacctttagcatgactaag

SEQ ID NO: 3638567 - DNA, 25 bp, Homo sapien
tcaatacacagtcatcgggagccca

SEQ ID NO: 3638568 - DNA, 25 bp, Homo sapien
ttctgtttgtatcaacaatagtcat

SEQ ID NO: 3638569 - DNA, 25 bp, Homo sapien
tttctgtttgtatcaacaatagtca

SEQ ID NO: 3638570 - DNA, 25 bp, Homo sapien
tacacccgtgatcatattcttgcag

SEQ ID NO: 3638571 - DNA, 25 bp, Homo sapien
taacagcaggacattatccttgatc

SEQ ID NO: 3638572 - DNA, 25 bp, Homo sapien
tcccttcaaagccagaagacctgca

SEQ ID NO: 3638573 - DNA, 25 bp, Homo sapien
tgcagcttatgtagcaacccagtcc

SEQ ID NO: 3638574 - DNA, 25 bp, Homo sapien
gtccaatgcagtatggctggcttct

SEQ ID NO: 3638575 - DNA, 25 bp, Homo sapien
cctttgtccaatgcagtatggctgg

SEQ ID NO: 3638576 - DNA, 25 bp, Homo sapien
ctgcttccacttgctcagcttcact

SEQ ID NO: 3638577 - DNA, 25 bp, Homo sapien
agcacagtaggagcaattgctttct

SEQ ID NO: 3638578 - DNA, 25 bp, Homo sapien
ggtccttcatcaggacgaaccaggt

SEQ ID NO: 3638579 - DNA, 25 bp, Homo sapien
gatcctaacagaggcctttttgcca

SEQ ID NO: 3638580 - DNA, 25 bp, Homo sapien
gacgaaccaggttggatcctaacag

SEQ ID NO: 3638581 - DNA, 25 bp, Homo sapien
tgattcaaacacaaggagcccttct

SEQ ID NO: 3638582 - DNA, 25 bp, Homo sapien
agcacaattggagagattgttccaa

SEQ ID NO: 3638583 - DNA, 25 bp, Homo sapien
aagcacaattggagagattgttcca

SEQ ID NO: 3638584 - DNA, 25 bp, Homo sapien
gctgcctctacaggttgtggaagcc

SEQ ID NO: 3638585 - DNA, 25 bp, Homo sapien
acactgaaacagttcgcaaaagcat

SEQ ID NO: 3638586 - DNA, 25 bp, Homo sapien
gtgctgcagggcaagggatccacca

SEQ ID NO: 3638587 - DNA, 25 bp, Homo sapien
agtgctgcagggcaagggatccacc

SEQ ID NO: 3638588 - DNA, 25 bp, Homo sapien
gaaagatttaattcatcctcgctag

SEQ ID NO: 3638589 - DNA, 25 bp, Homo sapien
tgagtaggacccttgaaagatttaa

SEQ ID NO: 3638590 - DNA, 25 bp, Homo sapien
catggattgagtaggacccttgaaa

SEQ ID NO: 3638591 - DNA, 25 bp, Homo sapien
aattcatcctcgctagggcttgtag

SEQ ID NO: 3638592 - DNA, 25 bp, Homo sapien
cctgctgttggactgacactggtgg

SEQ ID NO: 3638593 - DNA, 25 bp, Homo sapien
cctggaacccgtgagcctgtgatag

SEQ ID NO: 3638594 - DNA, 25 bp, Homo sapien
ccgtgagcctgtgatagtactgcca

SEQ ID NO: 3638595 - DNA, 25 bp, Homo sapien
tgccactattcacattatggtcctg

SEQ ID NO: 3638596 - DNA, 25 bp, Homo sapien
ctttctttttcgaagtgctagtcat

SEQ ID NO: 3638597 - DNA, 25 bp, Homo sapien
ctccatgatgaaacctcctgttttc

SEQ ID NO: 3638598 - DNA, 25 bp, Homo sapien
ccatgatgaaacctcctgttttctt

SEQ ID NO: 3638599 - DNA, 25 bp, Homo sapien
ttctttctttttcgaagtgctagtc

SEQ ID NO: 3638600 - DNA, 25 bp, Homo sapien
ggctgcatggtcaagagtggtcaga

SEQ ID NO: 3638601 - DNA, 25 bp, Homo sapien
catggtcaagagtggtcagaaactg

SEQ ID NO: 3638602 - DNA, 25 bp, Homo sapien
tgcatggtcaagagtggtcagaaac

SEQ ID NO: 3638603 - DNA, 25 bp, Homo sapien
gctgcatggtcaagagtggtcagaa

SEQ ID NO: 3638604 - DNA, 25 bp, Homo sapien
aggatgctgtaagtgttggtgaact

SEQ ID NO: 3638605 - DNA, 25 bp, Homo sapien
tgccctgcttctgaacttctcagag

SEQ ID NO: 3638606 - DNA, 25 bp, Homo sapien
tgaacttgactactgtcccctgagc

SEQ ID NO: 3638607 - DNA, 25 bp, Homo sapien
tcaagtgaggcagtttatgcttgct

SEQ ID NO: 3638608 - DNA, 25 bp, Homo sapien
tctcacatggactgcatttctcaat

SEQ ID NO: 3638609 - DNA, 25 bp, Homo sapien
cacatggactgcatttctcaataga

SEQ ID NO: 3638610 - DNA, 25 bp, Homo sapien
catggactgcatttctcaatagagt

SEQ ID NO: 3638611 - DNA, 25 bp, Homo sapien
aactctcacatggactgcatttctc

SEQ ID NO: 3638612 - DNA, 25 bp, Homo sapien
aggtgggacaccatccatagagtca

SEQ ID NO: 3638613 - DNA, 25 bp, Homo sapien
tgggacaccatccatagagtcacct

SEQ ID NO: 3638614 - DNA, 25 bp, Homo sapien
gtgggacaccatccatagagtcacc

SEQ ID NO: 3638615 - DNA, 25 bp, Homo sapien
ggtgggacaccatccatagagtcac

SEQ ID NO: 3638616 - DNA, 25 bp, Homo sapien
cctagtccctaacacatcctccatc

SEQ ID NO: 3638617 - DNA, 25 bp, Homo sapien
tctctcctctcagaaatacttgttc

SEQ ID NO: 3638618 - DNA, 25 bp, Homo sapien
tctcctctcagaaatacttgttcac

SEQ ID NO: 3638619 - DNA, 25 bp, Homo sapien
ctctcagaaatacttgttcactcat

SEQ ID NO: 3638620 - DNA, 25 bp, Homo sapien
ctgccaagaagcgaaccaagaggca

SEQ ID NO: 3638621 - DNA, 25 bp, Homo sapien
gcaaatgtgagacaagcagcctttg

SEQ ID NO: 3638622 - DNA, 25 bp, Homo sapien
aggcaaatgtgagacaagcagcctt

SEQ ID NO: 3638623 - DNA, 25 bp, Homo sapien
ccaagaagcgaaccaagaggcaaat

SEQ ID NO: 3638624 - DNA, 25 bp, Homo sapien
ttactgctgttcgtggcctgaaatt

SEQ ID NO: 3638625 - DNA, 25 bp, Homo sapien
tactgctgttcgtggcctgaaattc

SEQ ID NO: 3638626 - DNA, 25 bp, Homo sapien
actgctgttcgtggcctgaaattcc

SEQ ID NO: 3638627 - DNA, 25 bp, Homo sapien
tatgactttggcttgtcatccctgg

SEQ ID NO: 3638628 - DNA, 25 bp, Homo sapien
catgtacatatgactttggcttgtc

SEQ ID NO: 3638629 - DNA, 25 bp, Homo sapien
ctgggagaagttgaggatctccaat

SEQ ID NO: 3638630 - DNA, 25 bp, Homo sapien
ttcctttcagcatgtacatatgact

SEQ ID NO: 3638631 - DNA, 25 bp, Homo sapien
tcttctgaatgctcacatcaaatat

SEQ ID NO: 3638632 - DNA, 25 bp, Homo sapien
tattgttaggagataaggataccgc

SEQ ID NO: 3638633 - DNA, 25 bp, Homo sapien
ctgaaaggaggatgtctggacccca

SEQ ID NO: 3638634 - DNA, 25 bp, Homo sapien
taaggataccgctacattatcggac

SEQ ID NO: 3638635 - DNA, 25 bp, Homo sapien
gctacattatcggactgaaaggagg

SEQ ID NO: 3638636 - DNA, 25 bp, Homo sapien
ccataagtcagaggattttctgcca

SEQ ID NO: 3638637 - DNA, 25 bp, Homo sapien
ctttcagattctccacactcctgta

SEQ ID NO: 3638638 - DNA, 25 bp, Homo sapien
cctttcagattctccacactcctgt

SEQ ID NO: 3638639 - DNA, 25 bp, Homo sapien
tttcagattctccacactcctgtat

SEQ ID NO: 3638640 - DNA, 25 bp, Homo sapien
tgagtgggttaagcaaacatatctg

SEQ ID NO: 3638641 - DNA, 25 bp, Homo sapien
agtaatttggagaattatctcacga

SEQ ID NO: 3638642 - DNA, 25 bp, Homo sapien
atctggaagatcattatctgagtgg

SEQ ID NO: 3638643 - DNA, 25 bp, Homo sapien
tatctcacgatgatctggaagatca

SEQ ID NO: 3638644 - DNA, 25 bp, Homo sapien
tcaaatgtcctttcaggagaggacc

SEQ ID NO: 3638645 - DNA, 25 bp, Homo sapien
ggtacttagcgatagcatccagcag

SEQ ID NO: 3638646 - DNA, 25 bp, Homo sapien
cctttcaggagaggaccagctgcaa

SEQ ID NO: 3638647 - DNA, 25 bp, Homo sapien
tccatttacatatgcatgtgcatgg

SEQ ID NO: 3638648 - DNA, 25 bp, Homo sapien
tctcggcgctgtgctatacatgtgt

SEQ ID NO: 3638649 - DNA, 25 bp, Homo sapien
ctccctcgtcacttgcaaaggctgt

SEQ ID NO: 3638650 - DNA, 25 bp, Homo sapien
tacatgtgttgttattgctaaagac

SEQ ID NO: 3638651 - DNA, 25 bp, Homo sapien
ttgctaaagacactgatctgttttc

SEQ ID NO: 3638652 - DNA, 25 bp, Homo sapien
gtctcttgcacagctcttagatcag

SEQ ID NO: 3638653 - DNA, 25 bp, Homo sapien
agctcttagatcagtttctagtgag

SEQ ID NO: 3638654 - DNA, 25 bp, Homo sapien
ctgcagtctcttgcacagctcttag

SEQ ID NO: 3638655 - DNA, 25 bp, Homo sapien
gcacagctcttagatcagtttctag

SEQ ID NO: 3638656 - DNA, 25 bp, Homo sapien
agtggagtctttgaatacagacagg

SEQ ID NO: 3638657 - DNA, 25 bp, Homo sapien
gagaatgcatgtttcaggccaagga

SEQ ID NO: 3638658 - DNA, 25 bp, Homo sapien
gaatagctgtttcaaggacctgagt

SEQ ID NO: 3638659 - DNA, 25 bp, Homo sapien
gggagaatgcatgtttcaggccaag

SEQ ID NO: 3638660 - DNA, 25 bp, Homo sapien
caaatttgccatcatgttcaaagga

SEQ ID NO: 3638661 - DNA, 25 bp, Homo sapien
atttctggtgatttcgggcattgaa

SEQ ID NO: 3638662 - DNA, 25 bp, Homo sapien
tgatttcgggcattgaatttaaaaa

SEQ ID NO: 3638663 - DNA, 25 bp, Homo sapien
caaaggatgtcttgatgctgaaaac

SEQ ID NO: 3638664 - DNA, 25 bp, Homo sapien
ttgttgccctgtccaatgcatttcc

SEQ ID NO: 3638665 - DNA, 25 bp, Homo sapien
tggaaagtggccctgtcttgttgcc

SEQ ID NO: 3638666 - DNA, 25 bp, Homo sapien
aatgcatttccgttcacttttgcca

SEQ ID NO: 3638667 - DNA, 25 bp, Homo sapien
ggaaagtggccctgtcttgttgccc

SEQ ID NO: 3638668 - DNA, 25 bp, Homo sapien
taaagtggacacagcgtaatgtcgc

SEQ ID NO: 3638669 - DNA, 25 bp, Homo sapien
tcaaccaaacactaaagtggacaca

SEQ ID NO: 3638670 - DNA, 25 bp, Homo sapien
aaaatcaattaattgtggccgggca

SEQ ID NO: 3638671 - DNA, 25 bp, Homo sapien
cacagcgtaatgtcgccagcagcat

SEQ ID NO: 3638672 - DNA, 25 bp, Homo sapien
tacatttatctagcgtgagctgttc

SEQ ID NO: 3638673 - DNA, 25 bp, Homo sapien
tctggatggtaaacattggttggga

SEQ ID NO: 3638674 - DNA, 25 bp, Homo sapien
agttacacgtatctggttaaagaca

SEQ ID NO: 3638675 - DNA, 25 bp, Homo sapien
ttataaagttacacgtatctggtta

SEQ ID NO: 3638676 - DNA, 25 bp, Homo sapien
cattttagacagatattccattgcc

SEQ ID NO: 3638677 - DNA, 25 bp, Homo sapien
tccccagtcgagagatgaaactgag

SEQ ID NO: 3638678 - DNA, 25 bp, Homo sapien
ggcagatcaagccagcggagaactg

SEQ ID NO: 3638679 - DNA, 25 bp, Homo sapien
gagaactggcatacatccccagtcg

SEQ ID NO: 3638680 - DNA, 25 bp, Homo sapien
atgagccttgatgcttctctgtggc

SEQ ID NO: 3638681 - DNA, 25 bp, Homo sapien
acatgagccttgatgcttctctgtg

SEQ ID NO: 3638682 - DNA, 25 bp, Homo sapien
catgagccttgatgcttctctgtgg

SEQ ID NO: 3638683 - DNA, 25 bp, Homo sapien
tacatgagccttgatgcttctctgt

SEQ ID NO: 3638684 - DNA, 25 bp, Homo sapien
tatcagggaatatctctatttgtgg

SEQ ID NO: 3638685 - DNA, 25 bp, Homo sapien
gatcttgtgatattcccaggaaccc

SEQ ID NO: 3638686 - DNA, 25 bp, Homo sapien
gaacacgctttcagagtatcaggga

SEQ ID NO: 3638687 - DNA, 25 bp, Homo sapien
tgtgtcatttaatagagctcgcctc

SEQ ID NO: 3638688 - DNA, 25 bp, Homo sapien
gatataacagagctctaattccagg

SEQ ID NO: 3638689 - DNA, 25 bp, Homo sapien
caagtcgggctgttccaactgtcat

SEQ ID NO: 3638690 - DNA, 25 bp, Homo sapien
gcagccatggtgaaactgttgcctc

SEQ ID NO: 3638691 - DNA, 25 bp, Homo sapien
atctcataatgctgacaagtcgggc

SEQ ID NO: 3638692 - DNA, 25 bp, Homo sapien
atcattccttttggattggcccagt

SEQ ID NO: 3638693 - DNA, 25 bp, Homo sapien
cattccttttggattggcccagtgg

SEQ ID NO: 3638694 - DNA, 25 bp, Homo sapien
tccttttggattggcccagtggaaa

SEQ ID NO: 3638695 - DNA, 25 bp, Homo sapien
attccttttggattggcccagtgga

SEQ ID NO: 3638696 - DNA, 25 bp, Homo sapien
cctcctgcttagtaatacaaattgc

SEQ ID NO: 3638697 - DNA, 25 bp, Homo sapien
aattgcatttggagttgtaaagggc

SEQ ID NO: 3638698 - DNA, 25 bp, Homo sapien
aattttgttcaaaagtgtcacactc

SEQ ID NO: 3638699 - DNA, 25 bp, Homo sapien
aatcagggggcatctaagtgaacag

SEQ ID NO: 3638700 - DNA, 25 bp, Homo sapien
tgctcttatgctccaagacatcttc

SEQ ID NO: 3638701 - DNA, 25 bp, Homo sapien
actgtgattagacaaggagtatgtt

SEQ ID NO: 3638702 - DNA, 25 bp, Homo sapien
tttctctgctcttatgctccaagac

SEQ ID NO: 3638703 - DNA, 25 bp, Homo sapien
ggagtatgttgcacaccactttctc

SEQ ID NO: 3638704 - DNA, 25 bp, Homo sapien
atgctacccatgacaaagtcagagg

SEQ ID NO: 3638705 - DNA, 25 bp, Homo sapien
aaagatttttgtctgagtggaagga

SEQ ID NO: 3638706 - DNA, 25 bp, Homo sapien
gcaaacactcccatgaaatgctacc

SEQ ID NO: 3638707 - DNA, 25 bp, Homo sapien
cactcccatgaaatgctacccatga

SEQ ID NO: 3638708 - DNA, 25 bp, Homo sapien
cttttccacccagactgacactttt

SEQ ID NO: 3638709 - DNA, 25 bp, Homo sapien
catatctcatactgttttcccttat

SEQ ID NO: 3638710 - DNA, 25 bp, Homo sapien
ttccttttccacccagactgacact

SEQ ID NO: 3638711 - DNA, 25 bp, Homo sapien
tccttttccacccagactgacactt

SEQ ID NO: 3638712 - DNA, 25 bp, Homo sapien
tacgatacgtctgagagaggaagga

SEQ ID NO: 3638713 - DNA, 25 bp, Homo sapien
aaagatccatcttctctacgatacg

SEQ ID NO: 3638714 - DNA, 25 bp, Homo sapien
gaactgctgatgtcttccccaagga

SEQ ID NO: 3638715 - DNA, 25 bp, Homo sapien
gaaggagacgaagctacaccgtcct

SEQ ID NO: 3638716 - DNA, 25 bp, Homo sapien
ttttgtctattgtaattcagttaga

SEQ ID NO: 3638717 - DNA, 25 bp, Homo sapien
cactataaggaatcatgaggtttac

SEQ ID NO: 3638718 - DNA, 25 bp, Homo sapien
catggtctacgttgctgactttgtc

SEQ ID NO: 3638719 - DNA, 25 bp, Homo sapien
tcatgaggtttacatggtctacgtt

SEQ ID NO: 3638720 - DNA, 25 bp, Homo sapien
tatttatggataagtagccattaac

SEQ ID NO: 3638721 - DNA, 25 bp, Homo sapien
ttccttcttctaccagtaatgaaaa

SEQ ID NO: 3638722 - DNA, 25 bp, Homo sapien
tccatcatcaatgccagttatgtca

SEQ ID NO: 3638723 - DNA, 25 bp, Homo sapien
ttatggataagtagccattaacctt

SEQ ID NO: 3638724 - DNA, 25 bp, Homo sapien
ggtattttgtggctcatcctctagg

SEQ ID NO: 3638725 - DNA, 25 bp, Homo sapien
caggttgagcctgcatatgaactta

SEQ ID NO: 3638726 - DNA, 25 bp, Homo sapien
tcagccattactcggcagagccaaa

SEQ ID NO: 3638727 - DNA, 25 bp, Homo sapien
tgaaattgtccctgatacactcctg

SEQ ID NO: 3638728 - DNA, 25 bp, Homo sapien
cagagaccatgatctgaagctgccc

SEQ ID NO: 3638729 - DNA, 25 bp, Homo sapien
gaacatagctgattccttccaatgg

SEQ ID NO: 3638730 - DNA, 25 bp, Homo sapien
gaggttagacatacccgaggaagcc

SEQ ID NO: 3638731 - DNA, 25 bp, Homo sapien
tgtaagacttcagggctaattccac

SEQ ID NO: 3638732 - DNA, 25 bp, Homo sapien
tatttgagagatccacacccacagt

SEQ ID NO: 3638733 - DNA, 25 bp, Homo sapien
gcaaggcggatgctgctaaaccgta

SEQ ID NO: 3638734 - DNA, 25 bp, Homo sapien
ggcatgtatgcaccgtaagagctgt

SEQ ID NO: 3638735 - DNA, 25 bp, Homo sapien
gaagcatctgtgttgacctttccag

SEQ ID NO: 3638736 - DNA, 25 bp, Homo sapien
tcctagttccactaatcaggggcat

SEQ ID NO: 3638737 - DNA, 25 bp, Homo sapien
tcatttccacctaccagtggctccg

SEQ ID NO: 3638738 - DNA, 25 bp, Homo sapien
tctcaaagcttggcctcatgtcagc

SEQ ID NO: 3638739 - DNA, 25 bp, Homo sapien
ctgccagtgaattccacctaccagg

SEQ ID NO: 3638740 - DNA, 25 bp, Homo sapien
aacactgcagccaataagagtaact

SEQ ID NO: 3638741 - DNA, 25 bp, Homo sapien
ctccttgctaagcacaactgggcct

SEQ ID NO: 3638742 - DNA, 25 bp, Homo sapien
cactgcagccaataagagtaacttc

SEQ ID NO: 3638743 - DNA, 25 bp, Homo sapien
gctaagcacaactgggccttcatgc

SEQ ID NO: 3638744 - DNA, 25 bp, Homo sapien
ttccacaatctcttgggcctttcat

SEQ ID NO: 3638745 - DNA, 25 bp, Homo sapien
gaggacaggtggcccgattccactc

SEQ ID NO: 3638746 - DNA, 25 bp, Homo sapien
attccacaatctcttgggcctttca

SEQ ID NO: 3638747 - DNA, 25 bp, Homo sapien
ggtggcccgattccactctctcaat

SEQ ID NO: 3638748 - DNA, 25 bp, Homo sapien
gtcttttgcttcttatgacgatgag

SEQ ID NO: 3638749 - DNA, 25 bp, Homo sapien
tctgttaatggtttttagacctgaa

SEQ ID NO: 3638750 - DNA, 25 bp, Homo sapien
tgctgcaataacaatgtacgtgtat

SEQ ID NO: 3638751 - DNA, 25 bp, Homo sapien
taacaatgtacgtgtatttacttgt

SEQ ID NO: 3638752 - DNA, 25 bp, Homo sapien
gaaggataataagagactgagggct

SEQ ID NO: 3638753 - DNA, 25 bp, Homo sapien
gctaagtgcgagagccagagagccc

SEQ ID NO: 3638754 - DNA, 25 bp, Homo sapien
gaacaagtagatgttgatggctaag

SEQ ID NO: 3638755 - DNA, 25 bp, Homo sapien
gccaagatgagttgactccagtgaa

SEQ ID NO: 3638756 - DNA, 25 bp, Homo sapien
cttttgcttttgctgaaggacccat

SEQ ID NO: 3638757 - DNA, 25 bp, Homo sapien
aatattttgatatgtcagaggcgtg

SEQ ID NO: 3638758 - DNA, 25 bp, Homo sapien
ttcccctagagcacattgaaggagt

SEQ ID NO: 3638759 - DNA, 25 bp, Homo sapien
tatgattagaaaccaactcctttta

SEQ ID NO: 3638760 - DNA, 25 bp, Homo sapien
ggagtgcagccaatttcaccttaaa

SEQ ID NO: 3638761 - DNA, 25 bp, Homo sapien
aagatcaaggtacaatagttcactc

SEQ ID NO: 3638762 - DNA, 25 bp, Homo sapien
ttttgtggcccgattgcccacaagg

SEQ ID NO: 3638763 - DNA, 25 bp, Homo sapien
gattgcccacaaggaaaagatcaag

SEQ ID NO: 3638764 - DNA, 25 bp, Homo sapien
cctctgcagggatcttcacgaagtt

SEQ ID NO: 3638765 - DNA, 25 bp, Homo sapien
tcaaccagccaaggaaatctgagcc

SEQ ID NO: 3638766 - DNA, 25 bp, Homo sapien
aaataggcactggtcctctttgcaa

SEQ ID NO: 3638767 - DNA, 25 bp, Homo sapien
gagccagtttattatagtctatgaa

SEQ ID NO: 3638768 - DNA, 25 bp, Homo sapien
taaatgtgtataatccacagagctt

SEQ ID NO: 3638769 - DNA, 25 bp, Homo sapien
agcccgttgtacttcataacacaaa

SEQ ID NO: 3638770 - DNA, 25 bp, Homo sapien
tttgctatccccaagcccgttgtac

SEQ ID NO: 3638771 - DNA, 25 bp, Homo sapien
tccccaagcccgttgtacttcataa

SEQ ID NO: 3638772 - DNA, 25 bp, Homo sapien
catcctttgctatccccaagcccgt

SEQ ID NO: 3638773 - DNA, 25 bp, Homo sapien
tcacatacatcgcatcagggccttc

SEQ ID NO: 3638774 - DNA, 25 bp, Homo sapien
cacatacatcgcatcagggccttca

SEQ ID NO: 3638775 - DNA, 25 bp, Homo sapien
tttcacatacatcgcatcagggcct

SEQ ID NO: 3638776 - DNA, 25 bp, Homo sapien
atttcacatacatcgcatcagggcc

SEQ ID NO: 3638777 - DNA, 25 bp, Homo sapien
acctcattggtttcattcacagcag

SEQ ID NO: 3638778 - DNA, 25 bp, Homo sapien
tttgatagcacacgcgaaggtatct

SEQ ID NO: 3638779 - DNA, 25 bp, Homo sapien
ttttgatagcacacgcgaaggtatc

SEQ ID NO: 3638780 - DNA, 25 bp, Homo sapien
attggtttcattcacagcagactga

SEQ ID NO: 3638781 - DNA, 25 bp, Homo sapien
gtgcaattgggagctctggaacctc

SEQ ID NO: 3638782 - DNA, 25 bp, Homo sapien
aggtgcaattgggagctctggaacc

SEQ ID NO: 3638783 - DNA, 25 bp, Homo sapien
tgcaattgggagctctggaacctcg

SEQ ID NO: 3638784 - DNA, 25 bp, Homo sapien
caattgggagctctggaacctcggt

SEQ ID NO: 3638785 - DNA, 25 bp, Homo sapien
gcataaatatagatctctgcagaaa

SEQ ID NO: 3638786 - DNA, 25 bp, Homo sapien
gaaggcaaagacatgataaacagca

SEQ ID NO: 3638787 - DNA, 25 bp, Homo sapien
taagctttccatgtttctcattgac

SEQ ID NO: 3638788 - DNA, 25 bp, Homo sapien
gactatacaagaaccaatgagcaga

SEQ ID NO: 3638789 - DNA, 25 bp, Homo sapien
gagctggtagctccaatctgaattt

SEQ ID NO: 3638790 - DNA, 25 bp, Homo sapien
ctgtctgtgccttcaatcttttgtg

SEQ ID NO: 3638791 - DNA, 25 bp, Homo sapien
tcttaacagggttgtagctcagact

SEQ ID NO: 3638792 - DNA, 25 bp, Homo sapien
taatttctatctgagtcttaacagg

SEQ ID NO: 3638793 - DNA, 25 bp, Homo sapien
tttattgcaccgaaacactcattaa

SEQ ID NO: 3638794 - DNA, 25 bp, Homo sapien
tattgcaccgaaacactcattaatt

SEQ ID NO: 3638795 - DNA, 25 bp, Homo sapien
cctttattgcaccgaaacactcatt

SEQ ID NO: 3638796 - DNA, 25 bp, Homo sapien
ctttattgcaccgaaacactcatta

SEQ ID NO: 3638797 - DNA, 25 bp, Homo sapien
agcagtaagaatggagatgattttc

SEQ ID NO: 3638798 - DNA, 25 bp, Homo sapien
aggcaaagcagtaagaatggagatg

SEQ ID NO: 3638799 - DNA, 25 bp, Homo sapien
ctgagaaggcaaagcagtaagaatg

SEQ ID NO: 3638800 - DNA, 25 bp, Homo sapien
gaaggcaaagcagtaagaatggaga

SEQ ID NO: 3638801 - DNA, 25 bp, Homo sapien
aaccagagctgcttgcatcgactca

SEQ ID NO: 3638802 - DNA, 25 bp, Homo sapien
gagatttctgcttggatggcgcaca

SEQ ID NO: 3638803 - DNA, 25 bp, Homo sapien
ttatcaaactggcagctgagcccca

SEQ ID NO: 3638804 - DNA, 25 bp, Homo sapien
cagccagagctgatcaggagtttca

SEQ ID NO: 3638805 - DNA, 25 bp, Homo sapien
caattagttgtaaacaccactgcac

SEQ ID NO: 3638806 - DNA, 25 bp, Homo sapien
aaagaaatctgtaactggttgtgat

SEQ ID NO: 3638807 - DNA, 25 bp, Homo sapien
aaacaccactgcactcagaccagct

SEQ ID NO: 3638808 - DNA, 25 bp, Homo sapien
gaagcagtgggaatgaaaaaggaac

SEQ ID NO: 3638809 - DNA, 25 bp, Homo sapien
ataggttatacatgtcatgtggtgg

SEQ ID NO: 3638810 - DNA, 25 bp, Homo sapien
aacgaattgtgttttatttgcctgt

SEQ ID NO: 3638811 - DNA, 25 bp, Homo sapien
taacgaattgtgttttatttgcctg

SEQ ID NO: 3638812 - DNA, 25 bp, Homo sapien
ggttatacatgtcatgtggtggttt

SEQ ID NO: 3638813 - DNA, 25 bp, Homo sapien
gccctgacttttacttttgtatcca

SEQ ID NO: 3638814 - DNA, 25 bp, Homo sapien
ccctgacttttacttttgtatccat

SEQ ID NO: 3638815 - DNA, 25 bp, Homo sapien
cagccctgacttttacttttgtatc

SEQ ID NO: 3638816 - DNA, 25 bp, Homo sapien
gacagccctgacttttacttttgta

SEQ ID NO: 3638817 - DNA, 25 bp, Homo sapien
tatgctcgtatggtgtcttttagtc

SEQ ID NO: 3638818 - DNA, 25 bp, Homo sapien
tccaggtgctaatcaaacaaggagg

SEQ ID NO: 3638819 - DNA, 25 bp, Homo sapien
aatcttccaggtgctaatcaaacaa

SEQ ID NO: 3638820 - DNA, 25 bp, Homo sapien
ctgtatgctcgtatggtgtctttta

SEQ ID NO: 3638821 - DNA, 25 bp, Homo sapien
tgggattctagcatacaaagtcacc

SEQ ID NO: 3638822 - DNA, 25 bp, Homo sapien
ccaaaagaggcaaggagctaggtct

SEQ ID NO: 3638823 - DNA, 25 bp, Homo sapien
ggattctagcatacaaagtcaccat

SEQ ID NO: 3638824 - DNA, 25 bp, Homo sapien
tgaaggtttctcgagcatccaaaag

SEQ ID NO: 3638825 - DNA, 25 bp, Homo sapien
tagcagcggcgttgccacattagag

SEQ ID NO: 3638826 - DNA, 25 bp, Homo sapien
tactggagagattccgcatagcctg

SEQ ID NO: 3638827 - DNA, 25 bp, Homo sapien
actctcggagcccagggtagcagcg

SEQ ID NO: 3638828 - DNA, 25 bp, Homo sapien
tacaattagccctgcactctcggag

SEQ ID NO: 3638829 - DNA, 25 bp, Homo sapien
gctttccacgatcatcacacactgt

SEQ ID NO: 3638830 - DNA, 25 bp, Homo sapien
ctggtaccacgcgagacaggggggt

SEQ ID NO: 3638831 - DNA, 25 bp, Homo sapien
gcgagacaggggggttagaacacga

SEQ ID NO: 3638832 - DNA, 25 bp, Homo sapien
acagtcctgctttccacgatcatca

SEQ ID NO: 3638833 - DNA, 25 bp, Homo sapien
ggattggtgacatcgcgtaaaggaa

SEQ ID NO: 3638834 - DNA, 25 bp, Homo sapien
acatcgcgtaaaggaaacacgagga

SEQ ID NO: 3638835 - DNA, 25 bp, Homo sapien
ttacagaacaagcacgggggattgg

SEQ ID NO: 3638836 - DNA, 25 bp, Homo sapien
acaagcacgggggattggtgacatc

SEQ ID NO: 3638837 - DNA, 25 bp, Homo sapien
gacacttgctgttgaaggcattttg

SEQ ID NO: 3638838 - DNA, 25 bp, Homo sapien
aggcattttgttctggcagctgtag

SEQ ID NO: 3638839 - DNA, 25 bp, Homo sapien
agcgggtcattgctggacagcctga

SEQ ID NO: 3638840 - DNA, 25 bp, Homo sapien
ggtcacagcagaattgacacttgct

SEQ ID NO: 3638841 - DNA, 25 bp, Homo sapien
gtgcttattgtgcaatcctgtacta

SEQ ID NO: 3638842 - DNA, 25 bp, Homo sapien
tttcagaggaaaatgcctgctatcc

SEQ ID NO: 3638843 - DNA, 25 bp, Homo sapien
aatgcctgctatccacagtgcttat

SEQ ID NO: 3638844 - DNA, 25 bp, Homo sapien
tctttatccttggtacatatcctcc

SEQ ID NO: 3638845 - DNA, 25 bp, Homo sapien
gattcttggcccataactgtcctaa

SEQ ID NO: 3638846 - DNA, 25 bp, Homo sapien
cagctggactcctgtatttgaaacg

SEQ ID NO: 3638847 - DNA, 25 bp, Homo sapien
tgcataaggttttcagtcatacaga

SEQ ID NO: 3638848 - DNA, 25 bp, Homo sapien
tctgagcatcatgaattgcataagg

SEQ ID NO: 3638849 - DNA, 25 bp, Homo sapien
ctgaaggagtcaaacgagagaggca

SEQ ID NO: 3638850 - DNA, 25 bp, Homo sapien
taggtgtcctgtagctgttgtcaag

SEQ ID NO: 3638851 - DNA, 25 bp, Homo sapien
gagctgtaacactctctataggaca

SEQ ID NO: 3638852 - DNA, 25 bp, Homo sapien
gcaggaacagtgttgtgcagatcca

SEQ ID NO: 3638853 - DNA, 25 bp, Homo sapien
tttccttcactcctgccgttctcat

SEQ ID NO: 3638854 - DNA, 25 bp, Homo sapien
gttctcatcctcagtatgtaaatac

SEQ ID NO: 3638855 - DNA, 25 bp, Homo sapien
atgtaaatacgctttggtctcttcc

SEQ ID NO: 3638856 - DNA, 25 bp, Homo sapien
tcctcagtatgtaaatacgctttgg

SEQ ID NO: 3638857 - DNA, 25 bp, Homo sapien
gagtgaaccaccagcctataaatcc

SEQ ID NO: 3638858 - DNA, 25 bp, Homo sapien
aatctacctgacagttgctatggag

SEQ ID NO: 3638859 - DNA, 25 bp, Homo sapien
cactgaattgaaaaggctcaaccag

SEQ ID NO: 3638860 - DNA, 25 bp, Homo sapien
tgctatggagacacgaacaggaaga

SEQ ID NO: 3638861 - DNA, 25 bp, Homo sapien
tgcactgagctaaggagtagcatag

SEQ ID NO: 3638862 - DNA, 25 bp, Homo sapien
tctgaattaaagctgcactgagcta

SEQ ID NO: 3638863 - DNA, 25 bp, Homo sapien
gggacagcctgatcacatactggac

SEQ ID NO: 3638864 - DNA, 25 bp, Homo sapien
tggaccaaagctactggaggtggca

SEQ ID NO: 3638865 - DNA, 25 bp, Homo sapien
cagcagaggttttgctaaggatcaa

SEQ ID NO: 3638866 - DNA, 25 bp, Homo sapien
ttgccttctggtattctaagaggga

SEQ ID NO: 3638867 - DNA, 25 bp, Homo sapien
tctggtattctaagagggatggcat

SEQ ID NO: 3638868 - DNA, 25 bp, Homo sapien
atggcatggatgcagcagaggtttt

SEQ ID NO: 3638869 - DNA, 25 bp, Homo sapien
ccctccacagttgactggatcagag

SEQ ID NO: 3638870 - DNA, 25 bp, Homo sapien
gaatccactgcctgggataaggcat

SEQ ID NO: 3638871 - DNA, 25 bp, Homo sapien
ttgactggatcagagcaatgaatcc

SEQ ID NO: 3638872 - DNA, 25 bp, Homo sapien
cagagcaatgaatccactgcctggg

SEQ ID NO: 3638873 - DNA, 25 bp, Homo sapien
acattctggaagacagcttcaaaag

SEQ ID NO: 3638874 - DNA, 25 bp, Homo sapien
gacagcttcaaaagaggccttttca

SEQ ID NO: 3638875 - DNA, 25 bp, Homo sapien
tagtcacttggaccatacttctgga

SEQ ID NO: 3638876 - DNA, 25 bp, Homo sapien
catacttctggatacctccagctat

SEQ ID NO: 3638877 - DNA, 25 bp, Homo sapien
tactcccgacctatagtcacttgga

SEQ ID NO: 3638878 - DNA, 25 bp, Homo sapien
cttttccaggttctggacaactact

SEQ ID NO: 3638879 - DNA, 25 bp, Homo sapien
gttgccatattgagtcccaagtctc

SEQ ID NO: 3638880 - DNA, 25 bp, Homo sapien
ttaagttgccatattgagtcccaag

SEQ ID NO: 3638881 - DNA, 25 bp, Homo sapien
aagttgccatattgagtcccaagtc

SEQ ID NO: 3638882 - DNA, 25 bp, Homo sapien
cgatgttggggtttctggagcagga

SEQ ID NO: 3638883 - DNA, 25 bp, Homo sapien
cagcttgcaagttccagcctgtgtt

SEQ ID NO: 3638884 - DNA, 25 bp, Homo sapien
tggctaaagtcactaacagcttgca

SEQ ID NO: 3638885 - DNA, 25 bp, Homo sapien
ttgttggagcagtagtgttcctgcc

SEQ ID NO: 3638886 - DNA, 25 bp, Homo sapien
gagcagtagtgttcctgcctgcatc

SEQ ID NO: 3638887 - DNA, 25 bp, Homo sapien
cccacagagctgatccaagcctgga

SEQ ID NO: 3638888 - DNA, 25 bp, Homo sapien
gaatgtctttgaaaccaatgggagt

SEQ ID NO: 3638889 - DNA, 25 bp, Homo sapien
gctgatccaagcctggaatgtcttt

SEQ ID NO: 3638890 - DNA, 25 bp, Homo sapien
tggaatgtctttgaaaccaatggga

SEQ ID NO: 3638891 - DNA, 25 bp, Homo sapien
acagagctggtccatacccaaagag

SEQ ID NO: 3638892 - DNA, 25 bp, Homo sapien
gagctggtccatacccaaagagctg

SEQ ID NO: 3638893 - DNA, 25 bp, Homo sapien
cattcctcgtctggctgatccgtgc

SEQ ID NO: 3638894 - DNA, 25 bp, Homo sapien
cctgtgtctggtccattcctcgtct

SEQ ID NO: 3638895 - DNA, 25 bp, Homo sapien
acagccactgtgcaaacaaaaaaag

SEQ ID NO: 3638896 - DNA, 25 bp, Homo sapien
agcagggtggttaaattagcgtgct

SEQ ID NO: 3638897 - DNA, 25 bp, Homo sapien
tgcagcaccaactcgctcacaggaa

SEQ ID NO: 3638898 - DNA, 25 bp, Homo sapien
ttgcagcaccaactcgctcacagga

SEQ ID NO: 3638899 - DNA, 25 bp, Homo sapien
gcagcaccaactcgctcacaggaat

SEQ ID NO: 3638900 - DNA, 25 bp, Homo sapien
tatggataagctcaaagtttgacac

SEQ ID NO: 3638901 - DNA, 25 bp, Homo sapien
tgtttcacacgtgcttttaaaggaa

SEQ ID NO: 3638902 - DNA, 25 bp, Homo sapien
caagcagactcattgacaagcctaa

SEQ ID NO: 3638903 - DNA, 25 bp, Homo sapien
caagcctaaacctctccgtgtgtct

SEQ ID NO: 3638904 - DNA, 25 bp, Homo sapien
taatgttctaaggtctttttagaca

SEQ ID NO: 3638905 - DNA, 25 bp, Homo sapien
tattctaacaattgacactttgtaa

SEQ ID NO: 3638906 - DNA, 25 bp, Homo sapien
ttttctcttgttgtaaagaggcaga

SEQ ID NO: 3638907 - DNA, 25 bp, Homo sapien
tttcaagcgctctgggggcaccggt

SEQ ID NO: 3638908 - DNA, 25 bp, Homo sapien
tcacgatccctgcatgggtagcttc

SEQ ID NO: 3638909 - DNA, 25 bp, Homo sapien
catcacgatccctgcatgggtagct

SEQ ID NO: 3638910 - DNA, 25 bp, Homo sapien
cacgatccctgcatgggtagcttca

SEQ ID NO: 3638911 - DNA, 25 bp, Homo sapien
cgatccctgcatgggtagcttcatc

SEQ ID NO: 3638912 - DNA, 25 bp, Homo sapien
ggacgatcacgccttctaattgcgg

SEQ ID NO: 3638913 - DNA, 25 bp, Homo sapien
acgccttctaattgcgggtccttgg

SEQ ID NO: 3638914 - DNA, 25 bp, Homo sapien
ttctaattgcgggtccttggcatta

SEQ ID NO: 3638915 - DNA, 25 bp, Homo sapien
ctctggacgatcacgccttctaatt

SEQ ID NO: 3638916 - DNA, 25 bp, Homo sapien
gggtgttcagacatgttgttctttg

SEQ ID NO: 3638917 - DNA, 25 bp, Homo sapien
agggtgttcagacatgttgttcttt

SEQ ID NO: 3638918 - DNA, 25 bp, Homo sapien
gctccttcttgcattggttatacgg

SEQ ID NO: 3638919 - DNA, 25 bp, Homo sapien
tgcattggttatacggtttttcaaa

SEQ ID NO: 3638920 - DNA, 25 bp, Homo sapien
cctccagtatctttgaggctgccct

SEQ ID NO: 3638921 - DNA, 25 bp, Homo sapien
tcctccagtatctttgaggctgccc

SEQ ID NO: 3638922 - DNA, 25 bp, Homo sapien
cctggttctccttactgtgagtctg

SEQ ID NO: 3638923 - DNA, 25 bp, Homo sapien
gactctgtgttagctccacgatggg

SEQ ID NO: 3638924 - DNA, 25 bp, Homo sapien
cgtggatttaatgcacacacttgct

SEQ ID NO: 3638925 - DNA, 25 bp, Homo sapien
gtttttcagcaatgtgactctgtgt

SEQ ID NO: 3638926 - DNA, 25 bp, Homo sapien
cacttgcttggcttgttacattgtg

SEQ ID NO: 3638927 - DNA, 25 bp, Homo sapien
gcaattagattcatgcagattctgg

SEQ ID NO: 3638928 - DNA, 25 bp, Homo sapien
atttccatgttcaagtagtattgcg

SEQ ID NO: 3638929 - DNA, 25 bp, Homo sapien
gtagtattgcgagtcactcagtggg

SEQ ID NO: 3638930 - DNA, 25 bp, Homo sapien
gctgcttattaggtctgtcactttc

SEQ ID NO: 3638931 - DNA, 25 bp, Homo sapien
catagcaatcagtgtacagaagtgc

SEQ ID NO: 3638932 - DNA, 25 bp, Homo sapien
ccactatggatgttgcagaaacaga

SEQ ID NO: 3638933 - DNA, 25 bp, Homo sapien
tctgtgctgccgaattgactgtaat

SEQ ID NO: 3638934 - DNA, 25 bp, Homo sapien
ccccgagggtaattaagccagcaat

SEQ ID NO: 3638935 - DNA, 25 bp, Homo sapien
agcttgactaagtagttactaatct

SEQ ID NO: 3638936 - DNA, 25 bp, Homo sapien
ctaagtagttactaatctgtttggt

SEQ ID NO: 3638937 - DNA, 25 bp, Homo sapien
gactaagtagttactaatctgtttg

SEQ ID NO: 3638938 - DNA, 25 bp, Homo sapien
gacctgatttgaaaccatccagctt

SEQ ID NO: 3638939 - DNA, 25 bp, Homo sapien
ttttaacagggacttgcatttcata

SEQ ID NO: 3638940 - DNA, 25 bp, Homo sapien
tgctcagtgctgaccctgcttgtct

SEQ ID NO: 3638941 - DNA, 25 bp, Homo sapien
gtctcagattcagcaacctgaaatc

SEQ ID NO: 3638942 - DNA, 25 bp, Homo sapien
cagtgctgaccctgcttgtctcaga

SEQ ID NO: 3638943 - DNA, 25 bp, Homo sapien
ccaggagatgccacgtcttgaaacc

SEQ ID NO: 3638944 - DNA, 25 bp, Homo sapien
gagatgccacgtcttgaaaccccag

SEQ ID NO: 3638945 - DNA, 25 bp, Homo sapien
cttgctcattagctgcagccaggtg

SEQ ID NO: 3638946 - DNA, 25 bp, Homo sapien
cagctggaccatggccatccttgct

SEQ ID NO: 3638947 - DNA, 25 bp, Homo sapien
ggtagacacatttgacggtccatag

SEQ ID NO: 3638948 - DNA, 25 bp, Homo sapien
ttgacggtccataggtgggctccat

SEQ ID NO: 3638949 - DNA, 25 bp, Homo sapien
atctctccagaggtagacacatttg

SEQ ID NO: 3638950 - DNA, 25 bp, Homo sapien
tccagaggtagacacatttgacggt

SEQ ID NO: 3638951 - DNA, 25 bp, Homo sapien
tctctgtctctactgacgctgctgc

SEQ ID NO: 3638952 - DNA, 25 bp, Homo sapien
tctgtctctactgacgctgctgcca

SEQ ID NO: 3638953 - DNA, 25 bp, Homo sapien
ttgttctctgtctctactgacgctg

SEQ ID NO: 3638954 - DNA, 25 bp, Homo sapien
cccaaatttcaccccttgttctctg

SEQ ID NO: 3638955 - DNA, 25 bp, Homo sapien
ttaatcccataaaagctgaaacgat

SEQ ID NO: 3638956 - DNA, 25 bp, Homo sapien
gaaaaatagatgtaagatgtaagat

SEQ ID NO: 3638957 - DNA, 25 bp, Homo sapien
taaatgtgtgaggatctcaatgaat

SEQ ID NO: 3638958 - DNA, 25 bp, Homo sapien
ttgcatccctgtgacactgaaatca

SEQ ID NO: 3638959 - DNA, 25 bp, Homo sapien
tacttcacaaatacgagaatactta

SEQ ID NO: 3638960 - DNA, 25 bp, Homo sapien
tgccagctacaatgtttgggttgtt

SEQ ID NO: 3638961 - DNA, 25 bp, Homo sapien
aaatttatcccttgttaccagctca

SEQ ID NO: 3638962 - DNA, 25 bp, Homo sapien
tattttcatgagaagacccatactt

SEQ ID NO: 3638963 - DNA, 25 bp, Homo sapien
aagttcacagaatgccagagctgcc

SEQ ID NO: 3638964 - DNA, 25 bp, Homo sapien
ctcaagttcacagaatgccagagct

SEQ ID NO: 3638965 - DNA, 25 bp, Homo sapien
agaatgccagagctgccaggttcat

SEQ ID NO: 3638966 - DNA, 25 bp, Homo sapien
tcacagaatgccagagctgccaggt

SEQ ID NO: 3638967 - DNA, 25 bp, Homo sapien
tctccagttggggctgataattcag

SEQ ID NO: 3638968 - DNA, 25 bp, Homo sapien
cagttggggctgataattcagtttg

SEQ ID NO: 3638969 - DNA, 25 bp, Homo sapien
ctccagttggggctgataattcagt

SEQ ID NO: 3638970 - DNA, 25 bp, Homo sapien
ccagttggggctgataattcagttt

SEQ ID NO: 3638971 - DNA, 25 bp, Homo sapien
acagagacactgggtaccttcgtgg

SEQ ID NO: 3638972 - DNA, 25 bp, Homo sapien
ctgccaaggtgggctgtccagagca

SEQ ID NO: 3638973 - DNA, 25 bp, Homo sapien
gccaaggtgggctgtccagagcagt

SEQ ID NO: 3638974 - DNA, 25 bp, Homo sapien
ggctgccaaggtgggctgtccagag

SEQ ID NO: 3638975 - DNA, 25 bp, Homo sapien
ctgagacagagttgataaactgaca

SEQ ID NO: 3638976 - DNA, 25 bp, Homo sapien
cctgagacagagttgataaactgac

SEQ ID NO: 3638977 - DNA, 25 bp, Homo sapien
atgtcagccagggcttcgtttccat

SEQ ID NO: 3638978 - DNA, 25 bp, Homo sapien
ggagagtgggtggatggctctgcaa

SEQ ID NO: 3638979 - DNA, 25 bp, Homo sapien
caaagtggagagtgggtggatggct

SEQ ID NO: 3638980 - DNA, 25 bp, Homo sapien
ctgagacaaagtggagagtgggtgg

SEQ ID NO: 3638981 - DNA, 25 bp, Homo sapien
gggtggatggctctgcaaccatgtt

SEQ ID NO: 3638982 - DNA, 25 bp, Homo sapien
aagcagtgttctctgaaagggcacc

SEQ ID NO: 3638983 - DNA, 25 bp, Homo sapien
gatcctgtatgctctgtaatgcaga

SEQ ID NO: 3638984 - DNA, 25 bp, Homo sapien
agaattgtctgctactcctaggcca

SEQ ID NO: 3638985 - DNA, 25 bp, Homo sapien
aagcaggaggttgttcagtgtttcc

SEQ ID NO: 3638986 - DNA, 25 bp, Homo sapien
tcctaggccacctatggtttttgca

SEQ ID NO: 3638987 - DNA, 25 bp, Homo sapien
ctgaggagaagtgggagttagtaca

SEQ ID NO: 3638988 - DNA, 25 bp, Homo sapien
ggagaagtgggagttagtacaggaa

SEQ ID NO: 3638989 - DNA, 25 bp, Homo sapien
aattccatgccactcccacagattt

SEQ ID NO: 3638990 - DNA, 25 bp, Homo sapien
agtgggagttagtacaggaagaatc

SEQ ID NO: 3638991 - DNA, 25 bp, Homo sapien
tctggtgctttggtagtagttggca

SEQ ID NO: 3638992 - DNA, 25 bp, Homo sapien
tcactagagatccacgacaatgttt

SEQ ID NO: 3638993 - DNA, 25 bp, Homo sapien
caactgtcgtttaaatgtgccccat

SEQ ID NO: 3638994 - DNA, 25 bp, Homo sapien
taaaaccccattcagtcctggagaa

SEQ ID NO: 3638995 - DNA, 25 bp, Homo sapien
ccttgctaaccctggagtcggactt

SEQ ID NO: 3638996 - DNA, 25 bp, Homo sapien
aagctgcatggagctattttgggcc

SEQ ID NO: 3638997 - DNA, 25 bp, Homo sapien
gaagctgcatggagctattttgggc

SEQ ID NO: 3638998 - DNA, 25 bp, Homo sapien
gggccttctcggtgcacttaacatt

SEQ ID NO: 3638999 - DNA, 25 bp, Homo sapien
tattttgggccttctcggtgcactt

SEQ ID NO: 3639000 - DNA, 25 bp, Homo sapien
ttccaacgttctgagtcacattcag

SEQ ID NO: 3639001 - DNA, 25 bp, Homo sapien
gctttccaacgttctgagtcacatt

SEQ ID NO: 3639002 - DNA, 25 bp, Homo sapien
attcagggttgtaaaatgacttatc

SEQ ID NO: 3639003 - DNA, 25 bp, Homo sapien
cagggttgtaaaatgacttatcgcc

SEQ ID NO: 3639004 - DNA, 25 bp, Homo sapien
cagttgggtgagttggctaaaacca

SEQ ID NO: 3639005 - DNA, 25 bp, Homo sapien
cccattgttttagcacgttagcaga

SEQ ID NO: 3639006 - DNA, 25 bp, Homo sapien
tgagcagttctgaatcaacgcaaaa

SEQ ID NO: 3639007 - DNA, 25 bp, Homo sapien
gctcttccaagcatatctgtgaggc

SEQ ID NO: 3639008 - DNA, 25 bp, Homo sapien
ccaaactcattagcctcatccccat

SEQ ID NO: 3639009 - DNA, 25 bp, Homo sapien
gagcacctcgtccaaactcattagc

SEQ ID NO: 3639010 - DNA, 25 bp, Homo sapien
tacagagcacctcgtccaaactcat

SEQ ID NO: 3639011 - DNA, 25 bp, Homo sapien
acatacagagcacctcgtccaaact

SEQ ID NO: 3639012 - DNA, 25 bp, Homo sapien
gtcactccatatagtcagttgccag

SEQ ID NO: 3639013 - DNA, 25 bp, Homo sapien
tcctctccaagtcactccatatagt

SEQ ID NO: 3639014 - DNA, 25 bp, Homo sapien
agcttggttctggccgcatctgcat

SEQ ID NO: 3639015 - DNA, 25 bp, Homo sapien
catatagtcagttgccagcttggtt

SEQ ID NO: 3639016 - DNA, 25 bp, Homo sapien
tcaccacattgattccgcatgccaa

SEQ ID NO: 3639017 - DNA, 25 bp, Homo sapien
tatcagccatacgatcaccacattg

SEQ ID NO: 3639018 - DNA, 25 bp, Homo sapien
ttatgagtttatatcagccatacga

SEQ ID NO: 3639019 - DNA, 25 bp, Homo sapien
gccaatgagataacattccactgtg

SEQ ID NO: 3639020 - DNA, 25 bp, Homo sapien
cctccaatcggtggcttgtaaacct

SEQ ID NO: 3639021 - DNA, 25 bp, Homo sapien
atccaacctccaatcggtggcttgt

SEQ ID NO: 3639022 - DNA, 25 bp, Homo sapien
gcctgggctctggacagtaattgca

SEQ ID NO: 3639023 - DNA, 25 bp, Homo sapien
cctgggctctggacagtaattgcag

SEQ ID NO: 3639024 - DNA, 25 bp, Homo sapien
agcttgcctcttcgtcgattcccat

SEQ ID NO: 3639025 - DNA, 25 bp, Homo sapien
gagcttgcctcttcgtcgattccca

SEQ ID NO: 3639026 - DNA, 25 bp, Homo sapien
agagcttgcctcttcgtcgattccc

SEQ ID NO: 3639027 - DNA, 25 bp, Homo sapien
caaagcctaaggccctttagagtct

SEQ ID NO: 3639028 - DNA, 25 bp, Homo sapien
gcctaaggccctttagagtctctgc

SEQ ID NO: 3639029 - DNA, 25 bp, Homo sapien
ctaaggccctttagagtctctgcct

SEQ ID NO: 3639030 - DNA, 25 bp, Homo sapien
gccctttagagtctctgccttgttc

SEQ ID NO: 3639031 - DNA, 25 bp, Homo sapien
aattcccactgttaagattagcatt

SEQ ID NO: 3639032 - DNA, 25 bp, Homo sapien
tactgccagcatgacataattccca

SEQ ID NO: 3639033 - DNA, 25 bp, Homo sapien
tgataattctgcaatcaacttgcca

SEQ ID NO: 3639034 - DNA, 25 bp, Homo sapien
tatgaagagaggtaattcggagtaa

SEQ ID NO: 3639035 - DNA, 25 bp, Homo sapien
ccagggaaaatagagtgacagtcca

SEQ ID NO: 3639036 - DNA, 25 bp, Homo sapien
gtaaccagggaaaatagagtgacag

SEQ ID NO: 3639037 - DNA, 25 bp, Homo sapien
gggaaaatagagtgacagtccactc

SEQ ID NO: 3639038 - DNA, 25 bp, Homo sapien
aaaatagagtgacagtccactctgc

SEQ ID NO: 3639039 - DNA, 25 bp, Homo sapien
tactggaagctactaaagcaggtac

SEQ ID NO: 3639040 - DNA, 25 bp, Homo sapien
gcctaggctcagacattcttcctgg

SEQ ID NO: 3639041 - DNA, 25 bp, Homo sapien
tgcctaggctcagacattcttcctg

SEQ ID NO: 3639042 - DNA, 25 bp, Homo sapien
gcaggtaccatgtttccccatggca

SEQ ID NO: 3639043 - DNA, 25 bp, Homo sapien
tgtagggctgagcacatcatctctg

SEQ ID NO: 3639044 - DNA, 25 bp, Homo sapien
taaatggcaccttatcaatgctcag

SEQ ID NO: 3639045 - DNA, 25 bp, Homo sapien
ccctatttcgaagatttgcggtaag

SEQ ID NO: 3639046 - DNA, 25 bp, Homo sapien
caggctcaccagttcaactcattgg

SEQ ID NO: 3639047 - DNA, 25 bp, Homo sapien
ttagcagtggcttcttaagtgccag

SEQ ID NO: 3639048 - DNA, 25 bp, Homo sapien
cagagacctagagtttggaattgga

SEQ ID NO: 3639049 - DNA, 25 bp, Homo sapien
gaattggagacattctccgacaatg

SEQ ID NO: 3639050 - DNA, 25 bp, Homo sapien
gacaaatttcttctttcgttacagc

SEQ ID NO: 3639051 - DNA, 25 bp, Homo sapien
aggagatcattcagaaccctggcag

SEQ ID NO: 3639052 - DNA, 25 bp, Homo sapien
tgggtggcaactgtgaactgctcca

SEQ ID NO: 3639053 - DNA, 25 bp, Homo sapien
cacacagtgccttgacgtacagttg

SEQ ID NO: 3639054 - DNA, 25 bp, Homo sapien
aaagaggccagtatccccaggagat

SEQ ID NO: 3639055 - DNA, 25 bp, Homo sapien
tgatgggccggatcactcctttgtg

SEQ ID NO: 3639056 - DNA, 25 bp, Homo sapien
gatgggccggatcactcctttgtgt

SEQ ID NO: 3639057 - DNA, 25 bp, Homo sapien
gccggatcactcctttgtgtagctc

SEQ ID NO: 3639058 - DNA, 25 bp, Homo sapien
tgggccggatcactcctttgtgtag

SEQ ID NO: 3639059 - DNA, 25 bp, Homo sapien
ttatagaatctgtaggtcaaagaca

SEQ ID NO: 3639060 - DNA, 25 bp, Homo sapien
gacagagcgatagaaggtgctgctt

SEQ ID NO: 3639061 - DNA, 25 bp, Homo sapien
ggtagcggaattgctgatgctgtca

SEQ ID NO: 3639062 - DNA, 25 bp, Homo sapien
ttctgaagaagtcgggttggttctg

SEQ ID NO: 3639063 - DNA, 25 bp, Homo sapien
ttagttacatgcaattctccctcgt

SEQ ID NO: 3639064 - DNA, 25 bp, Homo sapien
ctccctcgtctgagaaaatgctaca

SEQ ID NO: 3639065 - DNA, 25 bp, Homo sapien
aaggaggtctaacttagttacatgc

SEQ ID NO: 3639066 - DNA, 25 bp, Homo sapien
atgtttttgtgcactgaatgggatt

SEQ ID NO: 3639067 - DNA, 25 bp, Homo sapien
gagtgtcctgaaggtcataggcctt

SEQ ID NO: 3639068 - DNA, 25 bp, Homo sapien
tggaggatgttgatagaggatgctg

SEQ ID NO: 3639069 - DNA, 25 bp, Homo sapien
tggagacactctgggttaagacact

SEQ ID NO: 3639070 - DNA, 25 bp, Homo sapien
ccatccttgagtgtcctgaaggtca

SEQ ID NO: 3639071 - DNA, 25 bp, Homo sapien
gccatagagactgcgcgcgaaaatg

SEQ ID NO: 3639072 - DNA, 25 bp, Homo sapien
tgtgaatctgatcctacccgtggtt

SEQ ID NO: 3639073 - DNA, 25 bp, Homo sapien
tgtcctgtgcacctgtcgtagagcg

SEQ ID NO: 3639074 - DNA, 25 bp, Homo sapien
ccagcataggaaggatcacgtgata

SEQ ID NO: 3639075 - DNA, 25 bp, Homo sapien
gaagatgtcatttcacaggcccata

SEQ ID NO: 3639076 - DNA, 25 bp, Homo sapien
tagacactgggacagcgtaggctct

SEQ ID NO: 3639077 - DNA, 25 bp, Homo sapien
aatgctatctttggacgaggcagga

SEQ ID NO: 3639078 - DNA, 25 bp, Homo sapien
cgtaggctctgtaatgggacaccaa

SEQ ID NO: 3639079 - DNA, 25 bp, Homo sapien
ggctctcagtatccagccttgagat

SEQ ID NO: 3639080 - DNA, 25 bp, Homo sapien
cagtatccagccttgagattcccac

SEQ ID NO: 3639081 - DNA, 25 bp, Homo sapien
tctcagtatccagccttgagattcc

SEQ ID NO: 3639082 - DNA, 25 bp, Homo sapien
aggaaggctctcagtatccagcctt

SEQ ID NO: 3639083 - DNA, 25 bp, Homo sapien
taagtttttatgactcccatggtat

SEQ ID NO: 3639084 - DNA, 25 bp, Homo sapien
cattttcacatatgttgccttgatc

SEQ ID NO: 3639085 - DNA, 25 bp, Homo sapien
tatgttgccttgatctttcacatct

SEQ ID NO: 3639086 - DNA, 25 bp, Homo sapien
aaagatgttcaaatagtgagttttc

SEQ ID NO: 3639087 - DNA, 25 bp, Homo sapien
tagttaggcctgattgtgggatcca

SEQ ID NO: 3639088 - DNA, 25 bp, Homo sapien
tatatgtacctggactgcaacccac

SEQ ID NO: 3639089 - DNA, 25 bp, Homo sapien
caaaaggtatatcaccatgagggac

SEQ ID NO: 3639090 - DNA, 25 bp, Homo sapien
gatccaaatgggtgtcaagacctgt

SEQ ID NO: 3639091 - DNA, 25 bp, Homo sapien
tcatggtcatcacagctagggctaa

SEQ ID NO: 3639092 - DNA, 25 bp, Homo sapien
aaaacccttcgctggatgttcatgg

SEQ ID NO: 3639093 - DNA, 25 bp, Homo sapien
gatgtagagcgaggcagaaaaaccc

SEQ ID NO: 3639094 - DNA, 25 bp, Homo sapien
cacagccacatgaggtgagggagac

SEQ ID NO: 3639095 - DNA, 25 bp, Homo sapien
tcccatttcagtgagatgggttgaa

SEQ ID NO: 3639096 - DNA, 25 bp, Homo sapien
gaaatgtgtttagttgaatatctgg

SEQ ID NO: 3639097 - DNA, 25 bp, Homo sapien
aaaaccccagttgactcaaagtcag

SEQ ID NO: 3639098 - DNA, 25 bp, Homo sapien
tcagcaagttggaggtcatgacctt

SEQ ID NO: 3639099 - DNA, 25 bp, Homo sapien
tagaaagcatgaaacctgggtcctg

SEQ ID NO: 3639100 - DNA, 25 bp, Homo sapien
tgcatacaggaccaggcactgctga

SEQ ID NO: 3639101 - DNA, 25 bp, Homo sapien
gattgaatcagacattgaccctgcc

SEQ ID NO: 3639102 - DNA, 25 bp, Homo sapien
aaaatcttacttccacctgagggtg

SEQ ID NO: 3639103 - DNA, 25 bp, Homo sapien
cctgctatggaaggatgtggctcca

SEQ ID NO: 3639104 - DNA, 25 bp, Homo sapien
aaagcccaggacagcttagctcagc

SEQ ID NO: 3639105 - DNA, 25 bp, Homo sapien
ccccaaagggataagtgcctgctat

SEQ ID NO: 3639106 - DNA, 25 bp, Homo sapien
tcaatggagttagcaaaccacggcc

SEQ ID NO: 3639107 - DNA, 25 bp, Homo sapien
gctcctggcagagagtatacgctca

SEQ ID NO: 3639108 - DNA, 25 bp, Homo sapien
tttgaagtcttagtacagctcctgg

SEQ ID NO: 3639109 - DNA, 25 bp, Homo sapien
taactaagcaggttacacagcctcc

SEQ ID NO: 3639110 - DNA, 25 bp, Homo sapien
gatgatctttggacatggcttcaca

SEQ ID NO: 3639111 - DNA, 25 bp, Homo sapien
ttttctccagctttttcagactcaa

SEQ ID NO: 3639112 - DNA, 25 bp, Homo sapien
cagctttttcagactcaacactctg

SEQ ID NO: 3639113 - DNA, 25 bp, Homo sapien
ataaatactccttatttttctccag

SEQ ID NO: 3639114 - DNA, 25 bp, Homo sapien
ctccagctttttcagactcaacact

SEQ ID NO: 3639115 - DNA, 25 bp, Homo sapien
tacaggctgtgaaagtgctcaggca

SEQ ID NO: 3639116 - DNA, 25 bp, Homo sapien
gaataagcctaccatctcagagaca

SEQ ID NO: 3639117 - DNA, 25 bp, Homo sapien
tgcaaatggcagtacagcaagcccg

SEQ ID NO: 3639118 - DNA, 25 bp, Homo sapien
gagtttccacagatactatcccgag

SEQ ID NO: 3639119 - DNA, 25 bp, Homo sapien
ggtgggagcgtacactgcctcttgt

SEQ ID NO: 3639120 - DNA, 25 bp, Homo sapien
cactgcgttagtgagtccggtaatg

SEQ ID NO: 3639121 - DNA, 25 bp, Homo sapien
tatttatggcgcaacagcagggagt

SEQ ID NO: 3639122 - DNA, 25 bp, Homo sapien
tcttgtctacttcgggccactgcgt

SEQ ID NO: 3639123 - DNA, 25 bp, Homo sapien
ccttcctagaagtctttcgaaatgc

SEQ ID NO: 3639124 - DNA, 25 bp, Homo sapien
tggtggtctcaggttcttttacgtc

SEQ ID NO: 3639125 - DNA, 25 bp, Homo sapien
cctcgctcctgggtcctcgtgctgc

SEQ ID NO: 3639126 - DNA, 25 bp, Homo sapien
ctcgctcctgggtcctcgtgctgct

SEQ ID NO: 3639127 - DNA, 25 bp, Homo sapien
ttttcagacggaatatcggatttta

SEQ ID NO: 3639128 - DNA, 25 bp, Homo sapien
gagatgaagaacgaaccatcagtga

SEQ ID NO: 3639129 - DNA, 25 bp, Homo sapien
tacaaagtgatagatgaaccaaaac

SEQ ID NO: 3639130 - DNA, 25 bp, Homo sapien
taatataagctagacagtttcttcc

SEQ ID NO: 3639131 - DNA, 25 bp, Homo sapien
gaaatcgagtaacatggtaccagct

SEQ ID NO: 3639132 - DNA, 25 bp, Homo sapien
cctaaaattccgtcctactggtgtg

SEQ ID NO: 3639133 - DNA, 25 bp, Homo sapien
gaatctcatgatatggtcaggctac

SEQ ID NO: 3639134 - DNA, 25 bp, Homo sapien
tgggacgtctgtgtgctaaaggaac

SEQ ID NO: 3639135 - DNA, 25 bp, Homo sapien
gctggcatctgtaagggaagccagt

SEQ ID NO: 3639136 - DNA, 25 bp, Homo sapien
ggaagccagtgtgcaaatggcactg

SEQ ID NO: 3639137 - DNA, 25 bp, Homo sapien
catctgtaagggaagccagtgtgca

SEQ ID NO: 3639138 - DNA, 25 bp, Homo sapien
agaggagcccatccggccctggctg

SEQ ID NO: 3639139 - DNA, 25 bp, Homo sapien
tagactcccagctaactctgtggcc

SEQ ID NO: 3639140 - DNA, 25 bp, Homo sapien
gactcccagctaactctgtggccgt

SEQ ID NO: 3639141 - DNA, 25 bp, Homo sapien
ttggtagactcccagctaactctgt

SEQ ID NO: 3639142 - DNA, 25 bp, Homo sapien
ggtagactcccagctaactctgtgg

SEQ ID NO: 3639143 - DNA, 25 bp, Homo sapien
gaagacatggcacagtacttctctt

SEQ ID NO: 3639144 - DNA, 25 bp, Homo sapien
tagaataagcaaagccagcgtgctc

SEQ ID NO: 3639145 - DNA, 25 bp, Homo sapien
tctttgtggatataagaaatcgggc

SEQ ID NO: 3639146 - DNA, 25 bp, Homo sapien
ggatataagaaatcgggcatagaat

SEQ ID NO: 3639147 - DNA, 25 bp, Homo sapien
cagctgtgatcgcagagtctgggtg

SEQ ID NO: 3639148 - DNA, 25 bp, Homo sapien
agctgtgatcgcagagtctgggtgc

SEQ ID NO: 3639149 - DNA, 25 bp, Homo sapien
tacaatgagcagtcttgttcatgca

SEQ ID NO: 3639150 - DNA, 25 bp, Homo sapien
catgcacctgttactctcacttcaa

SEQ ID NO: 3639151 - DNA, 25 bp, Homo sapien
ccttcattgcctgagtttaagcaaa

SEQ ID NO: 3639152 - DNA, 25 bp, Homo sapien
gaatcatgtggactgctcgctccct

SEQ ID NO: 3639153 - DNA, 25 bp, Homo sapien
tcaccctctcgaactcagtaaaaaa

SEQ ID NO: 3639154 - DNA, 25 bp, Homo sapien
tccatgcaaacaacatacaagatgc

SEQ ID NO: 3639155 - DNA, 25 bp, Homo sapien
agacaactgcaaaacccatttgggt

SEQ ID NO: 3639156 - DNA, 25 bp, Homo sapien
gacttcaaccgaacctccatgcaaa

SEQ ID NO: 3639157 - DNA, 25 bp, Homo sapien
tgagaacaagcagcgtacacgattc

SEQ ID NO: 3639158 - DNA, 25 bp, Homo sapien
aacccagaacagatgaaaccccaga

SEQ ID NO: 3639159 - DNA, 25 bp, Homo sapien
taggccatactgaagcaaggtgaca

SEQ ID NO: 3639160 - DNA, 25 bp, Homo sapien
agatctcccctaacagtgtcgtgca

SEQ ID NO: 3639161 - DNA, 25 bp, Homo sapien
tattattgctagaaatgggaacata

SEQ ID NO: 3639162 - DNA, 25 bp, Homo sapien
cctgtatgatgtatgagtggccaca

SEQ ID NO: 3639163 - DNA, 25 bp, Homo sapien
ctttattattgctagaaatgggaac

SEQ ID NO: 3639164 - DNA, 25 bp, Homo sapien
caattataaagtaggattgttcttt

SEQ ID NO: 3639165 - DNA, 25 bp, Homo sapien
gagaaaaatctatgagagagtggaa

SEQ ID NO: 3639166 - DNA, 25 bp, Homo sapien
tcaggcgtgatccaagaatttatta

SEQ ID NO: 3639167 - DNA, 25 bp, Homo sapien
gcacatgcatatcagagaagggaga

SEQ ID NO: 3639168 - DNA, 25 bp, Homo sapien
aaagtcaactagaaggcacatgcat

SEQ ID NO: 3639169 - DNA, 25 bp, Homo sapien
aaaacccaggcatattctctgaaag

SEQ ID NO: 3639170 - DNA, 25 bp, Homo sapien
acttgagttgcctgacatgtttgca

SEQ ID NO: 3639171 - DNA, 25 bp, Homo sapien
tgaacctacaaactcacttgggaga

SEQ ID NO: 3639172 - DNA, 25 bp, Homo sapien
tctgaaagaattatcatctgatgcc

SEQ ID NO: 3639173 - DNA, 25 bp, Homo sapien
gtacagagacaggtaagcgtttttg

SEQ ID NO: 3639174 - DNA, 25 bp, Homo sapien
caggtaagcgtttttgcaggaagcc

SEQ ID NO: 3639175 - DNA, 25 bp, Homo sapien
ttttgatcacgataagaaggaccat

SEQ ID NO: 3639176 - DNA, 25 bp, Homo sapien
agacagggttttgatcacgataaga

SEQ ID NO: 3639177 - DNA, 25 bp, Homo sapien
ttctctctgggtaaatactgctgtc

SEQ ID NO: 3639178 - DNA, 25 bp, Homo sapien
tctctgggtaaatactgctgtcacc

SEQ ID NO: 3639179 - DNA, 25 bp, Homo sapien
tgtcacctgctgtttgtgtgtgcgt

SEQ ID NO: 3639180 - DNA, 25 bp, Homo sapien
ctgggtaaatactgctgtcacctgc

SEQ ID NO: 3639181 - DNA, 25 bp, Homo sapien
gactgatacgttgctccggaaagtg

SEQ ID NO: 3639182 - DNA, 25 bp, Homo sapien
gggagatcactagaggcacagcccc

SEQ ID NO: 3639183 - DNA, 25 bp, Homo sapien
cactggaagctgtgccatccacatg

SEQ ID NO: 3639184 - DNA, 25 bp, Homo sapien
gggtgtcccatctctcttatccaca

SEQ ID NO: 3639185 - DNA, 25 bp, Homo sapien
tgcagaagaccgaggagccattggt

SEQ ID NO: 3639186 - DNA, 25 bp, Homo sapien
catagagtccaaggtgttctgtggc

SEQ ID NO: 3639187 - DNA, 25 bp, Homo sapien
ccattggtcagtgtaggaggtgcct

SEQ ID NO: 3639188 - DNA, 25 bp, Homo sapien
atcccagcagctcagcgtgcagaag

SEQ ID NO: 3639189 - DNA, 25 bp, Homo sapien
tacaagcaaacctgagccctttaaa

SEQ ID NO: 3639190 - DNA, 25 bp, Homo sapien
tcatcttttactacaagcaaacctg

SEQ ID NO: 3639191 - DNA, 25 bp, Homo sapien
tttactacaagcaaacctgagccct

SEQ ID NO: 3639192 - DNA, 25 bp, Homo sapien
tcttttactacaagcaaacctgagc

SEQ ID NO: 3639193 - DNA, 25 bp, Homo sapien
tttgattatggcactctcttgaaga

SEQ ID NO: 3639194 - DNA, 25 bp, Homo sapien
tagagcagagataccataagcttcc

SEQ ID NO: 3639195 - DNA, 25 bp, Homo sapien
taagggtagttttgtggcagcaata

SEQ ID NO: 3639196 - DNA, 25 bp, Homo sapien
cagtatcgacattcagtaagctccc

SEQ ID NO: 3639197 - DNA, 25 bp, Homo sapien
ccacttttgcgggtccctttgcata

SEQ ID NO: 3639198 - DNA, 25 bp, Homo sapien
cctgtctagtgggtattatttaaca

SEQ ID NO: 3639199 - DNA, 25 bp, Homo sapien
ctcaaagacctgtctagtgggtatt

SEQ ID NO: 3639200 - DNA, 25 bp, Homo sapien
ttgcatatggcagttccctgaatca

SEQ ID NO: 3639201 - DNA, 25 bp, Homo sapien
tgaaacttgtcaaattccctttatc

SEQ ID NO: 3639202 - DNA, 25 bp, Homo sapien
gacaagtcacccagttgaaacctta

SEQ ID NO: 3639203 - DNA, 25 bp, Homo sapien
gaaaccttatcattctcccttggaa

SEQ ID NO: 3639204 - DNA, 25 bp, Homo sapien
catgtgaagtgccacaaaaggcatc

SEQ ID NO: 3639205 - DNA, 25 bp, Homo sapien
tggtagctaccacgacgctaggcta

SEQ ID NO: 3639206 - DNA, 25 bp, Homo sapien
gcagattcaagaacatccctgccat

SEQ ID NO: 3639207 - DNA, 25 bp, Homo sapien
agattcaagaacatccctgccatcc

SEQ ID NO: 3639208 - DNA, 25 bp, Homo sapien
gcaatacttacacggtgacagcacc

SEQ ID NO: 3639209 - DNA, 25 bp, Homo sapien
cacaaagggaaataatctaaggtca

SEQ ID NO: 3639210 - DNA, 25 bp, Homo sapien
gcagaaggaccagaaagatgcaagg

SEQ ID NO: 3639211 - DNA, 25 bp, Homo sapien
tgtaacggttcacacctaccccatg

SEQ ID NO: 3639212 - DNA, 25 bp, Homo sapien
ttgaaagtctgtagcaggaaccctg

SEQ ID NO: 3639213 - DNA, 25 bp, Homo sapien
gaaagctgatgcttatgttgataac

SEQ ID NO: 3639214 - DNA, 25 bp, Homo sapien
gaaagtctgtagcaggaaccctgaa

SEQ ID NO: 3639215 - DNA, 25 bp, Homo sapien
gatgcttatgttgataaccacagtg

SEQ ID NO: 3639216 - DNA, 25 bp, Homo sapien
gacatcccaattgcagtgtaatgcc

SEQ ID NO: 3639217 - DNA, 25 bp, Homo sapien
taccaccaaagaatggtcgcctagg

SEQ ID NO: 3639218 - DNA, 25 bp, Homo sapien
gtactatccggctgtgacatcccaa

SEQ ID NO: 3639219 - DNA, 25 bp, Homo sapien
cagctgtaatgagcggatgcctgtt

SEQ ID NO: 3639220 - DNA, 25 bp, Homo sapien
cttttcctgccacaagggtgggttg

SEQ ID NO: 3639221 - DNA, 25 bp, Homo sapien
gcagcactgttaacagaaagctcac

SEQ ID NO: 3639222 - DNA, 25 bp, Homo sapien
acaagttgcttcaatgcctccacct

SEQ ID NO: 3639223 - DNA, 25 bp, Homo sapien
tgttcttgcagcactgttaacagaa

SEQ ID NO: 3639224 - DNA, 25 bp, Homo sapien
gcacattcagttcaattcctgaaga

SEQ ID NO: 3639225 - DNA, 25 bp, Homo sapien
cagtcagttgggagtttttgcctag

SEQ ID NO: 3639226 - DNA, 25 bp, Homo sapien
cagttcaattcctgaagaagaatgc

SEQ ID NO: 3639227 - DNA, 25 bp, Homo sapien
ctaggatggcagcacattcagttca

SEQ ID NO: 3639228 - DNA, 25 bp, Homo sapien
aagcacagtaagtagggcccgtggc

SEQ ID NO: 3639229 - DNA, 25 bp, Homo sapien
cacacttgagttccaaacatcagat

SEQ ID NO: 3639230 - DNA, 25 bp, Homo sapien
taactgtgctaatgatgtgggatac

SEQ ID NO: 3639231 - DNA, 25 bp, Homo sapien
cagtcattctatgtatggcaaaaca

SEQ ID NO: 3639232 - DNA, 25 bp, Homo sapien
ggtgctggatagcagtaaatcctaa

SEQ ID NO: 3639233 - DNA, 25 bp, Homo sapien
tggtgctggatagcagtaaatccta

SEQ ID NO: 3639234 - DNA, 25 bp, Homo sapien
tgggtggtgctggatagcagtaaat

SEQ ID NO: 3639235 - DNA, 25 bp, Homo sapien
ggtggtgctggatagcagtaaatcc

SEQ ID NO: 3639236 - DNA, 25 bp, Homo sapien
ctgcacgtggacactgcctggacat

SEQ ID NO: 3639237 - DNA, 25 bp, Homo sapien
gaggcaggactatgcaagatacaca

SEQ ID NO: 3639238 - DNA, 25 bp, Homo sapien
ctcaaatgtaaggtgtgtaaaccaa

SEQ ID NO: 3639239 - DNA, 25 bp, Homo sapien
tacacattctcagagtgctgcacgt

SEQ ID NO: 3639240 - DNA, 25 bp, Homo sapien
gcattggagtctccccagtcactag

SEQ ID NO: 3639241 - DNA, 25 bp, Homo sapien
acagctatccccgagctcttcagct

SEQ ID NO: 3639242 - DNA, 25 bp, Homo sapien
ttcagctccactgtaccacactcat

SEQ ID NO: 3639243 - DNA, 25 bp, Homo sapien
acagggcacacagctatccccgagc

SEQ ID NO: 3639244 - DNA, 25 bp, Homo sapien
tagggttagagtatggtaggaagcc

SEQ ID NO: 3639245 - DNA, 25 bp, Homo sapien
ctaaaatatccaagcaggactgtcc

SEQ ID NO: 3639246 - DNA, 25 bp, Homo sapien
ttagagtatggtaggaagcccagag

SEQ ID NO: 3639247 - DNA, 25 bp, Homo sapien
aagctaaaatatccaagcaggactg

SEQ ID NO: 3639248 - DNA, 25 bp, Homo sapien
ttctcgacatgaaacacctgctcag

SEQ ID NO: 3639249 - DNA, 25 bp, Homo sapien
gtgtgtcccaagcaccatctttatc

SEQ ID NO: 3639250 - DNA, 25 bp, Homo sapien
catttaatgccctatccccagatat

SEQ ID NO: 3639251 - DNA, 25 bp, Homo sapien
caagcaccatctttatcagctacaa

SEQ ID NO: 3639252 - DNA, 25 bp, Homo sapien
tcaaggatttctacaagaccaggat

SEQ ID NO: 3639253 - DNA, 25 bp, Homo sapien
gaagagtgtaattagacaagtcaga

SEQ ID NO: 3639254 - DNA, 25 bp, Homo sapien
ctaatttggaatgaagaggtgagtc

SEQ ID NO: 3639255 - DNA, 25 bp, Homo sapien
gaacaaacccaaatcctgtagataa

SEQ ID NO: 3639256 - DNA, 25 bp, Homo sapien
tgagctagccctggtttttaacacc

SEQ ID NO: 3639257 - DNA, 25 bp, Homo sapien
tgcaacttagggtattggcctacca

SEQ ID NO: 3639258 - DNA, 25 bp, Homo sapien
tggctaccaatcaaagacgtcaata

SEQ ID NO: 3639259 - DNA, 25 bp, Homo sapien
tcagagacctaagtactacatgggc

SEQ ID NO: 3639260 - DNA, 25 bp, Homo sapien
tcctctttccttgttcttgggcttc

SEQ ID NO: 3639261 - DNA, 25 bp, Homo sapien
tctttccttgttcttgggcttcctg

SEQ ID NO: 3639262 - DNA, 25 bp, Homo sapien
tttctctcctggaaaatggtggcca

SEQ ID NO: 3639263 - DNA, 25 bp, Homo sapien
gcttcctgtttcaatcactttctct

SEQ ID NO: 3639264 - DNA, 25 bp, Homo sapien
gtcagaatcaaacggcgccaggctt

SEQ ID NO: 3639265 - DNA, 25 bp, Homo sapien
tatagactctgggacttcagtgggc

SEQ ID NO: 3639266 - DNA, 25 bp, Homo sapien
taataacagatatatcggccaggcg

SEQ ID NO: 3639267 - DNA, 25 bp, Homo sapien
tgaaaaggccttggcacaatgccgg

SEQ ID NO: 3639268 - DNA, 25 bp, Homo sapien
gaaaggcagatctatcaaacttatg

SEQ ID NO: 3639269 - DNA, 25 bp, Homo sapien
aggcagatctatcaaacttatgata

SEQ ID NO: 3639270 - DNA, 25 bp, Homo sapien
agaaaggcagatctatcaaacttat

SEQ ID NO: 3639271 - DNA, 25 bp, Homo sapien
aaaggcagatctatcaaacttatga

SEQ ID NO: 3639272 - DNA, 25 bp, Homo sapien
cattctccaacatgcacctcagtat

SEQ ID NO: 3639273 - DNA, 25 bp, Homo sapien
cagtataacctggactcaaagcatt

SEQ ID NO: 3639274 - DNA, 25 bp, Homo sapien
tgcgctcagcttggatggaacaaca

SEQ ID NO: 3639275 - DNA, 25 bp, Homo sapien
tagaacagcctcaaacagacgtggg

SEQ ID NO: 3639276 - DNA, 25 bp, Homo sapien
tgagtcatagatgcatagcatagag

SEQ ID NO: 3639277 - DNA, 25 bp, Homo sapien
tattttaactctgtgcgcaccagaa

SEQ ID NO: 3639278 - DNA, 25 bp, Homo sapien
aaatcagagcgtcattcacctggag

SEQ ID NO: 3639279 - DNA, 25 bp, Homo sapien
catagcatagagatcgaggatttgg

SEQ ID NO: 3639280 - DNA, 25 bp, Homo sapien
agagtgacaaggtcaagacccttag

SEQ ID NO: 3639281 - DNA, 25 bp, Homo sapien
gcattcacagttggattcatctgct

SEQ ID NO: 3639282 - DNA, 25 bp, Homo sapien
actgcattcacagttggattcatct

SEQ ID NO: 3639283 - DNA, 25 bp, Homo sapien
tgcattcacagttggattcatctgc

SEQ ID NO: 3639284 - DNA, 25 bp, Homo sapien
gcttctatactgatagtctcaacaa

SEQ ID NO: 3639285 - DNA, 25 bp, Homo sapien
aacatcaatgccacagtcgctgctc

SEQ ID NO: 3639286 - DNA, 25 bp, Homo sapien
tcaaatgctgaatagtagagcaagg

SEQ ID NO: 3639287 - DNA, 25 bp, Homo sapien
ttcactaagtagaaataatcctctc

SEQ ID NO: 3639288 - DNA, 25 bp, Homo sapien
tcatttctcatagtaacagcggatt

SEQ ID NO: 3639289 - DNA, 25 bp, Homo sapien
taacagcggatttgggacagcgcat

SEQ ID NO: 3639290 - DNA, 25 bp, Homo sapien
agtaacagcggatttgggacagcgc

SEQ ID NO: 3639291 - DNA, 25 bp, Homo sapien
ctcttcatttctcatagtaacagcg

SEQ ID NO: 3639292 - DNA, 25 bp, Homo sapien
tgtgccggcctcagatataaagctt

SEQ ID NO: 3639293 - DNA, 25 bp, Homo sapien
ccttcctggtatgtgagagaacccc

SEQ ID NO: 3639294 - DNA, 25 bp, Homo sapien
catgaaagaggtctccaaacgggta

SEQ ID NO: 3639295 - DNA, 25 bp, Homo sapien
caaatagaattcacggcagtcctcc

SEQ ID NO: 3639296 - DNA, 25 bp, Homo sapien
caaagagctcgtggtcactaggatc

SEQ ID NO: 3639297 - DNA, 25 bp, Homo sapien
tctctcaaatgggagccagacagtg

SEQ ID NO: 3639298 - DNA, 25 bp, Homo sapien
tgcaggcgtaacattcggtcccgga

SEQ ID NO: 3639299 - DNA, 25 bp, Homo sapien
cactgtgatttgcacacggcaggca

SEQ ID NO: 3639300 - DNA, 25 bp, Homo sapien
ggtctgcagcttccaatccaaggga

SEQ ID NO: 3639301 - DNA, 25 bp, Homo sapien
ccaagggaatgaaatgttagcactg

SEQ ID NO: 3639302 - DNA, 25 bp, Homo sapien
ttctcactcgcaaaggagggacccc

SEQ ID NO: 3639303 - DNA, 25 bp, Homo sapien
tagcactgtggatctctcacaccca

SEQ ID NO: 3639304 - DNA, 25 bp, Homo sapien
aagaggccttcaagctgaagacagt

SEQ ID NO: 3639305 - DNA, 25 bp, Homo sapien
ttcagggaatagtaagtagtcacca

SEQ ID NO: 3639306 - DNA, 25 bp, Homo sapien
tttcatagagccagaatacatcatg

SEQ ID NO: 3639307 - DNA, 25 bp, Homo sapien
atgaatttatctcccttgtgaagag

SEQ ID NO: 3639308 - DNA, 25 bp, Homo sapien
accaggatgcaaaacatctttcccc

SEQ ID NO: 3639309 - DNA, 25 bp, Homo sapien
tttggagcaagcaatacaggccctg

SEQ ID NO: 3639310 - DNA, 25 bp, Homo sapien
caaaaaaacacgtccagcgtgctca

SEQ ID NO: 3639311 - DNA, 25 bp, Homo sapien
tctggctcgtcatgacaaaccagga

SEQ ID NO: 3639312 - DNA, 25 bp, Homo sapien
ttttggcagttggagttatttggca

SEQ ID NO: 3639313 - DNA, 25 bp, Homo sapien
gaacgctcgggttcaatgaagctat

SEQ ID NO: 3639314 - DNA, 25 bp, Homo sapien
tatagtcaaggatcttatcgacagc

SEQ ID NO: 3639315 - DNA, 25 bp, Homo sapien
gatatgaaccggttggtgacaccac

SEQ ID NO: 3639316 - DNA, 25 bp, Homo sapien
cctcaaatcccttgaggcaatagtg

SEQ ID NO: 3639317 - DNA, 25 bp, Homo sapien
gaggcaatagtggattcaaagcagc

SEQ ID NO: 3639318 - DNA, 25 bp, Homo sapien
tcaaatcccttgaggcaatagtgga

SEQ ID NO: 3639319 - DNA, 25 bp, Homo sapien
tcccttgaggcaatagtggattcaa

SEQ ID NO: 3639320 - DNA, 25 bp, Homo sapien
agaagtcatgttcgcgggcgcacgc

SEQ ID NO: 3639321 - DNA, 25 bp, Homo sapien
ggcggctctgcgcgcgtccgagcgg

SEQ ID NO: 3639322 - DNA, 25 bp, Homo sapien
ggcggcgcgagacgggcagggacag

SEQ ID NO: 3639323 - DNA, 25 bp, Homo sapien
gggcagggacaggtgcgcgcggcct

SEQ ID NO: 3639324 - DNA, 25 bp, Homo sapien
gaacgagcaggcggccctcgaccat

SEQ ID NO: 3639325 - DNA, 25 bp, Homo sapien
ctgtcaggaacgagcaggcggccct

SEQ ID NO: 3639326 - DNA, 25 bp, Homo sapien
tcaggaacgagcaggcggccctcga

SEQ ID NO: 3639327 - DNA, 25 bp, Homo sapien
attctgtcaggaacgagcaggcggc

SEQ ID NO: 3639328 - DNA, 25 bp, Homo sapien
tgcaataaagtacacctggctagtt

SEQ ID NO: 3639329 - DNA, 25 bp, Homo sapien
ctggctagtttcacgctttataatt

SEQ ID NO: 3639330 - DNA, 25 bp, Homo sapien
ctagtttcacgctttataattatcc

SEQ ID NO: 3639331 - DNA, 25 bp, Homo sapien
cacctggctagtttcacgctttata

SEQ ID NO: 3639332 - DNA, 25 bp, Homo sapien
caagagctgggtcatattgggcgct

SEQ ID NO: 3639333 - DNA, 25 bp, Homo sapien
taactctttgtgatggcctaatccg

SEQ ID NO: 3639334 - DNA, 25 bp, Homo sapien
tgtgaccctcccgtgaagaaacaaa

SEQ ID NO: 3639335 - DNA, 25 bp, Homo sapien
tttgcatgccaaacgtaacctgtct

SEQ ID NO: 3639336 - DNA, 25 bp, Homo sapien
cacataggtttttcccaggaatgtg

SEQ ID NO: 3639337 - DNA, 25 bp, Homo sapien
ggaatgtgcagctccatttctctta

SEQ ID NO: 3639338 - DNA, 25 bp, Homo sapien
cccacataggtttttcccaggaatg

SEQ ID NO: 3639339 - DNA, 25 bp, Homo sapien
caggaatgtgcagctccatttctct

SEQ ID NO: 3639340 - DNA, 25 bp, Homo sapien
gatggaacaattacacggtgatgat

SEQ ID NO: 3639341 - DNA, 25 bp, Homo sapien
ggaggaggagatggtttccatccct

SEQ ID NO: 3639342 - DNA, 25 bp, Homo sapien
ctggattcagagcatgaggatattg

SEQ ID NO: 3639343 - DNA, 25 bp, Homo sapien
tggattcagagcatgaggatattgg

SEQ ID NO: 3639344 - DNA, 25 bp, Homo sapien
cagactaataaagccgacctgatag

SEQ ID NO: 3639345 - DNA, 25 bp, Homo sapien
tcataaaactccaggttggcacggc

SEQ ID NO: 3639346 - DNA, 25 bp, Homo sapien
aatacgctcacaaggcatttcagcc

SEQ ID NO: 3639347 - DNA, 25 bp, Homo sapien
ggcacggccaatgcgtaaatctcaa

SEQ ID NO: 3639348 - DNA, 25 bp, Homo sapien
gctgctgatctggaggacgcacaga

SEQ ID NO: 3639349 - DNA, 25 bp, Homo sapien
gaggaatcctggcaaactggtcaac

SEQ ID NO: 3639350 - DNA, 25 bp, Homo sapien
tcaactacctaggtgactcctgggc

SEQ ID NO: 3639351 - DNA, 25 bp, Homo sapien
tacctttaaagcactagaggaatcc

SEQ ID NO: 3639352 - DNA, 25 bp, Homo sapien
cattgtccctgagtagtgagtcacc

SEQ ID NO: 3639353 - DNA, 25 bp, Homo sapien
gagggtcaactttcctgctactagg

SEQ ID NO: 3639354 - DNA, 25 bp, Homo sapien
taaatgtcagacaaatcagctgtgg

SEQ ID NO: 3639355 - DNA, 25 bp, Homo sapien
gagcactgcatacagtctcactgag

SEQ ID NO: 3639356 - DNA, 25 bp, Homo sapien
gactttccagatatacagtcacata

SEQ ID NO: 3639357 - DNA, 25 bp, Homo sapien
agatgactttccagatatacagtca

SEQ ID NO: 3639358 - DNA, 25 bp, Homo sapien
ctttccagatatacagtcacataca

SEQ ID NO: 3639359 - DNA, 25 bp, Homo sapien
gatgactttccagatatacagtcac

SEQ ID NO: 3639360 - DNA, 25 bp, Homo sapien
gagttgaaatacagtcctgagactt

SEQ ID NO: 3639361 - DNA, 25 bp, Homo sapien
ttttctagcagtatcactaatttgc

SEQ ID NO: 3639362 - DNA, 25 bp, Homo sapien
aatttgcagtacatctttggtcaca

SEQ ID NO: 3639363 - DNA, 25 bp, Homo sapien
tacaatggtaataatccaaaaacac

SEQ ID NO: 3639364 - DNA, 25 bp, Homo sapien
cggaggaccgtatgtgtctgcataa

SEQ ID NO: 3639365 - DNA, 25 bp, Homo sapien
taacaagaaaacatccgtggaggcc

SEQ ID NO: 3639366 - DNA, 25 bp, Homo sapien
aaggacccctttcaacagcaacagg

SEQ ID NO: 3639367 - DNA, 25 bp, Homo sapien
gctggactcccattagacaataaaa

SEQ ID NO: 3639368 - DNA, 25 bp, Homo sapien
ccatcaaaatcgtgtccttggccag

SEQ ID NO: 3639369 - DNA, 25 bp, Homo sapien
taccatcaaaatcgtgtccttggcc

SEQ ID NO: 3639370 - DNA, 25 bp, Homo sapien
catcaaaatcgtgtccttggccagg

SEQ ID NO: 3639371 - DNA, 25 bp, Homo sapien
tcataccatcaaaatcgtgtccttg

SEQ ID NO: 3639372 - DNA, 25 bp, Homo sapien
catcctcaggctttggaaatgagaa

SEQ ID NO: 3639373 - DNA, 25 bp, Homo sapien
cagaggtacattttcgagttttcag

SEQ ID NO: 3639374 - DNA, 25 bp, Homo sapien
gcacagaacaagtagaagattgctg

SEQ ID NO: 3639375 - DNA, 25 bp, Homo sapien
gattgctgggtcatagctaagaacc

SEQ ID NO: 3639376 - DNA, 25 bp, Homo sapien
aagagacttgcaggcaacctcaggc

SEQ ID NO: 3639377 - DNA, 25 bp, Homo sapien
tatgcccacctatccagaaactcaa

SEQ ID NO: 3639378 - DNA, 25 bp, Homo sapien
agataatgtttgcatcagtagcaag

SEQ ID NO: 3639379 - DNA, 25 bp, Homo sapien
aaatgtaattatagataatgtttgc

SEQ ID NO: 3639380 - DNA, 25 bp, Homo sapien
gagagccatggtattgggccttaca

SEQ ID NO: 3639381 - DNA, 25 bp, Homo sapien
tgtcccagggatgcaatcgcacctg

SEQ ID NO: 3639382 - DNA, 25 bp, Homo sapien
tatacgatcatcattggaaacccag

SEQ ID NO: 3639383 - DNA, 25 bp, Homo sapien
tagtatcacgtagttgagagccatg

SEQ ID NO: 3639384 - DNA, 25 bp, Homo sapien
gcagccactttagacaaacaggttg

SEQ ID NO: 3639385 - DNA, 25 bp, Homo sapien
aactgatcgtgatcctgggatgggc

SEQ ID NO: 3639386 - DNA, 25 bp, Homo sapien
aagttggaacctcatacgctgctgg

SEQ ID NO: 3639387 - DNA, 25 bp, Homo sapien
gagacatgagttctaccagccctgg

SEQ ID NO: 3639388 - DNA, 25 bp, Homo sapien
cttgattcaggacacggaagtctgc

SEQ ID NO: 3639389 - DNA, 25 bp, Homo sapien
tccagatgggaaacatgtgtactcg

SEQ ID NO: 3639390 - DNA, 25 bp, Homo sapien
gaagtctgcgatgcaaccatgtagg

SEQ ID NO: 3639391 - DNA, 25 bp, Homo sapien
ctttctaggtatgcgaggaagccac

SEQ ID NO: 3639392 - DNA, 25 bp, Homo sapien
gatggcatactaacaagtgcagcta

SEQ ID NO: 3639393 - DNA, 25 bp, Homo sapien
gaagatcagaggtcccggttcacat

SEQ ID NO: 3639394 - DNA, 25 bp, Homo sapien
tccaatgatgttgtgctccctgtca

SEQ ID NO: 3639395 - DNA, 25 bp, Homo sapien
taaaatgattagacgcaaacagggc

SEQ ID NO: 3639396 - DNA, 25 bp, Homo sapien
tcgtttgagtcttccgctgcttgca

SEQ ID NO: 3639397 - DNA, 25 bp, Homo sapien
tgatagcacgttgcccatgttagaa

SEQ ID NO: 3639398 - DNA, 25 bp, Homo sapien
tctttgctatctccaccatacaggg

SEQ ID NO: 3639399 - DNA, 25 bp, Homo sapien
ggtcctgcctcgatgctgatggcta

SEQ ID NO: 3639400 - DNA, 25 bp, Homo sapien
cgaattgtcaaagcttaagggatag

SEQ ID NO: 3639401 - DNA, 25 bp, Homo sapien
tcccggcgtgtttcaatccctgctg

SEQ ID NO: 3639402 - DNA, 25 bp, Homo sapien
cagctggagggcttaagtgccacca

SEQ ID NO: 3639403 - DNA, 25 bp, Homo sapien
gactattgctaaacatcccggcgtg

SEQ ID NO: 3639404 - DNA, 25 bp, Homo sapien
taatgataaccctcggcactgtgtg

SEQ ID NO: 3639405 - DNA, 25 bp, Homo sapien
tgcaaaacggcaaaggacttgggaa

SEQ ID NO: 3639406 - DNA, 25 bp, Homo sapien
cttgtctcagagttaacggtttgca

SEQ ID NO: 3639407 - DNA, 25 bp, Homo sapien
taccaccacggagacattcacttgt

SEQ ID NO: 3639408 - DNA, 25 bp, Homo sapien
tgggcagaccttagaaaatgagacc

SEQ ID NO: 3639409 - DNA, 25 bp, Homo sapien
tctctccagggaacgaaaactaggc

SEQ ID NO: 3639410 - DNA, 25 bp, Homo sapien
taaagaatatcaaggaagcccagct

SEQ ID NO: 3639411 - DNA, 25 bp, Homo sapien
ctaccatggatgaagcaagcaggcc

SEQ ID NO: 3639412 - DNA, 25 bp, Homo sapien
tggtgacccaggattcaaatggtgg

SEQ ID NO: 3639413 - DNA, 25 bp, Homo sapien
caaatggtggtgcagtctgttttat

SEQ ID NO: 3639414 - DNA, 25 bp, Homo sapien
tcccaataactggatcccatcttgg

SEQ ID NO: 3639415 - DNA, 25 bp, Homo sapien
attcccaatatgtaactttaggcag

SEQ ID NO: 3639416 - DNA, 25 bp, Homo sapien
gaaggtctggattcatccagggcag

SEQ ID NO: 3639417 - DNA, 25 bp, Homo sapien
gatcccgtgtattagaacaccatga

SEQ ID NO: 3639418 - DNA, 25 bp, Homo sapien
tactgtcgctttcctcagtttacag

SEQ ID NO: 3639419 - DNA, 25 bp, Homo sapien
catgaaagaagagtccaggagattg

SEQ ID NO: 3639420 - DNA, 25 bp, Homo sapien
tataagggtcttccagatggcactg

SEQ ID NO: 3639421 - DNA, 25 bp, Homo sapien
ggaatgttggcgtctaatccccact

SEQ ID NO: 3639422 - DNA, 25 bp, Homo sapien
tgtccaaagtcaagacacaggccag

SEQ ID NO: 3639423 - DNA, 25 bp, Homo sapien
tacggttgttattgctgcgaatgcc

SEQ ID NO: 3639424 - DNA, 25 bp, Homo sapien
tgggcacctgggttgactccgtgtc

SEQ ID NO: 3639425 - DNA, 25 bp, Homo sapien
catatgagggcatgtatatttttgg

SEQ ID NO: 3639426 - DNA, 25 bp, Homo sapien
tgatgaacatatgagggcatgtata

SEQ ID NO: 3639427 - DNA, 25 bp, Homo sapien
tttatccaacctggcactgatgggc

SEQ ID NO: 3639428 - DNA, 25 bp, Homo sapien
gataaagtggtgtccgccaacaacc

SEQ ID NO: 3639429 - DNA, 25 bp, Homo sapien
ccaaggcctgagatcaaggataaag

SEQ ID NO: 3639430 - DNA, 25 bp, Homo sapien
tctcccctacagtgcctggaataag

SEQ ID NO: 3639431 - DNA, 25 bp, Homo sapien
gggtctcagctatgaaccttgcaat

SEQ ID NO: 3639432 - DNA, 25 bp, Homo sapien
gaatggcttccagtaccatgtggac

SEQ ID NO: 3639433 - DNA, 25 bp, Homo sapien
taagtggctactaattgtccatgac

SEQ ID NO: 3639434 - DNA, 25 bp, Homo sapien
gagaactcatatcgactgttgtgtg

SEQ ID NO: 3639435 - DNA, 25 bp, Homo sapien
ccatgtggacattgaatctccgaga

SEQ ID NO: 3639436 - DNA, 25 bp, Homo sapien
gaagcttctgtcagacctcgtcaga

SEQ ID NO: 3639437 - DNA, 25 bp, Homo sapien
tagctccgtgcaacagacttgagag

SEQ ID NO: 3639438 - DNA, 25 bp, Homo sapien
catcatcctggtagatagaggacaa

SEQ ID NO: 3639439 - DNA, 25 bp, Homo sapien
cctcgtcagattaaggtcaagtata

SEQ ID NO: 3639440 - DNA, 25 bp, Homo sapien
gcaaagacctcgtaaagagccaacg

SEQ ID NO: 3639441 - DNA, 25 bp, Homo sapien
tacctgattatgagtagcaccgact

SEQ ID NO: 3639442 - DNA, 25 bp, Homo sapien
ttactgaagagcagaacagcccatg

SEQ ID NO: 3639443 - DNA, 25 bp, Homo sapien
aatcgggaattctatgctcatgagc

SEQ ID NO: 3639444 - DNA, 25 bp, Homo sapien
gacacagaaggtgacatggtggcac

SEQ ID NO: 3639445 - DNA, 25 bp, Homo sapien
ggtgaagactcatcagtcctgatct

SEQ ID NO: 3639446 - DNA, 25 bp, Homo sapien
catgtagctggtcaactggatggcg

SEQ ID NO: 3639447 - DNA, 25 bp, Homo sapien
taagcaggccattctgtctgagcat

SEQ ID NO: 3639448 - DNA, 25 bp, Homo sapien
gaagctggaggagaaattaagcact

SEQ ID NO: 3639449 - DNA, 25 bp, Homo sapien
agctggaggagaaattaagcactcc

SEQ ID NO: 3639450 - DNA, 25 bp, Homo sapien
tggggaagctggaggagaaattaag

SEQ ID NO: 3639451 - DNA, 25 bp, Homo sapien
gggaagctggaggagaaattaagca

SEQ ID NO: 3639452 - DNA, 25 bp, Homo sapien
tagtaatctatgaaatcaagggccc

SEQ ID NO: 3639453 - DNA, 25 bp, Homo sapien
tgctgccgtaagtctcactatggtc

SEQ ID NO: 3639454 - DNA, 25 bp, Homo sapien
gcgctaactgtagtgctgccgtaag

SEQ ID NO: 3639455 - DNA, 25 bp, Homo sapien
aaagtatttgtaagagcctcagcgc

SEQ ID NO: 3639456 - DNA, 25 bp, Homo sapien
tgtggagcgttccagattctttaag

SEQ ID NO: 3639457 - DNA, 25 bp, Homo sapien
tgggtgtggagcgttccagattctt

SEQ ID NO: 3639458 - DNA, 25 bp, Homo sapien
agatgaactcataatctgccatcat

SEQ ID NO: 3639459 - DNA, 25 bp, Homo sapien
ggtgtggagcgttccagattcttta

SEQ ID NO: 3639460 - DNA, 25 bp, Homo sapien
actataaaccgtactcccagatcct

SEQ ID NO: 3639461 - DNA, 25 bp, Homo sapien
atcctgcagctgcatgactagccct

SEQ ID NO: 3639462 - DNA, 25 bp, Homo sapien
agcccttcggagagatgctctcctg

SEQ ID NO: 3639463 - DNA, 25 bp, Homo sapien
tataaaccgtactcccagatcctgc

SEQ ID NO: 3639464 - DNA, 25 bp, Homo sapien
tcatcttagaaggactttactggat

SEQ ID NO: 3639465 - DNA, 25 bp, Homo sapien
tagagaagtaatggccactgcgcag

SEQ ID NO: 3639466 - DNA, 25 bp, Homo sapien
gactttactggattgtgctctgtta

SEQ ID NO: 3639467 - DNA, 25 bp, Homo sapien
gctcatcactagagaagtaatggcc

SEQ ID NO: 3639468 - DNA, 25 bp, Homo sapien
ttcctgtatgacactcttaaggcca

SEQ ID NO: 3639469 - DNA, 25 bp, Homo sapien
tgtatgacactcttaaggccactgt

SEQ ID NO: 3639470 - DNA, 25 bp, Homo sapien
tatgacactcttaaggccactgtca

SEQ ID NO: 3639471 - DNA, 25 bp, Homo sapien
cctgtatgacactcttaaggccact

SEQ ID NO: 3639472 - DNA, 25 bp, Homo sapien
tgcttcttgctccagcgtattctcc

SEQ ID NO: 3639473 - DNA, 25 bp, Homo sapien
agtcccaggagtcctcgtgcttctt

SEQ ID NO: 3639474 - DNA, 25 bp, Homo sapien
ctttcctcgagtgactgagtacaca

SEQ ID NO: 3639475 - DNA, 25 bp, Homo sapien
cctcgtgcttcttgctccagcgtat

SEQ ID NO: 3639476 - DNA, 25 bp, Homo sapien
cattgggcggaagtcctacagaaac

SEQ ID NO: 3639477 - DNA, 25 bp, Homo sapien
ggcggaagtcctacagaaacatcac

SEQ ID NO: 3639478 - DNA, 25 bp, Homo sapien
gggcggaagtcctacagaaacatca

SEQ ID NO: 3639479 - DNA, 25 bp, Homo sapien
ggaagtcctacagaaacatcacggc

SEQ ID NO: 3639480 - DNA, 25 bp, Homo sapien
tcttttgccggtggagtgattttgc

SEQ ID NO: 3639481 - DNA, 25 bp, Homo sapien
gattttgctgctgtcagactgcatt

SEQ ID NO: 3639482 - DNA, 25 bp, Homo sapien
catttaagtcttttgccggtggagt

SEQ ID NO: 3639483 - DNA, 25 bp, Homo sapien
tgcattatggatattaggtcttgaa

SEQ ID NO: 3639484 - DNA, 25 bp, Homo sapien
tgagggccatgcgaagatctaagat

SEQ ID NO: 3639485 - DNA, 25 bp, Homo sapien
agggccatgcgaagatctaagattt

SEQ ID NO: 3639486 - DNA, 25 bp, Homo sapien
aacactggtatttgagggccatgcg

SEQ ID NO: 3639487 - DNA, 25 bp, Homo sapien
ttttaaacagcattgatgctagaca

SEQ ID NO: 3639488 - DNA, 25 bp, Homo sapien
cggtgtgtaaacacagaatgaataa

SEQ ID NO: 3639489 - DNA, 25 bp, Homo sapien
taaacacagaatgaataaaataagt

SEQ ID NO: 3639490 - DNA, 25 bp, Homo sapien
ctgtcggtgtgtaaacacagaatga

SEQ ID NO: 3639491 - DNA, 25 bp, Homo sapien
gtcggtgtgtaaacacagaatgaat

SEQ ID NO: 3639492 - DNA, 25 bp, Homo sapien
gataaattctttgcgagtttgcacc

SEQ ID NO: 3639493 - DNA, 25 bp, Homo sapien
tactgttcgatgataaattctttgc

SEQ ID NO: 3639494 - DNA, 25 bp, Homo sapien
gtttgcaccatagcacccagcagag

SEQ ID NO: 3639495 - DNA, 25 bp, Homo sapien
gagtatcccgatcctgtgtgtgtca

SEQ ID NO: 3639496 - DNA, 25 bp, Homo sapien
attcattccacgcaccactactgag

SEQ ID NO: 3639497 - DNA, 25 bp, Homo sapien
aggtgtgtatttctcggatcctgtg

SEQ ID NO: 3639498 - DNA, 25 bp, Homo sapien
caggtgtgtatttctcggatcctgt

SEQ ID NO: 3639499 - DNA, 25 bp, Homo sapien
cacgcaccactactgagttcttttt

SEQ ID NO: 3639500 - DNA, 25 bp, Homo sapien
gctgcaaatgtcttccgaaggcaat

SEQ ID NO: 3639501 - DNA, 25 bp, Homo sapien
cacgcattagcgagagtaagttgta

SEQ ID NO: 3639502 - DNA, 25 bp, Homo sapien
aatgtccatattaaccaaccagagg

SEQ ID NO: 3639503 - DNA, 25 bp, Homo sapien
gaaatgcggcattttcactagataa

SEQ ID NO: 3639504 - DNA, 25 bp, Homo sapien
cattatgagcaagagggacggtttt

SEQ ID NO: 3639505 - DNA, 25 bp, Homo sapien
catgggagagccaagttaaataagc

SEQ ID NO: 3639506 - DNA, 25 bp, Homo sapien
taaacattctgcaccgagcactgtg

SEQ ID NO: 3639507 - DNA, 25 bp, Homo sapien
catacagtctgttgcgtagaagcat

SEQ ID NO: 3639508 - DNA, 25 bp, Homo sapien
cagaacgctacagtagtgcaaccaa

SEQ ID NO: 3639509 - DNA, 25 bp, Homo sapien
cacccagaacgctacagtagtgcaa

SEQ ID NO: 3639510 - DNA, 25 bp, Homo sapien
gcacccagaacgctacagtagtgca

SEQ ID NO: 3639511 - DNA, 25 bp, Homo sapien
cccagaacgctacagtagtgcaacc

SEQ ID NO: 3639512 - DNA, 25 bp, Homo sapien
attcctatagtcaccttcactgtgt

SEQ ID NO: 3639513 - DNA, 25 bp, Homo sapien
tagtcaccttcactgtgtatcctgg

SEQ ID NO: 3639514 - DNA, 25 bp, Homo sapien
tgtatcctggcacactcaagcagag

SEQ ID NO: 3639515 - DNA, 25 bp, Homo sapien
gaaaataccaagtagcagtttctct

SEQ ID NO: 3639516 - DNA, 25 bp, Homo sapien
catttgacttgtccagacactggtt

SEQ ID NO: 3639517 - DNA, 25 bp, Homo sapien
gtaccactactgctggcaccacaat

SEQ ID NO: 3639518 - DNA, 25 bp, Homo sapien
tactgctggcaccacaatttctcac

SEQ ID NO: 3639519 - DNA, 25 bp, Homo sapien
aatgcgacccatttgacttgtccag

SEQ ID NO: 3639520 - DNA, 25 bp, Homo sapien
agagaaacctctttgctgccactgt

SEQ ID NO: 3639521 - DNA, 25 bp, Homo sapien
agcctcgggtttacttagtacactg

SEQ ID NO: 3639522 - DNA, 25 bp, Homo sapien
cctcgggtttacttagtacactgct

SEQ ID NO: 3639523 - DNA, 25 bp, Homo sapien
ctggccacggggctcatatttactt

SEQ ID NO: 3639524 - DNA, 25 bp, Homo sapien
tagaaaagattcgttcctgaggaat

SEQ ID NO: 3639525 - DNA, 25 bp, Homo sapien
tggtcatggaaacagactacaaaca

SEQ ID NO: 3639526 - DNA, 25 bp, Homo sapien
taagccaaaaagtcacctgtaatca

SEQ ID NO: 3639527 - DNA, 25 bp, Homo sapien
cctggactttttatgatctcacaac

SEQ ID NO: 3639528 - DNA, 25 bp, Homo sapien
cacacaaagcatctaactgtagttc

SEQ ID NO: 3639529 - DNA, 25 bp, Homo sapien
tacagcaaggctcatggccacacat

SEQ ID NO: 3639530 - DNA, 25 bp, Homo sapien
catctccaggaataaggtgatggta

SEQ ID NO: 3639531 - DNA, 25 bp, Homo sapien
gatggtagagtccagagttcaaaac

SEQ ID NO: 3639532 - DNA, 25 bp, Homo sapien
gggtcccctgtgtatacggtactga

SEQ ID NO: 3639533 - DNA, 25 bp, Homo sapien
gctggggtgctggataactctaatg

SEQ ID NO: 3639534 - DNA, 25 bp, Homo sapien
cacctccctcgatgctggggtgctg

SEQ ID NO: 3639535 - DNA, 25 bp, Homo sapien
gctggataactctaatgggattgcc

SEQ ID NO: 3639536 - DNA, 25 bp, Homo sapien
ctggattgatggagcccaccacctc

SEQ ID NO: 3639537 - DNA, 25 bp, Homo sapien
aatcagcgccacagccaagctcatg

SEQ ID NO: 3639538 - DNA, 25 bp, Homo sapien
agcgccacagccaagctcatggtac

SEQ ID NO: 3639539 - DNA, 25 bp, Homo sapien
cagcgccacagccaagctcatggta

SEQ ID NO: 3639540 - DNA, 25 bp, Homo sapien
atcagcgccacagccaagctcatgg

SEQ ID NO: 3639541 - DNA, 25 bp, Homo sapien
tgaggctttagctgacattcagaaa

SEQ ID NO: 3639542 - DNA, 25 bp, Homo sapien
gaagagctccacttgctaagtctga

SEQ ID NO: 3639543 - DNA, 25 bp, Homo sapien
ttcagaaatacatgacttcacttgg

SEQ ID NO: 3639544 - DNA, 25 bp, Homo sapien
gccaacggctctaaatgaggcttta

SEQ ID NO: 3639545 - DNA, 25 bp, Homo sapien
gaaggaactatcaacaaatgtaact

SEQ ID NO: 3639546 - DNA, 25 bp, Homo sapien
catgctgtcaatctcggtggatgcc

SEQ ID NO: 3639547 - DNA, 25 bp, Homo sapien
aatgtaactgggctttgcatgctgt

SEQ ID NO: 3639548 - DNA, 25 bp, Homo sapien
tgcaatttgggtttccatggagaca

SEQ ID NO: 3639549 - DNA, 25 bp, Homo sapien
gatctctcatgttggttttccacag

SEQ ID NO: 3639550 - DNA, 25 bp, Homo sapien
cactcctccaagatctctcatgttg

SEQ ID NO: 3639551 - DNA, 25 bp, Homo sapien
tttccacagcctgatcacctgcatt

SEQ ID NO: 3639552 - DNA, 25 bp, Homo sapien
caacccactcctccaagatctctca

SEQ ID NO: 3639553 - DNA, 25 bp, Homo sapien
tgggaatcctgtggagaggtcaccc

SEQ ID NO: 3639554 - DNA, 25 bp, Homo sapien
ggagaggtcacccattctcaagtat

SEQ ID NO: 3639555 - DNA, 25 bp, Homo sapien
agtatttgaaaataactgccctcat

SEQ ID NO: 3639556 - DNA, 25 bp, Homo sapien
tgttccgcaaaggaccttccatttc

SEQ ID NO: 3639557 - DNA, 25 bp, Homo sapien
ggcaatggcattgaaacgaaacaaa

SEQ ID NO: 3639558 - DNA, 25 bp, Homo sapien
gctcctctacaaccatgcatgtgtg

SEQ ID NO: 3639559 - DNA, 25 bp, Homo sapien
tcatgtgcatgggtgactttgcaca

SEQ ID NO: 3639560 - DNA, 25 bp, Homo sapien
gaggcacggaagtaccagcaaagac

SEQ ID NO: 3639561 - DNA, 25 bp, Homo sapien
atttggagacatctagggggtacct

SEQ ID NO: 3639562 - DNA, 25 bp, Homo sapien
atggctgaacagacaataaccctcc

SEQ ID NO: 3639563 - DNA, 25 bp, Homo sapien
caatgtgactgctagtaaaaggcac

SEQ ID NO: 3639564 - DNA, 25 bp, Homo sapien
tcaatgtgactgctagtaaaaggca

SEQ ID NO: 3639565 - DNA, 25 bp, Homo sapien
tattgctgaactgtgttcggttggg

SEQ ID NO: 3639566 - DNA, 25 bp, Homo sapien
gtctcaaatgcttgccagggtaaaa

SEQ ID NO: 3639567 - DNA, 25 bp, Homo sapien
cggttgggggtctcaaatgcttgcc

SEQ ID NO: 3639568 - DNA, 25 bp, Homo sapien
gcatccaaaattcgtagagaactat

SEQ ID NO: 3639569 - DNA, 25 bp, Homo sapien
cacataaattatggaatgaggcccc

SEQ ID NO: 3639570 - DNA, 25 bp, Homo sapien
gaaaaacgcgtctgtcttccatgac

SEQ ID NO: 3639571 - DNA, 25 bp, Homo sapien
tcttaactgtagtggcatccagggc

SEQ ID NO: 3639572 - DNA, 25 bp, Homo sapien
ctttcggcagggcagagtttgccac

SEQ ID NO: 3639573 - DNA, 25 bp, Homo sapien
tatttgcacagtccaatatggtggc

SEQ ID NO: 3639574 - DNA, 25 bp, Homo sapien
taatgatgtgaccactctgcgcctc

SEQ ID NO: 3639575 - DNA, 25 bp, Homo sapien
gaggccctcaacagcaggtcagtga

SEQ ID NO: 3639576 - DNA, 25 bp, Homo sapien
tcctatggctatggtctggacccag

SEQ ID NO: 3639577 - DNA, 25 bp, Homo sapien
gccatatggaataagaccgcaagtc

SEQ ID NO: 3639578 - DNA, 25 bp, Homo sapien
gcaagtctgcaagcactacgccagt

SEQ ID NO: 3639579 - DNA, 25 bp, Homo sapien
aactgcaatgagatcctgagtgcca

SEQ ID NO: 3639580 - DNA, 25 bp, Homo sapien
aattctgctagtacccttggcaagg

SEQ ID NO: 3639581 - DNA, 25 bp, Homo sapien
agaatgtgaatgcagtgagaggtga

SEQ ID NO: 3639582 - DNA, 25 bp, Homo sapien
aggtgaaggtcaactgcctctgctt

SEQ ID NO: 3639583 - DNA, 25 bp, Homo sapien
tgagaggtgaaggtcaactgcctct

SEQ ID NO: 3639584 - DNA, 25 bp, Homo sapien
gaggtgaaggtcaactgcctctgct

SEQ ID NO: 3639585 - DNA, 25 bp, Homo sapien
tttttagcggagactcactgaattc

SEQ ID NO: 3639586 - DNA, 25 bp, Homo sapien
cccaaatgaatcctgctctggactc

SEQ ID NO: 3639587 - DNA, 25 bp, Homo sapien
ctggctgatgctcatttttagcgga

SEQ ID NO: 3639588 - DNA, 25 bp, Homo sapien
atccacccaaatgaatcctgctctg

SEQ ID NO: 3639589 - DNA, 25 bp, Homo sapien
ctgccgaatcacatgccctgaatcc

SEQ ID NO: 3639590 - DNA, 25 bp, Homo sapien
ttgaccactctcctggcgctgccaa

SEQ ID NO: 3639591 - DNA, 25 bp, Homo sapien
aatgggtggtcctgtcccattgacc

SEQ ID NO: 3639592 - DNA, 25 bp, Homo sapien
aaatgggtggtcctgtcccatcgac

SEQ ID NO: 3639593 - DNA, 25 bp, Homo sapien
tgcctcaataggtggtccggtccca

SEQ ID NO: 3639594 - DNA, 25 bp, Homo sapien
tgatcaaaagcaaaataggtggtcc

SEQ ID NO: 3639595 - DNA, 25 bp, Homo sapien
tcaaaagcaaaataggtggtcctgt

SEQ ID NO: 3639596 - DNA, 25 bp, Homo sapien
tcctgatcaaaagcaaaataggtgg

SEQ ID NO: 3639597 - DNA, 25 bp, Homo sapien
aagcaaaataggtggtcctgtccca

SEQ ID NO: 3639598 - DNA, 25 bp, Homo sapien
gaaacacttggcagtccgtcagatg

SEQ ID NO: 3639599 - DNA, 25 bp, Homo sapien
tcagatgactaatgcaagatgcggg

SEQ ID NO: 3639600 - DNA, 25 bp, Homo sapien
tgcaaggctgccatcaacgcatcag

SEQ ID NO: 3639601 - DNA, 25 bp, Homo sapien
aatttgcagagtgcgcgaggcatcc

SEQ ID NO: 3639602 - DNA, 25 bp, Homo sapien
tgcgtgctgctgtcgagcagagccg

SEQ ID NO: 3639603 - DNA, 25 bp, Homo sapien
cgtgctgctgtcgagcagagccggg

SEQ ID NO: 3639604 - DNA, 25 bp, Homo sapien
agagccgggggagcacggggcagcg

SEQ ID NO: 3639605 - DNA, 25 bp, Homo sapien
gccgggggagcacggggcagcgccc

SEQ ID NO: 3639606 - DNA, 25 bp, Homo sapien
tgagttgctcctcggcggcggcgag

SEQ ID NO: 3639607 - DNA, 25 bp, Homo sapien
catgagttgctcctcggcggcggcg

SEQ ID NO: 3639608 - DNA, 25 bp, Homo sapien
tcctcggcggcggcgaggctctcac

SEQ ID NO: 3639609 - DNA, 25 bp, Homo sapien
gctcctcggcggcggcgaggctctc

SEQ ID NO: 3639610 - DNA, 25 bp, Homo sapien
gatgaactaaaacaaagcggaggca

SEQ ID NO: 3639611 - DNA, 25 bp, Homo sapien
aatttgatgaactaaaacaaagcgg

SEQ ID NO: 3639612 - DNA, 25 bp, Homo sapien
ctaatgagtcgtagaaatttgatga

SEQ ID NO: 3639613 - DNA, 25 bp, Homo sapien
tcgtagaaatttgatgaactaaaac

SEQ ID NO: 3639614 - DNA, 25 bp, Homo sapien
gagttagggcggcacgatgagggac

SEQ ID NO: 3639615 - DNA, 25 bp, Homo sapien
gggcggcacgatgagggacaggaag

SEQ ID NO: 3639616 - DNA, 25 bp, Homo sapien
ttagggcggcacgatgagggacagg

SEQ ID NO: 3639617 - DNA, 25 bp, Homo sapien
gagccagagttagggcggcacgatg

SEQ ID NO: 3639618 - DNA, 25 bp, Homo sapien
tggtagacggctccgtaaggctcaa

SEQ ID NO: 3639619 - DNA, 25 bp, Homo sapien
agctccttttccgaccatgaccggg

SEQ ID NO: 3639620 - DNA, 25 bp, Homo sapien
tttactctgcggagggttctgactc

SEQ ID NO: 3639621 - DNA, 25 bp, Homo sapien
tccggtcccggaggacgttgatctg

SEQ ID NO: 3639622 - DNA, 25 bp, Homo sapien
tggcgacccccgccccgcgctctgt

SEQ ID NO: 3639623 - DNA, 25 bp, Homo sapien
gcctggcgacccccgccccgcgctc

SEQ ID NO: 3639624 - DNA, 25 bp, Homo sapien
gcgacccccgccccgcgctctgtac

SEQ ID NO: 3639625 - DNA, 25 bp, Homo sapien
ctggcgacccccgccccgcgctctg

SEQ ID NO: 3639626 - DNA, 25 bp, Homo sapien
taagaggcttccaaagccctgccag

SEQ ID NO: 3639627 - DNA, 25 bp, Homo sapien
aagaggcttccaaagccctgccaga

SEQ ID NO: 3639628 - DNA, 25 bp, Homo sapien
gaggcttccaaagccctgccagacc

SEQ ID NO: 3639629 - DNA, 25 bp, Homo sapien
ttaagaggcttccaaagccctgcca

SEQ ID NO: 3639630 - DNA, 25 bp, Homo sapien
ggaccatcaacacgggtaaggcaat

SEQ ID NO: 3639631 - DNA, 25 bp, Homo sapien
gcaatgaatcaaggcctctccaaaa

SEQ ID NO: 3639632 - DNA, 25 bp, Homo sapien
gaggctctgatatcagccctgtgaa

SEQ ID NO: 3639633 - DNA, 25 bp, Homo sapien
catgataattgtactctgccgacaa

SEQ ID NO: 3639634 - DNA, 25 bp, Homo sapien
attgcttaaataaacgggctcccag

SEQ ID NO: 3639635 - DNA, 25 bp, Homo sapien
tgtttgtcccataggtcgtcggtca

SEQ ID NO: 3639636 - DNA, 25 bp, Homo sapien
tcgtcggtcagccaacaatgaaagg

SEQ ID NO: 3639637 - DNA, 25 bp, Homo sapien
gatgtgacaaggatcctccgcttgc

SEQ ID NO: 3639638 - DNA, 25 bp, Homo sapien
tcatgtctgactgattccccacgga

SEQ ID NO: 3639639 - DNA, 25 bp, Homo sapien
caaaggactggttgcctaatgcccc

SEQ ID NO: 3639640 - DNA, 25 bp, Homo sapien
gagacaggttttgacccacatgcgg

SEQ ID NO: 3639641 - DNA, 25 bp, Homo sapien
taggtcacgctaaggcagctctgag

SEQ ID NO: 3639642 - DNA, 25 bp, Homo sapien
cccctccctgatgtttgcgttattt

SEQ ID NO: 3639643 - DNA, 25 bp, Homo sapien
tgcgttatttctttacttgactagg

SEQ ID NO: 3639644 - DNA, 25 bp, Homo sapien
tacttgactaggatgcagttcccat

SEQ ID NO: 3639645 - DNA, 25 bp, Homo sapien
cattaaactatagtagtttgggaag

SEQ ID NO: 3639646 - DNA, 25 bp, Homo sapien
acttggtgtctggtgcatcactggg

SEQ ID NO: 3639647 - DNA, 25 bp, Homo sapien
taacacttggtgtctggtgcatcac

SEQ ID NO: 3639648 - DNA, 25 bp, Homo sapien
gtgcatcactgggaacgtttagcat

SEQ ID NO: 3639649 - DNA, 25 bp, Homo sapien
ctgttccgtaacacttggtgtctgg

SEQ ID NO: 3639650 - DNA, 25 bp, Homo sapien
aatctcatgactcaatgctctgagg

SEQ ID NO: 3639651 - DNA, 25 bp, Homo sapien
tttcccaatatcaggtacagtggcc

SEQ ID NO: 3639652 - DNA, 25 bp, Homo sapien
tacagtggcctagttaggagctaaa

SEQ ID NO: 3639653 - DNA, 25 bp, Homo sapien
tcccggacctttgcgattcatgctg

SEQ ID NO: 3639654 - DNA, 25 bp, Homo sapien
gtcagacgtgtaccatcacatggcc

SEQ ID NO: 3639655 - DNA, 25 bp, Homo sapien
cacaggatgatcacgctctctagcg

SEQ ID NO: 3639656 - DNA, 25 bp, Homo sapien
aacagaaaacacacgcgcacaagaa

SEQ ID NO: 3639657 - DNA, 25 bp, Homo sapien
gatacgggcatgtaaccgaaaggaa

SEQ ID NO: 3639658 - DNA, 25 bp, Homo sapien
gaagccttgactatcttacagagga

SEQ ID NO: 3639659 - DNA, 25 bp, Homo sapien
tcatgctgtctggaacgtgaaacca

SEQ ID NO: 3639660 - DNA, 25 bp, Homo sapien
aaaagtccatttccagcactgcagg

SEQ ID NO: 3639661 - DNA, 25 bp, Homo sapien
aatacttcgtccaaatgagccaccc

SEQ ID NO: 3639662 - DNA, 25 bp, Homo sapien
ccaaatcaacaagcaattgttgaat

SEQ ID NO: 3639663 - DNA, 25 bp, Homo sapien
caaatcaacaagcaattgttgaatc

SEQ ID NO: 3639664 - DNA, 25 bp, Homo sapien
cccaaatcaacaagcaattgttgaa

SEQ ID NO: 3639665 - DNA, 25 bp, Homo sapien
tgtgtaaaacggactggtggtcacc

SEQ ID NO: 3639666 - DNA, 25 bp, Homo sapien
cttcacccagagagtgacgggcact

SEQ ID NO: 3639667 - DNA, 25 bp, Homo sapien
ggcagtcacgctgttccaatctagg

SEQ ID NO: 3639668 - DNA, 25 bp, Homo sapien
ggttgcctactccataacgctgacg

SEQ ID NO: 3639669 - DNA, 25 bp, Homo sapien
tctcggaagcacttcctttgcaggg

SEQ ID NO: 3639670 - DNA, 25 bp, Homo sapien
gacttgcagaacagctaagagccag

SEQ ID NO: 3639671 - DNA, 25 bp, Homo sapien
gagctgaatacaccctgtgctggac

SEQ ID NO: 3639672 - DNA, 25 bp, Homo sapien
ggccccgtgtttgccacctctagag

SEQ ID NO: 3639673 - DNA, 25 bp, Homo sapien
gactcactcagctctgcggctaatg

SEQ ID NO: 3639674 - DNA, 25 bp, Homo sapien
ctagggcagcccgaccaatgggttt

SEQ ID NO: 3639675 - DNA, 25 bp, Homo sapien
cagcattctgtgttgctagggcagc

SEQ ID NO: 3639676 - DNA, 25 bp, Homo sapien
cctgagcattctagccgtctggaag

SEQ ID NO: 3639677 - DNA, 25 bp, Homo sapien
gcagggcatactggcagccacctgt

SEQ ID NO: 3639678 - DNA, 25 bp, Homo sapien
agcagggcatactggcagccacctg

SEQ ID NO: 3639679 - DNA, 25 bp, Homo sapien
agggcatactggcagccacctgtag

SEQ ID NO: 3639680 - DNA, 25 bp, Homo sapien
ttagcagggcatactggcagccacc

SEQ ID NO: 3639681 - DNA, 25 bp, Homo sapien
tctacacaaaggaacggagcacgga

SEQ ID NO: 3639682 - DNA, 25 bp, Homo sapien
ttaactacgagcataaacaggcgag

SEQ ID NO: 3639683 - DNA, 25 bp, Homo sapien
gaaaggatttaccaccagatgattg

SEQ ID NO: 3639684 - DNA, 25 bp, Homo sapien
caacagcataaagtctgcgaaggga

SEQ ID NO: 3639685 - DNA, 25 bp, Homo sapien
aaatactcacaattcacggtcttgg

SEQ ID NO: 3639686 - DNA, 25 bp, Homo sapien
ttaccagccagaccgaaaatactca

SEQ ID NO: 3639687 - DNA, 25 bp, Homo sapien
gaatagtgcctgtccttaccagcca

SEQ ID NO: 3639688 - DNA, 25 bp, Homo sapien
tccgaaacggacttctagagattaa

SEQ ID NO: 3639689 - DNA, 25 bp, Homo sapien
tatactccctgagctgagagtgcga

SEQ ID NO: 3639690 - DNA, 25 bp, Homo sapien
gctgtatctgagtcaacgtgtgcca

SEQ ID NO: 3639691 - DNA, 25 bp, Homo sapien
cagctcatggcctgaaagagtttcc

SEQ ID NO: 3639692 - DNA, 25 bp, Homo sapien
tgcgagggccattagaattcaccgt

SEQ ID NO: 3639693 - DNA, 25 bp, Homo sapien
gatgttcattcccaagactgccagt

SEQ ID NO: 3639694 - DNA, 25 bp, Homo sapien
tatggattgcctactgtgtacgcac

SEQ ID NO: 3639695 - DNA, 25 bp, Homo sapien
gaaccacgtaccatgcttggttgtg

SEQ ID NO: 3639696 - DNA, 25 bp, Homo sapien
aagtagggagtagtgctgaaacatc

SEQ ID NO: 3639697 - DNA, 25 bp, Homo sapien
gggagattttcgaggacagaagctc

SEQ ID NO: 3639698 - DNA, 25 bp, Homo sapien
aacccagccactgagagtcaaaatt

SEQ ID NO: 3639699 - DNA, 25 bp, Homo sapien
tttcagggagattttcgaggacaga

SEQ ID NO: 3639700 - DNA, 25 bp, Homo sapien
gaaaagagatacaaaacccagccac

SEQ ID NO: 3639701 - DNA, 25 bp, Homo sapien
agccaggtgcctttcaatacatcag

SEQ ID NO: 3639702 - DNA, 25 bp, Homo sapien
aatacattgatgctgctgtgcaact

SEQ ID NO: 3639703 - DNA, 25 bp, Homo sapien
ggatgtccatgaaggtcagcagcat

SEQ ID NO: 3639704 - DNA, 25 bp, Homo sapien
catgagtgtccattgttacaggcac

SEQ ID NO: 3639705 - DNA, 25 bp, Homo sapien
tctaggggactgtatgaatgcaaag

SEQ ID NO: 3639706 - DNA, 25 bp, Homo sapien
gttctaggggactgtatgaatgcaa

SEQ ID NO: 3639707 - DNA, 25 bp, Homo sapien
tggttctaggggactgtatgaatgc

SEQ ID NO: 3639708 - DNA, 25 bp, Homo sapien
taggggactgtatgaatgcaaaggt

SEQ ID NO: 3639709 - DNA, 25 bp, Homo sapien
gctactgtgagcattcgcaagcaat

SEQ ID NO: 3639710 - DNA, 25 bp, Homo sapien
tgtccaacaaagacgcatcgggatt

SEQ ID NO: 3639711 - DNA, 25 bp, Homo sapien
gaagccactgagatgaagctcccct

SEQ ID NO: 3639712 - DNA, 25 bp, Homo sapien
gagtgcatttcaaggctacgggcca

SEQ ID NO: 3639713 - DNA, 25 bp, Homo sapien
tactgtctctgctacactgagatgg

SEQ ID NO: 3639714 - DNA, 25 bp, Homo sapien
ttaagttcatggtcgaatgctgacg

SEQ ID NO: 3639715 - DNA, 25 bp, Homo sapien
gaagctccttctcaaccatagaggg

SEQ ID NO: 3639716 - DNA, 25 bp, Homo sapien
cacctagaggtgtgataggagttta

SEQ ID NO: 3639717 - DNA, 25 bp, Homo sapien
acagcacttggaggatagtctcgca

SEQ ID NO: 3639718 - DNA, 25 bp, Homo sapien
aaagagcttgggtcacggtacctag

SEQ ID NO: 3639719 - DNA, 25 bp, Homo sapien
cggtttgtgacgtcaaggtctgcca

SEQ ID NO: 3639720 - DNA, 25 bp, Homo sapien
tcttcctcgagaaagacgctgacgc

SEQ ID NO: 3639721 - DNA, 25 bp, Homo sapien
taatcctgcagcgttaaaagccgtg

SEQ ID NO: 3639722 - DNA, 25 bp, Homo sapien
gattaagtgttctgcctcccagggc

SEQ ID NO: 3639723 - DNA, 25 bp, Homo sapien
cagagtgtctgcctagagggctcaa

SEQ ID NO: 3639724 - DNA, 25 bp, Homo sapien
tatcacggacagagtgcagagtcac

SEQ ID NO: 3639725 - DNA, 25 bp, Homo sapien
cctgctcagtctgttagcgttacgt

SEQ ID NO: 3639726 - DNA, 25 bp, Homo sapien
acaggcaggccttgccgagtgtccc

SEQ ID NO: 3639727 - DNA, 25 bp, Homo sapien
acatggctgaccatactttgtggaa

SEQ ID NO: 3639728 - DNA, 25 bp, Homo sapien
agcgttacgtcatgtcctttttgtc

SEQ ID NO: 3639729 - DNA, 25 bp, Homo sapien
tcttagaaagtacaaggaggcctca

SEQ ID NO: 3639730 - DNA, 25 bp, Homo sapien
gatttatacccctagcatcttgagg

SEQ ID NO: 3639731 - DNA, 25 bp, Homo sapien
tcagggcactatgaccgactctggg

SEQ ID NO: 3639732 - DNA, 25 bp, Homo sapien
tacaagtagcaaacgttgggagtcg

SEQ ID NO: 3639733 - DNA, 25 bp, Homo sapien
tcaagtcagtagcatgcaagccagt

SEQ ID NO: 3639734 - DNA, 25 bp, Homo sapien
cacaagtcgaactgcaactgggatc

SEQ ID NO: 3639735 - DNA, 25 bp, Homo sapien
gacagatcaagggacgaaggccctg

SEQ ID NO: 3639736 - DNA, 25 bp, Homo sapien
caggtgcctgcttcacacaagtcga

SEQ ID NO: 3639737 - DNA, 25 bp, Homo sapien
tggccactaacacatcactgtgatt

SEQ ID NO: 3639738 - DNA, 25 bp, Homo sapien
tagtttctgaatgacttaccgtggg

SEQ ID NO: 3639739 - DNA, 25 bp, Homo sapien
tcatctgtccgacccaagagctgag

SEQ ID NO: 3639740 - DNA, 25 bp, Homo sapien
tattcacggcctcagtaggataccc

SEQ ID NO: 3639741 - DNA, 25 bp, Homo sapien
taggatacccttgtgcaattagcaa

SEQ ID NO: 3639742 - DNA, 25 bp, Homo sapien
tatagcacctacgtgaagagaagca

SEQ ID NO: 3639743 - DNA, 25 bp, Homo sapien
gactgtggcgaacaaacaatctact

SEQ ID NO: 3639744 - DNA, 25 bp, Homo sapien
gaatgggacctgtgttatagcacct

SEQ ID NO: 3639745 - DNA, 25 bp, Homo sapien
tacccacgttggagatcaattcctg

SEQ ID NO: 3639746 - DNA, 25 bp, Homo sapien
tttaatattgtgcagtgcattctgg

SEQ ID NO: 3639747 - DNA, 25 bp, Homo sapien
ttaatattgtgcagtgcattctggg

SEQ ID NO: 3639748 - DNA, 25 bp, Homo sapien
tgtataaaatgttacgaaacaacaa

SEQ ID NO: 3639749 - DNA, 25 bp, Homo sapien
agtcatttttggcactaagagccca

SEQ ID NO: 3639750 - DNA, 25 bp, Homo sapien
aatactctttggcagccgtggctgc

SEQ ID NO: 3639751 - DNA, 25 bp, Homo sapien
taatgccagcgctcctttatgggct

SEQ ID NO: 3639752 - DNA, 25 bp, Homo sapien
tatttgagaatgcttcccgtcagtg

SEQ ID NO: 3639753 - DNA, 25 bp, Homo sapien
catttctggtgaattgtgccaacta

SEQ ID NO: 3639754 - DNA, 25 bp, Homo sapien
ttatccttgcactggttaccacagg

SEQ ID NO: 3639755 - DNA, 25 bp, Homo sapien
ggtgttcctacatgcaacatcagtt

SEQ ID NO: 3639756 - DNA, 25 bp, Homo sapien
caaacagcatcaggaaattaatagc

SEQ ID NO: 3639757 - DNA, 25 bp, Homo sapien
cagtcactcagttaagcctccagga

SEQ ID NO: 3639758 - DNA, 25 bp, Homo sapien
taagatagaggtagcctgagcttcc

SEQ ID NO: 3639759 - DNA, 25 bp, Homo sapien
gacagtgttgtagaaagtgccagcc

SEQ ID NO: 3639760 - DNA, 25 bp, Homo sapien
tggtctaacccaagctgccagaggc

SEQ ID NO: 3639761 - DNA, 25 bp, Homo sapien
tctaagaggtgtagccactttcact

SEQ ID NO: 3639762 - DNA, 25 bp, Homo sapien
actttcttgaatgtagaacaatagg

SEQ ID NO: 3639763 - DNA, 25 bp, Homo sapien
ctaagaggtgtagccactttcactt

SEQ ID NO: 3639764 - DNA, 25 bp, Homo sapien
ttcactttcttgaatgtagaacaat

SEQ ID NO: 3639765 - DNA, 25 bp, Homo sapien
gattatagtgcctctatgagctgca

SEQ ID NO: 3639766 - DNA, 25 bp, Homo sapien
tcaaaatctaggctaatgcttccac

SEQ ID NO: 3639767 - DNA, 25 bp, Homo sapien
gatgagcttagcttcagttaactga

SEQ ID NO: 3639768 - DNA, 25 bp, Homo sapien
tgcagaagacaccaaagaactagtc

SEQ ID NO: 3639769 - DNA, 25 bp, Homo sapien
gacgtgactgctgcttgagtaccaa

SEQ ID NO: 3639770 - DNA, 25 bp, Homo sapien
caagctagttaacgtatctgtcacc

SEQ ID NO: 3639771 - DNA, 25 bp, Homo sapien
tgtgaacgtgtaagacccagggatc

SEQ ID NO: 3639772 - DNA, 25 bp, Homo sapien
gagcatcggagaggaccggttctac

SEQ ID NO: 3639773 - DNA, 25 bp, Homo sapien
tatttggtcgcccaactgcagctca

SEQ ID NO: 3639774 - DNA, 25 bp, Homo sapien
ggctgacaccccatcaagcagatat

SEQ ID NO: 3639775 - DNA, 25 bp, Homo sapien
tcccctgggtatatgctctctcttg

SEQ ID NO: 3639776 - DNA, 25 bp, Homo sapien
gctgatttaggcaaacgctgaccat

SEQ ID NO: 3639777 - DNA, 25 bp, Homo sapien
tcaacattctgagctgtagcccagg

SEQ ID NO: 3639778 - DNA, 25 bp, Homo sapien
cagcctgtagaggtagcggaagcct

SEQ ID NO: 3639779 - DNA, 25 bp, Homo sapien
tgggacctaaagaaatcacgcggcg

SEQ ID NO: 3639780 - DNA, 25 bp, Homo sapien
ggtttagcagagaagcccgattttc

SEQ ID NO: 3639781 - DNA, 25 bp, Homo sapien
cacatattgtgagcttactgcccat

SEQ ID NO: 3639782 - DNA, 25 bp, Homo sapien
gagagcagccgtgctagcacatatt

SEQ ID NO: 3639783 - DNA, 25 bp, Homo sapien
cgaaagagctatgtgccaactgaga

SEQ ID NO: 3639784 - DNA, 25 bp, Homo sapien
ttgactatgaaacgccaaaggcacc

SEQ ID NO: 3639785 - DNA, 25 bp, Homo sapien
gccactatggacacaacctcgtggg

SEQ ID NO: 3639786 - DNA, 25 bp, Homo sapien
aacacaggcctagtctggagacaga

SEQ ID NO: 3639787 - DNA, 25 bp, Homo sapien
agctatactctccagagtcgccact

SEQ ID NO: 3639788 - DNA, 25 bp, Homo sapien
gaagggagggttccgagccaacaca

SEQ ID NO: 3639789 - DNA, 25 bp, Homo sapien
taaagccgcacgttaaggtacatgg

SEQ ID NO: 3639790 - DNA, 25 bp, Homo sapien
tgtactaagaatcagcgtcctatgc

SEQ ID NO: 3639791 - DNA, 25 bp, Homo sapien
tcggcacacagagatatagtccttc

SEQ ID NO: 3639792 - DNA, 25 bp, Homo sapien
aaggaactagagtcaagcgcggtcc

SEQ ID NO: 3639793 - DNA, 25 bp, Homo sapien
ccacagcaaacactgtgagaggcca

SEQ ID NO: 3639794 - DNA, 25 bp, Homo sapien
gaacaactggtcatgggaagtagag

SEQ ID NO: 3639795 - DNA, 25 bp, Homo sapien
ccaaagaatttggatctggcaataa

SEQ ID NO: 3639796 - DNA, 25 bp, Homo sapien
tgcaggagcaactggtcccatggga

SEQ ID NO: 3639797 - DNA, 25 bp, Homo sapien
tggcacttggctctgatactttcat

SEQ ID NO: 3639798 - DNA, 25 bp, Homo sapien
tggaaggaatcactggctgcgcaaa

SEQ ID NO: 3639799 - DNA, 25 bp, Homo sapien
ttccatcacttgcaagccacagctc

SEQ ID NO: 3639800 - DNA, 25 bp, Homo sapien
aaatgctttcattataatgggtccc

SEQ ID NO: 3639801 - DNA, 25 bp, Homo sapien
taatgggtcccattctctcggcacc

SEQ ID NO: 3639802 - DNA, 25 bp, Homo sapien
catgcaatctcgagcaagtgtctca

SEQ ID NO: 3639803 - DNA, 25 bp, Homo sapien
tgacaacaagacttctccaggtact

SEQ ID NO: 3639804 - DNA, 25 bp, Homo sapien
tatgttacaggcaattctgctcctg

SEQ ID NO: 3639805 - DNA, 25 bp, Homo sapien
cacctgaattgtaaggctgtcagaa

SEQ ID NO: 3639806 - DNA, 25 bp, Homo sapien
gtttcatctgaatgggatgatgcat

SEQ ID NO: 3639807 - DNA, 25 bp, Homo sapien
tcactatctgcaggtttcatctgaa

SEQ ID NO: 3639808 - DNA, 25 bp, Homo sapien
cgttggacttttcactatctgcagg

SEQ ID NO: 3639809 - DNA, 25 bp, Homo sapien
gacttttcactatctgcaggtttca

SEQ ID NO: 3639810 - DNA, 25 bp, Homo sapien
taagcaagacagttggttaccacct

SEQ ID NO: 3639811 - DNA, 25 bp, Homo sapien
cacagggtccctatacagggcaagt

SEQ ID NO: 3639812 - DNA, 25 bp, Homo sapien
tgggcaattcctttcctgcagacgt

SEQ ID NO: 3639813 - DNA, 25 bp, Homo sapien
tctggatccccatgagatgtccctg

SEQ ID NO: 3639814 - DNA, 25 bp, Homo sapien
tcatgtctcgaataggcaaaaccca

SEQ ID NO: 3639815 - DNA, 25 bp, Homo sapien
tcagtcttatgggacagagcagctc

SEQ ID NO: 3639816 - DNA, 25 bp, Homo sapien
tcctagcaacatgcgtggcacacgg

SEQ ID NO: 3639817 - DNA, 25 bp, Homo sapien
taccttgtggagagatttagagccc

SEQ ID NO: 3639818 - DNA, 25 bp, Homo sapien
tctgagcgcaacctaacgtttcggg

SEQ ID NO: 3639819 - DNA, 25 bp, Homo sapien
ttccatcggtgtgccagaggctgca

SEQ ID NO: 3639820 - DNA, 25 bp, Homo sapien
gaatcgctcgatggacgaaagctgc

SEQ ID NO: 3639821 - DNA, 25 bp, Homo sapien
tggaaaacacgatgccgcgagcttc

SEQ ID NO: 3639822 - DNA, 25 bp, Homo sapien
ttcactgctaaacctataattatgg

SEQ ID NO: 3639823 - DNA, 25 bp, Homo sapien
tgagaaagtggcattcccgtgaacg

SEQ ID NO: 3639824 - DNA, 25 bp, Homo sapien
ttttgagcttcagggagatgccata

SEQ ID NO: 3639825 - DNA, 25 bp, Homo sapien
tcttcttaccctgaacaatctggtt

SEQ ID NO: 3639826 - DNA, 25 bp, Homo sapien
tacaccgcctgtgctcactaacatg

SEQ ID NO: 3639827 - DNA, 25 bp, Homo sapien
aggccgtctacaccgcctgtgctca

SEQ ID NO: 3639828 - DNA, 25 bp, Homo sapien
tgctgcaggccgtctacaccgcctg

SEQ ID NO: 3639829 - DNA, 25 bp, Homo sapien
cctgtgctcactaacatgggaggat

SEQ ID NO: 3639830 - DNA, 25 bp, Homo sapien
gatccgctgtgaactggtgaagcct

SEQ ID NO: 3639831 - DNA, 25 bp, Homo sapien
tgaagcctggtcagtcatgggcagc

SEQ ID NO: 3639832 - DNA, 25 bp, Homo sapien
cagagagacaccagataccctgggc

SEQ ID NO: 3639833 - DNA, 25 bp, Homo sapien
tgacctcctgtacgctgacggaaaa

SEQ ID NO: 3639834 - DNA, 25 bp, Homo sapien
gcagaaactctagggctccaaggaa

SEQ ID NO: 3639835 - DNA, 25 bp, Homo sapien
tcagtgaggaaagcatcagctggcc

SEQ ID NO: 3639836 - DNA, 25 bp, Homo sapien
tacaagttgaaaggcacgattccac

SEQ ID NO: 3639837 - DNA, 25 bp, Homo sapien
actacgaatcgtgcacccaggtgtt

SEQ ID NO: 3639838 - DNA, 25 bp, Homo sapien
caggtgtactggtaacaggtgggtt

SEQ ID NO: 3639839 - DNA, 25 bp, Homo sapien
ttctggacgctaaagcacacctctg

SEQ ID NO: 3639840 - DNA, 25 bp, Homo sapien
tccttctggacgctaaagcacacct

SEQ ID NO: 3639841 - DNA, 25 bp, Homo sapien
ccagttccttctggacgctaaagca

SEQ ID NO: 3639842 - DNA, 25 bp, Homo sapien
gggatcatgaggacgacacgcaaat

SEQ ID NO: 3639843 - DNA, 25 bp, Homo sapien
cgcaaattctaacctgggcacctga

SEQ ID NO: 3639844 - DNA, 25 bp, Homo sapien
gaaatgtgaactactttcggcccga

SEQ ID NO: 3639845 - DNA, 25 bp, Homo sapien
gacacgttgtacttcacagggcccg

SEQ ID NO: 3639846 - DNA, 25 bp, Homo sapien
gccaggttagttaccgctcaacagg

SEQ ID NO: 3639847 - DNA, 25 bp, Homo sapien
ctaagcagccaggttagttaccgct

SEQ ID NO: 3639848 - DNA, 25 bp, Homo sapien
cagccaggttagttaccgctcaaca

SEQ ID NO: 3639849 - DNA, 25 bp, Homo sapien
agcagccaggttagttaccgctcaa

SEQ ID NO: 3639850 - DNA, 25 bp, Homo sapien
aaagtacctctttcccgtgacactg

SEQ ID NO: 3639851 - DNA, 25 bp, Homo sapien
tacctctttcccgtgacactggtga

SEQ ID NO: 3639852 - DNA, 25 bp, Homo sapien
tctctggggagctaggaaagtacct

SEQ ID NO: 3639853 - DNA, 25 bp, Homo sapien
gtgatgcagtgctaaccaggtcccg

SEQ ID NO: 3639854 - DNA, 25 bp, Homo sapien
aaatagcttcatccctgctgatcta

SEQ ID NO: 3639855 - DNA, 25 bp, Homo sapien
tagcttcatccctgctgatctagac

SEQ ID NO: 3639856 - DNA, 25 bp, Homo sapien
gcttcatccctgctgatctagacaa

SEQ ID NO: 3639857 - DNA, 25 bp, Homo sapien
ttcatccctgctgatctagacaaga

SEQ ID NO: 3639858 - DNA, 25 bp, Homo sapien
aaaataacgaatgagcaaaggccat

SEQ ID NO: 3639859 - DNA, 25 bp, Homo sapien
ctaggagataaaaataacgaatgag

SEQ ID NO: 3639860 - DNA, 25 bp, Homo sapien
agataaaaataacgaatgagcaaag

SEQ ID NO: 3639861 - DNA, 25 bp, Homo sapien
aataacgaatgagcaaaggccattt

SEQ ID NO: 3639862 - DNA, 25 bp, Homo sapien
ggaggatccggcattcttctatctg

SEQ ID NO: 3639863 - DNA, 25 bp, Homo sapien
catttcttcgataccattcctatga

SEQ ID NO: 3639864 - DNA, 25 bp, Homo sapien
gccaaatggagagaacatcaccctg

SEQ ID NO: 3639865 - DNA, 25 bp, Homo sapien
catcaccctgatgtcgttctcatta

SEQ ID NO: 3639866 - DNA, 25 bp, Homo sapien
aacttgagctaatatggtggcacca

SEQ ID NO: 3639867 - DNA, 25 bp, Homo sapien
gacctcttgccgtgtgcggtgccta

SEQ ID NO: 3639868 - DNA, 25 bp, Homo sapien
tgaaaaggatgcctagcagtagggc

SEQ ID NO: 3639869 - DNA, 25 bp, Homo sapien
cagagctccaattagcactgaaggg

SEQ ID NO: 3639870 - DNA, 25 bp, Homo sapien
taaacaccagcttatcgtcaaggct

SEQ ID NO: 3639871 - DNA, 25 bp, Homo sapien
cagcctttatgagtggttccaggaa

SEQ ID NO: 3639872 - DNA, 25 bp, Homo sapien
gaatcaaaagcttggcgtggttcca

SEQ ID NO: 3639873 - DNA, 25 bp, Homo sapien
tgtcacttaacgagttcccctggct

SEQ ID NO: 3639874 - DNA, 25 bp, Homo sapien
ccagcagacggggagcagaaatcaa

SEQ ID NO: 3639875 - DNA, 25 bp, Homo sapien
gacggggagcagaaatcaagcacac

SEQ ID NO: 3639876 - DNA, 25 bp, Homo sapien
gccaggccagcagacggggagcaga

SEQ ID NO: 3639877 - DNA, 25 bp, Homo sapien
gcagacggggagcagaaatcaagca

SEQ ID NO: 3639878 - DNA, 25 bp, Homo sapien
agacagagaaaatgtgccagagagt

SEQ ID NO: 3639879 - DNA, 25 bp, Homo sapien
ctggacagacagagaaaatgtgcca

SEQ ID NO: 3639880 - DNA, 25 bp, Homo sapien
ggacagacagagaaaatgtgccaga

SEQ ID NO: 3639881 - DNA, 25 bp, Homo sapien
cagagaaaatgtgccagagagtcac

SEQ ID NO: 3639882 - DNA, 25 bp, Homo sapien
ctgaacgctgcaggcggcaatcctg

SEQ ID NO: 3639883 - DNA, 25 bp, Homo sapien
ctttcccatggaggttctggctgct

SEQ ID NO: 3639884 - DNA, 25 bp, Homo sapien
tcttgttaagtactgcgtgtcctgc

SEQ ID NO: 3639885 - DNA, 25 bp, Homo sapien
tctggctgctttaaaacctgatctg

SEQ ID NO: 3639886 - DNA, 25 bp, Homo sapien
tcaaccaaatggcagatcaaattag

SEQ ID NO: 3639887 - DNA, 25 bp, Homo sapien
tccactgagccagcgtttgcataaa

SEQ ID NO: 3639888 - DNA, 25 bp, Homo sapien
aaaatattgatgagactgctcccca

SEQ ID NO: 3639889 - DNA, 25 bp, Homo sapien
tgctccccatcacttgttgcaggaa

SEQ ID NO: 3639890 - DNA, 25 bp, Homo sapien
atttgaaaccaagcggagcctgggc

SEQ ID NO: 3639891 - DNA, 25 bp, Homo sapien
gcaccatgtgccaagctgacagttt

SEQ ID NO: 3639892 - DNA, 25 bp, Homo sapien
gagctctgaggtgatccagtccaaa

SEQ ID NO: 3639893 - DNA, 25 bp, Homo sapien
tacagcaattatcaggcctcagaag

SEQ ID NO: 3639894 - DNA, 25 bp, Homo sapien
tgtctcatgtggttctctgacagca

SEQ ID NO: 3639895 - DNA, 25 bp, Homo sapien
ctgtctcatgtggttctctgacagc

SEQ ID NO: 3639896 - DNA, 25 bp, Homo sapien
gctgtctcatgtggttctctgacag

SEQ ID NO: 3639897 - DNA, 25 bp, Homo sapien
gtctcatgtggttctctgacagcat

SEQ ID NO: 3639898 - DNA, 25 bp, Homo sapien
gcttgaagaagcctgaatgaagttc

SEQ ID NO: 3639899 - DNA, 25 bp, Homo sapien
tagcggcaccttttaatccaacagc

SEQ ID NO: 3639900 - DNA, 25 bp, Homo sapien
acattcgcctcctggctaagctggc

SEQ ID NO: 3639901 - DNA, 25 bp, Homo sapien
tatcaagtcaatactgtagcggcac

SEQ ID NO: 3639902 - DNA, 25 bp, Homo sapien
ctgcattcaaacaaccagcagattg

SEQ ID NO: 3639903 - DNA, 25 bp, Homo sapien
gcattcaaacaaccagcagattgtt

SEQ ID NO: 3639904 - DNA, 25 bp, Homo sapien
tgcattcaaacaaccagcagattgt

SEQ ID NO: 3639905 - DNA, 25 bp, Homo sapien
gcaggtcactgctccaactacatgg

SEQ ID NO: 3639906 - DNA, 25 bp, Homo sapien
gagaactgccacaagacgacactgt

SEQ ID NO: 3639907 - DNA, 25 bp, Homo sapien
tagccaccgggtttgaaatcagcaa

SEQ ID NO: 3639908 - DNA, 25 bp, Homo sapien
gatgtgagattgttgcccctgtggc

SEQ ID NO: 3639909 - DNA, 25 bp, Homo sapien
gtagaaaatgtgacaaacgcacagc

SEQ ID NO: 3639910 - DNA, 25 bp, Homo sapien
tgatgcatggctttgattgcattct

SEQ ID NO: 3639911 - DNA, 25 bp, Homo sapien
ctccatggtctgagactgatgcatg

SEQ ID NO: 3639912 - DNA, 25 bp, Homo sapien
tgagactgatgcatggctttgattg

SEQ ID NO: 3639913 - DNA, 25 bp, Homo sapien
ggtctgagactgatgcatggctttg

SEQ ID NO: 3639914 - DNA, 25 bp, Homo sapien
gctgttactgtttcatccgcaccga

SEQ ID NO: 3639915 - DNA, 25 bp, Homo sapien
gaagtaacggcatatcactcttgga

SEQ ID NO: 3639916 - DNA, 25 bp, Homo sapien
caaaattctgaaaggccatgaccca

SEQ ID NO: 3639917 - DNA, 25 bp, Homo sapien
atccacaggaatggagcggcctcag

SEQ ID NO: 3639918 - DNA, 25 bp, Homo sapien
aacttccagcctactggtcttcagc

SEQ ID NO: 3639919 - DNA, 25 bp, Homo sapien
aactcagcatgataatagacctctc

SEQ ID NO: 3639920 - DNA, 25 bp, Homo sapien
tctggtagacagagtcatggtacag

SEQ ID NO: 3639921 - DNA, 25 bp, Homo sapien
gcagttctgaatacatgaggatatc

SEQ ID NO: 3639922 - DNA, 25 bp, Homo sapien
agcaaacttcaccacgataggtgaa

SEQ ID NO: 3639923 - DNA, 25 bp, Homo sapien
tcaccacgataggtgaagagcagcc

SEQ ID NO: 3639924 - DNA, 25 bp, Homo sapien
agccctgtcaggttcccccaggtgg

SEQ ID NO: 3639925 - DNA, 25 bp, Homo sapien
gatactgtggggtcagtccgcccag

SEQ ID NO: 3639926 - DNA, 25 bp, Homo sapien
tttgttgaatgccgctgaacgcacc

SEQ ID NO: 3639927 - DNA, 25 bp, Homo sapien
aacgcacccaggttgctggaggagg

SEQ ID NO: 3639928 - DNA, 25 bp, Homo sapien
gaacgcacccaggttgctggaggag

SEQ ID NO: 3639929 - DNA, 25 bp, Homo sapien
gttgaatgccgctgaacgcacccag

SEQ ID NO: 3639930 - DNA, 25 bp, Homo sapien
ttgttgatatagatgccaatcagga

SEQ ID NO: 3639931 - DNA, 25 bp, Homo sapien
gatgccaatcaggatttctcagccc

SEQ ID NO: 3639932 - DNA, 25 bp, Homo sapien
ctagagagtcgttgatataatcatt

SEQ ID NO: 3639933 - DNA, 25 bp, Homo sapien
attctatagcggtcatgcacagcga

SEQ ID NO: 3639934 - DNA, 25 bp, Homo sapien
tactggcgcagctcattagaagaag

SEQ ID NO: 3639935 - DNA, 25 bp, Homo sapien
tcctcacggcaggttaatgggcacc

SEQ ID NO: 3639936 - DNA, 25 bp, Homo sapien
gaaggaatccttcaacgagctggct

SEQ ID NO: 3639937 - DNA, 25 bp, Homo sapien
gaaacaaggaaaaggctctctgacc

SEQ ID NO: 3639938 - DNA, 25 bp, Homo sapien
aacacagaaaatcccctgaatattt

SEQ ID NO: 3639939 - DNA, 25 bp, Homo sapien
tgacaaatcttagcatttattttag

SEQ ID NO: 3639940 - DNA, 25 bp, Homo sapien
gaaaagcaaatctcccgtgggctga

SEQ ID NO: 3639941 - DNA, 25 bp, Homo sapien
ttttagagcttgcaatcaggaggtt

SEQ ID NO: 3639942 - DNA, 25 bp, Homo sapien
gcccctaatttcagatcctggtgag

SEQ ID NO: 3639943 - DNA, 25 bp, Homo sapien
aatttcagatcctggtgagtccata

SEQ ID NO: 3639944 - DNA, 25 bp, Homo sapien
taaggaaagcccctaatttcagatc

SEQ ID NO: 3639945 - DNA, 25 bp, Homo sapien
cctgaggccacctctaaggaaagcc

SEQ ID NO: 3639946 - DNA, 25 bp, Homo sapien
tggctggtgcggcacaggcacacac

SEQ ID NO: 3639947 - DNA, 25 bp, Homo sapien
cacatcctaatgaaagatgacaggg

SEQ ID NO: 3639948 - DNA, 25 bp, Homo sapien
gggacagcacgctcggcagcagcct

SEQ ID NO: 3639949 - DNA, 25 bp, Homo sapien
aagatgacagggcacgctgtccacc

SEQ ID NO: 3639950 - DNA, 25 bp, Homo sapien
taggaaggaacctctatcgcccatt

SEQ ID NO: 3639951 - DNA, 25 bp, Homo sapien
gagacctgacgatccctataaatgc

SEQ ID NO: 3639952 - DNA, 25 bp, Homo sapien
tcaaatacgtaggaagaggagacct

SEQ ID NO: 3639953 - DNA, 25 bp, Homo sapien
tacttttgggacaagacaagagcgt

SEQ ID NO: 3639954 - DNA, 25 bp, Homo sapien
tcactcatccactcgaggatactca

SEQ ID NO: 3639955 - DNA, 25 bp, Homo sapien
gatactcatgagcagctcttagagg

SEQ ID NO: 3639956 - DNA, 25 bp, Homo sapien
cacggaagagtatccacagagtatc

SEQ ID NO: 3639957 - DNA, 25 bp, Homo sapien
gctctcctggagcacggaagagtat

SEQ ID NO: 3639958 - DNA, 25 bp, Homo sapien
ccctctacgtaggacacagtatcaa

SEQ ID NO: 3639959 - DNA, 25 bp, Homo sapien
ggcatttaacttaagctccactggg

SEQ ID NO: 3639960 - DNA, 25 bp, Homo sapien
caataagcactgtaacatcaggtgg

SEQ ID NO: 3639961 - DNA, 25 bp, Homo sapien
tagactctagctataaacctcatcg

SEQ ID NO: 3639962 - DNA, 25 bp, Homo sapien
ctctccactcgtgctagacaccaag

SEQ ID NO: 3639963 - DNA, 25 bp, Homo sapien
ccaagacagtcttctaagagaacag

SEQ ID NO: 3639964 - DNA, 25 bp, Homo sapien
gagcgcctccaattcgacattctca

SEQ ID NO: 3639965 - DNA, 25 bp, Homo sapien
gacctccgatacactgtttttgcaa

SEQ ID NO: 3639966 - DNA, 25 bp, Homo sapien
tggtggctgatgtcttggctcctcc

SEQ ID NO: 3639967 - DNA, 25 bp, Homo sapien
acagcgccatcacccggaacgtgga

SEQ ID NO: 3639968 - DNA, 25 bp, Homo sapien
gcccttccctggcaacgatgcacgt

SEQ ID NO: 3639969 - DNA, 25 bp, Homo sapien
gggactgtcttggccccagtgttcc

SEQ ID NO: 3639970 - DNA, 25 bp, Homo sapien
cttctcctcctgtgcattggtatcc

SEQ ID NO: 3639971 - DNA, 25 bp, Homo sapien
tcctgtgcattggtatccatttcct

SEQ ID NO: 3639972 - DNA, 25 bp, Homo sapien
tctggagctgttctgacctcttcct

SEQ ID NO: 3639973 - DNA, 25 bp, Homo sapien
ctgccctctcggtccccatctggag

SEQ ID NO: 3639974 - DNA, 25 bp, Homo sapien
gacattctcctaagcctttccctgc

SEQ ID NO: 3639975 - DNA, 25 bp, Homo sapien
cactttaccatccaacagtttctga

SEQ ID NO: 3639976 - DNA, 25 bp, Homo sapien
cgctcctttaggatccagggctaag

SEQ ID NO: 3639977 - DNA, 25 bp, Homo sapien
gacagcactcaggttctctccactg

SEQ ID NO: 3639978 - DNA, 25 bp, Homo sapien
cacttgggtcagagacatgaggtcc

SEQ ID NO: 3639979 - DNA, 25 bp, Homo sapien
aggagcctcagtgatggagctgtgt

SEQ ID NO: 3639980 - DNA, 25 bp, Homo sapien
ttgggtcagagacatgaggtccctg

SEQ ID NO: 3639981 - DNA, 25 bp, Homo sapien
gcctcagtgatggagctgtgttgat

SEQ ID NO: 3639982 - DNA, 25 bp, Homo sapien
tggactggcagcttctatgacatag

SEQ ID NO: 3639983 - DNA, 25 bp, Homo sapien
tggccacagtagggccttgtggact

SEQ ID NO: 3639984 - DNA, 25 bp, Homo sapien
gtggactggcagcttctatgacata

SEQ ID NO: 3639985 - DNA, 25 bp, Homo sapien
aaagaggagagatttcagtgctgac

SEQ ID NO: 3639986 - DNA, 25 bp, Homo sapien
gccttcctgccatgctgtagagata

SEQ ID NO: 3639987 - DNA, 25 bp, Homo sapien
gtattctcagcccaaggccttcctg

SEQ ID NO: 3639988 - DNA, 25 bp, Homo sapien
ctgccatgctgtagagataagtgga

SEQ ID NO: 3639989 - DNA, 25 bp, Homo sapien
cgggactcgtgagggctcccagggc

SEQ ID NO: 3639990 - DNA, 25 bp, Homo sapien
gcgctgctcgtggtagagagagggt

SEQ ID NO: 3639991 - DNA, 25 bp, Homo sapien
cagcagcagccagcgtcgccaggtt

SEQ ID NO: 3639992 - DNA, 25 bp, Homo sapien
ttctgcaactgtaaagcattcatgc

SEQ ID NO: 3639993 - DNA, 25 bp, Homo sapien
catcacctgcaagggaagagcaccc

SEQ ID NO: 3639994 - DNA, 25 bp, Homo sapien
gcaagggaagagcaccccccacact

SEQ ID NO: 3639995 - DNA, 25 bp, Homo sapien
acctgcaagggaagagcacccccca

SEQ ID NO: 3639996 - DNA, 25 bp, Homo sapien
gctgcatcacctgcaagggaagagc

SEQ ID NO: 3639997 - DNA, 25 bp, Homo sapien
ttccaacacttagctaatccttggg

SEQ ID NO: 3639998 - DNA, 25 bp, Homo sapien
ttttccaacacttagctaatccttg

SEQ ID NO: 3639999 - DNA, 25 bp, Homo sapien
cgatgtgtgtttcctgaagctattt

SEQ ID NO: 3640000 - DNA, 25 bp, Homo sapien
tgggctgtagttttcgatgtgtgtt

SEQ ID NO: 3640001 - DNA, 25 bp, Homo sapien
taagaaggttgcaacaagctcacac

SEQ ID NO: 3640002 - DNA, 25 bp, Homo sapien
ctcccgaaggtaggcagcacatctg

SEQ ID NO: 3640003 - DNA, 25 bp, Homo sapien
tccagtagcccacattttaagaagg

SEQ ID NO: 3640004 - DNA, 25 bp, Homo sapien
ttccgtcacggaactcaggtctctg

SEQ ID NO: 3640005 - DNA, 25 bp, Homo sapien
gctgcgctggtgtggttttgactcc

SEQ ID NO: 3640006 - DNA, 25 bp, Homo sapien
tctcagtgacacctaagcgagcggc

SEQ ID NO: 3640007 - DNA, 25 bp, Homo sapien
tctgaagggcaagaagcctcttaca

SEQ ID NO: 3640008 - DNA, 25 bp, Homo sapien
tgaggcttcccttcaactcacaggg

SEQ ID NO: 3640009 - DNA, 25 bp, Homo sapien
ggggcgccgcgtggactcagtagga

SEQ ID NO: 3640010 - DNA, 25 bp, Homo sapien
ctggcgcagcccagggacgtcacag

SEQ ID NO: 3640011 - DNA, 25 bp, Homo sapien
ctggggcgccgcgtggactcagtag

SEQ ID NO: 3640012 - DNA, 25 bp, Homo sapien
tggcgcagcccagggacgtcacagc

SEQ ID NO: 3640013 - DNA, 25 bp, Homo sapien
ccagagacattggtgcccctctctt

SEQ ID NO: 3640014 - DNA, 25 bp, Homo sapien
gcttcccaaggaagctgatgccacc

SEQ ID NO: 3640015 - DNA, 25 bp, Homo sapien
tgccacctggcttggtgcagtgctg

SEQ ID NO: 3640016 - DNA, 25 bp, Homo sapien
ttccccagagacattggtgcccctc

SEQ ID NO: 3640017 - DNA, 25 bp, Homo sapien
tagtgcgctggacaagggcctcgca

SEQ ID NO: 3640018 - DNA, 25 bp, Homo sapien
ggatttgcttgtccgtttccctaga

SEQ ID NO: 3640019 - DNA, 25 bp, Homo sapien
aagacagccggttgaagagcaggga

SEQ ID NO: 3640020 - DNA, 25 bp, Homo sapien
tgagaatcactggtgcagcgggcac

SEQ ID NO: 3640021 - DNA, 25 bp, Homo sapien
tctctctgttcaaacagcgccattc

SEQ ID NO: 3640022 - DNA, 25 bp, Homo sapien
tctctctctgttcaaacagcgccat

SEQ ID NO: 3640023 - DNA, 25 bp, Homo sapien
ttctctctctgttcaaacagcgcca

SEQ ID NO: 3640024 - DNA, 25 bp, Homo sapien
ctcttctctctctgttcaaacagcg

SEQ ID NO: 3640025 - DNA, 25 bp, Homo sapien
cagactggtagaactgggaaggacc

SEQ ID NO: 3640026 - DNA, 25 bp, Homo sapien
gtagaactgggaaggacctgtatcc

SEQ ID NO: 3640027 - DNA, 25 bp, Homo sapien
gccgatgcgtgtttgacaaaggcat

SEQ ID NO: 3640028 - DNA, 25 bp, Homo sapien
gggcaccgagttgaaccagaagatg

SEQ ID NO: 3640029 - DNA, 25 bp, Homo sapien
gaggcaaggacctgagctccacttt

SEQ ID NO: 3640030 - DNA, 25 bp, Homo sapien
ggcatgaggactccacaaggaggcc

SEQ ID NO: 3640031 - DNA, 25 bp, Homo sapien
tctgctatgtggataacctggacca

SEQ ID NO: 3640032 - DNA, 25 bp, Homo sapien
cacttagggatacagcagttgtgga

SEQ ID NO: 3640033 - DNA, 25 bp, Homo sapien
gcaataacttggatacgtcacattt

SEQ ID NO: 3640034 - DNA, 25 bp, Homo sapien
taagcctgttgtaccactggttaaa

SEQ ID NO: 3640035 - DNA, 25 bp, Homo sapien
cattttaagcctgttgtaccactgg

SEQ ID NO: 3640036 - DNA, 25 bp, Homo sapien
gatacgtcacattttaagcctgttg

SEQ ID NO: 3640037 - DNA, 25 bp, Homo sapien
gtaatctagtctgcctaactgccag

SEQ ID NO: 3640038 - DNA, 25 bp, Homo sapien
ttctagggactgcatccgatgccag

SEQ ID NO: 3640039 - DNA, 25 bp, Homo sapien
tatggttgggaaagctgtgcgaaca

SEQ ID NO: 3640040 - DNA, 25 bp, Homo sapien
tattagatactgcacaggagccttg

SEQ ID NO: 3640041 - DNA, 25 bp, Homo sapien
cctatgggcatgagtaagatgggcc

SEQ ID NO: 3640042 - DNA, 25 bp, Homo sapien
aaatctgcgaatgggaggcctgccc

SEQ ID NO: 3640043 - DNA, 25 bp, Homo sapien
taacctcatacagtgactgggagag

SEQ ID NO: 3640044 - DNA, 25 bp, Homo sapien
tgtcatcatctcagtggacggagct

SEQ ID NO: 3640045 - DNA, 25 bp, Homo sapien
ctgctagtgcattaatattattcag

SEQ ID NO: 3640046 - DNA, 25 bp, Homo sapien
gtccttgcagagtcccgagagaggt

SEQ ID NO: 3640047 - DNA, 25 bp, Homo sapien
tattattcagtccaacagtggctcc

SEQ ID NO: 3640048 - DNA, 25 bp, Homo sapien
ttgcagagtcccgagagaggtcaag

SEQ ID NO: 3640049 - DNA, 25 bp, Homo sapien
tgtccaccagagcagcaaatactca

SEQ ID NO: 3640050 - DNA, 25 bp, Homo sapien
ctccccgtggcatatcctttttcgg

SEQ ID NO: 3640051 - DNA, 25 bp, Homo sapien
ctgtccaccagagcagcaaatactc

SEQ ID NO: 3640052 - DNA, 25 bp, Homo sapien
tttttcgggtcatttctggctgacc

SEQ ID NO: 3640053 - DNA, 25 bp, Homo sapien
tctgatggtcaatcacatgtgttcc

SEQ ID NO: 3640054 - DNA, 25 bp, Homo sapien
taattgagctacttgtctactgacc

SEQ ID NO: 3640055 - DNA, 25 bp, Homo sapien
tcagatacagactcttgggtggaaa

SEQ ID NO: 3640056 - DNA, 25 bp, Homo sapien
taagccatttggaagccattcgaat

SEQ ID NO: 3640057 - DNA, 25 bp, Homo sapien
agtaaaagccttttgcttctgggag

SEQ ID NO: 3640058 - DNA, 25 bp, Homo sapien
tggaagtaaaagccttttgcttctg

SEQ ID NO: 3640059 - DNA, 25 bp, Homo sapien
atcatttaaacacagtacaacagca

SEQ ID NO: 3640060 - DNA, 25 bp, Homo sapien
gctttccaaaggaagttagagaatc

SEQ ID NO: 3640061 - DNA, 25 bp, Homo sapien
cagccgtgccattcgtcaagcctgt

SEQ ID NO: 3640062 - DNA, 25 bp, Homo sapien
aagtcctccattcagagccgccata

SEQ ID NO: 3640063 - DNA, 25 bp, Homo sapien
agcctgtggcgccaagtcctccatt

SEQ ID NO: 3640064 - DNA, 25 bp, Homo sapien
gccattcgtcaagcctgtggcgcca

SEQ ID NO: 3640065 - DNA, 25 bp, Homo sapien
gctctggctgtacagagtgggcagc

SEQ ID NO: 3640066 - DNA, 25 bp, Homo sapien
cgcggcggctgcgtactgttgaatt

SEQ ID NO: 3640067 - DNA, 25 bp, Homo sapien
gcgtactgttgaattcctgagtagg

SEQ ID NO: 3640068 - DNA, 25 bp, Homo sapien
gctgtacagagtgggcagcgcggcg

SEQ ID NO: 3640069 - DNA, 25 bp, Homo sapien
ccgtgctctagaggccagtgctgcc

SEQ ID NO: 3640070 - DNA, 25 bp, Homo sapien
gctttctgttatgacatgggttcag

SEQ ID NO: 3640071 - DNA, 25 bp, Homo sapien
ctgttatgacatgggttcagttcaa

SEQ ID NO: 3640072 - DNA, 25 bp, Homo sapien
tcaatttgataccttctaaccgtgc

SEQ ID NO: 3640073 - DNA, 25 bp, Homo sapien
tagagtttactggaaggccctgctc

SEQ ID NO: 3640074 - DNA, 25 bp, Homo sapien
gtgggctcagatgaaacctcagaaa

SEQ ID NO: 3640075 - DNA, 25 bp, Homo sapien
aactccaggcgagtaagttgagggc

SEQ ID NO: 3640076 - DNA, 25 bp, Homo sapien
tctgtagtggagaggtgaccaccat

SEQ ID NO: 3640077 - DNA, 25 bp, Homo sapien
tcctgggtggtatgtctgatggtca

SEQ ID NO: 3640078 - DNA, 25 bp, Homo sapien
gatatatccgtattctagggcatgg

SEQ ID NO: 3640079 - DNA, 25 bp, Homo sapien
gaaaacttcttgaggcaaactatgg

SEQ ID NO: 3640080 - DNA, 25 bp, Homo sapien
caaactatggaagccacagagtgaa

SEQ ID NO: 3640081 - DNA, 25 bp, Homo sapien
ccgtattttctcaggtacggacagg

SEQ ID NO: 3640082 - DNA, 25 bp, Homo sapien
gtgccactgccccttggcatatgca

SEQ ID NO: 3640083 - DNA, 25 bp, Homo sapien
ctgacagtcttctgtgagtcacagg

SEQ ID NO: 3640084 - DNA, 25 bp, Homo sapien
tggcatatgcatttcagtcaccttt

SEQ ID NO: 3640085 - DNA, 25 bp, Homo sapien
cagagtaaggtatcccttgagtctt

SEQ ID NO: 3640086 - DNA, 25 bp, Homo sapien
aagtcagagtaaggtatcccttgag

SEQ ID NO: 3640087 - DNA, 25 bp, Homo sapien
agtaaggtatcccttgagtcttagt

SEQ ID NO: 3640088 - DNA, 25 bp, Homo sapien
aaaagtcagagtaaggtatcccttg

SEQ ID NO: 3640089 - DNA, 25 bp, Homo sapien
gactttagcagagataacatttcca

SEQ ID NO: 3640090 - DNA, 25 bp, Homo sapien
gattggtctgtttgtcaatgaagac

SEQ ID NO: 3640091 - DNA, 25 bp, Homo sapien
tcctgtggaaggtggtaaataaaga

SEQ ID NO: 3640092 - DNA, 25 bp, Homo sapien
tctgcagaatgtcctggtctccaaa

SEQ ID NO: 3640093 - DNA, 25 bp, Homo sapien
tgctatagcgttccacaaaaatgga

SEQ ID NO: 3640094 - DNA, 25 bp, Homo sapien
ggaaaccagtccatcatgctcaaga

SEQ ID NO: 3640095 - DNA, 25 bp, Homo sapien
caagcaaactgggtgctatagcgtt

SEQ ID NO: 3640096 - DNA, 25 bp, Homo sapien
catgctcaagaattgtctgctgaca

SEQ ID NO: 3640097 - DNA, 25 bp, Homo sapien
aagacccagtgacaagaggatcttg

SEQ ID NO: 3640098 - DNA, 25 bp, Homo sapien
tctgtagcaacgacctccaccataa

SEQ ID NO: 3640099 - DNA, 25 bp, Homo sapien
tagcaacgacctccaccataaacag

SEQ ID NO: 3640100 - DNA, 25 bp, Homo sapien
tgaaaaagaactgcaaagacccagt

SEQ ID NO: 3640101 - DNA, 25 bp, Homo sapien
gactggaaatgtggcatcatggagc

SEQ ID NO: 3640102 - DNA, 25 bp, Homo sapien
gaaccccaggtccatacatgctact

SEQ ID NO: 3640103 - DNA, 25 bp, Homo sapien
gaactgatcgtgagtccaccgtgag

SEQ ID NO: 3640104 - DNA, 25 bp, Homo sapien
tactgaactcgctcaaatcattgtg

SEQ ID NO: 3640105 - DNA, 25 bp, Homo sapien
gaaaataccgagagagggagtcagc

SEQ ID NO: 3640106 - DNA, 25 bp, Homo sapien
ggaaaataccgagagagggagtcag

SEQ ID NO: 3640107 - DNA, 25 bp, Homo sapien
ctggaaaataccgagagagggagtc

SEQ ID NO: 3640108 - DNA, 25 bp, Homo sapien
tggaaaataccgagagagggagtca

SEQ ID NO: 3640109 - DNA, 25 bp, Homo sapien
gcaccttcaagcgtttcatgccgat

SEQ ID NO: 3640110 - DNA, 25 bp, Homo sapien
gtttttggaacgcttcagctgcacc

SEQ ID NO: 3640111 - DNA, 25 bp, Homo sapien
cagtaaggtttgctgtcgtttttgg

SEQ ID NO: 3640112 - DNA, 25 bp, Homo sapien
catagcttggatagcagcttgtgca

SEQ ID NO: 3640113 - DNA, 25 bp, Homo sapien
taagaaagctaaaatgagagcaggg

SEQ ID NO: 3640114 - DNA, 25 bp, Homo sapien
aagctaaaatgagagcagggagcct

SEQ ID NO: 3640115 - DNA, 25 bp, Homo sapien
gagcagggagcctctggggttagga

SEQ ID NO: 3640116 - DNA, 25 bp, Homo sapien
aaaatgagagcagggagcctctggg

SEQ ID NO: 3640117 - DNA, 25 bp, Homo sapien
ccgtctctcttggtaaaagttggca

SEQ ID NO: 3640118 - DNA, 25 bp, Homo sapien
agacaggctggctcgtgggacttac

SEQ ID NO: 3640119 - DNA, 25 bp, Homo sapien
ctctgccttccctgttgagacaggc

SEQ ID NO: 3640120 - DNA, 25 bp, Homo sapien
attgtaaaaataaccgtctctcttg

SEQ ID NO: 3640121 - DNA, 25 bp, Homo sapien
tcagagttagaattgcacattagcg

SEQ ID NO: 3640122 - DNA, 25 bp, Homo sapien
caagccgatgtagtggaaagacgtg

SEQ ID NO: 3640123 - DNA, 25 bp, Homo sapien
gattcaaatcgcaaaacaaaggaga

SEQ ID NO: 3640124 - DNA, 25 bp, Homo sapien
taggccaccaagttaacctctaagc

SEQ ID NO: 3640125 - DNA, 25 bp, Homo sapien
tacacagaatctatgcagcggcaac

SEQ ID NO: 3640126 - DNA, 25 bp, Homo sapien
ccatctggagagagcgaaacgggat

SEQ ID NO: 3640127 - DNA, 25 bp, Homo sapien
gagaactgctctttaggtacccaat

SEQ ID NO: 3640128 - DNA, 25 bp, Homo sapien
tcttaggtcattagggagtctccga

SEQ ID NO: 3640129 - DNA, 25 bp, Homo sapien
cacagggacatgctaggcaaacgat

SEQ ID NO: 3640130 - DNA, 25 bp, Homo sapien
ggcaaacgatgaactaacgggcatg

SEQ ID NO: 3640131 - DNA, 25 bp, Homo sapien
ccagtgaccgggaagaatgccaatc

SEQ ID NO: 3640132 - DNA, 25 bp, Homo sapien
cacactgaagctctaggaaggaagt

SEQ ID NO: 3640133 - DNA, 25 bp, Homo sapien
ggaaggccccagcagtagtaaacac

SEQ ID NO: 3640134 - DNA, 25 bp, Homo sapien
gatgaactcgttacgcctttgagga

SEQ ID NO: 3640135 - DNA, 25 bp, Homo sapien
tgattccagagtagcacaagccaac

SEQ ID NO: 3640136 - DNA, 25 bp, Homo sapien
gaaacactcgattcagagggcgcgt

SEQ ID NO: 3640137 - DNA, 25 bp, Homo sapien
cacggttatgttcacaatgaggaca

SEQ ID NO: 3640138 - DNA, 25 bp, Homo sapien
aaatggtcttacagtttccactagg

SEQ ID NO: 3640139 - DNA, 25 bp, Homo sapien
tccacttaaagtgactgagtacttc

SEQ ID NO: 3640140 - DNA, 25 bp, Homo sapien
aagtttgactgtttcaactacacgg

SEQ ID NO: 3640141 - DNA, 25 bp, Homo sapien
taagaactgcgtggatagactcatg

SEQ ID NO: 3640142 - DNA, 25 bp, Homo sapien
cagagggagcaaacatcgacggaat

SEQ ID NO: 3640143 - DNA, 25 bp, Homo sapien
gaaaatacaatctcgggccagaggg

SEQ ID NO: 3640144 - DNA, 25 bp, Homo sapien
tactgggagagatttcactggcacg

SEQ ID NO: 3640145 - DNA, 25 bp, Homo sapien
gtatcactcaagacttaaaagaaca

SEQ ID NO: 3640146 - DNA, 25 bp, Homo sapien
aatcacattaactttacacacaaca

SEQ ID NO: 3640147 - DNA, 25 bp, Homo sapien
tgtatcactcaagacttaaaagaac

SEQ ID NO: 3640148 - DNA, 25 bp, Homo sapien
tcacattaactttacacacaacaga

SEQ ID NO: 3640149 - DNA, 25 bp, Homo sapien
tccaaagtcaatttattgaatatta

SEQ ID NO: 3640150 - DNA, 25 bp, Homo sapien
caaagtcaatttattgaatattaag

SEQ ID NO: 3640151 - DNA, 25 bp, Homo sapien
caatttattgaatattaagtcataa

SEQ ID NO: 3640152 - DNA, 25 bp, Homo sapien
gtcaatttattgaatattaagtcat

SEQ ID NO: 3640153 - DNA, 25 bp, Homo sapien
tggggcccgtaacaacctaatgtca

SEQ ID NO: 3640154 - DNA, 25 bp, Homo sapien
tgactggttgtttttgacgttggtg

SEQ ID NO: 3640155 - DNA, 25 bp, Homo sapien
ctgaaatcccaaggtccctaatttg

SEQ ID NO: 3640156 - DNA, 25 bp, Homo sapien
tgtttttgacgttggtgatccttat

SEQ ID NO: 3640157 - DNA, 25 bp, Homo sapien
caggtatgtattcttggccagggca

SEQ ID NO: 3640158 - DNA, 25 bp, Homo sapien
tatttcagggtcacactagcaggta

SEQ ID NO: 3640159 - DNA, 25 bp, Homo sapien
tctccagcagttggccagaagacgc

SEQ ID NO: 3640160 - DNA, 25 bp, Homo sapien
cctgagggatcgaggtggcacaaca

SEQ ID NO: 3640161 - DNA, 25 bp, Homo sapien
cttcttgctttgagaggcgattcca

SEQ ID NO: 3640162 - DNA, 25 bp, Homo sapien
gtgtggaaggactcagctctgactc

SEQ ID NO: 3640163 - DNA, 25 bp, Homo sapien
gcgattccaatctccataaccatgg

SEQ ID NO: 3640164 - DNA, 25 bp, Homo sapien
gctctgactccgtgggaccctagat

SEQ ID NO: 3640165 - DNA, 25 bp, Homo sapien
tattttctgactgaaccacatcttc

SEQ ID NO: 3640166 - DNA, 25 bp, Homo sapien
ctaccgtcccgctggacagtagtaa

SEQ ID NO: 3640167 - DNA, 25 bp, Homo sapien
attccacaggacatacgcagcccat

SEQ ID NO: 3640168 - DNA, 25 bp, Homo sapien
atcttttctaccgtcccgctggaca

SEQ ID NO: 3640169 - DNA, 25 bp, Homo sapien
ttcaagcaggttgctggaaataatg

SEQ ID NO: 3640170 - DNA, 25 bp, Homo sapien
gtcctacttgccaggctctgagaag

SEQ ID NO: 3640171 - DNA, 25 bp, Homo sapien
aggtgtgcaccagtagccataggga

SEQ ID NO: 3640172 - DNA, 25 bp, Homo sapien
ctggctgttgattcaagcaggttgc

SEQ ID NO: 3640173 - DNA, 25 bp, Homo sapien
tcttggagggcaaagtatgggatgc

SEQ ID NO: 3640174 - DNA, 25 bp, Homo sapien
tgggatgctgttggagtcttgtcgc

SEQ ID NO: 3640175 - DNA, 25 bp, Homo sapien
atgctgttggagtcttgtcgcctgg

SEQ ID NO: 3640176 - DNA, 25 bp, Homo sapien
gagggcaaagtatgggatgctgttg

SEQ ID NO: 3640177 - DNA, 25 bp, Homo sapien
accagatccgctttccataaaaggc

SEQ ID NO: 3640178 - DNA, 25 bp, Homo sapien
cagctcctggacttgcacaaaaacc

SEQ ID NO: 3640179 - DNA, 25 bp, Homo sapien
cacaaaaacccaatatggaccacag

SEQ ID NO: 3640180 - DNA, 25 bp, Homo sapien
cacagagctactgggtgaaccagat

SEQ ID NO: 3640181 - DNA, 25 bp, Homo sapien
gagccagacatctgccaaccctcat

SEQ ID NO: 3640182 - DNA, 25 bp, Homo sapien
ccagcgccgtgggaacatcctctgt

SEQ ID NO: 3640183 - DNA, 25 bp, Homo sapien
gccgtgggaacatcctctgtcttga

SEQ ID NO: 3640184 - DNA, 25 bp, Homo sapien
actcagcattggatgattcatgatc

SEQ ID NO: 3640185 - DNA, 25 bp, Homo sapien
gggttttcgtgcacagccacatgga

SEQ ID NO: 3640186 - DNA, 25 bp, Homo sapien
agccccaaggactgcagggttttcg

SEQ ID NO: 3640187 - DNA, 25 bp, Homo sapien
gtggaccaaccacattctcgctctg

SEQ ID NO: 3640188 - DNA, 25 bp, Homo sapien
tcatacgaccgcttcctgctggtgt

SEQ ID NO: 3640189 - DNA, 25 bp, Homo sapien
ctgagctgactgtgcctggatctct

SEQ ID NO: 3640190 - DNA, 25 bp, Homo sapien
accccagtgaatagatggaggatct

SEQ ID NO: 3640191 - DNA, 25 bp, Homo sapien
tctgctcggccaccgttctcctgag

SEQ ID NO: 3640192 - DNA, 25 bp, Homo sapien
ggaccccagtgaatagatggaggat

SEQ ID NO: 3640193 - DNA, 25 bp, Homo sapien
agtgaagtggagctaaccacgtggc

SEQ ID NO: 3640194 - DNA, 25 bp, Homo sapien
gggcccgtgcaggtttgttgagtga

SEQ ID NO: 3640195 - DNA, 25 bp, Homo sapien
aagtggagctaaccacgtggctgtg

SEQ ID NO: 3640196 - DNA, 25 bp, Homo sapien
cccgtgcaggtttgttgagtgaagt

SEQ ID NO: 3640197 - DNA, 25 bp, Homo sapien
cctcaggcacgtaggcccgtcttcg

SEQ ID NO: 3640198 - DNA, 25 bp, Homo sapien
aggcacgtaggcccgtcttcgaatc

SEQ ID NO: 3640199 - DNA, 25 bp, Homo sapien
ctcaggcacgtaggcccgtcttcga

SEQ ID NO: 3640200 - DNA, 25 bp, Homo sapien
caggcacgtaggcccgtcttcgaat

SEQ ID NO: 3640201 - DNA, 25 bp, Homo sapien
catccagtccaatcacagttggcaa

SEQ ID NO: 3640202 - DNA, 25 bp, Homo sapien
caagtcggggtgcaatgagcagaca

SEQ ID NO: 3640203 - DNA, 25 bp, Homo sapien
aggtggcccatgaggctccctggct

SEQ ID NO: 3640204 - DNA, 25 bp, Homo sapien
tgtggccatcaagtcggggtgcaat

SEQ ID NO: 3640205 - DNA, 25 bp, Homo sapien
catgttgctgcagtgaggttggaaa

SEQ ID NO: 3640206 - DNA, 25 bp, Homo sapien
aacaagcgcatcaagtggagaggtc

SEQ ID NO: 3640207 - DNA, 25 bp, Homo sapien
agatatggatgaaacaagggtggcc

SEQ ID NO: 3640208 - DNA, 25 bp, Homo sapien
aaagtagtgcatgaggaagcatttc

SEQ ID NO: 3640209 - DNA, 25 bp, Homo sapien
gtgggcctcgcgcatcagttgcctt

SEQ ID NO: 3640210 - DNA, 25 bp, Homo sapien
cgcgcatcagttgcctttctgggtt

SEQ ID NO: 3640211 - DNA, 25 bp, Homo sapien
gcctcgcgcatcagttgcctttctg

SEQ ID NO: 3640212 - DNA, 25 bp, Homo sapien
tgggcctcgcgcatcagttgccttt

SEQ ID NO: 3640213 - DNA, 25 bp, Homo sapien
gctgacttcagaggcggattcatcg

SEQ ID NO: 3640214 - DNA, 25 bp, Homo sapien
ttttcttaattccagcaccctgcct

SEQ ID NO: 3640215 - DNA, 25 bp, Homo sapien
cttgggggtgccgtcctgattcctt

SEQ ID NO: 3640216 - DNA, 25 bp, Homo sapien
ctttgtcccctgaagcacaccagcc

SEQ ID NO: 3640217 - DNA, 25 bp, Homo sapien
gacaagactccctggtaccagtggg

SEQ ID NO: 3640218 - DNA, 25 bp, Homo sapien
tgttttcacggcacgtgtaccagcg

SEQ ID NO: 3640219 - DNA, 25 bp, Homo sapien
tcaaggcagctgtcgtgtgttttca

SEQ ID NO: 3640220 - DNA, 25 bp, Homo sapien
tcacagtcagatctgttccctggag

SEQ ID NO: 3640221 - DNA, 25 bp, Homo sapien
cagcccgcagtgtcactgtgtgctg

SEQ ID NO: 3640222 - DNA, 25 bp, Homo sapien
gccttcgatgctggcactgtcttgg

SEQ ID NO: 3640223 - DNA, 25 bp, Homo sapien
ttggcgcctggctctacatcatgac

SEQ ID NO: 3640224 - DNA, 25 bp, Homo sapien
ggagccacggccttcgatgctggca

SEQ ID NO: 3640225 - DNA, 25 bp, Homo sapien
ctgcacacagcgctgcctcggatgt

SEQ ID NO: 3640226 - DNA, 25 bp, Homo sapien
cacagcgctgcctcggatgtggcag

SEQ ID NO: 3640227 - DNA, 25 bp, Homo sapien
gcacacagcgctgcctcggatgtgg

SEQ ID NO: 3640228 - DNA, 25 bp, Homo sapien
ctgggggctgcacacagcgctgcct

SEQ ID NO: 3640229 - DNA, 25 bp, Homo sapien
ggcgcgtcgcttcagcagagacctg

SEQ ID NO: 3640230 - DNA, 25 bp, Homo sapien
cagagacctggcaatttgcagggcg

SEQ ID NO: 3640231 - DNA, 25 bp, Homo sapien
ttgaccgagcctttgattcgctcct

SEQ ID NO: 3640232 - DNA, 25 bp, Homo sapien
gggtgagatcaacgtgaaacgtcaa

SEQ ID NO: 3640233 - DNA, 25 bp, Homo sapien
atcagctgatttgcgtggcttggcc

SEQ ID NO: 3640234 - DNA, 25 bp, Homo sapien
gcctggctcgcccagaattctgatt

SEQ ID NO: 3640235 - DNA, 25 bp, Homo sapien
gacacatcagctgatttgcgtggct

SEQ ID NO: 3640236 - DNA, 25 bp, Homo sapien
tttgcgtggcttggcctggctcgcc

SEQ ID NO: 3640237 - DNA, 25 bp, Homo sapien
cccatttaaccggtcagttatggca

SEQ ID NO: 3640238 - DNA, 25 bp, Homo sapien
gcaatccctgggtccagttggaaaa

SEQ ID NO: 3640239 - DNA, 25 bp, Homo sapien
ggtcagttatggcaatccctgggtc

SEQ ID NO: 3640240 - DNA, 25 bp, Homo sapien
ttaaccggtcagttatggcaatccc

SEQ ID NO: 3640241 - DNA, 25 bp, Homo sapien
cgttccgcagttccacaagccaata

SEQ ID NO: 3640242 - DNA, 25 bp, Homo sapien
tccctcccagatgcaggtgtcctgg

SEQ ID NO: 3640243 - DNA, 25 bp, Homo sapien
ccatgatgctcagcggttcttgttg

SEQ ID NO: 3640244 - DNA, 25 bp, Homo sapien
cctgatgaagacgactagttgggct

SEQ ID NO: 3640245 - DNA, 25 bp, Homo sapien
gtaagaaatggaaagccctcagtac

SEQ ID NO: 3640246 - DNA, 25 bp, Homo sapien
agacctggtgctgtaagaaatggaa

SEQ ID NO: 3640247 - DNA, 25 bp, Homo sapien
gctgtaagaaatggaaagccctcag

SEQ ID NO: 3640248 - DNA, 25 bp, Homo sapien
tcagagacctggtgctgtaagaaat

SEQ ID NO: 3640249 - DNA, 25 bp, Homo sapien
tcgtgctgcctgagacatcgtggga

SEQ ID NO: 3640250 - DNA, 25 bp, Homo sapien
gctgcctgagacatcgtgggaattc

SEQ ID NO: 3640251 - DNA, 25 bp, Homo sapien
aatgcagctcattctcgtgctgcct

SEQ ID NO: 3640252 - DNA, 25 bp, Homo sapien
ctgagacatcgtgggaattcctcat

SEQ ID NO: 3640253 - DNA, 25 bp, Homo sapien
gaactgggtgggtcccacggcagct

SEQ ID NO: 3640254 - DNA, 25 bp, Homo sapien
gcgtgacaccactgtgcaggtttgt

SEQ ID NO: 3640255 - DNA, 25 bp, Homo sapien
gccagtgcgtgacaccactgtgcag

SEQ ID NO: 3640256 - DNA, 25 bp, Homo sapien
ccagaactgggtgggtcccacggca

SEQ ID NO: 3640257 - DNA, 25 bp, Homo sapien
tctgagaactccatgattggaaagg

SEQ ID NO: 3640258 - DNA, 25 bp, Homo sapien
actgcagcgtggaggccgatatctg

SEQ ID NO: 3640259 - DNA, 25 bp, Homo sapien
tgagatcgccctcttccacggagag

SEQ ID NO: 3640260 - DNA, 25 bp, Homo sapien
tgtcatactgaagccggcagctcct

SEQ ID NO: 3640261 - DNA, 25 bp, Homo sapien
tgcttggggaaatggtctgcttgcc

SEQ ID NO: 3640262 - DNA, 25 bp, Homo sapien
tgctgcttggggaaatggtctgctt

SEQ ID NO: 3640263 - DNA, 25 bp, Homo sapien
gggaaatggtctgcttgccttctgc

SEQ ID NO: 3640264 - DNA, 25 bp, Homo sapien
cttggggaaatggtctgcttgcctt

SEQ ID NO: 3640265 - DNA, 25 bp, Homo sapien
ttctcggagccgtgtgtcgttgcca

SEQ ID NO: 3640266 - DNA, 25 bp, Homo sapien
tgccaaagggtttatggcctcttaa

SEQ ID NO: 3640267 - DNA, 25 bp, Homo sapien
catgcgtgtgttctcggagccgtgt

SEQ ID NO: 3640268 - DNA, 25 bp, Homo sapien
tgtgtcgttgccaaagggtttatgg

SEQ ID NO: 3640269 - DNA, 25 bp, Homo sapien
tgcatctccaggcacggctgcttgt

SEQ ID NO: 3640270 - DNA, 25 bp, Homo sapien
agggtaaagcctccccacgagcatt

SEQ ID NO: 3640271 - DNA, 25 bp, Homo sapien
aaaacctcagtacaagcaggctgcg

SEQ ID NO: 3640272 - DNA, 25 bp, Homo sapien
gaaggcctggtatatctgcatctcc

SEQ ID NO: 3640273 - DNA, 25 bp, Homo sapien
gcagaagggagtaacgcctgcaccc

SEQ ID NO: 3640274 - DNA, 25 bp, Homo sapien
gtggcgtttgttcatctgcagtgtc

SEQ ID NO: 3640275 - DNA, 25 bp, Homo sapien
agggagtaacgcctgcaccctggcc

SEQ ID NO: 3640276 - DNA, 25 bp, Homo sapien
ggccaatgaggtggcgtttgttcat

SEQ ID NO: 3640277 - DNA, 25 bp, Homo sapien
tatgatcccttggagtcccatggcc

SEQ ID NO: 3640278 - DNA, 25 bp, Homo sapien
cttgggagaagcctgtgacatcaca

SEQ ID NO: 3640279 - DNA, 25 bp, Homo sapien
ggcattctgtccgatgagcgtgaat

SEQ ID NO: 3640280 - DNA, 25 bp, Homo sapien
taagcctgagtccaggtgcttggga

SEQ ID NO: 3640281 - DNA, 25 bp, Homo sapien
ctgccaggaggccccgagtagcagc

SEQ ID NO: 3640282 - DNA, 25 bp, Homo sapien
gctgccaggaggccccgagtagcag

SEQ ID NO: 3640283 - DNA, 25 bp, Homo sapien
tctctcgggagtctgagttggcagt

SEQ ID NO: 3640284 - DNA, 25 bp, Homo sapien
agccctcctaagctctctcgggagt

SEQ ID NO: 3640285 - DNA, 25 bp, Homo sapien
tggcacccggcactgcatttcaagc

SEQ ID NO: 3640286 - DNA, 25 bp, Homo sapien
ctgacattcccacgccatggctgaa

SEQ ID NO: 3640287 - DNA, 25 bp, Homo sapien
tttctgttcgaggaaggtgagggac

SEQ ID NO: 3640288 - DNA, 25 bp, Homo sapien
cttctctttctgttcgaggaaggtg

SEQ ID NO: 3640289 - DNA, 25 bp, Homo sapien
ttctgttcgaggaaggtgagggaca

SEQ ID NO: 3640290 - DNA, 25 bp, Homo sapien
ctctttctgttcgaggaaggtgagg

SEQ ID NO: 3640291 - DNA, 25 bp, Homo sapien
tgtttgggccgcttgacacagttag

SEQ ID NO: 3640292 - DNA, 25 bp, Homo sapien
ctggcactgttactgataatggttg

SEQ ID NO: 3640293 - DNA, 25 bp, Homo sapien
gccgcttgacacagttagggacgtg

SEQ ID NO: 3640294 - DNA, 25 bp, Homo sapien
ggttggccctccatagggtctttca

SEQ ID NO: 3640295 - DNA, 25 bp, Homo sapien
gcatgacaggctttcgggaagggtg

SEQ ID NO: 3640296 - DNA, 25 bp, Homo sapien
agcatgacaggctttcgggaagggt

SEQ ID NO: 3640297 - DNA, 25 bp, Homo sapien
catgacaggctttcgggaagggtgg

SEQ ID NO: 3640298 - DNA, 25 bp, Homo sapien
tccaagcatccggagcttgtctgga

SEQ ID NO: 3640299 - DNA, 25 bp, Homo sapien
cccctgtaattgtcgtgtgagtgtg

SEQ ID NO: 3640300 - DNA, 25 bp, Homo sapien
gaagggacagccatcacctggcacc

SEQ ID NO: 3640301 - DNA, 25 bp, Homo sapien
tgacccacgacaaggatccaagcat

SEQ ID NO: 3640302 - DNA, 25 bp, Homo sapien
gagcagcagcggacattggagttct

SEQ ID NO: 3640303 - DNA, 25 bp, Homo sapien
agggatgggacgcagtcaccttcca

SEQ ID NO: 3640304 - DNA, 25 bp, Homo sapien
gatgtgagttgtcgtcctgctgagc

SEQ ID NO: 3640305 - DNA, 25 bp, Homo sapien
gctccgtgagcactccagggtgtca

SEQ ID NO: 3640306 - DNA, 25 bp, Homo sapien
cacaggcacaagtgggaagtgatgc

SEQ ID NO: 3640307 - DNA, 25 bp, Homo sapien
gaagtgatgcagctcaaaggtttgg

SEQ ID NO: 3640308 - DNA, 25 bp, Homo sapien
gatgtgcagcgattgagtcgtagct

SEQ ID NO: 3640309 - DNA, 25 bp, Homo sapien
gacttgacaatgaggagctctctgc

SEQ ID NO: 3640310 - DNA, 25 bp, Homo sapien
tgcataggttatatcccagaccact

SEQ ID NO: 3640311 - DNA, 25 bp, Homo sapien
aagctgttacatccctctgaagttg

SEQ ID NO: 3640312 - DNA, 25 bp, Homo sapien
taagagcagatcttgacccttgctg

SEQ ID NO: 3640313 - DNA, 25 bp, Homo sapien
tgacccaaagtcgtgagaataggaa

SEQ ID NO: 3640314 - DNA, 25 bp, Homo sapien
gatttaggcactccaagagagtatg

SEQ ID NO: 3640315 - DNA, 25 bp, Homo sapien
gggagcttgttttcaacattgctta

SEQ ID NO: 3640316 - DNA, 25 bp, Homo sapien
gaaaacccgacattgatgtttcttc

SEQ ID NO: 3640317 - DNA, 25 bp, Homo sapien
gaagtaacgtttgtttagctagtga

SEQ ID NO: 3640318 - DNA, 25 bp, Homo sapien
gatattcgggcaattcagggtcacc

SEQ ID NO: 3640319 - DNA, 25 bp, Homo sapien
tatacatacagacctgagacgcagg

SEQ ID NO: 3640320 - DNA, 25 bp, Homo sapien
aatcatggacccgagatgctagccg

SEQ ID NO: 3640321 - DNA, 25 bp, Homo sapien
tacaggaatcgggacgggctttcca

SEQ ID NO: 3640322 - DNA, 25 bp, Homo sapien
tcaggccaggagttatgctatgcgc

SEQ ID NO: 3640323 - DNA, 25 bp, Homo sapien
acctgtgacttgctagtggtgagcc

SEQ ID NO: 3640324 - DNA, 25 bp, Homo sapien
ggaaaatagtagagccctgcactgt

SEQ ID NO: 3640325 - DNA, 25 bp, Homo sapien
tagtgagtaccagccattagtgtca

SEQ ID NO: 3640326 - DNA, 25 bp, Homo sapien
gatttagattagacaggagtcccac

SEQ ID NO: 3640327 - DNA, 25 bp, Homo sapien
ttctgtggaatgtcgcacactcagg

SEQ ID NO: 3640328 - DNA, 25 bp, Homo sapien
tcctctgaatgacactgagctgctg

SEQ ID NO: 3640329 - DNA, 25 bp, Homo sapien
tgaagagcacagtcccactattctg

SEQ ID NO: 3640330 - DNA, 25 bp, Homo sapien
tcaggtgtgtggacgtcgctgctgc

SEQ ID NO: 3640331 - DNA, 25 bp, Homo sapien
tgccactggcgttggagcctaagca

SEQ ID NO: 3640332 - DNA, 25 bp, Homo sapien
ggtgtgtggacgtcgctgctgccac

SEQ ID NO: 3640333 - DNA, 25 bp, Homo sapien
ccactggcgttggagcctaagcagg

SEQ ID NO: 3640334 - DNA, 25 bp, Homo sapien
ccccacctcacccttccaaagcgct

SEQ ID NO: 3640335 - DNA, 25 bp, Homo sapien
tgatccccccacctcacccttccaa

SEQ ID NO: 3640336 - DNA, 25 bp, Homo sapien
ggatccttgttgacagattctcttg

SEQ ID NO: 3640337 - DNA, 25 bp, Homo sapien
taatgctagaggatccttgttgaca

SEQ ID NO: 3640338 - DNA, 25 bp, Homo sapien
ttgcccttatttaatgctagaggat

SEQ ID NO: 3640339 - DNA, 25 bp, Homo sapien
gacagattctcttgttaagcctttg

SEQ ID NO: 3640340 - DNA, 25 bp, Homo sapien
cagatgactgcggtggtaaaggata

SEQ ID NO: 3640341 - DNA, 25 bp, Homo sapien
gaaggtggaacacggcagcttcacc

SEQ ID NO: 3640342 - DNA, 25 bp, Homo sapien
tgggctggtctgctgttcacgcgta

SEQ ID NO: 3640343 - DNA, 25 bp, Homo sapien
tggtaaaggatatgtttctctgggc

SEQ ID NO: 3640344 - DNA, 25 bp, Homo sapien
taaggaaaggcgcttctccattgcc

SEQ ID NO: 3640345 - DNA, 25 bp, Homo sapien
tgccattatcttatccgggtttcca

SEQ ID NO: 3640346 - DNA, 25 bp, Homo sapien
ctcttctggataaggaaaggcgctt

SEQ ID NO: 3640347 - DNA, 25 bp, Homo sapien
ctttactgctgttagagtctctctt

SEQ ID NO: 3640348 - DNA, 25 bp, Homo sapien
catgattccaaatgcaggtgcgtgt

SEQ ID NO: 3640349 - DNA, 25 bp, Homo sapien
ggtgcgtgttctccgcgtccttctg

SEQ ID NO: 3640350 - DNA, 25 bp, Homo sapien
tgcaggtgcgtgttctccgcgtcct

SEQ ID NO: 3640351 - DNA, 25 bp, Homo sapien
tccaaatgcaggtgcgtgttctccg

SEQ ID NO: 3640352 - DNA, 25 bp, Homo sapien
ttgaatttcggtgtttgatggtgtc

SEQ ID NO: 3640353 - DNA, 25 bp, Homo sapien
ggtagcctgtgcctttcatgtttga

SEQ ID NO: 3640354 - DNA, 25 bp, Homo sapien
gatggtgtcttgtatactgcttacc

SEQ ID NO: 3640355 - DNA, 25 bp, Homo sapien
taggatcagtgttgcagatgtaagt

SEQ ID NO: 3640356 - DNA, 25 bp, Homo sapien
cagcagatccaacctgagtctccaa

SEQ ID NO: 3640357 - DNA, 25 bp, Homo sapien
cccagcagatccaacctgagtctcc

SEQ ID NO: 3640358 - DNA, 25 bp, Homo sapien
ccagcagatccaacctgagtctcca

SEQ ID NO: 3640359 - DNA, 25 bp, Homo sapien
gccgtttccatagcggcggcaggag

SEQ ID NO: 3640360 - DNA, 25 bp, Homo sapien
gctcggcttcgccgggatcctcttg

SEQ ID NO: 3640361 - DNA, 25 bp, Homo sapien
ccgtactgaggtaacttccattcct

SEQ ID NO: 3640362 - DNA, 25 bp, Homo sapien
gctgcccacagcctagcagtcggga

SEQ ID NO: 3640363 - DNA, 25 bp, Homo sapien
ctgcggtgacggttggcggcggccg

SEQ ID NO: 3640364 - DNA, 25 bp, Homo sapien
aaggggccgcgccaatatggcggcg

SEQ ID NO: 3640365 - DNA, 25 bp, Homo sapien
gccgggaaggggccgcgccaatatg

SEQ ID NO: 3640366 - DNA, 25 bp, Homo sapien
gcggccgctgcggtgacggttggcg

SEQ ID NO: 3640367 - DNA, 25 bp, Homo sapien
gcgggagtgcgggagcggagcgcac

SEQ ID NO: 3640368 - DNA, 25 bp, Homo sapien
cgggagcgcgcacggcgggagtgcg

SEQ ID NO: 3640369 - DNA, 25 bp, Homo sapien
gggcgggagcgcgcacggcgggagt

SEQ ID NO: 3640370 - DNA, 25 bp, Homo sapien
gagcgcgcacggcgggagtgcggga

SEQ ID NO: 3640371 - DNA, 25 bp, Homo sapien
tatcctctgacctgccggctggaca

SEQ ID NO: 3640372 - DNA, 25 bp, Homo sapien
ctgccggctggacacgccaatgtcg

SEQ ID NO: 3640373 - DNA, 25 bp, Homo sapien
aatgtcgctcgtttgcgtgccccga

SEQ ID NO: 3640374 - DNA, 25 bp, Homo sapien
gacacgccaatgtcgctcgtttgcg

SEQ ID NO: 3640375 - DNA, 25 bp, Homo sapien
caggtcctattatcattccacttta

SEQ ID NO: 3640376 - DNA, 25 bp, Homo sapien
ggaaaagtgtccaagggctgacacc

SEQ ID NO: 3640377 - DNA, 25 bp, Homo sapien
cacctggtaagtagttgaggcagaa

SEQ ID NO: 3640378 - DNA, 25 bp, Homo sapien
caagcactcgcttgttccaggacag

SEQ ID NO: 3640379 - DNA, 25 bp, Homo sapien
gaaagttatcttaatggaagggaga

SEQ ID NO: 3640380 - DNA, 25 bp, Homo sapien
ctggtatttagcaagcctacgagag

SEQ ID NO: 3640381 - DNA, 25 bp, Homo sapien
cgagagagccggaaatccacaagga

SEQ ID NO: 3640382 - DNA, 25 bp, Homo sapien
tatcttaatggaagggagagtcaaa

SEQ ID NO: 3640383 - DNA, 25 bp, Homo sapien
cctctcgggctgattggcggtaccc

SEQ ID NO: 3640384 - DNA, 25 bp, Homo sapien
agtcacatgtcaaggaggcatgcag

SEQ ID NO: 3640385 - DNA, 25 bp, Homo sapien
catgtccctgtctgtgtgtaccaca

SEQ ID NO: 3640386 - DNA, 25 bp, Homo sapien
gcaccgcagtgtgagattggcgcct

SEQ ID NO: 3640387 - DNA, 25 bp, Homo sapien
ctgggtgtctcaccaagggtaaatt

SEQ ID NO: 3640388 - DNA, 25 bp, Homo sapien
gtctcaccaagggtaaattctgctg

SEQ ID NO: 3640389 - DNA, 25 bp, Homo sapien
ggtgtctcaccaagggtaaattctg

SEQ ID NO: 3640390 - DNA, 25 bp, Homo sapien
ctcaccaagggtaaattctgctggg

SEQ ID NO: 3640391 - DNA, 25 bp, Homo sapien
aaatggtgggtcacagtaggtacat

SEQ ID NO: 3640392 - DNA, 25 bp, Homo sapien
attgttacaagacctaggattcgac

SEQ ID NO: 3640393 - DNA, 25 bp, Homo sapien
gacctaggattcgacgtcgcatcat

SEQ ID NO: 3640394 - DNA, 25 bp, Homo sapien
gtaggtacattctaatacagaaaac

SEQ ID NO: 3640395 - DNA, 25 bp, Homo sapien
tcaaatttagacaacggaaggccac

SEQ ID NO: 3640396 - DNA, 25 bp, Homo sapien
caggcagaggcgcaaataaaacgtc

SEQ ID NO: 3640397 - DNA, 25 bp, Homo sapien
gtctggacttccgatgccgaaaccg

SEQ ID NO: 3640398 - DNA, 25 bp, Homo sapien
ataaaacgtcggtgagaagcccagc

SEQ ID NO: 3640399 - DNA, 25 bp, Homo sapien
ttcttcctctcacacgctgacttgg

SEQ ID NO: 3640400 - DNA, 25 bp, Homo sapien
ggtttggaatgggatatttctctca

SEQ ID NO: 3640401 - DNA, 25 bp, Homo sapien
ccatcagaggtttggaatgggatat

SEQ ID NO: 3640402 - DNA, 25 bp, Homo sapien
tctcacacgctgacttggccagttt

SEQ ID NO: 3640403 - DNA, 25 bp, Homo sapien
atgatcagtagtcattgtattagtc

SEQ ID NO: 3640404 - DNA, 25 bp, Homo sapien
tccactatgatcagtagtcattgta

SEQ ID NO: 3640405 - DNA, 25 bp, Homo sapien
atccactatgatcagtagtcattgt

SEQ ID NO: 3640406 - DNA, 25 bp, Homo sapien
tcaaacccatggtggccaaatgcaa

SEQ ID NO: 3640407 - DNA, 25 bp, Homo sapien
tagatcttaactacccagtggacgt

SEQ ID NO: 3640408 - DNA, 25 bp, Homo sapien
cagtggacgtcttacctggatatgc

SEQ ID NO: 3640409 - DNA, 25 bp, Homo sapien
tccaaactgtctgtgggatacaagt

SEQ ID NO: 3640410 - DNA, 25 bp, Homo sapien
cctctggtcctctgaacaacacagg

SEQ ID NO: 3640411 - DNA, 25 bp, Homo sapien
cacagggcttttgtatgacatgatc

SEQ ID NO: 3640412 - DNA, 25 bp, Homo sapien
tctgaacaacacagggcttttgtat

SEQ ID NO: 3640413 - DNA, 25 bp, Homo sapien
tgtatgacatgatctcagtcctggg

SEQ ID NO: 3640414 - DNA, 25 bp, Homo sapien
tcaagcttgaaacggcagagtggat

SEQ ID NO: 3640415 - DNA, 25 bp, Homo sapien
attgtgggaaaatgtcactctgccc

SEQ ID NO: 3640416 - DNA, 25 bp, Homo sapien
gccccagtgatcagtctctaagact

SEQ ID NO: 3640417 - DNA, 25 bp, Homo sapien
taccacttgtcccttggatttgcaa

SEQ ID NO: 3640418 - DNA, 25 bp, Homo sapien
taatgttcctattgggcacagagct

SEQ ID NO: 3640419 - DNA, 25 bp, Homo sapien
agtggtggccgatatttaaagttca

SEQ ID NO: 3640420 - DNA, 25 bp, Homo sapien
gactaattgtcacctaaccaaggga

SEQ ID NO: 3640421 - DNA, 25 bp, Homo sapien
caacgctcctaattgctgaatccca

SEQ ID NO: 3640422 - DNA, 25 bp, Homo sapien
taaatagcaacacctccctgtttag

SEQ ID NO: 3640423 - DNA, 25 bp, Homo sapien
ctaaaggagtctttctcagtagcaa

SEQ ID NO: 3640424 - DNA, 25 bp, Homo sapien
gtttctgtgtgtacaccgagctcta

SEQ ID NO: 3640425 - DNA, 25 bp, Homo sapien
tagcaataaatagcaacacctccct

SEQ ID NO: 3640426 - DNA, 25 bp, Homo sapien
cattcctgttcggaggtggatgtca

SEQ ID NO: 3640427 - DNA, 25 bp, Homo sapien
gaactgaagttcacattcctgttcg

SEQ ID NO: 3640428 - DNA, 25 bp, Homo sapien
gttctcgtctccacgtttccagggc

SEQ ID NO: 3640429 - DNA, 25 bp, Homo sapien
caaattgacaattaaaggggaactg

SEQ ID NO: 3640430 - DNA, 25 bp, Homo sapien
ggcagcttctggatttccacgcaag

SEQ ID NO: 3640431 - DNA, 25 bp, Homo sapien
gtgtgattctgggaggcgccaagca

SEQ ID NO: 3640432 - DNA, 25 bp, Homo sapien
tctgatcggacggttctagaagtga

SEQ ID NO: 3640433 - DNA, 25 bp, Homo sapien
cagagggtctctgatcggacggttc

SEQ ID NO: 3640434 - DNA, 25 bp, Homo sapien
tcccgatggtcactaaggatgtgcc

SEQ ID NO: 3640435 - DNA, 25 bp, Homo sapien
ggtcactaaggatgtgcctctccag

SEQ ID NO: 3640436 - DNA, 25 bp, Homo sapien
cttgtcccgatggtcactaaggatg

SEQ ID NO: 3640437 - DNA, 25 bp, Homo sapien
cagccttgtcccgatggtcactaag

SEQ ID NO: 3640438 - DNA, 25 bp, Homo sapien
catgactcgtaagattaggcaggac

SEQ ID NO: 3640439 - DNA, 25 bp, Homo sapien
tctgagaggtttcacgtgggcctcc

SEQ ID NO: 3640440 - DNA, 25 bp, Homo sapien
ctcattgagatgaaaggtggccttc

SEQ ID NO: 3640441 - DNA, 25 bp, Homo sapien
caaggaacaaggtgcaccggctgta

SEQ ID NO: 3640442 - DNA, 25 bp, Homo sapien
aaaaggtattcatagtctgcagtgc

SEQ ID NO: 3640443 - DNA, 25 bp, Homo sapien
aaacaggcctctgccgctttgagag

SEQ ID NO: 3640444 - DNA, 25 bp, Homo sapien
tcaagattccgtcagatcctgaggg

SEQ ID NO: 3640445 - DNA, 25 bp, Homo sapien
gccagccccgagcaaatgaaacaat

SEQ ID NO: 3640446 - DNA, 25 bp, Homo sapien
ctgtctgggaggctgggaggcttcc

SEQ ID NO: 3640447 - DNA, 25 bp, Homo sapien
gctgggaggcttccctgccacaggg

SEQ ID NO: 3640448 - DNA, 25 bp, Homo sapien
tgggaggcttccctgccacaggggc

SEQ ID NO: 3640449 - DNA, 25 bp, Homo sapien
gaggctgggaggcttccctgccaca

SEQ ID NO: 3640450 - DNA, 25 bp, Homo sapien
cgaggggacggccagtgaagtcatt

SEQ ID NO: 3640451 - DNA, 25 bp, Homo sapien
gaggggacggccagtgaagtcattc

SEQ ID NO: 3640452 - DNA, 25 bp, Homo sapien
gaaagtccaaatcaggacaaggagg

SEQ ID NO: 3640453 - DNA, 25 bp, Homo sapien
cggcagcgagtcagatgaggaattc

SEQ ID NO: 3640454 - DNA, 25 bp, Homo sapien
aatccgcgataagcctctagaagcg

SEQ ID NO: 3640455 - DNA, 25 bp, Homo sapien
gccaaatagcggctctcctttccag

SEQ ID NO: 3640456 - DNA, 25 bp, Homo sapien
aaccgtcctgactttgaccttgcag

SEQ ID NO: 3640457 - DNA, 25 bp, Homo sapien
ccttgaaccgtcctgactttgacct

SEQ ID NO: 3640458 - DNA, 25 bp, Homo sapien
tcctgactttgaccttgcagtccag

SEQ ID NO: 3640459 - DNA, 25 bp, Homo sapien
ttgaaccgtcctgactttgaccttg

SEQ ID NO: 3640460 - DNA, 25 bp, Homo sapien
tatttgctccagcactctgaggtgt

SEQ ID NO: 3640461 - DNA, 25 bp, Homo sapien
cctgctatttgctccagcactctga

SEQ ID NO: 3640462 - DNA, 25 bp, Homo sapien
tctgaggtgtgccttggccaccgcc

SEQ ID NO: 3640463 - DNA, 25 bp, Homo sapien
agcactctgaggtgtgccttggcca

SEQ ID NO: 3640464 - DNA, 25 bp, Homo sapien
caagcaaagctgtattggactctat

SEQ ID NO: 3640465 - DNA, 25 bp, Homo sapien
ccgtttggattcgtgtttaagctgt

SEQ ID NO: 3640466 - DNA, 25 bp, Homo sapien
ctgttttgaagatgatggggcgtct

SEQ ID NO: 3640467 - DNA, 25 bp, Homo sapien
tatccgtttggattcgtgtttaagc

SEQ ID NO: 3640468 - DNA, 25 bp, Homo sapien
agcattcgggatggccagacgccgc

SEQ ID NO: 3640469 - DNA, 25 bp, Homo sapien
ggacggaaccgcctgacaggcccag

SEQ ID NO: 3640470 - DNA, 25 bp, Homo sapien
cggaactcgacggaactcgacggtg

SEQ ID NO: 3640471 - DNA, 25 bp, Homo sapien
agacgccgcaggatcgcgctgcctg

SEQ ID NO: 3640472 - DNA, 25 bp, Homo sapien
gccggagacacatgggcccacttgc

SEQ ID NO: 3640473 - DNA, 25 bp, Homo sapien
gcgctggtgggccgcggctccgact

SEQ ID NO: 3640474 - DNA, 25 bp, Homo sapien
gggccgcgccggagacacatgggcc

SEQ ID NO: 3640475 - DNA, 25 bp, Homo sapien
cccgcaagacggcgacggcggccat

SEQ ID NO: 3640476 - DNA, 25 bp, Homo sapien
ctgaccccgactcggcaccaacgcg

SEQ ID NO: 3640477 - DNA, 25 bp, Homo sapien
gactcggcaccaacgcgaggagccc

SEQ ID NO: 3640478 - DNA, 25 bp, Homo sapien
ctgcgcgtctcgctgccaggcccgg

SEQ ID NO: 3640479 - DNA, 25 bp, Homo sapien
ccccgggtcaatggcggcgccctga

SEQ ID NO: 3640480 - DNA, 25 bp, Homo sapien
ttcatatttaattctggagaactcg

SEQ ID NO: 3640481 - DNA, 25 bp, Homo sapien
taattctggagaactcgaccggcct

SEQ ID NO: 3640482 - DNA, 25 bp, Homo sapien
ctggagaactcgaccggcctccttt

SEQ ID NO: 3640483 - DNA, 25 bp, Homo sapien
tatttaattctggagaactcgaccg

SEQ ID NO: 3640484 - DNA, 25 bp, Homo sapien
ttttgaatctgatattccttccgcg

SEQ ID NO: 3640485 - DNA, 25 bp, Homo sapien
ttccgcggtacagccaacttggatc

SEQ ID NO: 3640486 - DNA, 25 bp, Homo sapien
cttggatcctccataaatagtattc

SEQ ID NO: 3640487 - DNA, 25 bp, Homo sapien
ggatcctccataaatagtattctgt

SEQ ID NO: 3640488 - DNA, 25 bp, Homo sapien
aaagctggcgtccaaagggcctgtt

SEQ ID NO: 3640489 - DNA, 25 bp, Homo sapien
aaaaagctggcgtccaaagggcctg

SEQ ID NO: 3640490 - DNA, 25 bp, Homo sapien
aagctggcgtccaaagggcctgttt

SEQ ID NO: 3640491 - DNA, 25 bp, Homo sapien
gctggcgtccaaagggcctgtttgc

SEQ ID NO: 3640492 - DNA, 25 bp, Homo sapien
agctactgcacctaggcccgtcttt

SEQ ID NO: 3640493 - DNA, 25 bp, Homo sapien
tcttttcttacagtggcatcctgta

SEQ ID NO: 3640494 - DNA, 25 bp, Homo sapien
ggcatcctgtaagtttacaaaacaa

SEQ ID NO: 3640495 - DNA, 25 bp, Homo sapien
cacctaggcccgtcttttcttacag

SEQ ID NO: 3640496 - DNA, 25 bp, Homo sapien
ccacctccacggagagggcaatgca

SEQ ID NO: 3640497 - DNA, 25 bp, Homo sapien
gtcagaaacatgactgccacctcca

SEQ ID NO: 3640498 - DNA, 25 bp, Homo sapien
aatgcacagcggttccaaaatcaac

SEQ ID NO: 3640499 - DNA, 25 bp, Homo sapien
gagagggcaatgcacagcggttcca

SEQ ID NO: 3640500 - DNA, 25 bp, Homo sapien
cttgggattgctcaagacgatgttc

SEQ ID NO: 3640501 - DNA, 25 bp, Homo sapien
gacaacgcgttcctcttcttgggat

SEQ ID NO: 3640502 - DNA, 25 bp, Homo sapien
gactttcagatcgttgctgtcagcg

SEQ ID NO: 3640503 - DNA, 25 bp, Homo sapien
ctgtcagcgtcatgaagaatgtcac

SEQ ID NO: 3640504 - DNA, 25 bp, Homo sapien
cttggaacaggtctgaaatacttcg

SEQ ID NO: 3640505 - DNA, 25 bp, Homo sapien
cagctcctttaagtcatgcccagaa

SEQ ID NO: 3640506 - DNA, 25 bp, Homo sapien
aatacttcggcatggtaatcacggc

SEQ ID NO: 3640507 - DNA, 25 bp, Homo sapien
gcatggtaatcacggccttgctcct

SEQ ID NO: 3640508 - DNA, 25 bp, Homo sapien
tatgagtaccatcctatattccact

SEQ ID NO: 3640509 - DNA, 25 bp, Homo sapien
caatgctagacatggcaactatgag

SEQ ID NO: 3640510 - DNA, 25 bp, Homo sapien
ggcaactatgagtaccatcctatat

SEQ ID NO: 3640511 - DNA, 25 bp, Homo sapien
gacatggcaactatgagtaccatcc

SEQ ID NO: 3640512 - DNA, 25 bp, Homo sapien
tttccacccagagggaggcacgaca

SEQ ID NO: 3640513 - DNA, 25 bp, Homo sapien
tcatttccacccagagggaggcacg

SEQ ID NO: 3640514 - DNA, 25 bp, Homo sapien
ccacccagagggaggcacgacatta

SEQ ID NO: 3640515 - DNA, 25 bp, Homo sapien
atttccacccagagggaggcacgac

SEQ ID NO: 3640516 - DNA, 25 bp, Homo sapien
gcaatgtcgcagctggcaaccagtt

SEQ ID NO: 3640517 - DNA, 25 bp, Homo sapien
caaaagaggacttgtcgctcgccac

SEQ ID NO: 3640518 - DNA, 25 bp, Homo sapien
ttgaccatggcaatgacgggaacgg

SEQ ID NO: 3640519 - DNA, 25 bp, Homo sapien
gacgttcaccccaggagtggcaaaa

SEQ ID NO: 3640520 - DNA, 25 bp, Homo sapien
gctttgtggcggaaacagacttcac

SEQ ID NO: 3640521 - DNA, 25 bp, Homo sapien
gattcaacataccacgcacaggaga

SEQ ID NO: 3640522 - DNA, 25 bp, Homo sapien
gatttcacaaattgacgcctggcgt

SEQ ID NO: 3640523 - DNA, 25 bp, Homo sapien
tacgctattctatctcatgggcaac

SEQ ID NO: 3640524 - DNA, 25 bp, Homo sapien
tctgaagacactttagccagccggc

SEQ ID NO: 3640525 - DNA, 25 bp, Homo sapien
tcttgacagaatcgaaaacatcctc

SEQ ID NO: 3640526 - DNA, 25 bp, Homo sapien
gccagccggcacctactgtagtgtg

SEQ ID NO: 3640527 - DNA, 25 bp, Homo sapien
gagaatcccttgaacattgcagtga

SEQ ID NO: 3640528 - DNA, 25 bp, Homo sapien
tcagaacatgagaacagagaccagg

SEQ ID NO: 3640529 - DNA, 25 bp, Homo sapien
ttttcagtgttgaccccaagccatg

SEQ ID NO: 3640530 - DNA, 25 bp, Homo sapien
taaagcaggcccacacaattagatc

SEQ ID NO: 3640531 - DNA, 25 bp, Homo sapien
tgagtggcccagcattaataagccc

SEQ ID NO: 3640532 - DNA, 25 bp, Homo sapien
cacgctcgggtacaaatgaccatca

SEQ ID NO: 3640533 - DNA, 25 bp, Homo sapien
gcagccagcacgctcgggtacaaat

SEQ ID NO: 3640534 - DNA, 25 bp, Homo sapien
accatcaccaagggacacagtgaag

SEQ ID NO: 3640535 - DNA, 25 bp, Homo sapien
gaagccactaactaatgacagcagg

SEQ ID NO: 3640536 - DNA, 25 bp, Homo sapien
acaggcggctcttggggaactcaga

SEQ ID NO: 3640537 - DNA, 25 bp, Homo sapien
tccactgacacaggcggctcttggg

SEQ ID NO: 3640538 - DNA, 25 bp, Homo sapien
gaactcagagggaccaaatgtcaga

SEQ ID NO: 3640539 - DNA, 25 bp, Homo sapien
gctcttggggaactcagagggacca

SEQ ID NO: 3640540 - DNA, 25 bp, Homo sapien
agtgtgccgccaactacccttgtgg

SEQ ID NO: 3640541 - DNA, 25 bp, Homo sapien
caaggaggtgatacagcttgcagct

SEQ ID NO: 3640542 - DNA, 25 bp, Homo sapien
tggttcctttgagacaagggcaagg

SEQ ID NO: 3640543 - DNA, 25 bp, Homo sapien
gaaaacagagtacagcacaagtggc

SEQ ID NO: 3640544 - DNA, 25 bp, Homo sapien
tggaggaaggccgtgatgccctcct

SEQ ID NO: 3640545 - DNA, 25 bp, Homo sapien
tagcgatccgcatggtctcctcctg

SEQ ID NO: 3640546 - DNA, 25 bp, Homo sapien
ccggacggctcagcgatgcgatctt

SEQ ID NO: 3640547 - DNA, 25 bp, Homo sapien
tagaaggtggctttgcccagggaca

SEQ ID NO: 3640548 - DNA, 25 bp, Homo sapien
ttaagacgttgcaaggagcacccca

SEQ ID NO: 3640549 - DNA, 25 bp, Homo sapien
tcagataagggtcaggctggcgtcc

SEQ ID NO: 3640550 - DNA, 25 bp, Homo sapien
gatttgaaatgtgtcgcctctcctg

SEQ ID NO: 3640551 - DNA, 25 bp, Homo sapien
tatcaagtcacgaaagcagcctgtc

SEQ ID NO: 3640552 - DNA, 25 bp, Homo sapien
tatagaaataggaggcacctactct

SEQ ID NO: 3640553 - DNA, 25 bp, Homo sapien
tactctatgccatcagcgtgagcat

SEQ ID NO: 3640554 - DNA, 25 bp, Homo sapien
tttcttagacagcttgcagtgtagc

SEQ ID NO: 3640555 - DNA, 25 bp, Homo sapien
gcgtgagcatacaaaaacagttaat

SEQ ID NO: 3640556 - DNA, 25 bp, Homo sapien
gtaggatgtgtgcaccccacctcct

SEQ ID NO: 3640557 - DNA, 25 bp, Homo sapien
cttaatgcgtaggatgtgtgcaccc

SEQ ID NO: 3640558 - DNA, 25 bp, Homo sapien
aatgcgtaggatgtgtgcaccccac

SEQ ID NO: 3640559 - DNA, 25 bp, Homo sapien
gctcttaatgcgtaggatgtgtgca

SEQ ID NO: 3640560 - DNA, 25 bp, Homo sapien
tcctggaagccgagcatcatttgga

SEQ ID NO: 3640561 - DNA, 25 bp, Homo sapien
ctctcctggaagccgagcatcattt

SEQ ID NO: 3640562 - DNA, 25 bp, Homo sapien
ctcctggaagccgagcatcatttgg

SEQ ID NO: 3640563 - DNA, 25 bp, Homo sapien
cctggaagccgagcatcatttggaa

SEQ ID NO: 3640564 - DNA, 25 bp, Homo sapien
ctgaagccagcaggtcatagactta

SEQ ID NO: 3640565 - DNA, 25 bp, Homo sapien
tgaagccagcaggtcatagacttag

SEQ ID NO: 3640566 - DNA, 25 bp, Homo sapien
gaagccagcaggtcatagacttagg

SEQ ID NO: 3640567 - DNA, 25 bp, Homo sapien
agccagcaggtcatagacttaggtc

SEQ ID NO: 3640568 - DNA, 25 bp, Homo sapien
ctggttttaaacaatcagccttacg

SEQ ID NO: 3640569 - DNA, 25 bp, Homo sapien
tgggacatttcttgggccacgtttg

SEQ ID NO: 3640570 - DNA, 25 bp, Homo sapien
tcagccttacggcaatcttgaggac

SEQ ID NO: 3640571 - DNA, 25 bp, Homo sapien
gggacatttcttgggccacgtttga

SEQ ID NO: 3640572 - DNA, 25 bp, Homo sapien
tccttgtctggactcagacagcacc

SEQ ID NO: 3640573 - DNA, 25 bp, Homo sapien
gactcagacagcaccgtgtacctct

SEQ ID NO: 3640574 - DNA, 25 bp, Homo sapien
tctggactcagacagcaccgtgtac

SEQ ID NO: 3640575 - DNA, 25 bp, Homo sapien
ttgtctggactcagacagcaccgtg

SEQ ID NO: 3640576 - DNA, 25 bp, Homo sapien
tctaggacagtggtctcacctgcgg

SEQ ID NO: 3640577 - DNA, 25 bp, Homo sapien
gaataaagcgggactccggcatcac

SEQ ID NO: 3640578 - DNA, 25 bp, Homo sapien
taactcagggcttgagaactcccaa

SEQ ID NO: 3640579 - DNA, 25 bp, Homo sapien
tgtaacagtaaactcacctgccggg

SEQ ID NO: 3640580 - DNA, 25 bp, Homo sapien
cacggctgccaaggcgggctttctc

SEQ ID NO: 3640581 - DNA, 25 bp, Homo sapien
cacacgccaccctttcgggaaggtg

SEQ ID NO: 3640582 - DNA, 25 bp, Homo sapien
tgcgcaccgcaggtgatgaaacctg

SEQ ID NO: 3640583 - DNA, 25 bp, Homo sapien
aggaggtctccgcacagacccctga

SEQ ID NO: 3640584 - DNA, 25 bp, Homo sapien
tgagaaaagcccagtgtcgagggtg

SEQ ID NO: 3640585 - DNA, 25 bp, Homo sapien
ccatttcagcaccaaggtctgaact

SEQ ID NO: 3640586 - DNA, 25 bp, Homo sapien
aaaagcccagtgtcgagggtggtgg

SEQ ID NO: 3640587 - DNA, 25 bp, Homo sapien
ggcaggggggacgtctcccatttca

SEQ ID NO: 3640588 - DNA, 25 bp, Homo sapien
ggcttgctgcgggtactctggggaa

SEQ ID NO: 3640589 - DNA, 25 bp, Homo sapien
cccagttctcacaatagaagccata

SEQ ID NO: 3640590 - DNA, 25 bp, Homo sapien
gtgatgacccagttctcacaataga

SEQ ID NO: 3640591 - DNA, 25 bp, Homo sapien
ccagatggttttgtgatgacccagt

SEQ ID NO: 3640592 - DNA, 25 bp, Homo sapien
cagcattgtgtgctatctcgaaggc

SEQ ID NO: 3640593 - DNA, 25 bp, Homo sapien
gtgctatctcgaaggccttccattt

SEQ ID NO: 3640594 - DNA, 25 bp, Homo sapien
cattgtgtgctatctcgaaggcctt

SEQ ID NO: 3640595 - DNA, 25 bp, Homo sapien
ctatccgcagacagcattgtgtgct

SEQ ID NO: 3640596 - DNA, 25 bp, Homo sapien
gcctgaccaccctctctggggtctg

SEQ ID NO: 3640597 - DNA, 25 bp, Homo sapien
ctgaccaccctctctggggtctgat

SEQ ID NO: 3640598 - DNA, 25 bp, Homo sapien
ctagcctgaccaccctctctggggt

SEQ ID NO: 3640599 - DNA, 25 bp, Homo sapien
gaccaccctctctggggtctgatca

SEQ ID NO: 3640600 - DNA, 25 bp, Homo sapien
ttgctctctataaagcccattaggg

SEQ ID NO: 3640601 - DNA, 25 bp, Homo sapien
gctctctataaagcccattagggga

SEQ ID NO: 3640602 - DNA, 25 bp, Homo sapien
tctctataaagcccattaggggact

SEQ ID NO: 3640603 - DNA, 25 bp, Homo sapien
ctctataaagcccattaggggactt

SEQ ID NO: 3640604 - DNA, 25 bp, Homo sapien
caaattgtgtggacattcagcgctc

SEQ ID NO: 3640605 - DNA, 25 bp, Homo sapien
tgatgtcgggcgttcactttgaagt

SEQ ID NO: 3640606 - DNA, 25 bp, Homo sapien
taaagcgttctctatgtgggacatg

SEQ ID NO: 3640607 - DNA, 25 bp, Homo sapien
gacatggcctggacgttaacgggct

SEQ ID NO: 3640608 - DNA, 25 bp, Homo sapien
attgtgaaaggccaggttctctttt

SEQ ID NO: 3640609 - DNA, 25 bp, Homo sapien
tcattgtgaaaggccaggttctctt

SEQ ID NO: 3640610 - DNA, 25 bp, Homo sapien
ttgtgaaaggccaggttctcttttc

SEQ ID NO: 3640611 - DNA, 25 bp, Homo sapien
ttcattgtgaaaggccaggttctct

SEQ ID NO: 3640612 - DNA, 25 bp, Homo sapien
tggcgcagactgttccgggacgccc

SEQ ID NO: 3640613 - DNA, 25 bp, Homo sapien
gcccgtctggcgcagactgttccgg

SEQ ID NO: 3640614 - DNA, 25 bp, Homo sapien
gggactcaggtgtccacgccgccag

SEQ ID NO: 3640615 - DNA, 25 bp, Homo sapien
ctaccccgggactcaggtgtccacg

SEQ ID NO: 3640616 - DNA, 25 bp, Homo sapien
tcccctagtcagagcgaggagcgcg

SEQ ID NO: 3640617 - DNA, 25 bp, Homo sapien
aggagcgcgccaaggcagggtccgg

SEQ ID NO: 3640618 - DNA, 25 bp, Homo sapien
ccgggctcccctagtcagagcgagg

SEQ ID NO: 3640619 - DNA, 25 bp, Homo sapien
cggcgccgggctcccctagtcagag

SEQ ID NO: 3640620 - DNA, 25 bp, Homo sapien
gaggctgttgatgccactggctgga

SEQ ID NO: 3640621 - DNA, 25 bp, Homo sapien
tggctggacataacccgtgcagagg

SEQ ID NO: 3640622 - DNA, 25 bp, Homo sapien
tcactgtgagttccgcagacagagg

SEQ ID NO: 3640623 - DNA, 25 bp, Homo sapien
aacacaggctttcctatggtggcca

SEQ ID NO: 3640624 - DNA, 25 bp, Homo sapien
tcgccatcactgaaaaagataccaa

SEQ ID NO: 3640625 - DNA, 25 bp, Homo sapien
ctagagaggctgggttttaacaggc

SEQ ID NO: 3640626 - DNA, 25 bp, Homo sapien
ctagtgtcggttcgccatcactgaa

SEQ ID NO: 3640627 - DNA, 25 bp, Homo sapien
gaagtttcctagtgtcggttcgcca

SEQ ID NO: 3640628 - DNA, 25 bp, Homo sapien
gagcatacttacacactacagcagg

SEQ ID NO: 3640629 - DNA, 25 bp, Homo sapien
taagcacggccacatagacagctga

SEQ ID NO: 3640630 - DNA, 25 bp, Homo sapien
tcaaagtgcacacctacacgctagg

SEQ ID NO: 3640631 - DNA, 25 bp, Homo sapien
gggccggcgtgcataccatgaattt

SEQ ID NO: 3640632 - DNA, 25 bp, Homo sapien
tctggctgctaccaacacagaaagg

SEQ ID NO: 3640633 - DNA, 25 bp, Homo sapien
agggcacctgagtctggctgctacc

SEQ ID NO: 3640634 - DNA, 25 bp, Homo sapien
gggcacctgagtctggctgctacca

SEQ ID NO: 3640635 - DNA, 25 bp, Homo sapien
gctgctaccaacacagaaaggaaag

SEQ ID NO: 3640636 - DNA, 25 bp, Homo sapien
cagttagatcagctggatgaggcca

SEQ ID NO: 3640637 - DNA, 25 bp, Homo sapien
gaacatgtggaaacacgtgccggga

SEQ ID NO: 3640638 - DNA, 25 bp, Homo sapien
ttttacatgcatagccaggcccgaa

SEQ ID NO: 3640639 - DNA, 25 bp, Homo sapien
gaaactaagcgtgtcctacgagcca

SEQ ID NO: 3640640 - DNA, 25 bp, Homo sapien
aagtcaaccagtttgaggatgctga

SEQ ID NO: 3640641 - DNA, 25 bp, Homo sapien
aaggcgattgggaaacgctaagtca

SEQ ID NO: 3640642 - DNA, 25 bp, Homo sapien
gtcaaccagtttgaggatgctgact

SEQ ID NO: 3640643 - DNA, 25 bp, Homo sapien
gattgggaaacgctaagtcaaccag

SEQ ID NO: 3640644 - DNA, 25 bp, Homo sapien
cctcagggccggctcgatcacagga

SEQ ID NO: 3640645 - DNA, 25 bp, Homo sapien
ctcagggccggctcgatcacaggaa

SEQ ID NO: 3640646 - DNA, 25 bp, Homo sapien
tcagggccggctcgatcacaggaag

SEQ ID NO: 3640647 - DNA, 25 bp, Homo sapien
gggacgtgtctgagttcatgtcaga

SEQ ID NO: 3640648 - DNA, 25 bp, Homo sapien
cgagagctgctgcttcgactctcca

SEQ ID NO: 3640649 - DNA, 25 bp, Homo sapien
gctgctgcttcgactctccaggctg

SEQ ID NO: 3640650 - DNA, 25 bp, Homo sapien
tgcgtctgatttccggtgggttaca

SEQ ID NO: 3640651 - DNA, 25 bp, Homo sapien
tgacggtggtaaccaaacacccaga

SEQ ID NO: 3640652 - DNA, 25 bp, Homo sapien
ggagacacaggccttagagggtgac

SEQ ID NO: 3640653 - DNA, 25 bp, Homo sapien
gttttgtgagacgaggtgagccctg

SEQ ID NO: 3640654 - DNA, 25 bp, Homo sapien
gaacgctggtgtgaggcagcaccgt

SEQ ID NO: 3640655 - DNA, 25 bp, Homo sapien
gcgagtgcagagctctccgcccttt

SEQ ID NO: 3640656 - DNA, 25 bp, Homo sapien
tatttcttctagaggaagcttcggg

SEQ ID NO: 3640657 - DNA, 25 bp, Homo sapien
tccttgagaaccatgcgagtgcaga

SEQ ID NO: 3640658 - DNA, 25 bp, Homo sapien
tgtgaaggcagacccgacttcagga

SEQ ID NO: 3640659 - DNA, 25 bp, Homo sapien
tttggattgtggagtaaatggcagt

SEQ ID NO: 3640660 - DNA, 25 bp, Homo sapien
tggagtaaatggcagttctttaagg

SEQ ID NO: 3640661 - DNA, 25 bp, Homo sapien
cagtttggattgtggagtaaatggc

SEQ ID NO: 3640662 - DNA, 25 bp, Homo sapien
atggcagttctttaaggatacacat

SEQ ID NO: 3640663 - DNA, 25 bp, Homo sapien
ggacgaagccaccttccacagtgaa

SEQ ID NO: 3640664 - DNA, 25 bp, Homo sapien
tgggctgtccgctgcctaatcctgg

SEQ ID NO: 3640665 - DNA, 25 bp, Homo sapien
agtctggccttgtgccctgagtccc

SEQ ID NO: 3640666 - DNA, 25 bp, Homo sapien
ttccacagtgaacccggatctgcct

SEQ ID NO: 3640667 - DNA, 25 bp, Homo sapien
ggcacctggtgtgtatcccaagcac

SEQ ID NO: 3640668 - DNA, 25 bp, Homo sapien
actgacacttgctttcggcagggct

SEQ ID NO: 3640669 - DNA, 25 bp, Homo sapien
tggacacagctttccgaagtggttg

SEQ ID NO: 3640670 - DNA, 25 bp, Homo sapien
caatcgccgggtctgaagatgtgtg

SEQ ID NO: 3640671 - DNA, 25 bp, Homo sapien
ctgttggatataaacctatgcacaa

SEQ ID NO: 3640672 - DNA, 25 bp, Homo sapien
aatttctcaagctagcctggtctta

SEQ ID NO: 3640673 - DNA, 25 bp, Homo sapien
tagttgaaagcacagtacactgttg

SEQ ID NO: 3640674 - DNA, 25 bp, Homo sapien
gagcctgtggtctacacaatttcag

SEQ ID NO: 3640675 - DNA, 25 bp, Homo sapien
gcaggcagaacattgctagggaaga

SEQ ID NO: 3640676 - DNA, 25 bp, Homo sapien
tggctcctcaaagtcctcgtctagg

SEQ ID NO: 3640677 - DNA, 25 bp, Homo sapien
tgctggctgcactaagtcgatgaca

SEQ ID NO: 3640678 - DNA, 25 bp, Homo sapien
gggagtcaatcgtctcttcaaaaaa

SEQ ID NO: 3640679 - DNA, 25 bp, Homo sapien
catcttcaggctcggagggactgga

SEQ ID NO: 3640680 - DNA, 25 bp, Homo sapien
gagccaccggcccacgtgaaagtaa

SEQ ID NO: 3640681 - DNA, 25 bp, Homo sapien
aaagtaaatgcatgaagttccctct

SEQ ID NO: 3640682 - DNA, 25 bp, Homo sapien
tccctctcgctgaactgaaaagagc

SEQ ID NO: 3640683 - DNA, 25 bp, Homo sapien
aagacaagggaggagcctgtgagcc

SEQ ID NO: 3640684 - DNA, 25 bp, Homo sapien
aggtggaggagtctcagcatcttgt

SEQ ID NO: 3640685 - DNA, 25 bp, Homo sapien
gagtctggggtgctccaccggcggg

SEQ ID NO: 3640686 - DNA, 25 bp, Homo sapien
gcgcaagaagggtctcgggagccgg

SEQ ID NO: 3640687 - DNA, 25 bp, Homo sapien
gggtggtggcgcaagaagggtctcg

SEQ ID NO: 3640688 - DNA, 25 bp, Homo sapien
gtgggaacagagcgcaggagtctgg

SEQ ID NO: 3640689 - DNA, 25 bp, Homo sapien
gcgagagggcttcgttccccgccat

SEQ ID NO: 3640690 - DNA, 25 bp, Homo sapien
ggcgagagggcttcgttccccgcca

SEQ ID NO: 3640691 - DNA, 25 bp, Homo sapien
tcctctcggaaatcttctgcgccat

SEQ ID NO: 3640692 - DNA, 25 bp, Homo sapien
tccccgccatcctctcggaaatctt

SEQ ID NO: 3640693 - DNA, 25 bp, Homo sapien
ggctcccgggccgcgccgttggtga

SEQ ID NO: 3640694 - DNA, 25 bp, Homo sapien
ccgcgccgttggtgacgatgatgtt

SEQ ID NO: 3640695 - DNA, 25 bp, Homo sapien
tgcgctcctgcacgctgacggccgc

SEQ ID NO: 3640696 - DNA, 25 bp, Homo sapien
cgccctgcgctcctgcacgctgacg

SEQ ID NO: 3640697 - DNA, 25 bp, Homo sapien
cccctgcccggagactctcagcggg

SEQ ID NO: 3640698 - DNA, 25 bp, Homo sapien
cggcgtggccgtggatggtggccaa

SEQ ID NO: 3640699 - DNA, 25 bp, Homo sapien
gaaggcgccggcgtggccgtggatg

SEQ ID NO: 3640700 - DNA, 25 bp, Homo sapien
gagcctgaccccctgcccggagact

SEQ ID NO: 3640701 - DNA, 25 bp, Homo sapien
agctgggtgcgctcttcagggcctc

SEQ ID NO: 3640702 - DNA, 25 bp, Homo sapien
cgcacttgggaagccgttggccagc

SEQ ID NO: 3640703 - DNA, 25 bp, Homo sapien
cagcgggcgcgaaggagctgggtgc

SEQ ID NO: 3640704 - DNA, 25 bp, Homo sapien
tgacgggcccgcgtgctgggcaggg

SEQ ID NO: 3640705 - DNA, 25 bp, Homo sapien
ggcccgcgaactgcacggtgatgcc

SEQ ID NO: 3640706 - DNA, 25 bp, Homo sapien
cgcggcccgcgaactgcacggtgat

SEQ ID NO: 3640707 - DNA, 25 bp, Homo sapien
cggcccgcgaactgcacggtgatgc

SEQ ID NO: 3640708 - DNA, 25 bp, Homo sapien
agccgcggcccgcgaactgcacggt

SEQ ID NO: 3640709 - DNA, 25 bp, Homo sapien
gggtgcagcgactctttcaccctct

SEQ ID NO: 3640710 - DNA, 25 bp, Homo sapien
gtcacttccattttagaccaaacag

SEQ ID NO: 3640711 - DNA, 25 bp, Homo sapien
tctagactccgatgtgccacagagg

SEQ ID NO: 3640712 - DNA, 25 bp, Homo sapien
accaaacagctcctgggtgcagcga

SEQ ID NO: 3640713 - DNA, 25 bp, Homo sapien
acttcgagaagagggtagatgagac

SEQ ID NO: 3640714 - DNA, 25 bp, Homo sapien
aagccctcggccagattcctttagg

SEQ ID NO: 3640715 - DNA, 25 bp, Homo sapien
tttcttagaaaaggcggcgagaatc

SEQ ID NO: 3640716 - DNA, 25 bp, Homo sapien
tcacggaaacctatgggtctaacag

SEQ ID NO: 3640717 - DNA, 25 bp, Homo sapien
tctacccaagaataggaagcgctgg

SEQ ID NO: 3640718 - DNA, 25 bp, Homo sapien
cacaaaggtgtcactgctcagggca

SEQ ID NO: 3640719 - DNA, 25 bp, Homo sapien
gaagcgctggcatcctgtagtgact

SEQ ID NO: 3640720 - DNA, 25 bp, Homo sapien
taagacatagtctgggaggaaaccg

SEQ ID NO: 3640721 - DNA, 25 bp, Homo sapien
caagaaatgaccagagtgacagtca

SEQ ID NO: 3640722 - DNA, 25 bp, Homo sapien
gctttgagatatgcatggtccttca

SEQ ID NO: 3640723 - DNA, 25 bp, Homo sapien
tcacatcacgtaattatggcaagga

SEQ ID NO: 3640724 - DNA, 25 bp, Homo sapien
gcaaggaaactaatgcctctccaca

SEQ ID NO: 3640725 - DNA, 25 bp, Homo sapien
cacaaagttgggtatgcatgctagg

SEQ ID NO: 3640726 - DNA, 25 bp, Homo sapien
caaatgggcatcctacagtggaact

SEQ ID NO: 3640727 - DNA, 25 bp, Homo sapien
tcagaagacagcttgtatagcccag

SEQ ID NO: 3640728 - DNA, 25 bp, Homo sapien
taaacaccatggagaagttgtcccc

SEQ ID NO: 3640729 - DNA, 25 bp, Homo sapien
caaattcaatacaccagacaccaag

SEQ ID NO: 3640730 - DNA, 25 bp, Homo sapien
cagacaccaagtgaatagccaggta

SEQ ID NO: 3640731 - DNA, 25 bp, Homo sapien
gaagcttgtacagtccgagaaccag

SEQ ID NO: 3640732 - DNA, 25 bp, Homo sapien
gtctgatttcaaggaccaggaagct

SEQ ID NO: 3640733 - DNA, 25 bp, Homo sapien
tcagctgctccgatatctgggcatg

SEQ ID NO: 3640734 - DNA, 25 bp, Homo sapien
agctgctccgatatctgggcatggc

SEQ ID NO: 3640735 - DNA, 25 bp, Homo sapien
ctcagctgctccgatatctgggcat

SEQ ID NO: 3640736 - DNA, 25 bp, Homo sapien
ctgctccgatatctgggcatggcca

SEQ ID NO: 3640737 - DNA, 25 bp, Homo sapien
cccagatactgggtcggagccaggc

SEQ ID NO: 3640738 - DNA, 25 bp, Homo sapien
ggcgctggaaactcctacaggcaat

SEQ ID NO: 3640739 - DNA, 25 bp, Homo sapien
tgtgtaaggcgaaataccacctggt

SEQ ID NO: 3640740 - DNA, 25 bp, Homo sapien
aaccccgggagcttgtgtagccgtg

SEQ ID NO: 3640741 - DNA, 25 bp, Homo sapien
gggaattggtggaggcttcccagag

SEQ ID NO: 3640742 - DNA, 25 bp, Homo sapien
cagtgtggcgggttgcctttccgtt

SEQ ID NO: 3640743 - DNA, 25 bp, Homo sapien
cactggcttggcaggatgggcggag

SEQ ID NO: 3640744 - DNA, 25 bp, Homo sapien
tgggaggcagtgtggcgggttgcct

SEQ ID NO: 3640745 - DNA, 25 bp, Homo sapien
gcgttgtgtctcgggcccaggtctt

SEQ ID NO: 3640746 - DNA, 25 bp, Homo sapien
tctcctagcggcaccgggtggtaca

SEQ ID NO: 3640747 - DNA, 25 bp, Homo sapien
gtctttcagtctccctctccttggt

SEQ ID NO: 3640748 - DNA, 25 bp, Homo sapien
gtcttcctgttggacgctgccctct

SEQ ID NO: 3640749 - DNA, 25 bp, Homo sapien
aagctgctccggtcgtcggtggtca

SEQ ID NO: 3640750 - DNA, 25 bp, Homo sapien
gggcctactattctgtcatctgagc

SEQ ID NO: 3640751 - DNA, 25 bp, Homo sapien
gctccgtgtcaggttgaagctgctc

SEQ ID NO: 3640752 - DNA, 25 bp, Homo sapien
ggaccaagaaagtggcttgggccta

SEQ ID NO: 3640753 - DNA, 25 bp, Homo sapien
tggtgatgacactggccttcaactt

SEQ ID NO: 3640754 - DNA, 25 bp, Homo sapien
cttcaacttccttggccccacccag

SEQ ID NO: 3640755 - DNA, 25 bp, Homo sapien
tctcctgggcagggattccatccat

SEQ ID NO: 3640756 - DNA, 25 bp, Homo sapien
gtctctcctgggcagggattccatc

SEQ ID NO: 3640757 - DNA, 25 bp, Homo sapien
gctcccagtgccttcccttattcca

SEQ ID NO: 3640758 - DNA, 25 bp, Homo sapien
ggctcccagtgccttcccttattcc

SEQ ID NO: 3640759 - DNA, 25 bp, Homo sapien
ccagtgccttcccttattccagctt

SEQ ID NO: 3640760 - DNA, 25 bp, Homo sapien
tcccagtgccttcccttattccagc

SEQ ID NO: 3640761 - DNA, 25 bp, Homo sapien
acacgggtgtgttcgcacgttggca

SEQ ID NO: 3640762 - DNA, 25 bp, Homo sapien
tggagagccctcgaccttctcatct

SEQ ID NO: 3640763 - DNA, 25 bp, Homo sapien
tgtttagccaaggtttgaaagcctg

SEQ ID NO: 3640764 - DNA, 25 bp, Homo sapien
ggagacgggccagctatgccctgtc

SEQ ID NO: 3640765 - DNA, 25 bp, Homo sapien
aacttgaacgctcccactggtttcg

SEQ ID NO: 3640766 - DNA, 25 bp, Homo sapien
gaaacccaagatagggcctgcagtg

SEQ ID NO: 3640767 - DNA, 25 bp, Homo sapien
gctggtggtgtttgaatcttcgaaa

SEQ ID NO: 3640768 - DNA, 25 bp, Homo sapien
ccacatcttgccctggttactcgag

SEQ ID NO: 3640769 - DNA, 25 bp, Homo sapien
tggcctttgccatgccacaccgggc

SEQ ID NO: 3640770 - DNA, 25 bp, Homo sapien
gccacaccgggcctctggacccagg

SEQ ID NO: 3640771 - DNA, 25 bp, Homo sapien
tgccatgccacaccgggcctctgga

SEQ ID NO: 3640772 - DNA, 25 bp, Homo sapien
cacaccgggcctctggacccaggac

SEQ ID NO: 3640773 - DNA, 25 bp, Homo sapien
gccaagagagccttggttctcctgg

SEQ ID NO: 3640774 - DNA, 25 bp, Homo sapien
tgaaaattcaccttggccaagagag

SEQ ID NO: 3640775 - DNA, 25 bp, Homo sapien
tctcatctttgctggccagactgag

SEQ ID NO: 3640776 - DNA, 25 bp, Homo sapien
tctgtaggcgatgctggtactggtt

SEQ ID NO: 3640777 - DNA, 25 bp, Homo sapien
ggaggaccatatcccagtctctcgg

SEQ ID NO: 3640778 - DNA, 25 bp, Homo sapien
gagctcctttaagccggctgggttg

SEQ ID NO: 3640779 - DNA, 25 bp, Homo sapien
tgcagcctggctactggaggaccat

SEQ ID NO: 3640780 - DNA, 25 bp, Homo sapien
tcgggactcccgcattgggtctgct

SEQ ID NO: 3640781 - DNA, 25 bp, Homo sapien
tccacactgccctgttttggcggcg

SEQ ID NO: 3640782 - DNA, 25 bp, Homo sapien
gggcatgctccccttatttctggca

SEQ ID NO: 3640783 - DNA, 25 bp, Homo sapien
gaccagtgactggaccattgctata

SEQ ID NO: 3640784 - DNA, 25 bp, Homo sapien
tgtaagtcccgtggcttcctgaagt

SEQ ID NO: 3640785 - DNA, 25 bp, Homo sapien
gagaccgcgaattcacaaggccggg

SEQ ID NO: 3640786 - DNA, 25 bp, Homo sapien
tgctctcaactcagacaagccctgg

SEQ ID NO: 3640787 - DNA, 25 bp, Homo sapien
cagagatacgggagagacactcggg

SEQ ID NO: 3640788 - DNA, 25 bp, Homo sapien
tgtctgggccttgaggataaggtga

SEQ ID NO: 3640789 - DNA, 25 bp, Homo sapien
gatggacttgatgtggacgtgggct

SEQ ID NO: 3640790 - DNA, 25 bp, Homo sapien
ttaggacttgcaggctcccgtgagc

SEQ ID NO: 3640791 - DNA, 25 bp, Homo sapien
gacgtgggctcgatgcagatgcttt

SEQ ID NO: 3640792 - DNA, 25 bp, Homo sapien
ccgtgagcccctgagtcttcacctc

SEQ ID NO: 3640793 - DNA, 25 bp, Homo sapien
tgtgagtttgccctcatatcccagt

SEQ ID NO: 3640794 - DNA, 25 bp, Homo sapien
ttgccctcatatcccagtgctggag

SEQ ID NO: 3640795 - DNA, 25 bp, Homo sapien
ctctggcaaggcagatgcccctgtc

SEQ ID NO: 3640796 - DNA, 25 bp, Homo sapien
ataggaggacagctcgccaaggtca

SEQ ID NO: 3640797 - DNA, 25 bp, Homo sapien
ccatctggaatgtgtaccctcatcc

SEQ ID NO: 3640798 - DNA, 25 bp, Homo sapien
ctggaatgtgtaccctcatccttca

SEQ ID NO: 3640799 - DNA, 25 bp, Homo sapien
ggactgaccaccgactgctcctttg

SEQ ID NO: 3640800 - DNA, 25 bp, Homo sapien
acaggactgaccaccgactgctcct

SEQ ID NO: 3640801 - DNA, 25 bp, Homo sapien
gcttctgagatacatcgtggatggt

SEQ ID NO: 3640802 - DNA, 25 bp, Homo sapien
ggaactggcatcagtcaaaccaccc

SEQ ID NO: 3640803 - DNA, 25 bp, Homo sapien
gccctgcaaagtgcctagacaggaa

SEQ ID NO: 3640804 - DNA, 25 bp, Homo sapien
ccaccccaggtgttagcttctgaga

SEQ ID NO: 3640805 - DNA, 25 bp, Homo sapien
tctgggccccctgcgtgatttaggg

SEQ ID NO: 3640806 - DNA, 25 bp, Homo sapien
ctccttcccttgagctttagtagga

SEQ ID NO: 3640807 - DNA, 25 bp, Homo sapien
ctttagtaggaggtgtctctctgcc

SEQ ID NO: 3640808 - DNA, 25 bp, Homo sapien
atggaaatgcgcggccgtcctctgg

SEQ ID NO: 3640809 - DNA, 25 bp, Homo sapien
aatgagggtccttagtctgtttctg

SEQ ID NO: 3640810 - DNA, 25 bp, Homo sapien
tccagcaggcgtagtatatttagtc

SEQ ID NO: 3640811 - DNA, 25 bp, Homo sapien
gagcacatctgtatgcgacaacttg

SEQ ID NO: 3640812 - DNA, 25 bp, Homo sapien
gttaatttcttaggacagctgtctt

SEQ ID NO: 3640813 - DNA, 25 bp, Homo sapien
gagcagttacaccaaggagagcgtg

SEQ ID NO: 3640814 - DNA, 25 bp, Homo sapien
aacaagccgacgcttccagacaagg

SEQ ID NO: 3640815 - DNA, 25 bp, Homo sapien
tgagatggttcacttgactactgag

SEQ ID NO: 3640816 - DNA, 25 bp, Homo sapien
tttgtaatggaaatctcgcgagggt

SEQ ID NO: 3640817 - DNA, 25 bp, Homo sapien
cttgcacagggccatgctagtcttc

SEQ ID NO: 3640818 - DNA, 25 bp, Homo sapien
ttgcacagggccatgctagtcttct

SEQ ID NO: 3640819 - DNA, 25 bp, Homo sapien
tctctgtatcactacaatttttagt

SEQ ID NO: 3640820 - DNA, 25 bp, Homo sapien
tagtcttctctgtatcactacaatt

SEQ ID NO: 3640821 - DNA, 25 bp, Homo sapien
gagaccgtgtggacgtgctaccatg

SEQ ID NO: 3640822 - DNA, 25 bp, Homo sapien
gtagtctccacctccgtagttcaag

SEQ ID NO: 3640823 - DNA, 25 bp, Homo sapien
cttaatctcgctgttgaatatggac

SEQ ID NO: 3640824 - DNA, 25 bp, Homo sapien
gagacagccttcactgtcgcccatg

SEQ ID NO: 3640825 - DNA, 25 bp, Homo sapien
cagagccttcactggtgtttccaaa

SEQ ID NO: 3640826 - DNA, 25 bp, Homo sapien
tactctgatactagcaagtgctgcc

SEQ ID NO: 3640827 - DNA, 25 bp, Homo sapien
cattctccagggtcaagacagccag

SEQ ID NO: 3640828 - DNA, 25 bp, Homo sapien
gtccaaatgtgtggcgtctgcaagt

SEQ ID NO: 3640829 - DNA, 25 bp, Homo sapien
gatttgctcagctttgttattaaca

SEQ ID NO: 3640830 - DNA, 25 bp, Homo sapien
aaaattgacagtacctttgcactga

SEQ ID NO: 3640831 - DNA, 25 bp, Homo sapien
ctttttattacgtatcatgagttag

SEQ ID NO: 3640832 - DNA, 25 bp, Homo sapien
ttgcactgatgctgtacttaccctc

SEQ ID NO: 3640833 - DNA, 25 bp, Homo sapien
tacattgcagatatttttaagtaac

SEQ ID NO: 3640834 - DNA, 25 bp, Homo sapien
ccggccctacattgcagatattttt

SEQ ID NO: 3640835 - DNA, 25 bp, Homo sapien
cgtgcccggccctacattgcagata

SEQ ID NO: 3640836 - DNA, 25 bp, Homo sapien
gcccggccctacattgcagatattt

SEQ ID NO: 3640837 - DNA, 25 bp, Homo sapien
ctggcacattgtaagtatttagtaa

SEQ ID NO: 3640838 - DNA, 25 bp, Homo sapien
taaaagcacttaataacagtgtctg

SEQ ID NO: 3640839 - DNA, 25 bp, Homo sapien
aatagttctgtaactctgaggtaaa

SEQ ID NO: 3640840 - DNA, 25 bp, Homo sapien
tctgaggtaaatgtgaatcatatag

SEQ ID NO: 3640841 - DNA, 25 bp, Homo sapien
ccagaggcgactccacactccagct

SEQ ID NO: 3640842 - DNA, 25 bp, Homo sapien
gggtccggcgtcgttctcctcagac

SEQ ID NO: 3640843 - DNA, 25 bp, Homo sapien
tccgaggctcccatcaacgcgggag

SEQ ID NO: 3640844 - DNA, 25 bp, Homo sapien
agcagtggagggaccgcgggtccgg

SEQ ID NO: 3640845 - DNA, 25 bp, Homo sapien
taaagcttcttaaggtaatcccatg

SEQ ID NO: 3640846 - DNA, 25 bp, Homo sapien
gtagttcattacgtgggcttgggca

SEQ ID NO: 3640847 - DNA, 25 bp, Homo sapien
ttaaatacaggaagcagcaacactc

SEQ ID NO: 3640848 - DNA, 25 bp, Homo sapien
gagaagcgtgggtggctatcaccaa

SEQ ID NO: 3640849 - DNA, 25 bp, Homo sapien
aggcgctcgccaccacatttggcta

SEQ ID NO: 3640850 - DNA, 25 bp, Homo sapien
gtttcaccatattggggccaggctg

SEQ ID NO: 3640851 - DNA, 25 bp, Homo sapien
ggcgctcgccaccacatttggctaa

SEQ ID NO: 3640852 - DNA, 25 bp, Homo sapien
attttgtatttttagtggagactgg

SEQ ID NO: 3640853 - DNA, 25 bp, Homo sapien
tcccggccagcatgctaaggcggga

SEQ ID NO: 3640854 - DNA, 25 bp, Homo sapien
gttcaccagatgtcccggccagcat

SEQ ID NO: 3640855 - DNA, 25 bp, Homo sapien
agatgtcccggccagcatgctaagg

SEQ ID NO: 3640856 - DNA, 25 bp, Homo sapien
ccagcatgctaaggcgggagcccga

SEQ ID NO: 3640857 - DNA, 25 bp, Homo sapien
tagccacgccagaagagagggagag

SEQ ID NO: 3640858 - DNA, 25 bp, Homo sapien
cgtgctgctgccgcagtagcagagg

SEQ ID NO: 3640859 - DNA, 25 bp, Homo sapien
ctgctgccgcagtagcagaggccat

SEQ ID NO: 3640860 - DNA, 25 bp, Homo sapien
tggtagccacgccagaagagaggga

SEQ ID NO: 3640861 - DNA, 25 bp, Homo sapien
gctctcgggcttcctcggccggtag

SEQ ID NO: 3640862 - DNA, 25 bp, Homo sapien
ggctctcgggcttcctcggccggta

SEQ ID NO: 3640863 - DNA, 25 bp, Homo sapien
ctcgggcttcctcggccggtagccg

SEQ ID NO: 3640864 - DNA, 25 bp, Homo sapien
ggctcgcggctctcgggcttcctcg

SEQ ID NO: 3640865 - DNA, 25 bp, Homo sapien
accgcaaatcggccaggggaggctt

SEQ ID NO: 3640866 - DNA, 25 bp, Homo sapien
cccaccgcaaatcggccaggggagg

SEQ ID NO: 3640867 - DNA, 25 bp, Homo sapien
ggccgcgcgttcaggccggcagccg

SEQ ID NO: 3640868 - DNA, 25 bp, Homo sapien
cgacaccccaccgcaaatcggccag

SEQ ID NO: 3640869 - DNA, 25 bp, Homo sapien
gaggtgaaagtacaagctgttacaa

SEQ ID NO: 3640870 - DNA, 25 bp, Homo sapien
tacagaggtgaaagtacaagctgtt

SEQ ID NO: 3640871 - DNA, 25 bp, Homo sapien
cagaggtgaaagtacaagctgttac

SEQ ID NO: 3640872 - DNA, 25 bp, Homo sapien
aggtgaaagtacaagctgttacaaa

SEQ ID NO: 3640873 - DNA, 25 bp, Homo sapien
ggcttggtggctcacgtctgtaatc

SEQ ID NO: 3640874 - DNA, 25 bp, Homo sapien
ctagcactttgggaggcggaggcag

SEQ ID NO: 3640875 - DNA, 25 bp, Homo sapien
atcagaaacagggtctggctggctg

SEQ ID NO: 3640876 - DNA, 25 bp, Homo sapien
gaggatcacaaggtcaggagatcga

SEQ ID NO: 3640877 - DNA, 25 bp, Homo sapien
tcttgaagacaaacgtaggccctcc

SEQ ID NO: 3640878 - DNA, 25 bp, Homo sapien
cagacttaatgaatggccgggcaca

SEQ ID NO: 3640879 - DNA, 25 bp, Homo sapien
tacgacgtgaaggtactcagtggcc

SEQ ID NO: 3640880 - DNA, 25 bp, Homo sapien
tccctagagagcatgagtacgacgt

SEQ ID NO: 3640881 - DNA, 25 bp, Homo sapien
tttgtattctatgcactgccaaagc

SEQ ID NO: 3640882 - DNA, 25 bp, Homo sapien
tgatttcagagccacccatgcactt

SEQ ID NO: 3640883 - DNA, 25 bp, Homo sapien
gccaaagcacacctctttacttgta

SEQ ID NO: 3640884 - DNA, 25 bp, Homo sapien
cattttatgaacaagtgttgctgtg

SEQ ID NO: 3640885 - DNA, 25 bp, Homo sapien
ggcagctttatgaccatgctcacaa

SEQ ID NO: 3640886 - DNA, 25 bp, Homo sapien
ttttggcagctttatgaccatgctc

SEQ ID NO: 3640887 - DNA, 25 bp, Homo sapien
tatgaccatgctcacaatatactgt

SEQ ID NO: 3640888 - DNA, 25 bp, Homo sapien
ccagcagggcttgtccggtgaagag

SEQ ID NO: 3640889 - DNA, 25 bp, Homo sapien
atagatggggtttcaccatcttggc

SEQ ID NO: 3640890 - DNA, 25 bp, Homo sapien
tagatggggtttcaccatcttggcc

SEQ ID NO: 3640891 - DNA, 25 bp, Homo sapien
caccacgtctggctaattttttatt

SEQ ID NO: 3640892 - DNA, 25 bp, Homo sapien
actacacgtgcacaccaccacgtct

SEQ ID NO: 3640893 - DNA, 25 bp, Homo sapien
tatggtcaaaggtcatgaagcagta

SEQ ID NO: 3640894 - DNA, 25 bp, Homo sapien
tggtcaaaggtcatgaagcagtaaa

SEQ ID NO: 3640895 - DNA, 25 bp, Homo sapien
aaatatggtcaaaggtcatgaagca

SEQ ID NO: 3640896 - DNA, 25 bp, Homo sapien
tcaaaggtcatgaagcagtaaaact

SEQ ID NO: 3640897 - DNA, 25 bp, Homo sapien
cattagtttcgacagatgttttcgc

SEQ ID NO: 3640898 - DNA, 25 bp, Homo sapien
tgattgagatagactaacacttcct

SEQ ID NO: 3640899 - DNA, 25 bp, Homo sapien
gcagttcctcaaaccgcttggcaaa

SEQ ID NO: 3640900 - DNA, 25 bp, Homo sapien
ggtttcaatagaaatctgcccacag

SEQ ID NO: 3640901 - DNA, 25 bp, Homo sapien
tcagcagctcgtggaaaaagcccat

SEQ ID NO: 3640902 - DNA, 25 bp, Homo sapien
agtgatcccgctgtaggccgacatt

SEQ ID NO: 3640903 - DNA, 25 bp, Homo sapien
tatcgcttcactgtcgagaacttgg

SEQ ID NO: 3640904 - DNA, 25 bp, Homo sapien
tggtggccagaaagtggtcaaactc

SEQ ID NO: 3640905 - DNA, 25 bp, Homo sapien
cagagttttgcgaggttacccatgg

SEQ ID NO: 3640906 - DNA, 25 bp, Homo sapien
tgtttgtagagaccatgccacctaa

SEQ ID NO: 3640907 - DNA, 25 bp, Homo sapien
tttgcgaggttacccatggtcttga

SEQ ID NO: 3640908 - DNA, 25 bp, Homo sapien
ccataggtgcaccacctaattttca

SEQ ID NO: 3640909 - DNA, 25 bp, Homo sapien
ttcatcacaatggagtctagggaag

SEQ ID NO: 3640910 - DNA, 25 bp, Homo sapien
caatggagtctagggaagaagtgct

SEQ ID NO: 3640911 - DNA, 25 bp, Homo sapien
ggaagaagtgctgagttgaaatcat

SEQ ID NO: 3640912 - DNA, 25 bp, Homo sapien
aagaagtgctgagttgaaatcatac

SEQ ID NO: 3640913 - DNA, 25 bp, Homo sapien
cgagggattgggcaacattgtcaca

SEQ ID NO: 3640914 - DNA, 25 bp, Homo sapien
tctggagagtaatcgccgtcttggc

SEQ ID NO: 3640915 - DNA, 25 bp, Homo sapien
caaagtacaggtccacagaggaggt

SEQ ID NO: 3640916 - DNA, 25 bp, Homo sapien
taagcctcgcattttacggaacatc

SEQ ID NO: 3640917 - DNA, 25 bp, Homo sapien
gcctcaatttcagaagctccaagta

SEQ ID NO: 3640918 - DNA, 25 bp, Homo sapien
tggcctcaatttcagaagctccaag

SEQ ID NO: 3640919 - DNA, 25 bp, Homo sapien
ctctggcctcaatttcagaagctcc

SEQ ID NO: 3640920 - DNA, 25 bp, Homo sapien
cctcaatttcagaagctccaagtac

SEQ ID NO: 3640921 - DNA, 25 bp, Homo sapien
gctaaagccagttgcctgaagacta

SEQ ID NO: 3640922 - DNA, 25 bp, Homo sapien
caagttaattcataagccatgcaag

SEQ ID NO: 3640923 - DNA, 25 bp, Homo sapien
tgttatatgtatgggaaccacaaag

SEQ ID NO: 3640924 - DNA, 25 bp, Homo sapien
gaagactaaacctcatgaatctcct

SEQ ID NO: 3640925 - DNA, 25 bp, Homo sapien
tcactgcagtataaagaagaccttc

SEQ ID NO: 3640926 - DNA, 25 bp, Homo sapien
ggttattaacaatcaaatgcacact

SEQ ID NO: 3640927 - DNA, 25 bp, Homo sapien
tctgaaatgtgggagattggacagc

SEQ ID NO: 3640928 - DNA, 25 bp, Homo sapien
ggagtggtgtaacccagctggttat

SEQ ID NO: 3640929 - DNA, 25 bp, Homo sapien
ccattgacatggatgatggcacagc

SEQ ID NO: 3640930 - DNA, 25 bp, Homo sapien
aataatcacatccttgcggaactgg

SEQ ID NO: 3640931 - DNA, 25 bp, Homo sapien
caaaagccagtcgtgtggcacggac

SEQ ID NO: 3640932 - DNA, 25 bp, Homo sapien
gaactggcgttggtattcaaaagcc

SEQ ID NO: 3640933 - DNA, 25 bp, Homo sapien
tactccaggtggtgatttgcgcttc

SEQ ID NO: 3640934 - DNA, 25 bp, Homo sapien
cattcaacttggcatagtaggagga

SEQ ID NO: 3640935 - DNA, 25 bp, Homo sapien
tcctgcgtcatgagtccgccagcaa

SEQ ID NO: 3640936 - DNA, 25 bp, Homo sapien
ttcatgccaacaaaccgcaggaggt

SEQ ID NO: 3640937 - DNA, 25 bp, Homo sapien
gcggtggcccagtctagcttgattc

SEQ ID NO: 3640938 - DNA, 25 bp, Homo sapien
aaggcaagagcttccgcggtggccc

SEQ ID NO: 3640939 - DNA, 25 bp, Homo sapien
cagtctagcttgattccgtccatca

SEQ ID NO: 3640940 - DNA, 25 bp, Homo sapien
gcttgattccgtccatcatcttctc

SEQ ID NO: 3640941 - DNA, 25 bp, Homo sapien
gaaagttccacgaccaacatcttgg

SEQ ID NO: 3640942 - DNA, 25 bp, Homo sapien
tgtaggtgtcatccgtctcctggca

SEQ ID NO: 3640943 - DNA, 25 bp, Homo sapien
cgattgcatgcctctgactgaaagt

SEQ ID NO: 3640944 - DNA, 25 bp, Homo sapien
aacatcttggccacttagacgaaca

SEQ ID NO: 3640945 - DNA, 25 bp, Homo sapien
tcccatattcaaatcccaggacggc

SEQ ID NO: 3640946 - DNA, 25 bp, Homo sapien
tctgggcaccattgaagaaatcgcc

SEQ ID NO: 3640947 - DNA, 25 bp, Homo sapien
caggacggcctcttctgacagtggg

SEQ ID NO: 3640948 - DNA, 25 bp, Homo sapien
gggcagtaactttgggctctcaatg

SEQ ID NO: 3640949 - DNA, 25 bp, Homo sapien
aagtaccacgtggggagtaagagct

SEQ ID NO: 3640950 - DNA, 25 bp, Homo sapien
tcgacaggatgagtggtctggccca

SEQ ID NO: 3640951 - DNA, 25 bp, Homo sapien
tgcaggaaacgctctattcgacagg

SEQ ID NO: 3640952 - DNA, 25 bp, Homo sapien
aggaggatgacgatgccgctttgta

SEQ ID NO: 3640953 - DNA, 25 bp, Homo sapien
cagccccatcgtagccatgtggaag

SEQ ID NO: 3640954 - DNA, 25 bp, Homo sapien
gttcacagtgtctccgtccaccccc

SEQ ID NO: 3640955 - DNA, 25 bp, Homo sapien
gttgggtgaaccacaaacatgttca

SEQ ID NO: 3640956 - DNA, 25 bp, Homo sapien
ttgttgggtgaaccacaaacatgtt

SEQ ID NO: 3640957 - DNA, 25 bp, Homo sapien
tccgtccaccccctcttccgcactg

SEQ ID NO: 3640958 - DNA, 25 bp, Homo sapien
gaagttccggaccatctgtctccta

SEQ ID NO: 3640959 - DNA, 25 bp, Homo sapien
tcttaggggaagcaacaatgagtgg

SEQ ID NO: 3640960 - DNA, 25 bp, Homo sapien
gcaacaatgagtggttttctgaagt

SEQ ID NO: 3640961 - DNA, 25 bp, Homo sapien
gttttctgaagttccggaccatctg

SEQ ID NO: 3640962 - DNA, 25 bp, Homo sapien
aatcaccaatgaccgggttaaatgt

SEQ ID NO: 3640963 - DNA, 25 bp, Homo sapien
gaatcaccaatgaccgggttaaatg

SEQ ID NO: 3640964 - DNA, 25 bp, Homo sapien
atgaccgggttaaatgttgttcctg

SEQ ID NO: 3640965 - DNA, 25 bp, Homo sapien
tgaatcaccaatgaccgggttaaat

SEQ ID NO: 3640966 - DNA, 25 bp, Homo sapien
tcaccagggagtagaaatgtttgcc

SEQ ID NO: 3640967 - DNA, 25 bp, Homo sapien
cctctactcggatgatggcaaagtc

SEQ ID NO: 3640968 - DNA, 25 bp, Homo sapien
ttgccggagcagaacacgagggtct

SEQ ID NO: 3640969 - DNA, 25 bp, Homo sapien
gagattctctttgtttcaccaggga

SEQ ID NO: 3640970 - DNA, 25 bp, Homo sapien
acggacccatgttctgaggttcctc

SEQ ID NO: 3640971 - DNA, 25 bp, Homo sapien
cggacccatgttctgaggttcctcc

SEQ ID NO: 3640972 - DNA, 25 bp, Homo sapien
ggacccatgttctgaggttcctcct

SEQ ID NO: 3640973 - DNA, 25 bp, Homo sapien
agaaacaaacgaccacggacccatg

SEQ ID NO: 3640974 - DNA, 25 bp, Homo sapien
tggcaaagggggccggcccaccaga

SEQ ID NO: 3640975 - DNA, 25 bp, Homo sapien
ctggcaaagggggccggcccaccag

SEQ ID NO: 3640976 - DNA, 25 bp, Homo sapien
gaaggtcttggcgaggatatcttca

SEQ ID NO: 3640977 - DNA, 25 bp, Homo sapien
tcttggcgaggatatcttcatgctg

SEQ ID NO: 3640978 - DNA, 25 bp, Homo sapien
tcaagcgaaggtcttggcgaggata

SEQ ID NO: 3640979 - DNA, 25 bp, Homo sapien
aagcgaaggtcttggcgaggatatc

SEQ ID NO: 3640980 - DNA, 25 bp, Homo sapien
tgttgaggtcatctccacggagctg

SEQ ID NO: 3640981 - DNA, 25 bp, Homo sapien
caagcacctggtgttgggaaagtcc

SEQ ID NO: 3640982 - DNA, 25 bp, Homo sapien
gaaaatattagtactgccacaggac

SEQ ID NO: 3640983 - DNA, 25 bp, Homo sapien
ttgctggtaaaagtagagagggcct

SEQ ID NO: 3640984 - DNA, 25 bp, Homo sapien
tgagtgagaatatccaagttttgtc

SEQ ID NO: 3640985 - DNA, 25 bp, Homo sapien
caaagcggcctaacgctgacacaga

SEQ ID NO: 3640986 - DNA, 25 bp, Homo sapien
gaagtagaaatagtagcaaccatgg

SEQ ID NO: 3640987 - DNA, 25 bp, Homo sapien
gacttacttcacgtaacatgatgac

SEQ ID NO: 3640988 - DNA, 25 bp, Homo sapien
ggcgcaaaggatcttctcacctaag

SEQ ID NO: 3640989 - DNA, 25 bp, Homo sapien
ttttcacagtatggatctcactctg

SEQ ID NO: 3640990 - DNA, 25 bp, Homo sapien
gaagtggcactgtatcggctcattg

SEQ ID NO: 3640991 - DNA, 25 bp, Homo sapien
cctcaaagtccttggcgcaaaggat

SEQ ID NO: 3640992 - DNA, 25 bp, Homo sapien
tcctaccggccccgcgcaggctccg

SEQ ID NO: 3640993 - DNA, 25 bp, Homo sapien
gatcctaccggccccgcgcaggctc

SEQ ID NO: 3640994 - DNA, 25 bp, Homo sapien
atcctaccggccccgcgcaggctcc

SEQ ID NO: 3640995 - DNA, 25 bp, Homo sapien
ctaccggccccgcgcaggctccgcc

SEQ ID NO: 3640996 - DNA, 25 bp, Homo sapien
ctgccttcgctcgactcccgcggct

SEQ ID NO: 3640997 - DNA, 25 bp, Homo sapien
cttcgctcgactcccgcggctcggg

SEQ ID NO: 3640998 - DNA, 25 bp, Homo sapien
gactcccgcggctcgggcctcggta

SEQ ID NO: 3640999 - DNA, 25 bp, Homo sapien
ggcctcggcgctgccttcgctcgac

SEQ ID NO: 3641000 - DNA, 25 bp, Homo sapien
tctggtagaactgcacagaatggtt

SEQ ID NO: 3641001 - DNA, 25 bp, Homo sapien
gtagaactgcacagaatggtttgat

SEQ ID NO: 3641002 - DNA, 25 bp, Homo sapien
cacagaatggtttgataacttctaa

SEQ ID NO: 3641003 - DNA, 25 bp, Homo sapien
gcacagaatggtttgataacttcta

SEQ ID NO: 3641004 - DNA, 25 bp, Homo sapien
aaaatgaagagcgttatagcagtcc

SEQ ID NO: 3641005 - DNA, 25 bp, Homo sapien
tgaagagcgttatagcagtccacag

SEQ ID NO: 3641006 - DNA, 25 bp, Homo sapien
aagagcgttatagcagtccacagaa

SEQ ID NO: 3641007 - DNA, 25 bp, Homo sapien
aatgaagagcgttatagcagtccac

SEQ ID NO: 3641008 - DNA, 25 bp, Homo sapien
ggtcactcttctcaatgtaagactg

SEQ ID NO: 3641009 - DNA, 25 bp, Homo sapien
caatggaatattacatggccactaa

SEQ ID NO: 3641010 - DNA, 25 bp, Homo sapien
ttttgcaaagctctatatactaaag

SEQ ID NO: 3641011 - DNA, 25 bp, Homo sapien
gctctatatactaaagacagccaag

SEQ ID NO: 3641012 - DNA, 25 bp, Homo sapien
aaggatctgcagaatctgatgacat

SEQ ID NO: 3641013 - DNA, 25 bp, Homo sapien
taactctcatccagtagaaaggatc

SEQ ID NO: 3641014 - DNA, 25 bp, Homo sapien
ccagaataactctcatccagtagaa

SEQ ID NO: 3641015 - DNA, 25 bp, Homo sapien
aataactctcatccagtagaaagga

SEQ ID NO: 3641016 - DNA, 25 bp, Homo sapien
ccaatcatcacatctacggactacg

SEQ ID NO: 3641017 - DNA, 25 bp, Homo sapien
catctcacacacgagcgtgaagatc

SEQ ID NO: 3641018 - DNA, 25 bp, Homo sapien
acacacgagcgtgaagatccaatca

SEQ ID NO: 3641019 - DNA, 25 bp, Homo sapien
cacatctacggactacgaaagcatc

SEQ ID NO: 3641020 - DNA, 25 bp, Homo sapien
agctctatctttcggtgtatctcca

SEQ ID NO: 3641021 - DNA, 25 bp, Homo sapien
aactgcataatcaaaccagatgtta

SEQ ID NO: 3641022 - DNA, 25 bp, Homo sapien
tatctccaacttcaatgattttggc

SEQ ID NO: 3641023 - DNA, 25 bp, Homo sapien
agatgttacaattggggagataccc

SEQ ID NO: 3641024 - DNA, 25 bp, Homo sapien
caatggcttgcccaatggtaatgat

SEQ ID NO: 3641025 - DNA, 25 bp, Homo sapien
ccccgtcatgacatacacaatggct

SEQ ID NO: 3641026 - DNA, 25 bp, Homo sapien
tggcttgcccaatggtaatgatcat

SEQ ID NO: 3641027 - DNA, 25 bp, Homo sapien
aggagacagattccggcacccattt

SEQ ID NO: 3641028 - DNA, 25 bp, Homo sapien
ccatcggactacagagtggttcaca

SEQ ID NO: 3641029 - DNA, 25 bp, Homo sapien
ggcaacagccgtccatgaacatcag

SEQ ID NO: 3641030 - DNA, 25 bp, Homo sapien
ccacagaaagcatcgtgatgggcct

SEQ ID NO: 3641031 - DNA, 25 bp, Homo sapien
tgttcagaacagtgaccatcggact

SEQ ID NO: 3641032 - DNA, 25 bp, Homo sapien
tctggtataatagcaagatggaaat

SEQ ID NO: 3641033 - DNA, 25 bp, Homo sapien
ggataagtctaagggctgtgttgat

SEQ ID NO: 3641034 - DNA, 25 bp, Homo sapien
gatgaattctggtataatagcaaga

SEQ ID NO: 3641035 - DNA, 25 bp, Homo sapien
cactgccatcaaaggataagtctaa

SEQ ID NO: 3641036 - DNA, 25 bp, Homo sapien
ctgccagtgttaatggtagtgggac

SEQ ID NO: 3641037 - DNA, 25 bp, Homo sapien
cagcagcacaatcaaaccagcaaca

SEQ ID NO: 3641038 - DNA, 25 bp, Homo sapien
aacccttctgtagcagctcatctaa

SEQ ID NO: 3641039 - DNA, 25 bp, Homo sapien
ccttccagacaatggtctcacagat

SEQ ID NO: 3641040 - DNA, 25 bp, Homo sapien
atccagcaaaacgcgtgcagttgca

SEQ ID NO: 3641041 - DNA, 25 bp, Homo sapien
cgtgcagttgcagtcgctgtgcgat

SEQ ID NO: 3641042 - DNA, 25 bp, Homo sapien
aaaacgcgtgcagttgcagtcgctg

SEQ ID NO: 3641043 - DNA, 25 bp, Homo sapien
cagttgcagtcgctgtgcgatgtac

SEQ ID NO: 3641044 - DNA, 25 bp, Homo sapien
tactgcgacacgatgggtttgttcc

SEQ ID NO: 3641045 - DNA, 25 bp, Homo sapien
cagaacggctctaggcatgtactgc

SEQ ID NO: 3641046 - DNA, 25 bp, Homo sapien
cacgatgggtttgttcccagcacac

SEQ ID NO: 3641047 - DNA, 25 bp, Homo sapien
taggcatgtactgcgacacgatggg

SEQ ID NO: 3641048 - DNA, 25 bp, Homo sapien
gacagatgtcactctatcgagcctg

SEQ ID NO: 3641049 - DNA, 25 bp, Homo sapien
taaccgtgaaagtccagtatacagc

SEQ ID NO: 3641050 - DNA, 25 bp, Homo sapien
tcaagacagacacgacctgtggact

SEQ ID NO: 3641051 - DNA, 25 bp, Homo sapien
gcctcgaagtttaccgcaccaagaa

SEQ ID NO: 3641052 - DNA, 25 bp, Homo sapien
caaatggaacagagctatgactgca

SEQ ID NO: 3641053 - DNA, 25 bp, Homo sapien
agttctgccgataaaaagcctcccg

SEQ ID NO: 3641054 - DNA, 25 bp, Homo sapien
gactttgtccgtcctggtggccaac

SEQ ID NO: 3641055 - DNA, 25 bp, Homo sapien
agcctcccgtaaagctcggactttg

SEQ ID NO: 3641056 - DNA, 25 bp, Homo sapien
gttgccactaaatcgaacagacagc

SEQ ID NO: 3641057 - DNA, 25 bp, Homo sapien
taacgggccgacttaatgggcagat

SEQ ID NO: 3641058 - DNA, 25 bp, Homo sapien
gcccactgtcctagtaaatttacta

SEQ ID NO: 3641059 - DNA, 25 bp, Homo sapien
taatgggcagatcaacgcgaaatcc

SEQ ID NO: 3641060 - DNA, 25 bp, Homo sapien
gcaacacttaccagttcttccagat

SEQ ID NO: 3641061 - DNA, 25 bp, Homo sapien
taaaaagcgcttgggcaatcttact

SEQ ID NO: 3641062 - DNA, 25 bp, Homo sapien
tgagatgtgaaagtgcttcctagag

SEQ ID NO: 3641063 - DNA, 25 bp, Homo sapien
tacagcaaatgctccaatgtcgacc

SEQ ID NO: 3641064 - DNA, 25 bp, Homo sapien
gtgcccctagaatcattaatcccag

SEQ ID NO: 3641065 - DNA, 25 bp, Homo sapien
tacaggaccaactactcaaagcact

SEQ ID NO: 3641066 - DNA, 25 bp, Homo sapien
gctgctggactattctaaggagggc

SEQ ID NO: 3641067 - DNA, 25 bp, Homo sapien
aacttgctgcctagactttatgtgg

SEQ ID NO: 3641068 - DNA, 25 bp, Homo sapien
catgaagatgatataaacaacgaca

SEQ ID NO: 3641069 - DNA, 25 bp, Homo sapien
gacaggatcctcaaagatggcgccc

SEQ ID NO: 3641070 - DNA, 25 bp, Homo sapien
gaatgcacatgaccccaacatgaag

SEQ ID NO: 3641071 - DNA, 25 bp, Homo sapien
agacacttcaatccatgtcttagag

SEQ ID NO: 3641072 - DNA, 25 bp, Homo sapien
gaaccatagaggtatctcggtggcc

SEQ ID NO: 3641073 - DNA, 25 bp, Homo sapien
tcattaccatctgctgttctttcag

SEQ ID NO: 3641074 - DNA, 25 bp, Homo sapien
gctcatgaaccatagaggtatctcg

SEQ ID NO: 3641075 - DNA, 25 bp, Homo sapien
gaggtatctcggtggcccctcatta

SEQ ID NO: 3641076 - DNA, 25 bp, Homo sapien
taggagacagaaccccaagttaggc

SEQ ID NO: 3641077 - DNA, 25 bp, Homo sapien
gaacagcacggcagctagagacgaa

SEQ ID NO: 3641078 - DNA, 25 bp, Homo sapien
tagctgggtctaaagcctccctgaa

SEQ ID NO: 3641079 - DNA, 25 bp, Homo sapien
gcaaaagaaggaatctggatcccac

SEQ ID NO: 3641080 - DNA, 25 bp, Homo sapien
gggcgccaatgcacaaaccgccaaa

SEQ ID NO: 3641081 - DNA, 25 bp, Homo sapien
aaccgccaaacgcagctgcggtggg

SEQ ID NO: 3641082 - DNA, 25 bp, Homo sapien
taaataatagtgactgctagcagaa

SEQ ID NO: 3641083 - DNA, 25 bp, Homo sapien
agtgccagatccaatggcccccagg

SEQ ID NO: 3641084 - DNA, 25 bp, Homo sapien
ttagaaaaacaaagcacccatccca

SEQ ID NO: 3641085 - DNA, 25 bp, Homo sapien
tagaaaaacaaagcacccatcccac

SEQ ID NO: 3641086 - DNA, 25 bp, Homo sapien
tgacaaaaacgatccgtcaaagtgt

SEQ ID NO: 3641087 - DNA, 25 bp, Homo sapien
tcatctgacaaaaacgatccgtcaa

SEQ ID NO: 3641088 - DNA, 25 bp, Homo sapien
catctgacaaaaacgatccgtcaaa

SEQ ID NO: 3641089 - DNA, 25 bp, Homo sapien
tctgacaaaaacgatccgtcaaagt

SEQ ID NO: 3641090 - DNA, 25 bp, Homo sapien
gttgtgtgcaaaacgaatccatctc

SEQ ID NO: 3641091 - DNA, 25 bp, Homo sapien
agcgggtactaatgctgcacacaga

SEQ ID NO: 3641092 - DNA, 25 bp, Homo sapien
ggtttccagcattacaggcaacact

SEQ ID NO: 3641093 - DNA, 25 bp, Homo sapien
caaggtagatacactggtttccagc

SEQ ID NO: 3641094 - DNA, 25 bp, Homo sapien
tagaagcagttgtggcagaaataac

SEQ ID NO: 3641095 - DNA, 25 bp, Homo sapien
gagacttgatttcgcccatgtgggc

SEQ ID NO: 3641096 - DNA, 25 bp, Homo sapien
tgctgctgtgagtacaacaacagac

SEQ ID NO: 3641097 - DNA, 25 bp, Homo sapien
atagccaatacaggcaaacagcacg

SEQ ID NO: 3641098 - DNA, 25 bp, Homo sapien
tatcagatttctttattttttccaa

SEQ ID NO: 3641099 - DNA, 25 bp, Homo sapien
tcagatttctttattttttccaaca

SEQ ID NO: 3641100 - DNA, 25 bp, Homo sapien
atatcagatttctttattttttcca

SEQ ID NO: 3641101 - DNA, 25 bp, Homo sapien
tctttattttttccaacacaactga

SEQ ID NO: 3641102 - DNA, 25 bp, Homo sapien
gattacccttaagttggtcactatc

SEQ ID NO: 3641103 - DNA, 25 bp, Homo sapien
tttgacttttacaggcatctcaggg

SEQ ID NO: 3641104 - DNA, 25 bp, Homo sapien
tgttgttttgagaccactgttttcc

SEQ ID NO: 3641105 - DNA, 25 bp, Homo sapien
aaatgatttaccaagatctatgctc

SEQ ID NO: 3641106 - DNA, 25 bp, Homo sapien
ctgctgcgcaaacactgattgaata

SEQ ID NO: 3641107 - DNA, 25 bp, Homo sapien
gctctggtagctgaagaacatctca

SEQ ID NO: 3641108 - DNA, 25 bp, Homo sapien
ttgtccttccttaacggcatgatct

SEQ ID NO: 3641109 - DNA, 25 bp, Homo sapien
aacatctcacagtggacgccagggt

SEQ ID NO: 3641110 - DNA, 25 bp, Homo sapien
tgacaatcaatacgaggcagcgcag

SEQ ID NO: 3641111 - DNA, 25 bp, Homo sapien
tgaggctccgcggaccataattagc

SEQ ID NO: 3641112 - DNA, 25 bp, Homo sapien
tcagtgaataagcagagcgcctggt

SEQ ID NO: 3641113 - DNA, 25 bp, Homo sapien
taaggtagaagccacctcgacagct

SEQ ID NO: 3641114 - DNA, 25 bp, Homo sapien
catcatgggaatattttattgggta

SEQ ID NO: 3641115 - DNA, 25 bp, Homo sapien
catgggaatattttattgggtataa

SEQ ID NO: 3641116 - DNA, 25 bp, Homo sapien
gtcatcatgggaatattttattggg

SEQ ID NO: 3641117 - DNA, 25 bp, Homo sapien
tcatgggaatattttattgggtata

SEQ ID NO: 3641118 - DNA, 25 bp, Homo sapien
ggcccttagaaatcactggtcatgt

SEQ ID NO: 3641119 - DNA, 25 bp, Homo sapien
tatggagacataccatgggcccttc

SEQ ID NO: 3641120 - DNA, 25 bp, Homo sapien
ttcaaggagcacctctgtatgggct

SEQ ID NO: 3641121 - DNA, 25 bp, Homo sapien
gcattgtataattcttggccaccca

SEQ ID NO: 3641122 - DNA, 25 bp, Homo sapien
gaggtatgttctgcaactcctggtg

SEQ ID NO: 3641123 - DNA, 25 bp, Homo sapien
catactgctcgagtttgacaatgta

SEQ ID NO: 3641124 - DNA, 25 bp, Homo sapien
caaagcctttttgacgcctcttgta

SEQ ID NO: 3641125 - DNA, 25 bp, Homo sapien
agtcttccgatgttaccactccagg

SEQ ID NO: 3641126 - DNA, 25 bp, Homo sapien
cagggctgagacctatgtgcatgac

SEQ ID NO: 3641127 - DNA, 25 bp, Homo sapien
tatatcctttgcacgcacacggcga

SEQ ID NO: 3641128 - DNA, 25 bp, Homo sapien
ggcctgcatgacacccagagggtaa

SEQ ID NO: 3641129 - DNA, 25 bp, Homo sapien
caggtactcccacagagggtcatga

SEQ ID NO: 3641130 - DNA, 25 bp, Homo sapien
ctgcatttcctaatcagggatgtac

SEQ ID NO: 3641131 - DNA, 25 bp, Homo sapien
tcctaatcagggatgtacatcagaa

SEQ ID NO: 3641132 - DNA, 25 bp, Homo sapien
atttcctaatcagggatgtacatca

SEQ ID NO: 3641133 - DNA, 25 bp, Homo sapien
gcatttcctaatcagggatgtacat

SEQ ID NO: 3641134 - DNA, 25 bp, Homo sapien
cttgagcccgggaggaggtggttgc

SEQ ID NO: 3641135 - DNA, 25 bp, Homo sapien
gctgagacaggagaattgcttgagc

SEQ ID NO: 3641136 - DNA, 25 bp, Homo sapien
attagcccagcgtggtggcatgcgc

SEQ ID NO: 3641137 - DNA, 25 bp, Homo sapien
ctgtaatcccagctaccccggaggc

SEQ ID NO: 3641138 - DNA, 25 bp, Homo sapien
gatttgagctctgcatcaccccttt

SEQ ID NO: 3641139 - DNA, 25 bp, Homo sapien
tggatacagctaaatgagggttcac

SEQ ID NO: 3641140 - DNA, 25 bp, Homo sapien
tctgctatcacctcaaacaagcgtg

SEQ ID NO: 3641141 - DNA, 25 bp, Homo sapien
ttctcctgcatgctgaaaagtcagt

SEQ ID NO: 3641142 - DNA, 25 bp, Homo sapien
gaaagggaccacatctgcatggtgc

SEQ ID NO: 3641143 - DNA, 25 bp, Homo sapien
tccttggagcgctgaattcgtttag

SEQ ID NO: 3641144 - DNA, 25 bp, Homo sapien
ttagtctggcctcgcaaaagttgtc

SEQ ID NO: 3641145 - DNA, 25 bp, Homo sapien
gaataccgcctgtacgatcctggag

SEQ ID NO: 3641146 - DNA, 25 bp, Homo sapien
cgccggtgtttcgagccgtggcacc

SEQ ID NO: 3641147 - DNA, 25 bp, Homo sapien
tgtttcgagccgtggcaccggcatc

SEQ ID NO: 3641148 - DNA, 25 bp, Homo sapien
agggtgcgcgcccatccttttagca

SEQ ID NO: 3641149 - DNA, 25 bp, Homo sapien
ttttagcaccgcgagaggcgccggt

SEQ ID NO: 3641150 - DNA, 25 bp, Homo sapien
caactccgtcttcgccctaaacgca

SEQ ID NO: 3641151 - DNA, 25 bp, Homo sapien
gctttagtctcgaaagaggaattac

SEQ ID NO: 3641152 - DNA, 25 bp, Homo sapien
ggcatacgcttgacacacacgcata

SEQ ID NO: 3641153 - DNA, 25 bp, Homo sapien
tacaaaaagagctttagtctcgaaa

SEQ ID NO: 3641154 - DNA, 25 bp, Homo sapien
gcaagaaggaagaccgagaaaagga

SEQ ID NO: 3641155 - DNA, 25 bp, Homo sapien
ctattttggttcaaggactcttccg

SEQ ID NO: 3641156 - DNA, 25 bp, Homo sapien
cgagctattttggttcaaggactct

SEQ ID NO: 3641157 - DNA, 25 bp, Homo sapien
gaagtgcccgccgagctattttggt

SEQ ID NO: 3641158 - DNA, 25 bp, Homo sapien
gcccgccgagctattttggttcaag

SEQ ID NO: 3641159 - DNA, 25 bp, Homo sapien
ggtaccacgcggagaactggcagtg

SEQ ID NO: 3641160 - DNA, 25 bp, Homo sapien
tgatggtaacgcctcggaagaacgg

SEQ ID NO: 3641161 - DNA, 25 bp, Homo sapien
ctcttgatggtaacgcctcggaaga

SEQ ID NO: 3641162 - DNA, 25 bp, Homo sapien
agaacgggtaccacgcggagaactg

SEQ ID NO: 3641163 - DNA, 25 bp, Homo sapien
cagtaagattcgctcagaagtcgca

SEQ ID NO: 3641164 - DNA, 25 bp, Homo sapien
ctcccatgcagtcgctagaaggcct

SEQ ID NO: 3641165 - DNA, 25 bp, Homo sapien
gctgatgtacttccctctcgacaca

SEQ ID NO: 3641166 - DNA, 25 bp, Homo sapien
caacaggacgcagacaattgctgat

SEQ ID NO: 3641167 - DNA, 25 bp, Homo sapien
gagtaaataatccttcacattctga

SEQ ID NO: 3641168 - DNA, 25 bp, Homo sapien
catcatcgagtaaataatccttcac

SEQ ID NO: 3641169 - DNA, 25 bp, Homo sapien
ccagagttccatcatcgagtaaata

SEQ ID NO: 3641170 - DNA, 25 bp, Homo sapien
gaaaccaccagagttccatcatcga

SEQ ID NO: 3641171 - DNA, 25 bp, Homo sapien
aatggtgcctaagctaattcattca

SEQ ID NO: 3641172 - DNA, 25 bp, Homo sapien
tgaacaaatgggccaagtccctgtt

SEQ ID NO: 3641173 - DNA, 25 bp, Homo sapien
tggctgagaatgtgttggtggatca

SEQ ID NO: 3641174 - DNA, 25 bp, Homo sapien
actgtctggctgagaatgtgttggt

SEQ ID NO: 3641175 - DNA, 25 bp, Homo sapien
ctgagaatgtgttggtggatcatcc

SEQ ID NO: 3641176 - DNA, 25 bp, Homo sapien
tcatcatcactgtctggctgagaat

SEQ ID NO: 3641177 - DNA, 25 bp, Homo sapien
gcgtggctgtgttctcatcatcaga

SEQ ID NO: 3641178 - DNA, 25 bp, Homo sapien
tggctgtgttctcatcatcagacca

SEQ ID NO: 3641179 - DNA, 25 bp, Homo sapien
gtaagcgtggctgtgttctcatcat

SEQ ID NO: 3641180 - DNA, 25 bp, Homo sapien
cgtaagcgtggctgtgttctcatca

SEQ ID NO: 3641181 - DNA, 25 bp, Homo sapien
cttggggcactccaattaagcttag

SEQ ID NO: 3641182 - DNA, 25 bp, Homo sapien
ggcactccaattaagcttaggaaag

SEQ ID NO: 3641183 - DNA, 25 bp, Homo sapien
tgcccccgagggaattgatagcttc

SEQ ID NO: 3641184 - DNA, 25 bp, Homo sapien
gagggaattgatagcttcctggact

SEQ ID NO: 3641185 - DNA, 25 bp, Homo sapien
gtcgctgagggttttacatttcaga

SEQ ID NO: 3641186 - DNA, 25 bp, Homo sapien
atgtcgctgagggttttacatttca

SEQ ID NO: 3641187 - DNA, 25 bp, Homo sapien
cacgagtgatgaaatcggaactctt

SEQ ID NO: 3641188 - DNA, 25 bp, Homo sapien
gctgagtgaagtcacgagtgatgaa

SEQ ID NO: 3641189 - DNA, 25 bp, Homo sapien
ggtattccgtccacctacaacgctg

SEQ ID NO: 3641190 - DNA, 25 bp, Homo sapien
agggcaggtattccgtccacctaca

SEQ ID NO: 3641191 - DNA, 25 bp, Homo sapien
tgtcaaattctttagctatagagtg

SEQ ID NO: 3641192 - DNA, 25 bp, Homo sapien
caacgctgactgcactgtcaaattc

SEQ ID NO: 3641193 - DNA, 25 bp, Homo sapien
ggacaactgcttgaacctgggaggc

SEQ ID NO: 3641194 - DNA, 25 bp, Homo sapien
cccagctacttgggaggctgaggca

SEQ ID NO: 3641195 - DNA, 25 bp, Homo sapien
aggcgtggtggcgtgcgcctacagt

SEQ ID NO: 3641196 - DNA, 25 bp, Homo sapien
agcggttgcagtgagccaagatcat

SEQ ID NO: 3641197 - DNA, 25 bp, Homo sapien
gagatcattccatttaggcgttaag

SEQ ID NO: 3641198 - DNA, 25 bp, Homo sapien
taaagtctccaactacgcaagggag

SEQ ID NO: 3641199 - DNA, 25 bp, Homo sapien
ccaggggacttggacttcattataa

SEQ ID NO: 3641200 - DNA, 25 bp, Homo sapien
gggtttaaaaaacgcatctatatca

SEQ ID NO: 3641201 - DNA, 25 bp, Homo sapien
ggagaatcatcagtacaatgaataa

SEQ ID NO: 3641202 - DNA, 25 bp, Homo sapien
gatctggagaatcatcagtacaatg

SEQ ID NO: 3641203 - DNA, 25 bp, Homo sapien
tacatggatctggagaatcatcagt

SEQ ID NO: 3641204 - DNA, 25 bp, Homo sapien
ctcatattctatacatggatctgga

SEQ ID NO: 3641205 - DNA, 25 bp, Homo sapien
agttgtctaccttaagtaccatgag

SEQ ID NO: 3641206 - DNA, 25 bp, Homo sapien
tagtcgatcaattctacccttggcc

SEQ ID NO: 3641207 - DNA, 25 bp, Homo sapien
aggaaaatttcaggtgggcactctc

SEQ ID NO: 3641208 - DNA, 25 bp, Homo sapien
ccttggcctaaatcacaaatgggtc

SEQ ID NO: 3641209 - DNA, 25 bp, Homo sapien
ccttgacaaaacatcgaaactcagc

SEQ ID NO: 3641210 - DNA, 25 bp, Homo sapien
acaaaacatcgaaactcagccccag

SEQ ID NO: 3641211 - DNA, 25 bp, Homo sapien
aaactcagccccaggaatcaattca

SEQ ID NO: 3641212 - DNA, 25 bp, Homo sapien
aactcagccccaggaatcaattcac

SEQ ID NO: 3641213 - DNA, 25 bp, Homo sapien
cgtttcctgcggcaagtgactctgg

SEQ ID NO: 3641214 - DNA, 25 bp, Homo sapien
gatcatagtattgtgtgtagtctct

SEQ ID NO: 3641215 - DNA, 25 bp, Homo sapien
gtactgtatgtgtttcttgaaaaag

SEQ ID NO: 3641216 - DNA, 25 bp, Homo sapien
gtatgcatctgcgaatttcttcctt

SEQ ID NO: 3641217 - DNA, 25 bp, Homo sapien
cttgaaaaagtcttgtatgcatctg

SEQ ID NO: 3641218 - DNA, 25 bp, Homo sapien
gaagctgcacgagccgcgatcgcac

SEQ ID NO: 3641219 - DNA, 25 bp, Homo sapien
tggaagctgcacgagccgcgatcgc

SEQ ID NO: 3641220 - DNA, 25 bp, Homo sapien
aggtggaagctgcacgagccgcgat

SEQ ID NO: 3641221 - DNA, 25 bp, Homo sapien
gaggtggaagctgcacgagccgcga

SEQ ID NO: 3641222 - DNA, 25 bp, Homo sapien
tctggtagaatgcaatgagtaaagc

SEQ ID NO: 3641223 - DNA, 25 bp, Homo sapien
gcaaagtactagtgaaacgggcatc

SEQ ID NO: 3641224 - DNA, 25 bp, Homo sapien
tagactttgttctctgtagatagcc

SEQ ID NO: 3641225 - DNA, 25 bp, Homo sapien
tctaaaacaagacagggaactgact

SEQ ID NO: 3641226 - DNA, 25 bp, Homo sapien
tactgtctctgtatatatcgaacac

SEQ ID NO: 3641227 - DNA, 25 bp, Homo sapien
cctactgtctctgtatatatcgaac

SEQ ID NO: 3641228 - DNA, 25 bp, Homo sapien
ctgtctctgtatatatcgaacacaa

SEQ ID NO: 3641229 - DNA, 25 bp, Homo sapien
actgtctctgtatatatcgaacaca

SEQ ID NO: 3641230 - DNA, 25 bp, Homo sapien
aaggcatgctctgcctgcttataaa

SEQ ID NO: 3641231 - DNA, 25 bp, Homo sapien
taacaaaggcatgctctgcctgctt

SEQ ID NO: 3641232 - DNA, 25 bp, Homo sapien
taaaaccagctcttatattaaagca

SEQ ID NO: 3641233 - DNA, 25 bp, Homo sapien
cataacaaaggcatgctctgcctgc

SEQ ID NO: 3641234 - DNA, 25 bp, Homo sapien
catggtacacaatgatttcagctat

SEQ ID NO: 3641235 - DNA, 25 bp, Homo sapien
taagtcctctaatgttaggtatatt

SEQ ID NO: 3641236 - DNA, 25 bp, Homo sapien
gaatccctaaaccatggtacacaat

SEQ ID NO: 3641237 - DNA, 25 bp, Homo sapien
tattaagtcctctaatgttaggtat

SEQ ID NO: 3641238 - DNA, 25 bp, Homo sapien
tacgggattattcaccatggcagac

SEQ ID NO: 3641239 - DNA, 25 bp, Homo sapien
tctaccgagggtaaactgcaacatt

SEQ ID NO: 3641240 - DNA, 25 bp, Homo sapien
ccaaagatgattcgaagatgtccaa

SEQ ID NO: 3641241 - DNA, 25 bp, Homo sapien
catggcagactgcagaagaccagac

SEQ ID NO: 3641242 - DNA, 25 bp, Homo sapien
aacttcttggtaatgatgtcaactt

SEQ ID NO: 3641243 - DNA, 25 bp, Homo sapien
tcttcattcctggaactatgtgaaa

SEQ ID NO: 3641244 - DNA, 25 bp, Homo sapien
ggaactatgtgaaacagtatcagcc

SEQ ID NO: 3641245 - DNA, 25 bp, Homo sapien
cttcttggtaatgatgtcaacttta

SEQ ID NO: 3641246 - DNA, 25 bp, Homo sapien
ttcctcgaaaggtttatctttgctc

SEQ ID NO: 3641247 - DNA, 25 bp, Homo sapien
agtggatggatgtttcctcgaaagg

SEQ ID NO: 3641248 - DNA, 25 bp, Homo sapien
tggatgtttcctcgaaaggtttatc

SEQ ID NO: 3641249 - DNA, 25 bp, Homo sapien
cctcgaaaggtttatctttgctcct

SEQ ID NO: 3641250 - DNA, 25 bp, Homo sapien
cgccaggaatgacggccacggcatc

SEQ ID NO: 3641251 - DNA, 25 bp, Homo sapien
gctgcgccgccaggaatgacggcca

SEQ ID NO: 3641252 - DNA, 25 bp, Homo sapien
aggaatgacggccacggcatccgat

SEQ ID NO: 3641253 - DNA, 25 bp, Homo sapien
gacggccacggcatccgatcacgaa

SEQ ID NO: 3641254 - DNA, 25 bp, Homo sapien
gaaaacagccagtgctgacacgcac

SEQ ID NO: 3641255 - DNA, 25 bp, Homo sapien
ctttgagctgggggcactgtgctga

SEQ ID NO: 3641256 - DNA, 25 bp, Homo sapien
gggggcactgtgctgaggtagggct

SEQ ID NO: 3641257 - DNA, 25 bp, Homo sapien
gctggggcctctgagcagaaaacag

SEQ ID NO: 3641258 - DNA, 25 bp, Homo sapien
caaaagatcatctgtctatatccca

SEQ ID NO: 3641259 - DNA, 25 bp, Homo sapien
ccatctgagaaagggccgcctgtct

SEQ ID NO: 3641260 - DNA, 25 bp, Homo sapien
tgtctgaatagacagagatctaaag

SEQ ID NO: 3641261 - DNA, 25 bp, Homo sapien
gacagagatctaaagggagggcccc

SEQ ID NO: 3641262 - DNA, 25 bp, Homo sapien
gaacagcagtgaatctgtgacttca

SEQ ID NO: 3641263 - DNA, 25 bp, Homo sapien
tcaccaaatggattaaagtcaatga

SEQ ID NO: 3641264 - DNA, 25 bp, Homo sapien
agtgaatctgtgacttcaccaaatg

SEQ ID NO: 3641265 - DNA, 25 bp, Homo sapien
caccaaatggattaaagtcaatgag

SEQ ID NO: 3641266 - DNA, 25 bp, Homo sapien
tcaacttcactaaaatcgccgttta

SEQ ID NO: 3641267 - DNA, 25 bp, Homo sapien
tgctcttgagcgtcaacttcactaa

SEQ ID NO: 3641268 - DNA, 25 bp, Homo sapien
agttgttctcagatatcagttcttc

SEQ ID NO: 3641269 - DNA, 25 bp, Homo sapien
ttaagttgttctcagatatcagttc

SEQ ID NO: 3641270 - DNA, 25 bp, Homo sapien
gaggtatctgagcatgactaaatcc

SEQ ID NO: 3641271 - DNA, 25 bp, Homo sapien
tttctttaagaatgagcacgttact

SEQ ID NO: 3641272 - DNA, 25 bp, Homo sapien
caaaggtctatgcatgtgtttaaat

SEQ ID NO: 3641273 - DNA, 25 bp, Homo sapien
cagcactacaaagttgtttcaggaa

SEQ ID NO: 3641274 - DNA, 25 bp, Homo sapien
tagagaggtctacaaagtccttggg

SEQ ID NO: 3641275 - DNA, 25 bp, Homo sapien
cactgtttgtgcaacggaaagctgg

SEQ ID NO: 3641276 - DNA, 25 bp, Homo sapien
gaagtctattagcttgtgagcgtcc

SEQ ID NO: 3641277 - DNA, 25 bp, Homo sapien
ggctggactgtcacttcactgtttg

SEQ ID NO: 3641278 - DNA, 25 bp, Homo sapien
gctctaactcagtaacttggttcca

SEQ ID NO: 3641279 - DNA, 25 bp, Homo sapien
agccaatttgaaggtctatttgaaa

SEQ ID NO: 3641280 - DNA, 25 bp, Homo sapien
tgttcaaaaggcatgtacagcataa

SEQ ID NO: 3641281 - DNA, 25 bp, Homo sapien
taaccatcaaagtctaggtgataca

SEQ ID NO: 3641282 - DNA, 25 bp, Homo sapien
taattttctagaggtcttggcaaag

SEQ ID NO: 3641283 - DNA, 25 bp, Homo sapien
ctttgactcctgagcaaattatcct

SEQ ID NO: 3641284 - DNA, 25 bp, Homo sapien
catgctccttgggatatctgctcag

SEQ ID NO: 3641285 - DNA, 25 bp, Homo sapien
ccctcttgagtaaaatcaccaccag

SEQ ID NO: 3641286 - DNA, 25 bp, Homo sapien
gggtcggcaggaagttgcggctgat

SEQ ID NO: 3641287 - DNA, 25 bp, Homo sapien
cggcaggaagttgcggctgatgagc

SEQ ID NO: 3641288 - DNA, 25 bp, Homo sapien
tcagggtcggcaggaagttgcggct

SEQ ID NO: 3641289 - DNA, 25 bp, Homo sapien
gtcggcaggaagttgcggctgatga

SEQ ID NO: 3641290 - DNA, 25 bp, Homo sapien
ccccaggtgaatgtacatgaatata

SEQ ID NO: 3641291 - DNA, 25 bp, Homo sapien
ttccccaggtgaatgtacatgaata

SEQ ID NO: 3641292 - DNA, 25 bp, Homo sapien
ttttcctatgtttaagatctattta

SEQ ID NO: 3641293 - DNA, 25 bp, Homo sapien
tggttttcctatgtttaagatctat

SEQ ID NO: 3641294 - DNA, 25 bp, Homo sapien
catagaaagcattttattatcagaa

SEQ ID NO: 3641295 - DNA, 25 bp, Homo sapien
tagaaagcattttattatcagaaca

SEQ ID NO: 3641296 - DNA, 25 bp, Homo sapien
atagaaagcattttattatcagaac

SEQ ID NO: 3641297 - DNA, 25 bp, Homo sapien
tgcaaatcaaatgagactcttgaaa

SEQ ID NO: 3641298 - DNA, 25 bp, Homo sapien
gttttttaacgatcctcaatcatca

SEQ ID NO: 3641299 - DNA, 25 bp, Homo sapien
aaaaactgtcacataaggtttctgc

SEQ ID NO: 3641300 - DNA, 25 bp, Homo sapien
ttgagatgagaaaaccttacgaact

SEQ ID NO: 3641301 - DNA, 25 bp, Homo sapien
ctccctgaaacccatagtctttagg

SEQ ID NO: 3641302 - DNA, 25 bp, Homo sapien
gcacacggtgctgtaacaggctcat

SEQ ID NO: 3641303 - DNA, 25 bp, Homo sapien
ggtgaaggcacacggtgctgtaaca

SEQ ID NO: 3641304 - DNA, 25 bp, Homo sapien
gggatttcttcgctgattctgcaga

SEQ ID NO: 3641305 - DNA, 25 bp, Homo sapien
agacagcccttgcaaattcagggtg

SEQ ID NO: 3641306 - DNA, 25 bp, Homo sapien
gggtgtatggctaccttgattgtcc

SEQ ID NO: 3641307 - DNA, 25 bp, Homo sapien
ttcagggtgtatggctaccttgatt

SEQ ID NO: 3641308 - DNA, 25 bp, Homo sapien
gtatggctaccttgattgtcctcag

SEQ ID NO: 3641309 - DNA, 25 bp, Homo sapien
caaacataatatgtgcatgtgctcc

SEQ ID NO: 3641310 - DNA, 25 bp, Homo sapien
aacaagaccataggacctggtgtag

SEQ ID NO: 3641311 - DNA, 25 bp, Homo sapien
gtgtttggaaacaagaccataggac

SEQ ID NO: 3641312 - DNA, 25 bp, Homo sapien
gacctggtgtagtcccaaacataat

SEQ ID NO: 3641313 - DNA, 25 bp, Homo sapien
gacagaagcccttcatactgcaaag

SEQ ID NO: 3641314 - DNA, 25 bp, Homo sapien
cagaagcccttcatactgcaaagag

SEQ ID NO: 3641315 - DNA, 25 bp, Homo sapien
acagaagcccttcatactgcaaaga

SEQ ID NO: 3641316 - DNA, 25 bp, Homo sapien
ccagcttccataccttgagctactg

SEQ ID NO: 3641317 - DNA, 25 bp, Homo sapien
ctaaacagaacaagtaagtctcatc

SEQ ID NO: 3641318 - DNA, 25 bp, Homo sapien
tccataccttgagctactgtaagct

SEQ ID NO: 3641319 - DNA, 25 bp, Homo sapien
catcaataatggattccagaggcaa

SEQ ID NO: 3641320 - DNA, 25 bp, Homo sapien
ttcatcatttcatcgtctaccataa

SEQ ID NO: 3641321 - DNA, 25 bp, Homo sapien
cgtctaccataaaacctgcacacat

SEQ ID NO: 3641322 - DNA, 25 bp, Homo sapien
tgcacacatggccaagcctcggtta

SEQ ID NO: 3641323 - DNA, 25 bp, Homo sapien
aataaggctgatttccaacctccat

SEQ ID NO: 3641324 - DNA, 25 bp, Homo sapien
ttgcttggtcgctgtgaattttaaa

SEQ ID NO: 3641325 - DNA, 25 bp, Homo sapien
gaactcaatgaacctgcatcacaga

SEQ ID NO: 3641326 - DNA, 25 bp, Homo sapien
gcttggtcgctgtgaattttaaatt

SEQ ID NO: 3641327 - DNA, 25 bp, Homo sapien
ttagaagtgtctgaactcaatgaac

SEQ ID NO: 3641328 - DNA, 25 bp, Homo sapien
ttgttgtctggaaagaaatgcatgt

SEQ ID NO: 3641329 - DNA, 25 bp, Homo sapien
gaaagctgcctcatagaggtgtcca

SEQ ID NO: 3641330 - DNA, 25 bp, Homo sapien
gacacatacttaatagggattgttg

SEQ ID NO: 3641331 - DNA, 25 bp, Homo sapien
cattaataaactgggaataagacac

SEQ ID NO: 3641332 - DNA, 25 bp, Homo sapien
aatcaaacctcattaaatcagaagg

SEQ ID NO: 3641333 - DNA, 25 bp, Homo sapien
gtgtggcaggtataggcatgaaaat

SEQ ID NO: 3641334 - DNA, 25 bp, Homo sapien
gctaaagtgtggcaggtataggcat

SEQ ID NO: 3641335 - DNA, 25 bp, Homo sapien
tgtcggccgctgctaaagtgtggca

SEQ ID NO: 3641336 - DNA, 25 bp, Homo sapien
caagccaggtgtcggccgctgctaa

SEQ ID NO: 3641337 - DNA, 25 bp, Homo sapien
gaatatcttgcctggagcagctcat

SEQ ID NO: 3641338 - DNA, 25 bp, Homo sapien
aaaacaaaaacaagcgctggcccag

SEQ ID NO: 3641339 - DNA, 25 bp, Homo sapien
actctttgtgttgcaattagttggg

SEQ ID NO: 3641340 - DNA, 25 bp, Homo sapien
tcctgagcaagggaacactctttgt

SEQ ID NO: 3641341 - DNA, 25 bp, Homo sapien
tcacatgttcaagtgactttgctgc

SEQ ID NO: 3641342 - DNA, 25 bp, Homo sapien
gccacatcactgtcagtggaccacg

SEQ ID NO: 3641343 - DNA, 25 bp, Homo sapien
catgttcaagtgactttgctgccac

SEQ ID NO: 3641344 - DNA, 25 bp, Homo sapien
cagtggaccacgtgctttggttggc

SEQ ID NO: 3641345 - DNA, 25 bp, Homo sapien
ttatggccgatctgagctgacaacg

SEQ ID NO: 3641346 - DNA, 25 bp, Homo sapien
gttcttatcagcctcgtctttctcc

SEQ ID NO: 3641347 - DNA, 25 bp, Homo sapien
cacaggctgtcactcgaaatccctt

SEQ ID NO: 3641348 - DNA, 25 bp, Homo sapien
atctgagctgacaacggaaggacgc

SEQ ID NO: 3641349 - DNA, 25 bp, Homo sapien
cgggctgcggcgcagcttcctcctc

SEQ ID NO: 3641350 - DNA, 25 bp, Homo sapien
ctcgggctgcggcgcagcttcctcc

SEQ ID NO: 3641351 - DNA, 25 bp, Homo sapien
gccgcggccgcggtccctccctggc

SEQ ID NO: 3641352 - DNA, 25 bp, Homo sapien
cgcggccgcggtccctccctggctc

SEQ ID NO: 3641353 - DNA, 25 bp, Homo sapien
tgctctcgccgttctcccgggccat

SEQ ID NO: 3641354 - DNA, 25 bp, Homo sapien
gttccgagggtctctttgaactcga

SEQ ID NO: 3641355 - DNA, 25 bp, Homo sapien
gtctctttgaactcgaagatcttct

SEQ ID NO: 3641356 - DNA, 25 bp, Homo sapien
aggagctgctctcgccgttctcccg

SEQ ID NO: 3641357 - DNA, 25 bp, Homo sapien
cagacgccgagcctggaggtgaaga

SEQ ID NO: 3641358 - DNA, 25 bp, Homo sapien
gcagacgccgagcctggaggtgaag

SEQ ID NO: 3641359 - DNA, 25 bp, Homo sapien
agcagacgccgagcctggaggtgaa

SEQ ID NO: 3641360 - DNA, 25 bp, Homo sapien
agacgccgagcctggaggtgaagac

SEQ ID NO: 3641361 - DNA, 25 bp, Homo sapien
agccacggacaggaaagcattcaca

SEQ ID NO: 3641362 - DNA, 25 bp, Homo sapien
tgggaacaagccacggacaggaaag

SEQ ID NO: 3641363 - DNA, 25 bp, Homo sapien
ctcgggtgggaacaagccacggaca

SEQ ID NO: 3641364 - DNA, 25 bp, Homo sapien
atcagtcacccggaggctacaggca

SEQ ID NO: 3641365 - DNA, 25 bp, Homo sapien
gagtctacgttcagacagccccatg

SEQ ID NO: 3641366 - DNA, 25 bp, Homo sapien
gtctgcattcaagcgtcacctcaag

SEQ ID NO: 3641367 - DNA, 25 bp, Homo sapien
tgtggccgcctttgaccggaagagt

SEQ ID NO: 3641368 - DNA, 25 bp, Homo sapien
cgtctcctcggtgcctagaatatag

SEQ ID NO: 3641369 - DNA, 25 bp, Homo sapien
taagcacggaattgaccatcttgca

SEQ ID NO: 3641370 - DNA, 25 bp, Homo sapien
gaatctttcccggagtccacgtgtc

SEQ ID NO: 3641371 - DNA, 25 bp, Homo sapien
tagccaacgtgaaccgagatcaggc

SEQ ID NO: 3641372 - DNA, 25 bp, Homo sapien
aaataacgtgggtccgctgactcgg

SEQ ID NO: 3641373 - DNA, 25 bp, Homo sapien
cactattccaacctaaagaagccct

SEQ ID NO: 3641374 - DNA, 25 bp, Homo sapien
atttttcctggtgacgtggacacta

SEQ ID NO: 3641375 - DNA, 25 bp, Homo sapien
gctgtgacagtatctgcagtcccgg

SEQ ID NO: 3641376 - DNA, 25 bp, Homo sapien
gccctggcgtccatggtagagctgt

SEQ ID NO: 3641377 - DNA, 25 bp, Homo sapien
catggtgaaacctcgtctctactaa

SEQ ID NO: 3641378 - DNA, 25 bp, Homo sapien
aggagatcgagaccagcctggccaa

SEQ ID NO: 3641379 - DNA, 25 bp, Homo sapien
caagacgggtgggtcatttgaggtc

SEQ ID NO: 3641380 - DNA, 25 bp, Homo sapien
ggccaagacgggtgggtcatttgag

SEQ ID NO: 3641381 - DNA, 25 bp, Homo sapien
tcaggagatcgcgactatcctgact

SEQ ID NO: 3641382 - DNA, 25 bp, Homo sapien
gatcgcgactatcctgactaacacg

SEQ ID NO: 3641383 - DNA, 25 bp, Homo sapien
aggaggtcaggagatcgcgactatc

SEQ ID NO: 3641384 - DNA, 25 bp, Homo sapien
gagatcgcgactatcctgactaaca

SEQ ID NO: 3641385 - DNA, 25 bp, Homo sapien
ttgtacccgggaggaagagcctgca

SEQ ID NO: 3641386 - DNA, 25 bp, Homo sapien
gtgtgctggcgtgcaccagtagtca

SEQ ID NO: 3641387 - DNA, 25 bp, Homo sapien
tgctggcgtgcaccagtagtcacag

SEQ ID NO: 3641388 - DNA, 25 bp, Homo sapien
ctggcgtgcaccagtagtcacagct

SEQ ID NO: 3641389 - DNA, 25 bp, Homo sapien
cactaactagcttgttagcagcctg

SEQ ID NO: 3641390 - DNA, 25 bp, Homo sapien
aatgagaatgatggccatgcgtggt

SEQ ID NO: 3641391 - DNA, 25 bp, Homo sapien
ttgttagcagcctgatcaaatgaga

SEQ ID NO: 3641392 - DNA, 25 bp, Homo sapien
agtcagtacttctctatcccatcag

SEQ ID NO: 3641393 - DNA, 25 bp, Homo sapien
tctggaagtctgtggcgtcaggtct

SEQ ID NO: 3641394 - DNA, 25 bp, Homo sapien
ccatgagaataagccaagcaaggcc

SEQ ID NO: 3641395 - DNA, 25 bp, Homo sapien
tcttggcgacaggatctgtcccgct

SEQ ID NO: 3641396 - DNA, 25 bp, Homo sapien
tgtggcgtcaggtctcatcttggcg

SEQ ID NO: 3641397 - DNA, 25 bp, Homo sapien
tttagccaggagtagagtcgtatct

SEQ ID NO: 3641398 - DNA, 25 bp, Homo sapien
acaaggtttcgctttgccgcccaga

SEQ ID NO: 3641399 - DNA, 25 bp, Homo sapien
aagatatttagccaggagtagagtc

SEQ ID NO: 3641400 - DNA, 25 bp, Homo sapien
tgaatggtaaaaactggcctcaaat

SEQ ID NO: 3641401 - DNA, 25 bp, Homo sapien
aagtgctaggaaggaacacagaaag

SEQ ID NO: 3641402 - DNA, 25 bp, Homo sapien
cacatttaatcaaagtgctaggaag

SEQ ID NO: 3641403 - DNA, 25 bp, Homo sapien
gctacttgcagggatgttgtacaga

SEQ ID NO: 3641404 - DNA, 25 bp, Homo sapien
tcttccatgtgccaactacaaaaaa

SEQ ID NO: 3641405 - DNA, 25 bp, Homo sapien
gaacctccactacaaagttgaatgg

SEQ ID NO: 3641406 - DNA, 25 bp, Homo sapien
gacactcttgtgtcgctcctgaggc

SEQ ID NO: 3641407 - DNA, 25 bp, Homo sapien
ctagttaaggtaaagcgttcattct

SEQ ID NO: 3641408 - DNA, 25 bp, Homo sapien
tctaactacgctggctagaacctcc

SEQ ID NO: 3641409 - DNA, 25 bp, Homo sapien
taagcagtaactgaccacacacacc

SEQ ID NO: 3641410 - DNA, 25 bp, Homo sapien
gagaacacttaaatctggagctggt

SEQ ID NO: 3641411 - DNA, 25 bp, Homo sapien
cccctctgcagggagtttaagcagt

SEQ ID NO: 3641412 - DNA, 25 bp, Homo sapien
gctggtggaatcaccagaaacccaa

SEQ ID NO: 3641413 - DNA, 25 bp, Homo sapien
gagcctacgtggctggaagtgctaa

SEQ ID NO: 3641414 - DNA, 25 bp, Homo sapien
cctacgtggctggaagtgctaagct

SEQ ID NO: 3641415 - DNA, 25 bp, Homo sapien
aagtgctaagctgaaccagcaacag

SEQ ID NO: 3641416 - DNA, 25 bp, Homo sapien
gtgctaagctgaaccagcaacagct

SEQ ID NO: 3641417 - DNA, 25 bp, Homo sapien
gatcgcatcattagggcttctgcct

SEQ ID NO: 3641418 - DNA, 25 bp, Homo sapien
gcatctggcttcacgtgtccaacgt

SEQ ID NO: 3641419 - DNA, 25 bp, Homo sapien
tctgccttcttcctgagtacttcca

SEQ ID NO: 3641420 - DNA, 25 bp, Homo sapien
tgtccaacgtggtcctcagatcgca

SEQ ID NO: 3641421 - DNA, 25 bp, Homo sapien
gagtctttatagaatagctgttcat

SEQ ID NO: 3641422 - DNA, 25 bp, Homo sapien
caagagacaattttttgagtgccca

SEQ ID NO: 3641423 - DNA, 25 bp, Homo sapien
gcattaacagggaggtttctatccc

SEQ ID NO: 3641424 - DNA, 25 bp, Homo sapien
tgcaggaattctatggtgcacgcct

SEQ ID NO: 3641425 - DNA, 25 bp, Homo sapien
ccaacaagccaaccgctaatcccag

SEQ ID NO: 3641426 - DNA, 25 bp, Homo sapien
cagcaccatttgattgatgcaccca

SEQ ID NO: 3641427 - DNA, 25 bp, Homo sapien
tggctgtggtgccaatggaactgcc

SEQ ID NO: 3641428 - DNA, 25 bp, Homo sapien
accatttgattgatgcacccattca

SEQ ID NO: 3641429 - DNA, 25 bp, Homo sapien
tgtttggcgcgacatgacggtcctg

SEQ ID NO: 3641430 - DNA, 25 bp, Homo sapien
tgaatgtccggagtgcacagcacaa

SEQ ID NO: 3641431 - DNA, 25 bp, Homo sapien
cttttgccagatattaactagtatt

SEQ ID NO: 3641432 - DNA, 25 bp, Homo sapien
gctgtttccccaggggtatctggaa

SEQ ID NO: 3641433 - DNA, 25 bp, Homo sapien
tgcacagtgatcagggagctgcttc

SEQ ID NO: 3641434 - DNA, 25 bp, Homo sapien
gcatctcattaaggcactcacaggg

SEQ ID NO: 3641435 - DNA, 25 bp, Homo sapien
cagatgggaaccaatgtggatccgc

SEQ ID NO: 3641436 - DNA, 25 bp, Homo sapien
acatagcgggctagtcgaggtcgtc

SEQ ID NO: 3641437 - DNA, 25 bp, Homo sapien
gttgtcacctgagaaaccagcccac

SEQ ID NO: 3641438 - DNA, 25 bp, Homo sapien
tattcatcccatcaacagtcatcaa

SEQ ID NO: 3641439 - DNA, 25 bp, Homo sapien
cacactgggccaggctacgggaagc

SEQ ID NO: 3641440 - DNA, 25 bp, Homo sapien
caccaggagatgaggactgtgataa

SEQ ID NO: 3641441 - DNA, 25 bp, Homo sapien
tctctacaagctcttttttggaggg

SEQ ID NO: 3641442 - DNA, 25 bp, Homo sapien
cctcttgcatttggccaggtgttca

SEQ ID NO: 3641443 - DNA, 25 bp, Homo sapien
gggcatgctgcagcttggaatccag

SEQ ID NO: 3641444 - DNA, 25 bp, Homo sapien
cagtcattcgtatccaggcatcgca

SEQ ID NO: 3641445 - DNA, 25 bp, Homo sapien
tattcacaggcaactcacacaggag

SEQ ID NO: 3641446 - DNA, 25 bp, Homo sapien
ggctaacgcattcctggctgtctga

SEQ ID NO: 3641447 - DNA, 25 bp, Homo sapien
tggagcgtagtcacaggatcatagc

SEQ ID NO: 3641448 - DNA, 25 bp, Homo sapien
gactgaatttctgccgctgacgctt

SEQ ID NO: 3641449 - DNA, 25 bp, Homo sapien
tatactctcaacacgggagcagcta

SEQ ID NO: 3641450 - DNA, 25 bp, Homo sapien
ggttctacgtgctcccaatgaggat

SEQ ID NO: 3641451 - DNA, 25 bp, Homo sapien
taacagcaagcgtggttcctgccaa

SEQ ID NO: 3641452 - DNA, 25 bp, Homo sapien
tggcctgacctagggtatacacagc

SEQ ID NO: 3641453 - DNA, 25 bp, Homo sapien
tgctgttgaatgagggcagagtttc

SEQ ID NO: 3641454 - DNA, 25 bp, Homo sapien
aaatggtcaaacttacattaataca

SEQ ID NO: 3641455 - DNA, 25 bp, Homo sapien
aagtcaaaatggtcaaacttacatt

SEQ ID NO: 3641456 - DNA, 25 bp, Homo sapien
gttgctgttgaatgagggcagagtt

SEQ ID NO: 3641457 - DNA, 25 bp, Homo sapien
tctctccctgtggagccgttcactt

SEQ ID NO: 3641458 - DNA, 25 bp, Homo sapien
ctgtggagccgttcacttgatttcc

SEQ ID NO: 3641459 - DNA, 25 bp, Homo sapien
tttcctctttatccggggagctaca

SEQ ID NO: 3641460 - DNA, 25 bp, Homo sapien
ttatccggggagctacaggtctcca

SEQ ID NO: 3641461 - DNA, 25 bp, Homo sapien
ggtcacctgatgtgtacacagccag

SEQ ID NO: 3641462 - DNA, 25 bp, Homo sapien
ctcggacacggttcacatggtcacc

SEQ ID NO: 3641463 - DNA, 25 bp, Homo sapien
caggttttaggctgctgagctctag

SEQ ID NO: 3641464 - DNA, 25 bp, Homo sapien
tgagctctagtcaaaggacctcgga

SEQ ID NO: 3641465 - DNA, 25 bp, Homo sapien
aatagtgctcgcaggaaaggaagaa

SEQ ID NO: 3641466 - DNA, 25 bp, Homo sapien
tatctctccttagcaggaaaggaat

SEQ ID NO: 3641467 - DNA, 25 bp, Homo sapien
gaataaatagtgctcgcaggaaagg

SEQ ID NO: 3641468 - DNA, 25 bp, Homo sapien
caggaaaggaataaatagtgctcgc

SEQ ID NO: 3641469 - DNA, 25 bp, Homo sapien
tcttctagggcataaggtctctggt

SEQ ID NO: 3641470 - DNA, 25 bp, Homo sapien
ggtattgtcacagagactccaagct

SEQ ID NO: 3641471 - DNA, 25 bp, Homo sapien
tctggtttgggactagacccacctc

SEQ ID NO: 3641472 - DNA, 25 bp, Homo sapien
cagaatggaggccatagttccacct

SEQ ID NO: 3641473 - DNA, 25 bp, Homo sapien
taaatgctgttaacgaaagacatgg

SEQ ID NO: 3641474 - DNA, 25 bp, Homo sapien
gaatttaagcccatcacaaccataa

SEQ ID NO: 3641475 - DNA, 25 bp, Homo sapien
aaattggacttttcaagcccagcca

SEQ ID NO: 3641476 - DNA, 25 bp, Homo sapien
tgctataagggaacacacaccaaat

SEQ ID NO: 3641477 - DNA, 25 bp, Homo sapien
cttttgagccatacagcctagatca

SEQ ID NO: 3641478 - DNA, 25 bp, Homo sapien
gactcgttgttgctattaatggcca

SEQ ID NO: 3641479 - DNA, 25 bp, Homo sapien
catgccgcccactaattacaggtta

SEQ ID NO: 3641480 - DNA, 25 bp, Homo sapien
gacatacaacttgcaggactggcca

SEQ ID NO: 3641481 - DNA, 25 bp, Homo sapien
tactaaacgctcatgagcaccagca

SEQ ID NO: 3641482 - DNA, 25 bp, Homo sapien
agacccactactaaacgctcatgag

SEQ ID NO: 3641483 - DNA, 25 bp, Homo sapien
tgagcaccagcacatatgtcatcta

SEQ ID NO: 3641484 - DNA, 25 bp, Homo sapien
atgagcaccagcacatatgtcatct

SEQ ID NO: 3641485 - DNA, 25 bp, Homo sapien
tcctataacaggattttcgtacttc

SEQ ID NO: 3641486 - DNA, 25 bp, Homo sapien
gaagaccttcctggaatccccgtca

SEQ ID NO: 3641487 - DNA, 25 bp, Homo sapien
caggattttcgtacttctccattgg

SEQ ID NO: 3641488 - DNA, 25 bp, Homo sapien
cgtcaattctccaagatcccacaaa

SEQ ID NO: 3641489 - DNA, 25 bp, Homo sapien
ccacaggcagctcatcctgattgta

SEQ ID NO: 3641490 - DNA, 25 bp, Homo sapien
ggtgcctgcgaggaaataatctttt

SEQ ID NO: 3641491 - DNA, 25 bp, Homo sapien
ctgattgtaagccaggtgcctgcga

SEQ ID NO: 3641492 - DNA, 25 bp, Homo sapien
tgcaaaagttgaatccttcctcctt

SEQ ID NO: 3641493 - DNA, 25 bp, Homo sapien
ggatttactaagtccatcttccaga

SEQ ID NO: 3641494 - DNA, 25 bp, Homo sapien
cagaaggcggaaaagccctttggca

SEQ ID NO: 3641495 - DNA, 25 bp, Homo sapien
caccccaatggtcctgagtttgttg

SEQ ID NO: 3641496 - DNA, 25 bp, Homo sapien
ctgggaactgcgatcaggcccctct

SEQ ID NO: 3641497 - DNA, 25 bp, Homo sapien
cagcccactgagtcgttctctgtgc

SEQ ID NO: 3641498 - DNA, 25 bp, Homo sapien
cagcaacttgggctctgtgcacagg

SEQ ID NO: 3641499 - DNA, 25 bp, Homo sapien
tctctgtgccaagactttcaactcc

SEQ ID NO: 3641500 - DNA, 25 bp, Homo sapien
gctctgtgcacagggaagtaccaca

SEQ ID NO: 3641501 - DNA, 25 bp, Homo sapien
cttagggatacacttcacagcaaag

SEQ ID NO: 3641502 - DNA, 25 bp, Homo sapien
tctcaggacggctatctcattctct

SEQ ID NO: 3641503 - DNA, 25 bp, Homo sapien
cagcgccttcttagggatacacttc

SEQ ID NO: 3641504 - DNA, 25 bp, Homo sapien
ttctcaggacggctatctcattctc

SEQ ID NO: 3641505 - DNA, 25 bp, Homo sapien
gcagggtctcggttcacaagcaagt

SEQ ID NO: 3641506 - DNA, 25 bp, Homo sapien
aaatctttacaacaccctgccaggg

SEQ ID NO: 3641507 - DNA, 25 bp, Homo sapien
caaccatggccgtgaatgttctaag

SEQ ID NO: 3641508 - DNA, 25 bp, Homo sapien
ttggttatcgtttgcacagcctggg

SEQ ID NO: 3641509 - DNA, 25 bp, Homo sapien
tgcaaaatcaggtaccatacaaggg

SEQ ID NO: 3641510 - DNA, 25 bp, Homo sapien
caaaatcaggtaccatacaagggct

SEQ ID NO: 3641511 - DNA, 25 bp, Homo sapien
acatgcaaaatcaggtaccatacaa

SEQ ID NO: 3641512 - DNA, 25 bp, Homo sapien
catgcaaaatcaggtaccatacaag

SEQ ID NO: 3641513 - DNA, 25 bp, Homo sapien
taacagtggtgactattcccaaaac

SEQ ID NO: 3641514 - DNA, 25 bp, Homo sapien
cgcacatctgcataaggaaacactg

SEQ ID NO: 3641515 - DNA, 25 bp, Homo sapien
tactggacatatacccctaggaaat

SEQ ID NO: 3641516 - DNA, 25 bp, Homo sapien
cgactcagcaacaataccatggaaa

SEQ ID NO: 3641517 - DNA, 25 bp, Homo sapien
ttgaacctacgggagggtcactgcc

SEQ ID NO: 3641518 - DNA, 25 bp, Homo sapien
agtgacaaggtcactactgccattg

SEQ ID NO: 3641519 - DNA, 25 bp, Homo sapien
gtagttacctcaagtacttgtagag

SEQ ID NO: 3641520 - DNA, 25 bp, Homo sapien
tgccacatccacttaagtgacaagg

SEQ ID NO: 3641521 - DNA, 25 bp, Homo sapien
gcatacagagtcaaggtggccgtca

SEQ ID NO: 3641522 - DNA, 25 bp, Homo sapien
ctccattctgagatagacggcatgc

SEQ ID NO: 3641523 - DNA, 25 bp, Homo sapien
tcccagtccgtgctagaaaccaaga

SEQ ID NO: 3641524 - DNA, 25 bp, Homo sapien
aggtgtgctcactgactgacatgca

SEQ ID NO: 3641525 - DNA, 25 bp, Homo sapien
tgggtaagggataaaacactgcaca

SEQ ID NO: 3641526 - DNA, 25 bp, Homo sapien
gtaagggataaaacactgcacactg

SEQ ID NO: 3641527 - DNA, 25 bp, Homo sapien
ggtaagggataaaacactgcacact

SEQ ID NO: 3641528 - DNA, 25 bp, Homo sapien
ggatgggtaagggataaaacactgc

SEQ ID NO: 3641529 - DNA, 25 bp, Homo sapien
aatgagaagaggaacggccctgagc

SEQ ID NO: 3641530 - DNA, 25 bp, Homo sapien
tcgagatggcaggtcactgaagact

SEQ ID NO: 3641531 - DNA, 25 bp, Homo sapien
taaatacctatgctcggaagggctc

SEQ ID NO: 3641532 - DNA, 25 bp, Homo sapien
tccatggagtgtccgaaggatcgag

SEQ ID NO: 3641533 - DNA, 25 bp, Homo sapien
tatccaacttaccaaggaggagcct

SEQ ID NO: 3641534 - DNA, 25 bp, Homo sapien
gatgccccgagtgagaggtaaccaa

SEQ ID NO: 3641535 - DNA, 25 bp, Homo sapien
tcaaaaccgctaatgggaagatgcc

SEQ ID NO: 3641536 - DNA, 25 bp, Homo sapien
catggtccccattctcctgtaaggg

SEQ ID NO: 3641537 - DNA, 25 bp, Homo sapien
catcacaacctctcttaacattgca

SEQ ID NO: 3641538 - DNA, 25 bp, Homo sapien
ggtggttttaacatgccgccaagcc

SEQ ID NO: 3641539 - DNA, 25 bp, Homo sapien
taatccatctggaatagacccaggt

SEQ ID NO: 3641540 - DNA, 25 bp, Homo sapien
tattctaggaaagcgatcgtgggct

SEQ ID NO: 3641541 - DNA, 25 bp, Homo sapien
aagtcaatgcgtttttagctccaag

SEQ ID NO: 3641542 - DNA, 25 bp, Homo sapien
gcagacagccttgggtcttaccttt

SEQ ID NO: 3641543 - DNA, 25 bp, Homo sapien
ttaagaagcttcagtccagagggag

SEQ ID NO: 3641544 - DNA, 25 bp, Homo sapien
catgagtcagcgcagacagccttgg

SEQ ID NO: 3641545 - DNA, 25 bp, Homo sapien
cttacctttaagaagcttcagtcca

SEQ ID NO: 3641546 - DNA, 25 bp, Homo sapien
tgagaagggacagaaacgtagagcc

SEQ ID NO: 3641547 - DNA, 25 bp, Homo sapien
tagagcccattgtcattggcccact

SEQ ID NO: 3641548 - DNA, 25 bp, Homo sapien
gacagaaacgcttgagttcactgac

SEQ ID NO: 3641549 - DNA, 25 bp, Homo sapien
gatcacacctataggcttaaacgtg

SEQ ID NO: 3641550 - DNA, 25 bp, Homo sapien
cacacgttcaacctcctggaaacag

SEQ ID NO: 3641551 - DNA, 25 bp, Homo sapien
gccgagcagatgagaaccacacgtt

SEQ ID NO: 3641552 - DNA, 25 bp, Homo sapien
ccgcctttcattgtcagtgtcagca

SEQ ID NO: 3641553 - DNA, 25 bp, Homo sapien
ttctgctttccgcaagtggatcctg

SEQ ID NO: 3641554 - DNA, 25 bp, Homo sapien
gctttcaatctctaaaccagtggga

SEQ ID NO: 3641555 - DNA, 25 bp, Homo sapien
cctgtttcactagagtgttcaaagc

SEQ ID NO: 3641556 - DNA, 25 bp, Homo sapien
gagtatcctgtttcactagagtgtt

SEQ ID NO: 3641557 - DNA, 25 bp, Homo sapien
tttgctttcaatctctaaaccagtg

SEQ ID NO: 3641558 - DNA, 25 bp, Homo sapien
ctctctttctaccacgaataggttt

SEQ ID NO: 3641559 - DNA, 25 bp, Homo sapien
tctctttctaccacgaataggtttg

SEQ ID NO: 3641560 - DNA, 25 bp, Homo sapien
ctctttctaccacgaataggtttgt

SEQ ID NO: 3641561 - DNA, 25 bp, Homo sapien
ggtcccactccatcgaatagcacag

SEQ ID NO: 3641562 - DNA, 25 bp, Homo sapien
tggagccgtgttctcaacccgaggt

SEQ ID NO: 3641563 - DNA, 25 bp, Homo sapien
tggcttcaggcactgcgcaactggt

SEQ ID NO: 3641564 - DNA, 25 bp, Homo sapien
taaggacctattacaacagcagaag

SEQ ID NO: 3641565 - DNA, 25 bp, Homo sapien
gagatgtgatgttaaggagcttgtt

SEQ ID NO: 3641566 - DNA, 25 bp, Homo sapien
ttggagatgtgatgttaaggagctt

SEQ ID NO: 3641567 - DNA, 25 bp, Homo sapien
ccccttcatgactggttggagatgt

SEQ ID NO: 3641568 - DNA, 25 bp, Homo sapien
caggccccttcatgactggttggag

SEQ ID NO: 3641569 - DNA, 25 bp, Homo sapien
gggctgattactccatgtcggcagt

SEQ ID NO: 3641570 - DNA, 25 bp, Homo sapien
tagctggtaatgtgcttgctgggcc

SEQ ID NO: 3641571 - DNA, 25 bp, Homo sapien
taacaacagctggtagccctagagc

SEQ ID NO: 3641572 - DNA, 25 bp, Homo sapien
cacacttctaaggatggcgacttgg

SEQ ID NO: 3641573 - DNA, 25 bp, Homo sapien
tcggctgctaatcatgaaccactgg

SEQ ID NO: 3641574 - DNA, 25 bp, Homo sapien
ggatttcaaggagctcaccagtgga

SEQ ID NO: 3641575 - DNA, 25 bp, Homo sapien
cacggtggtgtacatttgcagtccc

SEQ ID NO: 3641576 - DNA, 25 bp, Homo sapien
tatggacacacaagtgcaagacggt

SEQ ID NO: 3641577 - DNA, 25 bp, Homo sapien
cagttcatcatagggctcgtgctcc

SEQ ID NO: 3641578 - DNA, 25 bp, Homo sapien
cacacattagagtctcatcaggagc

SEQ ID NO: 3641579 - DNA, 25 bp, Homo sapien
tcgtgctcctgcgagaatctaaggc

SEQ ID NO: 3641580 - DNA, 25 bp, Homo sapien
taaggccgccactgataggacagga

SEQ ID NO: 3641581 - DNA, 25 bp, Homo sapien
gcttcattaaatccaatcattctgg

SEQ ID NO: 3641582 - DNA, 25 bp, Homo sapien
ccacaatctcctttcttactcgggt

SEQ ID NO: 3641583 - DNA, 25 bp, Homo sapien
gccattgaacccagcccacaatctc

SEQ ID NO: 3641584 - DNA, 25 bp, Homo sapien
catgcagcgtttcagatgatcagca

SEQ ID NO: 3641585 - DNA, 25 bp, Homo sapien
catgaccaagtacaggtgatttggg

SEQ ID NO: 3641586 - DNA, 25 bp, Homo sapien
gaccaagtacaggtgatttgggctt

SEQ ID NO: 3641587 - DNA, 25 bp, Homo sapien
tgcatgaccaagtacaggtgatttg

SEQ ID NO: 3641588 - DNA, 25 bp, Homo sapien
agctgcatgaccaagtacaggtgat

SEQ ID NO: 3641589 - DNA, 25 bp, Homo sapien
gttggttcaaaactcatcaatcaaa

SEQ ID NO: 3641590 - DNA, 25 bp, Homo sapien
tttgcaagttggttcaaaactcatc

SEQ ID NO: 3641591 - DNA, 25 bp, Homo sapien
gatccctttagacattggagtttgc

SEQ ID NO: 3641592 - DNA, 25 bp, Homo sapien
cattggagtttgcaagttggttcaa

SEQ ID NO: 3641593 - DNA, 25 bp, Homo sapien
agtgtcttcaggcagccacatttgg

SEQ ID NO: 3641594 - DNA, 25 bp, Homo sapien
cactgaagtgtcttcaggcagccac

SEQ ID NO: 3641595 - DNA, 25 bp, Homo sapien
tgaagtgtcttcaggcagccacatt

SEQ ID NO: 3641596 - DNA, 25 bp, Homo sapien
agtgggcccactgaagtgtcttcag

SEQ ID NO: 3641597 - DNA, 25 bp, Homo sapien
tcagtcacatgtgctgttatctgtc

SEQ ID NO: 3641598 - DNA, 25 bp, Homo sapien
gggtatacacagttaccatctgctt

SEQ ID NO: 3641599 - DNA, 25 bp, Homo sapien
agaaacgggtatacacagttaccat

SEQ ID NO: 3641600 - DNA, 25 bp, Homo sapien
acatgtgctgttatctgtcaaagga

SEQ ID NO: 3641601 - DNA, 25 bp, Homo sapien
catattaacgacgtggttttttgtg

SEQ ID NO: 3641602 - DNA, 25 bp, Homo sapien
aaaattcttaatgagtgtgccccat

SEQ ID NO: 3641603 - DNA, 25 bp, Homo sapien
cagttaatcccaccctaattcctct

SEQ ID NO: 3641604 - DNA, 25 bp, Homo sapien
atgagtgtgccccatattaacgacg

SEQ ID NO: 3641605 - DNA, 25 bp, Homo sapien
tccttcagggactaactagaattaa

SEQ ID NO: 3641606 - DNA, 25 bp, Homo sapien
ttttatatgctagcagcagcaagca

SEQ ID NO: 3641607 - DNA, 25 bp, Homo sapien
tagcaagatcagaggctaatgcaca

SEQ ID NO: 3641608 - DNA, 25 bp, Homo sapien
tgaagacctacatcctgaaaactat

SEQ ID NO: 3641609 - DNA, 25 bp, Homo sapien
gccctgtggcagtactggcctggta

SEQ ID NO: 3641610 - DNA, 25 bp, Homo sapien
tctttgactcgaagatgagaagcca

SEQ ID NO: 3641611 - DNA, 25 bp, Homo sapien
aaagataagcgattccagcagaaag

SEQ ID NO: 3641612 - DNA, 25 bp, Homo sapien
aggctgcagctgaacgaaagaaagg

SEQ ID NO: 3641613 - DNA, 25 bp, Homo sapien
gcatattcaatcgttagtccggaga

SEQ ID NO: 3641614 - DNA, 25 bp, Homo sapien
ttaaggtgtctcctcccagagtgcc

SEQ ID NO: 3641615 - DNA, 25 bp, Homo sapien
tggagcccagctacctatctcgtgg

SEQ ID NO: 3641616 - DNA, 25 bp, Homo sapien
tcacgaaagcaacctccgagggtta

SEQ ID NO: 3641617 - DNA, 25 bp, Homo sapien
taatcatccggatgtagcaaaaggg

SEQ ID NO: 3641618 - DNA, 25 bp, Homo sapien
ttccttcaaacccagaaccagagag

SEQ ID NO: 3641619 - DNA, 25 bp, Homo sapien
gagagcctttcaataatcccagcca

SEQ ID NO: 3641620 - DNA, 25 bp, Homo sapien
tgggtgcaagcaatcacgagcaagg

SEQ ID NO: 3641621 - DNA, 25 bp, Homo sapien
tgcgctgcggtcaggtgttgcatct

SEQ ID NO: 3641622 - DNA, 25 bp, Homo sapien
gacaatgtggtttcctccacgggac

SEQ ID NO: 3641623 - DNA, 25 bp, Homo sapien
gcagctgccactcatccgacaatgt

SEQ ID NO: 3641624 - DNA, 25 bp, Homo sapien
tgcatctgcagagtgaatgcagcag

SEQ ID NO: 3641625 - DNA, 25 bp, Homo sapien
gatccagtctgctagagggaactaa

SEQ ID NO: 3641626 - DNA, 25 bp, Homo sapien
gaatatgttctgagagtggaccact

SEQ ID NO: 3641627 - DNA, 25 bp, Homo sapien
caaagagaatagctggtcctgaatc

SEQ ID NO: 3641628 - DNA, 25 bp, Homo sapien
tcattaagggctcagtacgaaggct

SEQ ID NO: 3641629 - DNA, 25 bp, Homo sapien
caatctattacagccttagagctca

SEQ ID NO: 3641630 - DNA, 25 bp, Homo sapien
tctccggaattgagagatctggctt

SEQ ID NO: 3641631 - DNA, 25 bp, Homo sapien
ggtatattggcaagaaagcacaatc

SEQ ID NO: 3641632 - DNA, 25 bp, Homo sapien
cactgtagcctgcaacagctgtgaa

SEQ ID NO: 3641633 - DNA, 25 bp, Homo sapien
taaatggatatttcattcgccttaa

SEQ ID NO: 3641634 - DNA, 25 bp, Homo sapien
cattcgccttaattccctcctgttt

SEQ ID NO: 3641635 - DNA, 25 bp, Homo sapien
tcagcagagcctgcattaaatggat

SEQ ID NO: 3641636 - DNA, 25 bp, Homo sapien
tgtcagcagagcctgcattaaatgg

SEQ ID NO: 3641637 - DNA, 25 bp, Homo sapien
ggcccttgaaggatctgcacaacgt

SEQ ID NO: 3641638 - DNA, 25 bp, Homo sapien
taaactaatgctgccagcgttttgg

SEQ ID NO: 3641639 - DNA, 25 bp, Homo sapien
tgaaggatctgcacaacgtcacgac

SEQ ID NO: 3641640 - DNA, 25 bp, Homo sapien
ctcctttgtggatcttagggttcac

SEQ ID NO: 3641641 - DNA, 25 bp, Homo sapien
gcaattttgtggtcattcctggaca

SEQ ID NO: 3641642 - DNA, 25 bp, Homo sapien
ttcgagttactggacatgcacattc

SEQ ID NO: 3641643 - DNA, 25 bp, Homo sapien
gtatttacaaattcacctgctggct

SEQ ID NO: 3641644 - DNA, 25 bp, Homo sapien
tttgtttgaaacaggccgcaggcac

SEQ ID NO: 3641645 - DNA, 25 bp, Homo sapien
gtttgcaaatcacttccgtttataa

SEQ ID NO: 3641646 - DNA, 25 bp, Homo sapien
aacaaaatcgaactgaaagagaggg

SEQ ID NO: 3641647 - DNA, 25 bp, Homo sapien
catactggaagaagcctgaggcctg

SEQ ID NO: 3641648 - DNA, 25 bp, Homo sapien
gggaaatgatgacaagtaaccgtaa

SEQ ID NO: 3641649 - DNA, 25 bp, Homo sapien
cctatatctatgtgtggaatatggc

SEQ ID NO: 3641650 - DNA, 25 bp, Homo sapien
gggagccacacaaatgagctctggc

SEQ ID NO: 3641651 - DNA, 25 bp, Homo sapien
cttccagggtcttcataactgcgcc

SEQ ID NO: 3641652 - DNA, 25 bp, Homo sapien
aagtgggttcccagcctaggcatac

SEQ ID NO: 3641653 - DNA, 25 bp, Homo sapien
aaatttcacttcctcgccaccaaga

SEQ ID NO: 3641654 - DNA, 25 bp, Homo sapien
gtcctccaccgtcttccgttgtgtg

SEQ ID NO: 3641655 - DNA, 25 bp, Homo sapien
ttcacttcctcgccaccaagagcag

SEQ ID NO: 3641656 - DNA, 25 bp, Homo sapien
atttcacttcctcgccaccaagagc

SEQ ID NO: 3641657 - DNA, 25 bp, Homo sapien
ggtgcggcccacactgctttcatag

SEQ ID NO: 3641658 - DNA, 25 bp, Homo sapien
ataactgaacctacctcgtatcggg

SEQ ID NO: 3641659 - DNA, 25 bp, Homo sapien
cagatggagcccgtcttcaagtagc

SEQ ID NO: 3641660 - DNA, 25 bp, Homo sapien
tgtaaagtcctaggcacaggtgcgg

SEQ ID NO: 3641661 - DNA, 25 bp, Homo sapien
actcccatgccacagttcaggcccc

SEQ ID NO: 3641662 - DNA, 25 bp, Homo sapien
tctgaggcttggacctgggtagcca

SEQ ID NO: 3641663 - DNA, 25 bp, Homo sapien
caaggaggaaagatgtctgaggctt

SEQ ID NO: 3641664 - DNA, 25 bp, Homo sapien
aaagatgtctgaggcttggacctgg

SEQ ID NO: 3641665 - DNA, 25 bp, Homo sapien
taaatatgcctacaatccaccagct

SEQ ID NO: 3641666 - DNA, 25 bp, Homo sapien
gaatgttttcccgaggcagtaagta

SEQ ID NO: 3641667 - DNA, 25 bp, Homo sapien
cagctatacaagatatcgggtgaca

SEQ ID NO: 3641668 - DNA, 25 bp, Homo sapien
cggtaacttgaagagtcaggatgca

SEQ ID NO: 3641669 - DNA, 25 bp, Homo sapien
tgaaacaggcggttttctcttttgc

SEQ ID NO: 3641670 - DNA, 25 bp, Homo sapien
cttatgcgactgaaacaggcggttt

SEQ ID NO: 3641671 - DNA, 25 bp, Homo sapien
gccagaacccaactgttcctggaat

SEQ ID NO: 3641672 - DNA, 25 bp, Homo sapien
ttgcttttagccagaacccaactgt

SEQ ID NO: 3641673 - DNA, 25 bp, Homo sapien
tgaaggagagcggagcttcccttag

SEQ ID NO: 3641674 - DNA, 25 bp, Homo sapien
ttagggtggccctcaagcttcttgg

SEQ ID NO: 3641675 - DNA, 25 bp, Homo sapien
gttgaaggagagcggagcttccctt

SEQ ID NO: 3641676 - DNA, 25 bp, Homo sapien
gtccctggagagcttcagttgaagg

SEQ ID NO: 3641677 - DNA, 25 bp, Homo sapien
acttcagatagtggccttgagtaag

SEQ ID NO: 3641678 - DNA, 25 bp, Homo sapien
cacttccaaacttcagatagtggcc

SEQ ID NO: 3641679 - DNA, 25 bp, Homo sapien
gttctgctaacaataacttcgccta

SEQ ID NO: 3641680 - DNA, 25 bp, Homo sapien
catgtattgttctcatcaggaagga

SEQ ID NO: 3641681 - DNA, 25 bp, Homo sapien
gaaagctacctcacttagggaaaca

SEQ ID NO: 3641682 - DNA, 25 bp, Homo sapien
taccatggactgtctcccaaaatgc

SEQ ID NO: 3641683 - DNA, 25 bp, Homo sapien
tatagagcctgctgcacttagaagg

SEQ ID NO: 3641684 - DNA, 25 bp, Homo sapien
ggtctacagtggtaattctgacacc

SEQ ID NO: 3641685 - DNA, 25 bp, Homo sapien
ctgcaaaacactagacggatgtgcc

SEQ ID NO: 3641686 - DNA, 25 bp, Homo sapien
gcaaaacactagacggatgtgcctg

SEQ ID NO: 3641687 - DNA, 25 bp, Homo sapien
caaaacactagacggatgtgcctgg

SEQ ID NO: 3641688 - DNA, 25 bp, Homo sapien
tgcaaaacactagacggatgtgcct

SEQ ID NO: 3641689 - DNA, 25 bp, Homo sapien
aaacacagtgggacccttgcttctg

SEQ ID NO: 3641690 - DNA, 25 bp, Homo sapien
ctaaggagaaacacagtgggaccct

SEQ ID NO: 3641691 - DNA, 25 bp, Homo sapien
aggagaaacacagtgggacccttgc

SEQ ID NO: 3641692 - DNA, 25 bp, Homo sapien
gagaaacacagtgggacccttgctt

SEQ ID NO: 3641693 - DNA, 25 bp, Homo sapien
ggctcctgtggcaatgtgggcaggt

SEQ ID NO: 3641694 - DNA, 25 bp, Homo sapien
aggactgcggatctgagggttctcc

SEQ ID NO: 3641695 - DNA, 25 bp, Homo sapien
tgagtccacagaggactgcggatct

SEQ ID NO: 3641696 - DNA, 25 bp, Homo sapien
cagggatctgcaagctgagtccaca

SEQ ID NO: 3641697 - DNA, 25 bp, Homo sapien
gggccacgggcatggcgtgccgtag

SEQ ID NO: 3641698 - DNA, 25 bp, Homo sapien
tgcgcaggctgaggataacgcggaa

SEQ ID NO: 3641699 - DNA, 25 bp, Homo sapien
taggcctgactgaatacagccgctc

SEQ ID NO: 3641700 - DNA, 25 bp, Homo sapien
catggcgtgccgtaggcctgactga

SEQ ID NO: 3641701 - DNA, 25 bp, Homo sapien
gatgccagtgcacaataacgggtta

SEQ ID NO: 3641702 - DNA, 25 bp, Homo sapien
gtggccaattactcccagctaaggg

SEQ ID NO: 3641703 - DNA, 25 bp, Homo sapien
taagggctctgctaatggactaaca

SEQ ID NO: 3641704 - DNA, 25 bp, Homo sapien
tgtaccgatgtaactagcgctgccc

SEQ ID NO: 3641705 - DNA, 25 bp, Homo sapien
tgtcccttggacacggcatcgaagg

SEQ ID NO: 3641706 - DNA, 25 bp, Homo sapien
gaaggttcgcccctccgcttcttgc

SEQ ID NO: 3641707 - DNA, 25 bp, Homo sapien
atcgaagggcagtggcgaagagacc

SEQ ID NO: 3641708 - DNA, 25 bp, Homo sapien
gcagtggcgaagagaccgaaggttc

SEQ ID NO: 3641709 - DNA, 25 bp, Homo sapien
tattctgaaagacactaagcatgct

SEQ ID NO: 3641710 - DNA, 25 bp, Homo sapien
catcctctgactggcgccgtgaggg

SEQ ID NO: 3641711 - DNA, 25 bp, Homo sapien
tgttctggccagaccagattctgga

SEQ ID NO: 3641712 - DNA, 25 bp, Homo sapien
tgtcttagcacatgatggctccctg

SEQ ID NO: 3641713 - DNA, 25 bp, Homo sapien
cctgcaaccgcatgagtttcatgca

SEQ ID NO: 3641714 - DNA, 25 bp, Homo sapien
ctgcaaccgcatgagtttcatgcat

SEQ ID NO: 3641715 - DNA, 25 bp, Homo sapien
gcctgcaaccgcatgagtttcatgc

SEQ ID NO: 3641716 - DNA, 25 bp, Homo sapien
aaactctgagtcacacgccagtgcc

SEQ ID NO: 3641717 - DNA, 25 bp, Homo sapien
gccagagtccaagtccctggctcat

SEQ ID NO: 3641718 - DNA, 25 bp, Homo sapien
tccagaaagcaagccttttccagga

SEQ ID NO: 3641719 - DNA, 25 bp, Homo sapien
aggaaaactctgagtcacacgccag

SEQ ID NO: 3641720 - DNA, 25 bp, Homo sapien
gcatcacgccccaaatttaggagct

SEQ ID NO: 3641721 - DNA, 25 bp, Homo sapien
cgtgacaccgaatgggaacactgca

SEQ ID NO: 3641722 - DNA, 25 bp, Homo sapien
caaagactatcagtcaaggtgtgga

SEQ ID NO: 3641723 - DNA, 25 bp, Homo sapien
gcatggttagacctaaagttcacgc

SEQ ID NO: 3641724 - DNA, 25 bp, Homo sapien
tcccctcttcccacaaaacgcagct

SEQ ID NO: 3641725 - DNA, 25 bp, Homo sapien
ccctcttcccacaaaacgcagctgt

SEQ ID NO: 3641726 - DNA, 25 bp, Homo sapien
tcttcccacaaaacgcagctgtcca

SEQ ID NO: 3641727 - DNA, 25 bp, Homo sapien
gattcccctcttcccacaaaacgca

SEQ ID NO: 3641728 - DNA, 25 bp, Homo sapien
agtttccatcttctcgatcttttcc

SEQ ID NO: 3641729 - DNA, 25 bp, Homo sapien
ttccatcttctcgatcttttcctca

SEQ ID NO: 3641730 - DNA, 25 bp, Homo sapien
gtttccatcttctcgatcttttcct

SEQ ID NO: 3641731 - DNA, 25 bp, Homo sapien
tttccatcttctcgatcttttcctc

SEQ ID NO: 3641732 - DNA, 25 bp, Homo sapien
ccattctgtcaaggtcctctttttt

SEQ ID NO: 3641733 - DNA, 25 bp, Homo sapien
tccctcaaaacctacctgtcctgct

SEQ ID NO: 3641734 - DNA, 25 bp, Homo sapien
ctgcgtccctcaaaacctacctgtc

SEQ ID NO: 3641735 - DNA, 25 bp, Homo sapien
cgtccctcaaaacctacctgtcctg

SEQ ID NO: 3641736 - DNA, 25 bp, Homo sapien
tgtgcttggataatgtttcatttcc

SEQ ID NO: 3641737 - DNA, 25 bp, Homo sapien
ttgtgcttggataatgtttcatttc

SEQ ID NO: 3641738 - DNA, 25 bp, Homo sapien
gatgcccattctgtggagatagtac

SEQ ID NO: 3641739 - DNA, 25 bp, Homo sapien
caagacttggcggatcagagtgctg

SEQ ID NO: 3641740 - DNA, 25 bp, Homo sapien
ttctctgtataaaaccccttctcca

SEQ ID NO: 3641741 - DNA, 25 bp, Homo sapien
tatccggtcaaacagctctccaccg

SEQ ID NO: 3641742 - DNA, 25 bp, Homo sapien
ttcttttatacagtgtgttgtgctg

SEQ ID NO: 3641743 - DNA, 25 bp, Homo sapien
cttttatacagtgtgttgtgctgca

SEQ ID NO: 3641744 - DNA, 25 bp, Homo sapien
gctgcggaactgcaccgggaggagg

SEQ ID NO: 3641745 - DNA, 25 bp, Homo sapien
ggctggaattggcaaaggtgctgcg

SEQ ID NO: 3641746 - DNA, 25 bp, Homo sapien
tatgccaatataaggcccagatcct

SEQ ID NO: 3641747 - DNA, 25 bp, Homo sapien
tgtgccaacggggaaagggtcaata

SEQ ID NO: 3641748 - DNA, 25 bp, Homo sapien
atatatgccaatataaggcccagat

SEQ ID NO: 3641749 - DNA, 25 bp, Homo sapien
tgccaacggggaaagggtcaatata

SEQ ID NO: 3641750 - DNA, 25 bp, Homo sapien
tcagtactattgtgtttgacatctg

SEQ ID NO: 3641751 - DNA, 25 bp, Homo sapien
tgacatccacccttcagtactattg

SEQ ID NO: 3641752 - DNA, 25 bp, Homo sapien
tgtgtttgacatctgtccttcagtg

SEQ ID NO: 3641753 - DNA, 25 bp, Homo sapien
tttggtaccatatgtgtgacatcca

SEQ ID NO: 3641754 - DNA, 25 bp, Homo sapien
aagtatctccaggccccgaacatga

SEQ ID NO: 3641755 - DNA, 25 bp, Homo sapien
tccaggccccgaacatgagctgacc

SEQ ID NO: 3641756 - DNA, 25 bp, Homo sapien
gctgaccacgcccacagccatttca

SEQ ID NO: 3641757 - DNA, 25 bp, Homo sapien
ctgaagtatctccaggccccgaaca

SEQ ID NO: 3641758 - DNA, 25 bp, Homo sapien
ggtcctcggcctgttgtgcagcaga

SEQ ID NO: 3641759 - DNA, 25 bp, Homo sapien
gatcttgcccttcagcgggtctgag

SEQ ID NO: 3641760 - DNA, 25 bp, Homo sapien
ttgactgagacctggttaggcgcag

SEQ ID NO: 3641761 - DNA, 25 bp, Homo sapien
caagcagcattctgatgtgtcaaca

SEQ ID NO: 3641762 - DNA, 25 bp, Homo sapien
cccagtgaatgaggaatcgtttctg

SEQ ID NO: 3641763 - DNA, 25 bp, Homo sapien
aaaccttaaagggagcgcagcacga

SEQ ID NO: 3641764 - DNA, 25 bp, Homo sapien
cacgaagaatctgacatgggaaagg

SEQ ID NO: 3641765 - DNA, 25 bp, Homo sapien
ccaggataatcctcacccagtgaat

SEQ ID NO: 3641766 - DNA, 25 bp, Homo sapien
tccatttttgacaatccaaagtcac

SEQ ID NO: 3641767 - DNA, 25 bp, Homo sapien
tttggactcctcatcttgactgtag

SEQ ID NO: 3641768 - DNA, 25 bp, Homo sapien
caggcagtggacatcacatctcctt

SEQ ID NO: 3641769 - DNA, 25 bp, Homo sapien
caaagtcactgatcattattttgga

SEQ ID NO: 3641770 - DNA, 25 bp, Homo sapien
aaaaacttgaatgcctagcatcgca

SEQ ID NO: 3641771 - DNA, 25 bp, Homo sapien
cctctgcattttggatgtttagtac

SEQ ID NO: 3641772 - DNA, 25 bp, Homo sapien
gaccccggaagtcaaaagatgaaca

SEQ ID NO: 3641773 - DNA, 25 bp, Homo sapien
gttcagatccgtcagtagtttcctc

SEQ ID NO: 3641774 - DNA, 25 bp, Homo sapien
tttacgtcgcccacgtgcgatgagt

SEQ ID NO: 3641775 - DNA, 25 bp, Homo sapien
cagagcgactctgtgggactgccat

SEQ ID NO: 3641776 - DNA, 25 bp, Homo sapien
taacagtcggagaggatgagaacaa

SEQ ID NO: 3641777 - DNA, 25 bp, Homo sapien
tgagtcaggtccacgaagaggagca

SEQ ID NO: 3641778 - DNA, 25 bp, Homo sapien
aacatttctggcctctgtttagggc

SEQ ID NO: 3641779 - DNA, 25 bp, Homo sapien
taagcactgtaacacaaatcaggct

SEQ ID NO: 3641780 - DNA, 25 bp, Homo sapien
gagctaaggcctaccctctgaaatt

SEQ ID NO: 3641781 - DNA, 25 bp, Homo sapien
gacgtcacctcaagtcagctcaagg

SEQ ID NO: 3641782 - DNA, 25 bp, Homo sapien
gtgtgtgcgtgtgtgtgtgtgagat

SEQ ID NO: 3641783 - DNA, 25 bp, Homo sapien
aatgaaggggtgtgtgggtgagtgt

SEQ ID NO: 3641784 - DNA, 25 bp, Homo sapien
tgtgtgcgtgtgtgtgtgtgagatg

SEQ ID NO: 3641785 - DNA, 25 bp, Homo sapien
tgaaggggtgtgtgggtgagtgtgt

SEQ ID NO: 3641786 - DNA, 25 bp, Homo sapien
aagatgtaggcaatcactccgatgg

SEQ ID NO: 3641787 - DNA, 25 bp, Homo sapien
gatggaccagcagtcaacggctttg

SEQ ID NO: 3641788 - DNA, 25 bp, Homo sapien
gcaatcactccgatggaccagcagt

SEQ ID NO: 3641789 - DNA, 25 bp, Homo sapien
gctttgctgtaaggtttctgggcga

SEQ ID NO: 3641790 - DNA, 25 bp, Homo sapien
ccacatcagtgaacagtccctatta

SEQ ID NO: 3641791 - DNA, 25 bp, Homo sapien
tcagcactcctcatgctgataggaa

SEQ ID NO: 3641792 - DNA, 25 bp, Homo sapien
gaacagtccctattaaagtcagcac

SEQ ID NO: 3641793 - DNA, 25 bp, Homo sapien
tataagcaggcgactgttgcccgct

SEQ ID NO: 3641794 - DNA, 25 bp, Homo sapien
ctttgagtcaaggatcaagggtgga

SEQ ID NO: 3641795 - DNA, 25 bp, Homo sapien
ctcaacacggttaggccctgctggg

SEQ ID NO: 3641796 - DNA, 25 bp, Homo sapien
agcaggtggattcctcctccacagc

SEQ ID NO: 3641797 - DNA, 25 bp, Homo sapien
gagctcgggagaaggacactttgaa

SEQ ID NO: 3641798 - DNA, 25 bp, Homo sapien
tgattacacattaggtcatctccct

SEQ ID NO: 3641799 - DNA, 25 bp, Homo sapien
ctagctgattacacattaggtcatc

SEQ ID NO: 3641800 - DNA, 25 bp, Homo sapien
gctgattacacattaggtcatctcc

SEQ ID NO: 3641801 - DNA, 25 bp, Homo sapien
tacacattaggtcatctccctggcc

SEQ ID NO: 3641802 - DNA, 25 bp, Homo sapien
cagctgagccaactccctgaggcag

SEQ ID NO: 3641803 - DNA, 25 bp, Homo sapien
gagagggcagctgagccaactccct

SEQ ID NO: 3641804 - DNA, 25 bp, Homo sapien
tgagccaactccctgaggcagcccc

SEQ ID NO: 3641805 - DNA, 25 bp, Homo sapien
gggcagctgagccaactccctgagg

SEQ ID NO: 3641806 - DNA, 25 bp, Homo sapien
gatgcctcaaaggtccccagcatgg

SEQ ID NO: 3641807 - DNA, 25 bp, Homo sapien
tgtaaccagtgaaggccaggatgcc

SEQ ID NO: 3641808 - DNA, 25 bp, Homo sapien
aatgcaggacaaggagcaggtagcc

SEQ ID NO: 3641809 - DNA, 25 bp, Homo sapien
ttcagtggacgctgcctgctcagag

SEQ ID NO: 3641810 - DNA, 25 bp, Homo sapien
gtttgagtcaggaagacgagtggcc

SEQ ID NO: 3641811 - DNA, 25 bp, Homo sapien
ctaaggtgggtggtctatcttgcag

SEQ ID NO: 3641812 - DNA, 25 bp, Homo sapien
gatagggacaattggctttgcagca

SEQ ID NO: 3641813 - DNA, 25 bp, Homo sapien
gagtggccaacttgctgcagccaga

SEQ ID NO: 3641814 - DNA, 25 bp, Homo sapien
tcccttttcgtatacggtccttgca

SEQ ID NO: 3641815 - DNA, 25 bp, Homo sapien
catgggtgctattccttgtggttcc

SEQ ID NO: 3641816 - DNA, 25 bp, Homo sapien
tgcaatgaggcccagggtcatgggt

SEQ ID NO: 3641817 - DNA, 25 bp, Homo sapien
tcgtatacggtccttgcacatccct

SEQ ID NO: 3641818 - DNA, 25 bp, Homo sapien
cagctgttcctcccgtgggacgcac

SEQ ID NO: 3641819 - DNA, 25 bp, Homo sapien
ccgtgggacgcacatcgccagccat

SEQ ID NO: 3641820 - DNA, 25 bp, Homo sapien
cccgtgggacgcacatcgccagcca

SEQ ID NO: 3641821 - DNA, 25 bp, Homo sapien
tgttcctcccgtgggacgcacatcg

SEQ ID NO: 3641822 - DNA, 25 bp, Homo sapien
taggagacaaaatggagtaaaagct

SEQ ID NO: 3641823 - DNA, 25 bp, Homo sapien
gagacaaaatggagtaaaagctgga

SEQ ID NO: 3641824 - DNA, 25 bp, Homo sapien
ctaggagacaaaatggagtaaaagc

SEQ ID NO: 3641825 - DNA, 25 bp, Homo sapien
caaaatggagtaaaagctggaacat

SEQ ID NO: 3641826 - DNA, 25 bp, Homo sapien
tcataaaaaggagggtagccgcaga

SEQ ID NO: 3641827 - DNA, 25 bp, Homo sapien
gagtcggagatgtcatcccagtagg

SEQ ID NO: 3641828 - DNA, 25 bp, Homo sapien
gagtcaaactcatattccgccttga

SEQ ID NO: 3641829 - DNA, 25 bp, Homo sapien
tgaggatctgctcaaagagcttgga

SEQ ID NO: 3641830 - DNA, 25 bp, Homo sapien
gtggtctgggtgtaagtgtcgcggg

SEQ ID NO: 3641831 - DNA, 25 bp, Homo sapien
tgggagctgcctatgggagacctac

SEQ ID NO: 3641832 - DNA, 25 bp, Homo sapien
gtgtcgcgggggccgcccactggga

SEQ ID NO: 3641833 - DNA, 25 bp, Homo sapien
cactgggagctgcctatgggagacc

SEQ ID NO: 3641834 - DNA, 25 bp, Homo sapien
tcttttattcgggtccttctccatc

SEQ ID NO: 3641835 - DNA, 25 bp, Homo sapien
tctccatcaggttccgaatgaagtc

SEQ ID NO: 3641836 - DNA, 25 bp, Homo sapien
tatcttttattcgggtccttctcca

SEQ ID NO: 3641837 - DNA, 25 bp, Homo sapien
ttctccatcaggttccgaatgaagt

SEQ ID NO: 3641838 - DNA, 25 bp, Homo sapien
tcatggtgcttccagaagctgtgtc

SEQ ID NO: 3641839 - DNA, 25 bp, Homo sapien
ctcatgataagctaggaaacttgca

SEQ ID NO: 3641840 - DNA, 25 bp, Homo sapien
gacagcgctgatgctcagtgtcact

SEQ ID NO: 3641841 - DNA, 25 bp, Homo sapien
caatagtaacatccggacagcgctg

SEQ ID NO: 3641842 - DNA, 25 bp, Homo sapien
tacaagccgcaatgacaacggtgac

SEQ ID NO: 3641843 - DNA, 25 bp, Homo sapien
gcgccctcctggttgactactcccc

SEQ ID NO: 3641844 - DNA, 25 bp, Homo sapien
ttctacactccgcaccctccccaga

SEQ ID NO: 3641845 - DNA, 25 bp, Homo sapien
cacaaagtcctattccagcttctac

SEQ ID NO: 3641846 - DNA, 25 bp, Homo sapien
tggttgactactccccggctctcat

SEQ ID NO: 3641847 - DNA, 25 bp, Homo sapien
gagagccgaggctcagtcgtggaca

SEQ ID NO: 3641848 - DNA, 25 bp, Homo sapien
ccgaggctcagtcgtggacagggtg

SEQ ID NO: 3641849 - DNA, 25 bp, Homo sapien
agccgaggctcagtcgtggacaggg

SEQ ID NO: 3641850 - DNA, 25 bp, Homo sapien
ggctcagtcgtggacagggtggctg

SEQ ID NO: 3641851 - DNA, 25 bp, Homo sapien
gcaaaggtgctgctctgaagtgctt

SEQ ID NO: 3641852 - DNA, 25 bp, Homo sapien
cagaggcaaaggtgctgctctgaag

SEQ ID NO: 3641853 - DNA, 25 bp, Homo sapien
gaggcaaaggtgctgctctgaagtg

SEQ ID NO: 3641854 - DNA, 25 bp, Homo sapien
aaacagaggcaaaggtgctgctctg

SEQ ID NO: 3641855 - DNA, 25 bp, Homo sapien
actcgtggatgtttttgttgagggc

SEQ ID NO: 3641856 - DNA, 25 bp, Homo sapien
tgttgagggctgtgtcaccagcgat

SEQ ID NO: 3641857 - DNA, 25 bp, Homo sapien
gcgctgacggactcgtggatgtttt

SEQ ID NO: 3641858 - DNA, 25 bp, Homo sapien
gtttttccggatctgggcgctgacg

SEQ ID NO: 3641859 - DNA, 25 bp, Homo sapien
gggaatttcatatactccacactta

SEQ ID NO: 3641860 - DNA, 25 bp, Homo sapien
ccacggggaatttcatatactccac

SEQ ID NO: 3641861 - DNA, 25 bp, Homo sapien
cggggaatttcatatactccacact

SEQ ID NO: 3641862 - DNA, 25 bp, Homo sapien
cacggggaatttcatatactccaca

SEQ ID NO: 3641863 - DNA, 25 bp, Homo sapien
ttttggctggccaaactgaggctgc

SEQ ID NO: 3641864 - DNA, 25 bp, Homo sapien
caggctgctgccgaggtgtagtttt

SEQ ID NO: 3641865 - DNA, 25 bp, Homo sapien
tatgtctgacgacggccgtggcatt

SEQ ID NO: 3641866 - DNA, 25 bp, Homo sapien
ctgaggctgctcgaaacacttgcat

SEQ ID NO: 3641867 - DNA, 25 bp, Homo sapien
cagctgagggattctggttttgcta

SEQ ID NO: 3641868 - DNA, 25 bp, Homo sapien
tcagctgagggattctggttttgct

SEQ ID NO: 3641869 - DNA, 25 bp, Homo sapien
gattaagtatagaaagcgcctggca

SEQ ID NO: 3641870 - DNA, 25 bp, Homo sapien
gagtccaggcctttatccagacaga

SEQ ID NO: 3641871 - DNA, 25 bp, Homo sapien
tagcaatacctagggttccacgagt

SEQ ID NO: 3641872 - DNA, 25 bp, Homo sapien
aaacaggaggtgctcggcagatgcc

SEQ ID NO: 3641873 - DNA, 25 bp, Homo sapien
tgtaaagaagggatccatcgtgggg

SEQ ID NO: 3641874 - DNA, 25 bp, Homo sapien
ctgtaaagaagggatccatcgtggg

SEQ ID NO: 3641875 - DNA, 25 bp, Homo sapien
aacagccatacaaggagtgctcccg

SEQ ID NO: 3641876 - DNA, 25 bp, Homo sapien
aaagccttgatatgagaggcctcag

SEQ ID NO: 3641877 - DNA, 25 bp, Homo sapien
gctttgctgccgatgccagtgtatg

SEQ ID NO: 3641878 - DNA, 25 bp, Homo sapien
ggatgtgcaggcatcaaaagccttg

SEQ ID NO: 3641879 - DNA, 25 bp, Homo sapien
ctacagagcgtggaaggtgccagac

SEQ ID NO: 3641880 - DNA, 25 bp, Homo sapien
cagagtgcactgccgtcacagtggt

SEQ ID NO: 3641881 - DNA, 25 bp, Homo sapien
tgcactgccgtcacagtggtgggcc

SEQ ID NO: 3641882 - DNA, 25 bp, Homo sapien
aaatgaaactacagagcgtggaagg

SEQ ID NO: 3641883 - DNA, 25 bp, Homo sapien
gcacccggctgatcctcttattaga

SEQ ID NO: 3641884 - DNA, 25 bp, Homo sapien
gcaagattcgtatatacagcaccag

SEQ ID NO: 3641885 - DNA, 25 bp, Homo sapien
tcggtcttccagtcctatgcaggaa

SEQ ID NO: 3641886 - DNA, 25 bp, Homo sapien
ggtccgttcagttagagctttgcaa

SEQ ID NO: 3641887 - DNA, 25 bp, Homo sapien
gagaagagagcctcgcagaactgag

SEQ ID NO: 3641888 - DNA, 25 bp, Homo sapien
ggtgaagggcactcttagccttgga

SEQ ID NO: 3641889 - DNA, 25 bp, Homo sapien
tctgctggatgggttgccagcaaag

SEQ ID NO: 3641890 - DNA, 25 bp, Homo sapien
tgtgcagattctctaccaaagtccc

SEQ ID NO: 3641891 - DNA, 25 bp, Homo sapien
gcaagtctggcctgtgaagctgagc

SEQ ID NO: 3641892 - DNA, 25 bp, Homo sapien
gcaaatgggacgtttggtgacccta

SEQ ID NO: 3641893 - DNA, 25 bp, Homo sapien
tgaagtcccattagcctggcagggc

SEQ ID NO: 3641894 - DNA, 25 bp, Homo sapien
aatccttcagtctcgggcaaatggg

SEQ ID NO: 3641895 - DNA, 25 bp, Homo sapien
taaattctgcgaagcagcgagggct

SEQ ID NO: 3641896 - DNA, 25 bp, Homo sapien
tacagatatttcctatgagcccagc

SEQ ID NO: 3641897 - DNA, 25 bp, Homo sapien
cataaaatagcaagccccagtgggt

SEQ ID NO: 3641898 - DNA, 25 bp, Homo sapien
aattgtggccatggtcaagaacgca

SEQ ID NO: 3641899 - DNA, 25 bp, Homo sapien
tggcgccccatctttcgaagcaaag

SEQ ID NO: 3641900 - DNA, 25 bp, Homo sapien
gattaagattttcctccgagaagca

SEQ ID NO: 3641901 - DNA, 25 bp, Homo sapien
caagcctggtaatagtagatgcggg

SEQ ID NO: 3641902 - DNA, 25 bp, Homo sapien
tcgaatgagaagttccccggagaca

SEQ ID NO: 3641903 - DNA, 25 bp, Homo sapien
catttgctacatagacccatgaaca

SEQ ID NO: 3641904 - DNA, 25 bp, Homo sapien
tgattgtcaaggcagagaatcattt

SEQ ID NO: 3641905 - DNA, 25 bp, Homo sapien
acaggaagtcatcaatctcattatc

SEQ ID NO: 3641906 - DNA, 25 bp, Homo sapien
ttgcagtgccgcaaacctatgtggg

SEQ ID NO: 3641907 - DNA, 25 bp, Homo sapien
ccaattcttgtcttgttgggttaca

SEQ ID NO: 3641908 - DNA, 25 bp, Homo sapien
cttcccgaatacaggcagagatgag

SEQ ID NO: 3641909 - DNA, 25 bp, Homo sapien
gcttggccgtttctgctgccaattc

SEQ ID NO: 3641910 - DNA, 25 bp, Homo sapien
gggttacatggccaccggcttgggc

SEQ ID NO: 3641911 - DNA, 25 bp, Homo sapien
tacagccagtgtcgtgctaccaaca

SEQ ID NO: 3641912 - DNA, 25 bp, Homo sapien
ttgtcaacaaatgggtcagaaaagt

SEQ ID NO: 3641913 - DNA, 25 bp, Homo sapien
tctacgcctgagtcatccttgttca

SEQ ID NO: 3641914 - DNA, 25 bp, Homo sapien
gctaccaacattctctacgcctgag

SEQ ID NO: 3641915 - DNA, 25 bp, Homo sapien
gcttagatctcacacccgttggttg

SEQ ID NO: 3641916 - DNA, 25 bp, Homo sapien
tctgcttagatctcacacccgttgg

SEQ ID NO: 3641917 - DNA, 25 bp, Homo sapien
tgcttagatctcacacccgttggtt

SEQ ID NO: 3641918 - DNA, 25 bp, Homo sapien
ctctgcttagatctcacacccgttg

SEQ ID NO: 3641919 - DNA, 25 bp, Homo sapien
gcaaaattgtcacggtccctgctgc

SEQ ID NO: 3641920 - DNA, 25 bp, Homo sapien
ctgtacgtgggggacacgatgatgg

SEQ ID NO: 3641921 - DNA, 25 bp, Homo sapien
gggcaaaattgtcacggtccctgct

SEQ ID NO: 3641922 - DNA, 25 bp, Homo sapien
tacgtgggggacacgatgatggtgg

SEQ ID NO: 3641923 - DNA, 25 bp, Homo sapien
cagagcttagacaaagggaacagga

SEQ ID NO: 3641924 - DNA, 25 bp, Homo sapien
agcttagacaaagggaacaggagct

SEQ ID NO: 3641925 - DNA, 25 bp, Homo sapien
gggagcagagcttagacaaagggaa

SEQ ID NO: 3641926 - DNA, 25 bp, Homo sapien
gcaggggagcagagcttagacaaag

SEQ ID NO: 3641927 - DNA, 25 bp, Homo sapien
tagaagacagcaatcagcaggtgga

SEQ ID NO: 3641928 - DNA, 25 bp, Homo sapien
ttagaagacagcaatcagcaggtgg

SEQ ID NO: 3641929 - DNA, 25 bp, Homo sapien
gacagcaatcagcaggtggattttc

SEQ ID NO: 3641930 - DNA, 25 bp, Homo sapien
gaagacagcaatcagcaggtggatt

SEQ ID NO: 3641931 - DNA, 25 bp, Homo sapien
tggaaggcatccctcttcactccta

SEQ ID NO: 3641932 - DNA, 25 bp, Homo sapien
gaaggcatccctcttcactcctata

SEQ ID NO: 3641933 - DNA, 25 bp, Homo sapien
cagagttgaccacaactaccgtttt

SEQ ID NO: 3641934 - DNA, 25 bp, Homo sapien
aggcatccctcttcactcctataaa

SEQ ID NO: 3641935 - DNA, 25 bp, Homo sapien
gttcttcgttgagagttcaatcttg

SEQ ID NO: 3641936 - DNA, 25 bp, Homo sapien
gccagcaaaacacgttctggcagta

SEQ ID NO: 3641937 - DNA, 25 bp, Homo sapien
agaatgctgttcttcgttgagagtt

SEQ ID NO: 3641938 - DNA, 25 bp, Homo sapien
cacgttctggcagtaagaatgctgt

SEQ ID NO: 3641939 - DNA, 25 bp, Homo sapien
taagaagagatacaggaaaaggaga

SEQ ID NO: 3641940 - DNA, 25 bp, Homo sapien
ctgagagggagataagaagagatac

SEQ ID NO: 3641941 - DNA, 25 bp, Homo sapien
gggagataagaagagatacaggaaa

SEQ ID NO: 3641942 - DNA, 25 bp, Homo sapien
gataagaagagatacaggaaaagga

SEQ ID NO: 3641943 - DNA, 25 bp, Homo sapien
cagatgacgcagacatgggcgctgc

SEQ ID NO: 3641944 - DNA, 25 bp, Homo sapien
gatgacgcagacatgggcgctgctc

SEQ ID NO: 3641945 - DNA, 25 bp, Homo sapien
gacagatgacgcagacatgggcgct

SEQ ID NO: 3641946 - DNA, 25 bp, Homo sapien
tgacgcagacatgggcgctgctcca

SEQ ID NO: 3641947 - DNA, 25 bp, Homo sapien
ctgtggaagtccatgaattgcaccc

SEQ ID NO: 3641948 - DNA, 25 bp, Homo sapien
ctcagtgacactctcgcaggtggct

SEQ ID NO: 3641949 - DNA, 25 bp, Homo sapien
tcttccacgaatctcccagaatgga

SEQ ID NO: 3641950 - DNA, 25 bp, Homo sapien
gtgacactctcgcaggtggctctgg

SEQ ID NO: 3641951 - DNA, 25 bp, Homo sapien
ctatgtaagaaaggatctataatgt

SEQ ID NO: 3641952 - DNA, 25 bp, Homo sapien
tgtaagaaaggatctataatgtgaa

SEQ ID NO: 3641953 - DNA, 25 bp, Homo sapien
aagaaaggatctataatgtgaatac

SEQ ID NO: 3641954 - DNA, 25 bp, Homo sapien
tatgtaagaaaggatctataatgtg

SEQ ID NO: 3641955 - DNA, 25 bp, Homo sapien
cgggcagatggcccgacaggcaggt

SEQ ID NO: 3641956 - DNA, 25 bp, Homo sapien
tgctcctcaaccttccccacttggc

SEQ ID NO: 3641957 - DNA, 25 bp, Homo sapien
cgacaggcaggtgcccaaatgggaa

SEQ ID NO: 3641958 - DNA, 25 bp, Homo sapien
aggtgcccaaatgggaacccaactg

SEQ ID NO: 3641959 - DNA, 25 bp, Homo sapien
ggtactgttggtgcccatcctctga

SEQ ID NO: 3641960 - DNA, 25 bp, Homo sapien
ggctggccatgaactacctctactc

SEQ ID NO: 3641961 - DNA, 25 bp, Homo sapien
gatgcttcgttctctgggtaaacag

SEQ ID NO: 3641962 - DNA, 25 bp, Homo sapien
tgagcaccagccaagttctacagaa

SEQ ID NO: 3641963 - DNA, 25 bp, Homo sapien
cctactatcatcttcacatctatct

SEQ ID NO: 3641964 - DNA, 25 bp, Homo sapien
catcctactatcatcttcacatcta

SEQ ID NO: 3641965 - DNA, 25 bp, Homo sapien
tccatcctactatcatcttcacatc

SEQ ID NO: 3641966 - DNA, 25 bp, Homo sapien
ctatcatcttcacatctatcttgct

SEQ ID NO: 3641967 - DNA, 25 bp, Homo sapien
tacagcccgtgcttggagaaccatg

SEQ ID NO: 3641968 - DNA, 25 bp, Homo sapien
cttttccaataaatacgagcggcga

SEQ ID NO: 3641969 - DNA, 25 bp, Homo sapien
tgaggtgctccaagacgctgtgaac

SEQ ID NO: 3641970 - DNA, 25 bp, Homo sapien
tcctctgtaccggaaatggcaggca

SEQ ID NO: 3641971 - DNA, 25 bp, Homo sapien
gggatccctgagtgctgaatgctcg

SEQ ID NO: 3641972 - DNA, 25 bp, Homo sapien
gagtgctgaatgctcgcctgcagag

SEQ ID NO: 3641973 - DNA, 25 bp, Homo sapien
ctcaatgtcagaccccacgcgctgc

SEQ ID NO: 3641974 - DNA, 25 bp, Homo sapien
ggagagaacattttagaatctctag

SEQ ID NO: 3641975 - DNA, 25 bp, Homo sapien
tggcgaaccagaaactcagtgagaa

SEQ ID NO: 3641976 - DNA, 25 bp, Homo sapien
cgagtgaagaaggtcaagaggtcct

SEQ ID NO: 3641977 - DNA, 25 bp, Homo sapien
tgctcctcggtgcagaaggccttgt

SEQ ID NO: 3641978 - DNA, 25 bp, Homo sapien
gaggaggaggaccacgtcaagaaac

SEQ ID NO: 3641979 - DNA, 25 bp, Homo sapien
tgcctgctaagcagtcctgggtcat

SEQ ID NO: 3641980 - DNA, 25 bp, Homo sapien
ctgcctgctaagcagtcctgggtca

SEQ ID NO: 3641981 - DNA, 25 bp, Homo sapien
taggaagacttcaggtggaggctcc

SEQ ID NO: 3641982 - DNA, 25 bp, Homo sapien
cattaaggccactcaatctcatgga

SEQ ID NO: 3641983 - DNA, 25 bp, Homo sapien
tggatgcatgagcaccccatcttgc

SEQ ID NO: 3641984 - DNA, 25 bp, Homo sapien
gatttgtcccgtcactggagacagg

SEQ ID NO: 3641985 - DNA, 25 bp, Homo sapien
ttaccttcttgcagactagaatgga

SEQ ID NO: 3641986 - DNA, 25 bp, Homo sapien
accttcttgcagactagaatggaat

SEQ ID NO: 3641987 - DNA, 25 bp, Homo sapien
taccttcttgcagactagaatggaa

SEQ ID NO: 3641988 - DNA, 25 bp, Homo sapien
tccgtgggcagctcacgctgtagac

SEQ ID NO: 3641989 - DNA, 25 bp, Homo sapien
caaacacggcactcatgtaagagag

SEQ ID NO: 3641990 - DNA, 25 bp, Homo sapien
cacgctgtagactggattcacaaac

SEQ ID NO: 3641991 - DNA, 25 bp, Homo sapien
agcccgtccgagtgcgggtaacttg

SEQ ID NO: 3641992 - DNA, 25 bp, Homo sapien
gcttgctctttcctcccctgggtat

SEQ ID NO: 3641993 - DNA, 25 bp, Homo sapien
tcaatggtgatcctgtgacggagac

SEQ ID NO: 3641994 - DNA, 25 bp, Homo sapien
caggagaacgatgcttcacaattgc

SEQ ID NO: 3641995 - DNA, 25 bp, Homo sapien
ctccaggtgaagtcaaccaggtgcc

SEQ ID NO: 3641996 - DNA, 25 bp, Homo sapien
ggctttggggcctgttggacctgct

SEQ ID NO: 3641997 - DNA, 25 bp, Homo sapien
attgtcttcaatgggctcggctttg

SEQ ID NO: 3641998 - DNA, 25 bp, Homo sapien
ttaaattgtcttcaatgggctcggc

SEQ ID NO: 3641999 - DNA, 25 bp, Homo sapien
tggacctgctggacccatgtggaag

SEQ ID NO: 3642000 - DNA, 25 bp, Homo sapien
actgatttagcccttcagggtagcc

SEQ ID NO: 3642001 - DNA, 25 bp, Homo sapien
tttagcccttcagggtagccacggc

SEQ ID NO: 3642002 - DNA, 25 bp, Homo sapien
aacaccactgatttagcccttcagg

SEQ ID NO: 3642003 - DNA, 25 bp, Homo sapien
tgactctcagaacaccactgattta

SEQ ID NO: 3642004 - DNA, 25 bp, Homo sapien
tagtggagaccccagattcagagcc

SEQ ID NO: 3642005 - DNA, 25 bp, Homo sapien
acaggacctaattcttgaaatgtgg

SEQ ID NO: 3642006 - DNA, 25 bp, Homo sapien
tctggctatcctggctgtatgtacc

SEQ ID NO: 3642007 - DNA, 25 bp, Homo sapien
gacagtttaggatctctggctatcc

SEQ ID NO: 3642008 - DNA, 25 bp, Homo sapien
aaaggagctgttacaacacgggcgg

SEQ ID NO: 3642009 - DNA, 25 bp, Homo sapien
ctgttacaacacgggcgggagagca

SEQ ID NO: 3642010 - DNA, 25 bp, Homo sapien
agcaaaggagctgttacaacacggg

SEQ ID NO: 3642011 - DNA, 25 bp, Homo sapien
acagcaaaggagctgttacaacacg

SEQ ID NO: 3642012 - DNA, 25 bp, Homo sapien
cttggttggattgtgtatggcatga

SEQ ID NO: 3642013 - DNA, 25 bp, Homo sapien
ggtggtttgatagtgagttactgtc

SEQ ID NO: 3642014 - DNA, 25 bp, Homo sapien
gagtttaagggcatgtgtgggtgcg

SEQ ID NO: 3642015 - DNA, 25 bp, Homo sapien
tgagttactgtcctgcacgcagcag

SEQ ID NO: 3642016 - DNA, 25 bp, Homo sapien
ggtgatgaaacctttgtctgtggct

SEQ ID NO: 3642017 - DNA, 25 bp, Homo sapien
ctgtggctgggattcaagaatttgg

SEQ ID NO: 3642018 - DNA, 25 bp, Homo sapien
gaaaccagaggaatatatcactggg

SEQ ID NO: 3642019 - DNA, 25 bp, Homo sapien
tccaaaggcgatccaaatctggtga

SEQ ID NO: 3642020 - DNA, 25 bp, Homo sapien
gggtggttcagcattgatttgccca

SEQ ID NO: 3642021 - DNA, 25 bp, Homo sapien
gaggctgccgaaactgatcttgttc

SEQ ID NO: 3642022 - DNA, 25 bp, Homo sapien
gaggcttgcaagtcctggaaccgga

SEQ ID NO: 3642023 - DNA, 25 bp, Homo sapien
tcctctcattgacaaacagccaggg

SEQ ID NO: 3642024 - DNA, 25 bp, Homo sapien
tgttggaaattagggaccatttcat

SEQ ID NO: 3642025 - DNA, 25 bp, Homo sapien
ttggaaattagggaccatttcatct

SEQ ID NO: 3642026 - DNA, 25 bp, Homo sapien
ggaaattagggaccatttcatcttc

SEQ ID NO: 3642027 - DNA, 25 bp, Homo sapien
gaaattagggaccatttcatcttca

SEQ ID NO: 3642028 - DNA, 25 bp, Homo sapien
agagagaagggtggattccccagtt

SEQ ID NO: 3642029 - DNA, 25 bp, Homo sapien
tccttattctgaggctagagagaag

SEQ ID NO: 3642030 - DNA, 25 bp, Homo sapien
ttccttattctgaggctagagagaa

SEQ ID NO: 3642031 - DNA, 25 bp, Homo sapien
aaagtgtgccgagagtcttgcagtc

SEQ ID NO: 3642032 - DNA, 25 bp, Homo sapien
tgaatcctctctcggtgtcttgccc

SEQ ID NO: 3642033 - DNA, 25 bp, Homo sapien
gaagtaaccaatgctagggtcatga

SEQ ID NO: 3642034 - DNA, 25 bp, Homo sapien
tgccagagtactagaagcagagctt

SEQ ID NO: 3642035 - DNA, 25 bp, Homo sapien
tggaatttggtagtaactaaagtca

SEQ ID NO: 3642036 - DNA, 25 bp, Homo sapien
tgtaaataaacaggactcttgccat

SEQ ID NO: 3642037 - DNA, 25 bp, Homo sapien
gactcttgccatggactacttcata

SEQ ID NO: 3642038 - DNA, 25 bp, Homo sapien
ggtagtaactaaagtcagagctttg

SEQ ID NO: 3642039 - DNA, 25 bp, Homo sapien
ccagtaccaacaaaccgctatagga

SEQ ID NO: 3642040 - DNA, 25 bp, Homo sapien
tcaagggcatagaaatggaaatagc

SEQ ID NO: 3642041 - DNA, 25 bp, Homo sapien
cattgacatttcagttcccgttcac

SEQ ID NO: 3642042 - DNA, 25 bp, Homo sapien
tgaagtcacttagagcaaaaggatc

SEQ ID NO: 3642043 - DNA, 25 bp, Homo sapien
aacaagtaggaaatatgatatcata

SEQ ID NO: 3642044 - DNA, 25 bp, Homo sapien
tgaacaagtaggaaatatgatatca

SEQ ID NO: 3642045 - DNA, 25 bp, Homo sapien
gttgtacattaggagcctccaagga

SEQ ID NO: 3642046 - DNA, 25 bp, Homo sapien
tgagttgcttgtctccgtttaggtt

SEQ ID NO: 3642047 - DNA, 25 bp, Homo sapien
aacagaattgtcatggactgggtca

SEQ ID NO: 3642048 - DNA, 25 bp, Homo sapien
ggaaatgcagatgcttaaactggca

SEQ ID NO: 3642049 - DNA, 25 bp, Homo sapien
tcatgatgtctagagttcggtccct

SEQ ID NO: 3642050 - DNA, 25 bp, Homo sapien
ttaaactggcagagatcatgatgtc

SEQ ID NO: 3642051 - DNA, 25 bp, Homo sapien
tgagtcttcccttcagcaggaagac

SEQ ID NO: 3642052 - DNA, 25 bp, Homo sapien
gagagggcccagctgtgagtcttcc

SEQ ID NO: 3642053 - DNA, 25 bp, Homo sapien
tagtgtgcacagtttgtgaatttac

SEQ ID NO: 3642054 - DNA, 25 bp, Homo sapien
tgaatttacattctcttgagagggc

SEQ ID NO: 3642055 - DNA, 25 bp, Homo sapien
cacaacactggtgcccaaaactaaa

SEQ ID NO: 3642056 - DNA, 25 bp, Homo sapien
ggtcaccacacaagaactgaagagc

SEQ ID NO: 3642057 - DNA, 25 bp, Homo sapien
ttggctgtctcatcatggtatacaa

SEQ ID NO: 3642058 - DNA, 25 bp, Homo sapien
tataaaatctgtggagaggtgtggt

SEQ ID NO: 3642059 - DNA, 25 bp, Homo sapien
catatttaactacacaagcagaaga

SEQ ID NO: 3642060 - DNA, 25 bp, Homo sapien
gacatcacatacacgacacatattt

SEQ ID NO: 3642061 - DNA, 25 bp, Homo sapien
aagaaaatgcagtagctgtgaaatt

SEQ ID NO: 3642062 - DNA, 25 bp, Homo sapien
tccgggtgttgccttttaagagaca

SEQ ID NO: 3642063 - DNA, 25 bp, Homo sapien
ggagtggctccctttagtgacagag

SEQ ID NO: 3642064 - DNA, 25 bp, Homo sapien
caaaatcgctaaggacctcccgttg

SEQ ID NO: 3642065 - DNA, 25 bp, Homo sapien
aactgacatgtgaaagttgccagcc

SEQ ID NO: 3642066 - DNA, 25 bp, Homo sapien
gctttccacggtcttcaatatgctg

SEQ ID NO: 3642067 - DNA, 25 bp, Homo sapien
aagcattccagcccattgcagagta

SEQ ID NO: 3642068 - DNA, 25 bp, Homo sapien
cattccagcccattgcagagtacat

SEQ ID NO: 3642069 - DNA, 25 bp, Homo sapien
cttcaggctgtagaaaagcattcca

SEQ ID NO: 3642070 - DNA, 25 bp, Homo sapien
aaaagcattccagcccattgcagag

SEQ ID NO: 3642071 - DNA, 25 bp, Homo sapien
tctgggcggctggtctcatcagatc

SEQ ID NO: 3642072 - DNA, 25 bp, Homo sapien
cattgtcttctggagcagtaacaca

SEQ ID NO: 3642073 - DNA, 25 bp, Homo sapien
atcagatctgcacagctggatgcca

SEQ ID NO: 3642074 - DNA, 25 bp, Homo sapien
gacccttttcggctttgcgggcaga

SEQ ID NO: 3642075 - DNA, 25 bp, Homo sapien
caggagcgttggctggactcctggc

SEQ ID NO: 3642076 - DNA, 25 bp, Homo sapien
cctggcaacagctcttagaagtaca

SEQ ID NO: 3642077 - DNA, 25 bp, Homo sapien
gaaagcctgatctcaatacatccat

SEQ ID NO: 3642078 - DNA, 25 bp, Homo sapien
acatccatgatctaccccagatgtc

SEQ ID NO: 3642079 - DNA, 25 bp, Homo sapien
gaacagggactgctctaaggcgtca

SEQ ID NO: 3642080 - DNA, 25 bp, Homo sapien
ccccggattagacagcaggatgaca

SEQ ID NO: 3642081 - DNA, 25 bp, Homo sapien
gctgccgcccacagaaagaggagaa

SEQ ID NO: 3642082 - DNA, 25 bp, Homo sapien
tcttgttgcggacgaataggctcgg

SEQ ID NO: 3642083 - DNA, 25 bp, Homo sapien
ccgggactggggtgcctagggctga

SEQ ID NO: 3642084 - DNA, 25 bp, Homo sapien
gtgcctagggctgatgcgcggcctg

SEQ ID NO: 3642085 - DNA, 25 bp, Homo sapien
gggtgcctagggctgatgcgcggcc

SEQ ID NO: 3642086 - DNA, 25 bp, Homo sapien
cctagggctgatgcgcggcctggcg

SEQ ID NO: 3642087 - DNA, 25 bp, Homo sapien
gcatcgtgccgcctggagagaactc

SEQ ID NO: 3642088 - DNA, 25 bp, Homo sapien
actcccgaccgggatgggacgctga

SEQ ID NO: 3642089 - DNA, 25 bp, Homo sapien
ggtcactgtttcctcggcatcgtgc

SEQ ID NO: 3642090 - DNA, 25 bp, Homo sapien
cgcccggcttggcttcgctcagggt

SEQ ID NO: 3642091 - DNA, 25 bp, Homo sapien
gcgtgtctgtaaccacctccttatg

SEQ ID NO: 3642092 - DNA, 25 bp, Homo sapien
catgtctcccacaggcgtgtctgta

SEQ ID NO: 3642093 - DNA, 25 bp, Homo sapien
tccttatggcgaggaactggctgcg

SEQ ID NO: 3642094 - DNA, 25 bp, Homo sapien
tcagctcgggtagtggtcccatgtc

SEQ ID NO: 3642095 - DNA, 25 bp, Homo sapien
tgtccagttgccctcgagaataaag

SEQ ID NO: 3642096 - DNA, 25 bp, Homo sapien
ttatgcgcctctacctaagtaaggg

SEQ ID NO: 3642097 - DNA, 25 bp, Homo sapien
cgggggttcggcaggacataataca

SEQ ID NO: 3642098 - DNA, 25 bp, Homo sapien
cagaaggtgtatttcatggccagaa

SEQ ID NO: 3642099 - DNA, 25 bp, Homo sapien
accttttgttgaacatctcgaatag

SEQ ID NO: 3642100 - DNA, 25 bp, Homo sapien
cctacaagagctagtaccaagaggg

SEQ ID NO: 3642101 - DNA, 25 bp, Homo sapien
caagaggggcattctcatgtagtca

SEQ ID NO: 3642102 - DNA, 25 bp, Homo sapien
cctgtgacagtacagcctgtgccac

SEQ ID NO: 3642103 - DNA, 25 bp, Homo sapien
catgtagtcatgtaatgagggtgat

SEQ ID NO: 3642104 - DNA, 25 bp, Homo sapien
tgaggaagttgggtttacagaggcg

SEQ ID NO: 3642105 - DNA, 25 bp, Homo sapien
tatgtgcggactcagcacaccaggc

SEQ ID NO: 3642106 - DNA, 25 bp, Homo sapien
aggcgtacggctcatccaaggccag

SEQ ID NO: 3642107 - DNA, 25 bp, Homo sapien
gaagtggcaccaccagctatcaaag

SEQ ID NO: 3642108 - DNA, 25 bp, Homo sapien
tctctccagttacattttggacatt

SEQ ID NO: 3642109 - DNA, 25 bp, Homo sapien
aagttgcccactttctctccagtta

SEQ ID NO: 3642110 - DNA, 25 bp, Homo sapien
tccaaaagttgcccactttctctcc

SEQ ID NO: 3642111 - DNA, 25 bp, Homo sapien
ccactttctctccagttacattttg

SEQ ID NO: 3642112 - DNA, 25 bp, Homo sapien
ctggtggttctcggtcaggagctct

SEQ ID NO: 3642113 - DNA, 25 bp, Homo sapien
tggtggttctcggtcaggagctctt

SEQ ID NO: 3642114 - DNA, 25 bp, Homo sapien
ggtggttctcggtcaggagctcttt

SEQ ID NO: 3642115 - DNA, 25 bp, Homo sapien
gtggttctcggtcaggagctctttc

SEQ ID NO: 3642116 - DNA, 25 bp, Homo sapien
gctaaatatcattatgctacttcct

SEQ ID NO: 3642117 - DNA, 25 bp, Homo sapien
atgggctaaatatcattatgctact

SEQ ID NO: 3642118 - DNA, 25 bp, Homo sapien
gggctaaatatcattatgctacttc

SEQ ID NO: 3642119 - DNA, 25 bp, Homo sapien
taaatatcattatgctacttccttg

SEQ ID NO: 3642120 - DNA, 25 bp, Homo sapien
cagagtgatggagtcacacaccagg

SEQ ID NO: 3642121 - DNA, 25 bp, Homo sapien
cacaccaggaaagtggacttgatct

SEQ ID NO: 3642122 - DNA, 25 bp, Homo sapien
gaaagtggacttgatctgatgaacc

SEQ ID NO: 3642123 - DNA, 25 bp, Homo sapien
gatgaaccaaatctccctctagtcc

SEQ ID NO: 3642124 - DNA, 25 bp, Homo sapien
gccattagacgctcttttgcttctt

SEQ ID NO: 3642125 - DNA, 25 bp, Homo sapien
cctcaaatctccctttcatggcttg

SEQ ID NO: 3642126 - DNA, 25 bp, Homo sapien
tgactcaaggccattagacgctctt

SEQ ID NO: 3642127 - DNA, 25 bp, Homo sapien
tgtccaggccgaaagctcctcaaat

SEQ ID NO: 3642128 - DNA, 25 bp, Homo sapien
tttcctgctccgcttcggccctggg

SEQ ID NO: 3642129 - DNA, 25 bp, Homo sapien
gaagcctggagtcatcagtggggtc

SEQ ID NO: 3642130 - DNA, 25 bp, Homo sapien
ggaagcctggagtcatcagtggggt

SEQ ID NO: 3642131 - DNA, 25 bp, Homo sapien
ttcctgctccgcttcggccctggga

SEQ ID NO: 3642132 - DNA, 25 bp, Homo sapien
gcttgagctgcagttcagacacgat

SEQ ID NO: 3642133 - DNA, 25 bp, Homo sapien
tggagttcagcttgagctgcagttc

SEQ ID NO: 3642134 - DNA, 25 bp, Homo sapien
aaggaatcttctgaggagccgctgg

SEQ ID NO: 3642135 - DNA, 25 bp, Homo sapien
acgatgcccaacaggtctgccttct

SEQ ID NO: 3642136 - DNA, 25 bp, Homo sapien
ctgtaaacatgaaagcttatctgct

SEQ ID NO: 3642137 - DNA, 25 bp, Homo sapien
tttctcaaggttaaggtcatacaga

SEQ ID NO: 3642138 - DNA, 25 bp, Homo sapien
caaggttaaggtcatacagagctgg

SEQ ID NO: 3642139 - DNA, 25 bp, Homo sapien
acatgaaagcttatctgctcctccc

SEQ ID NO: 3642140 - DNA, 25 bp, Homo sapien
tctcgtgggcccaggactatgcttg

SEQ ID NO: 3642141 - DNA, 25 bp, Homo sapien
ttttactgacccttctgcttctcct

SEQ ID NO: 3642142 - DNA, 25 bp, Homo sapien
tgccagtggagactgttctcgtggg

SEQ ID NO: 3642143 - DNA, 25 bp, Homo sapien
atttcttttactgacccttctgctt

SEQ ID NO: 3642144 - DNA, 25 bp, Homo sapien
tgtctgcctgacagcccgagtcttc

SEQ ID NO: 3642145 - DNA, 25 bp, Homo sapien
caaatattctggaaagatcctggta

SEQ ID NO: 3642146 - DNA, 25 bp, Homo sapien
aacatttgacctccggtgacaagca

SEQ ID NO: 3642147 - DNA, 25 bp, Homo sapien
gtgacaagcacccagtgacgagcct

SEQ ID NO: 3642148 - DNA, 25 bp, Homo sapien
gttttcatcagaaaaattccaaaga

SEQ ID NO: 3642149 - DNA, 25 bp, Homo sapien
cagttaactcctcatgttcgaagta

SEQ ID NO: 3642150 - DNA, 25 bp, Homo sapien
cttgagtgcaacttcaagtctctcc

SEQ ID NO: 3642151 - DNA, 25 bp, Homo sapien
cacagttaactcctcatgttcgaag

SEQ ID NO: 3642152 - DNA, 25 bp, Homo sapien
ttggcctccttgagtgcaacttcaa

SEQ ID NO: 3642153 - DNA, 25 bp, Homo sapien
gtgctcccctctgtctgggtttcaa

SEQ ID NO: 3642154 - DNA, 25 bp, Homo sapien
gggtttcaatctcagaacgattact

SEQ ID NO: 3642155 - DNA, 25 bp, Homo sapien
tctgtctgggtttcaatctcagaac

SEQ ID NO: 3642156 - DNA, 25 bp, Homo sapien
tcaatctcagaacgattacttgttt

SEQ ID NO: 3642157 - DNA, 25 bp, Homo sapien
tatggctatcaaccttcacggcttc

SEQ ID NO: 3642158 - DNA, 25 bp, Homo sapien
tgtaaatgcctttcacgtgggcccc

SEQ ID NO: 3642159 - DNA, 25 bp, Homo sapien
tagaccacagaggtgtcaaagcaca

SEQ ID NO: 3642160 - DNA, 25 bp, Homo sapien
ttaagactggctggtgaatcaatcc

SEQ ID NO: 3642161 - DNA, 25 bp, Homo sapien
tagctcagctttgctgagttttgta

SEQ ID NO: 3642162 - DNA, 25 bp, Homo sapien
tgagcctcttgaagctccttaaaca

SEQ ID NO: 3642163 - DNA, 25 bp, Homo sapien
ttttgtatgagcctcttgaagctcc

SEQ ID NO: 3642164 - DNA, 25 bp, Homo sapien
tgtcacctggaggttcagtgcttcc

SEQ ID NO: 3642165 - DNA, 25 bp, Homo sapien
ggaaaactagctcacagctttactg

SEQ ID NO: 3642166 - DNA, 25 bp, Homo sapien
cagaattaaagttctccagtcccca

SEQ ID NO: 3642167 - DNA, 25 bp, Homo sapien
tttactgtagagatcttacccaggc

SEQ ID NO: 3642168 - DNA, 25 bp, Homo sapien
tacccaggctcgtacatttaacaaa

SEQ ID NO: 3642169 - DNA, 25 bp, Homo sapien
catgcagtactgtcctctttgaata

SEQ ID NO: 3642170 - DNA, 25 bp, Homo sapien
tataggttctgtcaattgcaaagac

SEQ ID NO: 3642171 - DNA, 25 bp, Homo sapien
ccacagtagtaattagctaaggcgc

SEQ ID NO: 3642172 - DNA, 25 bp, Homo sapien
gctaaggcgcttctcatgtagtgat

SEQ ID NO: 3642173 - DNA, 25 bp, Homo sapien
ctttttgttagtataaacaagctct

SEQ ID NO: 3642174 - DNA, 25 bp, Homo sapien
tagctctaactttttgttagtataa

SEQ ID NO: 3642175 - DNA, 25 bp, Homo sapien
cttgtagctctaactttttgttagt

SEQ ID NO: 3642176 - DNA, 25 bp, Homo sapien
tccacttgtagctctaactttttgt

SEQ ID NO: 3642177 - DNA, 25 bp, Homo sapien
gtcgctgcccttctgactcaacata

SEQ ID NO: 3642178 - DNA, 25 bp, Homo sapien
tctctgagaggtctgctaggactcc

SEQ ID NO: 3642179 - DNA, 25 bp, Homo sapien
gacagagtgcaaacaatcagcataa

SEQ ID NO: 3642180 - DNA, 25 bp, Homo sapien
tatagtcttgcctcccaaccttctg

SEQ ID NO: 3642181 - DNA, 25 bp, Homo sapien
gtgtcatctgtagcacagttaattt

SEQ ID NO: 3642182 - DNA, 25 bp, Homo sapien
gcattattatgttcttgaagaagct

SEQ ID NO: 3642183 - DNA, 25 bp, Homo sapien
catctgtagcacagttaatttggac

SEQ ID NO: 3642184 - DNA, 25 bp, Homo sapien
aatgcattattatgttcttgaagaa

SEQ ID NO: 3642185 - DNA, 25 bp, Homo sapien
tatggaagtaatttttttcagtgaa

SEQ ID NO: 3642186 - DNA, 25 bp, Homo sapien
gctatggaagtaatttttttcagtg

SEQ ID NO: 3642187 - DNA, 25 bp, Homo sapien
tggaagtaatttttttcagtgaata

SEQ ID NO: 3642188 - DNA, 25 bp, Homo sapien
aggctatggaagtaatttttttcag

SEQ ID NO: 3642189 - DNA, 25 bp, Homo sapien
gcactgccctgtccactttttctga

SEQ ID NO: 3642190 - DNA, 25 bp, Homo sapien
tcctgcttggcaatggtttgcttca

SEQ ID NO: 3642191 - DNA, 25 bp, Homo sapien
gccagttccagtttttcactcagtt

SEQ ID NO: 3642192 - DNA, 25 bp, Homo sapien
agccctgaggatggtcatggtttcc

SEQ ID NO: 3642193 - DNA, 25 bp, Homo sapien
gactttccaggtacattccgatagc

SEQ ID NO: 3642194 - DNA, 25 bp, Homo sapien
gctgtatccttcaatagcccttgtg

SEQ ID NO: 3642195 - DNA, 25 bp, Homo sapien
gatgcacaatcctgctagaaaacag

SEQ ID NO: 3642196 - DNA, 25 bp, Homo sapien
ttccgatagcagatacaagctgtgt

SEQ ID NO: 3642197 - DNA, 25 bp, Homo sapien
gcctccgtcttcgaaagcatcattc

SEQ ID NO: 3642198 - DNA, 25 bp, Homo sapien
ctgcctccgtcttcgaaagcatcat

SEQ ID NO: 3642199 - DNA, 25 bp, Homo sapien
gcaatgccagttgctccttttcctc

SEQ ID NO: 3642200 - DNA, 25 bp, Homo sapien
gaactgccagctgcaatgccagttg

SEQ ID NO: 3642201 - DNA, 25 bp, Homo sapien
aacaaggtaagcctgctggtcagag

SEQ ID NO: 3642202 - DNA, 25 bp, Homo sapien
gagtcacttgttctcgccccatgac

SEQ ID NO: 3642203 - DNA, 25 bp, Homo sapien
ttgttctcgccccatgacgactctg

SEQ ID NO: 3642204 - DNA, 25 bp, Homo sapien
tctttgaacaaggtaagcctgctgg

SEQ ID NO: 3642205 - DNA, 25 bp, Homo sapien
cataggatagctatttcctgaaaat

SEQ ID NO: 3642206 - DNA, 25 bp, Homo sapien
aaatccaggatcacacgggactcac

SEQ ID NO: 3642207 - DNA, 25 bp, Homo sapien
ctgaaaatccaggatcacacgggac

SEQ ID NO: 3642208 - DNA, 25 bp, Homo sapien
tcataggatagctatttcctgaaaa

SEQ ID NO: 3642209 - DNA, 25 bp, Homo sapien
tcaaggggatgattcagtctggcta

SEQ ID NO: 3642210 - DNA, 25 bp, Homo sapien
ggggatgattcagtctggctaatgt

SEQ ID NO: 3642211 - DNA, 25 bp, Homo sapien
caaggggatgattcagtctggctaa

SEQ ID NO: 3642212 - DNA, 25 bp, Homo sapien
aaggggatgattcagtctggctaat

SEQ ID NO: 3642213 - DNA, 25 bp, Homo sapien
tgcattggtgcattcttttaggatt

SEQ ID NO: 3642214 - DNA, 25 bp, Homo sapien
ccagtttcaaggtatgcgaaaatac

SEQ ID NO: 3642215 - DNA, 25 bp, Homo sapien
ttacaggtgcattggtgcattcttt

SEQ ID NO: 3642216 - DNA, 25 bp, Homo sapien
aaactgtatcccagtttcaaggtat

SEQ ID NO: 3642217 - DNA, 25 bp, Homo sapien
tgaagaacagatggcgagttttaac

SEQ ID NO: 3642218 - DNA, 25 bp, Homo sapien
cattagttccattttgcaggcagtt

SEQ ID NO: 3642219 - DNA, 25 bp, Homo sapien
aagaacagatggcgagttttaacat

SEQ ID NO: 3642220 - DNA, 25 bp, Homo sapien
gtgtttgtttcacttgaagaacaga

SEQ ID NO: 3642221 - DNA, 25 bp, Homo sapien
taacgtgtctatgtcaggcagaacc

SEQ ID NO: 3642222 - DNA, 25 bp, Homo sapien
gaatattccgctgttgccgccagtc

SEQ ID NO: 3642223 - DNA, 25 bp, Homo sapien
gcaggaatgaatcggaatattccgc

SEQ ID NO: 3642224 - DNA, 25 bp, Homo sapien
gatgcaatccatcacgtgaatctgt

SEQ ID NO: 3642225 - DNA, 25 bp, Homo sapien
caatgaggccaatgttatcggtttc

SEQ ID NO: 3642226 - DNA, 25 bp, Homo sapien
tgatgtcacatgctagctaactgca

SEQ ID NO: 3642227 - DNA, 25 bp, Homo sapien
actgggctccagtaaagggatctgc

SEQ ID NO: 3642228 - DNA, 25 bp, Homo sapien
tatctactgtacaagcccacaggcc

SEQ ID NO: 3642229 - DNA, 25 bp, Homo sapien
agtaaaaggattatgtccaataact

SEQ ID NO: 3642230 - DNA, 25 bp, Homo sapien
attactgttgaatttgtatcatgtg

SEQ ID NO: 3642231 - DNA, 25 bp, Homo sapien
ccttctctgtttaggagactataga

SEQ ID NO: 3642232 - DNA, 25 bp, Homo sapien
cctccagtataagatgataagggaa

SEQ ID NO: 3642233 - DNA, 25 bp, Homo sapien
tgtagagtttcattcacgcaggatg

SEQ ID NO: 3642234 - DNA, 25 bp, Homo sapien
gatctgctctacaacaatgtgcaca

SEQ ID NO: 3642235 - DNA, 25 bp, Homo sapien
cccacttataggaggtatgtgaaac

SEQ ID NO: 3642236 - DNA, 25 bp, Homo sapien
tcgtaaacctgttaagagtgcaatc

SEQ ID NO: 3642237 - DNA, 25 bp, Homo sapien
gggacaccattaagtggaccaatat

SEQ ID NO: 3642238 - DNA, 25 bp, Homo sapien
ccagtcagtggatcaaaaagggaaa

SEQ ID NO: 3642239 - DNA, 25 bp, Homo sapien
agtctaaggaacttctgggacacca

SEQ ID NO: 3642240 - DNA, 25 bp, Homo sapien
tagcagaaaccttgccagatggcca

SEQ ID NO: 3642241 - DNA, 25 bp, Homo sapien
catactctagatgcctggaggacac

SEQ ID NO: 3642242 - DNA, 25 bp, Homo sapien
agaggttaatacagctcagccagcc

SEQ ID NO: 3642243 - DNA, 25 bp, Homo sapien
tccaggactcatggtgcagcataca

SEQ ID NO: 3642244 - DNA, 25 bp, Homo sapien
gcttgatataccatagatgcctggg

SEQ ID NO: 3642245 - DNA, 25 bp, Homo sapien
ggctgtaactcaggtaaattttcat

SEQ ID NO: 3642246 - DNA, 25 bp, Homo sapien
tgctgccttccagtctaggctggaa

SEQ ID NO: 3642247 - DNA, 25 bp, Homo sapien
gctcattcatatttcccagttccca

SEQ ID NO: 3642248 - DNA, 25 bp, Homo sapien
tgtgcctggctgtaactcaggtaaa

SEQ ID NO: 3642249 - DNA, 25 bp, Homo sapien
tctggttatgttacccatcttttcc

SEQ ID NO: 3642250 - DNA, 25 bp, Homo sapien
tattgatgagcgcactggagacact

SEQ ID NO: 3642251 - DNA, 25 bp, Homo sapien
taacccacggttcctgaatattctg

SEQ ID NO: 3642252 - DNA, 25 bp, Homo sapien
gaacccttaggagtatacatcatag

SEQ ID NO: 3642253 - DNA, 25 bp, Homo sapien
tagactactgatatttaaagttact

SEQ ID NO: 3642254 - DNA, 25 bp, Homo sapien
tttaattggtatctttagactactg

SEQ ID NO: 3642255 - DNA, 25 bp, Homo sapien
tggtatctttagactactgatattt

SEQ ID NO: 3642256 - DNA, 25 bp, Homo sapien
ttagactactgatatttaaagttac

SEQ ID NO: 3642257 - DNA, 25 bp, Homo sapien
tttcagataaccagcttctggtttc

SEQ ID NO: 3642258 - DNA, 25 bp, Homo sapien
tgttggtatactggtattggtgatt

SEQ ID NO: 3642259 - DNA, 25 bp, Homo sapien
tactttggaataccaaagtgttcca

SEQ ID NO: 3642260 - DNA, 25 bp, Homo sapien
catacagatcttaaatgaatacttt

SEQ ID NO: 3642261 - DNA, 25 bp, Homo sapien
gttgattttttcagcgaatctttcg

SEQ ID NO: 3642262 - DNA, 25 bp, Homo sapien
ttttcagcgaatctttcgagggcga

SEQ ID NO: 3642263 - DNA, 25 bp, Homo sapien
gctgagttgattttttcagcgaatc

SEQ ID NO: 3642264 - DNA, 25 bp, Homo sapien
tcagcgaatctttcgagggcgaagg

SEQ ID NO: 3642265 - DNA, 25 bp, Homo sapien
ccactgggatattgggtaatcactc

SEQ ID NO: 3642266 - DNA, 25 bp, Homo sapien
tcctagctacacaaagacctgacag

SEQ ID NO: 3642267 - DNA, 25 bp, Homo sapien
gacctgacagatccaccaagaagaa

SEQ ID NO: 3642268 - DNA, 25 bp, Homo sapien
ttatgtaagtctttgggccccactg

SEQ ID NO: 3642269 - DNA, 25 bp, Homo sapien
gctgattaagaaaggcacggtagcc

SEQ ID NO: 3642270 - DNA, 25 bp, Homo sapien
gagacataggaagaacggaacaggt

SEQ ID NO: 3642271 - DNA, 25 bp, Homo sapien
gatattagcgagaaggaagcagaga

SEQ ID NO: 3642272 - DNA, 25 bp, Homo sapien
tagggtcgtttttgaggttgtgcac

SEQ ID NO: 3642273 - DNA, 25 bp, Homo sapien
ccgatgccgggacgccttcttcgtt

SEQ ID NO: 3642274 - DNA, 25 bp, Homo sapien
cgatgccgggacgccttcttcgttc

SEQ ID NO: 3642275 - DNA, 25 bp, Homo sapien
gcaaagcacagagaaacagcgtagc

SEQ ID NO: 3642276 - DNA, 25 bp, Homo sapien
cagaaagttattgagctgcagagca

SEQ ID NO: 3642277 - DNA, 25 bp, Homo sapien
gattcaatactagtcagcaaagcac

SEQ ID NO: 3642278 - DNA, 25 bp, Homo sapien
gacatctgcgttatccacgacagct

SEQ ID NO: 3642279 - DNA, 25 bp, Homo sapien
cccagatgagcaatgtagaatcttg

SEQ ID NO: 3642280 - DNA, 25 bp, Homo sapien
cagttgtgacaggaaacttcgaagg

SEQ ID NO: 3642281 - DNA, 25 bp, Homo sapien
aacttcgaaggaggctcagatgccc

SEQ ID NO: 3642282 - DNA, 25 bp, Homo sapien
tcagatgcccagatgagcaatgtag

SEQ ID NO: 3642283 - DNA, 25 bp, Homo sapien
tcgccgtcggcatcaaagagctcat

SEQ ID NO: 3642284 - DNA, 25 bp, Homo sapien
tgcggtcagcagagacagattgtct

SEQ ID NO: 3642285 - DNA, 25 bp, Homo sapien
tcatcaaatgcgtcgggctcgccat

SEQ ID NO: 3642286 - DNA, 25 bp, Homo sapien
tgtataagattcaccgtcgccgtcg

SEQ ID NO: 3642287 - DNA, 25 bp, Homo sapien
tttgatgacaactatcagattggtg

SEQ ID NO: 3642288 - DNA, 25 bp, Homo sapien
aactatcagattggtggtcttcatc

SEQ ID NO: 3642289 - DNA, 25 bp, Homo sapien
cttcatccaacttatccgaaagaaa

SEQ ID NO: 3642290 - DNA, 25 bp, Homo sapien
taaggaaggcaagtagttagggcac

SEQ ID NO: 3642291 - DNA, 25 bp, Homo sapien
catttgctcttgcaaattccttaat

SEQ ID NO: 3642292 - DNA, 25 bp, Homo sapien
cttgctgtctgtttaattgttgtta

SEQ ID NO: 3642293 - DNA, 25 bp, Homo sapien
tttagctgctcttgtaaggccttca

SEQ ID NO: 3642294 - DNA, 25 bp, Homo sapien
ggggatttttgcagacgggctgggc

SEQ ID NO: 3642295 - DNA, 25 bp, Homo sapien
acacgattgccagaatgacagtctt

SEQ ID NO: 3642296 - DNA, 25 bp, Homo sapien
aaataaatgcacacgattgccagaa

SEQ ID NO: 3642297 - DNA, 25 bp, Homo sapien
atgcacacgattgccagaatgacag

SEQ ID NO: 3642298 - DNA, 25 bp, Homo sapien
taaatgcacacgattgccagaatga

SEQ ID NO: 3642299 - DNA, 25 bp, Homo sapien
cttaatcaaaagtaaaataagtgag

SEQ ID NO: 3642300 - DNA, 25 bp, Homo sapien
taatcaaaagtaaaataagtgagta

SEQ ID NO: 3642301 - DNA, 25 bp, Homo sapien
ttcgagccaccctcttggttcttgg

SEQ ID NO: 3642302 - DNA, 25 bp, Homo sapien
tcttggtagcgcagggacatcaagc

SEQ ID NO: 3642303 - DNA, 25 bp, Homo sapien
tgaagcctttggtgttcgagccacc

SEQ ID NO: 3642304 - DNA, 25 bp, Homo sapien
gaaaagcatgttgactcctgaattc

SEQ ID NO: 3642305 - DNA, 25 bp, Homo sapien
tacaatagtgccaagatactgagac

SEQ ID NO: 3642306 - DNA, 25 bp, Homo sapien
tagtgccaagatactgagaccgcaa

SEQ ID NO: 3642307 - DNA, 25 bp, Homo sapien
aatagtgccaagatactgagaccgc

SEQ ID NO: 3642308 - DNA, 25 bp, Homo sapien
tgccaagatactgagaccgcaagta

SEQ ID NO: 3642309 - DNA, 25 bp, Homo sapien
cacaatttgacctctagttatccca

SEQ ID NO: 3642310 - DNA, 25 bp, Homo sapien
ggagggtgcacttgtcatccttgaa

SEQ ID NO: 3642311 - DNA, 25 bp, Homo sapien
gatgggttgagtcgtttccccagaa

SEQ ID NO: 3642312 - DNA, 25 bp, Homo sapien
ttgttccgagaaatcgtctgtaggg

SEQ ID NO: 3642313 - DNA, 25 bp, Homo sapien
ggatcctgatgtataaacacactac

SEQ ID NO: 3642314 - DNA, 25 bp, Homo sapien
cgcacatgaatagatggtttagcta

SEQ ID NO: 3642315 - DNA, 25 bp, Homo sapien
cttctaaaggactccgagaggcaca

SEQ ID NO: 3642316 - DNA, 25 bp, Homo sapien
gagaggcacaaaaagctatgccgtg

SEQ ID NO: 3642317 - DNA, 25 bp, Homo sapien
ccttgatctgagacagtctgatcag

SEQ ID NO: 3642318 - DNA, 25 bp, Homo sapien
ttccttgatctgagacagtctgatc

SEQ ID NO: 3642319 - DNA, 25 bp, Homo sapien
gtctgatcagttttcggccggtcat

SEQ ID NO: 3642320 - DNA, 25 bp, Homo sapien
ctgatcagttttcggccggtcattt

SEQ ID NO: 3642321 - DNA, 25 bp, Homo sapien
actattcacactctgtggcgtaacc

SEQ ID NO: 3642322 - DNA, 25 bp, Homo sapien
cactctgtggcgtaaccttcttcaa

SEQ ID NO: 3642323 - DNA, 25 bp, Homo sapien
aaccccaaatgtcacccaatctatt

SEQ ID NO: 3642324 - DNA, 25 bp, Homo sapien
aatgtcacccaatctatttcttcca

SEQ ID NO: 3642325 - DNA, 25 bp, Homo sapien
gaattcccactgtcagtttgtagta

SEQ ID NO: 3642326 - DNA, 25 bp, Homo sapien
caaattcaggacatcgaattcccac

SEQ ID NO: 3642327 - DNA, 25 bp, Homo sapien
caggacatcgaattcccactgtcag

SEQ ID NO: 3642328 - DNA, 25 bp, Homo sapien
ccactgtcagtttgtagtaaaacag

SEQ ID NO: 3642329 - DNA, 25 bp, Homo sapien
ccaaataagaacaaggacacacatt

SEQ ID NO: 3642330 - DNA, 25 bp, Homo sapien
tccgtcttccagagcgctttgtgaa

SEQ ID NO: 3642331 - DNA, 25 bp, Homo sapien
ttggcattgaggatccctacgacag

SEQ ID NO: 3642332 - DNA, 25 bp, Homo sapien
tgtcaggtcacgaagatcattcagt

SEQ ID NO: 3642333 - DNA, 25 bp, Homo sapien
cagggatgcagaaggcaccttcagt

SEQ ID NO: 3642334 - DNA, 25 bp, Homo sapien
tgaagccagggctctataaccgttt

SEQ ID NO: 3642335 - DNA, 25 bp, Homo sapien
taaccgttttaggaacagggatgca

SEQ ID NO: 3642336 - DNA, 25 bp, Homo sapien
tagtggtctaaaggaatttgaagcc

SEQ ID NO: 3642337 - DNA, 25 bp, Homo sapien
ctgtaagaaaaggtggggcaggagt

SEQ ID NO: 3642338 - DNA, 25 bp, Homo sapien
gtcaagagcttcacccataattaag

SEQ ID NO: 3642339 - DNA, 25 bp, Homo sapien
tgcgtgcacggctctccattcttct

SEQ ID NO: 3642340 - DNA, 25 bp, Homo sapien
gctttacaggttcccaggtcaagag

SEQ ID NO: 3642341 - DNA, 25 bp, Homo sapien
aattaagaccttctgaggatgatcg

SEQ ID NO: 3642342 - DNA, 25 bp, Homo sapien
tttctttagcagaaaccatcctaac

SEQ ID NO: 3642343 - DNA, 25 bp, Homo sapien
tagcagaaaccatcctaacaaggct

SEQ ID NO: 3642344 - DNA, 25 bp, Homo sapien
ctttagcagaaaccatcctaacaag

SEQ ID NO: 3642345 - DNA, 25 bp, Homo sapien
ttagcagaaaccatcctaacaaggc

SEQ ID NO: 3642346 - DNA, 25 bp, Homo sapien
aaagcactgttctggtgaaataccc

SEQ ID NO: 3642347 - DNA, 25 bp, Homo sapien
aagcactgttctggtgaaatacccc

SEQ ID NO: 3642348 - DNA, 25 bp, Homo sapien
tgaaagcactgttctggtgaaatac

SEQ ID NO: 3642349 - DNA, 25 bp, Homo sapien
cactgttctggtgaaataccccttg

SEQ ID NO: 3642350 - DNA, 25 bp, Homo sapien
ctccacgaccgttcccaatgtggaa

SEQ ID NO: 3642351 - DNA, 25 bp, Homo sapien
cccaatgtggaagggctgctcagtc

SEQ ID NO: 3642352 - DNA, 25 bp, Homo sapien
cgttcccaatgtggaagggctgctc

SEQ ID NO: 3642353 - DNA, 25 bp, Homo sapien
cacgaccgttcccaatgtggaaggg

SEQ ID NO: 3642354 - DNA, 25 bp, Homo sapien
ggaacatgacgcatgcagagtcctc

SEQ ID NO: 3642355 - DNA, 25 bp, Homo sapien
tcaggatgagggcaacaggctggga

SEQ ID NO: 3642356 - DNA, 25 bp, Homo sapien
cacttcccggaacatgacgcatgca

SEQ ID NO: 3642357 - DNA, 25 bp, Homo sapien
gacgcatgcagagtcctccctgctg

SEQ ID NO: 3642358 - DNA, 25 bp, Homo sapien
ggaattcgtcctccagagaaggtgg

SEQ ID NO: 3642359 - DNA, 25 bp, Homo sapien
gctgagcttcttgtactgagcctgg

SEQ ID NO: 3642360 - DNA, 25 bp, Homo sapien
catcttggcacagccgttctttgag

SEQ ID NO: 3642361 - DNA, 25 bp, Homo sapien
tggactgcagatccgcacgctttgc

SEQ ID NO: 3642362 - DNA, 25 bp, Homo sapien
acaaccagattactcagagtggttt

SEQ ID NO: 3642363 - DNA, 25 bp, Homo sapien
aaccagattactcagagtggtttga

SEQ ID NO: 3642364 - DNA, 25 bp, Homo sapien
tcttcttcttaggagccacagctgc

SEQ ID NO: 3642365 - DNA, 25 bp, Homo sapien
atcttcttcttaggagccacagctg

SEQ ID NO: 3642366 - DNA, 25 bp, Homo sapien
tgaactcctcagagcaagacaggct

SEQ ID NO: 3642367 - DNA, 25 bp, Homo sapien
ctcagagcaagacaggctcttctgg

SEQ ID NO: 3642368 - DNA, 25 bp, Homo sapien
cagttccttgaactcctcagagcaa

SEQ ID NO: 3642369 - DNA, 25 bp, Homo sapien
gagcaagacaggctcttctggggta

SEQ ID NO: 3642370 - DNA, 25 bp, Homo sapien
ttaagttcctggctccacacgtcgg

SEQ ID NO: 3642371 - DNA, 25 bp, Homo sapien
atgttgttttaagttcctggctcca

SEQ ID NO: 3642372 - DNA, 25 bp, Homo sapien
tggctccacacgtcggcaggtccat

SEQ ID NO: 3642373 - DNA, 25 bp, Homo sapien
aagctgtggctttggctaaatgttg

SEQ ID NO: 3642374 - DNA, 25 bp, Homo sapien
aacagaagcccagactgagggggtg

SEQ ID NO: 3642375 - DNA, 25 bp, Homo sapien
gaagcccagactgagggggtgccct

SEQ ID NO: 3642376 - DNA, 25 bp, Homo sapien
cccagactgagggggtgccctggga

SEQ ID NO: 3642377 - DNA, 25 bp, Homo sapien
cagaagcccagactgagggggtgcc

SEQ ID NO: 3642378 - DNA, 25 bp, Homo sapien
ggctggttttgggctccccataatc

SEQ ID NO: 3642379 - DNA, 25 bp, Homo sapien
tggctggttttgggctccccataat

SEQ ID NO: 3642380 - DNA, 25 bp, Homo sapien
gctggttttgggctccccataatcc

SEQ ID NO: 3642381 - DNA, 25 bp, Homo sapien
ttctgttgcttcaagagtgctgagg

SEQ ID NO: 3642382 - DNA, 25 bp, Homo sapien
tcctcatctccaacatccgctgctt

SEQ ID NO: 3642383 - DNA, 25 bp, Homo sapien
catccgctgcttctgttgcttcaag

SEQ ID NO: 3642384 - DNA, 25 bp, Homo sapien
cttcaagagtgctgaggccgagatg

SEQ ID NO: 3642385 - DNA, 25 bp, Homo sapien
aaatcgatgaagacgttctgaggac

SEQ ID NO: 3642386 - DNA, 25 bp, Homo sapien
ctggaaatcgatgaagacgttctga

SEQ ID NO: 3642387 - DNA, 25 bp, Homo sapien
gaaatcgatgaagacgttctgagga

SEQ ID NO: 3642388 - DNA, 25 bp, Homo sapien
atcgatgaagacgttctgaggacgc

SEQ ID NO: 3642389 - DNA, 25 bp, Homo sapien
cccagcttgggcgtcattgtggccg

SEQ ID NO: 3642390 - DNA, 25 bp, Homo sapien
gaactcggatcctgtccgtggaggc

SEQ ID NO: 3642391 - DNA, 25 bp, Homo sapien
gcttctgctaaagcactcagttttg

SEQ ID NO: 3642392 - DNA, 25 bp, Homo sapien
tggtggtgactcatcataaaagaga

SEQ ID NO: 3642393 - DNA, 25 bp, Homo sapien
tcttcttaatgctgtttgggtttgt

SEQ ID NO: 3642394 - DNA, 25 bp, Homo sapien
cccttaatttggtgatagcagctaa

SEQ ID NO: 3642395 - DNA, 25 bp, Homo sapien
gccttttgcccttaatttggtgata

SEQ ID NO: 3642396 - DNA, 25 bp, Homo sapien
ttttctacacgttccttcacctcca

SEQ ID NO: 3642397 - DNA, 25 bp, Homo sapien
ctggcaggctccaattcatcctcag

SEQ ID NO: 3642398 - DNA, 25 bp, Homo sapien
aattcctcagattccagataggcaa

SEQ ID NO: 3642399 - DNA, 25 bp, Homo sapien
gataggcaagttgttctctcctttt

SEQ ID NO: 3642400 - DNA, 25 bp, Homo sapien
attcctcagattccagataggcaag

SEQ ID NO: 3642401 - DNA, 25 bp, Homo sapien
ccagataggcaagttgttctctcct

SEQ ID NO: 3642402 - DNA, 25 bp, Homo sapien
tcaaagtagcgctcctgcatctcag

SEQ ID NO: 3642403 - DNA, 25 bp, Homo sapien
catgtcacgacacggcacttcactt

SEQ ID NO: 3642404 - DNA, 25 bp, Homo sapien
cgtcttgcatgtcacgacacggcac

SEQ ID NO: 3642405 - DNA, 25 bp, Homo sapien
agtggctcaaagtagcgctcctgca

SEQ ID NO: 3642406 - DNA, 25 bp, Homo sapien
acatcacgagatagggccccagatc

SEQ ID NO: 3642407 - DNA, 25 bp, Homo sapien
catgctgccgagtcacaaaagcacc

SEQ ID NO: 3642408 - DNA, 25 bp, Homo sapien
tccacatgctgccgagtcacaaaag

SEQ ID NO: 3642409 - DNA, 25 bp, Homo sapien
catcacgagatagggccccagatcc

SEQ ID NO: 3642410 - DNA, 25 bp, Homo sapien
ccagggcaagagatgttaggaccca

SEQ ID NO: 3642411 - DNA, 25 bp, Homo sapien
gagaagaatcccctcgacaaacact

SEQ ID NO: 3642412 - DNA, 25 bp, Homo sapien
gatgttaggacccatccaaactggg

SEQ ID NO: 3642413 - DNA, 25 bp, Homo sapien
ttgctttccagcctaattaactgac

SEQ ID NO: 3642414 - DNA, 25 bp, Homo sapien
gagcctttgaggacaaatgctcagc

SEQ ID NO: 3642415 - DNA, 25 bp, Homo sapien
caccgtttctcacgtttgtcccaat

SEQ ID NO: 3642416 - DNA, 25 bp, Homo sapien
acactgataccaccgtttctcacgt

SEQ ID NO: 3642417 - DNA, 25 bp, Homo sapien
ttcgcctcttgctacagtgacccgt

SEQ ID NO: 3642418 - DNA, 25 bp, Homo sapien
ctgcacagagcaacaaaaaacccac

SEQ ID NO: 3642419 - DNA, 25 bp, Homo sapien
ggtattcatgctgctcactgacgca

SEQ ID NO: 3642420 - DNA, 25 bp, Homo sapien
ccagcagcttgaagtgggtataggc

SEQ ID NO: 3642421 - DNA, 25 bp, Homo sapien
catcatgccagtggtattcatgctg

SEQ ID NO: 3642422 - DNA, 25 bp, Homo sapien
cactgacgcaggtctccagcagctt

SEQ ID NO: 3642423 - DNA, 25 bp, Homo sapien
ctgcagtgcttgttcgggagtctgt

SEQ ID NO: 3642424 - DNA, 25 bp, Homo sapien
gcttgttcgggagtctgtccaagga

SEQ ID NO: 3642425 - DNA, 25 bp, Homo sapien
gtccaaggagatgcttctgtttcca

SEQ ID NO: 3642426 - DNA, 25 bp, Homo sapien
agatgcttctgtttccacagggaca

SEQ ID NO: 3642427 - DNA, 25 bp, Homo sapien
tccaagggaacagaatcacagactc

SEQ ID NO: 3642428 - DNA, 25 bp, Homo sapien
gaatgatcatccaacgttccaaggg

SEQ ID NO: 3642429 - DNA, 25 bp, Homo sapien
aaagagatgaaaatccccacgtggg

SEQ ID NO: 3642430 - DNA, 25 bp, Homo sapien
gcttgagtcccaagggtagcctgga

SEQ ID NO: 3642431 - DNA, 25 bp, Homo sapien
aaaatattatgtgcatcctagcccc

SEQ ID NO: 3642432 - DNA, 25 bp, Homo sapien
tctgaggaccccttatgggccaggc

SEQ ID NO: 3642433 - DNA, 25 bp, Homo sapien
gcagagtcctcacaagctaaagaca

SEQ ID NO: 3642434 - DNA, 25 bp, Homo sapien
caatgccccttggatactgaagaac

SEQ ID NO: 3642435 - DNA, 25 bp, Homo sapien
gtccagcccttcttgctctagtttt

SEQ ID NO: 3642436 - DNA, 25 bp, Homo sapien
cagcccttcttgctctagtttttaa

SEQ ID NO: 3642437 - DNA, 25 bp, Homo sapien
gaacactatggtgaaaacttatttc

SEQ ID NO: 3642438 - DNA, 25 bp, Homo sapien
cttccaccctgagaagggatgtgaa

SEQ ID NO: 3642439 - DNA, 25 bp, Homo sapien
gataatctatgtttggccccttcct

SEQ ID NO: 3642440 - DNA, 25 bp, Homo sapien
cagggatccacgcactgcaggtaat

SEQ ID NO: 3642441 - DNA, 25 bp, Homo sapien
taggcccactcatgtaaagacgacg

SEQ ID NO: 3642442 - DNA, 25 bp, Homo sapien
tgtaggtccttacaaagctagaggc

SEQ ID NO: 3642443 - DNA, 25 bp, Homo sapien
gcattccgtcccgttcccatttgta

SEQ ID NO: 3642444 - DNA, 25 bp, Homo sapien
tagcattccgtcccgttcccatttg

SEQ ID NO: 3642445 - DNA, 25 bp, Homo sapien
ctttagcattccgtcccgttcccat

SEQ ID NO: 3642446 - DNA, 25 bp, Homo sapien
cattccgtcccgttcccatttgtag

SEQ ID NO: 3642447 - DNA, 25 bp, Homo sapien
aaaaattagtacgcaaatggcatac

SEQ ID NO: 3642448 - DNA, 25 bp, Homo sapien
cattattagcatgggtcactaaaag

SEQ ID NO: 3642449 - DNA, 25 bp, Homo sapien
tattagcatgggtcactaaaaggag

SEQ ID NO: 3642450 - DNA, 25 bp, Homo sapien
acattattagcatgggtcactaaaa

SEQ ID NO: 3642451 - DNA, 25 bp, Homo sapien
ttattagcatgggtcactaaaagga

SEQ ID NO: 3642452 - DNA, 25 bp, Homo sapien
atttaaggctgttcagaaatttagc

SEQ ID NO: 3642453 - DNA, 25 bp, Homo sapien
tcctcttggtaacagagtttctcct

SEQ ID NO: 3642454 - DNA, 25 bp, Homo sapien
ctcctcttggtaacagagtttctcc

SEQ ID NO: 3642455 - DNA, 25 bp, Homo sapien
ctcctcctatctttggaccagtctt

SEQ ID NO: 3642456 - DNA, 25 bp, Homo sapien
gacggcgtcaatcaggaatcaatgg

SEQ ID NO: 3642457 - DNA, 25 bp, Homo sapien
tggacaatacacagccaatcctttg

SEQ ID NO: 3642458 - DNA, 25 bp, Homo sapien
ttacctggagtgagaattaagccaa

SEQ ID NO: 3642459 - DNA, 25 bp, Homo sapien
tggtatcaaaccaacccaatggcag

SEQ ID NO: 3642460 - DNA, 25 bp, Homo sapien
aatctggcttttaatgtccgtacat

SEQ ID NO: 3642461 - DNA, 25 bp, Homo sapien
cgtacatcaagactatgtgatcatc

SEQ ID NO: 3642462 - DNA, 25 bp, Homo sapien
ttaatgtccgtacatcaagactatg

SEQ ID NO: 3642463 - DNA, 25 bp, Homo sapien
tcaagactatgtgatcatcattatc

SEQ ID NO: 3642464 - DNA, 25 bp, Homo sapien
ggattgctcagacaccaacctggtg

SEQ ID NO: 3642465 - DNA, 25 bp, Homo sapien
catatttctatcacagggctccaca

SEQ ID NO: 3642466 - DNA, 25 bp, Homo sapien
tgaatactgactgcaatgataccct

SEQ ID NO: 3642467 - DNA, 25 bp, Homo sapien
gcaccttccacccaattagagcaga

SEQ ID NO: 3642468 - DNA, 25 bp, Homo sapien
gatagatgagccctgtggctctgtc

SEQ ID NO: 3642469 - DNA, 25 bp, Homo sapien
ggagcccacgtagggccagccagca

SEQ ID NO: 3642470 - DNA, 25 bp, Homo sapien
tcctcatgcattcgttcagccatgt

SEQ ID NO: 3642471 - DNA, 25 bp, Homo sapien
ttcagccatgtagagcccttgctcc

SEQ ID NO: 3642472 - DNA, 25 bp, Homo sapien
tcatccctaccaaatggggggctct

SEQ ID NO: 3642473 - DNA, 25 bp, Homo sapien
ccttttggtacaatccttatttcat

SEQ ID NO: 3642474 - DNA, 25 bp, Homo sapien
tggtacaatccttatttcatcccta

SEQ ID NO: 3642475 - DNA, 25 bp, Homo sapien
ggctctcaggaacatcattagtcct

SEQ ID NO: 3642476 - DNA, 25 bp, Homo sapien
gttcatctatattctccatgaggct

SEQ ID NO: 3642477 - DNA, 25 bp, Homo sapien
tattctccatgaggctcctggaggc

SEQ ID NO: 3642478 - DNA, 25 bp, Homo sapien
tctatattctccatgaggctcctgg

SEQ ID NO: 3642479 - DNA, 25 bp, Homo sapien
tcatctatattctccatgaggctcc

SEQ ID NO: 3642480 - DNA, 25 bp, Homo sapien
tagtccccgtgaagtgctgtgttcc

SEQ ID NO: 3642481 - DNA, 25 bp, Homo sapien
agtccccgtgaagtgctgtgttccc

SEQ ID NO: 3642482 - DNA, 25 bp, Homo sapien
gtccccgtgaagtgctgtgttccct

SEQ ID NO: 3642483 - DNA, 25 bp, Homo sapien
gggctcagaacacagccatacattc

SEQ ID NO: 3642484 - DNA, 25 bp, Homo sapien
tcatttccctataaagttcatcgtg

SEQ ID NO: 3642485 - DNA, 25 bp, Homo sapien
tggctgagcgctggcggagctgcca

SEQ ID NO: 3642486 - DNA, 25 bp, Homo sapien
aagttcatcgtgaaaccagaaagca

SEQ ID NO: 3642487 - DNA, 25 bp, Homo sapien
tatgctcccggagatgtgttgtgtg

SEQ ID NO: 3642488 - DNA, 25 bp, Homo sapien
ttcccagtcctatgctcccggagat

SEQ ID NO: 3642489 - DNA, 25 bp, Homo sapien
cagtcctatgctcccggagatgtgt

SEQ ID NO: 3642490 - DNA, 25 bp, Homo sapien
agatgtgttgtgtgggccttctctg

SEQ ID NO: 3642491 - DNA, 25 bp, Homo sapien
taccccgatgggctcctgtgtcttc

SEQ ID NO: 3642492 - DNA, 25 bp, Homo sapien
tatgcctcggatgttgctggaaact

SEQ ID NO: 3642493 - DNA, 25 bp, Homo sapien
ttgtgttgattcctcgttaccccga

SEQ ID NO: 3642494 - DNA, 25 bp, Homo sapien
cagaccacccataatcttgtgttga

SEQ ID NO: 3642495 - DNA, 25 bp, Homo sapien
cctgattcgtagtcaaagcaccggg

SEQ ID NO: 3642496 - DNA, 25 bp, Homo sapien
ggacaggctctttcaggcagtgaga

SEQ ID NO: 3642497 - DNA, 25 bp, Homo sapien
ggcctcctgattcgtagtcaaagca

SEQ ID NO: 3642498 - DNA, 25 bp, Homo sapien
ctgggcctcctgattcgtagtcaaa

SEQ ID NO: 3642499 - DNA, 25 bp, Homo sapien
ggttgcgagcaacagaaactgccct

SEQ ID NO: 3642500 - DNA, 25 bp, Homo sapien
gcccttgaccgtgagaaacagaaac

SEQ ID NO: 3642501 - DNA, 25 bp, Homo sapien
tcagaatctcggttgcgagcaacag

SEQ ID NO: 3642502 - DNA, 25 bp, Homo sapien
tcagtagcagtcagaatctcggttg

SEQ ID NO: 3642503 - DNA, 25 bp, Homo sapien
ggcatttcttggaacacggtgtttg

SEQ ID NO: 3642504 - DNA, 25 bp, Homo sapien
atttgaagcacgtgaaatttactac

SEQ ID NO: 3642505 - DNA, 25 bp, Homo sapien
cacgtgaaatttactactcgtttag

SEQ ID NO: 3642506 - DNA, 25 bp, Homo sapien
gcatttcttggaacacggtgtttgt

SEQ ID NO: 3642507 - DNA, 25 bp, Homo sapien
gaagccgcctgatgtcaagtctgaa

SEQ ID NO: 3642508 - DNA, 25 bp, Homo sapien
cccattgaaggcctttgttaggtgt

SEQ ID NO: 3642509 - DNA, 25 bp, Homo sapien
catttcaagcctgaagccgcctgat

SEQ ID NO: 3642510 - DNA, 25 bp, Homo sapien
tgatgtcaagtctgaagcccattga

SEQ ID NO: 3642511 - DNA, 25 bp, Homo sapien
ggtatgttttgtatcccctttctga

SEQ ID NO: 3642512 - DNA, 25 bp, Homo sapien
tcattcagttagctctttacccaag

SEQ ID NO: 3642513 - DNA, 25 bp, Homo sapien
cagccaataaaggtggttggtgtct

SEQ ID NO: 3642514 - DNA, 25 bp, Homo sapien
aatacattcacatctagtcaagggc

SEQ ID NO: 3642515 - DNA, 25 bp, Homo sapien
ttgcgccacgatgccaggcgaattt

SEQ ID NO: 3642516 - DNA, 25 bp, Homo sapien
cactctgcaatgtcggcccactgca

SEQ ID NO: 3642517 - DNA, 25 bp, Homo sapien
acagggttgcgccacgatgccaggc

SEQ ID NO: 3642518 - DNA, 25 bp, Homo sapien
gcctcccaagtgtaatttgtattat

SEQ ID NO: 3642519 - DNA, 25 bp, Homo sapien
tgcctgttgtctcggctcttctggg

SEQ ID NO: 3642520 - DNA, 25 bp, Homo sapien
ttgtggagacgtcgtttcaccggcg

SEQ ID NO: 3642521 - DNA, 25 bp, Homo sapien
tccctgctggactacggcattgcca

SEQ ID NO: 3642522 - DNA, 25 bp, Homo sapien
agagatgtccaatcacaggcgcacg

SEQ ID NO: 3642523 - DNA, 25 bp, Homo sapien
caaaccgtagagtccttgagagccc

SEQ ID NO: 3642524 - DNA, 25 bp, Homo sapien
ctacatggtcatattcccgcgcggg

SEQ ID NO: 3642525 - DNA, 25 bp, Homo sapien
cccgggtccttctgttggtctgaga

SEQ ID NO: 3642526 - DNA, 25 bp, Homo sapien
tgcgttcaaaccgtgacaaaccgta

SEQ ID NO: 3642527 - DNA, 25 bp, Homo sapien
tctgcaaggttactttcaatacgta

SEQ ID NO: 3642528 - DNA, 25 bp, Homo sapien
ttttacttagctgttcaaatatggc

SEQ ID NO: 3642529 - DNA, 25 bp, Homo sapien
tcaatacgtaagtaaccaagcacat

SEQ ID NO: 3642530 - DNA, 25 bp, Homo sapien
cctagccagtttgaacaatttaatc

SEQ ID NO: 3642531 - DNA, 25 bp, Homo sapien
tcttgccaaaggaaatgacccctgg

SEQ ID NO: 3642532 - DNA, 25 bp, Homo sapien
caagtgcccatcttcgtgagagaaa

SEQ ID NO: 3642533 - DNA, 25 bp, Homo sapien
ccaaagctgcacatgtaaactgact

SEQ ID NO: 3642534 - DNA, 25 bp, Homo sapien
cattaagcacaagggcgctggatcc

SEQ ID NO: 3642535 - DNA, 25 bp, Homo sapien
tagacacttatctcttgccgcatag

SEQ ID NO: 3642536 - DNA, 25 bp, Homo sapien
cagctgtttggcctaattcttagca

SEQ ID NO: 3642537 - DNA, 25 bp, Homo sapien
tgccgcataggctttttaaaggtgc

SEQ ID NO: 3642538 - DNA, 25 bp, Homo sapien
tacccgtagtcgtgtcaaatagcag

SEQ ID NO: 3642539 - DNA, 25 bp, Homo sapien
tcaagaaactttgcaggacgtctcc

SEQ ID NO: 3642540 - DNA, 25 bp, Homo sapien
gggctcctagcctcctgtgcaaatt

SEQ ID NO: 3642541 - DNA, 25 bp, Homo sapien
caattcgaacacatccagggttgcg

SEQ ID NO: 3642542 - DNA, 25 bp, Homo sapien
tccggagccgagctaaacaatagga

SEQ ID NO: 3642543 - DNA, 25 bp, Homo sapien
ttcacctctgggtgatcactcaacg

SEQ ID NO: 3642544 - DNA, 25 bp, Homo sapien
tctttcacctctgggtgatcactca

SEQ ID NO: 3642545 - DNA, 25 bp, Homo sapien
acctctgggtgatcactcaacggga

SEQ ID NO: 3642546 - DNA, 25 bp, Homo sapien
ctctgggtgatcactcaacgggagg

SEQ ID NO: 3642547 - DNA, 25 bp, Homo sapien
ggagaaagtacttcttagtctccat

SEQ ID NO: 3642548 - DNA, 25 bp, Homo sapien
caaggagaaagtacttcttagtctc

SEQ ID NO: 3642549 - DNA, 25 bp, Homo sapien
atcaattcaaggagaaagtacttct

SEQ ID NO: 3642550 - DNA, 25 bp, Homo sapien
aaatcaattcaaggagaaagtactt

SEQ ID NO: 3642551 - DNA, 25 bp, Homo sapien
cttctgaagatcaagtccagagtcc

SEQ ID NO: 3642552 - DNA, 25 bp, Homo sapien
caaacatccagctgttttgctgttg

SEQ ID NO: 3642553 - DNA, 25 bp, Homo sapien
tctgaagatcaagtccagagtccag

SEQ ID NO: 3642554 - DNA, 25 bp, Homo sapien
aaacatccagctgttttgctgttgg

SEQ ID NO: 3642555 - DNA, 25 bp, Homo sapien
actgggcactgggctttgaaagaac

SEQ ID NO: 3642556 - DNA, 25 bp, Homo sapien
gggcactgggctttgaaagaacagt

SEQ ID NO: 3642557 - DNA, 25 bp, Homo sapien
tcaccaactgggcactgggctttga

SEQ ID NO: 3642558 - DNA, 25 bp, Homo sapien
ttcaccaactgggcactgggctttg

SEQ ID NO: 3642559 - DNA, 25 bp, Homo sapien
gatcgtatatcctggacatatctct

SEQ ID NO: 3642560 - DNA, 25 bp, Homo sapien
tgatcgtatatcctggacatatctc

SEQ ID NO: 3642561 - DNA, 25 bp, Homo sapien
accaagcaagtcagtcctgtagaag

SEQ ID NO: 3642562 - DNA, 25 bp, Homo sapien
aaggtctgcccacgctgctagtacg

SEQ ID NO: 3642563 - DNA, 25 bp, Homo sapien
ggtctgcccacgctgctagtacgtc

SEQ ID NO: 3642564 - DNA, 25 bp, Homo sapien
ggaaggtctgcccacgctgctagta

SEQ ID NO: 3642565 - DNA, 25 bp, Homo sapien
ggcacagtggcttggatccagagcc

SEQ ID NO: 3642566 - DNA, 25 bp, Homo sapien
gcacagtggcttggatccagagcca

SEQ ID NO: 3642567 - DNA, 25 bp, Homo sapien
tggttctgcaatgcgtcatcgctgc

SEQ ID NO: 3642568 - DNA, 25 bp, Homo sapien
tcctgtgaaagacccgtggaggaag

SEQ ID NO: 3642569 - DNA, 25 bp, Homo sapien
caatgtcgttatgaaggcactgcaa

SEQ ID NO: 3642570 - DNA, 25 bp, Homo sapien
tgtcgctgttgatcggcctttggaa

SEQ ID NO: 3642571 - DNA, 25 bp, Homo sapien
gagtattataatgttgccccaaagc

SEQ ID NO: 3642572 - DNA, 25 bp, Homo sapien
cattgtgacatctaaaaacccggct

SEQ ID NO: 3642573 - DNA, 25 bp, Homo sapien
tttcaataaactccaccaggtgtca

SEQ ID NO: 3642574 - DNA, 25 bp, Homo sapien
ttcagaaccgatgctagagatggag

SEQ ID NO: 3642575 - DNA, 25 bp, Homo sapien
tccagcccgtgagtcttgcaggtgt

SEQ ID NO: 3642576 - DNA, 25 bp, Homo sapien
cacgtcatatcttttggcccaaggc

SEQ ID NO: 3642577 - DNA, 25 bp, Homo sapien
tttgaggtatcctggcagaacagct

SEQ ID NO: 3642578 - DNA, 25 bp, Homo sapien
gaagacctctctaacccaatggcca

SEQ ID NO: 3642579 - DNA, 25 bp, Homo sapien
caggagctgctgcctgggaaggcac

SEQ ID NO: 3642580 - DNA, 25 bp, Homo sapien
aggcgggcgggtaggggcaggagct

SEQ ID NO: 3642581 - DNA, 25 bp, Homo sapien
agaggcgggcgggtaggggcaggag

SEQ ID NO: 3642582 - DNA, 25 bp, Homo sapien
ctgtgaggagaggcgggcgggtagg

SEQ ID NO: 3642583 - DNA, 25 bp, Homo sapien
caattcagggtctgactctgggccc

SEQ ID NO: 3642584 - DNA, 25 bp, Homo sapien
tgactctgggcccctggttttacag

SEQ ID NO: 3642585 - DNA, 25 bp, Homo sapien
tcaattcagggtctgactctgggcc

SEQ ID NO: 3642586 - DNA, 25 bp, Homo sapien
gtctgactctgggcccctggtttta

SEQ ID NO: 3642587 - DNA, 25 bp, Homo sapien
gcgggctggaatccagcttcttcgg

SEQ ID NO: 3642588 - DNA, 25 bp, Homo sapien
cagcgggctggaatccagcttcttc

SEQ ID NO: 3642589 - DNA, 25 bp, Homo sapien
gggctggaatccagcttcttcggag

SEQ ID NO: 3642590 - DNA, 25 bp, Homo sapien
gctggaatccagcttcttcggaggt

SEQ ID NO: 3642591 - DNA, 25 bp, Homo sapien
tctgttaagagatctgctgggaacc

SEQ ID NO: 3642592 - DNA, 25 bp, Homo sapien
taagtaatcccgttcctgacaacag

SEQ ID NO: 3642593 - DNA, 25 bp, Homo sapien
gatgaacggatctacacactggaaa

SEQ ID NO: 3642594 - DNA, 25 bp, Homo sapien
caaggagctactacccaagggaagg

SEQ ID NO: 3642595 - DNA, 25 bp, Homo sapien
cattctcctctagggcacagaagtg

SEQ ID NO: 3642596 - DNA, 25 bp, Homo sapien
tccatgatgccgataggaaccgaga

SEQ ID NO: 3642597 - DNA, 25 bp, Homo sapien
ggatcaataatattacctgctctca

SEQ ID NO: 3642598 - DNA, 25 bp, Homo sapien
ggaaccgagaggtctggatcaataa

SEQ ID NO: 3642599 - DNA, 25 bp, Homo sapien
attaacaactgagaagtagaaggtg

SEQ ID NO: 3642600 - DNA, 25 bp, Homo sapien
ttaacaactgagaagtagaaggtgg

SEQ ID NO: 3642601 - DNA, 25 bp, Homo sapien
tattaacaactgagaagtagaaggt

SEQ ID NO: 3642602 - DNA, 25 bp, Homo sapien
ctattaacaactgagaagtagaagg

SEQ ID NO: 3642603 - DNA, 25 bp, Homo sapien
cttctcttctgcgttcctagcaggt

SEQ ID NO: 3642604 - DNA, 25 bp, Homo sapien
tgcccagatacttgtgatcggctcc

SEQ ID NO: 3642605 - DNA, 25 bp, Homo sapien
agatgatctgcccagatacttgtga

SEQ ID NO: 3642606 - DNA, 25 bp, Homo sapien
ttgtgatcggctcccttggcccttc

SEQ ID NO: 3642607 - DNA, 25 bp, Homo sapien
ttcctgaaggggaactccctgctgc

SEQ ID NO: 3642608 - DNA, 25 bp, Homo sapien
tgagaggccctagacgcgtcactag

SEQ ID NO: 3642609 - DNA, 25 bp, Homo sapien
tctcttcctgcacaatcggattgtt

SEQ ID NO: 3642610 - DNA, 25 bp, Homo sapien
aaatgtgtctgccatgctactgaca

SEQ ID NO: 3642611 - DNA, 25 bp, Homo sapien
tggcagcgtggcgttccccagggct

SEQ ID NO: 3642612 - DNA, 25 bp, Homo sapien
ccttggcagcgtggcgttccccagg

SEQ ID NO: 3642613 - DNA, 25 bp, Homo sapien
tccttggcagcgtggcgttccccag

SEQ ID NO: 3642614 - DNA, 25 bp, Homo sapien
cttggcagcgtggcgttccccaggg

SEQ ID NO: 3642615 - DNA, 25 bp, Homo sapien
gcctggccagccgtgcttgggcccc

SEQ ID NO: 3642616 - DNA, 25 bp, Homo sapien
ctgcctggccagccgtgcttgggcc

SEQ ID NO: 3642617 - DNA, 25 bp, Homo sapien
cctggccagccgtgcttgggcccct

SEQ ID NO: 3642618 - DNA, 25 bp, Homo sapien
ctggccagccgtgcttgggcccctt

SEQ ID NO: 3642619 - DNA, 25 bp, Homo sapien
tcagcatcttcacgggcttatatcc

SEQ ID NO: 3642620 - DNA, 25 bp, Homo sapien
cctaccatcccgtgtcctaaaggag

SEQ ID NO: 3642621 - DNA, 25 bp, Homo sapien
cctagaccagccctaccatcccgtg

SEQ ID NO: 3642622 - DNA, 25 bp, Homo sapien
ggcttatatccctgttcttctgcca

SEQ ID NO: 3642623 - DNA, 25 bp, Homo sapien
tatagatagctccaagcccatgagc

SEQ ID NO: 3642624 - DNA, 25 bp, Homo sapien
tctcagaacaattcttccagctgca

SEQ ID NO: 3642625 - DNA, 25 bp, Homo sapien
tgcatgctccggtatctcagaacaa

SEQ ID NO: 3642626 - DNA, 25 bp, Homo sapien
ctgagcatcctcacacgcggttgct

SEQ ID NO: 3642627 - DNA, 25 bp, Homo sapien
tgcatttcagccccacactgttggc

SEQ ID NO: 3642628 - DNA, 25 bp, Homo sapien
ctgctgcatttcagccccacactgt

SEQ ID NO: 3642629 - DNA, 25 bp, Homo sapien
catttcagccccacactgttggcca

SEQ ID NO: 3642630 - DNA, 25 bp, Homo sapien
tgctgcatttcagccccacactgtt

SEQ ID NO: 3642631 - DNA, 25 bp, Homo sapien
ggacaggtaatctgccagcccctgc

SEQ ID NO: 3642632 - DNA, 25 bp, Homo sapien
gggacaggtaatctgccagcccctg

SEQ ID NO: 3642633 - DNA, 25 bp, Homo sapien
ctggggacaggtaatctgccagccc

SEQ ID NO: 3642634 - DNA, 25 bp, Homo sapien
tggggacaggtaatctgccagcccc

SEQ ID NO: 3642635 - DNA, 25 bp, Homo sapien
gtgtcccgtgatgtgcctctaagat

SEQ ID NO: 3642636 - DNA, 25 bp, Homo sapien
gagagagcaaggctttactccaacc

SEQ ID NO: 3642637 - DNA, 25 bp, Homo sapien
catatgccattgaggacgcgtgaag

SEQ ID NO: 3642638 - DNA, 25 bp, Homo sapien
taagatttgtgggtgcacaaaggcc

SEQ ID NO: 3642639 - DNA, 25 bp, Homo sapien
cacggccagcttttgcaatccttga

SEQ ID NO: 3642640 - DNA, 25 bp, Homo sapien
tcagttttatggatatctagggccc

SEQ ID NO: 3642641 - DNA, 25 bp, Homo sapien
agatgagatggtcctcacggccagc

SEQ ID NO: 3642642 - DNA, 25 bp, Homo sapien
ccccatagagtagcagtcagcacga

SEQ ID NO: 3642643 - DNA, 25 bp, Homo sapien
gacacatccgtatacttcccctcca

SEQ ID NO: 3642644 - DNA, 25 bp, Homo sapien
tagcctttgtcctagcaacttggtg

SEQ ID NO: 3642645 - DNA, 25 bp, Homo sapien
ctgaagacttcttgacacatccgta

SEQ ID NO: 3642646 - DNA, 25 bp, Homo sapien
ccctccaggtatattttagcctttg

SEQ ID NO: 3642647 - DNA, 25 bp, Homo sapien
taggctaaatgtgccgtttcctagt

SEQ ID NO: 3642648 - DNA, 25 bp, Homo sapien
agttaggctaaatgtgccgtttcct

SEQ ID NO: 3642649 - DNA, 25 bp, Homo sapien
ataaacctaataacggaatccatag

SEQ ID NO: 3642650 - DNA, 25 bp, Homo sapien
acggaatccatagttaggctaaatg

SEQ ID NO: 3642651 - DNA, 25 bp, Homo sapien
ctgccctcattctttgaaccttggg

SEQ ID NO: 3642652 - DNA, 25 bp, Homo sapien
ttgtgttatgtgacacaagggtcct

SEQ ID NO: 3642653 - DNA, 25 bp, Homo sapien
agctgccctcattctttgaaccttg

SEQ ID NO: 3642654 - DNA, 25 bp, Homo sapien
ttttgtgttatgtgacacaagggtc

SEQ ID NO: 3642655 - DNA, 25 bp, Homo sapien
tgatgacaggtatcggccctgagtg

SEQ ID NO: 3642656 - DNA, 25 bp, Homo sapien
gtatcaaccccgagtctaagagcga

SEQ ID NO: 3642657 - DNA, 25 bp, Homo sapien
ccctgagtgtaacagcgatgacgag

SEQ ID NO: 3642658 - DNA, 25 bp, Homo sapien
gagcgatgatgggtatcaaccccaa

SEQ ID NO: 3642659 - DNA, 25 bp, Homo sapien
cgatatcggccctgagtctaacagc

SEQ ID NO: 3642660 - DNA, 25 bp, Homo sapien
gcgatgacgatatcggccctgagtc

SEQ ID NO: 3642661 - DNA, 25 bp, Homo sapien
gtctaacagcgatgacggataccat

SEQ ID NO: 3642662 - DNA, 25 bp, Homo sapien
gacggataccatccccgagtctaac

SEQ ID NO: 3642663 - DNA, 25 bp, Homo sapien
gatgacggatgtcggccccgagtcc

SEQ ID NO: 3642664 - DNA, 25 bp, Homo sapien
atctgacagtgatgacggatgtcgg

SEQ ID NO: 3642665 - DNA, 25 bp, Homo sapien
agtgatgatgggtatcgaccccaaa

SEQ ID NO: 3642666 - DNA, 25 bp, Homo sapien
ggtatcgaccccaaatctgacagtg

SEQ ID NO: 3642667 - DNA, 25 bp, Homo sapien
gacagatatcaaccccgagtctaac

SEQ ID NO: 3642668 - DNA, 25 bp, Homo sapien
acagcgatgacagatatcaaccccg

SEQ ID NO: 3642669 - DNA, 25 bp, Homo sapien
cgatgacagatatcaaccccgagtc

SEQ ID NO: 3642670 - DNA, 25 bp, Homo sapien
gtctaacagcgatgacggatgtcgg

SEQ ID NO: 3642671 - DNA, 25 bp, Homo sapien
ggtatcagccccgagtccaacggcg

SEQ ID NO: 3642672 - DNA, 25 bp, Homo sapien
tccaacggcgatgatgggtgtcgac

SEQ ID NO: 3642673 - DNA, 25 bp, Homo sapien
gatgggtgtcgaccccgagtctaac

SEQ ID NO: 3642674 - DNA, 25 bp, Homo sapien
cagtgatgacagatatcggccccga

SEQ ID NO: 3642675 - DNA, 25 bp, Homo sapien
ctaacagtgatgacagatatcggcc

SEQ ID NO: 3642676 - DNA, 25 bp, Homo sapien
aacagtgatgacagatatcggcccc

SEQ ID NO: 3642677 - DNA, 25 bp, Homo sapien
gtgatgacagatatcggccccgagt

SEQ ID NO: 3642678 - DNA, 25 bp, Homo sapien
tgatgacgggtatcgacctgagccc

SEQ ID NO: 3642679 - DNA, 25 bp, Homo sapien
tgatgacggatatcgaccggagtcc

SEQ ID NO: 3642680 - DNA, 25 bp, Homo sapien
tatcaacccaagtctaacagcgatg

SEQ ID NO: 3642681 - DNA, 25 bp, Homo sapien
caatgatgagtatcgaccagagtcc

SEQ ID NO: 3642682 - DNA, 25 bp, Homo sapien
tctctgcatggacttcagtgcaggc

SEQ ID NO: 3642683 - DNA, 25 bp, Homo sapien
tctgcatggacttcagtgcaggcat

SEQ ID NO: 3642684 - DNA, 25 bp, Homo sapien
agtctctgcatggacttcagtgcag

SEQ ID NO: 3642685 - DNA, 25 bp, Homo sapien
ctctgcatggacttcagtgcaggca

SEQ ID NO: 3642686 - DNA, 25 bp, Homo sapien
tgctcaggtaagtcaccgaacgtga

SEQ ID NO: 3642687 - DNA, 25 bp, Homo sapien
tagcggtaggattggaccccatttc

SEQ ID NO: 3642688 - DNA, 25 bp, Homo sapien
gacatccctgagtgatgggtttgag

SEQ ID NO: 3642689 - DNA, 25 bp, Homo sapien
ttaacataggacaaaacgggacatg

SEQ ID NO: 3642690 - DNA, 25 bp, Homo sapien
ttcccactaggatccttggcgttcc

SEQ ID NO: 3642691 - DNA, 25 bp, Homo sapien
cgttccttcttggtacctgtcctgg

SEQ ID NO: 3642692 - DNA, 25 bp, Homo sapien
ccttggcgttccttcttggtacctg

SEQ ID NO: 3642693 - DNA, 25 bp, Homo sapien
ctgttttcccactaggatccttggc

SEQ ID NO: 3642694 - DNA, 25 bp, Homo sapien
tcagctggcaaacatgtaactgtgg

SEQ ID NO: 3642695 - DNA, 25 bp, Homo sapien
ggcattgatcatgcgttccctcagt

SEQ ID NO: 3642696 - DNA, 25 bp, Homo sapien
tgtagctggcgatgctgaagagcct

SEQ ID NO: 3642697 - DNA, 25 bp, Homo sapien
tttgtctgttcagtcacggacaccg

SEQ ID NO: 3642698 - DNA, 25 bp, Homo sapien
tgcccacgtgggctgatctcagtac

SEQ ID NO: 3642699 - DNA, 25 bp, Homo sapien
agctccttgctccaatctgcccacg

SEQ ID NO: 3642700 - DNA, 25 bp, Homo sapien
cgtgggctgatctcagtacgtaact

SEQ ID NO: 3642701 - DNA, 25 bp, Homo sapien
cacgtgggctgatctcagtacgtaa

SEQ ID NO: 3642702 - DNA, 25 bp, Homo sapien
tctccccaaagaggacacactcgaa

SEQ ID NO: 3642703 - DNA, 25 bp, Homo sapien
tattcagcttcccatagatgaagca

SEQ ID NO: 3642704 - DNA, 25 bp, Homo sapien
gggtcgacatctctgaaactctgaa

SEQ ID NO: 3642705 - DNA, 25 bp, Homo sapien
agagagttatctcccagccacgaca

SEQ ID NO: 3642706 - DNA, 25 bp, Homo sapien
cacgtcagggatgagcagagctaaa

SEQ ID NO: 3642707 - DNA, 25 bp, Homo sapien
gactttccagcaagtgtagctgcat

SEQ ID NO: 3642708 - DNA, 25 bp, Homo sapien
gagactttccagcaagtgtagctgc

SEQ ID NO: 3642709 - DNA, 25 bp, Homo sapien
gttcccagctcacgtcagggatgag

SEQ ID NO: 3642710 - DNA, 25 bp, Homo sapien
tcccggcggctccgccgcggtgaca

SEQ ID NO: 3642711 - DNA, 25 bp, Homo sapien
cgcggtgacacgagcccgcgccgcc

SEQ ID NO: 3642712 - DNA, 25 bp, Homo sapien
tccgccgcggtgacacgagcccgcg

SEQ ID NO: 3642713 - DNA, 25 bp, Homo sapien
ggcggctccgccgcggtgacacgag

SEQ ID NO: 3642714 - DNA, 25 bp, Homo sapien
tactaagcgctttgtgtttgggtcc

SEQ ID NO: 3642715 - DNA, 25 bp, Homo sapien
tttcctggcccactcgaaagatgtg

SEQ ID NO: 3642716 - DNA, 25 bp, Homo sapien
gaatattacacataactactaagcg

SEQ ID NO: 3642717 - DNA, 25 bp, Homo sapien
aagaaatggtgcctgaagtgcgctc

SEQ ID NO: 3642718 - DNA, 25 bp, Homo sapien
tcagcggctgcctcatttgggtgag

SEQ ID NO: 3642719 - DNA, 25 bp, Homo sapien
cctttgtcccgtgccggagaggtag

SEQ ID NO: 3642720 - DNA, 25 bp, Homo sapien
ttgggtgagacccacgtgacactca

SEQ ID NO: 3642721 - DNA, 25 bp, Homo sapien
tgggtttggcagatactttcacgca

SEQ ID NO: 3642722 - DNA, 25 bp, Homo sapien
ccttccggatgtgccgcctttggta

SEQ ID NO: 3642723 - DNA, 25 bp, Homo sapien
tttggtatcacccaagatctcggga

SEQ ID NO: 3642724 - DNA, 25 bp, Homo sapien
caagatctcgggatgggtacccatc

SEQ ID NO: 3642725 - DNA, 25 bp, Homo sapien
gctaggtataaccagccttccggat

SEQ ID NO: 3642726 - DNA, 25 bp, Homo sapien
ccactgaattcattgttgttgttca

SEQ ID NO: 3642727 - DNA, 25 bp, Homo sapien
tcttccactgaattcattgttgttg

SEQ ID NO: 3642728 - DNA, 25 bp, Homo sapien
tcttcttccactgaattcattgttg

SEQ ID NO: 3642729 - DNA, 25 bp, Homo sapien
cttcttcttccactgaattcattgt

SEQ ID NO: 3642730 - DNA, 25 bp, Homo sapien
gtttcttgtcagctttggcaaagtg

SEQ ID NO: 3642731 - DNA, 25 bp, Homo sapien
aagatctctattgcctgtgggagga

SEQ ID NO: 3642732 - DNA, 25 bp, Homo sapien
gaattcccatagtgggtatcagccc

SEQ ID NO: 3642733 - DNA, 25 bp, Homo sapien
gtatcagccctgttgaaagatctct

SEQ ID NO: 3642734 - DNA, 25 bp, Homo sapien
gggcagcccatataccatagccagt

SEQ ID NO: 3642735 - DNA, 25 bp, Homo sapien
atataccatagccagtgcccttttc

SEQ ID NO: 3642736 - DNA, 25 bp, Homo sapien
tgaacattcacagtaatcggatggg

SEQ ID NO: 3642737 - DNA, 25 bp, Homo sapien
tttcttgaacattcacagtaatcgg

SEQ ID NO: 3642738 - DNA, 25 bp, Homo sapien
atctgcagggaacaagggttgctga

SEQ ID NO: 3642739 - DNA, 25 bp, Homo sapien
ctcatctgcagggaacaagggttgc

SEQ ID NO: 3642740 - DNA, 25 bp, Homo sapien
ggcacacagctacaccctgcactgg

SEQ ID NO: 3642741 - DNA, 25 bp, Homo sapien
ggttgctgagggcacacagctacac

SEQ ID NO: 3642742 - DNA, 25 bp, Homo sapien
agatgagggaagagagtggcccggg

SEQ ID NO: 3642743 - DNA, 25 bp, Homo sapien
gagggaagagagtggcccggggcgc

SEQ ID NO: 3642744 - DNA, 25 bp, Homo sapien
atgagggaagagagtggcccggggc

SEQ ID NO: 3642745 - DNA, 25 bp, Homo sapien
ctgggatgagagagatgagggaaga

SEQ ID NO: 3642746 - DNA, 25 bp, Homo sapien
tgagtatacggaacaacaagcccaa

SEQ ID NO: 3642747 - DNA, 25 bp, Homo sapien
ctcgccgccagaatttaagctccag

SEQ ID NO: 3642748 - DNA, 25 bp, Homo sapien
tgagaacaactgacaggagccgctt

SEQ ID NO: 3642749 - DNA, 25 bp, Homo sapien
ggcggccgcgaacccactgagtata

SEQ ID NO: 3642750 - DNA, 25 bp, Homo sapien
cttccgaaggatctctgatttcaga

SEQ ID NO: 3642751 - DNA, 25 bp, Homo sapien
gccgcttccgaaggatctctgattt

SEQ ID NO: 3642752 - DNA, 25 bp, Homo sapien
cgcttccgaaggatctctgatttca

SEQ ID NO: 3642753 - DNA, 25 bp, Homo sapien
gctgccgcttccgaaggatctctga

SEQ ID NO: 3642754 - DNA, 25 bp, Homo sapien
gacccccacgaccgcagggtcctca

SEQ ID NO: 3642755 - DNA, 25 bp, Homo sapien
tcagcacgaattgtactcaagttcc

SEQ ID NO: 3642756 - DNA, 25 bp, Homo sapien
tgggcgttaattggcctcaggttcc

SEQ ID NO: 3642757 - DNA, 25 bp, Homo sapien
gcctcaacagtgagacgccaagggt

SEQ ID NO: 3642758 - DNA, 25 bp, Homo sapien
gaatcctctgagtatcgtcaccctc

SEQ ID NO: 3642759 - DNA, 25 bp, Homo sapien
agaagggaactctcaggagcactgg

SEQ ID NO: 3642760 - DNA, 25 bp, Homo sapien
ccgcagaatgccaacaggtaggagc

SEQ ID NO: 3642761 - DNA, 25 bp, Homo sapien
gcacgtccgcagaatgccaacaggt

SEQ ID NO: 3642762 - DNA, 25 bp, Homo sapien
ggcacaaacccttcgtaaggcgaca

SEQ ID NO: 3642763 - DNA, 25 bp, Homo sapien
taaaatactcccaaccactcatcaa

SEQ ID NO: 3642764 - DNA, 25 bp, Homo sapien
aatactcccaaccactcatcaaaag

SEQ ID NO: 3642765 - DNA, 25 bp, Homo sapien
tactcccaaccactcatcaaaaggt

SEQ ID NO: 3642766 - DNA, 25 bp, Homo sapien
aaaatactcccaaccactcatcaaa

SEQ ID NO: 3642767 - DNA, 25 bp, Homo sapien
ttacttgtgactggacctctggtcc

SEQ ID NO: 3642768 - DNA, 25 bp, Homo sapien
catctacagtccgtaatttggaggc

SEQ ID NO: 3642769 - DNA, 25 bp, Homo sapien
tacatctacagtccgtaatttggag

SEQ ID NO: 3642770 - DNA, 25 bp, Homo sapien
ctacagtccgtaatttggaggcttg

SEQ ID NO: 3642771 - DNA, 25 bp, Homo sapien
ttgttacatctacagtccgtaattt

SEQ ID NO: 3642772 - DNA, 25 bp, Homo sapien
ttttggcgagctcactacgcttgaa

SEQ ID NO: 3642773 - DNA, 25 bp, Homo sapien
gagctcactacgcttgaaatatttt

SEQ ID NO: 3642774 - DNA, 25 bp, Homo sapien
tcttttttggcgagctcactacgct

SEQ ID NO: 3642775 - DNA, 25 bp, Homo sapien
ctcttcttttttggcgagctcacta

SEQ ID NO: 3642776 - DNA, 25 bp, Homo sapien
tcacgtcaggggcatcacaagtcca

SEQ ID NO: 3642777 - DNA, 25 bp, Homo sapien
gtcaggggcatcacaagtccagagc

SEQ ID NO: 3642778 - DNA, 25 bp, Homo sapien
aaaagagagtcaaacgtattcacgt

SEQ ID NO: 3642779 - DNA, 25 bp, Homo sapien
agagtcaaacgtattcacgtcaggg

SEQ ID NO: 3642780 - DNA, 25 bp, Homo sapien
caaagagctcacaataagtgtacat

SEQ ID NO: 3642781 - DNA, 25 bp, Homo sapien
gttcaagttctaacactggattcga

SEQ ID NO: 3642782 - DNA, 25 bp, Homo sapien
tcataggtaatttttcctctgccag

SEQ ID NO: 3642783 - DNA, 25 bp, Homo sapien
ctcttgcctagaaagcgtcataggt

SEQ ID NO: 3642784 - DNA, 25 bp, Homo sapien
actggattcgatgaagttaatggtt

SEQ ID NO: 3642785 - DNA, 25 bp, Homo sapien
gcagtgagtaatttagaacttcatg

SEQ ID NO: 3642786 - DNA, 25 bp, Homo sapien
gaaacattatggagcaaacaagcaa

SEQ ID NO: 3642787 - DNA, 25 bp, Homo sapien
taaagtttagaaggataagctctaa

SEQ ID NO: 3642788 - DNA, 25 bp, Homo sapien
caagcaatgggaaattatacactca

SEQ ID NO: 3642789 - DNA, 25 bp, Homo sapien
acaaagtgaaacagatacccagtaa

SEQ ID NO: 3642790 - DNA, 25 bp, Homo sapien
agtgaaacagatacccagtaaattt

SEQ ID NO: 3642791 - DNA, 25 bp, Homo sapien
aaagtgaaacagatacccagtaaat

SEQ ID NO: 3642792 - DNA, 25 bp, Homo sapien
caaagtgaaacagatacccagtaaa

SEQ ID NO: 3642793 - DNA, 25 bp, Homo sapien
agtctctccaaatagtctgattggt

SEQ ID NO: 3642794 - DNA, 25 bp, Homo sapien
caaatagtctgattggttctcctct

SEQ ID NO: 3642795 - DNA, 25 bp, Homo sapien
ggtgtgaggatctctattttcctta

SEQ ID NO: 3642796 - DNA, 25 bp, Homo sapien
tccttaaacgttgaaaagcatcata

SEQ ID NO: 3642797 - DNA, 25 bp, Homo sapien
accgcattccagcgtaggtgacgga

SEQ ID NO: 3642798 - DNA, 25 bp, Homo sapien
caccgcattccagcgtaggtgacgg

SEQ ID NO: 3642799 - DNA, 25 bp, Homo sapien
ccaccgcattccagcgtaggtgacg

SEQ ID NO: 3642800 - DNA, 25 bp, Homo sapien
ccgcattccagcgtaggtgacggag

SEQ ID NO: 3642801 - DNA, 25 bp, Homo sapien
cgccgacgatttcattgaggtactg

SEQ ID NO: 3642802 - DNA, 25 bp, Homo sapien
gtactgctgatcaatcttatccaag

SEQ ID NO: 3642803 - DNA, 25 bp, Homo sapien
gacgatttcattgaggtactgctga

SEQ ID NO: 3642804 - DNA, 25 bp, Homo sapien
tcattgaggtactgctgatcaatct

SEQ ID NO: 3642805 - DNA, 25 bp, Homo sapien
tcagatcattctgtgtgtcttcctc

SEQ ID NO: 3642806 - DNA, 25 bp, Homo sapien
cctcatgaactttcagatcattctg

SEQ ID NO: 3642807 - DNA, 25 bp, Homo sapien
taactcttcaattgtggtgttttcc

SEQ ID NO: 3642808 - DNA, 25 bp, Homo sapien
gtggtgttttcctcatgaactttca

SEQ ID NO: 3642809 - DNA, 25 bp, Homo sapien
gatcatcgcctttccctaaggactc

SEQ ID NO: 3642810 - DNA, 25 bp, Homo sapien
tatgatcatcgcctttccctaagga

SEQ ID NO: 3642811 - DNA, 25 bp, Homo sapien
atgtctttatgatcatcgcctttcc

SEQ ID NO: 3642812 - DNA, 25 bp, Homo sapien
tctttatgatcatcgcctttcccta

SEQ ID NO: 3642813 - DNA, 25 bp, Homo sapien
ctgtttctgggtcgcactgttcagt

SEQ ID NO: 3642814 - DNA, 25 bp, Homo sapien
gtttaccctgcacactgcgtttcac

SEQ ID NO: 3642815 - DNA, 25 bp, Homo sapien
ctgcgtttcacataatcttctctgg

SEQ ID NO: 3642816 - DNA, 25 bp, Homo sapien
tctttagcccaaacgccaagaagaa

SEQ ID NO: 3642817 - DNA, 25 bp, Homo sapien
tgaatttaataatatccgttattga

SEQ ID NO: 3642818 - DNA, 25 bp, Homo sapien
taataatatccgttattgattcttt

SEQ ID NO: 3642819 - DNA, 25 bp, Homo sapien
taatatccgttattgattctttaat

SEQ ID NO: 3642820 - DNA, 25 bp, Homo sapien
gattctttaatatcagcaggaagat

SEQ ID NO: 3642821 - DNA, 25 bp, Homo sapien
catagtgacaccgatgggccaaggc

SEQ ID NO: 3642822 - DNA, 25 bp, Homo sapien
acaccgatgggccaaggcgcatttc

SEQ ID NO: 3642823 - DNA, 25 bp, Homo sapien
tgggccaaggcgcatttccaatggc

SEQ ID NO: 3642824 - DNA, 25 bp, Homo sapien
cgcatttccaatggccatctgaaga

SEQ ID NO: 3642825 - DNA, 25 bp, Homo sapien
ctgaatatatttccgctgagtttcg

SEQ ID NO: 3642826 - DNA, 25 bp, Homo sapien
tccgctgagtttcgtcatttaaaac

SEQ ID NO: 3642827 - DNA, 25 bp, Homo sapien
tgccagttctggcatggataccaac

SEQ ID NO: 3642828 - DNA, 25 bp, Homo sapien
gtttcgtcatttaaaacatgtgcaa

SEQ ID NO: 3642829 - DNA, 25 bp, Homo sapien
gactaaggcataaagcatgacacga

SEQ ID NO: 3642830 - DNA, 25 bp, Homo sapien
taaacttccggagtatcactgtcaa

SEQ ID NO: 3642831 - DNA, 25 bp, Homo sapien
tatacagttcacatgagggagtccg

SEQ ID NO: 3642832 - DNA, 25 bp, Homo sapien
gaaaacaaaccatcggcactttaga

SEQ ID NO: 3642833 - DNA, 25 bp, Homo sapien
tcggtatagccatccaagtcagtca

SEQ ID NO: 3642834 - DNA, 25 bp, Homo sapien
cattaaaaggttcgacaggacagca

SEQ ID NO: 3642835 - DNA, 25 bp, Homo sapien
caagaataccactgggtctgcctca

SEQ ID NO: 3642836 - DNA, 25 bp, Homo sapien
tagcatctaccctaagagacacgag

SEQ ID NO: 3642837 - DNA, 25 bp, Homo sapien
tcctgagcagtacatatccatccaa

SEQ ID NO: 3642838 - DNA, 25 bp, Homo sapien
tcacagtcagtatccatgggttatg

SEQ ID NO: 3642839 - DNA, 25 bp, Homo sapien
tactcaataccgtgcgcaaacaggc

SEQ ID NO: 3642840 - DNA, 25 bp, Homo sapien
gatctttcagaatccttggtcgaca

SEQ ID NO: 3642841 - DNA, 25 bp, Homo sapien
tcattggtcccatagtaagcagaca

SEQ ID NO: 3642842 - DNA, 25 bp, Homo sapien
tttctggcaaatggtcattaacctc

SEQ ID NO: 3642843 - DNA, 25 bp, Homo sapien
agtgcattgtactccacacatttgg

SEQ ID NO: 3642844 - DNA, 25 bp, Homo sapien
tctggcaaatggtcattaacctctt

SEQ ID NO: 3642845 - DNA, 25 bp, Homo sapien
acagtgcattgtactccacacattt

SEQ ID NO: 3642846 - DNA, 25 bp, Homo sapien
agtccacagcctgcttccctaagtt

SEQ ID NO: 3642847 - DNA, 25 bp, Homo sapien
tgttggtaattccagaagtccacag

SEQ ID NO: 3642848 - DNA, 25 bp, Homo sapien
gtaattccagaagtccacagcctgc

SEQ ID NO: 3642849 - DNA, 25 bp, Homo sapien
gtccacagcctgcttccctaagttt

SEQ ID NO: 3642850 - DNA, 25 bp, Homo sapien
tttaatcatctaaccacaactttcg

SEQ ID NO: 3642851 - DNA, 25 bp, Homo sapien
taaacccccttctgttgtctatgga

SEQ ID NO: 3642852 - DNA, 25 bp, Homo sapien
ccaatcaagagttacatcaggtaga

SEQ ID NO: 3642853 - DNA, 25 bp, Homo sapien
taaccacaactttcgggtcaactga

SEQ ID NO: 3642854 - DNA, 25 bp, Homo sapien
tcctcctctgttggcgggtgtggct

SEQ ID NO: 3642855 - DNA, 25 bp, Homo sapien
gggacatcagtaccagcaccttcct

SEQ ID NO: 3642856 - DNA, 25 bp, Homo sapien
gagccctcactgtggaaaaccaagg

SEQ ID NO: 3642857 - DNA, 25 bp, Homo sapien
tgggaacacagtctgcccaggtcta

SEQ ID NO: 3642858 - DNA, 25 bp, Homo sapien
gaggcctctcgggttctaaagcata

SEQ ID NO: 3642859 - DNA, 25 bp, Homo sapien
taaagcatagtaacaggtcacagtg

SEQ ID NO: 3642860 - DNA, 25 bp, Homo sapien
tccgggagcatccactcacacatgc

SEQ ID NO: 3642861 - DNA, 25 bp, Homo sapien
tcgggttctaaagcatagtaacagg

SEQ ID NO: 3642862 - DNA, 25 bp, Homo sapien
tgttttgtgaggacacactgcccct

SEQ ID NO: 3642863 - DNA, 25 bp, Homo sapien
gaggaaccagaatagaccgctgtga

SEQ ID NO: 3642864 - DNA, 25 bp, Homo sapien
gccgcagggttcagatacagtaaat

SEQ ID NO: 3642865 - DNA, 25 bp, Homo sapien
catttaagacaacgaagctgacgct

SEQ ID NO: 3642866 - DNA, 25 bp, Homo sapien
atgagggagtgggaggcaaggaacc

SEQ ID NO: 3642867 - DNA, 25 bp, Homo sapien
caccaccatgcatataaccatcaga

SEQ ID NO: 3642868 - DNA, 25 bp, Homo sapien
catcagaaacgatcctgtctaggca

SEQ ID NO: 3642869 - DNA, 25 bp, Homo sapien
aagagcacaagtggccaaaactggc

SEQ ID NO: 3642870 - DNA, 25 bp, Homo sapien
gctggtaagttacactaagctctaa

SEQ ID NO: 3642871 - DNA, 25 bp, Homo sapien
taatgaactactctactgtgtgacc

SEQ ID NO: 3642872 - DNA, 25 bp, Homo sapien
gtctgtctctcacttgcgctggtaa

SEQ ID NO: 3642873 - DNA, 25 bp, Homo sapien
tgctgtcatatcttacgaaagtctg

SEQ ID NO: 3642874 - DNA, 25 bp, Homo sapien
agtctgtgatgaaaaccagttgcca

SEQ ID NO: 3642875 - DNA, 25 bp, Homo sapien
gaagctcttgcgtcaatataccgtg

SEQ ID NO: 3642876 - DNA, 25 bp, Homo sapien
tcagccaatggaactgcagagtctg

SEQ ID NO: 3642877 - DNA, 25 bp, Homo sapien
taaccattaaaggactagcgtgtgg

SEQ ID NO: 3642878 - DNA, 25 bp, Homo sapien
ccagccaaacctatctcgtacttta

SEQ ID NO: 3642879 - DNA, 25 bp, Homo sapien
atccaacaatgtgcaaccagcccaa

SEQ ID NO: 3642880 - DNA, 25 bp, Homo sapien
tctcgtactttaactgacctcccat

SEQ ID NO: 3642881 - DNA, 25 bp, Homo sapien
taactgacctcccatttattttgta

SEQ ID NO: 3642882 - DNA, 25 bp, Homo sapien
ttgtgagacacagcatcaagactga

SEQ ID NO: 3642883 - DNA, 25 bp, Homo sapien
gacacttgacgcgtaacactagact

SEQ ID NO: 3642884 - DNA, 25 bp, Homo sapien
tgagtaagtatcagaacccctaagc

SEQ ID NO: 3642885 - DNA, 25 bp, Homo sapien
tagaaattaggaccatggctatgac

SEQ ID NO: 3642886 - DNA, 25 bp, Homo sapien
tggtagaccgagtaaacacatggcc

SEQ ID NO: 3642887 - DNA, 25 bp, Homo sapien
ctgaatagatcaaaaagatggggta

SEQ ID NO: 3642888 - DNA, 25 bp, Homo sapien
ggggtaaaggagaattagctctctc

SEQ ID NO: 3642889 - DNA, 25 bp, Homo sapien
ccttctcagtgcatacgggcatcat

SEQ ID NO: 3642890 - DNA, 25 bp, Homo sapien
tactgttctcatataacatgaggcc

SEQ ID NO: 3642891 - DNA, 25 bp, Homo sapien
tctcatataacatgaggcccacagg

SEQ ID NO: 3642892 - DNA, 25 bp, Homo sapien
ccaatactgttctcatataacatga

SEQ ID NO: 3642893 - DNA, 25 bp, Homo sapien
tgttctcatataacatgaggcccac

SEQ ID NO: 3642894 - DNA, 25 bp, Homo sapien
tcttaggaggatgtggcaaagtccg

SEQ ID NO: 3642895 - DNA, 25 bp, Homo sapien
attccagtcgaaatgaacaaagacc

SEQ ID NO: 3642896 - DNA, 25 bp, Homo sapien
accacttcaagtaaatgctctcaca

SEQ ID NO: 3642897 - DNA, 25 bp, Homo sapien
gcaaagtccgattttattccagtcg

SEQ ID NO: 3642898 - DNA, 25 bp, Homo sapien
cttgaggtgcttttaacatcagttc

SEQ ID NO: 3642899 - DNA, 25 bp, Homo sapien
tccttgaggtgcttttaacatcagt

SEQ ID NO: 3642900 - DNA, 25 bp, Homo sapien
tgtccttgaggtgcttttaacatca

SEQ ID NO: 3642901 - DNA, 25 bp, Homo sapien
gaggtgcttttaacatcagttccat

SEQ ID NO: 3642902 - DNA, 25 bp, Homo sapien
tctacaagtgtggaaaaccgcaccc

SEQ ID NO: 3642903 - DNA, 25 bp, Homo sapien
tcatggacgagacaaacaggcacac

SEQ ID NO: 3642904 - DNA, 25 bp, Homo sapien
ttgatgacagggcagaagaactcct

SEQ ID NO: 3642905 - DNA, 25 bp, Homo sapien
gagtgaaacctctcaggcgtggaca

SEQ ID NO: 3642906 - DNA, 25 bp, Homo sapien
gctctaccacatgaaagcaactggt

SEQ ID NO: 3642907 - DNA, 25 bp, Homo sapien
caactggtagataggaagatcctct

SEQ ID NO: 3642908 - DNA, 25 bp, Homo sapien
tgccaaaaaaggtgattccgaacat

SEQ ID NO: 3642909 - DNA, 25 bp, Homo sapien
caaagggccctcacgtaagtcttct

SEQ ID NO: 3642910 - DNA, 25 bp, Homo sapien
gctagttgatgctgccgaaaaggaa

SEQ ID NO: 3642911 - DNA, 25 bp, Homo sapien
ctagttgatgctgccgaaaaggaaa

SEQ ID NO: 3642912 - DNA, 25 bp, Homo sapien
gagaatcacatctggaagtgagccc

SEQ ID NO: 3642913 - DNA, 25 bp, Homo sapien
agaagccttggccactagagctagt

SEQ ID NO: 3642914 - DNA, 25 bp, Homo sapien
taaatcacatcacgagagccaagcg

SEQ ID NO: 3642915 - DNA, 25 bp, Homo sapien
gcatccctgcatgaaaaactcctgg

SEQ ID NO: 3642916 - DNA, 25 bp, Homo sapien
ggatcaagattctagcccactggag

SEQ ID NO: 3642917 - DNA, 25 bp, Homo sapien
gtgactgctgcaatcgaatccctgg

SEQ ID NO: 3642918 - DNA, 25 bp, Homo sapien
catgcatggctggactggtgattcc

SEQ ID NO: 3642919 - DNA, 25 bp, Homo sapien
ttcccagaacgctttaagtgtacac

SEQ ID NO: 3642920 - DNA, 25 bp, Homo sapien
tctctagacaattcagggcctgctt

SEQ ID NO: 3642921 - DNA, 25 bp, Homo sapien
gggattcatattcccagaacgcttt

SEQ ID NO: 3642922 - DNA, 25 bp, Homo sapien
accaccgagagtcgagctggggcac

SEQ ID NO: 3642923 - DNA, 25 bp, Homo sapien
accgagagtcgagctggggcacaca

SEQ ID NO: 3642924 - DNA, 25 bp, Homo sapien
ggagaccaccgagagtcgagctggg

SEQ ID NO: 3642925 - DNA, 25 bp, Homo sapien
tggagaccaccgagagtcgagctgg

SEQ ID NO: 3642926 - DNA, 25 bp, Homo sapien
aataaccataggctctaccagacca

SEQ ID NO: 3642927 - DNA, 25 bp, Homo sapien
ccagaagggtaaggatggacactaa

SEQ ID NO: 3642928 - DNA, 25 bp, Homo sapien
ctgaagttagcttaagcataaaaac

SEQ ID NO: 3642929 - DNA, 25 bp, Homo sapien
gaaagcagaactgaagttagcttaa

SEQ ID NO: 3642930 - DNA, 25 bp, Homo sapien
tgccacggtaaaggcgaggaagtct

SEQ ID NO: 3642931 - DNA, 25 bp, Homo sapien
agcctgaaaaactgccccaatgcca

SEQ ID NO: 3642932 - DNA, 25 bp, Homo sapien
gttgctgactcacagtcgccatcca

SEQ ID NO: 3642933 - DNA, 25 bp, Homo sapien
tctctctccgtagagagcctgaaaa

SEQ ID NO: 3642934 - DNA, 25 bp, Homo sapien
agagccagacaccaatcctcaatgg

SEQ ID NO: 3642935 - DNA, 25 bp, Homo sapien
agcccctaggccaggaaccatcagg

SEQ ID NO: 3642936 - DNA, 25 bp, Homo sapien
ccctggcgctcttgcccatagagag

SEQ ID NO: 3642937 - DNA, 25 bp, Homo sapien
tggaaggttccggtcccactgtgtg

SEQ ID NO: 3642938 - DNA, 25 bp, Homo sapien
tcaccctgcaccagctttggccctc

SEQ ID NO: 3642939 - DNA, 25 bp, Homo sapien
cagctttggccctcagcactttttt

SEQ ID NO: 3642940 - DNA, 25 bp, Homo sapien
cagcactgttgagggtctcaggcct

SEQ ID NO: 3642941 - DNA, 25 bp, Homo sapien
ggaaagactcgtgattagcacaggg

SEQ ID NO: 3642942 - DNA, 25 bp, Homo sapien
aaatgctctaggtttcaggcggccc

SEQ ID NO: 3642943 - DNA, 25 bp, Homo sapien
tcaggcctcactgctccgaacagga

SEQ ID NO: 3642944 - DNA, 25 bp, Homo sapien
atccaccagtatatgcacagatgcc

SEQ ID NO: 3642945 - DNA, 25 bp, Homo sapien
aatccaccagtatatgcacagatgc

SEQ ID NO: 3642946 - DNA, 25 bp, Homo sapien
ttaaaatccaccagtatatgcacag

SEQ ID NO: 3642947 - DNA, 25 bp, Homo sapien
ctggtgctccaaacacaggactctc

SEQ ID NO: 3642948 - DNA, 25 bp, Homo sapien
tatttctggtgctccaaacacagga

SEQ ID NO: 3642949 - DNA, 25 bp, Homo sapien
gtttatttctggtgctccaaacaca

SEQ ID NO: 3642950 - DNA, 25 bp, Homo sapien
tttctggtgctccaaacacaggact

SEQ ID NO: 3642951 - DNA, 25 bp, Homo sapien
aggcacgtggccacctttgaaccag

SEQ ID NO: 3642952 - DNA, 25 bp, Homo sapien
tttgatcgggggactctcattggcc

SEQ ID NO: 3642953 - DNA, 25 bp, Homo sapien
aggatggcgccatggtggagagcac

SEQ ID NO: 3642954 - DNA, 25 bp, Homo sapien
gaccacgtggagttagggagagact

SEQ ID NO: 3642955 - DNA, 25 bp, Homo sapien
ggtttccatactgcggctcctctag

SEQ ID NO: 3642956 - DNA, 25 bp, Homo sapien
atactgcggctcctctaggagccac

SEQ ID NO: 3642957 - DNA, 25 bp, Homo sapien
tggtttccatactgcggctcctcta

SEQ ID NO: 3642958 - DNA, 25 bp, Homo sapien
tccatactgcggctcctctaggagc

SEQ ID NO: 3642959 - DNA, 25 bp, Homo sapien
tggttcctggtttggtggagcatca

SEQ ID NO: 3642960 - DNA, 25 bp, Homo sapien
caactggctgtgagttgaatcatga

SEQ ID NO: 3642961 - DNA, 25 bp, Homo sapien
ttctgttgcccctgagacatcatct

SEQ ID NO: 3642962 - DNA, 25 bp, Homo sapien
gatgtctgggaaaacctgacaactg

SEQ ID NO: 3642963 - DNA, 25 bp, Homo sapien
tctcagggtgcaagaaaaagggctg

SEQ ID NO: 3642964 - DNA, 25 bp, Homo sapien
cagccagtgtcttaggatgtctcag

SEQ ID NO: 3642965 - DNA, 25 bp, Homo sapien
cacacaaaagagatcaggtgccctg

SEQ ID NO: 3642966 - DNA, 25 bp, Homo sapien
caggctgactcaaaatgccaggcaa

SEQ ID NO: 3642967 - DNA, 25 bp, Homo sapien
ttcttcactgtgtcagctcgaaaga

SEQ ID NO: 3642968 - DNA, 25 bp, Homo sapien
tcagctcgaaagagtgtcatagacg

SEQ ID NO: 3642969 - DNA, 25 bp, Homo sapien
aaagagtgtcatagacgttcagatc

SEQ ID NO: 3642970 - DNA, 25 bp, Homo sapien
actgtgtcagctcgaaagagtgtca

SEQ ID NO: 3642971 - DNA, 25 bp, Homo sapien
cacatccccgtggacgtttattagg

SEQ ID NO: 3642972 - DNA, 25 bp, Homo sapien
gacaagctccaaagatcaggtaatg

SEQ ID NO: 3642973 - DNA, 25 bp, Homo sapien
taatggtgggtgttccgtggacttc

SEQ ID NO: 3642974 - DNA, 25 bp, Homo sapien
tgaaatttgccattgactccccagg

SEQ ID NO: 3642975 - DNA, 25 bp, Homo sapien
gatcgcagatcctgcggactccgtc

SEQ ID NO: 3642976 - DNA, 25 bp, Homo sapien
cactacagcgtcaaggctcagttca

SEQ ID NO: 3642977 - DNA, 25 bp, Homo sapien
gcctgacgccgtcgcgatcgcagat

SEQ ID NO: 3642978 - DNA, 25 bp, Homo sapien
gttcaagacgtccaactcctacacg

SEQ ID NO: 3642979 - DNA, 25 bp, Homo sapien
ctactccacgctggccgaggactcg

SEQ ID NO: 3642980 - DNA, 25 bp, Homo sapien
tccacgctggccgaggactcgccgt

SEQ ID NO: 3642981 - DNA, 25 bp, Homo sapien
tggccgaggactcgccgtccaaggc

SEQ ID NO: 3642982 - DNA, 25 bp, Homo sapien
ccgtccaaggcgcgccagaggcaga

SEQ ID NO: 3642983 - DNA, 25 bp, Homo sapien
ccatggacgactgctcgtcgtgcac

SEQ ID NO: 3642984 - DNA, 25 bp, Homo sapien
ggacgactgctcgtcgtgcaccagc

SEQ ID NO: 3642985 - DNA, 25 bp, Homo sapien
catggacgactgctcgtcgtgcacc

SEQ ID NO: 3642986 - DNA, 25 bp, Homo sapien
gctcgtcgtgcaccagccactcgag

SEQ ID NO: 3642987 - DNA, 25 bp, Homo sapien
tcttgttcctgctccctttaggctt

SEQ ID NO: 3642988 - DNA, 25 bp, Homo sapien
ctcaaaagtcaatgagatcaggcaa

SEQ ID NO: 3642989 - DNA, 25 bp, Homo sapien
cttgttcctgctccctttaggctta

SEQ ID NO: 3642990 - DNA, 25 bp, Homo sapien
tcagtatgtggttcccctcggtagg

SEQ ID NO: 3642991 - DNA, 25 bp, Homo sapien
tcttgagtgagctggccggtcagta

SEQ ID NO: 3642992 - DNA, 25 bp, Homo sapien
catttgggtgtctgtcgaagttgct

SEQ ID NO: 3642993 - DNA, 25 bp, Homo sapien
cctcggtaggagtagtttgcttgca

SEQ ID NO: 3642994 - DNA, 25 bp, Homo sapien
ggaaccacccattgttcggagaaga

SEQ ID NO: 3642995 - DNA, 25 bp, Homo sapien
gctcacgggcaagctgccagtagaa

SEQ ID NO: 3642996 - DNA, 25 bp, Homo sapien
tcacatatgcaggagctcacgggca

SEQ ID NO: 3642997 - DNA, 25 bp, Homo sapien
cccattgttcggagaagaataggaa

SEQ ID NO: 3642998 - DNA, 25 bp, Homo sapien
ttagagaggcccgagaactcacgct

SEQ ID NO: 3642999 - DNA, 25 bp, Homo sapien
gcatctggccagagtaggttactat

SEQ ID NO: 3643000 - DNA, 25 bp, Homo sapien
actgctcctcactggctgggtgacc

SEQ ID NO: 3643001 - DNA, 25 bp, Homo sapien
tttgatgcagtgtcaagagcacggg

SEQ ID NO: 3643002 - DNA, 25 bp, Homo sapien
gtcaccatggaagtctgtcaactaa

SEQ ID NO: 3643003 - DNA, 25 bp, Homo sapien
tgaatttgatgcctggcctctacag

SEQ ID NO: 3643004 - DNA, 25 bp, Homo sapien
ttaaccaggatcactgtcaccatgg

SEQ ID NO: 3643005 - DNA, 25 bp, Homo sapien
tgtacccacaacaagtagatttccg

SEQ ID NO: 3643006 - DNA, 25 bp, Homo sapien
gctgccctgcgcaaaagctttctgt

SEQ ID NO: 3643007 - DNA, 25 bp, Homo sapien
atttcccggcaatctgaacacagcg

SEQ ID NO: 3643008 - DNA, 25 bp, Homo sapien
gatagttggccattgtgctctgaaa

SEQ ID NO: 3643009 - DNA, 25 bp, Homo sapien
gatttggattttcccgcctgctggg

SEQ ID NO: 3643010 - DNA, 25 bp, Homo sapien
tgtgtctccgagaagctgtaagcct

SEQ ID NO: 3643011 - DNA, 25 bp, Homo sapien
gggtaaatcccatctccgcagcatg

SEQ ID NO: 3643012 - DNA, 25 bp, Homo sapien
aatcagatagctcgcagtcggccaa

SEQ ID NO: 3643013 - DNA, 25 bp, Homo sapien
cattagtggtccagatgtgtgtccc

SEQ ID NO: 3643014 - DNA, 25 bp, Homo sapien
cacattatctttgcactaagcaaaa

SEQ ID NO: 3643015 - DNA, 25 bp, Homo sapien
cattatctttgcactaagcaaaaat

SEQ ID NO: 3643016 - DNA, 25 bp, Homo sapien
gaaaatgcatagcaatggttatttc

SEQ ID NO: 3643017 - DNA, 25 bp, Homo sapien
ggtgattagttaatggactatttct

SEQ ID NO: 3643018 - DNA, 25 bp, Homo sapien
gctcatgatacaaaacatgaagtta

SEQ ID NO: 3643019 - DNA, 25 bp, Homo sapien
ttaggagggaatttgctcatgatac

SEQ ID NO: 3643020 - DNA, 25 bp, Homo sapien
atatgtataacttttattaggaggg

SEQ ID NO: 3643021 - DNA, 25 bp, Homo sapien
aatatgtataacttttattaggagg

SEQ ID NO: 3643022 - DNA, 25 bp, Homo sapien
tctgctcagagacgttaaatagaag

SEQ ID NO: 3643023 - DNA, 25 bp, Homo sapien
tagtaagagcctgtatgtatggtaa

SEQ ID NO: 3643024 - DNA, 25 bp, Homo sapien
gagctgtttgatgccacgggacaga

SEQ ID NO: 3643025 - DNA, 25 bp, Homo sapien
aatgatagtatgtttctgcggtgac

SEQ ID NO: 3643026 - DNA, 25 bp, Homo sapien
acggtgggtggtacatctgcaagca

SEQ ID NO: 3643027 - DNA, 25 bp, Homo sapien
tcctgaattgatgtggccacggtgg

SEQ ID NO: 3643028 - DNA, 25 bp, Homo sapien
gccacggtgggtggtacatctgcaa

SEQ ID NO: 3643029 - DNA, 25 bp, Homo sapien
ttcctgaattgatgtggccacggtg

SEQ ID NO: 3643030 - DNA, 25 bp, Homo sapien
tgtccttccatgtgtctgccggccg

SEQ ID NO: 3643031 - DNA, 25 bp, Homo sapien
aatgtgcgctcatatccggtgctga

SEQ ID NO: 3643032 - DNA, 25 bp, Homo sapien
tgtgctgctggcgttgcctccacat

SEQ ID NO: 3643033 - DNA, 25 bp, Homo sapien
gcatttctggctcgcggctgaatga

SEQ ID NO: 3643034 - DNA, 25 bp, Homo sapien
acagatgagccacgcgtggctcctg

SEQ ID NO: 3643035 - DNA, 25 bp, Homo sapien
aaaacagatgagccacgcgtggctc

SEQ ID NO: 3643036 - DNA, 25 bp, Homo sapien
aacagatgagccacgcgtggctcct

SEQ ID NO: 3643037 - DNA, 25 bp, Homo sapien
aaacagatgagccacgcgtggctcc

SEQ ID NO: 3643038 - DNA, 25 bp, Homo sapien
cagggcgcagccaaagtcggattgt

SEQ ID NO: 3643039 - DNA, 25 bp, Homo sapien
tttgtttatgctggaccgtgtgccc

SEQ ID NO: 3643040 - DNA, 25 bp, Homo sapien
gcccagggagagctgcgaaatctct

SEQ ID NO: 3643041 - DNA, 25 bp, Homo sapien
tctggacatgtttgagcaggactgg

SEQ ID NO: 3643042 - DNA, 25 bp, Homo sapien
catttgcagaaagttcaggtacagt

SEQ ID NO: 3643043 - DNA, 25 bp, Homo sapien
gtgcctctgttattgaccactggag

SEQ ID NO: 3643044 - DNA, 25 bp, Homo sapien
gaacccgcgtcctgaatccatttgt

SEQ ID NO: 3643045 - DNA, 25 bp, Homo sapien
tgccctgtgacagcccagtgattgc

SEQ ID NO: 3643046 - DNA, 25 bp, Homo sapien
tgcagagcggctcccattgtcagct

SEQ ID NO: 3643047 - DNA, 25 bp, Homo sapien
cagagcggctcccattgtcagcttc

SEQ ID NO: 3643048 - DNA, 25 bp, Homo sapien
gcggctcccattgtcagcttcagtg

SEQ ID NO: 3643049 - DNA, 25 bp, Homo sapien
gagcggctcccattgtcagcttcag

SEQ ID NO: 3643050 - DNA, 25 bp, Homo sapien
gagcgtttcacaatccccatggcaa

SEQ ID NO: 3643051 - DNA, 25 bp, Homo sapien
tagaaccacgcagtgcaagaaggcc

SEQ ID NO: 3643052 - DNA, 25 bp, Homo sapien
caagctgtcgggaatgtcaggtcca

SEQ ID NO: 3643053 - DNA, 25 bp, Homo sapien
gaatactctctccatcgtgtcgcag

SEQ ID NO: 3643054 - DNA, 25 bp, Homo sapien
tgttctttatagaacagcgatgtga

SEQ ID NO: 3643055 - DNA, 25 bp, Homo sapien
ctttgggaattacattacaacacct

SEQ ID NO: 3643056 - DNA, 25 bp, Homo sapien
attgatctctgatgggcagcacggc

SEQ ID NO: 3643057 - DNA, 25 bp, Homo sapien
tgggtgagtgatggccgacagggct

SEQ ID NO: 3643058 - DNA, 25 bp, Homo sapien
aatggaggtacctagccttgcacca

SEQ ID NO: 3643059 - DNA, 25 bp, Homo sapien
gccttgcaccacctttcaagatact

SEQ ID NO: 3643060 - DNA, 25 bp, Homo sapien
gagaaatggaggtacctagccttgc

SEQ ID NO: 3643061 - DNA, 25 bp, Homo sapien
caagatactgttcttgtctaattca

SEQ ID NO: 3643062 - DNA, 25 bp, Homo sapien
tgtctcgtcccaggcaaactcgctc

SEQ ID NO: 3643063 - DNA, 25 bp, Homo sapien
tcgtcccaggcaaactcgctctgag

SEQ ID NO: 3643064 - DNA, 25 bp, Homo sapien
ggcaaactcgctctgagtacactga

SEQ ID NO: 3643065 - DNA, 25 bp, Homo sapien
ctcgctctgagtacactgagttagc

SEQ ID NO: 3643066 - DNA, 25 bp, Homo sapien
cctcagggggatatagatgtcaggt

SEQ ID NO: 3643067 - DNA, 25 bp, Homo sapien
attaaagccacgtggtagggcctca

SEQ ID NO: 3643068 - DNA, 25 bp, Homo sapien
gggcttctcaattaggataaacaaa

SEQ ID NO: 3643069 - DNA, 25 bp, Homo sapien
gagaggtctgagttggacctggagg

SEQ ID NO: 3643070 - DNA, 25 bp, Homo sapien
cttggacctgtgcagtagcccctgt

SEQ ID NO: 3643071 - DNA, 25 bp, Homo sapien
tgcagcccatgataacccggtagga

SEQ ID NO: 3643072 - DNA, 25 bp, Homo sapien
tgaaacagccactcctgtgtagggc

SEQ ID NO: 3643073 - DNA, 25 bp, Homo sapien
gtagggcaagagcttatctcagcac

SEQ ID NO: 3643074 - DNA, 25 bp, Homo sapien
aacacacaccagtaagtccccatag

SEQ ID NO: 3643075 - DNA, 25 bp, Homo sapien
acacacaccagtaagtccccatagg

SEQ ID NO: 3643076 - DNA, 25 bp, Homo sapien
cacacaccagtaagtccccatagga

SEQ ID NO: 3643077 - DNA, 25 bp, Homo sapien
gccgaccgaaggcggagaacttgaa

SEQ ID NO: 3643078 - DNA, 25 bp, Homo sapien
actgccacgaccaaaccaacaaagg

SEQ ID NO: 3643079 - DNA, 25 bp, Homo sapien
caacaaaggccgaccgaaggcggag

SEQ ID NO: 3643080 - DNA, 25 bp, Homo sapien
ctggggactgccacgaccaaaccaa

SEQ ID NO: 3643081 - DNA, 25 bp, Homo sapien
ggctctttggcagacgcgcagttct

SEQ ID NO: 3643082 - DNA, 25 bp, Homo sapien
aaaatgtctagtgcatcatcccggg

SEQ ID NO: 3643083 - DNA, 25 bp, Homo sapien
tccatggttcgcagccaagggcaga

SEQ ID NO: 3643084 - DNA, 25 bp, Homo sapien
cagatggttttgttcgggctctttg

SEQ ID NO: 3643085 - DNA, 25 bp, Homo sapien
ttcccaggattgcatttgcaaaaca

SEQ ID NO: 3643086 - DNA, 25 bp, Homo sapien
cttcccaggattgcatttgcaaaac

SEQ ID NO: 3643087 - DNA, 25 bp, Homo sapien
cattagtcagtaagagctgttccca

SEQ ID NO: 3643088 - DNA, 25 bp, Homo sapien
tccacttgtaaagttaaccatccat

SEQ ID NO: 3643089 - DNA, 25 bp, Homo sapien
gctgttcccactaattggtggactc

SEQ ID NO: 3643090 - DNA, 25 bp, Homo sapien
tactttctacttacagtcatattgt

SEQ ID NO: 3643091 - DNA, 25 bp, Homo sapien
ctggagcaggcataagagaaatgcc

SEQ ID NO: 3643092 - DNA, 25 bp, Homo sapien
aagagaaatgccaactgccaacccc

SEQ ID NO: 3643093 - DNA, 25 bp, Homo sapien
tgtctctatgatgccacgtctctgg

SEQ ID NO: 3643094 - DNA, 25 bp, Homo sapien
tgacctccacagaggagatcgggat

SEQ ID NO: 3643095 - DNA, 25 bp, Homo sapien
tatgggtgataaagcacggtgtttc

SEQ ID NO: 3643096 - DNA, 25 bp, Homo sapien
tgagtgtatgcctgtatttccctgc

SEQ ID NO: 3643097 - DNA, 25 bp, Homo sapien
actccctggcaccttccaaccaggg

SEQ ID NO: 3643098 - DNA, 25 bp, Homo sapien
accttccaaccaggggagcctggag

SEQ ID NO: 3643099 - DNA, 25 bp, Homo sapien
tggcaccttccaaccaggggagcct

SEQ ID NO: 3643100 - DNA, 25 bp, Homo sapien
gcaccttccaaccaggggagcctgg

SEQ ID NO: 3643101 - DNA, 25 bp, Homo sapien
cgcttcagttcgtctgatgtcaggg

SEQ ID NO: 3643102 - DNA, 25 bp, Homo sapien
gctctaaagttaaatctctccattc

SEQ ID NO: 3643103 - DNA, 25 bp, Homo sapien
ggatacctattaagctctccaggta

SEQ ID NO: 3643104 - DNA, 25 bp, Homo sapien
caggtaaccctaatgaaccctctct

SEQ ID NO: 3643105 - DNA, 25 bp, Homo sapien
taacaagtcggttgatgagatgatc

SEQ ID NO: 3643106 - DNA, 25 bp, Homo sapien
tgagatgatcgggaatcctgatgtt

SEQ ID NO: 3643107 - DNA, 25 bp, Homo sapien
ctggcccagcagtcaagacacctca

SEQ ID NO: 3643108 - DNA, 25 bp, Homo sapien
gacacctcacaattctacacaattg

SEQ ID NO: 3643109 - DNA, 25 bp, Homo sapien
gccctcaacctagacgaaactcgga

SEQ ID NO: 3643110 - DNA, 25 bp, Homo sapien
cagtctaagatgaactcgcatgcag

SEQ ID NO: 3643111 - DNA, 25 bp, Homo sapien
gaaactcggaagctaggatgacccc

SEQ ID NO: 3643112 - DNA, 25 bp, Homo sapien
ttgtacatacgattccctgggaagc

SEQ ID NO: 3643113 - DNA, 25 bp, Homo sapien
aagatcaggcgcattcagggcagta

SEQ ID NO: 3643114 - DNA, 25 bp, Homo sapien
aatcagacaagatcaggcgcattca

SEQ ID NO: 3643115 - DNA, 25 bp, Homo sapien
acaagatcaggcgcattcagggcag

SEQ ID NO: 3643116 - DNA, 25 bp, Homo sapien
agacaagatcaggcgcattcagggc

SEQ ID NO: 3643117 - DNA, 25 bp, Homo sapien
ttattaaagaaagctacagcaatag

SEQ ID NO: 3643118 - DNA, 25 bp, Homo sapien
gctacagcaatagtgttcgagcact

SEQ ID NO: 3643119 - DNA, 25 bp, Homo sapien
cagcaatagtgttcgagcactaaat

SEQ ID NO: 3643120 - DNA, 25 bp, Homo sapien
gaaagctacagcaatagtgttcgag

SEQ ID NO: 3643121 - DNA, 25 bp, Homo sapien
attaacttggcgtggactcccggcg

SEQ ID NO: 3643122 - DNA, 25 bp, Homo sapien
cctctgacttgaccggcctaggtgg

SEQ ID NO: 3643123 - DNA, 25 bp, Homo sapien
gatttatcgttctcttctgtcggcg

SEQ ID NO: 3643124 - DNA, 25 bp, Homo sapien
tatgcggtgcggtgtacgttctgcc

SEQ ID NO: 3643125 - DNA, 25 bp, Homo sapien
gatgcacaattaggagcactatggg

SEQ ID NO: 3643126 - DNA, 25 bp, Homo sapien
tgtccctaagcagccgcggtggctt

SEQ ID NO: 3643127 - DNA, 25 bp, Homo sapien
tcccctctgaggcattaggagaagg

SEQ ID NO: 3643128 - DNA, 25 bp, Homo sapien
ggcttccagtgattcctaagggtat

SEQ ID NO: 3643129 - DNA, 25 bp, Homo sapien
cattggatgggcaacctgcaggctg

SEQ ID NO: 3643130 - DNA, 25 bp, Homo sapien
ccccgctggagttcgcacattggat

SEQ ID NO: 3643131 - DNA, 25 bp, Homo sapien
gcagtgactagccaggtagctttca

SEQ ID NO: 3643132 - DNA, 25 bp, Homo sapien
cagtgggtcttagcatcccagccaa

SEQ ID NO: 3643133 - DNA, 25 bp, Homo sapien
tcaatggaaacaaatagtagcagtc

SEQ ID NO: 3643134 - DNA, 25 bp, Homo sapien
gtagcagtccctcattaacaaggaa

SEQ ID NO: 3643135 - DNA, 25 bp, Homo sapien
ttatcagagcttagtgagtgtcggc

SEQ ID NO: 3643136 - DNA, 25 bp, Homo sapien
tatacctgtggtgtcagtctgcaag

SEQ ID NO: 3643137 - DNA, 25 bp, Homo sapien
cccagcatgagatttattaagacca

SEQ ID NO: 3643138 - DNA, 25 bp, Homo sapien
tatactgatgctaatcactaaaaca

SEQ ID NO: 3643139 - DNA, 25 bp, Homo sapien
atatttttgtttccgaggactggat

SEQ ID NO: 3643140 - DNA, 25 bp, Homo sapien
ctaaaacaggattctcccagcatga

SEQ ID NO: 3643141 - DNA, 25 bp, Homo sapien
cggatcatgggaacgtgtggccaca

SEQ ID NO: 3643142 - DNA, 25 bp, Homo sapien
ttattttgagagtaccctgacggga

SEQ ID NO: 3643143 - DNA, 25 bp, Homo sapien
gaactgggaatagcatgatctggcc

SEQ ID NO: 3643144 - DNA, 25 bp, Homo sapien
cacatggattgccagggagaaggaa

SEQ ID NO: 3643145 - DNA, 25 bp, Homo sapien
tgttgactgttctcagtcagacatc

SEQ ID NO: 3643146 - DNA, 25 bp, Homo sapien
gttgactgttctcagtcagacatct

SEQ ID NO: 3643147 - DNA, 25 bp, Homo sapien
ctgacggaaaccatagcaataaaca

SEQ ID NO: 3643148 - DNA, 25 bp, Homo sapien
tagccacaagctgcatagagctatt

SEQ ID NO: 3643149 - DNA, 25 bp, Homo sapien
tagagacactgacggaaaccatagc

SEQ ID NO: 3643150 - DNA, 25 bp, Homo sapien
catagagctattagagacactgacg

SEQ ID NO: 3643151 - DNA, 25 bp, Homo sapien
gattcccaggctagattccagctca

SEQ ID NO: 3643152 - DNA, 25 bp, Homo sapien
ccctccctccaatggccgcaagagc

SEQ ID NO: 3643153 - DNA, 25 bp, Homo sapien
ctccaatggccgcaagagcacgggg

SEQ ID NO: 3643154 - DNA, 25 bp, Homo sapien
agattcccaggctagattccagctc

SEQ ID NO: 3643155 - DNA, 25 bp, Homo sapien
atgagagttggaattcctgcagttc

SEQ ID NO: 3643156 - DNA, 25 bp, Homo sapien
taaccaaagaaacaggactgtgctt

SEQ ID NO: 3643157 - DNA, 25 bp, Homo sapien
ataaccaaagaaacaggactgtgct

SEQ ID NO: 3643158 - DNA, 25 bp, Homo sapien
accaaagaaacaggactgtgcttgc

SEQ ID NO: 3643159 - DNA, 25 bp, Homo sapien
aaccaaagaaacaggactgtgcttg

SEQ ID NO: 3643160 - DNA, 25 bp, Homo sapien
tcccatgagacaggagcgagtcagg

SEQ ID NO: 3643161 - DNA, 25 bp, Homo sapien
gagtcagggaatgtggaccctcagc

SEQ ID NO: 3643162 - DNA, 25 bp, Homo sapien
gaagcctgcctggaacgttgcgtgt

SEQ ID NO: 3643163 - DNA, 25 bp, Homo sapien
tagaaatgtgagtcccgtcccatgg

SEQ ID NO: 3643164 - DNA, 25 bp, Homo sapien
gaatcgagccacctgataaaagagg

SEQ ID NO: 3643165 - DNA, 25 bp, Homo sapien
ttcgttggcaaagcagaatcgagcc

SEQ ID NO: 3643166 - DNA, 25 bp, Homo sapien
catgtctaggtagccttcgttggca

SEQ ID NO: 3643167 - DNA, 25 bp, Homo sapien
tgcatatcttgacgcagcctgactc

SEQ ID NO: 3643168 - DNA, 25 bp, Homo sapien
ctaaacagaagcacggttgggctct

SEQ ID NO: 3643169 - DNA, 25 bp, Homo sapien
aacagaagcacggttgggctctgag

SEQ ID NO: 3643170 - DNA, 25 bp, Homo sapien
acagaagcacggttgggctctgagc

SEQ ID NO: 3643171 - DNA, 25 bp, Homo sapien
taaacagaagcacggttgggctctg

SEQ ID NO: 3643172 - DNA, 25 bp, Homo sapien
taggcttgagtccataaaagaactt

SEQ ID NO: 3643173 - DNA, 25 bp, Homo sapien
agaacttgaaataggcttgagtcca

SEQ ID NO: 3643174 - DNA, 25 bp, Homo sapien
gaaataggcttgagtccataaaaga

SEQ ID NO: 3643175 - DNA, 25 bp, Homo sapien
gcttgagtccataaaagaacttctg

SEQ ID NO: 3643176 - DNA, 25 bp, Homo sapien
atcccagcaccctcactaccctgag

SEQ ID NO: 3643177 - DNA, 25 bp, Homo sapien
cagaggatcccagcaccctcactac

SEQ ID NO: 3643178 - DNA, 25 bp, Homo sapien
agaggatcccagcaccctcactacc

SEQ ID NO: 3643179 - DNA, 25 bp, Homo sapien
aggatcccagcaccctcactaccct

SEQ ID NO: 3643180 - DNA, 25 bp, Homo sapien
cagtcagtcgacctattgaagcagc

SEQ ID NO: 3643181 - DNA, 25 bp, Homo sapien
cagtcgacctattgaagcagcctcc

SEQ ID NO: 3643182 - DNA, 25 bp, Homo sapien
gtcgacctattgaagcagcctccaa

SEQ ID NO: 3643183 - DNA, 25 bp, Homo sapien
gtcagtcgacctattgaagcagcct

SEQ ID NO: 3643184 - DNA, 25 bp, Homo sapien
gggcaaagtctgaattggtggcaaa

SEQ ID NO: 3643185 - DNA, 25 bp, Homo sapien
agcagctccgaaacacccagtctat

SEQ ID NO: 3643186 - DNA, 25 bp, Homo sapien
cacccagtctatggaggcaccaggt

SEQ ID NO: 3643187 - DNA, 25 bp, Homo sapien
tggtggcaaagtcagaatctgagcc

SEQ ID NO: 3643188 - DNA, 25 bp, Homo sapien
ctgggtagtttatcccaaataggag

SEQ ID NO: 3643189 - DNA, 25 bp, Homo sapien
ttgaatctcgtgaaacctgggtagt

SEQ ID NO: 3643190 - DNA, 25 bp, Homo sapien
gtggtcgaaacccagcagcaaacca

SEQ ID NO: 3643191 - DNA, 25 bp, Homo sapien
tgccacttgaatctcgtgaaacctg

SEQ ID NO: 3643192 - DNA, 25 bp, Homo sapien
cctttgttggaggtttaagcatgtg

SEQ ID NO: 3643193 - DNA, 25 bp, Homo sapien
aacaagcgtttttagacaatgatgc

SEQ ID NO: 3643194 - DNA, 25 bp, Homo sapien
tatccacagtcttgcacacatgcca

SEQ ID NO: 3643195 - DNA, 25 bp, Homo sapien
catgtgctgagaggaacaagcgttt

SEQ ID NO: 3643196 - DNA, 25 bp, Homo sapien
tccagctgttagcagcgaaatcagc

SEQ ID NO: 3643197 - DNA, 25 bp, Homo sapien
taagtactgccttgagccctcacag

SEQ ID NO: 3643198 - DNA, 25 bp, Homo sapien
ctcacagcccgaagggagagtcagt

SEQ ID NO: 3643199 - DNA, 25 bp, Homo sapien
gtcagtgcagaacccgaaactgctc

SEQ ID NO: 3643200 - DNA, 25 bp, Homo sapien
gtgagtcatgtagccctcactcagc

SEQ ID NO: 3643201 - DNA, 25 bp, Homo sapien
cagtgcactggtttcaagtgagtca

SEQ ID NO: 3643202 - DNA, 25 bp, Homo sapien
gaggcacgatccttaggctctcacc

SEQ ID NO: 3643203 - DNA, 25 bp, Homo sapien
gggcccttgaggcacgatccttagg

SEQ ID NO: 3643204 - DNA, 25 bp, Homo sapien
ctaagtacttcatatagatcagact

SEQ ID NO: 3643205 - DNA, 25 bp, Homo sapien
aaataatttatgattaggatctgaa

SEQ ID NO: 3643206 - DNA, 25 bp, Homo sapien
aatacaagtaacgttccatgccagg

SEQ ID NO: 3643207 - DNA, 25 bp, Homo sapien
ttatgattaggatctgaaataatga

SEQ ID NO: 3643208 - DNA, 25 bp, Homo sapien
cccgcatccgacatcctcagggtgt

SEQ ID NO: 3643209 - DNA, 25 bp, Homo sapien
agcggtaagtcactggtagggcctt

SEQ ID NO: 3643210 - DNA, 25 bp, Homo sapien
gaagacgtgctgtcagcggtaagtc

SEQ ID NO: 3643211 - DNA, 25 bp, Homo sapien
tgctgtcagcggtaagtcactggta

SEQ ID NO: 3643212 - DNA, 25 bp, Homo sapien
ccaacaatgacttgtgccgggaagt

SEQ ID NO: 3643213 - DNA, 25 bp, Homo sapien
caatgtttgggtacctagattggac

SEQ ID NO: 3643214 - DNA, 25 bp, Homo sapien
gctgtaactgcgtgacattcattca

SEQ ID NO: 3643215 - DNA, 25 bp, Homo sapien
tgtagtcatggccttggaatttcct

SEQ ID NO: 3643216 - DNA, 25 bp, Homo sapien
cctaaggcgtgatatgtcaatgtaa

SEQ ID NO: 3643217 - DNA, 25 bp, Homo sapien
tctccttcccgcctaaggcgtgata

SEQ ID NO: 3643218 - DNA, 25 bp, Homo sapien
ctgacggtcctgcaccatgatgcta

SEQ ID NO: 3643219 - DNA, 25 bp, Homo sapien
caataactgaacgttgaatgaagat

SEQ ID NO: 3643220 - DNA, 25 bp, Homo sapien
acatctggtggagccccataatggg

SEQ ID NO: 3643221 - DNA, 25 bp, Homo sapien
gaacatctggtggagccccataatg

SEQ ID NO: 3643222 - DNA, 25 bp, Homo sapien
gagccccataatggggtcttcattg

SEQ ID NO: 3643223 - DNA, 25 bp, Homo sapien
aatggggtcttcattggcatttggc

SEQ ID NO: 3643224 - DNA, 25 bp, Homo sapien
gacatcatgcaggacaccttggtgg

SEQ ID NO: 3643225 - DNA, 25 bp, Homo sapien
tcagaggccgctggtccggtgtcca

SEQ ID NO: 3643226 - DNA, 25 bp, Homo sapien
cagccccgtgcatttgtgtatagta

SEQ ID NO: 3643227 - DNA, 25 bp, Homo sapien
tggtggcaacagtgcaccgtgtccg

SEQ ID NO: 3643228 - DNA, 25 bp, Homo sapien
cagagtcagcggcttcctcagtctt

SEQ ID NO: 3643229 - DNA, 25 bp, Homo sapien
gagaacccggcagagtcagcggctt

SEQ ID NO: 3643230 - DNA, 25 bp, Homo sapien
agagcagggagaacccggcagagtc

SEQ ID NO: 3643231 - DNA, 25 bp, Homo sapien
ccggcagagtcagcggcttcctcag

SEQ ID NO: 3643232 - DNA, 25 bp, Homo sapien
ctgagtctgcgagatgcaagaggat

SEQ ID NO: 3643233 - DNA, 25 bp, Homo sapien
tcccacgcttggcatccccagcagt

SEQ ID NO: 3643234 - DNA, 25 bp, Homo sapien
ttggcatccccagcagtccactgag

SEQ ID NO: 3643235 - DNA, 25 bp, Homo sapien
acagctgtttagagccccctggctg

SEQ ID NO: 3643236 - DNA, 25 bp, Homo sapien
atgaggggacagagacctgcagcgc

SEQ ID NO: 3643237 - DNA, 25 bp, Homo sapien
gacctggcatgaggggacagagacc

SEQ ID NO: 3643238 - DNA, 25 bp, Homo sapien
agacctggcatgaggggacagagac

SEQ ID NO: 3643239 - DNA, 25 bp, Homo sapien
aggggacagagacctgcagcgcccc

SEQ ID NO: 3643240 - DNA, 25 bp, Homo sapien
tgcagaacgtctgcgtgaacgcatg

SEQ ID NO: 3643241 - DNA, 25 bp, Homo sapien
caacgtaatgagtgcgggtgccaca

SEQ ID NO: 3643242 - DNA, 25 bp, Homo sapien
cgtgcatgcgtaagaacctggacat

SEQ ID NO: 3643243 - DNA, 25 bp, Homo sapien
cacatcgtgcatgggtattcctaaa

SEQ ID NO: 3643244 - DNA, 25 bp, Homo sapien
caaatggcagaagtatttgagtgcc

SEQ ID NO: 3643245 - DNA, 25 bp, Homo sapien
tcattcaacacatacctattggtat

SEQ ID NO: 3643246 - DNA, 25 bp, Homo sapien
cccctggggagcttgcattcgaaga

SEQ ID NO: 3643247 - DNA, 25 bp, Homo sapien
acctattggtatgccttgaacattc

SEQ ID NO: 3643248 - DNA, 25 bp, Homo sapien
ggtagtctcagtttgagtcaaatca

SEQ ID NO: 3643249 - DNA, 25 bp, Homo sapien
tccacttgaagatggaagtcactgc

SEQ ID NO: 3643250 - DNA, 25 bp, Homo sapien
aactgtatcagtggaaattgggcat

SEQ ID NO: 3643251 - DNA, 25 bp, Homo sapien
ccggcctcagttcttaactgtatca

SEQ ID NO: 3643252 - DNA, 25 bp, Homo sapien
tggcgacggcttcttaatagacatc

SEQ ID NO: 3643253 - DNA, 25 bp, Homo sapien
tcaggcgtattctgcgaaatttcca

SEQ ID NO: 3643254 - DNA, 25 bp, Homo sapien
tgctaataatagctctggcgacggc

SEQ ID NO: 3643255 - DNA, 25 bp, Homo sapien
tcctcattctgaacgatgcagccat

SEQ ID NO: 3643256 - DNA, 25 bp, Homo sapien
ttaggcagagctgtgtaggcttttt

SEQ ID NO: 3643257 - DNA, 25 bp, Homo sapien
ggctttaggcagagctgtgtaggct

SEQ ID NO: 3643258 - DNA, 25 bp, Homo sapien
ggcagagctgtgtaggcttttttta

SEQ ID NO: 3643259 - DNA, 25 bp, Homo sapien
ctttaggcagagctgtgtaggcttt

SEQ ID NO: 3643260 - DNA, 25 bp, Homo sapien
gcacctcagtcccacgctgtctgaa

SEQ ID NO: 3643261 - DNA, 25 bp, Homo sapien
tgtctgaatctacccggggagatag

SEQ ID NO: 3643262 - DNA, 25 bp, Homo sapien
cacgctgtctgaatctacccgggga

SEQ ID NO: 3643263 - DNA, 25 bp, Homo sapien
tcagtcccacgctgtctgaatctac

SEQ ID NO: 3643264 - DNA, 25 bp, Homo sapien
gccggggactggctcggggcgcgct

SEQ ID NO: 3643265 - DNA, 25 bp, Homo sapien
cgcgccggggactggctcggggcgc

SEQ ID NO: 3643266 - DNA, 25 bp, Homo sapien
cgccggggactggctcggggcgcgc

SEQ ID NO: 3643267 - DNA, 25 bp, Homo sapien
agccgagccagctctggcggcgact

SEQ ID NO: 3643268 - DNA, 25 bp, Homo sapien
ctgcgggtgccacggagaggggctg

SEQ ID NO: 3643269 - DNA, 25 bp, Homo sapien
tctggcggcgactgggggcgtccct

SEQ ID NO: 3643270 - DNA, 25 bp, Homo sapien
ggaagccgagccagctctggcggcg

SEQ ID NO: 3643271 - DNA, 25 bp, Homo sapien
tgacaatagccacatgcctcggtta

SEQ ID NO: 3643272 - DNA, 25 bp, Homo sapien
caatacaattggactagatcgaggg

SEQ ID NO: 3643273 - DNA, 25 bp, Homo sapien
gcctcaccgggagcgaactttgtct

SEQ ID NO: 3643274 - DNA, 25 bp, Homo sapien
tcccagtcattgtcgcgaagccttg

SEQ ID NO: 3643275 - DNA, 25 bp, Homo sapien
cagtgcaccctcaattgctgaaagg

SEQ ID NO: 3643276 - DNA, 25 bp, Homo sapien
tgctgaagttcagagcacgcacctt

SEQ ID NO: 3643277 - DNA, 25 bp, Homo sapien
tagatgtgactgacgggcattccca

SEQ ID NO: 3643278 - DNA, 25 bp, Homo sapien
gcactcagaggacagggatggaatt

SEQ ID NO: 3643279 - DNA, 25 bp, Homo sapien
aattaacaagacctgctgtgcagtc

SEQ ID NO: 3643280 - DNA, 25 bp, Homo sapien
aagaatcggcggttgtggcatttca

SEQ ID NO: 3643281 - DNA, 25 bp, Homo sapien
ttttgtctgatctgggacccgccgt

SEQ ID NO: 3643282 - DNA, 25 bp, Homo sapien
gttacttaatgttcctgagcctcga

SEQ ID NO: 3643283 - DNA, 25 bp, Homo sapien
acaagccttgaaccctcaacaaata

SEQ ID NO: 3643284 - DNA, 25 bp, Homo sapien
gacacaagccttgaaccctcaacaa

SEQ ID NO: 3643285 - DNA, 25 bp, Homo sapien
cctacttcctcgtctgtcaggtgga

SEQ ID NO: 3643286 - DNA, 25 bp, Homo sapien
tgcctacttcctcgtctgtcaggtg

SEQ ID NO: 3643287 - DNA, 25 bp, Homo sapien
gcaactttccactgatcctggcagg

SEQ ID NO: 3643288 - DNA, 25 bp, Homo sapien
tcagagtcactaggagccattgggc

SEQ ID NO: 3643289 - DNA, 25 bp, Homo sapien
tgaacagcgctcatcacctaaagtg

SEQ ID NO: 3643290 - DNA, 25 bp, Homo sapien
aggtgacagctctcagtgaacagcg

SEQ ID NO: 3643291 - DNA, 25 bp, Homo sapien
ctcatagatgagatactggcttcca

SEQ ID NO: 3643292 - DNA, 25 bp, Homo sapien
catcttgagagattttgcagttcca

SEQ ID NO: 3643293 - DNA, 25 bp, Homo sapien
cacagggtgtagcagggctcataga

SEQ ID NO: 3643294 - DNA, 25 bp, Homo sapien
gacctgccgtcagtgccattgcaga

SEQ ID NO: 3643295 - DNA, 25 bp, Homo sapien
ccctggtggggaagagagaatgaaa

SEQ ID NO: 3643296 - DNA, 25 bp, Homo sapien
ttccctggtggggaagagagaatga

SEQ ID NO: 3643297 - DNA, 25 bp, Homo sapien
ccttccctggtggggaagagagaat

SEQ ID NO: 3643298 - DNA, 25 bp, Homo sapien
cctggtggggaagagagaatgaaac

SEQ ID NO: 3643299 - DNA, 25 bp, Homo sapien
caggcagatgatggagctgagcggg

SEQ ID NO: 3643300 - DNA, 25 bp, Homo sapien
ccaggcagatgatggagctgagcgg

SEQ ID NO: 3643301 - DNA, 25 bp, Homo sapien
tctgctgtccaagtccttggggaag

SEQ ID NO: 3643302 - DNA, 25 bp, Homo sapien
agctgcttcctttctatctgtgtcc

SEQ ID NO: 3643303 - DNA, 25 bp, Homo sapien
ctcccctagccagcttgtctgctgt

SEQ ID NO: 3643304 - DNA, 25 bp, Homo sapien
tgcttcctttctatctgtgtcccag

SEQ ID NO: 3643305 - DNA, 25 bp, Homo sapien
tttgtgcaaaattcagagatccatg

SEQ ID NO: 3643306 - DNA, 25 bp, Homo sapien
gccattcacaccttttttaggagcc

SEQ ID NO: 3643307 - DNA, 25 bp, Homo sapien
tgatgtcagggaagccattcacacc

SEQ ID NO: 3643308 - DNA, 25 bp, Homo sapien
gagatccatgtaaagtgatgtcagg

SEQ ID NO: 3643309 - DNA, 25 bp, Homo sapien
atatagtagaaaagagaggcctcac

SEQ ID NO: 3643310 - DNA, 25 bp, Homo sapien
caaggagggtagctggagtgaccgc

SEQ ID NO: 3643311 - DNA, 25 bp, Homo sapien
acaccaaggagggtagctggagtga

SEQ ID NO: 3643312 - DNA, 25 bp, Homo sapien
tggagtgaccgctctggaagaccct

SEQ ID NO: 3643313 - DNA, 25 bp, Homo sapien
gggtagctggagtgaccgctctgga

SEQ ID NO: 3643314 - DNA, 25 bp, Homo sapien
tttctaggggcttggtcagcaaaat

SEQ ID NO: 3643315 - DNA, 25 bp, Homo sapien
ttctaggggcttggtcagcaaaatg

SEQ ID NO: 3643316 - DNA, 25 bp, Homo sapien
ttttctaggggcttggtcagcaaaa

SEQ ID NO: 3643317 - DNA, 25 bp, Homo sapien
cttttctaggggcttggtcagcaaa

SEQ ID NO: 3643318 - DNA, 25 bp, Homo sapien
ctgctccagttcatctgagtcagac

SEQ ID NO: 3643319 - DNA, 25 bp, Homo sapien
atctgagtcagactttccacagcaa

SEQ ID NO: 3643320 - DNA, 25 bp, Homo sapien
agcaatttatccgatccacaccaac

SEQ ID NO: 3643321 - DNA, 25 bp, Homo sapien
catcttttacgctgtcaccttgaag

SEQ ID NO: 3643322 - DNA, 25 bp, Homo sapien
ctttacaacctttataggctggcca

SEQ ID NO: 3643323 - DNA, 25 bp, Homo sapien
ctttctttacaacctttataggctg

SEQ ID NO: 3643324 - DNA, 25 bp, Homo sapien
catgctggtcttcagtggaccaatc

SEQ ID NO: 3643325 - DNA, 25 bp, Homo sapien
tacaacctttataggctggccatgc

SEQ ID NO: 3643326 - DNA, 25 bp, Homo sapien
tatgccccgcctgataagtttgttt

SEQ ID NO: 3643327 - DNA, 25 bp, Homo sapien
gagtggacatgcacaggccagaata

SEQ ID NO: 3643328 - DNA, 25 bp, Homo sapien
tcttcttgactctggatgacatgga

SEQ ID NO: 3643329 - DNA, 25 bp, Homo sapien
gaataaccatccaatgaggcatttg

SEQ ID NO: 3643330 - DNA, 25 bp, Homo sapien
tggaacacagtttctctttagggcc

SEQ ID NO: 3643331 - DNA, 25 bp, Homo sapien
tttctggaaggctggttatctccac

SEQ ID NO: 3643332 - DNA, 25 bp, Homo sapien
ggttatctccacatatggaacacag

SEQ ID NO: 3643333 - DNA, 25 bp, Homo sapien
tatggaacacagtttctctttaggg

SEQ ID NO: 3643334 - DNA, 25 bp, Homo sapien
gggttggctgtgttgagggtcacag

SEQ ID NO: 3643335 - DNA, 25 bp, Homo sapien
ctgggttggctgtgttgagggtcac

SEQ ID NO: 3643336 - DNA, 25 bp, Homo sapien
tctgggttggctgtgttgagggtca

SEQ ID NO: 3643337 - DNA, 25 bp, Homo sapien
tgggttggctgtgttgagggtcaca

SEQ ID NO: 3643338 - DNA, 25 bp, Homo sapien
ggtgcatctccagggccgtctatca

SEQ ID NO: 3643339 - DNA, 25 bp, Homo sapien
tccagggccgtctatcaggtgggac

SEQ ID NO: 3643340 - DNA, 25 bp, Homo sapien
atctccagggccgtctatcaggtgg

SEQ ID NO: 3643341 - DNA, 25 bp, Homo sapien
cagggccgtctatcaggtgggacca

SEQ ID NO: 3643342 - DNA, 25 bp, Homo sapien
gctctgaggacccaccgtggagttg

SEQ ID NO: 3643343 - DNA, 25 bp, Homo sapien
aacctgacttgtcgggcgctgagga

SEQ ID NO: 3643344 - DNA, 25 bp, Homo sapien
tgaggacctgccaagtgaggaacat

SEQ ID NO: 3643345 - DNA, 25 bp, Homo sapien
attggcactttgtgtcactaaaaga

SEQ ID NO: 3643346 - DNA, 25 bp, Homo sapien
gggtgctcatagacccgctcttgag

SEQ ID NO: 3643347 - DNA, 25 bp, Homo sapien
gccaacatgagaagtacaatggccc

SEQ ID NO: 3643348 - DNA, 25 bp, Homo sapien
ggtccccagcattgtgaatgccgtg

SEQ ID NO: 3643349 - DNA, 25 bp, Homo sapien
gacccgctcttgagaagccaacatg

SEQ ID NO: 3643350 - DNA, 25 bp, Homo sapien
gacgggctcttcgaacggccagata

SEQ ID NO: 3643351 - DNA, 25 bp, Homo sapien
gagtctcccagacgggctcttcgaa

SEQ ID NO: 3643352 - DNA, 25 bp, Homo sapien
cagcagagagtctcccagacgggct

SEQ ID NO: 3643353 - DNA, 25 bp, Homo sapien
gaacggccagataccatttacacct

SEQ ID NO: 3643354 - DNA, 25 bp, Homo sapien
tggagtcccgactctggactcagtg

SEQ ID NO: 3643355 - DNA, 25 bp, Homo sapien
ggcttgttggagtcccgactctgga

SEQ ID NO: 3643356 - DNA, 25 bp, Homo sapien
gctggaatgcggagggcttgttgga

SEQ ID NO: 3643357 - DNA, 25 bp, Homo sapien
acagtcatgctggaatgcggagggc

SEQ ID NO: 3643358 - DNA, 25 bp, Homo sapien
cccactgggagcttgaccccctgcc

SEQ ID NO: 3643359 - DNA, 25 bp, Homo sapien
gcaggtcactggatccccactggga

SEQ ID NO: 3643360 - DNA, 25 bp, Homo sapien
tacctgcaggtcactggatccccac

SEQ ID NO: 3643361 - DNA, 25 bp, Homo sapien
ctgcttctacctgcaggtcactgga

SEQ ID NO: 3643362 - DNA, 25 bp, Homo sapien
tttgaaatctgtcctgggttttgct

SEQ ID NO: 3643363 - DNA, 25 bp, Homo sapien
gacttcataaaaccccgccatgtgg

SEQ ID NO: 3643364 - DNA, 25 bp, Homo sapien
ggctgctctggttttaacgctttga

SEQ ID NO: 3643365 - DNA, 25 bp, Homo sapien
gctctggacacacgttcgacttcat

SEQ ID NO: 3643366 - DNA, 25 bp, Homo sapien
tgcttcaggagtggagcaagcgctg

SEQ ID NO: 3643367 - DNA, 25 bp, Homo sapien
ctgcttcaggagtggagcaagcgct

SEQ ID NO: 3643368 - DNA, 25 bp, Homo sapien
cctgcttcaggagtggagcaagcgc

SEQ ID NO: 3643369 - DNA, 25 bp, Homo sapien
gcttcaggagtggagcaagcgctgc

SEQ ID NO: 3643370 - DNA, 25 bp, Homo sapien
catttgccaaattgcgaagtcctac

SEQ ID NO: 3643371 - DNA, 25 bp, Homo sapien
tgccaaattgcgaagtcctacagac

SEQ ID NO: 3643372 - DNA, 25 bp, Homo sapien
ccaaattgcgaagtcctacagacct

SEQ ID NO: 3643373 - DNA, 25 bp, Homo sapien
tttgccaaattgcgaagtcctacag

SEQ ID NO: 3643374 - DNA, 25 bp, Homo sapien
ggtcaccgtcctagggcttgtcagc

SEQ ID NO: 3643375 - DNA, 25 bp, Homo sapien
ctcagagtccgggaagcagatcctg

SEQ ID NO: 3643376 - DNA, 25 bp, Homo sapien
tctggagatcggagaggtcaccgtc

SEQ ID NO: 3643377 - DNA, 25 bp, Homo sapien
tgatgacagcttcaggccgagatgt

SEQ ID NO: 3643378 - DNA, 25 bp, Homo sapien
aggcttccagggtgatcaggttgac

SEQ ID NO: 3643379 - DNA, 25 bp, Homo sapien
aacagattcccaaatgcggattctg

SEQ ID NO: 3643380 - DNA, 25 bp, Homo sapien
cccaaatgcggattctggcacttac

SEQ ID NO: 3643381 - DNA, 25 bp, Homo sapien
cagggtgatcaggttgactcgcaga

SEQ ID NO: 3643382 - DNA, 25 bp, Homo sapien
ctggatgtcttttcatacttttaac

SEQ ID NO: 3643383 - DNA, 25 bp, Homo sapien
agttgaggcacaacctcagtaactt

SEQ ID NO: 3643384 - DNA, 25 bp, Homo sapien
caagctaaagttgaggcacaacctc

SEQ ID NO: 3643385 - DNA, 25 bp, Homo sapien
ctcagtaacttgctcattctggatg

SEQ ID NO: 3643386 - DNA, 25 bp, Homo sapien
cacgatgtcaaatagaatgatgtcc

SEQ ID NO: 3643387 - DNA, 25 bp, Homo sapien
ctcactgtctcttgccggataaggc

SEQ ID NO: 3643388 - DNA, 25 bp, Homo sapien
taaacagcagctcacacttgtcaca

SEQ ID NO: 3643389 - DNA, 25 bp, Homo sapien
gttttaaactcaggatgtcctcact

SEQ ID NO: 3643390 - DNA, 25 bp, Homo sapien
gtatctccgttttcacccactgatt

SEQ ID NO: 3643391 - DNA, 25 bp, Homo sapien
agagttgctgtatctccgttttcac

SEQ ID NO: 3643392 - DNA, 25 bp, Homo sapien
gctgtatctccgttttcacccactg

SEQ ID NO: 3643393 - DNA, 25 bp, Homo sapien
gttgctgtatctccgttttcaccca

SEQ ID NO: 3643394 - DNA, 25 bp, Homo sapien
cttcagttaaggtgtagtccaagac

SEQ ID NO: 3643395 - DNA, 25 bp, Homo sapien
ggctcaacatgcagggagaatccct

SEQ ID NO: 3643396 - DNA, 25 bp, Homo sapien
gtcattagggtgacaggctcaacat

SEQ ID NO: 3643397 - DNA, 25 bp, Homo sapien
tggaagcccctagtagagaaaatcc

SEQ ID NO: 3643398 - DNA, 25 bp, Homo sapien
aagctagagatgctgcttcgtgggc

SEQ ID NO: 3643399 - DNA, 25 bp, Homo sapien
cgctgaagttgcagaacttgggctg

SEQ ID NO: 3643400 - DNA, 25 bp, Homo sapien
atggaagaaagctagagatgctgct

SEQ ID NO: 3643401 - DNA, 25 bp, Homo sapien
cttcgtgggcgctgaagttgcagaa

SEQ ID NO: 3643402 - DNA, 25 bp, Homo sapien
ccacgagaagcaaagttgacatttc

SEQ ID NO: 3643403 - DNA, 25 bp, Homo sapien
atcactctccccagacgcgtcactt

SEQ ID NO: 3643404 - DNA, 25 bp, Homo sapien
acaagcgggacacggcagtctcgct

SEQ ID NO: 3643405 - DNA, 25 bp, Homo sapien
agacgcgtcacttgcccacaagcgg

SEQ ID NO: 3643406 - DNA, 25 bp, Homo sapien
cttgggagtcacgtgatggaatgaa

SEQ ID NO: 3643407 - DNA, 25 bp, Homo sapien
gggcttgggagtcacgtgatggaat

SEQ ID NO: 3643408 - DNA, 25 bp, Homo sapien
atggaatgaataatacgtctgatag

SEQ ID NO: 3643409 - DNA, 25 bp, Homo sapien
tacgtctgatagagctttgattaga

SEQ ID NO: 3643410 - DNA, 25 bp, Homo sapien
tcctattaggtgtgtttgaataaac

SEQ ID NO: 3643411 - DNA, 25 bp, Homo sapien
tcatagtacaaaactctgcttcttt

SEQ ID NO: 3643412 - DNA, 25 bp, Homo sapien
catttcctattaggtgtgtttgaat

SEQ ID NO: 3643413 - DNA, 25 bp, Homo sapien
gaaccttcatttccgtcattttcaa

SEQ ID NO: 3643414 - DNA, 25 bp, Homo sapien
catggaaccaattacgaacaaagcc

SEQ ID NO: 3643415 - DNA, 25 bp, Homo sapien
caggtttccagcccgtgcgctgctg

SEQ ID NO: 3643416 - DNA, 25 bp, Homo sapien
tggaatttcccacatcaacctgatg

SEQ ID NO: 3643417 - DNA, 25 bp, Homo sapien
tgactcgtgatgtgtgtctgcgctg

SEQ ID NO: 3643418 - DNA, 25 bp, Homo sapien
tccccgatactcactgcgctgtctt

SEQ ID NO: 3643419 - DNA, 25 bp, Homo sapien
taattacaacaccaacttccatcaa

SEQ ID NO: 3643420 - DNA, 25 bp, Homo sapien
ctgcgctgtcttcacccgtccaggg

SEQ ID NO: 3643421 - DNA, 25 bp, Homo sapien
ccatcaaagcgacggtttctcccat

SEQ ID NO: 3643422 - DNA, 25 bp, Homo sapien
gtcaatggacactggagcctctcat

SEQ ID NO: 3643423 - DNA, 25 bp, Homo sapien
catttagacaaggatgaagccagta

SEQ ID NO: 3643424 - DNA, 25 bp, Homo sapien
catggcagaagcgaggagttgacca

SEQ ID NO: 3643425 - DNA, 25 bp, Homo sapien
cagtatcatggagcttggtacagaa

SEQ ID NO: 3643426 - DNA, 25 bp, Homo sapien
tctatgatcttctgaccttctgatc

SEQ ID NO: 3643427 - DNA, 25 bp, Homo sapien
gtcaacagtctattaactgcattcg

SEQ ID NO: 3643428 - DNA, 25 bp, Homo sapien
tttcttaccacccttgttctcacag

SEQ ID NO: 3643429 - DNA, 25 bp, Homo sapien
gcattcgtgccatagaggtttaaaa

SEQ ID NO: 3643430 - DNA, 25 bp, Homo sapien
aagaaacagaggaaatcaagcaggt

SEQ ID NO: 3643431 - DNA, 25 bp, Homo sapien
aggagccccacaacgcaccccaaag

SEQ ID NO: 3643432 - DNA, 25 bp, Homo sapien
tccaacagcaggtccatagatgagg

SEQ ID NO: 3643433 - DNA, 25 bp, Homo sapien
agaggaaatcaagcaggtttcctga

SEQ ID NO: 3643434 - DNA, 25 bp, Homo sapien
gatttaaaatgcttctctccgaggc

SEQ ID NO: 3643435 - DNA, 25 bp, Homo sapien
acatgttcgcgtgcacaagctcgca

SEQ ID NO: 3643436 - DNA, 25 bp, Homo sapien
caagacgggagatcagtccaagcac

SEQ ID NO: 3643437 - DNA, 25 bp, Homo sapien
tccagaagtgttggcagtgccctca

SEQ ID NO: 3643438 - DNA, 25 bp, Homo sapien
ggcaagagacatcctcccatggctg

SEQ ID NO: 3643439 - DNA, 25 bp, Homo sapien
aaggatccagcaatagtcagggacg

SEQ ID NO: 3643440 - DNA, 25 bp, Homo sapien
cagggacgtgcgtctctggattctc

SEQ ID NO: 3643441 - DNA, 25 bp, Homo sapien
tctggaactcgagtgtgggtaacag

SEQ ID NO: 3643442 - DNA, 25 bp, Homo sapien
gcttacaaggattccgaggtcacca

SEQ ID NO: 3643443 - DNA, 25 bp, Homo sapien
ttcaccacgtggactttctaaggca

SEQ ID NO: 3643444 - DNA, 25 bp, Homo sapien
tcaccaccagaagtgtgcaattgga

SEQ ID NO: 3643445 - DNA, 25 bp, Homo sapien
caattggaatgtgccaggaatgatc

SEQ ID NO: 3643446 - DNA, 25 bp, Homo sapien
ttttgtgctacacgtgggttttcca

SEQ ID NO: 3643447 - DNA, 25 bp, Homo sapien
caagcctctggagttcctgaacaca

SEQ ID NO: 3643448 - DNA, 25 bp, Homo sapien
gacactttgttgttacaggcccatc

SEQ ID NO: 3643449 - DNA, 25 bp, Homo sapien
tggtggctgcaatccttccaagcat

SEQ ID NO: 3643450 - DNA, 25 bp, Homo sapien
tctgccagtgtcaaccatggaggtt

SEQ ID NO: 3643451 - DNA, 25 bp, Homo sapien
gaatctgccagtgtcaaccatggag

SEQ ID NO: 3643452 - DNA, 25 bp, Homo sapien
aatctgccagtgtcaaccatggagg

SEQ ID NO: 3643453 - DNA, 25 bp, Homo sapien
gccagtgtcaaccatggaggtttca

SEQ ID NO: 3643454 - DNA, 25 bp, Homo sapien
ggaaaatgggcaaggtgtattggaa

SEQ ID NO: 3643455 - DNA, 25 bp, Homo sapien
gagttggcagaggataggtaggcaa

SEQ ID NO: 3643456 - DNA, 25 bp, Homo sapien
cagagttggcagaggataggtaggc

SEQ ID NO: 3643457 - DNA, 25 bp, Homo sapien
agagttggcagaggataggtaggca

SEQ ID NO: 3643458 - DNA, 25 bp, Homo sapien
gaaagaccagatccaccaaagcata

SEQ ID NO: 3643459 - DNA, 25 bp, Homo sapien
tcttactgccttgatgggaaacatc

SEQ ID NO: 3643460 - DNA, 25 bp, Homo sapien
tacagagtaacctgaaaacctcagt

SEQ ID NO: 3643461 - DNA, 25 bp, Homo sapien
gatgaagactgcgtctggaaagacc

SEQ ID NO: 3643462 - DNA, 25 bp, Homo sapien
ctataacacaagctcgtttctctcc

SEQ ID NO: 3643463 - DNA, 25 bp, Homo sapien
ggaagtggccttaacgacatgtaat

SEQ ID NO: 3643464 - DNA, 25 bp, Homo sapien
tgatggtagttttcacagggcactg

SEQ ID NO: 3643465 - DNA, 25 bp, Homo sapien
gcaatgtggagtggaagaatttgat

SEQ ID NO: 3643466 - DNA, 25 bp, Homo sapien
tttctgagactactggaagtggcct

SEQ ID NO: 3643467 - DNA, 25 bp, Homo sapien
ggcgtgaccctctgaaagcatgaat

SEQ ID NO: 3643468 - DNA, 25 bp, Homo sapien
tccggcagcgactcaaaaatggtaa

SEQ ID NO: 3643469 - DNA, 25 bp, Homo sapien
aagtagaggcctgtagcatggaacc

SEQ ID NO: 3643470 - DNA, 25 bp, Homo sapien
taattcatctcgttgaagacccagg

SEQ ID NO: 3643471 - DNA, 25 bp, Homo sapien
cagagctggtagagtgtagtggcca

SEQ ID NO: 3643472 - DNA, 25 bp, Homo sapien
tcagtgcttcaggtttggtttgatg

SEQ ID NO: 3643473 - DNA, 25 bp, Homo sapien
gaccagagctggttacccaacctct

SEQ ID NO: 3643474 - DNA, 25 bp, Homo sapien
tcctctgcggtgtcacaattggaga

SEQ ID NO: 3643475 - DNA, 25 bp, Homo sapien
gaagtcatttcacctgccagtctga

SEQ ID NO: 3643476 - DNA, 25 bp, Homo sapien
gttactctgaaatccgtgctgccga

SEQ ID NO: 3643477 - DNA, 25 bp, Homo sapien
aatcatagccatcttctgagtcggg

SEQ ID NO: 3643478 - DNA, 25 bp, Homo sapien
tttaataatggagtgcacacggcac

SEQ ID NO: 3643479 - DNA, 25 bp, Homo sapien
agtaaagtaggctctgttagtttct

SEQ ID NO: 3643480 - DNA, 25 bp, Homo sapien
ctttttagtatccagcagaagccgc

SEQ ID NO: 3643481 - DNA, 25 bp, Homo sapien
catgacccttcaaaagcaatcctct

SEQ ID NO: 3643482 - DNA, 25 bp, Homo sapien
tccttccagataccaaggtgacttt

SEQ ID NO: 3643483 - DNA, 25 bp, Homo sapien
gggccaagcccctaatgagataatc

SEQ ID NO: 3643484 - DNA, 25 bp, Homo sapien
tactgaaaacatagaacgggctggc

SEQ ID NO: 3643485 - DNA, 25 bp, Homo sapien
tcctctctgggaaccgtggtgataa

SEQ ID NO: 3643486 - DNA, 25 bp, Homo sapien
catgggaagtcagccaacggtggtc

SEQ ID NO: 3643487 - DNA, 25 bp, Homo sapien
atgaaggctttagcatggagcggct

SEQ ID NO: 3643488 - DNA, 25 bp, Homo sapien
ccactctctgggcaatcgatgaagg

SEQ ID NO: 3643489 - DNA, 25 bp, Homo sapien
cactcaggtgcctgcaaagtgctgt

SEQ ID NO: 3643490 - DNA, 25 bp, Homo sapien
ttcctgtgcttcactcaggtgcctg

SEQ ID NO: 3643491 - DNA, 25 bp, Homo sapien
tctgatgggtcgaatttcattgtcc

SEQ ID NO: 3643492 - DNA, 25 bp, Homo sapien
tgttaatgtgttctgctctgatggg

SEQ ID NO: 3643493 - DNA, 25 bp, Homo sapien
cttgccacggccttttcggcaaaag

SEQ ID NO: 3643494 - DNA, 25 bp, Homo sapien
cggccttttcggcaaaagcctccat

SEQ ID NO: 3643495 - DNA, 25 bp, Homo sapien
ccaatagagagaggcaaggtggttt

SEQ ID NO: 3643496 - DNA, 25 bp, Homo sapien
cagagtcaccaaagatcactcttgc

SEQ ID NO: 3643497 - DNA, 25 bp, Homo sapien
cccaatagagagaggcaaggtggtt

SEQ ID NO: 3643498 - DNA, 25 bp, Homo sapien
agaacctggacagaacagagtcacc

SEQ ID NO: 3643499 - DNA, 25 bp, Homo sapien
cctacatcgagtgggattttgagat

SEQ ID NO: 3643500 - DNA, 25 bp, Homo sapien
tgagctccctacatcgagtgggatt

SEQ ID NO: 3643501 - DNA, 25 bp, Homo sapien
catcgagtgggattttgagatcaga

SEQ ID NO: 3643502 - DNA, 25 bp, Homo sapien
gctccctacatcgagtgggattttg

SEQ ID NO: 3643503 - DNA, 25 bp, Homo sapien
taagtagaacgtgtcatcaattttc

SEQ ID NO: 3643504 - DNA, 25 bp, Homo sapien
gtgaccataaagaccaggtccaaat

SEQ ID NO: 3643505 - DNA, 25 bp, Homo sapien
tccaaatatggataaggtatgacat

SEQ ID NO: 3643506 - DNA, 25 bp, Homo sapien
taaggtatgacataagtagaacgtg

SEQ ID NO: 3643507 - DNA, 25 bp, Homo sapien
ctcgatggcaggtggaatgtgggaa

SEQ ID NO: 3643508 - DNA, 25 bp, Homo sapien
atgtgggaagcacataaaacatggg

SEQ ID NO: 3643509 - DNA, 25 bp, Homo sapien
cgatggcaggtggaatgtgggaagc

SEQ ID NO: 3643510 - DNA, 25 bp, Homo sapien
ggaatgtgggaagcacataaaacat

SEQ ID NO: 3643511 - DNA, 25 bp, Homo sapien
tgtagaccttgatggcgatgtagac

SEQ ID NO: 3643512 - DNA, 25 bp, Homo sapien
ctgtaatgtcgatggcagtgtaacc

SEQ ID NO: 3643513 - DNA, 25 bp, Homo sapien
gacctcaatggcagcgtaacctcaa

SEQ ID NO: 3643514 - DNA, 25 bp, Homo sapien
aatggcggtgtaacccccatggcag

SEQ ID NO: 3643515 - DNA, 25 bp, Homo sapien
tggcagtgtaacctcgatggcagtg

SEQ ID NO: 3643516 - DNA, 25 bp, Homo sapien
tcaatggcagtgtaacctcgatggc

SEQ ID NO: 3643517 - DNA, 25 bp, Homo sapien
aatggcagtgtaacctcgatggcag

SEQ ID NO: 3643518 - DNA, 25 bp, Homo sapien
gcagtgtaacctcgatggcagtgta

SEQ ID NO: 3643519 - DNA, 25 bp, Homo sapien
acaggaaggcatagataggctctgt

SEQ ID NO: 3643520 - DNA, 25 bp, Homo sapien
actgagcggggccaccgtagagcct

SEQ ID NO: 3643521 - DNA, 25 bp, Homo sapien
tgagcggggccaccgtagagcctca

SEQ ID NO: 3643522 - DNA, 25 bp, Homo sapien
ggcatagataggctctgtgtggcct

SEQ ID NO: 3643523 - DNA, 25 bp, Homo sapien
aagacagggatgtccgtgtcagcac

SEQ ID NO: 3643524 - DNA, 25 bp, Homo sapien
agacagggatgtccgtgtcagcacc

SEQ ID NO: 3643525 - DNA, 25 bp, Homo sapien
acagggatgtccgtgtcagcacccc

SEQ ID NO: 3643526 - DNA, 25 bp, Homo sapien
agcacccccgtttccacatttgatc

SEQ ID NO: 3643527 - DNA, 25 bp, Homo sapien
tacccacaagtacgtgtgcttgagc

SEQ ID NO: 3643528 - DNA, 25 bp, Homo sapien
tagctctcgcatccttggcgatagg

SEQ ID NO: 3643529 - DNA, 25 bp, Homo sapien
cagtgagtgacctttcagagaagcc

SEQ ID NO: 3643530 - DNA, 25 bp, Homo sapien
aaggctatgccctgctggagtctgg

SEQ ID NO: 3643531 - DNA, 25 bp, Homo sapien
tttggccccaccattccgtctcctg

SEQ ID NO: 3643532 - DNA, 25 bp, Homo sapien
catatgaaccgctcactttgcacct

SEQ ID NO: 3643533 - DNA, 25 bp, Homo sapien
gtttgagcatatgaaccgctcactt

SEQ ID NO: 3643534 - DNA, 25 bp, Homo sapien
tccgtctcctgctggtaacaggttc

SEQ ID NO: 3643535 - DNA, 25 bp, Homo sapien
gaagttccttatattcattccccag

SEQ ID NO: 3643536 - DNA, 25 bp, Homo sapien
tgaaacatcgctataaaccctgaaa

SEQ ID NO: 3643537 - DNA, 25 bp, Homo sapien
tcaaatggctagaaggaagatactg

SEQ ID NO: 3643538 - DNA, 25 bp, Homo sapien
catccaccttggtcatgatagtaag

SEQ ID NO: 3643539 - DNA, 25 bp, Homo sapien
cttgagccttctagagaaatccagt

SEQ ID NO: 3643540 - DNA, 25 bp, Homo sapien
gagcttgagccttctagagaaatcc

SEQ ID NO: 3643541 - DNA, 25 bp, Homo sapien
aggagcttgagccttctagagaaat

SEQ ID NO: 3643542 - DNA, 25 bp, Homo sapien
gcttgagccttctagagaaatccag

SEQ ID NO: 3643543 - DNA, 25 bp, Homo sapien
gaaaacagcactacacagggcttca

SEQ ID NO: 3643544 - DNA, 25 bp, Homo sapien
tcatgggtgttatcatgggtcacca

SEQ ID NO: 3643545 - DNA, 25 bp, Homo sapien
gtaaccatatgtagttgctcatggg

SEQ ID NO: 3643546 - DNA, 25 bp, Homo sapien
cttctgctgcattccggtgatagct

SEQ ID NO: 3643547 - DNA, 25 bp, Homo sapien
agcccaggggtggtccagaatctga

SEQ ID NO: 3643548 - DNA, 25 bp, Homo sapien
cgtattctatgcagatgggagaagg

SEQ ID NO: 3643549 - DNA, 25 bp, Homo sapien
actaaagggaagacgtattctatgc

SEQ ID NO: 3643550 - DNA, 25 bp, Homo sapien
ctgaggttacccaagctaactaaag

SEQ ID NO: 3643551 - DNA, 25 bp, Homo sapien
cactgttgctatgtgaatttgcata

SEQ ID NO: 3643552 - DNA, 25 bp, Homo sapien
ctatgtgaatttgcataagcttgca

SEQ ID NO: 3643553 - DNA, 25 bp, Homo sapien
ctgcactgttgctatgtgaatttgc

SEQ ID NO: 3643554 - DNA, 25 bp, Homo sapien
tgttgctatgtgaatttgcataagc

SEQ ID NO: 3643555 - DNA, 25 bp, Homo sapien
gggcagtcacatcatggagccacag

SEQ ID NO: 3643556 - DNA, 25 bp, Homo sapien
taactggacttcatcttcgaggctg

SEQ ID NO: 3643557 - DNA, 25 bp, Homo sapien
tggaatctgtgtctttcccgacagt

SEQ ID NO: 3643558 - DNA, 25 bp, Homo sapien
gctgggtattgaaccaaagtgactc

SEQ ID NO: 3643559 - DNA, 25 bp, Homo sapien
tcagggcgatggaggtgcaggtgtt

SEQ ID NO: 3643560 - DNA, 25 bp, Homo sapien
tgtgattataagaaaaggccagagg

SEQ ID NO: 3643561 - DNA, 25 bp, Homo sapien
gaaattgccggcatgactgtagacc

SEQ ID NO: 3643562 - DNA, 25 bp, Homo sapien
gaggtgcatgatttcaacagtccag

SEQ ID NO: 3643563 - DNA, 25 bp, Homo sapien
tgggagccccacagtggccatgatg

SEQ ID NO: 3643564 - DNA, 25 bp, Homo sapien
ggccatgatgtgtcctgatcctcaa

SEQ ID NO: 3643565 - DNA, 25 bp, Homo sapien
gaatctgcttgaaatacactcccat

SEQ ID NO: 3643566 - DNA, 25 bp, Homo sapien
cattcatcgtgtgtgactcccagag

SEQ ID NO: 3643567 - DNA, 25 bp, Homo sapien
tcagcaaacgacaataattgatggg

SEQ ID NO: 3643568 - DNA, 25 bp, Homo sapien
ggagcaggtgagtgatatgaatcat

SEQ ID NO: 3643569 - DNA, 25 bp, Homo sapien
cagggctcttgttgaatgggaataa

SEQ ID NO: 3643570 - DNA, 25 bp, Homo sapien
gaataatcagcaaacgacaataatt

SEQ ID NO: 3643571 - DNA, 25 bp, Homo sapien
tgagtggagacttcgaaggcccttt

SEQ ID NO: 3643572 - DNA, 25 bp, Homo sapien
cagattgctactgcctctgacgctg

SEQ ID NO: 3643573 - DNA, 25 bp, Homo sapien
ggtacccgataaagcaccagattgc

SEQ ID NO: 3643574 - DNA, 25 bp, Homo sapien
cagcgacttggatcctgtgggcaca

SEQ ID NO: 3643575 - DNA, 25 bp, Homo sapien
caatttcttactggtagagctgcta

SEQ ID NO: 3643576 - DNA, 25 bp, Homo sapien
tgaccacagaggctatcttctgact

SEQ ID NO: 3643577 - DNA, 25 bp, Homo sapien
cttctcctagccaagtttctcatct

SEQ ID NO: 3643578 - DNA, 25 bp, Homo sapien
tccaacactcatttcctctagtcag

SEQ ID NO: 3643579 - DNA, 25 bp, Homo sapien
gtctaccctgctgactctaaggcca

SEQ ID NO: 3643580 - DNA, 25 bp, Homo sapien
tgtctgtctaccctgctgactctaa

SEQ ID NO: 3643581 - DNA, 25 bp, Homo sapien
tgctgactctaaggccaccttcatg

SEQ ID NO: 3643582 - DNA, 25 bp, Homo sapien
ctgccctgtctgtctaccctgctga

SEQ ID NO: 3643583 - DNA, 25 bp, Homo sapien
tccaaatcttacagcgcgctctcct

SEQ ID NO: 3643584 - DNA, 25 bp, Homo sapien
ctcctctctgtgggcatatcctttt

SEQ ID NO: 3643585 - DNA, 25 bp, Homo sapien
ttccaaatcttacagcgcgctctcc

SEQ ID NO: 3643586 - DNA, 25 bp, Homo sapien
ctctctgtgggcatatccttttcca

SEQ ID NO: 3643587 - DNA, 25 bp, Homo sapien
tgatcatcatattgtctaataaaca

SEQ ID NO: 3643588 - DNA, 25 bp, Homo sapien
gatcatcatattgtctaataaacat

SEQ ID NO: 3643589 - DNA, 25 bp, Homo sapien
cttgatcatcatattgtctaataaa

SEQ ID NO: 3643590 - DNA, 25 bp, Homo sapien
ccttgatcatcatattgtctaataa

SEQ ID NO: 3643591 - DNA, 25 bp, Homo sapien
tgcgtaaatcacaccatgagccgat

SEQ ID NO: 3643592 - DNA, 25 bp, Homo sapien
ggacccaggctctgcgtaaatcaca

SEQ ID NO: 3643593 - DNA, 25 bp, Homo sapien
caccatgagccgattaaaatggcat

SEQ ID NO: 3643594 - DNA, 25 bp, Homo sapien
gcaaataatcaggacccaggctctg

SEQ ID NO: 3643595 - DNA, 25 bp, Homo sapien
ctcacgcgagtacaactctcgtaga

SEQ ID NO: 3643596 - DNA, 25 bp, Homo sapien
caactctcgtagacttcgaagggag

SEQ ID NO: 3643597 - DNA, 25 bp, Homo sapien
tctcgtagacttcgaagggagtttc

SEQ ID NO: 3643598 - DNA, 25 bp, Homo sapien
gagtacaactctcgtagacttcgaa

SEQ ID NO: 3643599 - DNA, 25 bp, Homo sapien
tgtgcagtctctggcgcctaacaga

SEQ ID NO: 3643600 - DNA, 25 bp, Homo sapien
caaactatcgcagtattgtgcagtc

SEQ ID NO: 3643601 - DNA, 25 bp, Homo sapien
gacaggatgaggtttgaatgctttg

SEQ ID NO: 3643602 - DNA, 25 bp, Homo sapien
tgaccaggttttcaaattgcaaact

SEQ ID NO: 3643603 - DNA, 25 bp, Homo sapien
tggtgacccacttgttctcactggg

SEQ ID NO: 3643604 - DNA, 25 bp, Homo sapien
ccacttgttctcactgggcatgtag

SEQ ID NO: 3643605 - DNA, 25 bp, Homo sapien
gaatcctgttgcttacaggcagtac

SEQ ID NO: 3643606 - DNA, 25 bp, Homo sapien
gcagtacacttcaatccaaggtgct

SEQ ID NO: 3643607 - DNA, 25 bp, Homo sapien
tcagtaaatgagttcgcctctcggt

SEQ ID NO: 3643608 - DNA, 25 bp, Homo sapien
cctctcggttgattagacagccata

SEQ ID NO: 3643609 - DNA, 25 bp, Homo sapien
agccctcggagctgttcgtttgcag

SEQ ID NO: 3643610 - DNA, 25 bp, Homo sapien
agtaccaatttctcagatcgtattg

SEQ ID NO: 3643611 - DNA, 25 bp, Homo sapien
catggcatgggcgatgtctcaacag

SEQ ID NO: 3643612 - DNA, 25 bp, Homo sapien
cagtgagtgggataacaagtcgttt

SEQ ID NO: 3643613 - DNA, 25 bp, Homo sapien
tcgttttaatggttcagggccaata

SEQ ID NO: 3643614 - DNA, 25 bp, Homo sapien
gagtaaacaagagtgatttccttcc

SEQ ID NO: 3643615 - DNA, 25 bp, Homo sapien
ggagacaacagcagcgactttgaaa

SEQ ID NO: 3643616 - DNA, 25 bp, Homo sapien
tccaggctccgattaagtatgacag

SEQ ID NO: 3643617 - DNA, 25 bp, Homo sapien
ggtgcagtgctttcgcgttcaatag

SEQ ID NO: 3643618 - DNA, 25 bp, Homo sapien
gtatgacagtttccgtgatgtgccc

SEQ ID NO: 3643619 - DNA, 25 bp, Homo sapien
aattcaggtagtttcagtagttaca

SEQ ID NO: 3643620 - DNA, 25 bp, Homo sapien
gatcagtagaaacctgcctacccca

SEQ ID NO: 3643621 - DNA, 25 bp, Homo sapien
tacattttagatcagtagaaacctg

SEQ ID NO: 3643622 - DNA, 25 bp, Homo sapien
ctggaattcaggtagtttcagtagt

SEQ ID NO: 3643623 - DNA, 25 bp, Homo sapien
tttactacgtaaccatcctgcctca

SEQ ID NO: 3643624 - DNA, 25 bp, Homo sapien
gtgtgacagggttagatttactacg

SEQ ID NO: 3643625 - DNA, 25 bp, Homo sapien
gaaatcataaatggccgtcatgcag

SEQ ID NO: 3643626 - DNA, 25 bp, Homo sapien
aacagggcgtttcggttgtgtgaca

SEQ ID NO: 3643627 - DNA, 25 bp, Homo sapien
gggatccgaatctccagggcataga

SEQ ID NO: 3643628 - DNA, 25 bp, Homo sapien
taacaacagttgctaggagaccttt

SEQ ID NO: 3643629 - DNA, 25 bp, Homo sapien
ggcccgtagccactgaattgaacta

SEQ ID NO: 3643630 - DNA, 25 bp, Homo sapien
catagacttgaacctccatcaggag

SEQ ID NO: 3643631 - DNA, 25 bp, Homo sapien
cttccgaatggcagtttcaatcttg

SEQ ID NO: 3643632 - DNA, 25 bp, Homo sapien
aggtgcaatagcttccgaatggcag

SEQ ID NO: 3643633 - DNA, 25 bp, Homo sapien
tgttagtcctttttcactgcctgtg

SEQ ID NO: 3643634 - DNA, 25 bp, Homo sapien
gtagcgaaattcagatgttagtcct

SEQ ID NO: 3643635 - DNA, 25 bp, Homo sapien
aacaggaaagagaatgaagccgaat

SEQ ID NO: 3643636 - DNA, 25 bp, Homo sapien
ggaaagagaatgaagccgaatgtta

SEQ ID NO: 3643637 - DNA, 25 bp, Homo sapien
gaaagagaatgaagccgaatgttac

SEQ ID NO: 3643638 - DNA, 25 bp, Homo sapien
caggaaagagaatgaagccgaatgt

SEQ ID NO: 3643639 - DNA, 25 bp, Homo sapien
tccaacccagattggtgcacgcgct

SEQ ID NO: 3643640 - DNA, 25 bp, Homo sapien
tgcgagtcccacctgtacagaaagg

SEQ ID NO: 3643641 - DNA, 25 bp, Homo sapien
tgcacgcgctagaagagcttgcgag

SEQ ID NO: 3643642 - DNA, 25 bp, Homo sapien
ctttaacagtgaggaccatctgggc

SEQ ID NO: 3643643 - DNA, 25 bp, Homo sapien
gatgctgagtgcacctacatcctca

SEQ ID NO: 3643644 - DNA, 25 bp, Homo sapien
gctgagtgcacctacatcctcatga

SEQ ID NO: 3643645 - DNA, 25 bp, Homo sapien
gagtgcacctacatcctcatgaacc

SEQ ID NO: 3643646 - DNA, 25 bp, Homo sapien
gctgatgctgagtgcacctacatcc

SEQ ID NO: 3643647 - DNA, 25 bp, Homo sapien
tgagaacagcacgggctgcatttgt

SEQ ID NO: 3643648 - DNA, 25 bp, Homo sapien
gaacagcacgggctgcatttgttgt

SEQ ID NO: 3643649 - DNA, 25 bp, Homo sapien
acagcacgggctgcatttgttgttt

SEQ ID NO: 3643650 - DNA, 25 bp, Homo sapien
gagaacagcacgggctgcatttgtt

SEQ ID NO: 3643651 - DNA, 25 bp, Homo sapien
ctgtcattggaatatcgcacacggg

SEQ ID NO: 3643652 - DNA, 25 bp, Homo sapien
ttggaatatcgcacacgggtcctct

SEQ ID NO: 3643653 - DNA, 25 bp, Homo sapien
tatcgcacacgggtcctctccgtag

SEQ ID NO: 3643654 - DNA, 25 bp, Homo sapien
gtcctctccgtaggccatttgtcct

SEQ ID NO: 3643655 - DNA, 25 bp, Homo sapien
acagtcccagcagcatctttctggg

SEQ ID NO: 3643656 - DNA, 25 bp, Homo sapien
gatggcttcacctctattacagtcc

SEQ ID NO: 3643657 - DNA, 25 bp, Homo sapien
ctctgggatccaaagtttccatcct

SEQ ID NO: 3643658 - DNA, 25 bp, Homo sapien
ggagaagagattcaggagactcaga

SEQ ID NO: 3643659 - DNA, 25 bp, Homo sapien
acacgaaggagcttagagggcccac

SEQ ID NO: 3643660 - DNA, 25 bp, Homo sapien
aacacgaaggagcttagagggccca

SEQ ID NO: 3643661 - DNA, 25 bp, Homo sapien
gcaacacgaaggagcttagagggcc

SEQ ID NO: 3643662 - DNA, 25 bp, Homo sapien
ctgcaacacgaaggagcttagaggg

SEQ ID NO: 3643663 - DNA, 25 bp, Homo sapien
gatagttatcttctggcgactccag

SEQ ID NO: 3643664 - DNA, 25 bp, Homo sapien
tgatagttatcttctggcgactcca

SEQ ID NO: 3643665 - DNA, 25 bp, Homo sapien
tccaggggcctccttgaacattgtc

SEQ ID NO: 3643666 - DNA, 25 bp, Homo sapien
gtcagtaccctgcttgtgccctaac

SEQ ID NO: 3643667 - DNA, 25 bp, Homo sapien
tgggcgccagtcgcagtgaaaaccg

SEQ ID NO: 3643668 - DNA, 25 bp, Homo sapien
gggcgccagtcgcagtgaaaaccga

SEQ ID NO: 3643669 - DNA, 25 bp, Homo sapien
ggcgccagtcgcagtgaaaaccgag

SEQ ID NO: 3643670 - DNA, 25 bp, Homo sapien
cacagctctcatgagcaacccagtg

SEQ ID NO: 3643671 - DNA, 25 bp, Homo sapien
tccacagctctcatgagcaacccag

SEQ ID NO: 3643672 - DNA, 25 bp, Homo sapien
aagctggtcacacgtagcttctttc

SEQ ID NO: 3643673 - DNA, 25 bp, Homo sapien
cagttcatgaagctggtcacacgta

SEQ ID NO: 3643674 - DNA, 25 bp, Homo sapien
gacacggagttcctgagccaaaagg

SEQ ID NO: 3643675 - DNA, 25 bp, Homo sapien
gccttttcattaagagattctcaag

SEQ ID NO: 3643676 - DNA, 25 bp, Homo sapien
acacggagttcctgagccaaaaggc

SEQ ID NO: 3643677 - DNA, 25 bp, Homo sapien
catgactggggccttttcattaaga

SEQ ID NO: 3643678 - DNA, 25 bp, Homo sapien
cttgagaagtcagagaatgccggag

SEQ ID NO: 3643679 - DNA, 25 bp, Homo sapien
cttcagtaggcaactcggtgtgagg

SEQ ID NO: 3643680 - DNA, 25 bp, Homo sapien
ttcagtaggcaactcggtgtgagga

SEQ ID NO: 3643681 - DNA, 25 bp, Homo sapien
aatgccggagctcccctctctctgg

SEQ ID NO: 3643682 - DNA, 25 bp, Homo sapien
agggcgaggggctgctcccactctg

SEQ ID NO: 3643683 - DNA, 25 bp, Homo sapien
tgctccaccaccacatcgcactgtc

SEQ ID NO: 3643684 - DNA, 25 bp, Homo sapien
cccatccgctttgctccaccaccac

SEQ ID NO: 3643685 - DNA, 25 bp, Homo sapien
accaagcaaaggttccagggcgagg

SEQ ID NO: 3643686 - DNA, 25 bp, Homo sapien
ggtaatctggaaggttgcaaagccc

SEQ ID NO: 3643687 - DNA, 25 bp, Homo sapien
gaaggttgcaaagccctccaagcat

SEQ ID NO: 3643688 - DNA, 25 bp, Homo sapien
gcaaagccctccaagcatgttgatg

SEQ ID NO: 3643689 - DNA, 25 bp, Homo sapien
tccaagcatgttgatgttgggcccc

SEQ ID NO: 3643690 - DNA, 25 bp, Homo sapien
ggattttgtaagcgccatcccctcc

SEQ ID NO: 3643691 - DNA, 25 bp, Homo sapien
attttgtaagcgccatcccctcctc

SEQ ID NO: 3643692 - DNA, 25 bp, Homo sapien
ctggattttgtaagcgccatcccct

SEQ ID NO: 3643693 - DNA, 25 bp, Homo sapien
tggattttgtaagcgccatcccctc

SEQ ID NO: 3643694 - DNA, 25 bp, Homo sapien
tttggaggcgagtcacaaaggcatg

SEQ ID NO: 3643695 - DNA, 25 bp, Homo sapien
ccatttcactggtatgcgtgggatc

SEQ ID NO: 3643696 - DNA, 25 bp, Homo sapien
tgcgtgggatcatctgagtgttgca

SEQ ID NO: 3643697 - DNA, 25 bp, Homo sapien
agtgttgcagacactgcagggagat

SEQ ID NO: 3643698 - DNA, 25 bp, Homo sapien
gctccaagtatgatttcctaaaatg

SEQ ID NO: 3643699 - DNA, 25 bp, Homo sapien
cacttttgctccaagtatgatttcc

SEQ ID NO: 3643700 - DNA, 25 bp, Homo sapien
tcctaaaatggcagcctgagtgata

SEQ ID NO: 3643701 - DNA, 25 bp, Homo sapien
gagtgataggcatgttcttcttcta

SEQ ID NO: 3643702 - DNA, 25 bp, Homo sapien
tccttagttcctctgccttctctcc

SEQ ID NO: 3643703 - DNA, 25 bp, Homo sapien
cttagttcctctgccttctctcccc

SEQ ID NO: 3643704 - DNA, 25 bp, Homo sapien
ctgtccttagttcctctgccttctc

SEQ ID NO: 3643705 - DNA, 25 bp, Homo sapien
tagttcctctgccttctctccccat

SEQ ID NO: 3643706 - DNA, 25 bp, Homo sapien
caggtgctggaagaacggccagtct

SEQ ID NO: 3643707 - DNA, 25 bp, Homo sapien
atgcacgagggcgaaggacatcaca

SEQ ID NO: 3643708 - DNA, 25 bp, Homo sapien
agcactgagatgcacgagggcgaag

SEQ ID NO: 3643709 - DNA, 25 bp, Homo sapien
cacgagggcgaaggacatcacaggt

SEQ ID NO: 3643710 - DNA, 25 bp, Homo sapien
acacacagagggatgcaagccagga

SEQ ID NO: 3643711 - DNA, 25 bp, Homo sapien
acacagagggatgcaagccaggaaa

SEQ ID NO: 3643712 - DNA, 25 bp, Homo sapien
cagacacacagagggatgcaagcca

SEQ ID NO: 3643713 - DNA, 25 bp, Homo sapien
gacacacagagggatgcaagccagg

SEQ ID NO: 3643714 - DNA, 25 bp, Homo sapien
tcttcaattagggactgcgatggtg

SEQ ID NO: 3643715 - DNA, 25 bp, Homo sapien
tcatgttctgggatctcacactcag

SEQ ID NO: 3643716 - DNA, 25 bp, Homo sapien
caaaggtcgagatagctgttttcca

SEQ ID NO: 3643717 - DNA, 25 bp, Homo sapien
tgcatgcagcatggtcctatagaac

SEQ ID NO: 3643718 - DNA, 25 bp, Homo sapien
ctttgcataggagtcgtcaggaacc

SEQ ID NO: 3643719 - DNA, 25 bp, Homo sapien
gagagcaagacgtggctgccatgac

SEQ ID NO: 3643720 - DNA, 25 bp, Homo sapien
cataggagtcgtcaggaacctctga

SEQ ID NO: 3643721 - DNA, 25 bp, Homo sapien
tcactttgcataggagtcgtcagga

SEQ ID NO: 3643722 - DNA, 25 bp, Homo sapien
aatcaatgttccctcgactttggaa

SEQ ID NO: 3643723 - DNA, 25 bp, Homo sapien
tccattagatgacggcacttcctca

SEQ ID NO: 3643724 - DNA, 25 bp, Homo sapien
gcaagacagtgtttgtacccaatca

SEQ ID NO: 3643725 - DNA, 25 bp, Homo sapien
tcacattgaatgtgccgcatggccc

SEQ ID NO: 3643726 - DNA, 25 bp, Homo sapien
cagagtggatgaacttgttcttgaa

SEQ ID NO: 3643727 - DNA, 25 bp, Homo sapien
gagtggttgaatacaacaaagtctg

SEQ ID NO: 3643728 - DNA, 25 bp, Homo sapien
tgatggatgagttaagagagcagat

SEQ ID NO: 3643729 - DNA, 25 bp, Homo sapien
caagcaagatgttgagtgatggatg

SEQ ID NO: 3643730 - DNA, 25 bp, Homo sapien
gagccactcatatgaccacggaagg

SEQ ID NO: 3643731 - DNA, 25 bp, Homo sapien
gagatggccttttaggctgttgaaa

SEQ ID NO: 3643732 - DNA, 25 bp, Homo sapien
gctcacagagggcagtgatgcctct

SEQ ID NO: 3643733 - DNA, 25 bp, Homo sapien
tgattctttcaacggacagctcaca

SEQ ID NO: 3643734 - DNA, 25 bp, Homo sapien
cacaggagattttatgaaccaagca

SEQ ID NO: 3643735 - DNA, 25 bp, Homo sapien
atttacacaggagattttatgaacc

SEQ ID NO: 3643736 - DNA, 25 bp, Homo sapien
gcataagtgcttctgtgtatattga

SEQ ID NO: 3643737 - DNA, 25 bp, Homo sapien
ttttatgaaccaagcataagtgctt

SEQ ID NO: 3643738 - DNA, 25 bp, Homo sapien
cacggtaatactggctgttgtcgga

SEQ ID NO: 3643739 - DNA, 25 bp, Homo sapien
gctgttgtcggaagtagcctgcatc

SEQ ID NO: 3643740 - DNA, 25 bp, Homo sapien
aatactggctgttgtcggaagtagc

SEQ ID NO: 3643741 - DNA, 25 bp, Homo sapien
gttgtcggaagtagcctgcatcagg

SEQ ID NO: 3643742 - DNA, 25 bp, Homo sapien
tattaaagcacacaaggacatgggc

SEQ ID NO: 3643743 - DNA, 25 bp, Homo sapien
ttggcttttggcttgacactaggtt

SEQ ID NO: 3643744 - DNA, 25 bp, Homo sapien
atattaaagcacacaaggacatggg

SEQ ID NO: 3643745 - DNA, 25 bp, Homo sapien
acactaggttcagcagtggcttttg

SEQ ID NO: 3643746 - DNA, 25 bp, Homo sapien
tactgagttgggagcagcttgtttc

SEQ ID NO: 3643747 - DNA, 25 bp, Homo sapien
tctgctcatactttcctgtagaggt

SEQ ID NO: 3643748 - DNA, 25 bp, Homo sapien
ccattgatggccaaccttggcagga

SEQ ID NO: 3643749 - DNA, 25 bp, Homo sapien
tctaggcgcccatatatctgctcat

SEQ ID NO: 3643750 - DNA, 25 bp, Homo sapien
ggactgactcggcagcaggattcgt

SEQ ID NO: 3643751 - DNA, 25 bp, Homo sapien
attcgtgcatgggaatcggagacca

SEQ ID NO: 3643752 - DNA, 25 bp, Homo sapien
gtgcagctggtgcccgactcagctc

SEQ ID NO: 3643753 - DNA, 25 bp, Homo sapien
ctgctgatggtgagtgttcagacag

SEQ ID NO: 3643754 - DNA, 25 bp, Homo sapien
cctgatttaatcttattgagcatgg

SEQ ID NO: 3643755 - DNA, 25 bp, Homo sapien
tgctgtttgagctcgatgcttggag

SEQ ID NO: 3643756 - DNA, 25 bp, Homo sapien
tttgatatctccattggtgcctgat

SEQ ID NO: 3643757 - DNA, 25 bp, Homo sapien
ggtgcctgatttaatcttattgagc

SEQ ID NO: 3643758 - DNA, 25 bp, Homo sapien
tcagcctgtgacctgtcctcacaaa

SEQ ID NO: 3643759 - DNA, 25 bp, Homo sapien
tttgtggaatgaccattgccactcg

SEQ ID NO: 3643760 - DNA, 25 bp, Homo sapien
actcgaatttgggagctctcttctc

SEQ ID NO: 3643761 - DNA, 25 bp, Homo sapien
tatccactccctgaggtcttgccat

SEQ ID NO: 3643762 - DNA, 25 bp, Homo sapien
tctgtgtccgaaactgtactgaaac

SEQ ID NO: 3643763 - DNA, 25 bp, Homo sapien
aagctgctcgataaccccttgcagt

SEQ ID NO: 3643764 - DNA, 25 bp, Homo sapien
gcagttcgatttctgtgtccgaaac

SEQ ID NO: 3643765 - DNA, 25 bp, Homo sapien
aaccccttgcagttcgatttctgtg

SEQ ID NO: 3643766 - DNA, 25 bp, Homo sapien
agcagattccgtcttgcatcttggg

SEQ ID NO: 3643767 - DNA, 25 bp, Homo sapien
gttaggcagcaactccgcgtgaagg

SEQ ID NO: 3643768 - DNA, 25 bp, Homo sapien
tctgggtgtgtagagcagattccgt

SEQ ID NO: 3643769 - DNA, 25 bp, Homo sapien
gcagtcatgttaggcagcaactccg

SEQ ID NO: 3643770 - DNA, 25 bp, Homo sapien
ttgcaaactaagagatggagtgagg

SEQ ID NO: 3643771 - DNA, 25 bp, Homo sapien
tctcctaggcccctcttgttgcaaa

SEQ ID NO: 3643772 - DNA, 25 bp, Homo sapien
cacaacatttaaactccatgctaac

SEQ ID NO: 3643773 - DNA, 25 bp, Homo sapien
cagcagctggttagactgtttctca

SEQ ID NO: 3643774 - DNA, 25 bp, Homo sapien
caaagaagaggcgagtgtattccag

SEQ ID NO: 3643775 - DNA, 25 bp, Homo sapien
acagctgacggatgacaaagaagag

SEQ ID NO: 3643776 - DNA, 25 bp, Homo sapien
tcctgggagacagctgacggatgac

SEQ ID NO: 3643777 - DNA, 25 bp, Homo sapien
aggaggagagactgccgaggcagtg

SEQ ID NO: 3643778 - DNA, 25 bp, Homo sapien
tctatactggcatgcaacagagcct

SEQ ID NO: 3643779 - DNA, 25 bp, Homo sapien
tctttcacactgttactgctagagg

SEQ ID NO: 3643780 - DNA, 25 bp, Homo sapien
gcgatgcagccccatgacttctata

SEQ ID NO: 3643781 - DNA, 25 bp, Homo sapien
ccatgacttctatactggcatgcaa

SEQ ID NO: 3643782 - DNA, 25 bp, Homo sapien
actgaactgctattggaacttcctt

SEQ ID NO: 3643783 - DNA, 25 bp, Homo sapien
ttaccaacaccaccgtggggcttca

SEQ ID NO: 3643784 - DNA, 25 bp, Homo sapien
gcttcactgtagtgctcatggccat

SEQ ID NO: 3643785 - DNA, 25 bp, Homo sapien
ttgttgtcccggcttcttgtgctcc

SEQ ID NO: 3643786 - DNA, 25 bp, Homo sapien
ctaagcagaagcagcaggtgggaag

SEQ ID NO: 3643787 - DNA, 25 bp, Homo sapien
gcagaagcagcaggtgggaagtccc

SEQ ID NO: 3643788 - DNA, 25 bp, Homo sapien
gtgggaagtccctggcgctgttaca

SEQ ID NO: 3643789 - DNA, 25 bp, Homo sapien
tgggaagtccctggcgctgttacag

SEQ ID NO: 3643790 - DNA, 25 bp, Homo sapien
agacacgtgagctcataacctccaa

SEQ ID NO: 3643791 - DNA, 25 bp, Homo sapien
gggtgtatgtgtcagaacacagaca

SEQ ID NO: 3643792 - DNA, 25 bp, Homo sapien
gtgagctcataacctccaagaattc

SEQ ID NO: 3643793 - DNA, 25 bp, Homo sapien
gtgtcagaacacagacacgtgagct

SEQ ID NO: 3643794 - DNA, 25 bp, Homo sapien
aagagtgatgggcaagagttgtcca

SEQ ID NO: 3643795 - DNA, 25 bp, Homo sapien
gagtgatgggcaagagttgtccact

SEQ ID NO: 3643796 - DNA, 25 bp, Homo sapien
ggaagagtgatgggcaagagttgtc

SEQ ID NO: 3643797 - DNA, 25 bp, Homo sapien
gtgatgggcaagagttgtccactca

SEQ ID NO: 3643798 - DNA, 25 bp, Homo sapien
tcttctgttgagaaggttcttgaag

SEQ ID NO: 3643799 - DNA, 25 bp, Homo sapien
ttctgttgagaaggttcttgaagaa

SEQ ID NO: 3643800 - DNA, 25 bp, Homo sapien
cttctgttgagaaggttcttgaaga

SEQ ID NO: 3643801 - DNA, 25 bp, Homo sapien
tctagttgtctttgctttgaatcaa

SEQ ID NO: 3643802 - DNA, 25 bp, Homo sapien
ccttccagaacttgtcgcaactctt

SEQ ID NO: 3643803 - DNA, 25 bp, Homo sapien
ccatgtgctttgggttcctgacagc

SEQ ID NO: 3643804 - DNA, 25 bp, Homo sapien
gtgcatcccaatttgctgacattaa

SEQ ID NO: 3643805 - DNA, 25 bp, Homo sapien
tgaggtcccggatatacatatttcc

SEQ ID NO: 3643806 - DNA, 25 bp, Homo sapien
tttggtgcacggaactgaggtcccg

SEQ ID NO: 3643807 - DNA, 25 bp, Homo sapien
gtgcagcctgcggtaatgagattca

SEQ ID NO: 3643808 - DNA, 25 bp, Homo sapien
cctccactagacagcattttaaatc

SEQ ID NO: 3643809 - DNA, 25 bp, Homo sapien
tgaaacaataaggttgatttgcatt

SEQ ID NO: 3643810 - DNA, 25 bp, Homo sapien
tcctagaagatccaattgtttcagg

SEQ ID NO: 3643811 - DNA, 25 bp, Homo sapien
tttgccgttgcgatggtagtgccca

SEQ ID NO: 3643812 - DNA, 25 bp, Homo sapien
gaacagtggacttaattgggttatg

SEQ ID NO: 3643813 - DNA, 25 bp, Homo sapien
cactgcctttgactggattagttac

SEQ ID NO: 3643814 - DNA, 25 bp, Homo sapien
tacttttggagaagctagactcgcc

SEQ ID NO: 3643815 - DNA, 25 bp, Homo sapien
tattgggcagccacgtacttttgga

SEQ ID NO: 3643816 - DNA, 25 bp, Homo sapien
gcagcagtgagatgaatagccatga

SEQ ID NO: 3643817 - DNA, 25 bp, Homo sapien
gctagctctgcgctcttaaaaccat

SEQ ID NO: 3643818 - DNA, 25 bp, Homo sapien
gctctgcgctcttaaaaccatagaa

SEQ ID NO: 3643819 - DNA, 25 bp, Homo sapien
gagggctagctctgcgctcttaaaa

SEQ ID NO: 3643820 - DNA, 25 bp, Homo sapien
cgtggagggctagctctgcgctctt

SEQ ID NO: 3643821 - DNA, 25 bp, Homo sapien
catccgtggtgaaggcaaagtgtcc

SEQ ID NO: 3643822 - DNA, 25 bp, Homo sapien
aggaccaagcagccttagctacagc

SEQ ID NO: 3643823 - DNA, 25 bp, Homo sapien
gcagccttagctacagcacaattat

SEQ ID NO: 3643824 - DNA, 25 bp, Homo sapien
gatgttcttgttgtgagttatattc

SEQ ID NO: 3643825 - DNA, 25 bp, Homo sapien
cccagctctatcacttccagcacaa

SEQ ID NO: 3643826 - DNA, 25 bp, Homo sapien
agctctatcacttccagcacaaaca

SEQ ID NO: 3643827 - DNA, 25 bp, Homo sapien
tgcagcccagctctatcacttccag

SEQ ID NO: 3643828 - DNA, 25 bp, Homo sapien
cctgcagcccagctctatcacttcc

SEQ ID NO: 3643829 - DNA, 25 bp, Homo sapien
gggtgatggagtcagccaacattgc

SEQ ID NO: 3643830 - DNA, 25 bp, Homo sapien
agtccggtagggcatcgagttctga

SEQ ID NO: 3643831 - DNA, 25 bp, Homo sapien
ttcagcagtaacaggacagactggc

SEQ ID NO: 3643832 - DNA, 25 bp, Homo sapien
caataccacagtgtgagagagtccg

SEQ ID NO: 3643833 - DNA, 25 bp, Homo sapien
gcagcagcagaccacggtggggaca

SEQ ID NO: 3643834 - DNA, 25 bp, Homo sapien
agcagaccacggtggggacaaatga

SEQ ID NO: 3643835 - DNA, 25 bp, Homo sapien
ccacggtggggacaaatgagaggac

SEQ ID NO: 3643836 - DNA, 25 bp, Homo sapien
agcagcagaccacggtggggacaaa

SEQ ID NO: 3643837 - DNA, 25 bp, Homo sapien
acttggacctccctgaaggtgtcgc

SEQ ID NO: 3643838 - DNA, 25 bp, Homo sapien
tatggtggacttggacctccctgaa

SEQ ID NO: 3643839 - DNA, 25 bp, Homo sapien
tggacttggacctccctgaaggtgt

SEQ ID NO: 3643840 - DNA, 25 bp, Homo sapien
tgctgctatggtggacttggacctc

SEQ ID NO: 3643841 - DNA, 25 bp, Homo sapien
agggagggtgggtgtcagagaaggc

SEQ ID NO: 3643842 - DNA, 25 bp, Homo sapien
ctgcagtgtcctcacggggaagagc

SEQ ID NO: 3643843 - DNA, 25 bp, Homo sapien
agcagggagggtgggtgtcagagaa

SEQ ID NO: 3643844 - DNA, 25 bp, Homo sapien
gaagagcagggagggtgggtgtcag

SEQ ID NO: 3643845 - DNA, 25 bp, Homo sapien
ggagagtggaaagtctcattccttt

SEQ ID NO: 3643846 - DNA, 25 bp, Homo sapien
tggagagtggaaagtctcattcctt

SEQ ID NO: 3643847 - DNA, 25 bp, Homo sapien
agagtggaaagtctcattcctttct

SEQ ID NO: 3643848 - DNA, 25 bp, Homo sapien
ggaggcctcagctgaatcagaggga

SEQ ID NO: 3643849 - DNA, 25 bp, Homo sapien
ttccagctgcacctccgaaacagaa

SEQ ID NO: 3643850 - DNA, 25 bp, Homo sapien
cagctcacgaaagaaggacgtcctt

SEQ ID NO: 3643851 - DNA, 25 bp, Homo sapien
aacagtcactggatcccagctcacg

SEQ ID NO: 3643852 - DNA, 25 bp, Homo sapien
gctgcacctccgaaacagaagaggt

SEQ ID NO: 3643853 - DNA, 25 bp, Homo sapien
gcattacttcttgctatgaggatac

SEQ ID NO: 3643854 - DNA, 25 bp, Homo sapien
ttacttcttgctatgaggatactga

SEQ ID NO: 3643855 - DNA, 25 bp, Homo sapien
tatgaggatactgatgtgccggttc

SEQ ID NO: 3643856 - DNA, 25 bp, Homo sapien
ggatactgatgtgccggttcttact

SEQ ID NO: 3643857 - DNA, 25 bp, Homo sapien
cctgtgtgccggattggagggtagt

SEQ ID NO: 3643858 - DNA, 25 bp, Homo sapien
gaggtttggagggttacattgctcc

SEQ ID NO: 3643859 - DNA, 25 bp, Homo sapien
attgctccggaccacactttgctct

SEQ ID NO: 3643860 - DNA, 25 bp, Homo sapien
tctctgtggattggcgagtgcttgc

SEQ ID NO: 3643861 - DNA, 25 bp, Homo sapien
taagtggtggagaaaatttctggct

SEQ ID NO: 3643862 - DNA, 25 bp, Homo sapien
tctttgccagatctgctttaagtgg

SEQ ID NO: 3643863 - DNA, 25 bp, Homo sapien
cattctcgatggcagtatcttgatg

SEQ ID NO: 3643864 - DNA, 25 bp, Homo sapien
tatcttgatgcatctatctttgcca

SEQ ID NO: 3643865 - DNA, 25 bp, Homo sapien
ccagtgctggaagcctcattcgaaa

SEQ ID NO: 3643866 - DNA, 25 bp, Homo sapien
agtgctggaagcctcattcgaaagt

SEQ ID NO: 3643867 - DNA, 25 bp, Homo sapien
tgctggaagcctcattcgaaagtgt

SEQ ID NO: 3643868 - DNA, 25 bp, Homo sapien
tggaagcctcattcgaaagtgtcat

SEQ ID NO: 3643869 - DNA, 25 bp, Homo sapien
tttgatatgataggttcaggcacaa

SEQ ID NO: 3643870 - DNA, 25 bp, Homo sapien
ccagtgctgcctcttactgtgaggg

SEQ ID NO: 3643871 - DNA, 25 bp, Homo sapien
taggttcaggcacaaagagtaaaaa

SEQ ID NO: 3643872 - DNA, 25 bp, Homo sapien
tcatggagactcctggtgtggtttt

SEQ ID NO: 3643873 - DNA, 25 bp, Homo sapien
gggaagccagtcaggagccatgagg

SEQ ID NO: 3643874 - DNA, 25 bp, Homo sapien
tcaagcattgggtacagctgggaca

SEQ ID NO: 3643875 - DNA, 25 bp, Homo sapien
cattgggtacagctgggacaacccc

SEQ ID NO: 3643876 - DNA, 25 bp, Homo sapien
tacagctgggacaaccccttttggc

SEQ ID NO: 3643877 - DNA, 25 bp, Homo sapien
tcatgaggtcgggccaggtatggtg

SEQ ID NO: 3643878 - DNA, 25 bp, Homo sapien
tctatatagaatatcatgaggtcgg

SEQ ID NO: 3643879 - DNA, 25 bp, Homo sapien
atctatatagaatatcatgaggtcg

SEQ ID NO: 3643880 - DNA, 25 bp, Homo sapien
ctgccacttgatcgtattcacaggg

SEQ ID NO: 3643881 - DNA, 25 bp, Homo sapien
tgtattctcgaagcaattctgccac

SEQ ID NO: 3643882 - DNA, 25 bp, Homo sapien
tctgttcctagagcttaactagaat

SEQ ID NO: 3643883 - DNA, 25 bp, Homo sapien
tgaagattcgggactggctcatatc

SEQ ID NO: 3643884 - DNA, 25 bp, Homo sapien
tctatgggaatgctttagtgttagc

SEQ ID NO: 3643885 - DNA, 25 bp, Homo sapien
tgttagcagttgacaattaggccca

SEQ ID NO: 3643886 - DNA, 25 bp, Homo sapien
tatactgctagttagagaaacatgt

SEQ ID NO: 3643887 - DNA, 25 bp, Homo sapien
tctttgaagactcatagaaagctgg

SEQ ID NO: 3643888 - DNA, 25 bp, Homo sapien
gctttgattactaggagggtttctg

SEQ ID NO: 3643889 - DNA, 25 bp, Homo sapien
tctttcagatggaataaccttccag

SEQ ID NO: 3643890 - DNA, 25 bp, Homo sapien
tctctgtgtaataatagcaggctac

SEQ ID NO: 3643891 - DNA, 25 bp, Homo sapien
gttccaagaaggtacatcctgtcca

SEQ ID NO: 3643892 - DNA, 25 bp, Homo sapien
cccatagaatttgggaaggcgtcag

SEQ ID NO: 3643893 - DNA, 25 bp, Homo sapien
aaaagcctcagcacgccttcggagg

SEQ ID NO: 3643894 - DNA, 25 bp, Homo sapien
gcgtcagggcagatgcggcatttat

SEQ ID NO: 3643895 - DNA, 25 bp, Homo sapien
tacaaggcggtggttgacgaattac

SEQ ID NO: 3643896 - DNA, 25 bp, Homo sapien
tgtcctaaggaaagcggacctgcca

SEQ ID NO: 3643897 - DNA, 25 bp, Homo sapien
tttgactacagtgcaggaaggcgga

SEQ ID NO: 3643898 - DNA, 25 bp, Homo sapien
attggtcgttcccacctcactcggg

SEQ ID NO: 3643899 - DNA, 25 bp, Homo sapien
cattagttgaggaggtgtcgccacc

SEQ ID NO: 3643900 - DNA, 25 bp, Homo sapien
aagatgttttctgtttgggatcgta

SEQ ID NO: 3643901 - DNA, 25 bp, Homo sapien
tttaatgtcatcctttgcaagatgt

SEQ ID NO: 3643902 - DNA, 25 bp, Homo sapien
gatgttttctgtttgggatcgtaaa

SEQ ID NO: 3643903 - DNA, 25 bp, Homo sapien
tgtcatcctttgcaagatgttttct

SEQ ID NO: 3643904 - DNA, 25 bp, Homo sapien
tcaagtctaaacgttgcgcacggct

SEQ ID NO: 3643905 - DNA, 25 bp, Homo sapien
gcgcacggctttgttttgtccagag

SEQ ID NO: 3643906 - DNA, 25 bp, Homo sapien
cagagctgagctctcgttaggtcgg

SEQ ID NO: 3643907 - DNA, 25 bp, Homo sapien
ccctgaacagtccagaaactctgag

SEQ ID NO: 3643908 - DNA, 25 bp, Homo sapien
taatacctccctcgcagaactgttg

SEQ ID NO: 3643909 - DNA, 25 bp, Homo sapien
tagcctgtgggctccattagcaagg

SEQ ID NO: 3643910 - DNA, 25 bp, Homo sapien
ccaatggcatcaccatgggcaggct

SEQ ID NO: 3643911 - DNA, 25 bp, Homo sapien
gaggagctcaaaagacgaattcgat

SEQ ID NO: 3643912 - DNA, 25 bp, Homo sapien
tctgccgagggttctccccttggac

SEQ ID NO: 3643913 - DNA, 25 bp, Homo sapien
gtgctccaagcccatgcgcctatgt

SEQ ID NO: 3643914 - DNA, 25 bp, Homo sapien
tcatcaaatgctctccctggacttc

SEQ ID NO: 3643915 - DNA, 25 bp, Homo sapien
ccaggcttgagtcccatctttcttc

SEQ ID NO: 3643916 - DNA, 25 bp, Homo sapien
tcttcacctcctggtctaaccgaga

SEQ ID NO: 3643917 - DNA, 25 bp, Homo sapien
taaccgagagccactctccgagttc

SEQ ID NO: 3643918 - DNA, 25 bp, Homo sapien
tggtctaaccgagagccactctccg

SEQ ID NO: 3643919 - DNA, 25 bp, Homo sapien
ctctccgagttcagtgctgccttgg

SEQ ID NO: 3643920 - DNA, 25 bp, Homo sapien
ccctccagtcctggcctatttccat

SEQ ID NO: 3643921 - DNA, 25 bp, Homo sapien
cccctccagtcctggcctatttcca

SEQ ID NO: 3643922 - DNA, 25 bp, Homo sapien
cttggtctggaaggtcagtaactgg

SEQ ID NO: 3643923 - DNA, 25 bp, Homo sapien
agtgctgccagcacgttctcttggt

SEQ ID NO: 3643924 - DNA, 25 bp, Homo sapien
tgctctggcttctgtgccggatgag

SEQ ID NO: 3643925 - DNA, 25 bp, Homo sapien
ctggtaccagagttggtacggtttg

SEQ ID NO: 3643926 - DNA, 25 bp, Homo sapien
cctgcagtcaggttgtgtgagtgtt

SEQ ID NO: 3643927 - DNA, 25 bp, Homo sapien
gtgtgagtgttgcaacctggtaccc

SEQ ID NO: 3643928 - DNA, 25 bp, Homo sapien
cttcctgcagtcaggttgtgtgagt

SEQ ID NO: 3643929 - DNA, 25 bp, Homo sapien
agtgttgcaacctggtacccaccca

SEQ ID NO: 3643930 - DNA, 25 bp, Homo sapien
caaaaatgtgtttcttatagttctg

SEQ ID NO: 3643931 - DNA, 25 bp, Homo sapien
acacccagccaaaaatgtgtttctt

SEQ ID NO: 3643932 - DNA, 25 bp, Homo sapien
agccaaaaatgtgtttcttatagtt

SEQ ID NO: 3643933 - DNA, 25 bp, Homo sapien
cacccagccaaaaatgtgtttctta

SEQ ID NO: 3643934 - DNA, 25 bp, Homo sapien
aactctgcaagtgtatgtgggagca

SEQ ID NO: 3643935 - DNA, 25 bp, Homo sapien
ctttgttctgacacttgggtgacgg

SEQ ID NO: 3643936 - DNA, 25 bp, Homo sapien
tactggtttgcaaaatgtcctactg

SEQ ID NO: 3643937 - DNA, 25 bp, Homo sapien
cagttgtgatcagccacatgggctt

SEQ ID NO: 3643938 - DNA, 25 bp, Homo sapien
atggccagtagctgcttccggactc

SEQ ID NO: 3643939 - DNA, 25 bp, Homo sapien
tccggactccggaaaatatgtcgca

SEQ ID NO: 3643940 - DNA, 25 bp, Homo sapien
gctgaacaggaattcccaagtaaat

SEQ ID NO: 3643941 - DNA, 25 bp, Homo sapien
aaataattctttcttgtgaccgagg

SEQ ID NO: 3643942 - DNA, 25 bp, Homo sapien
gactctaccaggactgcttttttcc

SEQ ID NO: 3643943 - DNA, 25 bp, Homo sapien
tttctgcatttgtgctggaaacaga

SEQ ID NO: 3643944 - DNA, 25 bp, Homo sapien
tgatgactgactctaccaggactgc

SEQ ID NO: 3643945 - DNA, 25 bp, Homo sapien
ttttctgcatttgtgctggaaacag

SEQ ID NO: 3643946 - DNA, 25 bp, Homo sapien
cgtgctgttgaccaaacacttgatt

SEQ ID NO: 3643947 - DNA, 25 bp, Homo sapien
aaatcatggctgtgaccaataagtc

SEQ ID NO: 3643948 - DNA, 25 bp, Homo sapien
tctaggattcccatagtcacagtct

SEQ ID NO: 3643949 - DNA, 25 bp, Homo sapien
tataaagtaggttctaggattccca

SEQ ID NO: 3643950 - DNA, 25 bp, Homo sapien
gcccagccattcatagcctagtttc

SEQ ID NO: 3643951 - DNA, 25 bp, Homo sapien
ctgggccctgacctttcaactcggg

SEQ ID NO: 3643952 - DNA, 25 bp, Homo sapien
ggcccagccattcatagcctagttt

SEQ ID NO: 3643953 - DNA, 25 bp, Homo sapien
ccctgacctttcaactcggggatgg

SEQ ID NO: 3643954 - DNA, 25 bp, Homo sapien
ggacggtgcatgtcagctgcccagg

SEQ ID NO: 3643955 - DNA, 25 bp, Homo sapien
gaagctgttatcttccgttgccaag

SEQ ID NO: 3643956 - DNA, 25 bp, Homo sapien
ttatcttccgttgccaagggactct

SEQ ID NO: 3643957 - DNA, 25 bp, Homo sapien
tagaaatcctcacgacttgagctgg

SEQ ID NO: 3643958 - DNA, 25 bp, Homo sapien
cggtggccgtgacactgactccagt

SEQ ID NO: 3643959 - DNA, 25 bp, Homo sapien
tctttaggtcccttggaggtggcac

SEQ ID NO: 3643960 - DNA, 25 bp, Homo sapien
ctgttccagtgaacccagcatatgg

SEQ ID NO: 3643961 - DNA, 25 bp, Homo sapien
gggtggtgtaacacacacaaggagt

SEQ ID NO: 3643962 - DNA, 25 bp, Homo sapien
cacacttctcacgtcttctgatggc

SEQ ID NO: 3643963 - DNA, 25 bp, Homo sapien
ttccacacttctcacgtcttctgat

SEQ ID NO: 3643964 - DNA, 25 bp, Homo sapien
cagcttccacacttctcacgtcttc

SEQ ID NO: 3643965 - DNA, 25 bp, Homo sapien
cacttctcacgtcttctgatggctt

SEQ ID NO: 3643966 - DNA, 25 bp, Homo sapien
gcctgtttctcttgcacgcgacatt

SEQ ID NO: 3643967 - DNA, 25 bp, Homo sapien
aaaacgcagctcagttctaacaaga

SEQ ID NO: 3643968 - DNA, 25 bp, Homo sapien
tgatttggattgtaaaacgcagctc

SEQ ID NO: 3643969 - DNA, 25 bp, Homo sapien
cactggactctgaaaccacgagaat

SEQ ID NO: 3643970 - DNA, 25 bp, Homo sapien
ctttagattccgctgatctcctcct

SEQ ID NO: 3643971 - DNA, 25 bp, Homo sapien
tccatatggtccgtttctaaaacca

SEQ ID NO: 3643972 - DNA, 25 bp, Homo sapien
tacattctatcttcctgtctagcag

SEQ ID NO: 3643973 - DNA, 25 bp, Homo sapien
aacaggtatttgcatgacacccttt

SEQ ID NO: 3643974 - DNA, 25 bp, Homo sapien
gaaatcctggaggagtaaactagga

SEQ ID NO: 3643975 - DNA, 25 bp, Homo sapien
tgatgtagttctgttgaagggatga

SEQ ID NO: 3643976 - DNA, 25 bp, Homo sapien
atcctggaggagtaaactaggaagg

SEQ ID NO: 3643977 - DNA, 25 bp, Homo sapien
tgaaagaaatcctggaggagtaaac

SEQ ID NO: 3643978 - DNA, 25 bp, Homo sapien
tccttgaattgcagggctaggtttg

SEQ ID NO: 3643979 - DNA, 25 bp, Homo sapien
ccttgaattgcagggctaggtttgg

SEQ ID NO: 3643980 - DNA, 25 bp, Homo sapien
ctccttgaattgcagggctaggttt

SEQ ID NO: 3643981 - DNA, 25 bp, Homo sapien
gaaggtagccaatcctgaagccaaa

SEQ ID NO: 3643982 - DNA, 25 bp, Homo sapien
tctcatagaagcaataagacaagtc

SEQ ID NO: 3643983 - DNA, 25 bp, Homo sapien
ttctgattgggcataggatgccacc

SEQ ID NO: 3643984 - DNA, 25 bp, Homo sapien
ccaaaggagcatcgaagaagtagtt

SEQ ID NO: 3643985 - DNA, 25 bp, Homo sapien
ggcagaaaggacagtcaggtcctgc

SEQ ID NO: 3643986 - DNA, 25 bp, Homo sapien
gcagtaaaggagctttttgtagcca

SEQ ID NO: 3643987 - DNA, 25 bp, Homo sapien
aggtcctgcccatgaaaagaactac

SEQ ID NO: 3643988 - DNA, 25 bp, Homo sapien
tataaagtggagaatgcgagacagg

SEQ ID NO: 3643989 - DNA, 25 bp, Homo sapien
ctcggagcctgagagagattattcc

SEQ ID NO: 3643990 - DNA, 25 bp, Homo sapien
agtgttaccatgacgtctgagcttt

SEQ ID NO: 3643991 - DNA, 25 bp, Homo sapien
atcattggctcttcggtgtctgctg

SEQ ID NO: 3643992 - DNA, 25 bp, Homo sapien
gtatcattggctcttcggtgtctgc

SEQ ID NO: 3643993 - DNA, 25 bp, Homo sapien
tggtggtgtcctgagttaatctggt

SEQ ID NO: 3643994 - DNA, 25 bp, Homo sapien
tggtgtcctgagttaatctggtcca

SEQ ID NO: 3643995 - DNA, 25 bp, Homo sapien
tcctgagttaatctggtccagctgc

SEQ ID NO: 3643996 - DNA, 25 bp, Homo sapien
gttaatctggtccagctgcggtatt

SEQ ID NO: 3643997 - DNA, 25 bp, Homo sapien
tacagttgtgtggacagtgttgtgt

SEQ ID NO: 3643998 - DNA, 25 bp, Homo sapien
ctgaggagcaggtaagatcgtgtgg

SEQ ID NO: 3643999 - DNA, 25 bp, Homo sapien
tatttacagttgtgtggacagtgtt

SEQ ID NO: 3644000 - DNA, 25 bp, Homo sapien
gcatatttacagttgtgtggacagt

SEQ ID NO: 3644001 - DNA, 25 bp, Homo sapien
tggtaaatcagttgctgctccagaa

SEQ ID NO: 3644002 - DNA, 25 bp, Homo sapien
tgtttcctggtaaatcagttgctgc

SEQ ID NO: 3644003 - DNA, 25 bp, Homo sapien
tcctggtaaatcagttgctgctcca

SEQ ID NO: 3644004 - DNA, 25 bp, Homo sapien
tttcctggtaaatcagttgctgctc

SEQ ID NO: 3644005 - DNA, 25 bp, Homo sapien
tctgccctctacagactcgagatcc

SEQ ID NO: 3644006 - DNA, 25 bp, Homo sapien
cgatctgccctctacagactcgaga

SEQ ID NO: 3644007 - DNA, 25 bp, Homo sapien
gatctgccctctacagactcgagat

SEQ ID NO: 3644008 - DNA, 25 bp, Homo sapien
cacgatctgccctctacagactcga

SEQ ID NO: 3644009 - DNA, 25 bp, Homo sapien
tgggaaaaagccactacgaacgcat

SEQ ID NO: 3644010 - DNA, 25 bp, Homo sapien
tacgaacgcattcagcaaattgcag

SEQ ID NO: 3644011 - DNA, 25 bp, Homo sapien
aagccactacgaacgcattcagcaa

SEQ ID NO: 3644012 - DNA, 25 bp, Homo sapien
ttgctgggaaaaagccactacgaac

SEQ ID NO: 3644013 - DNA, 25 bp, Homo sapien
cattaccgtcaggccagaaggtgtc

SEQ ID NO: 3644014 - DNA, 25 bp, Homo sapien
taccgtcaggccagaaggtgtcttt

SEQ ID NO: 3644015 - DNA, 25 bp, Homo sapien
cgtcaggccagaaggtgtctttcct

SEQ ID NO: 3644016 - DNA, 25 bp, Homo sapien
ttaccgtcaggccagaaggtgtctt

SEQ ID NO: 3644017 - DNA, 25 bp, Homo sapien
ccgcagagtaacctgcagagcgcag

SEQ ID NO: 3644018 - DNA, 25 bp, Homo sapien
agcagggcgagggagcttggcccgc

SEQ ID NO: 3644019 - DNA, 25 bp, Homo sapien
gagcgcagaactggcacttgatcat

SEQ ID NO: 3644020 - DNA, 25 bp, Homo sapien
gagcttggcccgcagagtaacctgc

SEQ ID NO: 3644021 - DNA, 25 bp, Homo sapien
tgcctccaaacctgtaactgtctct

SEQ ID NO: 3644022 - DNA, 25 bp, Homo sapien
caaacaccgtttggtcatggtcaag

SEQ ID NO: 3644023 - DNA, 25 bp, Homo sapien
gatggaataacagagattaaaccgc

SEQ ID NO: 3644024 - DNA, 25 bp, Homo sapien
gattaaaccgcaattgcaggatagc

SEQ ID NO: 3644025 - DNA, 25 bp, Homo sapien
tgattgtatcatgcagaatccaaag

SEQ ID NO: 3644026 - DNA, 25 bp, Homo sapien
tagatggttccaagggagcagagcc

SEQ ID NO: 3644027 - DNA, 25 bp, Homo sapien
ctacgaataccccaatctccaataa

SEQ ID NO: 3644028 - DNA, 25 bp, Homo sapien
gagctcatctttggtgtgccccagg

SEQ ID NO: 3644029 - DNA, 25 bp, Homo sapien
caaagcagtaacagaggaccctagt

SEQ ID NO: 3644030 - DNA, 25 bp, Homo sapien
gatttttgcatggatcgtcatagcc

SEQ ID NO: 3644031 - DNA, 25 bp, Homo sapien
ggaccctagtgaaggctgaccgcat

SEQ ID NO: 3644032 - DNA, 25 bp, Homo sapien
cagctctctgcgatgtcatttacca

SEQ ID NO: 3644033 - DNA, 25 bp, Homo sapien
tcaagcccttcagtcgctgcagaac

SEQ ID NO: 3644034 - DNA, 25 bp, Homo sapien
ctcaagcccttcagtcgctgcagaa

SEQ ID NO: 3644035 - DNA, 25 bp, Homo sapien
ctactcaagcccttcagtcgctgca

SEQ ID NO: 3644036 - DNA, 25 bp, Homo sapien
tactcaagcccttcagtcgctgcag

SEQ ID NO: 3644037 - DNA, 25 bp, Homo sapien
ctctttgtgtgtctttgagaatgtc

SEQ ID NO: 3644038 - DNA, 25 bp, Homo sapien
tgatgatgcagtccctctttgtgtg

SEQ ID NO: 3644039 - DNA, 25 bp, Homo sapien
ctggagtgatgatgcagtccctctt

SEQ ID NO: 3644040 - DNA, 25 bp, Homo sapien
tctgagctgctggagtgatgatgca

SEQ ID NO: 3644041 - DNA, 25 bp, Homo sapien
cagtaaccaaggactgggctgcagc

SEQ ID NO: 3644042 - DNA, 25 bp, Homo sapien
tcaccctgaaggctcagtaaccaag

SEQ ID NO: 3644043 - DNA, 25 bp, Homo sapien
tgcagtgtaggaagagggtccagga

SEQ ID NO: 3644044 - DNA, 25 bp, Homo sapien
cagcagaagcttgcagtgtaggaag

SEQ ID NO: 3644045 - DNA, 25 bp, Homo sapien
ctggtcgatcaggcttccattcatc

SEQ ID NO: 3644046 - DNA, 25 bp, Homo sapien
gtcgatcaggcttccattcatcctc

SEQ ID NO: 3644047 - DNA, 25 bp, Homo sapien
gcttccattcatcctccaacctcat

SEQ ID NO: 3644048 - DNA, 25 bp, Homo sapien
ggcttccattcatcctccaacctca

SEQ ID NO: 3644049 - DNA, 25 bp, Homo sapien
ggagaaataggtctgcttcatgtcc

SEQ ID NO: 3644050 - DNA, 25 bp, Homo sapien
ttcatgtcctcacgcttgcttgcgg

SEQ ID NO: 3644051 - DNA, 25 bp, Homo sapien
tgcgggcttggaattagtcgatact

SEQ ID NO: 3644052 - DNA, 25 bp, Homo sapien
tggaattagtcgatacttgctgaac

SEQ ID NO: 3644053 - DNA, 25 bp, Homo sapien
gctttttctcagagcgctgacaaga

SEQ ID NO: 3644054 - DNA, 25 bp, Homo sapien
tgtcggcttcctatctgagtgctgg

SEQ ID NO: 3644055 - DNA, 25 bp, Homo sapien
caacaaggccgcctggtgtcggctt

SEQ ID NO: 3644056 - DNA, 25 bp, Homo sapien
gaagccctacaagcctaacaaaaga

SEQ ID NO: 3644057 - DNA, 25 bp, Homo sapien
attgcgggcgttctcactagtgcga

SEQ ID NO: 3644058 - DNA, 25 bp, Homo sapien
caattattgacacgcccaaggtgag

SEQ ID NO: 3644059 - DNA, 25 bp, Homo sapien
tctgcgattatagacgggatggagc

SEQ ID NO: 3644060 - DNA, 25 bp, Homo sapien
cttactgaataaggcattgcgggcg

SEQ ID NO: 3644061 - DNA, 25 bp, Homo sapien
caccgcatctctccaggcgaaagat

SEQ ID NO: 3644062 - DNA, 25 bp, Homo sapien
ggcaatgtggatcctgaaaccagga

SEQ ID NO: 3644063 - DNA, 25 bp, Homo sapien
ggcgaaagattgagtctacctccta

SEQ ID NO: 3644064 - DNA, 25 bp, Homo sapien
acagctgctagggtcgtggcccttc

SEQ ID NO: 3644065 - DNA, 25 bp, Homo sapien
ctgcaccatcctctgagtgacagac

SEQ ID NO: 3644066 - DNA, 25 bp, Homo sapien
cctgcaccatcctctgagtgacaga

SEQ ID NO: 3644067 - DNA, 25 bp, Homo sapien
acctgcaccatcctctgagtgacag

SEQ ID NO: 3644068 - DNA, 25 bp, Homo sapien
gttatcaggacccaggttctctttc

SEQ ID NO: 3644069 - DNA, 25 bp, Homo sapien
tccagtaaatccaatgggaagaaga

SEQ ID NO: 3644070 - DNA, 25 bp, Homo sapien
ggagtcaagatattggcagctgctt

SEQ ID NO: 3644071 - DNA, 25 bp, Homo sapien
caggtttaagtccagtaaatccaat

SEQ ID NO: 3644072 - DNA, 25 bp, Homo sapien
tttcagggactgatgtgggactcct

SEQ ID NO: 3644073 - DNA, 25 bp, Homo sapien
gtgctgtcctgctggtaccaaggct

SEQ ID NO: 3644074 - DNA, 25 bp, Homo sapien
gactcctgaactccgttgtgcgtgc

SEQ ID NO: 3644075 - DNA, 25 bp, Homo sapien
tcctgtcttggttaggtgaccttcc

SEQ ID NO: 3644076 - DNA, 25 bp, Homo sapien
gattgtgcaatgacatggcctagcc

SEQ ID NO: 3644077 - DNA, 25 bp, Homo sapien
cccaaggatagaattctatctggct

SEQ ID NO: 3644078 - DNA, 25 bp, Homo sapien
gataagacatcgtactgattgtgca

SEQ ID NO: 3644079 - DNA, 25 bp, Homo sapien
ggctttattaactctccagggatgg

SEQ ID NO: 3644080 - DNA, 25 bp, Homo sapien
ctacctttcggccatatgaaaggct

SEQ ID NO: 3644081 - DNA, 25 bp, Homo sapien
acctttcggccatatgaaaggctgg

SEQ ID NO: 3644082 - DNA, 25 bp, Homo sapien
atctctcctacctttcggccatatg

SEQ ID NO: 3644083 - DNA, 25 bp, Homo sapien
tctcctacctttcggccatatgaaa

SEQ ID NO: 3644084 - DNA, 25 bp, Homo sapien
gggccgactgtgaaggtgagcggtg

SEQ ID NO: 3644085 - DNA, 25 bp, Homo sapien
tgagcggtgtgacaactgcttgcat

SEQ ID NO: 3644086 - DNA, 25 bp, Homo sapien
ctgtgaaggtgagcggtgtgacaac

SEQ ID NO: 3644087 - DNA, 25 bp, Homo sapien
aaggtgagcggtgtgacaactgctt

SEQ ID NO: 3644088 - DNA, 25 bp, Homo sapien
cgagtagcttcagcgcgtctctgcg

SEQ ID NO: 3644089 - DNA, 25 bp, Homo sapien
ttcacgcgcagtccgcgagtagctt

SEQ ID NO: 3644090 - DNA, 25 bp, Homo sapien
tcaggcaccgcggagcttcacgttc

SEQ ID NO: 3644091 - DNA, 25 bp, Homo sapien
aaggttccgcctttcttcacgcgca

SEQ ID NO: 3644092 - DNA, 25 bp, Homo sapien
gcccaggtgaactccgatggccgcc

SEQ ID NO: 3644093 - DNA, 25 bp, Homo sapien
ccaggtgaactccgatggccgccat

SEQ ID NO: 3644094 - DNA, 25 bp, Homo sapien
cccaggtgaactccgatggccgcca

SEQ ID NO: 3644095 - DNA, 25 bp, Homo sapien
cttatagacggccacacaggctgag

SEQ ID NO: 3644096 - DNA, 25 bp, Homo sapien
cacgccgctctcaagcctgtggatg

SEQ ID NO: 3644097 - DNA, 25 bp, Homo sapien
gactttccggaggaatcgccaggcg

SEQ ID NO: 3644098 - DNA, 25 bp, Homo sapien
ctccgccgcggagtagacgactttc

SEQ ID NO: 3644099 - DNA, 25 bp, Homo sapien
ctgtggatgacccagcgccagaaaa

SEQ ID NO: 3644100 - DNA, 25 bp, Homo sapien
caacaacagctggagtaactcggtc

SEQ ID NO: 3644101 - DNA, 25 bp, Homo sapien
cggtcaccggcatcatttgcaacca

SEQ ID NO: 3644102 - DNA, 25 bp, Homo sapien
tttgcaaccacaccagcccggccat

SEQ ID NO: 3644103 - DNA, 25 bp, Homo sapien
acagctggagtaactcggtcaccgg

SEQ ID NO: 3644104 - DNA, 25 bp, Homo sapien
ggatctgctttactttcattactgt

SEQ ID NO: 3644105 - DNA, 25 bp, Homo sapien
cttctgcccaggatctgctttactt

SEQ ID NO: 3644106 - DNA, 25 bp, Homo sapien
cccaggatctgctttactttcatta

SEQ ID NO: 3644107 - DNA, 25 bp, Homo sapien
tactttgttttgctgccaatccaac

SEQ ID NO: 3644108 - DNA, 25 bp, Homo sapien
tccagcaatgtgtttgatgtctctg

SEQ ID NO: 3644109 - DNA, 25 bp, Homo sapien
taattttgcaagatataaccacggg

SEQ ID NO: 3644110 - DNA, 25 bp, Homo sapien
gcagcatgggaaactgcaattctct

SEQ ID NO: 3644111 - DNA, 25 bp, Homo sapien
tctggactatatcgatgtgagcatc

SEQ ID NO: 3644112 - DNA, 25 bp, Homo sapien
caggaagggtgtaaggataattttg

SEQ ID NO: 3644113 - DNA, 25 bp, Homo sapien
caggggaatgagagttacaggaagg

SEQ ID NO: 3644114 - DNA, 25 bp, Homo sapien
aaggccacaggggaatgagagttac

SEQ ID NO: 3644115 - DNA, 25 bp, Homo sapien
ttggcagcaagttaagtggtgctac

SEQ ID NO: 3644116 - DNA, 25 bp, Homo sapien
ctgagaagccaggtccaaggaccgc

SEQ ID NO: 3644117 - DNA, 25 bp, Homo sapien
tgagaagccaggtccaaggaccgca

SEQ ID NO: 3644118 - DNA, 25 bp, Homo sapien
gaaggtgtggggaagctctgtgtgc

SEQ ID NO: 3644119 - DNA, 25 bp, Homo sapien
ctggacagcaaggtgcaagtctgaa

SEQ ID NO: 3644120 - DNA, 25 bp, Homo sapien
ctctcaggatatctccaggatcttc

SEQ ID NO: 3644121 - DNA, 25 bp, Homo sapien
agctctgtgtgctctcaggatatct

SEQ ID NO: 3644122 - DNA, 25 bp, Homo sapien
gttggaaaggagggctaggcagctt

SEQ ID NO: 3644123 - DNA, 25 bp, Homo sapien
tgtgggttggaaaggagggctaggc

SEQ ID NO: 3644124 - DNA, 25 bp, Homo sapien
tgggttggaaaggagggctaggcag

SEQ ID NO: 3644125 - DNA, 25 bp, Homo sapien
ggttggaaaggagggctaggcagct

SEQ ID NO: 3644126 - DNA, 25 bp, Homo sapien
ctggaggcgctgaatatactctgcc

SEQ ID NO: 3644127 - DNA, 25 bp, Homo sapien
gaagagttcgtgtctcctgtctgga

SEQ ID NO: 3644128 - DNA, 25 bp, Homo sapien
catacttgtggcatgggcaacatag

SEQ ID NO: 3644129 - DNA, 25 bp, Homo sapien
aacttggagcggcactgacgttcgg

SEQ ID NO: 3644130 - DNA, 25 bp, Homo sapien
cagtcactatctgatttcggagaag

SEQ ID NO: 3644131 - DNA, 25 bp, Homo sapien
tgattttagaatgccggttccctct

SEQ ID NO: 3644132 - DNA, 25 bp, Homo sapien
gaggccactaagttctgatcacagt

SEQ ID NO: 3644133 - DNA, 25 bp, Homo sapien
ccattaagttgtctgggtcagtcac

SEQ ID NO: 3644134 - DNA, 25 bp, Homo sapien
gtcactggtttctcgtatccggtca

SEQ ID NO: 3644135 - DNA, 25 bp, Homo sapien
tgcacccgaggattcatcccaggag

SEQ ID NO: 3644136 - DNA, 25 bp, Homo sapien
tagctgacaatcctcatctgatgcc

SEQ ID NO: 3644137 - DNA, 25 bp, Homo sapien
tatccggtcactgattcttagctga

SEQ ID NO: 3644138 - DNA, 25 bp, Homo sapien
tgtagctgggggtcccttgagagca

SEQ ID NO: 3644139 - DNA, 25 bp, Homo sapien
ctgtagctgggggtcccttgagagc

SEQ ID NO: 3644140 - DNA, 25 bp, Homo sapien
tagctgggggtcccttgagagcacc

SEQ ID NO: 3644141 - DNA, 25 bp, Homo sapien
gtagctgggggtcccttgagagcac

SEQ ID NO: 3644142 - DNA, 25 bp, Homo sapien
aactcggctgcgatagtcctggcca

SEQ ID NO: 3644143 - DNA, 25 bp, Homo sapien
gctgttgccaaacgtctgactgcga

SEQ ID NO: 3644144 - DNA, 25 bp, Homo sapien
ttgagagttctcgtgccaatcgcct

SEQ ID NO: 3644145 - DNA, 25 bp, Homo sapien
gggagcaactgcacctctgaaaagg

SEQ ID NO: 3644146 - DNA, 25 bp, Homo sapien
tattcgaaatcaacctctgaagcaa

SEQ ID NO: 3644147 - DNA, 25 bp, Homo sapien
ctagcttttggtattcgaaatcaac

SEQ ID NO: 3644148 - DNA, 25 bp, Homo sapien
ttttcaaggcctagctgaaaagcac

SEQ ID NO: 3644149 - DNA, 25 bp, Homo sapien
caacctctgaagcaatttttcaagg

SEQ ID NO: 3644150 - DNA, 25 bp, Homo sapien
tctaccagtttaggaagcagagcct

SEQ ID NO: 3644151 - DNA, 25 bp, Homo sapien
tatagtcgtctaatgagccacacag

SEQ ID NO: 3644152 - DNA, 25 bp, Homo sapien
ggatgaaccagctgtctagaacgtg

SEQ ID NO: 3644153 - DNA, 25 bp, Homo sapien
tataaaccgtaacacacaatggcgg

SEQ ID NO: 3644154 - DNA, 25 bp, Homo sapien
tactcatggttctgggtacgctccc

SEQ ID NO: 3644155 - DNA, 25 bp, Homo sapien
gaggaggctcatctgttcacggcta

SEQ ID NO: 3644156 - DNA, 25 bp, Homo sapien
taaatcggaagtgtggcttatcacc

SEQ ID NO: 3644157 - DNA, 25 bp, Homo sapien
gaatacaggcctaactctccgtcaa

SEQ ID NO: 3644158 - DNA, 25 bp, Homo sapien
tttccgcgatgtatttctgagcttg

SEQ ID NO: 3644159 - DNA, 25 bp, Homo sapien
atgtatttctgagcttgtggatcac

SEQ ID NO: 3644160 - DNA, 25 bp, Homo sapien
atttctgagcttgtggatcactgga

SEQ ID NO: 3644161 - DNA, 25 bp, Homo sapien
tccgcgatgtatttctgagcttgtg

SEQ ID NO: 3644162 - DNA, 25 bp, Homo sapien
ctggcaacatcttctgggttaacaa

SEQ ID NO: 3644163 - DNA, 25 bp, Homo sapien
tatctatttcatatcgtaatttccc

SEQ ID NO: 3644164 - DNA, 25 bp, Homo sapien
catcttctgggttaacaaattttgt

SEQ ID NO: 3644165 - DNA, 25 bp, Homo sapien
cattttactaaatatcagtctggca

SEQ ID NO: 3644166 - DNA, 25 bp, Homo sapien
gaaatcatgcagcacttcttgtggt

SEQ ID NO: 3644167 - DNA, 25 bp, Homo sapien
ggctcttaggcttcagtatcaacca

SEQ ID NO: 3644168 - DNA, 25 bp, Homo sapien
aaccatcttctgaattagactgact

SEQ ID NO: 3644169 - DNA, 25 bp, Homo sapien
tatttggacacagaattagctttcc

SEQ ID NO: 3644170 - DNA, 25 bp, Homo sapien
gagcccaatacagaatgtgccgttt

SEQ ID NO: 3644171 - DNA, 25 bp, Homo sapien
caaacgggacagtaataactacatc

SEQ ID NO: 3644172 - DNA, 25 bp, Homo sapien
taactacatcatttgcatctgagcc

SEQ ID NO: 3644173 - DNA, 25 bp, Homo sapien
tctccaaaatcaaacgggacagtaa

SEQ ID NO: 3644174 - DNA, 25 bp, Homo sapien
ctctgagagtctaggacaggtgtcc

SEQ ID NO: 3644175 - DNA, 25 bp, Homo sapien
ggtgtcctgtcttcatgctatccag

SEQ ID NO: 3644176 - DNA, 25 bp, Homo sapien
gcaaaaagcacacgtactgaataag

SEQ ID NO: 3644177 - DNA, 25 bp, Homo sapien
taaaattgtaatgttcagagcccat

SEQ ID NO: 3644178 - DNA, 25 bp, Homo sapien
aattccataagcaagaagagctgca

SEQ ID NO: 3644179 - DNA, 25 bp, Homo sapien
cagacggttcgtgaattaatcgcaa

SEQ ID NO: 3644180 - DNA, 25 bp, Homo sapien
cagtaggggagtcttgtccaattcc

SEQ ID NO: 3644181 - DNA, 25 bp, Homo sapien
aatcgcaaaacattaaatccagcag

SEQ ID NO: 3644182 - DNA, 25 bp, Homo sapien
caagacaagggcataaaagctcaac

SEQ ID NO: 3644183 - DNA, 25 bp, Homo sapien
tccatccagaaaggtttggaaccac

SEQ ID NO: 3644184 - DNA, 25 bp, Homo sapien
tatttgaaaaactctaggcaagagt

SEQ ID NO: 3644185 - DNA, 25 bp, Homo sapien
gccaggcctcgaactttcaaatctt

SEQ ID NO: 3644186 - DNA, 25 bp, Homo sapien
tctatagtcacttattgacaaatca

SEQ ID NO: 3644187 - DNA, 25 bp, Homo sapien
tattagaagtcacttagtttaatcc

SEQ ID NO: 3644188 - DNA, 25 bp, Homo sapien
gacaaatcaagcctagatctgagat

SEQ ID NO: 3644189 - DNA, 25 bp, Homo sapien
gaaaatctcaggtgaataactaagt

SEQ ID NO: 3644190 - DNA, 25 bp, Homo sapien
gacgctgagagataaggatgttcct

SEQ ID NO: 3644191 - DNA, 25 bp, Homo sapien
gaaatgtgcaccaccgatgttatca

SEQ ID NO: 3644192 - DNA, 25 bp, Homo sapien
gaaagaacccgatatattccactgt

SEQ ID NO: 3644193 - DNA, 25 bp, Homo sapien
actgttaacttccatgacgctgaga

SEQ ID NO: 3644194 - DNA, 25 bp, Homo sapien
gcctggacaggacataactctagat

SEQ ID NO: 3644195 - DNA, 25 bp, Homo sapien
gaaaaatccaagcacactgcactag

SEQ ID NO: 3644196 - DNA, 25 bp, Homo sapien
taaccagacagaagagcactacatg

SEQ ID NO: 3644197 - DNA, 25 bp, Homo sapien
gacggtctctttacactaagtgaaa

SEQ ID NO: 3644198 - DNA, 25 bp, Homo sapien
gtgatcaatgacttcatttaaacaa

SEQ ID NO: 3644199 - DNA, 25 bp, Homo sapien
aagtagtgatcaatgacttcattta

SEQ ID NO: 3644200 - DNA, 25 bp, Homo sapien
taagtagtgatcaatgacttcattt

SEQ ID NO: 3644201 - DNA, 25 bp, Homo sapien
atcaatgacttcatttaaacaacat

SEQ ID NO: 3644202 - DNA, 25 bp, Homo sapien
aatgagtcaagaaaacagttggcac

SEQ ID NO: 3644203 - DNA, 25 bp, Homo sapien
aagaatgtttcgctacttcagcact

SEQ ID NO: 3644204 - DNA, 25 bp, Homo sapien
tcagcactgttcgttaatttcatca

SEQ ID NO: 3644205 - DNA, 25 bp, Homo sapien
tttcatcatggctcgcgcatttcct

SEQ ID NO: 3644206 - DNA, 25 bp, Homo sapien
ctggacacattgcaatcaaaatctt

SEQ ID NO: 3644207 - DNA, 25 bp, Homo sapien
tggacacattgcaatcaaaatcttg

SEQ ID NO: 3644208 - DNA, 25 bp, Homo sapien
ggacacattgcaatcaaaatcttga

SEQ ID NO: 3644209 - DNA, 25 bp, Homo sapien
gacacattgcaatcaaaatcttgac

SEQ ID NO: 3644210 - DNA, 25 bp, Homo sapien
gtggagaacaaagaagttcaaatct

SEQ ID NO: 3644211 - DNA, 25 bp, Homo sapien
aagtggagaacaaagaagttcaaat

SEQ ID NO: 3644212 - DNA, 25 bp, Homo sapien
gagaacaaagaagttcaaatcttgc

SEQ ID NO: 3644213 - DNA, 25 bp, Homo sapien
tggagaacaaagaagttcaaatctt

SEQ ID NO: 3644214 - DNA, 25 bp, Homo sapien
tctaagagtcctctgattgcttcta

SEQ ID NO: 3644215 - DNA, 25 bp, Homo sapien
cttgttgatatcatctgctgtaaat

SEQ ID NO: 3644216 - DNA, 25 bp, Homo sapien
tccattttgatctaagagtcctctg

SEQ ID NO: 3644217 - DNA, 25 bp, Homo sapien
tgttgatatcatctgctgtaaatcc

SEQ ID NO: 3644218 - DNA, 25 bp, Homo sapien
gcactgacatgcacctatctaatcg

SEQ ID NO: 3644219 - DNA, 25 bp, Homo sapien
tgcacctatctaatcgaaggcccag

SEQ ID NO: 3644220 - DNA, 25 bp, Homo sapien
ccactgtgacactgaatgtgaatgc

SEQ ID NO: 3644221 - DNA, 25 bp, Homo sapien
gaatgtgaatgcactgacatgcacc

SEQ ID NO: 3644222 - DNA, 25 bp, Homo sapien
tttgttggtaaaagtctcacagtat

SEQ ID NO: 3644223 - DNA, 25 bp, Homo sapien
tgtttgttggtaaaagtctcacagt

SEQ ID NO: 3644224 - DNA, 25 bp, Homo sapien
caatgtttgttggtaaaagtctcac

SEQ ID NO: 3644225 - DNA, 25 bp, Homo sapien
ccaatgtttgttggtaaaagtctca

SEQ ID NO: 3644226 - DNA, 25 bp, Homo sapien
taatcagtggtcctgaagaggccac

SEQ ID NO: 3644227 - DNA, 25 bp, Homo sapien
ttggagccaagtagctaaggcactc

SEQ ID NO: 3644228 - DNA, 25 bp, Homo sapien
tctgattccccatagagacgacttg

SEQ ID NO: 3644229 - DNA, 25 bp, Homo sapien
cattagaaaaggactaagcctgggt

SEQ ID NO: 3644230 - DNA, 25 bp, Homo sapien
catctcaggagttgttaaagagggt

SEQ ID NO: 3644231 - DNA, 25 bp, Homo sapien
gggtggttaagagccagctttcttc

SEQ ID NO: 3644232 - DNA, 25 bp, Homo sapien
gagttcaagcacctgagtcaaaatg

SEQ ID NO: 3644233 - DNA, 25 bp, Homo sapien
taaggccttctaagtgagttcaagc

SEQ ID NO: 3644234 - DNA, 25 bp, Homo sapien
gggattcgagaagaccctccacaaa

SEQ ID NO: 3644235 - DNA, 25 bp, Homo sapien
tctatagctgcaccaatagggatca

SEQ ID NO: 3644236 - DNA, 25 bp, Homo sapien
aatagggatcacttcatcaggaggg

SEQ ID NO: 3644237 - DNA, 25 bp, Homo sapien
tatcataagagagtcttccaccaac

SEQ ID NO: 3644238 - DNA, 25 bp, Homo sapien
atctactggctcctgattcgtccac

SEQ ID NO: 3644239 - DNA, 25 bp, Homo sapien
aatctactggctcctgattcgtcca

SEQ ID NO: 3644240 - DNA, 25 bp, Homo sapien
gagttcttcccatcagactcataga

SEQ ID NO: 3644241 - DNA, 25 bp, Homo sapien
gaagatatgcttccaggggcttgca

SEQ ID NO: 3644242 - DNA, 25 bp, Homo sapien
tgtcttcgagctggcaaaggagtcc

SEQ ID NO: 3644243 - DNA, 25 bp, Homo sapien
ccatcagactcatagagttcaaggc

SEQ ID NO: 3644244 - DNA, 25 bp, Homo sapien
gaacagctaatatatcacgtaatcc

SEQ ID NO: 3644245 - DNA, 25 bp, Homo sapien
taagaacagctaatatatcacgtaa

SEQ ID NO: 3644246 - DNA, 25 bp, Homo sapien
taatatatcacgtaatccattttct

SEQ ID NO: 3644247 - DNA, 25 bp, Homo sapien
cagctaatatatcacgtaatccatt

SEQ ID NO: 3644248 - DNA, 25 bp, Homo sapien
cagtttcttaggttgatgatagcca

SEQ ID NO: 3644249 - DNA, 25 bp, Homo sapien
taggccaaggcaaactcaccctgat

SEQ ID NO: 3644250 - DNA, 25 bp, Homo sapien
tatttcttgaaaacccatgatgaca

SEQ ID NO: 3644251 - DNA, 25 bp, Homo sapien
ggaacttccttccagaccactaaga

SEQ ID NO: 3644252 - DNA, 25 bp, Homo sapien
tctcaatagagattgcttcacattt

SEQ ID NO: 3644253 - DNA, 25 bp, Homo sapien
ctaagatgctatctcaatagagatt

SEQ ID NO: 3644254 - DNA, 25 bp, Homo sapien
tgctatctcaatagagattgcttca

SEQ ID NO: 3644255 - DNA, 25 bp, Homo sapien
tgtgcatgtcacatgtaaagatcca

SEQ ID NO: 3644256 - DNA, 25 bp, Homo sapien
tttaatacaaacaccacttatacac

SEQ ID NO: 3644257 - DNA, 25 bp, Homo sapien
caaaaccaaatgttgatattcttgt

SEQ ID NO: 3644258 - DNA, 25 bp, Homo sapien
aatacaaacaccacttatacacaaa

SEQ ID NO: 3644259 - DNA, 25 bp, Homo sapien
tattttaatacaaacaccacttata

SEQ ID NO: 3644260 - DNA, 25 bp, Homo sapien
tatattgtagtttaataaaacatag

SEQ ID NO: 3644261 - DNA, 25 bp, Homo sapien
gatatattgtagtttaataaaacat

SEQ ID NO: 3644262 - DNA, 25 bp, Homo sapien
tgttttcagagcccaccaaggagcg

SEQ ID NO: 3644263 - DNA, 25 bp, Homo sapien
gttttcagagcccaccaaggagcgg

SEQ ID NO: 3644264 - DNA, 25 bp, Homo sapien
cttggggcagtcgccgggattccga

SEQ ID NO: 3644265 - DNA, 25 bp, Homo sapien
ggttccgctggcttggggcagtcgc

SEQ ID NO: 3644266 - DNA, 25 bp, Homo sapien
ctggagaggttccgctggcttgggg

SEQ ID NO: 3644267 - DNA, 25 bp, Homo sapien
agaggttccgctggcttggggcagt

SEQ ID NO: 3644268 - DNA, 25 bp, Homo sapien
gctccctctagagctccgggcttcg

SEQ ID NO: 3644269 - DNA, 25 bp, Homo sapien
gacaccgctccctctagagctccgg

SEQ ID NO: 3644270 - DNA, 25 bp, Homo sapien
ccccgacaccgctccctctagagct

SEQ ID NO: 3644271 - DNA, 25 bp, Homo sapien
ccctctagagctccgggcttcggaa

SEQ ID NO: 3644272 - DNA, 25 bp, Homo sapien
ctgcctgtcgggtacggttccgcag

SEQ ID NO: 3644273 - DNA, 25 bp, Homo sapien
acactgcgagatccgacacgggcag

SEQ ID NO: 3644274 - DNA, 25 bp, Homo sapien
tcgggtacggttccgcagctaccgc

SEQ ID NO: 3644275 - DNA, 25 bp, Homo sapien
ttcggcagcactcgcacactgcgag

SEQ ID NO: 3644276 - DNA, 25 bp, Homo sapien
ctttcattcaaactggcgcggtctg

SEQ ID NO: 3644277 - DNA, 25 bp, Homo sapien
gagctttcattcaaactggcgcggt

SEQ ID NO: 3644278 - DNA, 25 bp, Homo sapien
ttcattcaaactggcgcggtctgac

SEQ ID NO: 3644279 - DNA, 25 bp, Homo sapien
caaactggcgcggtctgacgggata

SEQ ID NO: 3644280 - DNA, 25 bp, Homo sapien
ctcgcgcctcggccccgaccgccgc

SEQ ID NO: 3644281 - DNA, 25 bp, Homo sapien
gcgcctcggccccgaccgccgccat

SEQ ID NO: 3644282 - DNA, 25 bp, Homo sapien
ctcctcgcgcctcggccccgaccgc

SEQ ID NO: 3644283 - DNA, 25 bp, Homo sapien
tcctcgcgcctcggccccgaccgcc

SEQ ID NO: 3644284 - DNA, 25 bp, Homo sapien
cagggaaggcgagggggccgcgctc

SEQ ID NO: 3644285 - DNA, 25 bp, Homo sapien
acagggaaggcgagggggccgcgct

SEQ ID NO: 3644286 - DNA, 25 bp, Homo sapien
gggaaggcgagggggccgcgctcca

SEQ ID NO: 3644287 - DNA, 25 bp, Homo sapien
aaggcgagggggccgcgctccagcc

SEQ ID NO: 3644288 - DNA, 25 bp, Homo sapien
ggggaaccgccacgtcgccatctgg

SEQ ID NO: 3644289 - DNA, 25 bp, Homo sapien
cgtccgcagcgtgcgtcccggagtt

SEQ ID NO: 3644290 - DNA, 25 bp, Homo sapien
gggaggataggcgtccgcagcgtgc

SEQ ID NO: 3644291 - DNA, 25 bp, Homo sapien
gaaccgccacgtcgccatctggctg

SEQ ID NO: 3644292 - DNA, 25 bp, Homo sapien
gagcgggcggagaggccacgctcca

SEQ ID NO: 3644293 - DNA, 25 bp, Homo sapien
gggccgagcgggcggagaggccacg

SEQ ID NO: 3644294 - DNA, 25 bp, Homo sapien
ccgaggccgccacgggagacgcgga

SEQ ID NO: 3644295 - DNA, 25 bp, Homo sapien
aggccgccacgggagacgcggaggg

SEQ ID NO: 3644296 - DNA, 25 bp, Homo sapien
tctccccctctgatattaaggtcat

SEQ ID NO: 3644297 - DNA, 25 bp, Homo sapien
ttatctagttgaggattcaaaacac

SEQ ID NO: 3644298 - DNA, 25 bp, Homo sapien
ggaggttcctcttatctactcaagg

SEQ ID NO: 3644299 - DNA, 25 bp, Homo sapien
aaacacaacccgcaaaggaaatgct

SEQ ID NO: 3644300 - DNA, 25 bp, Homo sapien
tctcgacagtctccagtaatgcaga

SEQ ID NO: 3644301 - DNA, 25 bp, Homo sapien
aatagaattctttactaatgaaata

SEQ ID NO: 3644302 - DNA, 25 bp, Homo sapien
ctgaagagtatcaagtgaaactagg

SEQ ID NO: 3644303 - DNA, 25 bp, Homo sapien
caagtgaaactaggcaaggcacaca

SEQ ID NO: 3644304 - DNA, 25 bp, Homo sapien
tatcaagtgaaactaggcaaggcac

SEQ ID NO: 3644305 - DNA, 25 bp, Homo sapien
gaaactaggcaaggcacacaccaag

SEQ ID NO: 3644306 - DNA, 25 bp, Homo sapien
caatcgatttacatgtgagcttttc

SEQ ID NO: 3644307 - DNA, 25 bp, Homo sapien
ccaatcgatttacatgtgagctttt

SEQ ID NO: 3644308 - DNA, 25 bp, Homo sapien
ccacctcataattgtttagattcct

SEQ ID NO: 3644309 - DNA, 25 bp, Homo sapien
aagtattccacctcataattgttta

SEQ ID NO: 3644310 - DNA, 25 bp, Homo sapien
tgacagccattcagaacatgcagcc

SEQ ID NO: 3644311 - DNA, 25 bp, Homo sapien
gaagctttctgtgacctatccaagg

SEQ ID NO: 3644312 - DNA, 25 bp, Homo sapien
tgtcaaactttctcactaggctgtg

SEQ ID NO: 3644313 - DNA, 25 bp, Homo sapien
ttttatacatctacactgcaacggg

SEQ ID NO: 3644314 - DNA, 25 bp, Homo sapien
gaccctgtctggcatcccttttcac

SEQ ID NO: 3644315 - DNA, 25 bp, Homo sapien
cctgaccatcacttacacgatggag

SEQ ID NO: 3644316 - DNA, 25 bp, Homo sapien
cacttacacgatggagacactcagg

SEQ ID NO: 3644317 - DNA, 25 bp, Homo sapien
gagaatgtgatgaaagcgatggact

SEQ ID NO: 3644318 - DNA, 25 bp, Homo sapien
gcataacatgtttgataagaggcta

SEQ ID NO: 3644319 - DNA, 25 bp, Homo sapien
caaatcagacggctatttcccagtt

SEQ ID NO: 3644320 - DNA, 25 bp, Homo sapien
gacaaaggtactgaaactgatgact

SEQ ID NO: 3644321 - DNA, 25 bp, Homo sapien
tagtcacaggttcctaacacatgaa

SEQ ID NO: 3644322 - DNA, 25 bp, Homo sapien
cagtaacgggcacttcagattttgc

SEQ ID NO: 3644323 - DNA, 25 bp, Homo sapien
aataattatgcttgtcattagagaa

SEQ ID NO: 3644324 - DNA, 25 bp, Homo sapien
tatttgtagaatctggccatccttt

SEQ ID NO: 3644325 - DNA, 25 bp, Homo sapien
cattagagaattgctgaagcagtaa

SEQ ID NO: 3644326 - DNA, 25 bp, Homo sapien
gccacgtccattgctagttcgaaag

SEQ ID NO: 3644327 - DNA, 25 bp, Homo sapien
gatgcaaagcgaatactgtgtgcct

SEQ ID NO: 3644328 - DNA, 25 bp, Homo sapien
gaaggtgggccctctaaatcaacag

SEQ ID NO: 3644329 - DNA, 25 bp, Homo sapien
tattgggacaatcaggaccacactg

SEQ ID NO: 3644330 - DNA, 25 bp, Homo sapien
catttactacgtggcaaatgaaaca

SEQ ID NO: 3644331 - DNA, 25 bp, Homo sapien
tttccaaaagtataaaccttgcatg

SEQ ID NO: 3644332 - DNA, 25 bp, Homo sapien
taaaccttgcatgtccatcatttac

SEQ ID NO: 3644333 - DNA, 25 bp, Homo sapien
tatctcttaaagagataaaaaggta

SEQ ID NO: 3644334 - DNA, 25 bp, Homo sapien
gacacgctcggcttaagaaaccaaa

SEQ ID NO: 3644335 - DNA, 25 bp, Homo sapien
gacaactccagatatgtagccatgc

SEQ ID NO: 3644336 - DNA, 25 bp, Homo sapien
tacagataattataggtgacccaat

SEQ ID NO: 3644337 - DNA, 25 bp, Homo sapien
ttattactatgtgacctgtgtgacc

SEQ ID NO: 3644338 - DNA, 25 bp, Homo sapien
gagatacgtgattcccttgttgtca

SEQ ID NO: 3644339 - DNA, 25 bp, Homo sapien
gacacattgccgtatcgagccgcat

SEQ ID NO: 3644340 - DNA, 25 bp, Homo sapien
tgtgaattcatcagactcatagtcc

SEQ ID NO: 3644341 - DNA, 25 bp, Homo sapien
tcatagtccagatcaaagagatacg

SEQ ID NO: 3644342 - DNA, 25 bp, Homo sapien
taatgtcaccctaacaagcctaatg

SEQ ID NO: 3644343 - DNA, 25 bp, Homo sapien
gaagctctctgctaatcatacacca

SEQ ID NO: 3644344 - DNA, 25 bp, Homo sapien
aaaactgtttgatggccctggatag

SEQ ID NO: 3644345 - DNA, 25 bp, Homo sapien
cagctatataactttgtggcacaca

SEQ ID NO: 3644346 - DNA, 25 bp, Homo sapien
tgaaaacattgaacacctgaagatt

SEQ ID NO: 3644347 - DNA, 25 bp, Homo sapien
gaaaacaatgctattcggggaagac

SEQ ID NO: 3644348 - DNA, 25 bp, Homo sapien
tatcgaggttatcaatgaaaacatt

SEQ ID NO: 3644349 - DNA, 25 bp, Homo sapien
gggaagacgagtatcgaggttatca

SEQ ID NO: 3644350 - DNA, 25 bp, Homo sapien
gggctgtggtcaatagaatctgaag

SEQ ID NO: 3644351 - DNA, 25 bp, Homo sapien
tgggctgtggtcaatagaatctgaa

SEQ ID NO: 3644352 - DNA, 25 bp, Homo sapien
gctgggctgtggtcaatagaatctg

SEQ ID NO: 3644353 - DNA, 25 bp, Homo sapien
ctgggctgtggtcaatagaatctga

SEQ ID NO: 3644354 - DNA, 25 bp, Homo sapien
acgctttcaaacactacgggaggca

SEQ ID NO: 3644355 - DNA, 25 bp, Homo sapien
gaggcatcggtaatacatttggcaa

SEQ ID NO: 3644356 - DNA, 25 bp, Homo sapien
taagctgtaaatagtctgccttcca

SEQ ID NO: 3644357 - DNA, 25 bp, Homo sapien
tctccgaatttgaggtgtatggcaa

SEQ ID NO: 3644358 - DNA, 25 bp, Homo sapien
gaggtactcgacacagatttccaat

SEQ ID NO: 3644359 - DNA, 25 bp, Homo sapien
taacaggcgcccttaaagtgctcca

SEQ ID NO: 3644360 - DNA, 25 bp, Homo sapien
tcaatactatgttggaagcctccca

SEQ ID NO: 3644361 - DNA, 25 bp, Homo sapien
tgttacacctgcctgaaattgagag

SEQ ID NO: 3644362 - DNA, 25 bp, Homo sapien
agatgtatcacagaagacactcagc

SEQ ID NO: 3644363 - DNA, 25 bp, Homo sapien
taaatgtttgaatagtataaactag

SEQ ID NO: 3644364 - DNA, 25 bp, Homo sapien
gcctgaagccgaagattaaatactt

SEQ ID NO: 3644365 - DNA, 25 bp, Homo sapien
aagacactcagcagtcagccacatt

SEQ ID NO: 3644366 - DNA, 25 bp, Homo sapien
tctgtgagtcattcaacattcttga

SEQ ID NO: 3644367 - DNA, 25 bp, Homo sapien
gagacaccacttaaaacaatttgca

SEQ ID NO: 3644368 - DNA, 25 bp, Homo sapien
gatgctgcatggcaatccgaccaaa

SEQ ID NO: 3644369 - DNA, 25 bp, Homo sapien
ggatccaccagactaaccagggtaa

SEQ ID NO: 3644370 - DNA, 25 bp, Homo sapien
gcagtgagacacatatacccgagga

SEQ ID NO: 3644371 - DNA, 25 bp, Homo sapien
gggatctcagtcaccaaagcttttc

SEQ ID NO: 3644372 - DNA, 25 bp, Homo sapien
ggagaaccaactactctaagcagtg

SEQ ID NO: 3644373 - DNA, 25 bp, Homo sapien
tgaagaagaagtaggaatcccagct

SEQ ID NO: 3644374 - DNA, 25 bp, Homo sapien
caggcaatcataggactcatctgtg

SEQ ID NO: 3644375 - DNA, 25 bp, Homo sapien
catgggctctatccagatgttccct

SEQ ID NO: 3644376 - DNA, 25 bp, Homo sapien
tgcttagtgcactgaacacgtggtg

SEQ ID NO: 3644377 - DNA, 25 bp, Homo sapien
tctgttatgaagcagggagtcaggc

SEQ ID NO: 3644378 - DNA, 25 bp, Homo sapien
tacaaatgcccatggatcatgaggt

SEQ ID NO: 3644379 - DNA, 25 bp, Homo sapien
cctggcacggtgagttctgggcact

SEQ ID NO: 3644380 - DNA, 25 bp, Homo sapien
actactgaggcaaggctcttcttgg

SEQ ID NO: 3644381 - DNA, 25 bp, Homo sapien
tttccactctggctgttgggaccag

SEQ ID NO: 3644382 - DNA, 25 bp, Homo sapien
gcacttaggcagatcaagtctccag

SEQ ID NO: 3644383 - DNA, 25 bp, Homo sapien
ggtagcttaaacaggaggccaggca

SEQ ID NO: 3644384 - DNA, 25 bp, Homo sapien
tcctagtgtatggtggtaccctgca

SEQ ID NO: 3644385 - DNA, 25 bp, Homo sapien
tgttttaacactccaaggaactgcc

SEQ ID NO: 3644386 - DNA, 25 bp, Homo sapien
tggatcatgtggtcagagagatcga

SEQ ID NO: 3644387 - DNA, 25 bp, Homo sapien
ggtggatcatgtggtcagagagatc

SEQ ID NO: 3644388 - DNA, 25 bp, Homo sapien
tagtcccagctattggccaggcaca

SEQ ID NO: 3644389 - DNA, 25 bp, Homo sapien
cgggtggatcatgtggtcagagaga

SEQ ID NO: 3644390 - DNA, 25 bp, Homo sapien
taggccgcaactaatctatggtttg

SEQ ID NO: 3644391 - DNA, 25 bp, Homo sapien
caattccacgactgttagtataaca

SEQ ID NO: 3644392 - DNA, 25 bp, Homo sapien
ggacacttcatataagagaactcat

SEQ ID NO: 3644393 - DNA, 25 bp, Homo sapien
tccattataggtgaacaattccacg

SEQ ID NO: 3644394 - DNA, 25 bp, Homo sapien
gaggccagcagcgaaggcattattg

SEQ ID NO: 3644395 - DNA, 25 bp, Homo sapien
tcacggtaatcccacaaggttagaa

SEQ ID NO: 3644396 - DNA, 25 bp, Homo sapien
gcattattgggatcttatttgcccc

SEQ ID NO: 3644397 - DNA, 25 bp, Homo sapien
tttgccccaagatcacgcagagatg

SEQ ID NO: 3644398 - DNA, 25 bp, Homo sapien
caaaccatcaaaggtgttgccagta

SEQ ID NO: 3644399 - DNA, 25 bp, Homo sapien
tcctggagctctaccgtgagattct

SEQ ID NO: 3644400 - DNA, 25 bp, Homo sapien
gattcttcggacactagactcacag

SEQ ID NO: 3644401 - DNA, 25 bp, Homo sapien
cagcagaatttgttgttaggtctcc

SEQ ID NO: 3644402 - DNA, 25 bp, Homo sapien
tactgggttatcctcgttccgccga

SEQ ID NO: 3644403 - DNA, 25 bp, Homo sapien
ggtgcttgcgttctctactcgggat

SEQ ID NO: 3644404 - DNA, 25 bp, Homo sapien
cagcgagaggccaagtgttgtgccc

SEQ ID NO: 3644405 - DNA, 25 bp, Homo sapien
gcgaccctcgcgtctcttagtaacg

SEQ ID NO: 3644406 - DNA, 25 bp, Homo sapien
cacttgtctatattcggtttcatcc

SEQ ID NO: 3644407 - DNA, 25 bp, Homo sapien
gaactagccatggttacagaggcct

SEQ ID NO: 3644408 - DNA, 25 bp, Homo sapien
ttttggcatgacttactgattttgg

SEQ ID NO: 3644409 - DNA, 25 bp, Homo sapien
cctgcttgttgaaatctgtacagat

SEQ ID NO: 3644410 - DNA, 25 bp, Homo sapien
tctgaaagccatctgatccggtgag

SEQ ID NO: 3644411 - DNA, 25 bp, Homo sapien
tgggacaatccttaggacagctaag

SEQ ID NO: 3644412 - DNA, 25 bp, Homo sapien
ggagctgagctacttgatatgggac

SEQ ID NO: 3644413 - DNA, 25 bp, Homo sapien
tgtcccttggcatctctgaactttc

SEQ ID NO: 3644414 - DNA, 25 bp, Homo sapien
ggaaaggaggtgttctcaagactcc

SEQ ID NO: 3644415 - DNA, 25 bp, Homo sapien
gaaaggaggtgttctcaagactcca

SEQ ID NO: 3644416 - DNA, 25 bp, Homo sapien
tagaacgtattgtcccttctctgaa

SEQ ID NO: 3644417 - DNA, 25 bp, Homo sapien
tcactttgtggacttctttgtcatc

SEQ ID NO: 3644418 - DNA, 25 bp, Homo sapien
tctgtttgttgtagtaatagaacgt

SEQ ID NO: 3644419 - DNA, 25 bp, Homo sapien
acatatcctgtctccggccaacgat

SEQ ID NO: 3644420 - DNA, 25 bp, Homo sapien
ttctcatggcttttgtgtttcacaa

SEQ ID NO: 3644421 - DNA, 25 bp, Homo sapien
cagttcttagaacaggacaaggtga

SEQ ID NO: 3644422 - DNA, 25 bp, Homo sapien
tgacaaacacatgatgtagaaggaa

SEQ ID NO: 3644423 - DNA, 25 bp, Homo sapien
gattagcagataccaattctcatgg

SEQ ID NO: 3644424 - DNA, 25 bp, Homo sapien
tcaacttctcaactctgggaggctg

SEQ ID NO: 3644425 - DNA, 25 bp, Homo sapien
tctgggaggctgagtcgctgggatc

SEQ ID NO: 3644426 - DNA, 25 bp, Homo sapien
tctgtgacccctctcaacttctcaa

SEQ ID NO: 3644427 - DNA, 25 bp, Homo sapien
tttgtctgtgacccctctcaacttc

SEQ ID NO: 3644428 - DNA, 25 bp, Homo sapien
agctgcacggttggattgtgtgaca

SEQ ID NO: 3644429 - DNA, 25 bp, Homo sapien
tcatcaagaatgtggaaatctctca

SEQ ID NO: 3644430 - DNA, 25 bp, Homo sapien
ttcaccatcatcaagaatgtggaaa

SEQ ID NO: 3644431 - DNA, 25 bp, Homo sapien
gcacggttggattgtgtgacaattc

SEQ ID NO: 3644432 - DNA, 25 bp, Homo sapien
tgcactacccagtcatcatgaatcc

SEQ ID NO: 3644433 - DNA, 25 bp, Homo sapien
tgacggctttgtagccatctgtctc

SEQ ID NO: 3644434 - DNA, 25 bp, Homo sapien
atgacggctttgtagccatctgtct

SEQ ID NO: 3644435 - DNA, 25 bp, Homo sapien
tctgtctccctctgcactacccagt

SEQ ID NO: 3644436 - DNA, 25 bp, Homo sapien
catgtatagaatgcatgctcctgac

SEQ ID NO: 3644437 - DNA, 25 bp, Homo sapien
gatgtctttcttggtccttttttgc

SEQ ID NO: 3644438 - DNA, 25 bp, Homo sapien
tgtctttcttggtccttttttgcat

SEQ ID NO: 3644439 - DNA, 25 bp, Homo sapien
ttttttgcatgtatagaatgcatgc

SEQ ID NO: 3644440 - DNA, 25 bp, Homo sapien
atagcagagtcatctctcatgcggg

SEQ ID NO: 3644441 - DNA, 25 bp, Homo sapien
agcagagtcatctctcatgcgggct

SEQ ID NO: 3644442 - DNA, 25 bp, Homo sapien
agagtcatctctcatgcgggctgcc

SEQ ID NO: 3644443 - DNA, 25 bp, Homo sapien
ctgtggacatgcagtcgcatagcag

SEQ ID NO: 3644444 - DNA, 25 bp, Homo sapien
cctgtccttgtatctggtcatggtt

SEQ ID NO: 3644445 - DNA, 25 bp, Homo sapien
ctgtccttgtatctggtcatggttc

SEQ ID NO: 3644446 - DNA, 25 bp, Homo sapien
catcgggttcacttcggccacggtt

SEQ ID NO: 3644447 - DNA, 25 bp, Homo sapien
ggctgacatcgggttcacttcggcc

SEQ ID NO: 3644448 - DNA, 25 bp, Homo sapien
ctctttccttctcaaggtgtccaag

SEQ ID NO: 3644449 - DNA, 25 bp, Homo sapien
agagccacggaatctcacaggtgtc

SEQ ID NO: 3644450 - DNA, 25 bp, Homo sapien
ttccttctcaaggtgtccaagacac

SEQ ID NO: 3644451 - DNA, 25 bp, Homo sapien
tccaatcctctttccttctcaaggt

SEQ ID NO: 3644452 - DNA, 25 bp, Homo sapien
gggtcgtagctctcgtgtcgtcctt

SEQ ID NO: 3644453 - DNA, 25 bp, Homo sapien
tatgaagaagtgatgtcagaaaacc

SEQ ID NO: 3644454 - DNA, 25 bp, Homo sapien
tcagataatggggtcgtagctctcg

SEQ ID NO: 3644455 - DNA, 25 bp, Homo sapien
aaaaggtgttcccattgagaactat

SEQ ID NO: 3644456 - DNA, 25 bp, Homo sapien
gctgtgcctgtccatgtgcctggtc

SEQ ID NO: 3644457 - DNA, 25 bp, Homo sapien
tggaggcatggaagagagacatgct

SEQ ID NO: 3644458 - DNA, 25 bp, Homo sapien
tgcctgtccatgtgcctggtcacgg

SEQ ID NO: 3644459 - DNA, 25 bp, Homo sapien
cagagtcatctcctacgcaggctgc

SEQ ID NO: 3644460 - DNA, 25 bp, Homo sapien
ctgtgtaccacgcagggaagacagt

SEQ ID NO: 3644461 - DNA, 25 bp, Homo sapien
agaaagaggcgaagaattttacaca

SEQ ID NO: 3644462 - DNA, 25 bp, Homo sapien
gaattttacacaagctctctcctga

SEQ ID NO: 3644463 - DNA, 25 bp, Homo sapien
ctcccctgtgtaccacgcagggaag

SEQ ID NO: 3644464 - DNA, 25 bp, Homo sapien
tggtgtggtggcgtcagtgatgtac

SEQ ID NO: 3644465 - DNA, 25 bp, Homo sapien
ggtggcgtcagtgatgtacgctgtg

SEQ ID NO: 3644466 - DNA, 25 bp, Homo sapien
ccaggaatggtgtggtggcgtcagt

SEQ ID NO: 3644467 - DNA, 25 bp, Homo sapien
ctgacttcagctgtggcaccacccc

SEQ ID NO: 3644468 - DNA, 25 bp, Homo sapien
agcagttgtttgcttatttgatgga

SEQ ID NO: 3644469 - DNA, 25 bp, Homo sapien
ctagcagttgtttgcttatttgatg

SEQ ID NO: 3644470 - DNA, 25 bp, Homo sapien
tgatggaacaggcattggcatgtac

SEQ ID NO: 3644471 - DNA, 25 bp, Homo sapien
tatttgatggaacaggcattggcat

SEQ ID NO: 3644472 - DNA, 25 bp, Homo sapien
agcatcatcaatagcatattcatat

SEQ ID NO: 3644473 - DNA, 25 bp, Homo sapien
cagcatcatcaatagcatattcata

SEQ ID NO: 3644474 - DNA, 25 bp, Homo sapien
gcatcatcaatagcatattcatata

SEQ ID NO: 3644475 - DNA, 25 bp, Homo sapien
ttactacccagtcatcataaatcct

SEQ ID NO: 3644476 - DNA, 25 bp, Homo sapien
gcacagttggattgtgtgacaattc

SEQ ID NO: 3644477 - DNA, 25 bp, Homo sapien
tctaattttgtctgtgagccatctc

SEQ ID NO: 3644478 - DNA, 25 bp, Homo sapien
gtgtgacaattcaccttctccaaga

SEQ ID NO: 3644479 - DNA, 25 bp, Homo sapien
atgacaacgtgaggtctcacaatag

SEQ ID NO: 3644480 - DNA, 25 bp, Homo sapien
atatgacaacgtgaggtctcacaat

SEQ ID NO: 3644481 - DNA, 25 bp, Homo sapien
tatgacaacgtgaggtctcacaata

SEQ ID NO: 3644482 - DNA, 25 bp, Homo sapien
tgacaacgtgaggtctcacaatagg

SEQ ID NO: 3644483 - DNA, 25 bp, Homo sapien
tcatggtggaaggcaaggagaagca

SEQ ID NO: 3644484 - DNA, 25 bp, Homo sapien
catggtggaaggcaaggagaagcaa

SEQ ID NO: 3644485 - DNA, 25 bp, Homo sapien
gatgaactctgagcagacaatctga

SEQ ID NO: 3644486 - DNA, 25 bp, Homo sapien
ctctgagcagacaatctgaaagatg

SEQ ID NO: 3644487 - DNA, 25 bp, Homo sapien
tgagcagacaatctgaaagatgact

SEQ ID NO: 3644488 - DNA, 25 bp, Homo sapien
gaactctgagcagacaatctgaaag

SEQ ID NO: 3644489 - DNA, 25 bp, Homo sapien
ctctgtggcgtgttgagtgctcaac

SEQ ID NO: 3644490 - DNA, 25 bp, Homo sapien
aaggcgctgactcttattgacctct

SEQ ID NO: 3644491 - DNA, 25 bp, Homo sapien
gaagtcagttcctcttgagacgaag

SEQ ID NO: 3644492 - DNA, 25 bp, Homo sapien
tcggccttatgcacacagaagagtg

SEQ ID NO: 3644493 - DNA, 25 bp, Homo sapien
tctcttaggttggtctcctctctcc

SEQ ID NO: 3644494 - DNA, 25 bp, Homo sapien
gttctcttaggttggtctcctctct

SEQ ID NO: 3644495 - DNA, 25 bp, Homo sapien
ctcttaggttggtctcctctctcca

SEQ ID NO: 3644496 - DNA, 25 bp, Homo sapien
tcttaggttggtctcctctctccat

SEQ ID NO: 3644497 - DNA, 25 bp, Homo sapien
aaggcagggtatcggagcccctggg

SEQ ID NO: 3644498 - DNA, 25 bp, Homo sapien
aaaggcagggtatcggagcccctgg

SEQ ID NO: 3644499 - DNA, 25 bp, Homo sapien
ggcagggtatcggagcccctgggat

SEQ ID NO: 3644500 - DNA, 25 bp, Homo sapien
cagggtatcggagcccctgggatgg

SEQ ID NO: 3644501 - DNA, 25 bp, Homo sapien
ggctgagaaacctctttcaaactaa

SEQ ID NO: 3644502 - DNA, 25 bp, Homo sapien
tggctgagaaacctctttcaaacta

SEQ ID NO: 3644503 - DNA, 25 bp, Homo sapien
gctgagaaacctctttcaaactaaa

SEQ ID NO: 3644504 - DNA, 25 bp, Homo sapien
ctggctgagaaacctctttcaaact

SEQ ID NO: 3644505 - DNA, 25 bp, Homo sapien
gcaaatcagcttaaaagttgcctca

SEQ ID NO: 3644506 - DNA, 25 bp, Homo sapien
aaagcaaatcagcttaaaagttgcc

SEQ ID NO: 3644507 - DNA, 25 bp, Homo sapien
cagggtttttgtataagcagttgaa

SEQ ID NO: 3644508 - DNA, 25 bp, Homo sapien
tttgtataagcagttgaaaatgttt

SEQ ID NO: 3644509 - DNA, 25 bp, Homo sapien
gcaaaatgagtggagccacctccca

SEQ ID NO: 3644510 - DNA, 25 bp, Homo sapien
gtatcttggccccatttggcaaaat

SEQ ID NO: 3644511 - DNA, 25 bp, Homo sapien
aatcatgagtatcttggccccattt

SEQ ID NO: 3644512 - DNA, 25 bp, Homo sapien
ggcaaaatgagtggagccacctccc

SEQ ID NO: 3644513 - DNA, 25 bp, Homo sapien
ggctcacgccagcacatgggtaggc

SEQ ID NO: 3644514 - DNA, 25 bp, Homo sapien
aaattagaatccagaatagaccaag

SEQ ID NO: 3644515 - DNA, 25 bp, Homo sapien
gccagcacatgggtaggctgaagca

SEQ ID NO: 3644516 - DNA, 25 bp, Homo sapien
cacgccagcacatgggtaggctgaa

SEQ ID NO: 3644517 - DNA, 25 bp, Homo sapien
caagaggttcttcaactctgctttc

SEQ ID NO: 3644518 - DNA, 25 bp, Homo sapien
tgcaaatggtttatcctggatgact

SEQ ID NO: 3644519 - DNA, 25 bp, Homo sapien
aacttcatcaactaactgggagatg

SEQ ID NO: 3644520 - DNA, 25 bp, Homo sapien
gatgtcattttcaagaggttcttca

SEQ ID NO: 3644521 - DNA, 25 bp, Homo sapien
aaaagttgtgatggccataattacc

SEQ ID NO: 3644522 - DNA, 25 bp, Homo sapien
caatacaaaggtatgcatcttacaa

SEQ ID NO: 3644523 - DNA, 25 bp, Homo sapien
tacttaccatacaaactggtgaatt

SEQ ID NO: 3644524 - DNA, 25 bp, Homo sapien
cataattacctaacatgctgtctaa

SEQ ID NO: 3644525 - DNA, 25 bp, Homo sapien
ttttccagaagctatatgacatgtg

SEQ ID NO: 3644526 - DNA, 25 bp, Homo sapien
gcaacaatttgaatgcagagacaga

SEQ ID NO: 3644527 - DNA, 25 bp, Homo sapien
ccttaaaggtgtgtatcactgtgtc

SEQ ID NO: 3644528 - DNA, 25 bp, Homo sapien
tatatccgcagttctcaaaatacgg

SEQ ID NO: 3644529 - DNA, 25 bp, Homo sapien
tgttttcttttagacctagtgcagt

SEQ ID NO: 3644530 - DNA, 25 bp, Homo sapien
gttttcttttagacctagtgcagtc

SEQ ID NO: 3644531 - DNA, 25 bp, Homo sapien
atgtacaggagttgcacttgacaaa

SEQ ID NO: 3644532 - DNA, 25 bp, Homo sapien
ttgaaacatgaacaacaacacaggc

SEQ ID NO: 3644533 - DNA, 25 bp, Homo sapien
cttgaaacatgaacaacaacacagg

SEQ ID NO: 3644534 - DNA, 25 bp, Homo sapien
tgggaatgcgatgccaggcctttga

SEQ ID NO: 3644535 - DNA, 25 bp, Homo sapien
cagcaaaatgcttgggggtgcctcc

SEQ ID NO: 3644536 - DNA, 25 bp, Homo sapien
tccaaattccataaggtaatgactt

SEQ ID NO: 3644537 - DNA, 25 bp, Homo sapien
ttcatcatctttgggaatgcgatgc

SEQ ID NO: 3644538 - DNA, 25 bp, Homo sapien
gcaacttctaacaatgttcagatct

SEQ ID NO: 3644539 - DNA, 25 bp, Homo sapien
gtgcaacttctaacaatgttcagat

SEQ ID NO: 3644540 - DNA, 25 bp, Homo sapien
tgcaacttctaacaatgttcagatc

SEQ ID NO: 3644541 - DNA, 25 bp, Homo sapien
tacagctgaagaaagtcagcggcct

SEQ ID NO: 3644542 - DNA, 25 bp, Homo sapien
cggccttgaagacagtcagaggaaa

SEQ ID NO: 3644543 - DNA, 25 bp, Homo sapien
aaaaggtggctaacattcatgaaca

SEQ ID NO: 3644544 - DNA, 25 bp, Homo sapien
aagacagtcagaggaaattattcac

SEQ ID NO: 3644545 - DNA, 25 bp, Homo sapien
agtcacaggaaagaacagccttaga

SEQ ID NO: 3644546 - DNA, 25 bp, Homo sapien
gaacagccttagatggtacgttaga

SEQ ID NO: 3644547 - DNA, 25 bp, Homo sapien
caggaaagaacagccttagatggta

SEQ ID NO: 3644548 - DNA, 25 bp, Homo sapien
ccatgtcctttgctatgtcttcaga

SEQ ID NO: 3644549 - DNA, 25 bp, Homo sapien
tactcattgcagtaactactagttg

SEQ ID NO: 3644550 - DNA, 25 bp, Homo sapien
gacattggtcaaaaatcatcgaacg

SEQ ID NO: 3644551 - DNA, 25 bp, Homo sapien
atcatcgaacgtaaatatatacacc

SEQ ID NO: 3644552 - DNA, 25 bp, Homo sapien
tacactaaatacaacttcaactaat

SEQ ID NO: 3644553 - DNA, 25 bp, Homo sapien
tcgcaggatccagaagataaaagtg

SEQ ID NO: 3644554 - DNA, 25 bp, Homo sapien
tacttctagacacttgattatgtag

SEQ ID NO: 3644555 - DNA, 25 bp, Homo sapien
ctaaaaattggatatcgatgatact

SEQ ID NO: 3644556 - DNA, 25 bp, Homo sapien
taatttctcgttcgcaggatccaga

SEQ ID NO: 3644557 - DNA, 25 bp, Homo sapien
cccataaaggagaatcaagtgagat

SEQ ID NO: 3644558 - DNA, 25 bp, Homo sapien
aagtgctgccagaagtattctttac

SEQ ID NO: 3644559 - DNA, 25 bp, Homo sapien
tgtaacgaatctccctgacagtaga

SEQ ID NO: 3644560 - DNA, 25 bp, Homo sapien
ggcttgacctttgtccccagatacg

SEQ ID NO: 3644561 - DNA, 25 bp, Homo sapien
tcattgcagaaagtaaagtcaggtg

SEQ ID NO: 3644562 - DNA, 25 bp, Homo sapien
tgtgtgacctaagaaccctgcagtt

SEQ ID NO: 3644563 - DNA, 25 bp, Homo sapien
gaaaggtaatttacacagcagcccg

SEQ ID NO: 3644564 - DNA, 25 bp, Homo sapien
tatcttttcaagtctagggtactga

SEQ ID NO: 3644565 - DNA, 25 bp, Homo sapien
ctggggtagagcatccatgcctgtg

SEQ ID NO: 3644566 - DNA, 25 bp, Homo sapien
gtagagcatccatgcctgtgggaaa

SEQ ID NO: 3644567 - DNA, 25 bp, Homo sapien
aaatagcgagagatgtggttgaaga

SEQ ID NO: 3644568 - DNA, 25 bp, Homo sapien
atgcctgtgggaaatagcgagagat

SEQ ID NO: 3644569 - DNA, 25 bp, Homo sapien
acagtttccacgcagacgccctgaa

SEQ ID NO: 3644570 - DNA, 25 bp, Homo sapien
ggctacaccgagcaccaggtcatct

SEQ ID NO: 3644571 - DNA, 25 bp, Homo sapien
cacgagaggacgagagaggctctca

SEQ ID NO: 3644572 - DNA, 25 bp, Homo sapien
ggctctcactgctgcggagtccctg

SEQ ID NO: 3644573 - DNA, 25 bp, Homo sapien
ctccctggcatggccttttgtgtcc

SEQ ID NO: 3644574 - DNA, 25 bp, Homo sapien
ctggcatggccttttgtgtccccac

SEQ ID NO: 3644575 - DNA, 25 bp, Homo sapien
tccctggcatggccttttgtgtccc

SEQ ID NO: 3644576 - DNA, 25 bp, Homo sapien
cctggcatggccttttgtgtcccca

SEQ ID NO: 3644577 - DNA, 25 bp, Homo sapien
tggaacggtatagtactccaaagaa

SEQ ID NO: 3644578 - DNA, 25 bp, Homo sapien
attggaacggtatagtactccaaag

SEQ ID NO: 3644579 - DNA, 25 bp, Homo sapien
gaacggtatagtactccaaagaata

SEQ ID NO: 3644580 - DNA, 25 bp, Homo sapien
ctaattggaacggtatagtactcca

SEQ ID NO: 3644581 - DNA, 25 bp, Homo sapien
tgcaaaatgaatactgaaagcttta

SEQ ID NO: 3644582 - DNA, 25 bp, Homo sapien
atgcaaaatgaatactgaaagcttt

SEQ ID NO: 3644583 - DNA, 25 bp, Homo sapien
aagcgctcggagcagtgcaggtttc

SEQ ID NO: 3644584 - DNA, 25 bp, Homo sapien
gatggcgaatccgtggtcacctgaa

SEQ ID NO: 3644585 - DNA, 25 bp, Homo sapien
cctgtgttaggtcactccggagagg

SEQ ID NO: 3644586 - DNA, 25 bp, Homo sapien
gaaagcggcccacagcgtcgcgcga

SEQ ID NO: 3644587 - DNA, 25 bp, Homo sapien
gccggactagaaacgcggaagctct

SEQ ID NO: 3644588 - DNA, 25 bp, Homo sapien
gaagtgttgttctgttgtccgtgtc

SEQ ID NO: 3644589 - DNA, 25 bp, Homo sapien
gctgcaatccagcagaggagccgga

SEQ ID NO: 3644590 - DNA, 25 bp, Homo sapien
gcttcggcctccagattccgcagag

SEQ ID NO: 3644591 - DNA, 25 bp, Homo sapien
gaatatccttcctacagcatttgat

SEQ ID NO: 3644592 - DNA, 25 bp, Homo sapien
gctggcaattccatgaagactaggg

SEQ ID NO: 3644593 - DNA, 25 bp, Homo sapien
catttgatacatatgcaggcataca

SEQ ID NO: 3644594 - DNA, 25 bp, Homo sapien
aataacactgtcacgtccacttttg

SEQ ID NO: 3644595 - DNA, 25 bp, Homo sapien
ccagcccagtaacacatctgaccct

SEQ ID NO: 3644596 - DNA, 25 bp, Homo sapien
agcccagtaacacatctgaccctgt

SEQ ID NO: 3644597 - DNA, 25 bp, Homo sapien
cagcccagtaacacatctgaccctg

SEQ ID NO: 3644598 - DNA, 25 bp, Homo sapien
ccaaaatgctatctagttgggcttc

SEQ ID NO: 3644599 - DNA, 25 bp, Homo sapien
tatctagttgggcttccatgcattc

SEQ ID NO: 3644600 - DNA, 25 bp, Homo sapien
gactgtatggtattaatcttctaac

SEQ ID NO: 3644601 - DNA, 25 bp, Homo sapien
tattgcaatcatagtacaattccat

SEQ ID NO: 3644602 - DNA, 25 bp, Homo sapien
tgggttgttcaacgacgtcttcaca

SEQ ID NO: 3644603 - DNA, 25 bp, Homo sapien
tctcgtcttacggagagatccccgc

SEQ ID NO: 3644604 - DNA, 25 bp, Homo sapien
gacgtcttcacaaccagaggtctcg

SEQ ID NO: 3644605 - DNA, 25 bp, Homo sapien
ccagcggatgatgtatgggttgttc

SEQ ID NO: 3644606 - DNA, 25 bp, Homo sapien
tgaagtccaatagctttaagcctgt

SEQ ID NO: 3644607 - DNA, 25 bp, Homo sapien
tgacacttgctgcttagcatctgtt

SEQ ID NO: 3644608 - DNA, 25 bp, Homo sapien
cagattctcactaatatcaacagca

SEQ ID NO: 3644609 - DNA, 25 bp, Homo sapien
gcgtctgtaggatgaagtgcatatc

SEQ ID NO: 3644610 - DNA, 25 bp, Homo sapien
tccagggctctggtaacttcgttaa

SEQ ID NO: 3644611 - DNA, 25 bp, Homo sapien
taacgccaatggcaagctgcttcct

SEQ ID NO: 3644612 - DNA, 25 bp, Homo sapien
taacttcgttaacgccaatggcaag

SEQ ID NO: 3644613 - DNA, 25 bp, Homo sapien
ggctctggtaacttcgttaacgcca

SEQ ID NO: 3644614 - DNA, 25 bp, Homo sapien
gatggctcttacttcgtccacaaag

SEQ ID NO: 3644615 - DNA, 25 bp, Homo sapien
gaacacattttaagccaatgacggg

SEQ ID NO: 3644616 - DNA, 25 bp, Homo sapien
taatgttacagaagcctgccgaccg

SEQ ID NO: 3644617 - DNA, 25 bp, Homo sapien
catggcaggcttgactgatttacac

SEQ ID NO: 3644618 - DNA, 25 bp, Homo sapien
ttcacaaactgtatgacatgacaag

SEQ ID NO: 3644619 - DNA, 25 bp, Homo sapien
ggcttctttacaaggtgtcctttca

SEQ ID NO: 3644620 - DNA, 25 bp, Homo sapien
ttcaaggcttctttacaaggtgtcc

SEQ ID NO: 3644621 - DNA, 25 bp, Homo sapien
tttcacaaactgtatgacatgacaa

SEQ ID NO: 3644622 - DNA, 25 bp, Homo sapien
tgcttcacactacaaagctgagttg

SEQ ID NO: 3644623 - DNA, 25 bp, Homo sapien
gcttcacactacaaagctgagttga

SEQ ID NO: 3644624 - DNA, 25 bp, Homo sapien
ctgtgcctttggatccccaagtcaa

SEQ ID NO: 3644625 - DNA, 25 bp, Homo sapien
ttttcaacacttcccaaatatggcc

SEQ ID NO: 3644626 - DNA, 25 bp, Homo sapien
tggatccccaagtcaacatcatcct

SEQ ID NO: 3644627 - DNA, 25 bp, Homo sapien
tttttcaacacttcccaaatatggc

SEQ ID NO: 3644628 - DNA, 25 bp, Homo sapien
tgcagtaattcagcgtatgagatgg

SEQ ID NO: 3644629 - DNA, 25 bp, Homo sapien
gaaaggtctaatgactcggaagcct

SEQ ID NO: 3644630 - DNA, 25 bp, Homo sapien
ccccaacagttggtgattctctggt

SEQ ID NO: 3644631 - DNA, 25 bp, Homo sapien
taatatagagcagtagggaatcact

SEQ ID NO: 3644632 - DNA, 25 bp, Homo sapien
aagttgcttataagccatctagaca

SEQ ID NO: 3644633 - DNA, 25 bp, Homo sapien
tataagccatctagacatggtgcca

SEQ ID NO: 3644634 - DNA, 25 bp, Homo sapien
ccttgaaagttgttagaagttgctt

SEQ ID NO: 3644635 - DNA, 25 bp, Homo sapien
tgaaagttgttagaagttgcttata

SEQ ID NO: 3644636 - DNA, 25 bp, Homo sapien
tgagacctttccctgttactagtaa

SEQ ID NO: 3644637 - DNA, 25 bp, Homo sapien
ccatgggtgcatgaaacgtgtatac

SEQ ID NO: 3644638 - DNA, 25 bp, Homo sapien
ccttgagggaagaacttactgactt

SEQ ID NO: 3644639 - DNA, 25 bp, Homo sapien
ttattactcgggatatggactgtct

SEQ ID NO: 3644640 - DNA, 25 bp, Homo sapien
ccctgaacagttctagagagcaaag

SEQ ID NO: 3644641 - DNA, 25 bp, Homo sapien
aaattctaaagctctggagtagtga

SEQ ID NO: 3644642 - DNA, 25 bp, Homo sapien
gcttttacaaggacaacagctgaac

SEQ ID NO: 3644643 - DNA, 25 bp, Homo sapien
tagtgataagacacctaccctgatc

SEQ ID NO: 3644644 - DNA, 25 bp, Homo sapien
gctccagaagaatgttttgctctag

SEQ ID NO: 3644645 - DNA, 25 bp, Homo sapien
gctttaaggcgatctgctgggcagt

SEQ ID NO: 3644646 - DNA, 25 bp, Homo sapien
gatatcatatatcctgtggctttca

SEQ ID NO: 3644647 - DNA, 25 bp, Homo sapien
tgaaatttatcaagctaagtctgcc

SEQ ID NO: 3644648 - DNA, 25 bp, Homo sapien
tacgtagaggcccatgaatcatgca

SEQ ID NO: 3644649 - DNA, 25 bp, Homo sapien
tgaactctcagaaaacatgaccgct

SEQ ID NO: 3644650 - DNA, 25 bp, Homo sapien
gaatcttggctctcaaacggtttgt

SEQ ID NO: 3644651 - DNA, 25 bp, Homo sapien
catgtcgaggcatataaggtgttct

SEQ ID NO: 3644652 - DNA, 25 bp, Homo sapien
gacacacttacatgtaggttgccta

SEQ ID NO: 3644653 - DNA, 25 bp, Homo sapien
tacaatggagtgaagaataaggagt

SEQ ID NO: 3644654 - DNA, 25 bp, Homo sapien
gcagcctagcttatgtacaaggaaa

SEQ ID NO: 3644655 - DNA, 25 bp, Homo sapien
tatgggcaaatgctgttccactttg

SEQ ID NO: 3644656 - DNA, 25 bp, Homo sapien
actggctgttggaccaagggcctca

SEQ ID NO: 3644657 - DNA, 25 bp, Homo sapien
ctcactggctgttggaccaagggcc

SEQ ID NO: 3644658 - DNA, 25 bp, Homo sapien
ggattctccatagggtagctcacag

SEQ ID NO: 3644659 - DNA, 25 bp, Homo sapien
agttctttgccatgttggattctcc

SEQ ID NO: 3644660 - DNA, 25 bp, Homo sapien
aaactggtcgggttcataagtgcca

SEQ ID NO: 3644661 - DNA, 25 bp, Homo sapien
tctgagcaccatggataggacactt

SEQ ID NO: 3644662 - DNA, 25 bp, Homo sapien
cacagatgtcgtggataggcgctgc

SEQ ID NO: 3644663 - DNA, 25 bp, Homo sapien
tgtctaccgtgacctcagggctctg

SEQ ID NO: 3644664 - DNA, 25 bp, Homo sapien
tgacagtaatgcatgcactgcacgt

SEQ ID NO: 3644665 - DNA, 25 bp, Homo sapien
gagagcaatggagctgctatccgca

SEQ ID NO: 3644666 - DNA, 25 bp, Homo sapien
cacgtgcgtctgctcaagtttaaca

SEQ ID NO: 3644667 - DNA, 25 bp, Homo sapien
tagaatcccagtgttccaatgcaga

SEQ ID NO: 3644668 - DNA, 25 bp, Homo sapien
tactatggaaggtgaatggacaggc

SEQ ID NO: 3644669 - DNA, 25 bp, Homo sapien
tatagttgctggttagtatgccaca

SEQ ID NO: 3644670 - DNA, 25 bp, Homo sapien
tcttcccaggtagtgctactatgga

SEQ ID NO: 3644671 - DNA, 25 bp, Homo sapien
cttatataggagtggaatcgtggga

SEQ ID NO: 3644672 - DNA, 25 bp, Homo sapien
tgcagcgtggacatctcctgttgct

SEQ ID NO: 3644673 - DNA, 25 bp, Homo sapien
gcgtggacatctcctgttgctttca

SEQ ID NO: 3644674 - DNA, 25 bp, Homo sapien
ctgcagcgtggacatctcctgttgc

SEQ ID NO: 3644675 - DNA, 25 bp, Homo sapien
cagcgtggacatctcctgttgcttt

SEQ ID NO: 3644676 - DNA, 25 bp, Homo sapien
taagcttgcaaaacactcttcccgt

SEQ ID NO: 3644677 - DNA, 25 bp, Homo sapien
gatacagctttccaaggtaactcat

SEQ ID NO: 3644678 - DNA, 25 bp, Homo sapien
tagaggataccaccataagcttgca

SEQ ID NO: 3644679 - DNA, 25 bp, Homo sapien
tcttcccgtttctaaatgtcgcttc

SEQ ID NO: 3644680 - DNA, 25 bp, Homo sapien
ttgcaggtagttttgatgttgtcac

SEQ ID NO: 3644681 - DNA, 25 bp, Homo sapien
cttgcaggtagttttgatgttgtca

SEQ ID NO: 3644682 - DNA, 25 bp, Homo sapien
gagacttgcaggtagttttgatgtt

SEQ ID NO: 3644683 - DNA, 25 bp, Homo sapien
gacttgcaggtagttttgatgttgt

SEQ ID NO: 3644684 - DNA, 25 bp, Homo sapien
tcttgatgcaagaaactcacagtga

SEQ ID NO: 3644685 - DNA, 25 bp, Homo sapien
ccaagaagagggttgattgtactgc

SEQ ID NO: 3644686 - DNA, 25 bp, Homo sapien
caagggtgggaaatagttcctgaca

SEQ ID NO: 3644687 - DNA, 25 bp, Homo sapien
tgacattctcctagtttaaaccaaa

SEQ ID NO: 3644688 - DNA, 25 bp, Homo sapien
cagccatgggtaagtctctcgttga

SEQ ID NO: 3644689 - DNA, 25 bp, Homo sapien
cagtttgcagcggtcgttcttcatt

SEQ ID NO: 3644690 - DNA, 25 bp, Homo sapien
tgaatagcacaacaccatctggcag

SEQ ID NO: 3644691 - DNA, 25 bp, Homo sapien
tctcgttgactttgaattaaaccag

SEQ ID NO: 3644692 - DNA, 25 bp, Homo sapien
ttcagaagatattcacattgtaatt

SEQ ID NO: 3644693 - DNA, 25 bp, Homo sapien
tgtcatgcgtctccctccagagtac

SEQ ID NO: 3644694 - DNA, 25 bp, Homo sapien
atctctttctgtcatgcgtctccct

SEQ ID NO: 3644695 - DNA, 25 bp, Homo sapien
gcatctctttctgtcatgcgtctcc

SEQ ID NO: 3644696 - DNA, 25 bp, Homo sapien
tttctgtcatgcgtctccctccaga

SEQ ID NO: 3644697 - DNA, 25 bp, Homo sapien
gaggtggcaaaactgagagcctttt

SEQ ID NO: 3644698 - DNA, 25 bp, Homo sapien
tgaatgtgccactgattctctctgg

SEQ ID NO: 3644699 - DNA, 25 bp, Homo sapien
ccatttccatggctgagaaggaatg

SEQ ID NO: 3644700 - DNA, 25 bp, Homo sapien
tctttgtggacctttcaagtgaaac

SEQ ID NO: 3644701 - DNA, 25 bp, Homo sapien
ccgcctgcaggtcacttagtagcca

SEQ ID NO: 3644702 - DNA, 25 bp, Homo sapien
gccctggatgcgacttttctctttg

SEQ ID NO: 3644703 - DNA, 25 bp, Homo sapien
gaatcacagtgcttgtggtcaagtg

SEQ ID NO: 3644704 - DNA, 25 bp, Homo sapien
ttccatggccctaaagcacaagagg

SEQ ID NO: 3644705 - DNA, 25 bp, Homo sapien
tagccttgtacatatcagcacccct

SEQ ID NO: 3644706 - DNA, 25 bp, Homo sapien
ttatagcatcagtgtacttagtaac

SEQ ID NO: 3644707 - DNA, 25 bp, Homo sapien
ttgtctctagttccttaaaggactc

SEQ ID NO: 3644708 - DNA, 25 bp, Homo sapien
tattttatagcatcagtgtacttag

SEQ ID NO: 3644709 - DNA, 25 bp, Homo sapien
gcatcagtgtacttagtaacaagtt

SEQ ID NO: 3644710 - DNA, 25 bp, Homo sapien
tagattgattaccaacctgaacacc

SEQ ID NO: 3644711 - DNA, 25 bp, Homo sapien
ctttggagccaaaattcaccagtgt

SEQ ID NO: 3644712 - DNA, 25 bp, Homo sapien
ccctggttgactcattacaataaca

SEQ ID NO: 3644713 - DNA, 25 bp, Homo sapien
tcaccagtgtaatgggtcaatgaat

SEQ ID NO: 3644714 - DNA, 25 bp, Homo sapien
ccctgtagctcttagtgagtgtatc

SEQ ID NO: 3644715 - DNA, 25 bp, Homo sapien
cggaagccctgtagctcttagtgag

SEQ ID NO: 3644716 - DNA, 25 bp, Homo sapien
ctgccggaagccctgtagctcttag

SEQ ID NO: 3644717 - DNA, 25 bp, Homo sapien
ttcccagttgctctcacctcatctc

SEQ ID NO: 3644718 - DNA, 25 bp, Homo sapien
gccactatgaccaaaggcgctgacc

SEQ ID NO: 3644719 - DNA, 25 bp, Homo sapien
ttcatgaagccttccgcagccacta

SEQ ID NO: 3644720 - DNA, 25 bp, Homo sapien
tccgcagccactatgaccaaaggcg

SEQ ID NO: 3644721 - DNA, 25 bp, Homo sapien
tcacgcctttctgtgggtcatggct

SEQ ID NO: 3644722 - DNA, 25 bp, Homo sapien
gaaaaggattgcttcaggtgaaggc

SEQ ID NO: 3644723 - DNA, 25 bp, Homo sapien
gtgaaggccggtgttgatgctctct

SEQ ID NO: 3644724 - DNA, 25 bp, Homo sapien
gggatactgggctttgcaccgcctc

SEQ ID NO: 3644725 - DNA, 25 bp, Homo sapien
gaactgcgcaaagttctggcgccga

SEQ ID NO: 3644726 - DNA, 25 bp, Homo sapien
cccaagtccctcaagatgtctgttc

SEQ ID NO: 3644727 - DNA, 25 bp, Homo sapien
gctcaaaaatttctgtcaagagttt

SEQ ID NO: 3644728 - DNA, 25 bp, Homo sapien
tgtctgttctggtctgagccgtccg

SEQ ID NO: 3644729 - DNA, 25 bp, Homo sapien
tccgtagtagtgtccagggaaagca

SEQ ID NO: 3644730 - DNA, 25 bp, Homo sapien
ctgaaactgtccaatcccccagcat

SEQ ID NO: 3644731 - DNA, 25 bp, Homo sapien
acagctgacgggctttgaaatcgct

SEQ ID NO: 3644732 - DNA, 25 bp, Homo sapien
tttgcctcagaaatagttgccgttg

SEQ ID NO: 3644733 - DNA, 25 bp, Homo sapien
ggtgacatgtgacattttgcctcag

SEQ ID NO: 3644734 - DNA, 25 bp, Homo sapien
gcttctatcctaaagtttcacagag

SEQ ID NO: 3644735 - DNA, 25 bp, Homo sapien
cgggctgcgggttctccaacaatcc

SEQ ID NO: 3644736 - DNA, 25 bp, Homo sapien
gagtggatgatttgattgataggct

SEQ ID NO: 3644737 - DNA, 25 bp, Homo sapien
gattgataggcttgctcctggccag

SEQ ID NO: 3644738 - DNA, 25 bp, Homo sapien
ttcagataaatatatgactgctgag

SEQ ID NO: 3644739 - DNA, 25 bp, Homo sapien
ccttctggcaggttagagtggatga

SEQ ID NO: 3644740 - DNA, 25 bp, Homo sapien
ggccaagaagcatccaaacttgatc

SEQ ID NO: 3644741 - DNA, 25 bp, Homo sapien
aggactgtatctcttgcgtctggca

SEQ ID NO: 3644742 - DNA, 25 bp, Homo sapien
agacacgctccaccagatcatcggt

SEQ ID NO: 3644743 - DNA, 25 bp, Homo sapien
ttagttgggactgaaagaatcaccc

SEQ ID NO: 3644744 - DNA, 25 bp, Homo sapien
agtgaccacgagaaaagcttctcca

SEQ ID NO: 3644745 - DNA, 25 bp, Homo sapien
gtgcaaattaccctcacagtgacca

SEQ ID NO: 3644746 - DNA, 25 bp, Homo sapien
taccaagcaataggaggtgcaaatt

SEQ ID NO: 3644747 - DNA, 25 bp, Homo sapien
tctccaacgcacagttgcaaatggt

SEQ ID NO: 3644748 - DNA, 25 bp, Homo sapien
cctgctggtttgaacaagtatgaaa

SEQ ID NO: 3644749 - DNA, 25 bp, Homo sapien
ctgcaatactcactgtggcaccaac

SEQ ID NO: 3644750 - DNA, 25 bp, Homo sapien
caccaacctgctggtttgaacaagt

SEQ ID NO: 3644751 - DNA, 25 bp, Homo sapien
aatactcactgtggcaccaacctgc

SEQ ID NO: 3644752 - DNA, 25 bp, Homo sapien
ctagaattttccttggcatcacccg

SEQ ID NO: 3644753 - DNA, 25 bp, Homo sapien
tctgctgtggcattgttcggcttcc

SEQ ID NO: 3644754 - DNA, 25 bp, Homo sapien
ggcattgttcggcttcctctagaat

SEQ ID NO: 3644755 - DNA, 25 bp, Homo sapien
aattttccttggcatcacccgcaag

SEQ ID NO: 3644756 - DNA, 25 bp, Homo sapien
agaagcacttcttctccaaaccagc

SEQ ID NO: 3644757 - DNA, 25 bp, Homo sapien
caggttccggttctccagaagcact

SEQ ID NO: 3644758 - DNA, 25 bp, Homo sapien
cacttcttctccaaaccagcagcag

SEQ ID NO: 3644759 - DNA, 25 bp, Homo sapien
gttccggttctccagaagcacttct

SEQ ID NO: 3644760 - DNA, 25 bp, Homo sapien
gccctgactccataactgctcattc

SEQ ID NO: 3644761 - DNA, 25 bp, Homo sapien
cctgactccataactgctcattcac

SEQ ID NO: 3644762 - DNA, 25 bp, Homo sapien
ctgactccataactgctcattcaca

SEQ ID NO: 3644763 - DNA, 25 bp, Homo sapien
tgccctgactccataactgctcatt

SEQ ID NO: 3644764 - DNA, 25 bp, Homo sapien
gcaatggtgtgaagtcctatctgtc

SEQ ID NO: 3644765 - DNA, 25 bp, Homo sapien
catctgaacacttggccttcaatag

SEQ ID NO: 3644766 - DNA, 25 bp, Homo sapien
ttcctccagaaaacttgcaccagca

SEQ ID NO: 3644767 - DNA, 25 bp, Homo sapien
tgcaccagcaatggtgtgaagtcct

SEQ ID NO: 3644768 - DNA, 25 bp, Homo sapien
gaggacacgttagagatgcccttcc

SEQ ID NO: 3644769 - DNA, 25 bp, Homo sapien
tagcgaagatagactagaggacacg

SEQ ID NO: 3644770 - DNA, 25 bp, Homo sapien
ggtcagcatcctcgtttcaacacag

SEQ ID NO: 3644771 - DNA, 25 bp, Homo sapien
tctgtatcagctaagagtcctccaa

SEQ ID NO: 3644772 - DNA, 25 bp, Homo sapien
caataatcctactgtgaagctgtcg

SEQ ID NO: 3644773 - DNA, 25 bp, Homo sapien
gcgtatccgccaccagggacattaa

SEQ ID NO: 3644774 - DNA, 25 bp, Homo sapien
gactttggcggatgtcgcccctgca

SEQ ID NO: 3644775 - DNA, 25 bp, Homo sapien
taagaaaccgcacgtgatgtcgcta

SEQ ID NO: 3644776 - DNA, 25 bp, Homo sapien
gcagacccacctgactgtggaatat

SEQ ID NO: 3644777 - DNA, 25 bp, Homo sapien
tcgcagacccacctgactgtggaat

SEQ ID NO: 3644778 - DNA, 25 bp, Homo sapien
cgcagacccacctgactgtggaata

SEQ ID NO: 3644779 - DNA, 25 bp, Homo sapien
cagtgccctgcgatgcttgttggag

SEQ ID NO: 3644780 - DNA, 25 bp, Homo sapien
gaatgtgggaccacggtctgtaccc

SEQ ID NO: 3644781 - DNA, 25 bp, Homo sapien
agctcgtgtacctggatgacgtgga

SEQ ID NO: 3644782 - DNA, 25 bp, Homo sapien
agcagaaagagcctcgagccccaga

SEQ ID NO: 3644783 - DNA, 25 bp, Homo sapien
ccccggcacgaaggaactgatgagt

SEQ ID NO: 3644784 - DNA, 25 bp, Homo sapien
taacttgctgttttcacgccgagcg

SEQ ID NO: 3644785 - DNA, 25 bp, Homo sapien
gagttccaaaagagaccagtccacg

SEQ ID NO: 3644786 - DNA, 25 bp, Homo sapien
ccaggaatttagctcccgggaggag

SEQ ID NO: 3644787 - DNA, 25 bp, Homo sapien
gctgctccggtggtgaaactgtctg

SEQ ID NO: 3644788 - DNA, 25 bp, Homo sapien
ttcctggttgcaacacccagcggtc

SEQ ID NO: 3644789 - DNA, 25 bp, Homo sapien
ggtaccaccagtaaagaatcctggc

SEQ ID NO: 3644790 - DNA, 25 bp, Homo sapien
cagcggtcccatattcagcagaaga

SEQ ID NO: 3644791 - DNA, 25 bp, Homo sapien
acctcctaaaatgccggctgcacga

SEQ ID NO: 3644792 - DNA, 25 bp, Homo sapien
gccttgagtctgcaagtcccagcgg

SEQ ID NO: 3644793 - DNA, 25 bp, Homo sapien
ccagccataggcgttgattggaaca

SEQ ID NO: 3644794 - DNA, 25 bp, Homo sapien
cagaggacactaagaggcagtggta

SEQ ID NO: 3644795 - DNA, 25 bp, Homo sapien
actcagcatcgcagtggctctgtac

SEQ ID NO: 3644796 - DNA, 25 bp, Homo sapien
aaggccgggtagcactggtcctgcc

SEQ ID NO: 3644797 - DNA, 25 bp, Homo sapien
tgtgacttttcatggagatgccagt

SEQ ID NO: 3644798 - DNA, 25 bp, Homo sapien
tctccaatggagtgcaggaaggccg

SEQ ID NO: 3644799 - DNA, 25 bp, Homo sapien
tcaactgtacgtcaataaatatggg

SEQ ID NO: 3644800 - DNA, 25 bp, Homo sapien
accttcattgtagggccagacctca

SEQ ID NO: 3644801 - DNA, 25 bp, Homo sapien
gcttttgcactacaacgcagggttg

SEQ ID NO: 3644802 - DNA, 25 bp, Homo sapien
catctgctggcatattgtctgtgag

SEQ ID NO: 3644803 - DNA, 25 bp, Homo sapien
cagtcccagggtgtgtcagataagc

SEQ ID NO: 3644804 - DNA, 25 bp, Homo sapien
tcatggatggtacccgtgtcgtgcc

SEQ ID NO: 3644805 - DNA, 25 bp, Homo sapien
gatgtgttgcccacccaaatgcatg

SEQ ID NO: 3644806 - DNA, 25 bp, Homo sapien
cacttgatctgctcgagaaggcacg

SEQ ID NO: 3644807 - DNA, 25 bp, Homo sapien
taaccagtccatagtgtggccgcag

SEQ ID NO: 3644808 - DNA, 25 bp, Homo sapien
tgaatggtcctgagatgcaggctga

SEQ ID NO: 3644809 - DNA, 25 bp, Homo sapien
gacggcgtccgtgggtcccactcat

SEQ ID NO: 3644810 - DNA, 25 bp, Homo sapien
ttcctgggattgaactaagaaccca

SEQ ID NO: 3644811 - DNA, 25 bp, Homo sapien
acctcctctgccaatctgtctggaa

SEQ ID NO: 3644812 - DNA, 25 bp, Homo sapien
tgctgtgttctggtctacctcagtt

SEQ ID NO: 3644813 - DNA, 25 bp, Homo sapien
tctttttgctgtgttctggtctacc

SEQ ID NO: 3644814 - DNA, 25 bp, Homo sapien
ctggaaacccttcctggacaggaag

SEQ ID NO: 3644815 - DNA, 25 bp, Homo sapien
accacaatgcccaaatgatttattt

SEQ ID NO: 3644816 - DNA, 25 bp, Homo sapien
acataccacaatgcccaaatgattt

SEQ ID NO: 3644817 - DNA, 25 bp, Homo sapien
taccacaatgcccaaatgatttatt

SEQ ID NO: 3644818 - DNA, 25 bp, Homo sapien
ggcacataccacaatgcccaaatga

SEQ ID NO: 3644819 - DNA, 25 bp, Homo sapien
acaccgtgcgctaaactgcccgttg

SEQ ID NO: 3644820 - DNA, 25 bp, Homo sapien
ctgcccgttgggtctacctgaggtg

SEQ ID NO: 3644821 - DNA, 25 bp, Homo sapien
taactcgagtctctgctctccaaca

SEQ ID NO: 3644822 - DNA, 25 bp, Homo sapien
gctctccaacacaccgtgcgctaaa

SEQ ID NO: 3644823 - DNA, 25 bp, Homo sapien
tgcacccagctaattttggtatttt

SEQ ID NO: 3644824 - DNA, 25 bp, Homo sapien
ctgggactacacacacgtgccactg

SEQ ID NO: 3644825 - DNA, 25 bp, Homo sapien
gactacacacacgtgccactgcacc

SEQ ID NO: 3644826 - DNA, 25 bp, Homo sapien
ggccaggatggcctcaatctactga

SEQ ID NO: 3644827 - DNA, 25 bp, Homo sapien
gcccattctgcgtgtcgtacagcta

SEQ ID NO: 3644828 - DNA, 25 bp, Homo sapien
gatctgagcctcgtatatgatgaca

SEQ ID NO: 3644829 - DNA, 25 bp, Homo sapien
tccacccagggtgtagatctgagcc

SEQ ID NO: 3644830 - DNA, 25 bp, Homo sapien
gcaatgcataactcttgaaggcaca

SEQ ID NO: 3644831 - DNA, 25 bp, Homo sapien
ggtggtcagggccttgtaaatgtct

SEQ ID NO: 3644832 - DNA, 25 bp, Homo sapien
gtaaatgtctgcagtcgccacggga

SEQ ID NO: 3644833 - DNA, 25 bp, Homo sapien
tcacaggtgatttcggagctccgag

SEQ ID NO: 3644834 - DNA, 25 bp, Homo sapien
ccccaaaccggtcagctcagaggtg

SEQ ID NO: 3644835 - DNA, 25 bp, Homo sapien
tacttaggtaaagactacacactgg

SEQ ID NO: 3644836 - DNA, 25 bp, Homo sapien
tctctgatcataccaagcgaagaac

SEQ ID NO: 3644837 - DNA, 25 bp, Homo sapien
aagtagccacgcgtgatggcgcaag

SEQ ID NO: 3644838 - DNA, 25 bp, Homo sapien
tgttgattagagtggaactccgcct

SEQ ID NO: 3644839 - DNA, 25 bp, Homo sapien
aagactggttgattcatggccgggt

SEQ ID NO: 3644840 - DNA, 25 bp, Homo sapien
tcatatagacctttaaagctacatc

SEQ ID NO: 3644841 - DNA, 25 bp, Homo sapien
tctgatactacatcaagaagactgg

SEQ ID NO: 3644842 - DNA, 25 bp, Homo sapien
ttcccgagataagtacagtaatcct

SEQ ID NO: 3644843 - DNA, 25 bp, Homo sapien
catggatcatgctctatttgtgcga

SEQ ID NO: 3644844 - DNA, 25 bp, Homo sapien
gtcgagttgcacacgagacccatgc

SEQ ID NO: 3644845 - DNA, 25 bp, Homo sapien
gacccatgcccgtgatacatttatc

SEQ ID NO: 3644846 - DNA, 25 bp, Homo sapien
cagcaagaaacatacggtcgagttg

SEQ ID NO: 3644847 - DNA, 25 bp, Homo sapien
gacagttggagtgagcgtctctcca

SEQ ID NO: 3644848 - DNA, 25 bp, Homo sapien
caacagggctttagacttagagtga

SEQ ID NO: 3644849 - DNA, 25 bp, Homo sapien
gcagcagactccttttggagttcag

SEQ ID NO: 3644850 - DNA, 25 bp, Homo sapien
tggagttcagcagcgagtaagcaac

SEQ ID NO: 3644851 - DNA, 25 bp, Homo sapien
ggatgaaatgccttgatctgcacca

SEQ ID NO: 3644852 - DNA, 25 bp, Homo sapien
catttcgtggttggcgtctttggag

SEQ ID NO: 3644853 - DNA, 25 bp, Homo sapien
cccgaaataataggatgcagaaaac

SEQ ID NO: 3644854 - DNA, 25 bp, Homo sapien
gccaggaacctgtgccatttcgtgg

SEQ ID NO: 3644855 - DNA, 25 bp, Homo sapien
gggacgccccagaacaaacacacgc

SEQ ID NO: 3644856 - DNA, 25 bp, Homo sapien
ggacgccccagaacaaacacacgca

SEQ ID NO: 3644857 - DNA, 25 bp, Homo sapien
gacgccccagaacaaacacacgcag

SEQ ID NO: 3644858 - DNA, 25 bp, Homo sapien
gcgggacgccccagaacaaacacac

SEQ ID NO: 3644859 - DNA, 25 bp, Homo sapien
gcttcgtgaccccttcttggtgcag

SEQ ID NO: 3644860 - DNA, 25 bp, Homo sapien
gaaggaccaagcagaacttcagctc

SEQ ID NO: 3644861 - DNA, 25 bp, Homo sapien
gcacgcagataagtaaccagcttcg

SEQ ID NO: 3644862 - DNA, 25 bp, Homo sapien
gcactgggactgatcactgagctca

SEQ ID NO: 3644863 - DNA, 25 bp, Homo sapien
gactctaaggatcaggatgtcacac

SEQ ID NO: 3644864 - DNA, 25 bp, Homo sapien
taaaccctcttggaactatgagcag

SEQ ID NO: 3644865 - DNA, 25 bp, Homo sapien
tgagcaggcctgagtttccctcttg

SEQ ID NO: 3644866 - DNA, 25 bp, Homo sapien
tccaggctagggtgctgtgctccat

SEQ ID NO: 3644867 - DNA, 25 bp, Homo sapien
tatccttctaggaatgggagagggc

SEQ ID NO: 3644868 - DNA, 25 bp, Homo sapien
gaacacagcttgtttctcaagaccc

SEQ ID NO: 3644869 - DNA, 25 bp, Homo sapien
ggactttccagttaacttgcgctta

SEQ ID NO: 3644870 - DNA, 25 bp, Homo sapien
tcaggccccaaatgaccagatgtca

SEQ ID NO: 3644871 - DNA, 25 bp, Homo sapien
tggattacttaaccgctgagccaca

SEQ ID NO: 3644872 - DNA, 25 bp, Homo sapien
gccacaggttcttggtgtaactttc

SEQ ID NO: 3644873 - DNA, 25 bp, Homo sapien
tcagcagtgctgtttatgtgcggcg

SEQ ID NO: 3644874 - DNA, 25 bp, Homo sapien
tgtcaccgtgtcagcagcagtgacc

SEQ ID NO: 3644875 - DNA, 25 bp, Homo sapien
gatgtgtcagggtatattaagagca

SEQ ID NO: 3644876 - DNA, 25 bp, Homo sapien
gcaggcttatctccagctctgcata

SEQ ID NO: 3644877 - DNA, 25 bp, Homo sapien
gtcccttttctgtcgtgatgtgtca

SEQ ID NO: 3644878 - DNA, 25 bp, Homo sapien
tgcatactctctgataactttggca

SEQ ID NO: 3644879 - DNA, 25 bp, Homo sapien
gttcagggctgaagaactccgctct

SEQ ID NO: 3644880 - DNA, 25 bp, Homo sapien
tgttccatcgatttgctcagctgtg

SEQ ID NO: 3644881 - DNA, 25 bp, Homo sapien
ctgaagttttgtgcgtgtatgacgc

SEQ ID NO: 3644882 - DNA, 25 bp, Homo sapien
tctggcttctacagatagctgaagt

SEQ ID NO: 3644883 - DNA, 25 bp, Homo sapien
tggcatttcagatgagcgtgcatgc

SEQ ID NO: 3644884 - DNA, 25 bp, Homo sapien
ttcagatgagcgtgcatgcccacgg

SEQ ID NO: 3644885 - DNA, 25 bp, Homo sapien
catgcccacggcctgattgaatgga

SEQ ID NO: 3644886 - DNA, 25 bp, Homo sapien
cctgattgaatggagctgagctgtt

SEQ ID NO: 3644887 - DNA, 25 bp, Homo sapien
tcttgccgggggctcaggtctctgc

SEQ ID NO: 3644888 - DNA, 25 bp, Homo sapien
gggacagcgtcgaggactcctctgt

SEQ ID NO: 3644889 - DNA, 25 bp, Homo sapien
tgttgctggcgttttcaaaagggcc

SEQ ID NO: 3644890 - DNA, 25 bp, Homo sapien
actgaggcccgcagatgagcctctg

SEQ ID NO: 3644891 - DNA, 25 bp, Homo sapien
gggtcacacccagatacaatgtctc

SEQ ID NO: 3644892 - DNA, 25 bp, Homo sapien
ttgcggatctttaacactgggtgtg

SEQ ID NO: 3644893 - DNA, 25 bp, Homo sapien
gatgaaaagggctccgccctgaaag

SEQ ID NO: 3644894 - DNA, 25 bp, Homo sapien
cacaactacattaggatggcacctg

SEQ ID NO: 3644895 - DNA, 25 bp, Homo sapien
tattagaattttggctctgccactg

SEQ ID NO: 3644896 - DNA, 25 bp, Homo sapien
tctgcttgaccgaactacagtcagg

SEQ ID NO: 3644897 - DNA, 25 bp, Homo sapien
gaaccttcttctaggctcagttgtg

SEQ ID NO: 3644898 - DNA, 25 bp, Homo sapien
cactgaccaggtatgcacttttgga

SEQ ID NO: 3644899 - DNA, 25 bp, Homo sapien
gaccccacctttgctacaggttctg

SEQ ID NO: 3644900 - DNA, 25 bp, Homo sapien
gagccagttgctactctcatgcctg

SEQ ID NO: 3644901 - DNA, 25 bp, Homo sapien
ggttctgaatggtgtcaagccagga

SEQ ID NO: 3644902 - DNA, 25 bp, Homo sapien
ggaaagttatttctgcaagctgagc

SEQ ID NO: 3644903 - DNA, 25 bp, Homo sapien
gtagccatcgatggagtcaataaag

SEQ ID NO: 3644904 - DNA, 25 bp, Homo sapien
cctgttggttgtgcagacgcgtgta

SEQ ID NO: 3644905 - DNA, 25 bp, Homo sapien
gatctgtgtatagttagcagttgca

SEQ ID NO: 3644906 - DNA, 25 bp, Homo sapien
tagcagttgcatgccggcctgttgg

SEQ ID NO: 3644907 - DNA, 25 bp, Homo sapien
ggtgctcagagctaagataccaatc

SEQ ID NO: 3644908 - DNA, 25 bp, Homo sapien
cattttaaacttaggctgacttcct

SEQ ID NO: 3644909 - DNA, 25 bp, Homo sapien
gagctaagataccaatcgcattgaa

SEQ ID NO: 3644910 - DNA, 25 bp, Homo sapien
ctgtggacattttaaacttaggctg

SEQ ID NO: 3644911 - DNA, 25 bp, Homo sapien
aggagtccatgggcccaactgagca

SEQ ID NO: 3644912 - DNA, 25 bp, Homo sapien
agtccatgggcccaactgagcagat

SEQ ID NO: 3644913 - DNA, 25 bp, Homo sapien
tgagcagatgccatgtgcaattcat

SEQ ID NO: 3644914 - DNA, 25 bp, Homo sapien
ccatgggcccaactgagcagatgcc

SEQ ID NO: 3644915 - DNA, 25 bp, Homo sapien
cctctctgcggttatttattgttgc

SEQ ID NO: 3644916 - DNA, 25 bp, Homo sapien
caaggaggtctcctctaatatcctc

SEQ ID NO: 3644917 - DNA, 25 bp, Homo sapien
cagaggccacatgcatgaggcttta

SEQ ID NO: 3644918 - DNA, 25 bp, Homo sapien
caaagaattcgtagcctttcccaag

SEQ ID NO: 3644919 - DNA, 25 bp, Homo sapien
ttccccgtgatgtaagatttggctc

SEQ ID NO: 3644920 - DNA, 25 bp, Homo sapien
tgagcaatggactctgcggctgcag

SEQ ID NO: 3644921 - DNA, 25 bp, Homo sapien
gccaaaacccttacagagcaacgct

SEQ ID NO: 3644922 - DNA, 25 bp, Homo sapien
cagtggttgtgcatgggccaaaacc

SEQ ID NO: 3644923 - DNA, 25 bp, Homo sapien
caaacatcagttcagaacctctgaa

SEQ ID NO: 3644924 - DNA, 25 bp, Homo sapien
tccttgttaaggatattagaatcca

SEQ ID NO: 3644925 - DNA, 25 bp, Homo sapien
tgctgggctgtttagaatctaactc

SEQ ID NO: 3644926 - DNA, 25 bp, Homo sapien
actctccgtcactaccccttccttg

SEQ ID NO: 3644927 - DNA, 25 bp, Homo sapien
gacttctagactatgctgcaaaagc

SEQ ID NO: 3644928 - DNA, 25 bp, Homo sapien
tccagtaagagtcaagcatctcctc

SEQ ID NO: 3644929 - DNA, 25 bp, Homo sapien
tcctctgcacgggacaccagatgaa

SEQ ID NO: 3644930 - DNA, 25 bp, Homo sapien
ccagatgaaatgctctgggtcgctg

SEQ ID NO: 3644931 - DNA, 25 bp, Homo sapien
gctttccccaaaactagcctgcagt

SEQ ID NO: 3644932 - DNA, 25 bp, Homo sapien
tctatacagagcgtggagtttcagg

SEQ ID NO: 3644933 - DNA, 25 bp, Homo sapien
tcttgccgagacatatacgtgactc

SEQ ID NO: 3644934 - DNA, 25 bp, Homo sapien
caaggacaaggtcgcctgattcaga

SEQ ID NO: 3644935 - DNA, 25 bp, Homo sapien
aaataagccagacttcctaagaagc

SEQ ID NO: 3644936 - DNA, 25 bp, Homo sapien
taagaagcattttagaggtcacaca

SEQ ID NO: 3644937 - DNA, 25 bp, Homo sapien
cactccagggatccattgccactaa

SEQ ID NO: 3644938 - DNA, 25 bp, Homo sapien
cagatctctaggaaaacttgtgaaa

SEQ ID NO: 3644939 - DNA, 25 bp, Homo sapien
aaaggataacacagtcaccaaggcc

SEQ ID NO: 3644940 - DNA, 25 bp, Homo sapien
ccagattcaggagccttgtccaaag

SEQ ID NO: 3644941 - DNA, 25 bp, Homo sapien
gccttaagctcttttgatagcaaaa

SEQ ID NO: 3644942 - DNA, 25 bp, Homo sapien
gagccttgtccaaagctggatcaaa

SEQ ID NO: 3644943 - DNA, 25 bp, Homo sapien
tgaaaccctccatcatccgcccaac

SEQ ID NO: 3644944 - DNA, 25 bp, Homo sapien
gcatgaaaccctccatcatccgccc

SEQ ID NO: 3644945 - DNA, 25 bp, Homo sapien
atgaaaccctccatcatccgcccaa

SEQ ID NO: 3644946 - DNA, 25 bp, Homo sapien
catgaaaccctccatcatccgccca

SEQ ID NO: 3644947 - DNA, 25 bp, Homo sapien
cggtggtttacaagcttcgatgatg

SEQ ID NO: 3644948 - DNA, 25 bp, Homo sapien
ttccacggtggtttacaagcttcga

SEQ ID NO: 3644949 - DNA, 25 bp, Homo sapien
aagcttcgatgatgacagctggtat

SEQ ID NO: 3644950 - DNA, 25 bp, Homo sapien
agcttcgatgatgacagctggtatt

SEQ ID NO: 3644951 - DNA, 25 bp, Homo sapien
gttcacagacgcctacactttcaag

SEQ ID NO: 3644952 - DNA, 25 bp, Homo sapien
tgcacgggtgggaagaatgcaccac

SEQ ID NO: 3644953 - DNA, 25 bp, Homo sapien
tgcagccctgtgttcacagacgcct

SEQ ID NO: 3644954 - DNA, 25 bp, Homo sapien
acactttcaagtcctggggcgtgca

SEQ ID NO: 3644955 - DNA, 25 bp, Homo sapien
aactcagagggcaggcgcagctgca

SEQ ID NO: 3644956 - DNA, 25 bp, Homo sapien
gcaagttcttggtggaaggccagca

SEQ ID NO: 3644957 - DNA, 25 bp, Homo sapien
aaggccagcactcaaatccagcagg

SEQ ID NO: 3644958 - DNA, 25 bp, Homo sapien
gctttgagtgtgattggaatagtgc

SEQ ID NO: 3644959 - DNA, 25 bp, Homo sapien
ttcctttgccaacgaagcgacctga

SEQ ID NO: 3644960 - DNA, 25 bp, Homo sapien
ccaacgaagcgacctgaggcaaggt

SEQ ID NO: 3644961 - DNA, 25 bp, Homo sapien
tgagttgaatacatactccatcact

SEQ ID NO: 3644962 - DNA, 25 bp, Homo sapien
gctcacattcattggacatcctttg

SEQ ID NO: 3644963 - DNA, 25 bp, Homo sapien
tcacaaaggctgtatgcctgattcc

SEQ ID NO: 3644964 - DNA, 25 bp, Homo sapien
tagattacagtgagggttgtacaac

SEQ ID NO: 3644965 - DNA, 25 bp, Homo sapien
ttaacaggattgaggagtgactgct

SEQ ID NO: 3644966 - DNA, 25 bp, Homo sapien
gcaaacatagtggatttcaggcacc

SEQ ID NO: 3644967 - DNA, 25 bp, Homo sapien
gaaactctaagagaccattaccatt

SEQ ID NO: 3644968 - DNA, 25 bp, Homo sapien
ctctggcatgttcacaaaaagtaga

SEQ ID NO: 3644969 - DNA, 25 bp, Homo sapien
gacaaataacacattgtcaacctgg

SEQ ID NO: 3644970 - DNA, 25 bp, Homo sapien
taaacacgataaatgcatgagaaga

SEQ ID NO: 3644971 - DNA, 25 bp, Homo sapien
tccattttacaggtcaagcagccag

SEQ ID NO: 3644972 - DNA, 25 bp, Homo sapien
tatgaaggaagtgttgtctgtatat

SEQ ID NO: 3644973 - DNA, 25 bp, Homo sapien
aaggaagtgttgtctgtatatctcc

SEQ ID NO: 3644974 - DNA, 25 bp, Homo sapien
gaagtgttgtctgtatatctccatt

SEQ ID NO: 3644975 - DNA, 25 bp, Homo sapien
ggaaaacgtaccttgaatcatgaag

SEQ ID NO: 3644976 - DNA, 25 bp, Homo sapien
cacagggccaatactagacgtcagg

SEQ ID NO: 3644977 - DNA, 25 bp, Homo sapien
actgtaatacagaatggcccatgaa

SEQ ID NO: 3644978 - DNA, 25 bp, Homo sapien
ctatacaagaatgatagccacaggc

SEQ ID NO: 3644979 - DNA, 25 bp, Homo sapien
gaaaacatgtcacttgggcgtatac

SEQ ID NO: 3644980 - DNA, 25 bp, Homo sapien
ttttcaggaatcgagtcctcatggc

SEQ ID NO: 3644981 - DNA, 25 bp, Homo sapien
tagatacaattcaagggtccagcaa

SEQ ID NO: 3644982 - DNA, 25 bp, Homo sapien
ttgtaagggcttgcacaggttgcct

SEQ ID NO: 3644983 - DNA, 25 bp, Homo sapien
tcctgattccgttccttctagctag

SEQ ID NO: 3644984 - DNA, 25 bp, Homo sapien
tgctatgaagtcacatctccctgcc

SEQ ID NO: 3644985 - DNA, 25 bp, Homo sapien
taagatgtctttactccccccatat

SEQ ID NO: 3644986 - DNA, 25 bp, Homo sapien
tctatttctgctaatagccaaaata

SEQ ID NO: 3644987 - DNA, 25 bp, Homo sapien
ccatactgttttctgcgtgtcccat

SEQ ID NO: 3644988 - DNA, 25 bp, Homo sapien
cacacagtttctaattcccatactg

SEQ ID NO: 3644989 - DNA, 25 bp, Homo sapien
tcccatactgttttctgcgtgtccc

SEQ ID NO: 3644990 - DNA, 25 bp, Homo sapien
cagcacacagtttctaattcccata

SEQ ID NO: 3644991 - DNA, 25 bp, Homo sapien
tagcactcgcccattgtgctgtcgc

SEQ ID NO: 3644992 - DNA, 25 bp, Homo sapien
gcactcgcccattgtgctgtcgcat

SEQ ID NO: 3644993 - DNA, 25 bp, Homo sapien
catagcactcgcccattgtgctgtc

SEQ ID NO: 3644994 - DNA, 25 bp, Homo sapien
gttcccatagcactcgcccattgtg

SEQ ID NO: 3644995 - DNA, 25 bp, Homo sapien
gagcatgtatagtcaatgaaagttt

SEQ ID NO: 3644996 - DNA, 25 bp, Homo sapien
ttgctgaatgttcgtaggaagatac

SEQ ID NO: 3644997 - DNA, 25 bp, Homo sapien
tcataggtaacttgataggttgctg

SEQ ID NO: 3644998 - DNA, 25 bp, Homo sapien
tacagaattgtattttagaggtttc

SEQ ID NO: 3644999 - DNA, 25 bp, Homo sapien
tggctgattaggaaagaatttttgg

SEQ ID NO: 3645000 - DNA, 25 bp, Homo sapien
tgattaggaaagaatttttggcctg

SEQ ID NO: 3645001 - DNA, 25 bp, Homo sapien
ttggaattccccaattataggcagt

SEQ ID NO: 3645002 - DNA, 25 bp, Homo sapien
cttggaattccccaattataggcag

SEQ ID NO: 3645003 - DNA, 25 bp, Homo sapien
cattttctgccgctggacgcaaggt

SEQ ID NO: 3645004 - DNA, 25 bp, Homo sapien
ttcttttgccctgcgagagtccgcc

SEQ ID NO: 3645005 - DNA, 25 bp, Homo sapien
gaagctggactttctagacacgccc

SEQ ID NO: 3645006 - DNA, 25 bp, Homo sapien
tccgaactgactaaagagctgatgg

SEQ ID NO: 3645007 - DNA, 25 bp, Homo sapien
tccggtacggaaaactcgctgctgc

SEQ ID NO: 3645008 - DNA, 25 bp, Homo sapien
aggagtcggaagtggcaccagcact

SEQ ID NO: 3645009 - DNA, 25 bp, Homo sapien
tggcttgacaggcttggtctctgca

SEQ ID NO: 3645010 - DNA, 25 bp, Homo sapien
gccccaacctggcttgacaggcttg

SEQ ID NO: 3645011 - DNA, 25 bp, Homo sapien
aatcatagaagtgtacaggacctgc

SEQ ID NO: 3645012 - DNA, 25 bp, Homo sapien
cagatgaagaaagcaaggtacggct

SEQ ID NO: 3645013 - DNA, 25 bp, Homo sapien
gagacgatttcattagacccctgat

SEQ ID NO: 3645014 - DNA, 25 bp, Homo sapien
ttgaggtgcctatgacacatccaag

SEQ ID NO: 3645015 - DNA, 25 bp, Homo sapien
tcctggtatcccacagacacaccag

SEQ ID NO: 3645016 - DNA, 25 bp, Homo sapien
tcctcttcctggtatcccacagaca

SEQ ID NO: 3645017 - DNA, 25 bp, Homo sapien
tcttcctggtatcccacagacacac

SEQ ID NO: 3645018 - DNA, 25 bp, Homo sapien
gacacaccagctggaagagcagttc

SEQ ID NO: 3645019 - DNA, 25 bp, Homo sapien
caagcaaggcctttattgacagctt

SEQ ID NO: 3645020 - DNA, 25 bp, Homo sapien
ctatgaaaggcttgaggtcccagat

SEQ ID NO: 3645021 - DNA, 25 bp, Homo sapien
ggcccgttcatccactctttatgtc

SEQ ID NO: 3645022 - DNA, 25 bp, Homo sapien
ccttctatgaaaggcttgaggtccc

SEQ ID NO: 3645023 - DNA, 25 bp, Homo sapien
ccatgttgcaataaggtttgggagt

SEQ ID NO: 3645024 - DNA, 25 bp, Homo sapien
tgttgcaataaggtttgggagtgac

SEQ ID NO: 3645025 - DNA, 25 bp, Homo sapien
gtgcccatgttgcaataaggtttgg

SEQ ID NO: 3645026 - DNA, 25 bp, Homo sapien
atgtgcccatgttgcaataaggttt

SEQ ID NO: 3645027 - DNA, 25 bp, Homo sapien
caaagcctggattccagcgagggtt

SEQ ID NO: 3645028 - DNA, 25 bp, Homo sapien
cacattcctgtccaaagcctggatt

SEQ ID NO: 3645029 - DNA, 25 bp, Homo sapien
agcctggattccagcgagggttcct

SEQ ID NO: 3645030 - DNA, 25 bp, Homo sapien
cctgtccaaagcctggattccagcg

SEQ ID NO: 3645031 - DNA, 25 bp, Homo sapien
ctgtcttcaagtcccgtttctgagc

SEQ ID NO: 3645032 - DNA, 25 bp, Homo sapien
tgtcttcaagtcccgtttctgagca

SEQ ID NO: 3645033 - DNA, 25 bp, Homo sapien
aatggctgagaagtggagggataga

SEQ ID NO: 3645034 - DNA, 25 bp, Homo sapien
gctgagaagtggagggatagaagaa

SEQ ID NO: 3645035 - DNA, 25 bp, Homo sapien
gagaatggctgagaagtggagggat

SEQ ID NO: 3645036 - DNA, 25 bp, Homo sapien
ctgattgcagagagaatggctgaga

SEQ ID NO: 3645037 - DNA, 25 bp, Homo sapien
tcctttgttttgaggccacttctcc

SEQ ID NO: 3645038 - DNA, 25 bp, Homo sapien
tgaggccacttctccagtagaagtg

SEQ ID NO: 3645039 - DNA, 25 bp, Homo sapien
tttgaggccacttctccagtagaag

SEQ ID NO: 3645040 - DNA, 25 bp, Homo sapien
ttgttttgaggccacttctccagta

SEQ ID NO: 3645041 - DNA, 25 bp, Homo sapien
ctgtgaagagcaaggaccagaagtg

SEQ ID NO: 3645042 - DNA, 25 bp, Homo sapien
tcaaaaacacatctggaccaaaacc

SEQ ID NO: 3645043 - DNA, 25 bp, Homo sapien
aaaccaatagcaccaagtagtaact

SEQ ID NO: 3645044 - DNA, 25 bp, Homo sapien
ggtactggctatctggaattcatct

SEQ ID NO: 3645045 - DNA, 25 bp, Homo sapien
ggctaagattgagggtcaactggtt

SEQ ID NO: 3645046 - DNA, 25 bp, Homo sapien
tattcaaagtgtacagccaaagtgg

SEQ ID NO: 3645047 - DNA, 25 bp, Homo sapien
aatgacatgatttagcaaggagcca

SEQ ID NO: 3645048 - DNA, 25 bp, Homo sapien
taggtgccatgctgcatggtggatt

SEQ ID NO: 3645049 - DNA, 25 bp, Homo sapien
caaggagccaatgtcttggtagtga

SEQ ID NO: 3645050 - DNA, 25 bp, Homo sapien
cctgtgaggatcacaccaatggaaa

SEQ ID NO: 3645051 - DNA, 25 bp, Homo sapien
tctctgttaagcaattgcaattatt

SEQ ID NO: 3645052 - DNA, 25 bp, Homo sapien
tcttggtccctaatgtgcttttgac

SEQ ID NO: 3645053 - DNA, 25 bp, Homo sapien
gataacaaatggatactcttggtcc

SEQ ID NO: 3645054 - DNA, 25 bp, Homo sapien
aatgtgcttttgactacagattctg

SEQ ID NO: 3645055 - DNA, 25 bp, Homo sapien
tcactttcattaggagccatgtttt

SEQ ID NO: 3645056 - DNA, 25 bp, Homo sapien
cctcaatcagtatttctacattcac

SEQ ID NO: 3645057 - DNA, 25 bp, Homo sapien
cactttcattaggagccatgttttc

SEQ ID NO: 3645058 - DNA, 25 bp, Homo sapien
gcggtcctcaatcagtatttctaca

SEQ ID NO: 3645059 - DNA, 25 bp, Homo sapien
gcacccaccgagtctggagcaatgc

SEQ ID NO: 3645060 - DNA, 25 bp, Homo sapien
cccaccgagtctggagcaatgccag

SEQ ID NO: 3645061 - DNA, 25 bp, Homo sapien
acccaccgagtctggagcaatgcca

SEQ ID NO: 3645062 - DNA, 25 bp, Homo sapien
gggcacccaccgagtctggagcaat

SEQ ID NO: 3645063 - DNA, 25 bp, Homo sapien
tcttgctcttcaatggaattccagc

SEQ ID NO: 3645064 - DNA, 25 bp, Homo sapien
tgacccaagtcacagccctcagtgt

SEQ ID NO: 3645065 - DNA, 25 bp, Homo sapien
cagcttgcagctgcttgtatcttct

SEQ ID NO: 3645066 - DNA, 25 bp, Homo sapien
gaattccagcgagttgacccaagtc

SEQ ID NO: 3645067 - DNA, 25 bp, Homo sapien
caggtatttttagatgaacaatggc

SEQ ID NO: 3645068 - DNA, 25 bp, Homo sapien
caaatgcttcaacttccttggggaa

SEQ ID NO: 3645069 - DNA, 25 bp, Homo sapien
cagctctattagaccattttccaca

SEQ ID NO: 3645070 - DNA, 25 bp, Homo sapien
tagatcatgatattccacagctcta

SEQ ID NO: 3645071 - DNA, 25 bp, Homo sapien
cgctccttaattttaagacatgtgc

SEQ ID NO: 3645072 - DNA, 25 bp, Homo sapien
tgcttttgccggtgctttacttaag

SEQ ID NO: 3645073 - DNA, 25 bp, Homo sapien
tgcaagcaagaaatacggtttctgt

SEQ ID NO: 3645074 - DNA, 25 bp, Homo sapien
tttctgtactttaacatcgctcctt

SEQ ID NO: 3645075 - DNA, 25 bp, Homo sapien
ggtttctaagaccagctcttctcat

SEQ ID NO: 3645076 - DNA, 25 bp, Homo sapien
gagcatatgctacaagttcacccga

SEQ ID NO: 3645077 - DNA, 25 bp, Homo sapien
tgtctatggatacttcctcaatggc

SEQ ID NO: 3645078 - DNA, 25 bp, Homo sapien
actggaagtgtgaagtctgctactt

SEQ ID NO: 3645079 - DNA, 25 bp, Homo sapien
gacagagatcgtgactctggacaaa

SEQ ID NO: 3645080 - DNA, 25 bp, Homo sapien
tgtggacttctgtggcaacacttac

SEQ ID NO: 3645081 - DNA, 25 bp, Homo sapien
gactgtggacttctgtggcaacact

SEQ ID NO: 3645082 - DNA, 25 bp, Homo sapien
gttcttgagctttctatgagatcct

SEQ ID NO: 3645083 - DNA, 25 bp, Homo sapien
tttcaattgtggtcacaccctctcc

SEQ ID NO: 3645084 - DNA, 25 bp, Homo sapien
tttgtggcctgaatctaactggcag

SEQ ID NO: 3645085 - DNA, 25 bp, Homo sapien
gttggacgattactttgtggcctga

SEQ ID NO: 3645086 - DNA, 25 bp, Homo sapien
gaaccagttggacgattactttgtg

SEQ ID NO: 3645087 - DNA, 25 bp, Homo sapien
actgcaattggaaccagttggacga

SEQ ID NO: 3645088 - DNA, 25 bp, Homo sapien
tctctgggcttctatcttgaagatg

SEQ ID NO: 3645089 - DNA, 25 bp, Homo sapien
gggtaaattgctggaccccatgaaa

SEQ ID NO: 3645090 - DNA, 25 bp, Homo sapien
cagaagctgtcttaagatgagtggg

SEQ ID NO: 3645091 - DNA, 25 bp, Homo sapien
agatgcaaaaccagggcggcagcca

SEQ ID NO: 3645092 - DNA, 25 bp, Homo sapien
tgggaccacccaacatcgtttttga

SEQ ID NO: 3645093 - DNA, 25 bp, Homo sapien
acatcgtttttgatgttagctcctt

SEQ ID NO: 3645094 - DNA, 25 bp, Homo sapien
ggaccacccaacatcgtttttgatg

SEQ ID NO: 3645095 - DNA, 25 bp, Homo sapien
cacccaacatcgtttttgatgttag

SEQ ID NO: 3645096 - DNA, 25 bp, Homo sapien
cagagcattcagagttacgtgcaaa

SEQ ID NO: 3645097 - DNA, 25 bp, Homo sapien
tgttccaagtttggatcgaaaccat

SEQ ID NO: 3645098 - DNA, 25 bp, Homo sapien
gattgaagccaagcacgcagttaaa

SEQ ID NO: 3645099 - DNA, 25 bp, Homo sapien
aaagggattattgaataccttcaga

SEQ ID NO: 3645100 - DNA, 25 bp, Homo sapien
tcatcacaaatatgctcttcatctc

SEQ ID NO: 3645101 - DNA, 25 bp, Homo sapien
tatccccaaaaagattctcatcaca

SEQ ID NO: 3645102 - DNA, 25 bp, Homo sapien
tcaagagggaatacccatggaacca

SEQ ID NO: 3645103 - DNA, 25 bp, Homo sapien
cttgtatccttgatatgggcaggaa

SEQ ID NO: 3645104 - DNA, 25 bp, Homo sapien
gttgctgctgaaagctaaagggaga

SEQ ID NO: 3645105 - DNA, 25 bp, Homo sapien
agcttgacccatggttggacagttg

SEQ ID NO: 3645106 - DNA, 25 bp, Homo sapien
tgctgaaagctaaagggagaagtag

SEQ ID NO: 3645107 - DNA, 25 bp, Homo sapien
tgacccatggttggacagttgctgc

SEQ ID NO: 3645108 - DNA, 25 bp, Homo sapien
ggtatcactgatcctaacagcacca

SEQ ID NO: 3645109 - DNA, 25 bp, Homo sapien
ttaggtatcactgatcctaacagca

SEQ ID NO: 3645110 - DNA, 25 bp, Homo sapien
tatcactgatcctaacagcaccatc

SEQ ID NO: 3645111 - DNA, 25 bp, Homo sapien
ctaacagcaccatcagcctccgtac

SEQ ID NO: 3645112 - DNA, 25 bp, Homo sapien
gccagccaagcttgaggatgctgga

SEQ ID NO: 3645113 - DNA, 25 bp, Homo sapien
cactgactccagttgcattcagagc

SEQ ID NO: 3645114 - DNA, 25 bp, Homo sapien
cagccaagcttgaggatgctggaca

SEQ ID NO: 3645115 - DNA, 25 bp, Homo sapien
ctccagttgcattcagagctgagag

SEQ ID NO: 3645116 - DNA, 25 bp, Homo sapien
tgagtagctcattgctggcatagat

SEQ ID NO: 3645117 - DNA, 25 bp, Homo sapien
ctgggccttgagtagctcattgctg

SEQ ID NO: 3645118 - DNA, 25 bp, Homo sapien
gaataccaccagtagtttgacttgt

SEQ ID NO: 3645119 - DNA, 25 bp, Homo sapien
tggcatagattgagaataccaccag

SEQ ID NO: 3645120 - DNA, 25 bp, Homo sapien
acagaaggtcctcttgctattcttc

SEQ ID NO: 3645121 - DNA, 25 bp, Homo sapien
aatagtcaaccattgtggcaacaga

SEQ ID NO: 3645122 - DNA, 25 bp, Homo sapien
aaggtaaccaaatagtcaaccattg

SEQ ID NO: 3645123 - DNA, 25 bp, Homo sapien
ttgtggcaacagaaggtcctcttgc

SEQ ID NO: 3645124 - DNA, 25 bp, Homo sapien
ttgagaaacgtaaaactgagtgtgt

SEQ ID NO: 3645125 - DNA, 25 bp, Homo sapien
gagtttcctgacgactttcagattc

SEQ ID NO: 3645126 - DNA, 25 bp, Homo sapien
tctgtaattcatccaagtgatggtc

SEQ ID NO: 3645127 - DNA, 25 bp, Homo sapien
agtattgggtgaaataaccgctgag

SEQ ID NO: 3645128 - DNA, 25 bp, Homo sapien
gaagcgtattctgccctcactaagg

SEQ ID NO: 3645129 - DNA, 25 bp, Homo sapien
gacatgttttggtcacggtaaccca

SEQ ID NO: 3645130 - DNA, 25 bp, Homo sapien
ccagagagtggatgtaggaatctca

SEQ ID NO: 3645131 - DNA, 25 bp, Homo sapien
gctacccagggagtatcattatgga

SEQ ID NO: 3645132 - DNA, 25 bp, Homo sapien
cctgttgacccacataactgcaaag

SEQ ID NO: 3645133 - DNA, 25 bp, Homo sapien
gcctgttgacccacataactgcaaa

SEQ ID NO: 3645134 - DNA, 25 bp, Homo sapien
tgcctgttgacccacataactgcaa

SEQ ID NO: 3645135 - DNA, 25 bp, Homo sapien
tgttgacccacataactgcaaagcc

SEQ ID NO: 3645136 - DNA, 25 bp, Homo sapien
tagaggtctggaagtacctgtcact

SEQ ID NO: 3645137 - DNA, 25 bp, Homo sapien
aattcatttgcaattctaggatcac

SEQ ID NO: 3645138 - DNA, 25 bp, Homo sapien
gaagagactgtggatttgaataaag

SEQ ID NO: 3645139 - DNA, 25 bp, Homo sapien
actggtcataccaccgggtaggtag

SEQ ID NO: 3645140 - DNA, 25 bp, Homo sapien
ttgcattgcaactcatgtaaaggtg

SEQ ID NO: 3645141 - DNA, 25 bp, Homo sapien
gcagccacaggaatagcataggcag

SEQ ID NO: 3645142 - DNA, 25 bp, Homo sapien
tgttggaaacactgtcatagttgtc

SEQ ID NO: 3645143 - DNA, 25 bp, Homo sapien
actcatgtaaaggtggatgctgttg

SEQ ID NO: 3645144 - DNA, 25 bp, Homo sapien
aactcttagtgtgctggttgtctgc

SEQ ID NO: 3645145 - DNA, 25 bp, Homo sapien
tcacatcacagccagaacgaaacat

SEQ ID NO: 3645146 - DNA, 25 bp, Homo sapien
tgttaataagtttactgggacatct

SEQ ID NO: 3645147 - DNA, 25 bp, Homo sapien
ggttgtctgcttataccagctgtca

SEQ ID NO: 3645148 - DNA, 25 bp, Homo sapien
aaaatggaggtaagacataaagacg

SEQ ID NO: 3645149 - DNA, 25 bp, Homo sapien
taagacataaagacggtagggtgat

SEQ ID NO: 3645150 - DNA, 25 bp, Homo sapien
gtaagacataaagacggtagggtga

SEQ ID NO: 3645151 - DNA, 25 bp, Homo sapien
tggaggtaagacataaagacggtag

SEQ ID NO: 3645152 - DNA, 25 bp, Homo sapien
ttaagcaactctcccttgaaatgta

SEQ ID NO: 3645153 - DNA, 25 bp, Homo sapien
gcaactctcccttgaaatgtagcat

SEQ ID NO: 3645154 - DNA, 25 bp, Homo sapien
ccttgaaatgtagcataagaacata

SEQ ID NO: 3645155 - DNA, 25 bp, Homo sapien
actctcccttgaaatgtagcataag

SEQ ID NO: 3645156 - DNA, 25 bp, Homo sapien
ggtacatgtacaggaggagcttttc

SEQ ID NO: 3645157 - DNA, 25 bp, Homo sapien
atcagcaggtacatgtacaggagga

SEQ ID NO: 3645158 - DNA, 25 bp, Homo sapien
ggaggagcttttctaacacttgcat

SEQ ID NO: 3645159 - DNA, 25 bp, Homo sapien
tacaggaggagcttttctaacactt

SEQ ID NO: 3645160 - DNA, 25 bp, Homo sapien
ggatgatctgagatgggcaacaaaa

SEQ ID NO: 3645161 - DNA, 25 bp, Homo sapien
atgatctgagatgggcaacaaaaac

SEQ ID NO: 3645162 - DNA, 25 bp, Homo sapien
ctgagggagctgtagggagaaggat

SEQ ID NO: 3645163 - DNA, 25 bp, Homo sapien
agaaggatgatctgagatgggcaac

SEQ ID NO: 3645164 - DNA, 25 bp, Homo sapien
tggcactctgccacgtgccgtggct

SEQ ID NO: 3645165 - DNA, 25 bp, Homo sapien
gagagttgcaaaaggccacgtccag

SEQ ID NO: 3645166 - DNA, 25 bp, Homo sapien
gctttgatgctttacaggtgttctc

SEQ ID NO: 3645167 - DNA, 25 bp, Homo sapien
gttctctaaggcgtcgaaggcggaa

SEQ ID NO: 3645168 - DNA, 25 bp, Homo sapien
gatgtaacagccccactgcaccgcc

SEQ ID NO: 3645169 - DNA, 25 bp, Homo sapien
atgtaacagccccactgcaccgcct

SEQ ID NO: 3645170 - DNA, 25 bp, Homo sapien
agccaccagcattttcagaaagcca

SEQ ID NO: 3645171 - DNA, 25 bp, Homo sapien
gtgtaaatggagagaagccaccagc

SEQ ID NO: 3645172 - DNA, 25 bp, Homo sapien
caagaggaggaggtgtaaatggaga

SEQ ID NO: 3645173 - DNA, 25 bp, Homo sapien
ggaggtgtaaatggagagaagccac

SEQ ID NO: 3645174 - DNA, 25 bp, Homo sapien
tgagtcctgacgaaatctggctgtt

SEQ ID NO: 3645175 - DNA, 25 bp, Homo sapien
caagcaaatgggaccactttgtaag

SEQ ID NO: 3645176 - DNA, 25 bp, Homo sapien
cgaaatctggctgttataaatcctg

SEQ ID NO: 3645177 - DNA, 25 bp, Homo sapien
cctgacgaaatctggctgttataaa

SEQ ID NO: 3645178 - DNA, 25 bp, Homo sapien
cctgtgtacataggagatctgtgtt

SEQ ID NO: 3645179 - DNA, 25 bp, Homo sapien
tattgtcaatactgaaggtcctgtg

SEQ ID NO: 3645180 - DNA, 25 bp, Homo sapien
gttgagaagctacctttcgctttgg

SEQ ID NO: 3645181 - DNA, 25 bp, Homo sapien
ttcgctttggtaaggtcattgacag

SEQ ID NO: 3645182 - DNA, 25 bp, Homo sapien
tataaataacttgcatgcacaatgc

SEQ ID NO: 3645183 - DNA, 25 bp, Homo sapien
tgtgatcaaatggtaagagtaaacc

SEQ ID NO: 3645184 - DNA, 25 bp, Homo sapien
cagattctcaaggagcattgtgagg

SEQ ID NO: 3645185 - DNA, 25 bp, Homo sapien
tagatgtgatgacacatttgcctgt

SEQ ID NO: 3645186 - DNA, 25 bp, Homo sapien
ccaccacagagctgtagtacaggtt

SEQ ID NO: 3645187 - DNA, 25 bp, Homo sapien
tcttgggggccaatgactgtttcac

SEQ ID NO: 3645188 - DNA, 25 bp, Homo sapien
catcgggtaggtcaagactttgtgt

SEQ ID NO: 3645189 - DNA, 25 bp, Homo sapien
tggaactggttttgtacctccagcg

SEQ ID NO: 3645190 - DNA, 25 bp, Homo sapien
tgtttcacctttagacatcgggtag

SEQ ID NO: 3645191 - DNA, 25 bp, Homo sapien
gaaggcttcactgggtatgggttcc

SEQ ID NO: 3645192 - DNA, 25 bp, Homo sapien
actccattgagtccagcagtaactt

SEQ ID NO: 3645193 - DNA, 25 bp, Homo sapien
gactccattgagtccagcagtaact

SEQ ID NO: 3645194 - DNA, 25 bp, Homo sapien
ctgactccattgagtccagcagtaa

SEQ ID NO: 3645195 - DNA, 25 bp, Homo sapien
tgctgtgaggccaccctacgtggac

SEQ ID NO: 3645196 - DNA, 25 bp, Homo sapien
taggctcaagaataggttctttagc

SEQ ID NO: 3645197 - DNA, 25 bp, Homo sapien
tacgtggaccatactaggctcaaga

SEQ ID NO: 3645198 - DNA, 25 bp, Homo sapien
ggccaccctacgtggaccatactag

SEQ ID NO: 3645199 - DNA, 25 bp, Homo sapien
taggagtctgatttggatgaagttg

SEQ ID NO: 3645200 - DNA, 25 bp, Homo sapien
catgacacataagttaggccgggtt

SEQ ID NO: 3645201 - DNA, 25 bp, Homo sapien
cctttgcatgacacataagttaggc

SEQ ID NO: 3645202 - DNA, 25 bp, Homo sapien
tgatgtcagtgactgacgggatgaa

SEQ ID NO: 3645203 - DNA, 25 bp, Homo sapien
caagaccaaggatgcaatgttctgg

SEQ ID NO: 3645204 - DNA, 25 bp, Homo sapien
tctgggatacagtgttctcggtcct

SEQ ID NO: 3645205 - DNA, 25 bp, Homo sapien
tttggatcacaaatagcacagctga

SEQ ID NO: 3645206 - DNA, 25 bp, Homo sapien
tcctgttcccggtggatgagtctct

SEQ ID NO: 3645207 - DNA, 25 bp, Homo sapien
ccatagcatctctctatggaaggca

SEQ ID NO: 3645208 - DNA, 25 bp, Homo sapien
gcatctctctatggaaggcaggaga

SEQ ID NO: 3645209 - DNA, 25 bp, Homo sapien
ggaccaagagtccatagcatctctc

SEQ ID NO: 3645210 - DNA, 25 bp, Homo sapien
tagcatctctctatggaaggcagga

SEQ ID NO: 3645211 - DNA, 25 bp, Homo sapien
tctggaggtaggttacatttcttgt

SEQ ID NO: 3645212 - DNA, 25 bp, Homo sapien
agttctggaggtaggttacatttct

SEQ ID NO: 3645213 - DNA, 25 bp, Homo sapien
tggaggtaggttacatttcttgttg

SEQ ID NO: 3645214 - DNA, 25 bp, Homo sapien
ttctggaggtaggttacatttcttg

SEQ ID NO: 3645215 - DNA, 25 bp, Homo sapien
tggtaattataggtggatagtcaac

SEQ ID NO: 3645216 - DNA, 25 bp, Homo sapien
aggtggatagtcaaccaaattcaac

SEQ ID NO: 3645217 - DNA, 25 bp, Homo sapien
gatgcttctgccaatccatatttca

SEQ ID NO: 3645218 - DNA, 25 bp, Homo sapien
gcaatgtggtaattataggtggata

SEQ ID NO: 3645219 - DNA, 25 bp, Homo sapien
tacatttaaagatcatctcaacgtg

SEQ ID NO: 3645220 - DNA, 25 bp, Homo sapien
catgaattttcagtattcgtttgct

SEQ ID NO: 3645221 - DNA, 25 bp, Homo sapien
tcctcagaaatgaggtatcacaatc

SEQ ID NO: 3645222 - DNA, 25 bp, Homo sapien
tctcaacgtgaatgttcagtattca

SEQ ID NO: 3645223 - DNA, 25 bp, Homo sapien
tgtgtttatttatggaaatcccatt

SEQ ID NO: 3645224 - DNA, 25 bp, Homo sapien
tgtttatttatggaaatcccattca

SEQ ID NO: 3645225 - DNA, 25 bp, Homo sapien
tttatttatggaaatcccattcatc

SEQ ID NO: 3645226 - DNA, 25 bp, Homo sapien
tatttatggaaatcccattcatcct

SEQ ID NO: 3645227 - DNA, 25 bp, Homo sapien
gaaaaaagtgatgcacagtctccgg

SEQ ID NO: 3645228 - DNA, 25 bp, Homo sapien
tgaacacttcgcaaactactgagga

SEQ ID NO: 3645229 - DNA, 25 bp, Homo sapien
tgtggacatgaatagagagcaaggc

SEQ ID NO: 3645230 - DNA, 25 bp, Homo sapien
tgtaggcgctctcagctttcagagt

SEQ ID NO: 3645231 - DNA, 25 bp, Homo sapien
tttttatcctggttcaaatgctgat

SEQ ID NO: 3645232 - DNA, 25 bp, Homo sapien
gccatggcttgtgactggcctacat

SEQ ID NO: 3645233 - DNA, 25 bp, Homo sapien
aatgctgataagccatggcttgtga

SEQ ID NO: 3645234 - DNA, 25 bp, Homo sapien
gactggcctacatagtagggagaag

SEQ ID NO: 3645235 - DNA, 25 bp, Homo sapien
taattccctgcaccagaccactcct

SEQ ID NO: 3645236 - DNA, 25 bp, Homo sapien
tcatactgggccacccatgtggtgg

SEQ ID NO: 3645237 - DNA, 25 bp, Homo sapien
gaccactcctctatagagattctgt

SEQ ID NO: 3645238 - DNA, 25 bp, Homo sapien
catactgggccacccatgtggtggt

SEQ ID NO: 3645239 - DNA, 25 bp, Homo sapien
ttggaggtttccttagtattgtctc

SEQ ID NO: 3645240 - DNA, 25 bp, Homo sapien
ggtttccttagtattgtctcttcca

SEQ ID NO: 3645241 - DNA, 25 bp, Homo sapien
gaggtttccttagtattgtctcttc

SEQ ID NO: 3645242 - DNA, 25 bp, Homo sapien
gtttccttagtattgtctcttccat

SEQ ID NO: 3645243 - DNA, 25 bp, Homo sapien
ggaggtctcacgctcagcagaagga

SEQ ID NO: 3645244 - DNA, 25 bp, Homo sapien
aatccgcagcggacagaaggaggtc

SEQ ID NO: 3645245 - DNA, 25 bp, Homo sapien
cacaatcagggatgacagcatctag

SEQ ID NO: 3645246 - DNA, 25 bp, Homo sapien
gaaccgctaggacttgtgatccaca

SEQ ID NO: 3645247 - DNA, 25 bp, Homo sapien
ttccatccattgctcctataaaatg

SEQ ID NO: 3645248 - DNA, 25 bp, Homo sapien
gatgataccactcgagaaatgagga

SEQ ID NO: 3645249 - DNA, 25 bp, Homo sapien
cctataaaatgtgcgatgataccac

SEQ ID NO: 3645250 - DNA, 25 bp, Homo sapien
ggaaatggtgttggcaataggacca

SEQ ID NO: 3645251 - DNA, 25 bp, Homo sapien
gattgttaagtactggccttgcaca

SEQ ID NO: 3645252 - DNA, 25 bp, Homo sapien
caacgtctaagcaaccatgaggcag

SEQ ID NO: 3645253 - DNA, 25 bp, Homo sapien
tatcacaaatactgaggagtttatt

SEQ ID NO: 3645254 - DNA, 25 bp, Homo sapien
tgcacatgacctcggacaaccaatt

SEQ ID NO: 3645255 - DNA, 25 bp, Homo sapien
cagcctttccagttggccgcaggct

SEQ ID NO: 3645256 - DNA, 25 bp, Homo sapien
atgccttcaggtggacccagccttt

SEQ ID NO: 3645257 - DNA, 25 bp, Homo sapien
tcacccatttcccacgtttctccag

SEQ ID NO: 3645258 - DNA, 25 bp, Homo sapien
ctaggtttgaatgccttcaggtgga

SEQ ID NO: 3645259 - DNA, 25 bp, Homo sapien
tcactcggaccaatgaagcagaggc

SEQ ID NO: 3645260 - DNA, 25 bp, Homo sapien
gatatctgtcaggaccctttccagg

SEQ ID NO: 3645261 - DNA, 25 bp, Homo sapien
tgcagcctactcgaaggaggtaacc

SEQ ID NO: 3645262 - DNA, 25 bp, Homo sapien
tgtaggagcagcctaatggacagct

SEQ ID NO: 3645263 - DNA, 25 bp, Homo sapien
tcatatgtgagatttttcccaccaa

SEQ ID NO: 3645264 - DNA, 25 bp, Homo sapien
aaagaaaggcaatctagagtttcgg

SEQ ID NO: 3645265 - DNA, 25 bp, Homo sapien
gttctgccgctgaccattggttgtt

SEQ ID NO: 3645266 - DNA, 25 bp, Homo sapien
tagagtttcggtcatgcaggtagag

SEQ ID NO: 3645267 - DNA, 25 bp, Homo sapien
cctgttaaatactgacatgatgatt

SEQ ID NO: 3645268 - DNA, 25 bp, Homo sapien
aatactgacatgatgatttggtcca

SEQ ID NO: 3645269 - DNA, 25 bp, Homo sapien
gttgcccctgttaaatactgacatg

SEQ ID NO: 3645270 - DNA, 25 bp, Homo sapien
gaaagttgcccctgttaaatactga

SEQ ID NO: 3645271 - DNA, 25 bp, Homo sapien
taatccgataggcactctatctcca

SEQ ID NO: 3645272 - DNA, 25 bp, Homo sapien
gctgtaatccgataggcactctatc

SEQ ID NO: 3645273 - DNA, 25 bp, Homo sapien
gcactctatctccatatacaatctc

SEQ ID NO: 3645274 - DNA, 25 bp, Homo sapien
aaggatttgctgtaatccgataggc

SEQ ID NO: 3645275 - DNA, 25 bp, Homo sapien
catttcttttcacccaaaggagaca

SEQ ID NO: 3645276 - DNA, 25 bp, Homo sapien
tgttgaccatttcttttcacccaaa

SEQ ID NO: 3645277 - DNA, 25 bp, Homo sapien
ttcttccagccaaatgttgaccatt

SEQ ID NO: 3645278 - DNA, 25 bp, Homo sapien
gtttcttccagccaaatgttgacca

SEQ ID NO: 3645279 - DNA, 25 bp, Homo sapien
cgttcttttagctgctcattcaaga

SEQ ID NO: 3645280 - DNA, 25 bp, Homo sapien
ccgttcttttagctgctcattcaag

SEQ ID NO: 3645281 - DNA, 25 bp, Homo sapien
tcttttagctgctcattcaagacag

SEQ ID NO: 3645282 - DNA, 25 bp, Homo sapien
tttagctgctcattcaagacagagg

SEQ ID NO: 3645283 - DNA, 25 bp, Homo sapien
tatttttagagacatccagtactgc

SEQ ID NO: 3645284 - DNA, 25 bp, Homo sapien
ttttagagacatccagtactgcagg

SEQ ID NO: 3645285 - DNA, 25 bp, Homo sapien
atccagtactgcaggcctttcacca

SEQ ID NO: 3645286 - DNA, 25 bp, Homo sapien
agagacatccagtactgcaggcctt

SEQ ID NO: 3645287 - DNA, 25 bp, Homo sapien
tgttcccacttgtcactgtttcctg

SEQ ID NO: 3645288 - DNA, 25 bp, Homo sapien
ttgtcactgtttcctgccccggtgc

SEQ ID NO: 3645289 - DNA, 25 bp, Homo sapien
tggtttttgtgttcccacttgtcac

SEQ ID NO: 3645290 - DNA, 25 bp, Homo sapien
ctgccccggtgccgcgtttccttct

SEQ ID NO: 3645291 - DNA, 25 bp, Homo sapien
tgcaggcgctgtctgactgtcggta

SEQ ID NO: 3645292 - DNA, 25 bp, Homo sapien
taaatcggaggtggtgctctggcaa

SEQ ID NO: 3645293 - DNA, 25 bp, Homo sapien
tctggcaatttgatgtcacagtggg

SEQ ID NO: 3645294 - DNA, 25 bp, Homo sapien
tggaacaagggagcattccgtagct

SEQ ID NO: 3645295 - DNA, 25 bp, Homo sapien
ccgggcattgctgtcgagccacagg

SEQ ID NO: 3645296 - DNA, 25 bp, Homo sapien
gcgcagcggctagaaaatccttcct

SEQ ID NO: 3645297 - DNA, 25 bp, Homo sapien
cgggactggcgctctttgcaacgtc

SEQ ID NO: 3645298 - DNA, 25 bp, Homo sapien
cctgctctgactccaagaagcctta

SEQ ID NO: 3645299 - DNA, 25 bp, Homo sapien
ctgtgatcgcgccaaatgcactcta

SEQ ID NO: 3645300 - DNA, 25 bp, Homo sapien
gctgtgatcgcgccaaatgcactct

SEQ ID NO: 3645301 - DNA, 25 bp, Homo sapien
tgtgatcgcgccaaatgcactctag

SEQ ID NO: 3645302 - DNA, 25 bp, Homo sapien
gctggaaccagaactagaatagggc

SEQ ID NO: 3645303 - DNA, 25 bp, Homo sapien
tcctgttgacttgggatgtacaaag

SEQ ID NO: 3645304 - DNA, 25 bp, Homo sapien
tactgcctatgtaagggtatacctt

SEQ ID NO: 3645305 - DNA, 25 bp, Homo sapien
gtctaagagagtaacagcacactgg

SEQ ID NO: 3645306 - DNA, 25 bp, Homo sapien
tcaaagactgagcttggagacactg

SEQ ID NO: 3645307 - DNA, 25 bp, Homo sapien
ctgaaatcaaagactgagcttggag

SEQ ID NO: 3645308 - DNA, 25 bp, Homo sapien
actgcagcctgagagcctgggaaat

SEQ ID NO: 3645309 - DNA, 25 bp, Homo sapien
aaatcaaagactgagcttggagaca

SEQ ID NO: 3645310 - DNA, 25 bp, Homo sapien
cagaaggcactagccacgcatggtg

SEQ ID NO: 3645311 - DNA, 25 bp, Homo sapien
agagaagacattgggcagaaggcac

SEQ ID NO: 3645312 - DNA, 25 bp, Homo sapien
tcagtgcatcggagacaagtggcct

SEQ ID NO: 3645313 - DNA, 25 bp, Homo sapien
ggatccttcctacaacagcagggaa

SEQ ID NO: 3645314 - DNA, 25 bp, Homo sapien
gaacgggtcctgaagacacaagtaa

SEQ ID NO: 3645315 - DNA, 25 bp, Homo sapien
ccagaaagtagggtgtacacagcag

SEQ ID NO: 3645316 - DNA, 25 bp, Homo sapien
taagtgattgggctcgaacgggtcc

SEQ ID NO: 3645317 - DNA, 25 bp, Homo sapien
caatggtgcccaagttgtcagtggc

SEQ ID NO: 3645318 - DNA, 25 bp, Homo sapien
cattccggggatgatggttgttcat

SEQ ID NO: 3645319 - DNA, 25 bp, Homo sapien
cagcattccggggatgatggttgtt

SEQ ID NO: 3645320 - DNA, 25 bp, Homo sapien
aaatcacagcattccggggatgatg

SEQ ID NO: 3645321 - DNA, 25 bp, Homo sapien
gccttcttggttatggcaaatcaca

SEQ ID NO: 3645322 - DNA, 25 bp, Homo sapien
tctctttctgtcttaaaatacctta

SEQ ID NO: 3645323 - DNA, 25 bp, Homo sapien
tcagactgtggttgactacaggtaa

SEQ ID NO: 3645324 - DNA, 25 bp, Homo sapien
atattttcagactgtggttgactac

SEQ ID NO: 3645325 - DNA, 25 bp, Homo sapien
gtgaatgcggtttctctcctctctc

SEQ ID NO: 3645326 - DNA, 25 bp, Homo sapien
aattctagaaaaagctccatggcct

SEQ ID NO: 3645327 - DNA, 25 bp, Homo sapien
tggaagtcttgaagcccagtgacaa

SEQ ID NO: 3645328 - DNA, 25 bp, Homo sapien
gctgtttgaggtagtccatcgccga

SEQ ID NO: 3645329 - DNA, 25 bp, Homo sapien
tcgtatcacagttaagccagaccag

SEQ ID NO: 3645330 - DNA, 25 bp, Homo sapien
catggcggacggcaaatgaggaaca

SEQ ID NO: 3645331 - DNA, 25 bp, Homo sapien
cacagtcaatccgtatgaggcatac

SEQ ID NO: 3645332 - DNA, 25 bp, Homo sapien
gacagttacaacaaatccagcccgt

SEQ ID NO: 3645333 - DNA, 25 bp, Homo sapien
tagtgagcgtggaggtatgacaacc

SEQ ID NO: 3645334 - DNA, 25 bp, Homo sapien
cagacactacacttgatctttgcca

SEQ ID NO: 3645335 - DNA, 25 bp, Homo sapien
atctttgccaaaaggccaagaagca

SEQ ID NO: 3645336 - DNA, 25 bp, Homo sapien
tttgccaaaaggccaagaagcaata

SEQ ID NO: 3645337 - DNA, 25 bp, Homo sapien
agaacagacactacacttgatcttt

SEQ ID NO: 3645338 - DNA, 25 bp, Homo sapien
accaagagatgttctaaaaagagga

SEQ ID NO: 3645339 - DNA, 25 bp, Homo sapien
ccaagagatgttctaaaaagaggat

SEQ ID NO: 3645340 - DNA, 25 bp, Homo sapien
tgcaagcctcttcaacgtctgtgtg

SEQ ID NO: 3645341 - DNA, 25 bp, Homo sapien
gtgtctcggctaatcccagtggttg

SEQ ID NO: 3645342 - DNA, 25 bp, Homo sapien
tttggaaatagcttcctggcacggg

SEQ ID NO: 3645343 - DNA, 25 bp, Homo sapien
tgttcatgggtcagggtacggccca

SEQ ID NO: 3645344 - DNA, 25 bp, Homo sapien
ccaggatggataataacaggacaac

SEQ ID NO: 3645345 - DNA, 25 bp, Homo sapien
attcggataatctgaaatggtgccc

SEQ ID NO: 3645346 - DNA, 25 bp, Homo sapien
tgactgttttggagatgtctgcgcc

SEQ ID NO: 3645347 - DNA, 25 bp, Homo sapien
tttcactctcagtcaaaggccagga

SEQ ID NO: 3645348 - DNA, 25 bp, Homo sapien
tagtggttttctctgcgtgattagt

SEQ ID NO: 3645349 - DNA, 25 bp, Homo sapien
ttaattatatggcagtttgcatcca

SEQ ID NO: 3645350 - DNA, 25 bp, Homo sapien
tactaccttccatatagttagtggt

SEQ ID NO: 3645351 - DNA, 25 bp, Homo sapien
gcgtgattagtattgcattgactga

SEQ ID NO: 3645352 - DNA, 25 bp, Homo sapien
tgaaccaagtaagacagagcttggg

SEQ ID NO: 3645353 - DNA, 25 bp, Homo sapien
gtattaatgaaccaagtaagacaga

SEQ ID NO: 3645354 - DNA, 25 bp, Homo sapien
gaaccaagtaagacagagcttgggc

SEQ ID NO: 3645355 - DNA, 25 bp, Homo sapien
attaatgaaccaagtaagacagagc

SEQ ID NO: 3645356 - DNA, 25 bp, Homo sapien
ggaataagttgagacctagagctag

SEQ ID NO: 3645357 - DNA, 25 bp, Homo sapien
tgaggaataagttgagacctagagc

SEQ ID NO: 3645358 - DNA, 25 bp, Homo sapien
gttgagacctagagctagcatttgc

SEQ ID NO: 3645359 - DNA, 25 bp, Homo sapien
gaaaatgaggaataagttgagacct

SEQ ID NO: 3645360 - DNA, 25 bp, Homo sapien
gccgtgaacgtctaacaaggtgact

SEQ ID NO: 3645361 - DNA, 25 bp, Homo sapien
ttcacttggagagggttgaccccta

SEQ ID NO: 3645362 - DNA, 25 bp, Homo sapien
ggaacaagcaccttgcgccgtgaac

SEQ ID NO: 3645363 - DNA, 25 bp, Homo sapien
tcgtagtgacatctaggaacaagca

SEQ ID NO: 3645364 - DNA, 25 bp, Homo sapien
gccgagttggtaatgaagtagttca

SEQ ID NO: 3645365 - DNA, 25 bp, Homo sapien
gagatcatattccaagtagcagcca

SEQ ID NO: 3645366 - DNA, 25 bp, Homo sapien
catgtcaatatctgggccgagttgg

SEQ ID NO: 3645367 - DNA, 25 bp, Homo sapien
tagcagccaagttgagcaaactcca

SEQ ID NO: 3645368 - DNA, 25 bp, Homo sapien
tctgggcagtgtctgtcgtgacttc

SEQ ID NO: 3645369 - DNA, 25 bp, Homo sapien
tctttgatggtagaagatgccactc

SEQ ID NO: 3645370 - DNA, 25 bp, Homo sapien
cacagacaatggctcttctatggga

SEQ ID NO: 3645371 - DNA, 25 bp, Homo sapien
tttggcgtctagattctaaagtgga

SEQ ID NO: 3645372 - DNA, 25 bp, Homo sapien
tatgtcatgtgctaccagaattcga

SEQ ID NO: 3645373 - DNA, 25 bp, Homo sapien
tatatgagaatagccgtgacctcca

SEQ ID NO: 3645374 - DNA, 25 bp, Homo sapien
gacctccatatttcatcagccgggt

SEQ ID NO: 3645375 - DNA, 25 bp, Homo sapien
cagccgggttttcgtatgtatgtca

SEQ ID NO: 3645376 - DNA, 25 bp, Homo sapien
gaaggcaaaccctcctagttctcat

SEQ ID NO: 3645377 - DNA, 25 bp, Homo sapien
tcacagtggactggaaatcgctgaa

SEQ ID NO: 3645378 - DNA, 25 bp, Homo sapien
taggctgagtaactccctagaggca

SEQ ID NO: 3645379 - DNA, 25 bp, Homo sapien
tgatctgtcattagtcctaggtaac

SEQ ID NO: 3645380 - DNA, 25 bp, Homo sapien
gaaacattagatcgctcaagaagga

SEQ ID NO: 3645381 - DNA, 25 bp, Homo sapien
cagcagtgcccatcacctaagtgtt

SEQ ID NO: 3645382 - DNA, 25 bp, Homo sapien
gtatcgggctgtcatttccaataga

SEQ ID NO: 3645383 - DNA, 25 bp, Homo sapien
taaagaggaggctcaagtatcgggc

SEQ ID NO: 3645384 - DNA, 25 bp, Homo sapien
cagactgttaatatgaggactgcag

SEQ ID NO: 3645385 - DNA, 25 bp, Homo sapien
catggtgtgcctatctgaaggtggt

SEQ ID NO: 3645386 - DNA, 25 bp, Homo sapien
tgctttactggtgaaggacatttgc

SEQ ID NO: 3645387 - DNA, 25 bp, Homo sapien
ggactgcagacaccaagtggctctc

SEQ ID NO: 3645388 - DNA, 25 bp, Homo sapien
gacactaggtgaggccttcaaatga

SEQ ID NO: 3645389 - DNA, 25 bp, Homo sapien
catatagcctatatgacaacagagt

SEQ ID NO: 3645390 - DNA, 25 bp, Homo sapien
tgattactacaagtctgtggcctga

SEQ ID NO: 3645391 - DNA, 25 bp, Homo sapien
tgagctgctgcatacgtcaccaagg

SEQ ID NO: 3645392 - DNA, 25 bp, Homo sapien
ttctttagtatcaaatcaaaccgag

SEQ ID NO: 3645393 - DNA, 25 bp, Homo sapien
ctttagtatcaaatcaaaccgaggc

SEQ ID NO: 3645394 - DNA, 25 bp, Homo sapien
tctttagtatcaaatcaaaccgagg

SEQ ID NO: 3645395 - DNA, 25 bp, Homo sapien
gggaaatcaaatgctacctgactca

SEQ ID NO: 3645396 - DNA, 25 bp, Homo sapien
tgttaaccttagagctagacctggg

SEQ ID NO: 3645397 - DNA, 25 bp, Homo sapien
gaacactggattcgtatggctaacg

SEQ ID NO: 3645398 - DNA, 25 bp, Homo sapien
tgagggaattcccaagcctatgatc

SEQ ID NO: 3645399 - DNA, 25 bp, Homo sapien
gcaattgcccaagatgctgatcaga

SEQ ID NO: 3645400 - DNA, 25 bp, Homo sapien
tctcactaacgtagcggaaactgcc

SEQ ID NO: 3645401 - DNA, 25 bp, Homo sapien
taggtgcgtgctagtgcaattgccc

SEQ ID NO: 3645402 - DNA, 25 bp, Homo sapien
tgatcagaattacgactatgccagt

SEQ ID NO: 3645403 - DNA, 25 bp, Homo sapien
ctaataattgtggtgaacagctgaa

SEQ ID NO: 3645404 - DNA, 25 bp, Homo sapien
cgcaggaatttgtggttacgcctac

SEQ ID NO: 3645405 - DNA, 25 bp, Homo sapien
taattgggacagtcttacggtacag

SEQ ID NO: 3645406 - DNA, 25 bp, Homo sapien
taaagcccagtaaccatagaacatg

SEQ ID NO: 3645407 - DNA, 25 bp, Homo sapien
taccatgggcagattataagcagcc

SEQ ID NO: 3645408 - DNA, 25 bp, Homo sapien
aaatcggttgattgcgctgaaggaa

SEQ ID NO: 3645409 - DNA, 25 bp, Homo sapien
tttattagttatggcaccgatgccc

SEQ ID NO: 3645410 - DNA, 25 bp, Homo sapien
cagggtgaacacattgccttcctca

SEQ ID NO: 3645411 - DNA, 25 bp, Homo sapien
taggatcaggtgagcagccatacca

SEQ ID NO: 3645412 - DNA, 25 bp, Homo sapien
gccactcgaatgaaaactaatactg

SEQ ID NO: 3645413 - DNA, 25 bp, Homo sapien
ctaatgccactataataaataagcc

SEQ ID NO: 3645414 - DNA, 25 bp, Homo sapien
gctatttgaatacaatcactctaat

SEQ ID NO: 3645415 - DNA, 25 bp, Homo sapien
taataaataagccactcgaatgaaa

SEQ ID NO: 3645416 - DNA, 25 bp, Homo sapien
tctggactgtaaccatatgagagcc

SEQ ID NO: 3645417 - DNA, 25 bp, Homo sapien
tatccctaaaatgaccgcagctctc

SEQ ID NO: 3645418 - DNA, 25 bp, Homo sapien
cacttcttagaatggcaggttccct

SEQ ID NO: 3645419 - DNA, 25 bp, Homo sapien
tgttgaaagcccatgacagtgcata

SEQ ID NO: 3645420 - DNA, 25 bp, Homo sapien
aaaggcttatgaacagtccctcagc

SEQ ID NO: 3645421 - DNA, 25 bp, Homo sapien
ccagaatggagctattgaatcaccc

SEQ ID NO: 3645422 - DNA, 25 bp, Homo sapien
ggtctggaaaatacaatcgggctga

SEQ ID NO: 3645423 - DNA, 25 bp, Homo sapien
caaatggctaaaacgggcaggactc

SEQ ID NO: 3645424 - DNA, 25 bp, Homo sapien
taaacgcaacttcagggccattggc

SEQ ID NO: 3645425 - DNA, 25 bp, Homo sapien
gcctataaattgctccggcgcgcgt

SEQ ID NO: 3645426 - DNA, 25 bp, Homo sapien
catgtgggctgatctctgcaaaaac

SEQ ID NO: 3645427 - DNA, 25 bp, Homo sapien
tcaagcggcagcatgaaggctacga

SEQ ID NO: 3645428 - DNA, 25 bp, Homo sapien
tgatgtaataagtcaccgtcttccc

SEQ ID NO: 3645429 - DNA, 25 bp, Homo sapien
ggctgctgatcgtcacccaggatgt

SEQ ID NO: 3645430 - DNA, 25 bp, Homo sapien
taacttgcctgatatctaccctgga

SEQ ID NO: 3645431 - DNA, 25 bp, Homo sapien
agaagtccatgctgtgacacccgca

SEQ ID NO: 3645432 - DNA, 25 bp, Homo sapien
ggcttgagaagtgggaagccctatt

SEQ ID NO: 3645433 - DNA, 25 bp, Homo sapien
tgggaaaactccacatagcttgagg

SEQ ID NO: 3645434 - DNA, 25 bp, Homo sapien
gaatggcattgatcctcctggaagc

SEQ ID NO: 3645435 - DNA, 25 bp, Homo sapien
tagaactagtatggccagtctcggg

SEQ ID NO: 3645436 - DNA, 25 bp, Homo sapien
tatggccaggagacaacttattatg

SEQ ID NO: 3645437 - DNA, 25 bp, Homo sapien
gtctcagtaaccagccataagttcg

SEQ ID NO: 3645438 - DNA, 25 bp, Homo sapien
ccttctgggaaattcaagcagtaga

SEQ ID NO: 3645439 - DNA, 25 bp, Homo sapien
cacagtgagatacttctggaggaga

SEQ ID NO: 3645440 - DNA, 25 bp, Homo sapien
gcgtgagtaactttgcagagaacct

SEQ ID NO: 3645441 - DNA, 25 bp, Homo sapien
tgatcacggctttctggattggact

SEQ ID NO: 3645442 - DNA, 25 bp, Homo sapien
gctgtgctgtccgtagatactcaat

SEQ ID NO: 3645443 - DNA, 25 bp, Homo sapien
tactgattaatggatggccgtgcat

SEQ ID NO: 3645444 - DNA, 25 bp, Homo sapien
tcttctggagggtccacaaggtcca

SEQ ID NO: 3645445 - DNA, 25 bp, Homo sapien
gaagaaagatccagtggttggcagt

SEQ ID NO: 3645446 - DNA, 25 bp, Homo sapien
gaaagatccagtggttggcagttca

SEQ ID NO: 3645447 - DNA, 25 bp, Homo sapien
gaggagacattcaacgtgcttggga

SEQ ID NO: 3645448 - DNA, 25 bp, Homo sapien
gacattcaacgtgcttgggagcaca

SEQ ID NO: 3645449 - DNA, 25 bp, Homo sapien
ttttcactttcatgaatagttcatc

SEQ ID NO: 3645450 - DNA, 25 bp, Homo sapien
ttttccaattccaatcgtgtacatt

SEQ ID NO: 3645451 - DNA, 25 bp, Homo sapien
tccaattccaatcgtgtacatttta

SEQ ID NO: 3645452 - DNA, 25 bp, Homo sapien
tgaatagttcatccaaaaagatttt

SEQ ID NO: 3645453 - DNA, 25 bp, Homo sapien
gatggacattggctccacgaagctc

SEQ ID NO: 3645454 - DNA, 25 bp, Homo sapien
tataagtcttgcagccagaagagga

SEQ ID NO: 3645455 - DNA, 25 bp, Homo sapien
tctgttccacaaggtaggcatctgc

SEQ ID NO: 3645456 - DNA, 25 bp, Homo sapien
gtaatctgcatggtacagtgtccat

SEQ ID NO: 3645457 - DNA, 25 bp, Homo sapien
tgaagttccttcacattgtgtgtgg

SEQ ID NO: 3645458 - DNA, 25 bp, Homo sapien
ctgaagttccttcacattgtgtgtg

SEQ ID NO: 3645459 - DNA, 25 bp, Homo sapien
gactggattaagaccatctcagact

SEQ ID NO: 3645460 - DNA, 25 bp, Homo sapien
ctggattaaggctgtgatcagtttc

SEQ ID NO: 3645461 - DNA, 25 bp, Homo sapien
gagactggagaccatcttagactgg

SEQ ID NO: 3645462 - DNA, 25 bp, Homo sapien
tttccctccgtgttgctcagtgcag

SEQ ID NO: 3645463 - DNA, 25 bp, Homo sapien
tcagtttcgtatgaactccattcag

SEQ ID NO: 3645464 - DNA, 25 bp, Homo sapien
gctttcagtttcgtatgaactccat

SEQ ID NO: 3645465 - DNA, 25 bp, Homo sapien
tgtctgctttcagtttcgtatgaac

SEQ ID NO: 3645466 - DNA, 25 bp, Homo sapien
tctgctttcagtttcgtatgaactc

SEQ ID NO: 3645467 - DNA, 25 bp, Homo sapien
gcaaggctggggcctggaggaattc

SEQ ID NO: 3645468 - DNA, 25 bp, Homo sapien
ttacagcaaggctggggcctggagg

SEQ ID NO: 3645469 - DNA, 25 bp, Homo sapien
cagcaaggctggggcctggaggaat

SEQ ID NO: 3645470 - DNA, 25 bp, Homo sapien
aaggctggggcctggaggaattcac

SEQ ID NO: 3645471 - DNA, 25 bp, Homo sapien
ctccacatttgggactggtaaatgt

SEQ ID NO: 3645472 - DNA, 25 bp, Homo sapien
cactgttctgaagtcgtatctccac

SEQ ID NO: 3645473 - DNA, 25 bp, Homo sapien
tttgtgcaagttgtagttgtggaga

SEQ ID NO: 3645474 - DNA, 25 bp, Homo sapien
caagttgtagttgtggagaaagtag

SEQ ID NO: 3645475 - DNA, 25 bp, Homo sapien
tatgttttgctttggttggtggact

SEQ ID NO: 3645476 - DNA, 25 bp, Homo sapien
ttggttggtggactacataaaccat

SEQ ID NO: 3645477 - DNA, 25 bp, Homo sapien
gttttgctttggttggtggactaca

SEQ ID NO: 3645478 - DNA, 25 bp, Homo sapien
gctttggttggtggactacataaac

SEQ ID NO: 3645479 - DNA, 25 bp, Homo sapien
aaacagcagggtagatgccaagttc

SEQ ID NO: 3645480 - DNA, 25 bp, Homo sapien
aagtgccagtgtgcactggtggaaa

SEQ ID NO: 3645481 - DNA, 25 bp, Homo sapien
tttttatcaaacagcagggtagatg

SEQ ID NO: 3645482 - DNA, 25 bp, Homo sapien
tccactgagtgggtgtaaagtgcca

SEQ ID NO: 3645483 - DNA, 25 bp, Homo sapien
gttgggtgacattctataatcattg

SEQ ID NO: 3645484 - DNA, 25 bp, Homo sapien
ggtgacattctataatcattgttga

SEQ ID NO: 3645485 - DNA, 25 bp, Homo sapien
tgggtgacattctataatcattgtt

SEQ ID NO: 3645486 - DNA, 25 bp, Homo sapien
ggagttgggtgacattctataatca

SEQ ID NO: 3645487 - DNA, 25 bp, Homo sapien
aagaaagcgcttccactcactaata

SEQ ID NO: 3645488 - DNA, 25 bp, Homo sapien
agaaagcgcttccactcactaatag

SEQ ID NO: 3645489 - DNA, 25 bp, Homo sapien
gaagaaagcgcttccactcactaat

SEQ ID NO: 3645490 - DNA, 25 bp, Homo sapien
tgtcagcaaaactgactccttcctg

SEQ ID NO: 3645491 - DNA, 25 bp, Homo sapien
tgccatttccagtgtacagatgttg

SEQ ID NO: 3645492 - DNA, 25 bp, Homo sapien
tgtatacatctactgcccagcacat

SEQ ID NO: 3645493 - DNA, 25 bp, Homo sapien
tcaagaattgtgctgtcccccaacg

SEQ ID NO: 3645494 - DNA, 25 bp, Homo sapien
cagtttgacgataggtggcaaaacc

SEQ ID NO: 3645495 - DNA, 25 bp, Homo sapien
tataaatttcgctccagaaaggccg

SEQ ID NO: 3645496 - DNA, 25 bp, Homo sapien
tcctgaggaaattatccgagatccc

SEQ ID NO: 3645497 - DNA, 25 bp, Homo sapien
caaaaccttaagattgtgtactggg

SEQ ID NO: 3645498 - DNA, 25 bp, Homo sapien
taaacccaatgctgcgtgtgaggcc

SEQ ID NO: 3645499 - DNA, 25 bp, Homo sapien
tcaactgcgaattccatagtgggct

SEQ ID NO: 3645500 - DNA, 25 bp, Homo sapien
tctaagcgacttcgatgccaaggaa

SEQ ID NO: 3645501 - DNA, 25 bp, Homo sapien
gaaagtagcattccttcgccgaaga

SEQ ID NO: 3645502 - DNA, 25 bp, Homo sapien
gtcctctgtagtcagtcactgctat

SEQ ID NO: 3645503 - DNA, 25 bp, Homo sapien
cacgagtgttagcttcagaggatgg

SEQ ID NO: 3645504 - DNA, 25 bp, Homo sapien
ggaccagccagttcgtagtagcaag

SEQ ID NO: 3645505 - DNA, 25 bp, Homo sapien
tccaggtacatgcaaaacacaagcc

SEQ ID NO: 3645506 - DNA, 25 bp, Homo sapien
gaggacattaggcgagccagattcc

SEQ ID NO: 3645507 - DNA, 25 bp, Homo sapien
gagaggacattaggcgagccagatt

SEQ ID NO: 3645508 - DNA, 25 bp, Homo sapien
ccccagccacatgcgctgtggctgc

SEQ ID NO: 3645509 - DNA, 25 bp, Homo sapien
aaagagaggacattaggcgagccag

SEQ ID NO: 3645510 - DNA, 25 bp, Homo sapien
atctgctccgggaatttttattaag

SEQ ID NO: 3645511 - DNA, 25 bp, Homo sapien
ccttgcatctgctccgggaattttt

SEQ ID NO: 3645512 - DNA, 25 bp, Homo sapien
tgcatctgctccgggaatttttatt

SEQ ID NO: 3645513 - DNA, 25 bp, Homo sapien
cttgcatctgctccgggaattttta

SEQ ID NO: 3645514 - DNA, 25 bp, Homo sapien
tttgggtgacttttcatgtttctgc

SEQ ID NO: 3645515 - DNA, 25 bp, Homo sapien
tgctgatatccctggtctgcttata

SEQ ID NO: 3645516 - DNA, 25 bp, Homo sapien
tctgcttatagtcgaggcgcactgg

SEQ ID NO: 3645517 - DNA, 25 bp, Homo sapien
ccgctggtccctactgcctgcattt

SEQ ID NO: 3645518 - DNA, 25 bp, Homo sapien
tatccctggtctgcttatagtcgag

SEQ ID NO: 3645519 - DNA, 25 bp, Homo sapien
gaccgtgcaggtgtggatcgcgtgt

SEQ ID NO: 3645520 - DNA, 25 bp, Homo sapien
gtcccgccagggcatccacagaact

SEQ ID NO: 3645521 - DNA, 25 bp, Homo sapien
tgttttctgtgattcctcctaggca

SEQ ID NO: 3645522 - DNA, 25 bp, Homo sapien
gagggtcgcggcagaaggtatagga

SEQ ID NO: 3645523 - DNA, 25 bp, Homo sapien
atttgcagtagaccagagtggtgac

SEQ ID NO: 3645524 - DNA, 25 bp, Homo sapien
attcatcaagaccagcattgctttg

SEQ ID NO: 3645525 - DNA, 25 bp, Homo sapien
gacgtattcatcaagaccagcattg

SEQ ID NO: 3645526 - DNA, 25 bp, Homo sapien
gaccagagtggtgacgtattcatca

SEQ ID NO: 3645527 - DNA, 25 bp, Homo sapien
agtgatgcttggctcagatgttcag

SEQ ID NO: 3645528 - DNA, 25 bp, Homo sapien
gatgttcagtcactccatatttttg

SEQ ID NO: 3645529 - DNA, 25 bp, Homo sapien
cacctgatgagcgtggaattgagga

SEQ ID NO: 3645530 - DNA, 25 bp, Homo sapien
tgacagttgtgtatgaggcaccagg

SEQ ID NO: 3645531 - DNA, 25 bp, Homo sapien
tcttggatgatcgtttttcagggaa

SEQ ID NO: 3645532 - DNA, 25 bp, Homo sapien
acttttccatgagaatattgttggg

SEQ ID NO: 3645533 - DNA, 25 bp, Homo sapien
catccagtgtcgtcgtacggggccc

SEQ ID NO: 3645534 - DNA, 25 bp, Homo sapien
tagtaggagacgattgttacagaac

SEQ ID NO: 3645535 - DNA, 25 bp, Homo sapien
gccgtcacaggaacaccgctttgct

SEQ ID NO: 3645536 - DNA, 25 bp, Homo sapien
tgccgtcacaggaacaccgctttgc

SEQ ID NO: 3645537 - DNA, 25 bp, Homo sapien
ccgtcacaggaacaccgctttgctt

SEQ ID NO: 3645538 - DNA, 25 bp, Homo sapien
ggtttcccgatcagaacgcactggg

SEQ ID NO: 3645539 - DNA, 25 bp, Homo sapien
aacgtgtcgtgggtttcccgatcag

SEQ ID NO: 3645540 - DNA, 25 bp, Homo sapien
cgtgggtttcccgatcagaacgcac

SEQ ID NO: 3645541 - DNA, 25 bp, Homo sapien
tgtcgtgggtttcccgatcagaacg

SEQ ID NO: 3645542 - DNA, 25 bp, Homo sapien
tgatacaggcaatattccaagcatg

SEQ ID NO: 3645543 - DNA, 25 bp, Homo sapien
caggctcacaaagagacagtctggg

SEQ ID NO: 3645544 - DNA, 25 bp, Homo sapien
ggccgacagacccttgatcattaga

SEQ ID NO: 3645545 - DNA, 25 bp, Homo sapien
cattggaacgaataagaaagaggcc

SEQ ID NO: 3645546 - DNA, 25 bp, Homo sapien
ttccctctggagacacgctcggaac

SEQ ID NO: 3645547 - DNA, 25 bp, Homo sapien
gaccctggaacccaaatgtgttgat

SEQ ID NO: 3645548 - DNA, 25 bp, Homo sapien
tgattacgattggaaccttagggac

SEQ ID NO: 3645549 - DNA, 25 bp, Homo sapien
tgcagctgtcatgcaagagcttgcc

SEQ ID NO: 3645550 - DNA, 25 bp, Homo sapien
tggtggccaccgctggacaagcgca

SEQ ID NO: 3645551 - DNA, 25 bp, Homo sapien
tatttgtggcttaaatcatctcagc

SEQ ID NO: 3645552 - DNA, 25 bp, Homo sapien
agatgtggccatgtccctgccgtgc

SEQ ID NO: 3645553 - DNA, 25 bp, Homo sapien
tgccagtgcgccctgggcttatttg

SEQ ID NO: 3645554 - DNA, 25 bp, Homo sapien
catgaccgagaccaatccaaacttg

SEQ ID NO: 3645555 - DNA, 25 bp, Homo sapien
tgagctccaggactctacggactct

SEQ ID NO: 3645556 - DNA, 25 bp, Homo sapien
tcagtcaaggcagcagctaatttca

SEQ ID NO: 3645557 - DNA, 25 bp, Homo sapien
catttgccatgaacatcaggtcccc

SEQ ID NO: 3645558 - DNA, 25 bp, Homo sapien
ttcgccaaagactgaggagtcatgg

SEQ ID NO: 3645559 - DNA, 25 bp, Homo sapien
tcgccaaagactgaggagtcatggt

SEQ ID NO: 3645560 - DNA, 25 bp, Homo sapien
tgtcacaaagtctccatgcagaatg

SEQ ID NO: 3645561 - DNA, 25 bp, Homo sapien
caataaaatttcatgcccgagtctc

SEQ ID NO: 3645562 - DNA, 25 bp, Homo sapien
gtttgacaaagtgtttccctggtga

SEQ ID NO: 3645563 - DNA, 25 bp, Homo sapien
ccaaatgtccgcttgaattgcggtg

SEQ ID NO: 3645564 - DNA, 25 bp, Homo sapien
gcttttgggaaacatgcaaacaaac

SEQ ID NO: 3645565 - DNA, 25 bp, Homo sapien
tatcctaggtctgttgcatacatga

SEQ ID NO: 3645566 - DNA, 25 bp, Homo sapien
aagtgaccttcaccaaccttgctag

SEQ ID NO: 3645567 - DNA, 25 bp, Homo sapien
tcttgaaacttctggacccattcca

SEQ ID NO: 3645568 - DNA, 25 bp, Homo sapien
taaataagctactccaattgtttgg

SEQ ID NO: 3645569 - DNA, 25 bp, Homo sapien
ttaattcctcgttttcatacatgct

SEQ ID NO: 3645570 - DNA, 25 bp, Homo sapien
tacatgctgaatatgccttcgtgat

SEQ ID NO: 3645571 - DNA, 25 bp, Homo sapien
aataagatgcatatctctgagaagg

SEQ ID NO: 3645572 - DNA, 25 bp, Homo sapien
catcagcgccatgacagcttagaaa

SEQ ID NO: 3645573 - DNA, 25 bp, Homo sapien
tcagcgccatgacagcttagaaatg

SEQ ID NO: 3645574 - DNA, 25 bp, Homo sapien
tcccatcagcgccatgacagcttag

SEQ ID NO: 3645575 - DNA, 25 bp, Homo sapien
accctcccatcagcgccatgacagc

SEQ ID NO: 3645576 - DNA, 25 bp, Homo sapien
gtgaccttcctcagagcacgtcctc

SEQ ID NO: 3645577 - DNA, 25 bp, Homo sapien
gagcacgtcctcaagttcttctgag

SEQ ID NO: 3645578 - DNA, 25 bp, Homo sapien
tcagagcacgtcctcaagttcttct

SEQ ID NO: 3645579 - DNA, 25 bp, Homo sapien
cttcctcagagcacgtcctcaagtt

SEQ ID NO: 3645580 - DNA, 25 bp, Homo sapien
agcctgagatcaaggagcggacaga

SEQ ID NO: 3645581 - DNA, 25 bp, Homo sapien
tgaacttttactatgtgagtccaag

SEQ ID NO: 3645582 - DNA, 25 bp, Homo sapien
acactgcatcctctggagaagagaa

SEQ ID NO: 3645583 - DNA, 25 bp, Homo sapien
tttgttcctgcatactagatgcctt

SEQ ID NO: 3645584 - DNA, 25 bp, Homo sapien
cacctgcttattcatgtcatcattc

SEQ ID NO: 3645585 - DNA, 25 bp, Homo sapien
acacagtgggattggtcagtgtatc

SEQ ID NO: 3645586 - DNA, 25 bp, Homo sapien
tcacacagtgggattggtcagtgta

SEQ ID NO: 3645587 - DNA, 25 bp, Homo sapien
cacacagtgggattggtcagtgtat

SEQ ID NO: 3645588 - DNA, 25 bp, Homo sapien
gcttctaggcagtaatgggacctct

SEQ ID NO: 3645589 - DNA, 25 bp, Homo sapien
ccgatgagaccgctgttgtgtgagc

SEQ ID NO: 3645590 - DNA, 25 bp, Homo sapien
aatcgtttctggttgcttggcttct

SEQ ID NO: 3645591 - DNA, 25 bp, Homo sapien
tgtgtgagctgaagatctggattct

SEQ ID NO: 3645592 - DNA, 25 bp, Homo sapien
gcagacatccgtggccattcaggga

SEQ ID NO: 3645593 - DNA, 25 bp, Homo sapien
gatgttaatgggtcgggctgactcc

SEQ ID NO: 3645594 - DNA, 25 bp, Homo sapien
ggctgactcccaggcagacatccgt

SEQ ID NO: 3645595 - DNA, 25 bp, Homo sapien
cactgaagccagaaggatcgaggat

SEQ ID NO: 3645596 - DNA, 25 bp, Homo sapien
gagatggcctctgcaagacaaattg

SEQ ID NO: 3645597 - DNA, 25 bp, Homo sapien
tttgcaaaacgcagctgagatggcc

SEQ ID NO: 3645598 - DNA, 25 bp, Homo sapien
acactctcccgaaaaggcaggcgga

SEQ ID NO: 3645599 - DNA, 25 bp, Homo sapien
ccaacgcctgaggtgaccatctgga

SEQ ID NO: 3645600 - DNA, 25 bp, Homo sapien
cacagatgagatcttcaggagcaca

SEQ ID NO: 3645601 - DNA, 25 bp, Homo sapien
tatgctggcggttgtggaccaacag

SEQ ID NO: 3645602 - DNA, 25 bp, Homo sapien
acaggagccgagacttgatgcgtga

SEQ ID NO: 3645603 - DNA, 25 bp, Homo sapien
caatgaggtcacagatatgctggcg

SEQ ID NO: 3645604 - DNA, 25 bp, Homo sapien
aggggccgctcactagaccactgct

SEQ ID NO: 3645605 - DNA, 25 bp, Homo sapien
gagtaatctgtattcttcacagtcc

SEQ ID NO: 3645606 - DNA, 25 bp, Homo sapien
ttatcaacggccacttccggagctc

SEQ ID NO: 3645607 - DNA, 25 bp, Homo sapien
gcccgtgtgccccagttcagagtaa

SEQ ID NO: 3645608 - DNA, 25 bp, Homo sapien
gcaggtatcccagagggagggttct

SEQ ID NO: 3645609 - DNA, 25 bp, Homo sapien
gggttctggaggaactttgagctgt

SEQ ID NO: 3645610 - DNA, 25 bp, Homo sapien
cagagggagggttctggaggaactt

SEQ ID NO: 3645611 - DNA, 25 bp, Homo sapien
ggagggttctggaggaactttgagc

SEQ ID NO: 3645612 - DNA, 25 bp, Homo sapien
tgtacaggtagggttcatttgcatt

SEQ ID NO: 3645613 - DNA, 25 bp, Homo sapien
actgtacaggtagggttcatttgca

SEQ ID NO: 3645614 - DNA, 25 bp, Homo sapien
gtacaggtagggttcatttgcattc

SEQ ID NO: 3645615 - DNA, 25 bp, Homo sapien
ctgtacaggtagggttcatttgcat

SEQ ID NO: 3645616 - DNA, 25 bp, Homo sapien
ccttgtcacctttccaaaacagcag

SEQ ID NO: 3645617 - DNA, 25 bp, Homo sapien
aaagaaggtcatgccgggtgtgtta

SEQ ID NO: 3645618 - DNA, 25 bp, Homo sapien
tcagttcttcagtttaggaggacct

SEQ ID NO: 3645619 - DNA, 25 bp, Homo sapien
tgggatgagagcgtccccagcagtc

SEQ ID NO: 3645620 - DNA, 25 bp, Homo sapien
gaggttgagctatcagttcacttgt

SEQ ID NO: 3645621 - DNA, 25 bp, Homo sapien
aggcagaggttgagctatcagttca

SEQ ID NO: 3645622 - DNA, 25 bp, Homo sapien
attcacaatccatcactggaggcag

SEQ ID NO: 3645623 - DNA, 25 bp, Homo sapien
tccccttgctgtaattcacaatcca

SEQ ID NO: 3645624 - DNA, 25 bp, Homo sapien
tcctacgcgagagtgagaagattct

SEQ ID NO: 3645625 - DNA, 25 bp, Homo sapien
taattagtctagacaccacctctgt

SEQ ID NO: 3645626 - DNA, 25 bp, Homo sapien
catcagagtcttgtggtaatatgta

SEQ ID NO: 3645627 - DNA, 25 bp, Homo sapien
gaatcggcatgtatgtaattagtct

SEQ ID NO: 3645628 - DNA, 25 bp, Homo sapien
ctccttccagtcgaagaacgggaga

SEQ ID NO: 3645629 - DNA, 25 bp, Homo sapien
agctccatggacgaagcgttcctgt

SEQ ID NO: 3645630 - DNA, 25 bp, Homo sapien
tggacgaagcgttcctgtggctctg

SEQ ID NO: 3645631 - DNA, 25 bp, Homo sapien
ttccagtcgaagaacgggagaattc

SEQ ID NO: 3645632 - DNA, 25 bp, Homo sapien
tctgtagagaagtgcacgtgatggt

SEQ ID NO: 3645633 - DNA, 25 bp, Homo sapien
caagcctcctagatagatgtgcacc

SEQ ID NO: 3645634 - DNA, 25 bp, Homo sapien
gaattctttagaggtccatgcagct

SEQ ID NO: 3645635 - DNA, 25 bp, Homo sapien
cagcagaggcttgtggatcccattg

SEQ ID NO: 3645636 - DNA, 25 bp, Homo sapien
tatgctgattcgtatactgctcaat

SEQ ID NO: 3645637 - DNA, 25 bp, Homo sapien
cgtaaacattgcaagctactactgc

SEQ ID NO: 3645638 - DNA, 25 bp, Homo sapien
gataaaacaagctctgggcattacg

SEQ ID NO: 3645639 - DNA, 25 bp, Homo sapien
tattccaacagcaaaacccacacgt

SEQ ID NO: 3645640 - DNA, 25 bp, Homo sapien
cactcggaagcgtgcctcttacaga

SEQ ID NO: 3645641 - DNA, 25 bp, Homo sapien
gaatgcaaggcttttacttaactcc

SEQ ID NO: 3645642 - DNA, 25 bp, Homo sapien
gaattggaatatctcacagtctcag

SEQ ID NO: 3645643 - DNA, 25 bp, Homo sapien
tggtacctgacacgcaattaacaat

SEQ ID NO: 3645644 - DNA, 25 bp, Homo sapien
gaagcctcagcattccgttcttgtg

SEQ ID NO: 3645645 - DNA, 25 bp, Homo sapien
actgtgttactaccaagcgagggcc

SEQ ID NO: 3645646 - DNA, 25 bp, Homo sapien
gagggccgagctctagaccatgctt

SEQ ID NO: 3645647 - DNA, 25 bp, Homo sapien
gcatagtttcttggcagctgtacca

SEQ ID NO: 3645648 - DNA, 25 bp, Homo sapien
cataacatggattgtcaaggtataa

SEQ ID NO: 3645649 - DNA, 25 bp, Homo sapien
tttcccaacaattgtgaaggagcat

SEQ ID NO: 3645650 - DNA, 25 bp, Homo sapien
tagtttcccaacaattgtgaaggag

SEQ ID NO: 3645651 - DNA, 25 bp, Homo sapien
agtcgttatagtttcccaacaattg

SEQ ID NO: 3645652 - DNA, 25 bp, Homo sapien
acagtcgttatagtttcccaacaat

SEQ ID NO: 3645653 - DNA, 25 bp, Homo sapien
taaacacaatgaagggagatataag

SEQ ID NO: 3645654 - DNA, 25 bp, Homo sapien
gtaaacacaatgaagggagatataa

SEQ ID NO: 3645655 - DNA, 25 bp, Homo sapien
aaaatcagaattatgtgtaaacaca

SEQ ID NO: 3645656 - DNA, 25 bp, Homo sapien
ggaaaaatcagaattatgtgtaaac

SEQ ID NO: 3645657 - DNA, 25 bp, Homo sapien
aagatgagcctttaaatattcttcc

SEQ ID NO: 3645658 - DNA, 25 bp, Homo sapien
accagactggagagctatacatttg

SEQ ID NO: 3645659 - DNA, 25 bp, Homo sapien
gagctatacatttgagcccacagaa

SEQ ID NO: 3645660 - DNA, 25 bp, Homo sapien
tccagtagtttaccatataatattc

SEQ ID NO: 3645661 - DNA, 25 bp, Homo sapien
aaatgatttccagtagtttaccata

SEQ ID NO: 3645662 - DNA, 25 bp, Homo sapien
aagctgtgtcaacgatggcgtgcac

SEQ ID NO: 3645663 - DNA, 25 bp, Homo sapien
tcgctgggccggttctgcttaactt

SEQ ID NO: 3645664 - DNA, 25 bp, Homo sapien
tcagaggttacagcgtcatgtccac

SEQ ID NO: 3645665 - DNA, 25 bp, Homo sapien
cagctcgttccgctgtgacgggaag

SEQ ID NO: 3645666 - DNA, 25 bp, Homo sapien
tctagtccacggagaaagtattgtt

SEQ ID NO: 3645667 - DNA, 25 bp, Homo sapien
tcctcacaagttcgcatatgtctga

SEQ ID NO: 3645668 - DNA, 25 bp, Homo sapien
gtcccatgacgtggactctagtcca

SEQ ID NO: 3645669 - DNA, 25 bp, Homo sapien
gaattactgagttcccggtcccatg

SEQ ID NO: 3645670 - DNA, 25 bp, Homo sapien
tgtaagggccttatcttcgtaacag

SEQ ID NO: 3645671 - DNA, 25 bp, Homo sapien
tagtgactttgatattgaaccccat

SEQ ID NO: 3645672 - DNA, 25 bp, Homo sapien
tactgtggaaattcaaaccccagga

SEQ ID NO: 3645673 - DNA, 25 bp, Homo sapien
caacttgtgcttgggactctgtcac

SEQ ID NO: 3645674 - DNA, 25 bp, Homo sapien
caaggagactgggacttagcatgct

SEQ ID NO: 3645675 - DNA, 25 bp, Homo sapien
ttttgccgaagcgagagtccactac

SEQ ID NO: 3645676 - DNA, 25 bp, Homo sapien
gctctaacataggtacacacgatcc

SEQ ID NO: 3645677 - DNA, 25 bp, Homo sapien
tgaggcggatcactgtacaactaga

SEQ ID NO: 3645678 - DNA, 25 bp, Homo sapien
tatttggacctattgatacagagcc

SEQ ID NO: 3645679 - DNA, 25 bp, Homo sapien
caagaaacctgaactgcgaatggac

SEQ ID NO: 3645680 - DNA, 25 bp, Homo sapien
taatcaagccattaggacctgccac

SEQ ID NO: 3645681 - DNA, 25 bp, Homo sapien
caagtggagaattgctaatcaagcc

SEQ ID NO: 3645682 - DNA, 25 bp, Homo sapien
tgaaattcacgtcagcatccctaga

SEQ ID NO: 3645683 - DNA, 25 bp, Homo sapien
ggcatacgatggcttaagctccaca

SEQ ID NO: 3645684 - DNA, 25 bp, Homo sapien
cagttcgtggaatacaggccttcta

SEQ ID NO: 3645685 - DNA, 25 bp, Homo sapien
tatatcggcgtgcagacagttcgtg

SEQ ID NO: 3645686 - DNA, 25 bp, Homo sapien
tattaaagaccactgaacagctgag

SEQ ID NO: 3645687 - DNA, 25 bp, Homo sapien
tagtattccgtaagacacatcgagc

SEQ ID NO: 3645688 - DNA, 25 bp, Homo sapien
tatgctgttcatgaccttgtgcagg

SEQ ID NO: 3645689 - DNA, 25 bp, Homo sapien
tcaatgcgtaatcccatccagaagg

SEQ ID NO: 3645690 - DNA, 25 bp, Homo sapien
ttccacggaatctggtgccaacctc

SEQ ID NO: 3645691 - DNA, 25 bp, Homo sapien
caattgttttccgtgcaaatcaact

SEQ ID NO: 3645692 - DNA, 25 bp, Homo sapien
caggaagagtaacaaagaacatctt

SEQ ID NO: 3645693 - DNA, 25 bp, Homo sapien
agtggaggattttgtttatgacatc

SEQ ID NO: 3645694 - DNA, 25 bp, Homo sapien
tactattagctgttaggacctcagt

SEQ ID NO: 3645695 - DNA, 25 bp, Homo sapien
tagagcttcacttccagccaaatac

SEQ ID NO: 3645696 - DNA, 25 bp, Homo sapien
cagtgtcccagactctagagcttca

SEQ ID NO: 3645697 - DNA, 25 bp, Homo sapien
gcttccagcatcacagtgtcccaga

SEQ ID NO: 3645698 - DNA, 25 bp, Homo sapien
tagtatcccacattcggttgagcaa

SEQ ID NO: 3645699 - DNA, 25 bp, Homo sapien
aataagtgtcgagttactgtgcacc

SEQ ID NO: 3645700 - DNA, 25 bp, Homo sapien
cacaggaagacggtgattcttgccc

SEQ ID NO: 3645701 - DNA, 25 bp, Homo sapien
tgttcagacagagcctattacaagt

SEQ ID NO: 3645702 - DNA, 25 bp, Homo sapien
gctgaggttttggaacacaaccatt

SEQ ID NO: 3645703 - DNA, 25 bp, Homo sapien
ccaagaagtccagggattggtgctc

SEQ ID NO: 3645704 - DNA, 25 bp, Homo sapien
taatatggcactatccctcaaataa

SEQ ID NO: 3645705 - DNA, 25 bp, Homo sapien
gaggaagactcacgtccctcgaatg

SEQ ID NO: 3645706 - DNA, 25 bp, Homo sapien
tgcaccacgcgctgagaggtgagag

SEQ ID NO: 3645707 - DNA, 25 bp, Homo sapien
ctggttggagcacccgcgccgggaa

SEQ ID NO: 3645708 - DNA, 25 bp, Homo sapien
tggagctatacagcggcgtgggcgg

SEQ ID NO: 3645709 - DNA, 25 bp, Homo sapien
ctctctattcgctcacgggggctgg

SEQ ID NO: 3645710 - DNA, 25 bp, Homo sapien
ctttccatattaggacaaaacttca

SEQ ID NO: 3645711 - DNA, 25 bp, Homo sapien
aaatcctataagattattgtatccc

SEQ ID NO: 3645712 - DNA, 25 bp, Homo sapien
tcaaatcaggtttgtaaaatcctat

SEQ ID NO: 3645713 - DNA, 25 bp, Homo sapien
taagattattgtatcccattgccat

SEQ ID NO: 3645714 - DNA, 25 bp, Homo sapien
cctgaatcactagtataccttttgt

SEQ ID NO: 3645715 - DNA, 25 bp, Homo sapien
tccagggtttgtcgggagccttgga

SEQ ID NO: 3645716 - DNA, 25 bp, Homo sapien
tgcaggagcaacttggcttgggttc

SEQ ID NO: 3645717 - DNA, 25 bp, Homo sapien
gtcagccaaggatttacctgaatca

SEQ ID NO: 3645718 - DNA, 25 bp, Homo sapien
gcatttatttcttgacaattgacat

SEQ ID NO: 3645719 - DNA, 25 bp, Homo sapien
caattgacatttttttctgtgttaa

SEQ ID NO: 3645720 - DNA, 25 bp, Homo sapien
tgcttgatggcccaacagcatttat

SEQ ID NO: 3645721 - DNA, 25 bp, Homo sapien
cagcatttatttcttgacaattgac

SEQ ID NO: 3645722 - DNA, 25 bp, Homo sapien
caatactgcaattggcttccgttcc

SEQ ID NO: 3645723 - DNA, 25 bp, Homo sapien
tactgcaattggcttccgttcctcc

SEQ ID NO: 3645724 - DNA, 25 bp, Homo sapien
tgcaatactgcaattggcttccgtt

SEQ ID NO: 3645725 - DNA, 25 bp, Homo sapien
ctgcaattggcttccgttcctccat

SEQ ID NO: 3645726 - DNA, 25 bp, Homo sapien
ctggtgcccatagccgattcctcag

SEQ ID NO: 3645727 - DNA, 25 bp, Homo sapien
ggaggacaaggcattggcgaggtgt

SEQ ID NO: 3645728 - DNA, 25 bp, Homo sapien
catagccgattcctcagggctgcgg

SEQ ID NO: 3645729 - DNA, 25 bp, Homo sapien
cattggcgaggtgtggcactgtgcc

SEQ ID NO: 3645730 - DNA, 25 bp, Homo sapien
gatcccagggcaatgcgacgcttgc

SEQ ID NO: 3645731 - DNA, 25 bp, Homo sapien
caatgcgacgcttgctgactgactc

SEQ ID NO: 3645732 - DNA, 25 bp, Homo sapien
cagtgccgatcccagggcaatgcga

SEQ ID NO: 3645733 - DNA, 25 bp, Homo sapien
ttctacgtgcagtgccgatcccagg

SEQ ID NO: 3645734 - DNA, 25 bp, Homo sapien
tttaataactcgctaaagcctgtct

SEQ ID NO: 3645735 - DNA, 25 bp, Homo sapien
gcctgtctttgctcgaatgtgcgga

SEQ ID NO: 3645736 - DNA, 25 bp, Homo sapien
tcgaatgtgcggactttttgttagc

SEQ ID NO: 3645737 - DNA, 25 bp, Homo sapien
tcgctaaagcctgtctttgctcgaa

SEQ ID NO: 3645738 - DNA, 25 bp, Homo sapien
tcgccttgctgtgtgcggtcgggcc

SEQ ID NO: 3645739 - DNA, 25 bp, Homo sapien
gccatcgccttgctgtgtgcggtcg

SEQ ID NO: 3645740 - DNA, 25 bp, Homo sapien
ccatcgccttgctgtgtgcggtcgg

SEQ ID NO: 3645741 - DNA, 25 bp, Homo sapien
gggccatcgccttgctgtgtgcggt

SEQ ID NO: 3645742 - DNA, 25 bp, Homo sapien
ctccgcgcgcgctgctagttctcag

SEQ ID NO: 3645743 - DNA, 25 bp, Homo sapien
tgattcaagtctcagcgggctccgc

SEQ ID NO: 3645744 - DNA, 25 bp, Homo sapien
tccgcgcgcgctgctagttctcagt

SEQ ID NO: 3645745 - DNA, 25 bp, Homo sapien
attcaagtctcagcgggctccgcgc

SEQ ID NO: 3645746 - DNA, 25 bp, Homo sapien
cctgctgtcccgccgattgagggct

SEQ ID NO: 3645747 - DNA, 25 bp, Homo sapien
ccctgctgtcccgccgattgagggc

SEQ ID NO: 3645748 - DNA, 25 bp, Homo sapien
ctgctgtcccgccgattgagggctc

SEQ ID NO: 3645749 - DNA, 25 bp, Homo sapien
agtccagcttcggacggcgggagtt

SEQ ID NO: 3645750 - DNA, 25 bp, Homo sapien
tcgagggacctaacgggctcagtcc

SEQ ID NO: 3645751 - DNA, 25 bp, Homo sapien
gcgagacggcggtggcagaggaaag

SEQ ID NO: 3645752 - DNA, 25 bp, Homo sapien
ttctgtcgagggacctaacgggctc

SEQ ID NO: 3645753 - DNA, 25 bp, Homo sapien
gactgggcatggtcccgttacttca

SEQ ID NO: 3645754 - DNA, 25 bp, Homo sapien
ccaatagggacctagcgagaagcgg

SEQ ID NO: 3645755 - DNA, 25 bp, Homo sapien
ctggaccccgccgagggcgctgttt

SEQ ID NO: 3645756 - DNA, 25 bp, Homo sapien
tccggatgatagtctgagctgggct

SEQ ID NO: 3645757 - DNA, 25 bp, Homo sapien
agcgcggctgcgtctctggcgcggg

SEQ ID NO: 3645758 - DNA, 25 bp, Homo sapien
ggcggtggcgcggactggctcccgg

SEQ ID NO: 3645759 - DNA, 25 bp, Homo sapien
actggctcccggagaagaggcgaac

SEQ ID NO: 3645760 - DNA, 25 bp, Homo sapien
agaggcgaacgagggcgcggtgggt

SEQ ID NO: 3645761 - DNA, 25 bp, Homo sapien
cgggtggacgtagtcacgtagctcc

SEQ ID NO: 3645762 - DNA, 25 bp, Homo sapien
acgtagtcacgtagctccggctgga

SEQ ID NO: 3645763 - DNA, 25 bp, Homo sapien
tggacgtagtcacgtagctccggct

SEQ ID NO: 3645764 - DNA, 25 bp, Homo sapien
ctgtaggtgcgggtggacgtagtca

SEQ ID NO: 3645765 - DNA, 25 bp, Homo sapien
tgctggggcgcagcgcgctgcccag

SEQ ID NO: 3645766 - DNA, 25 bp, Homo sapien
tggtgctggggcgcagcgcgctgcc

SEQ ID NO: 3645767 - DNA, 25 bp, Homo sapien
gctggtgctggggcgcagcgcgctg

SEQ ID NO: 3645768 - DNA, 25 bp, Homo sapien
gtgctggggcgcagcgcgctgccca

SEQ ID NO: 3645769 - DNA, 25 bp, Homo sapien
cgggcacgctgctccgcaggcgcac

SEQ ID NO: 3645770 - DNA, 25 bp, Homo sapien
tcgttggtgcgggtgttcttgaact

SEQ ID NO: 3645771 - DNA, 25 bp, Homo sapien
agcgagaagtccaccgagtcctgca

SEQ ID NO: 3645772 - DNA, 25 bp, Homo sapien
tcggccagcgagaagtccaccgagt

SEQ ID NO: 3645773 - DNA, 25 bp, Homo sapien
aactcggtgttgatggcgtcggcca

SEQ ID NO: 3645774 - DNA, 25 bp, Homo sapien
ggcgaagcggtcattcagctcctgc

SEQ ID NO: 3645775 - DNA, 25 bp, Homo sapien
gtagttggcgaagcggtcattcagc

SEQ ID NO: 3645776 - DNA, 25 bp, Homo sapien
agttggcgaagcggtcattcagctc

SEQ ID NO: 3645777 - DNA, 25 bp, Homo sapien
ttggcgaagcggtcattcagctcct

SEQ ID NO: 3645778 - DNA, 25 bp, Homo sapien
tgtcgttggttagctggtccacctg

SEQ ID NO: 3645779 - DNA, 25 bp, Homo sapien
gctcggccagcaggatcttattctg

SEQ ID NO: 3645780 - DNA, 25 bp, Homo sapien
ttgccttggcccttgagctgctcga

SEQ ID NO: 3645781 - DNA, 25 bp, Homo sapien
tcgacgcgggctttgtcgttggtta

SEQ ID NO: 3645782 - DNA, 25 bp, Homo sapien
gtcctcggccaggttgtcgcgctcc

SEQ ID NO: 3645783 - DNA, 25 bp, Homo sapien
cctcggccaggttgtcgcgctccac

SEQ ID NO: 3645784 - DNA, 25 bp, Homo sapien
tcctcggccaggttgtcgcgctcca

SEQ ID NO: 3645785 - DNA, 25 bp, Homo sapien
cctcggcaggtttcagcgggacttc

SEQ ID NO: 3645786 - DNA, 25 bp, Homo sapien
tctgaaagtttggaggactggctct

SEQ ID NO: 3645787 - DNA, 25 bp, Homo sapien
gaaacagttgcgcattaaccaaagg

SEQ ID NO: 3645788 - DNA, 25 bp, Homo sapien
tctgtaacttgaaacggagcgtcct

SEQ ID NO: 3645789 - DNA, 25 bp, Homo sapien
tgtctgaaagattgcagggtgtttt

SEQ ID NO: 3645790 - DNA, 25 bp, Homo sapien
tctgaaagattgcagggtgttttcg

SEQ ID NO: 3645791 - DNA, 25 bp, Homo sapien
gtctgaaagattgcagggtgttttc

SEQ ID NO: 3645792 - DNA, 25 bp, Homo sapien
ctgtctgaaagattgcagggtgttt

SEQ ID NO: 3645793 - DNA, 25 bp, Homo sapien
acctgtggtcttcccgccactagag

SEQ ID NO: 3645794 - DNA, 25 bp, Homo sapien
cttttagaattgctcgtgggttgtg

SEQ ID NO: 3645795 - DNA, 25 bp, Homo sapien
agttttgcactttttagacgtgagt

SEQ ID NO: 3645796 - DNA, 25 bp, Homo sapien
gctttacgcgcagccctgaagtttt

SEQ ID NO: 3645797 - DNA, 25 bp, Homo sapien
ccagaaggtcaatgtgttgcaaaac

SEQ ID NO: 3645798 - DNA, 25 bp, Homo sapien
tttggcaaaccacaatctaaaattg

SEQ ID NO: 3645799 - DNA, 25 bp, Homo sapien
ttttaaactgcagggcataattgcg

SEQ ID NO: 3645800 - DNA, 25 bp, Homo sapien
tgtcccaaggaactgcttagaaatc

SEQ ID NO: 3645801 - DNA, 25 bp, Homo sapien
tctggcatccattgtacaaggctag

SEQ ID NO: 3645802 - DNA, 25 bp, Homo sapien
tatgcatgccaaagattcagttcag

SEQ ID NO: 3645803 - DNA, 25 bp, Homo sapien
catagtgaagcccatagaaaccatt

SEQ ID NO: 3645804 - DNA, 25 bp, Homo sapien
tacttgtgtccaattagaaccgtgc

SEQ ID NO: 3645805 - DNA, 25 bp, Homo sapien
ggtggtgatcagacaattttaaaat

SEQ ID NO: 3645806 - DNA, 25 bp, Homo sapien
cattcagtgctataatatgctgtgc

SEQ ID NO: 3645807 - DNA, 25 bp, Homo sapien
cttgtgttttactcaaggtggtgat

SEQ ID NO: 3645808 - DNA, 25 bp, Homo sapien
ggtaaactgcactcaatcatgactg

SEQ ID NO: 3645809 - DNA, 25 bp, Homo sapien
tatagaaaagccgttgacacatttt

SEQ ID NO: 3645810 - DNA, 25 bp, Homo sapien
tagaaaagccgttgacacattttat

SEQ ID NO: 3645811 - DNA, 25 bp, Homo sapien
agaaaagccgttgacacattttatg

SEQ ID NO: 3645812 - DNA, 25 bp, Homo sapien
gaaaagccgttgacacattttatga

SEQ ID NO: 3645813 - DNA, 25 bp, Homo sapien
aaccatctgaacctagtctccttac

SEQ ID NO: 3645814 - DNA, 25 bp, Homo sapien
aaagacaggacatggaggatgtaaa

SEQ ID NO: 3645815 - DNA, 25 bp, Homo sapien
tatttgtcttagattaaccatctga

SEQ ID NO: 3645816 - DNA, 25 bp, Homo sapien
catggaggatgtaaaagtgtatggc

SEQ ID NO: 3645817 - DNA, 25 bp, Homo sapien
tcaagacgtgccagagacgcattgt

SEQ ID NO: 3645818 - DNA, 25 bp, Homo sapien
tcttgcaaagattccactttgcgtt

SEQ ID NO: 3645819 - DNA, 25 bp, Homo sapien
gtgccagagacgcattgtcaacatc

SEQ ID NO: 3645820 - DNA, 25 bp, Homo sapien
ttgcgttcaaggtcaagacgtgcca

SEQ ID NO: 3645821 - DNA, 25 bp, Homo sapien
tggaaacatccacatcgatttggac

SEQ ID NO: 3645822 - DNA, 25 bp, Homo sapien
gcagggcagccgtgaggtcaggctt

SEQ ID NO: 3645823 - DNA, 25 bp, Homo sapien
cactttcatattgctgacgtacgtc

SEQ ID NO: 3645824 - DNA, 25 bp, Homo sapien
catcgatttggacatgctgttcctg

SEQ ID NO: 3645825 - DNA, 25 bp, Homo sapien
tattttcagagttcactctacagtg

SEQ ID NO: 3645826 - DNA, 25 bp, Homo sapien
aatgtcttccagtataggtttaaat

SEQ ID NO: 3645827 - DNA, 25 bp, Homo sapien
cacagtggaggtcaaaggtatggca

SEQ ID NO: 3645828 - DNA, 25 bp, Homo sapien
gagcagtggagtactgacattagta

SEQ ID NO: 3645829 - DNA, 25 bp, Homo sapien
aatgtagattgctcacattcaagtc

SEQ ID NO: 3645830 - DNA, 25 bp, Homo sapien
acagaaatgtagattgctcacattc

SEQ ID NO: 3645831 - DNA, 25 bp, Homo sapien
gtagattgctcacattcaagtcttt

SEQ ID NO: 3645832 - DNA, 25 bp, Homo sapien
gaaatgtagattgctcacattcaag

SEQ ID NO: 3645833 - DNA, 25 bp, Homo sapien
attgttccggttggcagcctcagag

SEQ ID NO: 3645834 - DNA, 25 bp, Homo sapien
tctccggtactcagtggactcctgc

SEQ ID NO: 3645835 - DNA, 25 bp, Homo sapien
cacctgtctccggtactcagtggac

SEQ ID NO: 3645836 - DNA, 25 bp, Homo sapien
tggcgcagggcgtcattgttccggt

SEQ ID NO: 3645837 - DNA, 25 bp, Homo sapien
ggtatcatcatgagcctagtcagca

SEQ ID NO: 3645838 - DNA, 25 bp, Homo sapien
gagaatgcgagtaccaagtccttca

SEQ ID NO: 3645839 - DNA, 25 bp, Homo sapien
taatttccattagcggcaaatggcg

SEQ ID NO: 3645840 - DNA, 25 bp, Homo sapien
aatggcgaccactctaattttaggt

SEQ ID NO: 3645841 - DNA, 25 bp, Homo sapien
tagcagcttcaacggcaaagttctc

SEQ ID NO: 3645842 - DNA, 25 bp, Homo sapien
caagggccatcttaacattgagcag

SEQ ID NO: 3645843 - DNA, 25 bp, Homo sapien
cgaaggtgacgagccatttcctcct

SEQ ID NO: 3645844 - DNA, 25 bp, Homo sapien
caatagtgtcttggtagttagcagc

SEQ ID NO: 3645845 - DNA, 25 bp, Homo sapien
attagttcacgcatccaagtctgag

SEQ ID NO: 3645846 - DNA, 25 bp, Homo sapien
gcacagggcctaacaaatggtcacc

SEQ ID NO: 3645847 - DNA, 25 bp, Homo sapien
tccacaggagcatgaacaggagtta

SEQ ID NO: 3645848 - DNA, 25 bp, Homo sapien
tgacagagttatgggttcaaatccc

SEQ ID NO: 3645849 - DNA, 25 bp, Homo sapien
gaaaagtttggaagaggcagagaaa

SEQ ID NO: 3645850 - DNA, 25 bp, Homo sapien
aaagtttggaagaggcagagaaatc

SEQ ID NO: 3645851 - DNA, 25 bp, Homo sapien
aggaaaagtttggaagaggcagaga

SEQ ID NO: 3645852 - DNA, 25 bp, Homo sapien
ctcaggttcagggaggaaaagtttg

SEQ ID NO: 3645853 - DNA, 25 bp, Homo sapien
caggatgagatagtacttgcagcag

SEQ ID NO: 3645854 - DNA, 25 bp, Homo sapien
gacactcttgagcatcaggatgaga

SEQ ID NO: 3645855 - DNA, 25 bp, Homo sapien
caagcagctgacgtttttcctaaag

SEQ ID NO: 3645856 - DNA, 25 bp, Homo sapien
gcaattgtgtaaagtactactcgcc

SEQ ID NO: 3645857 - DNA, 25 bp, Homo sapien
tcctttttgagtgggtatcaaccag

SEQ ID NO: 3645858 - DNA, 25 bp, Homo sapien
ctgtccatctctagtttcaaccgtc

SEQ ID NO: 3645859 - DNA, 25 bp, Homo sapien
cagaagtgtcctttttgagtgggta

SEQ ID NO: 3645860 - DNA, 25 bp, Homo sapien
ttcaaccgtcttaatcagaagtgtc

SEQ ID NO: 3645861 - DNA, 25 bp, Homo sapien
taggaagacaccatatgtccaggat

SEQ ID NO: 3645862 - DNA, 25 bp, Homo sapien
aactaaatgatcgtatggcacatgc

SEQ ID NO: 3645863 - DNA, 25 bp, Homo sapien
tacaggcaatataaggatccagtgg

SEQ ID NO: 3645864 - DNA, 25 bp, Homo sapien
tatttctttcctggcatagggaggt

SEQ ID NO: 3645865 - DNA, 25 bp, Homo sapien
ttattcaaggtcatcgtgatgctga

SEQ ID NO: 3645866 - DNA, 25 bp, Homo sapien
tattcaaggtcatcgtgatgctgag

SEQ ID NO: 3645867 - DNA, 25 bp, Homo sapien
tgctggtaatatattgctgcactga

SEQ ID NO: 3645868 - DNA, 25 bp, Homo sapien
ctggtaatatattgctgcactgagt

SEQ ID NO: 3645869 - DNA, 25 bp, Homo sapien
tggtaatatattgctgcactgagtg

SEQ ID NO: 3645870 - DNA, 25 bp, Homo sapien
gctggtaatatattgctgcactgag

SEQ ID NO: 3645871 - DNA, 25 bp, Homo sapien
ctatcttgcgctcctgaaaaactgc

SEQ ID NO: 3645872 - DNA, 25 bp, Homo sapien
caaatctatcttgcgctcctgaaaa

SEQ ID NO: 3645873 - DNA, 25 bp, Homo sapien
tattccaaatctatcttgcgctcct

SEQ ID NO: 3645874 - DNA, 25 bp, Homo sapien
tcctattccaaatctatcttgcgct

SEQ ID NO: 3645875 - DNA, 25 bp, Homo sapien
tctaaatcttgtaggagtgtcggtt

SEQ ID NO: 3645876 - DNA, 25 bp, Homo sapien
ggagtgtcggttgttaagaactaga

SEQ ID NO: 3645877 - DNA, 25 bp, Homo sapien
cttgtaggagtgtcggttgttaaga

SEQ ID NO: 3645878 - DNA, 25 bp, Homo sapien
ttttctaaatcttgtaggagtgtcg

SEQ ID NO: 3645879 - DNA, 25 bp, Homo sapien
gcagttttaatggtattcaaaatac

SEQ ID NO: 3645880 - DNA, 25 bp, Homo sapien
tgacaaattaactaataggaccaag

SEQ ID NO: 3645881 - DNA, 25 bp, Homo sapien
agaagtgaggtctatcaaaaatgac

SEQ ID NO: 3645882 - DNA, 25 bp, Homo sapien
caagttattttattcgacaccacct

SEQ ID NO: 3645883 - DNA, 25 bp, Homo sapien
gacctgagctcattttagagagacc

SEQ ID NO: 3645884 - DNA, 25 bp, Homo sapien
gggtaggccgtactggtcaatattc

SEQ ID NO: 3645885 - DNA, 25 bp, Homo sapien
ttgaactgaattgacctggtggtct

SEQ ID NO: 3645886 - DNA, 25 bp, Homo sapien
gacctggtggtctgctttgccacat

SEQ ID NO: 3645887 - DNA, 25 bp, Homo sapien
cttgcgtcaaggagaattgaattga

SEQ ID NO: 3645888 - DNA, 25 bp, Homo sapien
tccatagatggactactgttaaccc

SEQ ID NO: 3645889 - DNA, 25 bp, Homo sapien
tgttaaccctcagatcagagtcata

SEQ ID NO: 3645890 - DNA, 25 bp, Homo sapien
cagagtcatagaatttagtctgcct

SEQ ID NO: 3645891 - DNA, 25 bp, Homo sapien
ccaggaaccacagtataagatacat

SEQ ID NO: 3645892 - DNA, 25 bp, Homo sapien
ggtcctaccaagctgctgggcttct

SEQ ID NO: 3645893 - DNA, 25 bp, Homo sapien
tgggtcctaccaagctgctgggctt

SEQ ID NO: 3645894 - DNA, 25 bp, Homo sapien
gtgggaactgggtcctaccaagctg

SEQ ID NO: 3645895 - DNA, 25 bp, Homo sapien
gggaactgggtcctaccaagctgct

SEQ ID NO: 3645896 - DNA, 25 bp, Homo sapien
tttctgtttgacgatcttcaactca

SEQ ID NO: 3645897 - DNA, 25 bp, Homo sapien
ttctgtttgacgatcttcaactcac

SEQ ID NO: 3645898 - DNA, 25 bp, Homo sapien
atcctccaggtctgctaaccgcttg

SEQ ID NO: 3645899 - DNA, 25 bp, Homo sapien
tgctaaccgcttgcaggtgccaaac

SEQ ID NO: 3645900 - DNA, 25 bp, Homo sapien
ccgcttgcaggtgccaaactgcaga

SEQ ID NO: 3645901 - DNA, 25 bp, Homo sapien
tccaggtctgctaaccgcttgcagg

SEQ ID NO: 3645902 - DNA, 25 bp, Homo sapien
tcttatactttggcttccttttcat

SEQ ID NO: 3645903 - DNA, 25 bp, Homo sapien
atcttatactttggcttccttttca

SEQ ID NO: 3645904 - DNA, 25 bp, Homo sapien
tttcttaatcttatactttggcttc

SEQ ID NO: 3645905 - DNA, 25 bp, Homo sapien
cttaatcttatactttggcttcctt

SEQ ID NO: 3645906 - DNA, 25 bp, Homo sapien
caagggatatgaaacctggaggaca

SEQ ID NO: 3645907 - DNA, 25 bp, Homo sapien
cggcattgtccatcgtggtctgcat

SEQ ID NO: 3645908 - DNA, 25 bp, Homo sapien
tcctcttcggcattgtccatcgtgg

SEQ ID NO: 3645909 - DNA, 25 bp, Homo sapien
gtttggcaaaatcctcttcggcatt

SEQ ID NO: 3645910 - DNA, 25 bp, Homo sapien
tctgggctcttttgccatccggctt

SEQ ID NO: 3645911 - DNA, 25 bp, Homo sapien
caaggaggagcatgaaaaagagatc

SEQ ID NO: 3645912 - DNA, 25 bp, Homo sapien
gggctcttttgccatccggcttttc

SEQ ID NO: 3645913 - DNA, 25 bp, Homo sapien
gaagctggcggaggcctgaataact

SEQ ID NO: 3645914 - DNA, 25 bp, Homo sapien
gactgaagcaatttggatccctgta

SEQ ID NO: 3645915 - DNA, 25 bp, Homo sapien
tagctcagtctaagcccaaaggctg

SEQ ID NO: 3645916 - DNA, 25 bp, Homo sapien
tatgaaggtcctagaaccaggagca

SEQ ID NO: 3645917 - DNA, 25 bp, Homo sapien
gatttattacgagggattagctccc

SEQ ID NO: 3645918 - DNA, 25 bp, Homo sapien
gagtggagcccagattcagagactg

SEQ ID NO: 3645919 - DNA, 25 bp, Homo sapien
caattcaatactgcaacgccatcgt

SEQ ID NO: 3645920 - DNA, 25 bp, Homo sapien
gccatcgtaattcaaagcattgctg

SEQ ID NO: 3645921 - DNA, 25 bp, Homo sapien
caatcctattggtgcctactggtca

SEQ ID NO: 3645922 - DNA, 25 bp, Homo sapien
tgaaggacgaaattaaaaggcagcc

SEQ ID NO: 3645923 - DNA, 25 bp, Homo sapien
tcatctttgtaggcgccgtgacttg

SEQ ID NO: 3645924 - DNA, 25 bp, Homo sapien
tgtaggcgccgtgacttgattttgt

SEQ ID NO: 3645925 - DNA, 25 bp, Homo sapien
attctctggcacagatatcaggtga

SEQ ID NO: 3645926 - DNA, 25 bp, Homo sapien
gttccattggtctccatctttgttt

SEQ ID NO: 3645927 - DNA, 25 bp, Homo sapien
ggggatgacactgtatctataaatt

SEQ ID NO: 3645928 - DNA, 25 bp, Homo sapien
gatgacactgtatctataaattacc

SEQ ID NO: 3645929 - DNA, 25 bp, Homo sapien
tgttccattggtctccatctttgtt

SEQ ID NO: 3645930 - DNA, 25 bp, Homo sapien
agagtagaatgaggaattcaatctg

SEQ ID NO: 3645931 - DNA, 25 bp, Homo sapien
gaccagacaagtgcagtaatgagaa

SEQ ID NO: 3645932 - DNA, 25 bp, Homo sapien
ggaaaaagagtagaatgaggaattc

SEQ ID NO: 3645933 - DNA, 25 bp, Homo sapien
agaccagacaagtgcagtaatgaga

SEQ ID NO: 3645934 - DNA, 25 bp, Homo sapien
tagatgtccccagtaacataagtct

SEQ ID NO: 3645935 - DNA, 25 bp, Homo sapien
aaataattatgttagatgtccccag

SEQ ID NO: 3645936 - DNA, 25 bp, Homo sapien
tatgttagatgtccccagtaacata

SEQ ID NO: 3645937 - DNA, 25 bp, Homo sapien
taattatgttagatgtccccagtaa

SEQ ID NO: 3645938 - DNA, 25 bp, Homo sapien
gtcttctcagaagcgacagggtttc

SEQ ID NO: 3645939 - DNA, 25 bp, Homo sapien
acagggtttcttcggtcgtcatcca

SEQ ID NO: 3645940 - DNA, 25 bp, Homo sapien
tattcaagggttgcatttgtcgggc

SEQ ID NO: 3645941 - DNA, 25 bp, Homo sapien
gcctgactgggtgctttggccatga

SEQ ID NO: 3645942 - DNA, 25 bp, Homo sapien
atataactgacatttaatgacattt

SEQ ID NO: 3645943 - DNA, 25 bp, Homo sapien
tattgactcccagacttggaccggt

SEQ ID NO: 3645944 - DNA, 25 bp, Homo sapien
tacaggagttcctaggtattgaacc

SEQ ID NO: 3645945 - DNA, 25 bp, Homo sapien
gacatgacaatggtaaaacagcaca

SEQ ID NO: 3645946 - DNA, 25 bp, Homo sapien
tgaggaagtcataccagagacagac

SEQ ID NO: 3645947 - DNA, 25 bp, Homo sapien
taatgagaacacttgagtaacatca

SEQ ID NO: 3645948 - DNA, 25 bp, Homo sapien
tataattagctgaaggttaaccagg

SEQ ID NO: 3645949 - DNA, 25 bp, Homo sapien
aggtcccttgggatgctctgctaac

SEQ ID NO: 3645950 - DNA, 25 bp, Homo sapien
cattttgtgattgataggtcccttg

SEQ ID NO: 3645951 - DNA, 25 bp, Homo sapien
gctgagaatggcaaatctcttcagc

SEQ ID NO: 3645952 - DNA, 25 bp, Homo sapien
gagtgggggtagaagttgagacagg

SEQ ID NO: 3645953 - DNA, 25 bp, Homo sapien
tgagaatggcaaatctcttcagctg

SEQ ID NO: 3645954 - DNA, 25 bp, Homo sapien
gggatccccaaaggtgaaagctgag

SEQ ID NO: 3645955 - DNA, 25 bp, Homo sapien
gtagacagtctgtttttcttatatc

SEQ ID NO: 3645956 - DNA, 25 bp, Homo sapien
taagccaatagttggaggaactctg

SEQ ID NO: 3645957 - DNA, 25 bp, Homo sapien
tcttgaattgctcaagcagaatgag

SEQ ID NO: 3645958 - DNA, 25 bp, Homo sapien
cagaatgagaatgtgataagactcg

SEQ ID NO: 3645959 - DNA, 25 bp, Homo sapien
gccagtgaacatgcactgaggcctc

SEQ ID NO: 3645960 - DNA, 25 bp, Homo sapien
cagtgaacatgcactgaggcctcat

SEQ ID NO: 3645961 - DNA, 25 bp, Homo sapien
ccagtgaacatgcactgaggcctca

SEQ ID NO: 3645962 - DNA, 25 bp, Homo sapien
tgggtgggtcggagagtctgtgccc

SEQ ID NO: 3645963 - DNA, 25 bp, Homo sapien
aagtcacaagagaaaccataaacca

SEQ ID NO: 3645964 - DNA, 25 bp, Homo sapien
ggtggccacctccagaaagttgccc

SEQ ID NO: 3645965 - DNA, 25 bp, Homo sapien
cccagccttaaaggcggaagctggt

SEQ ID NO: 3645966 - DNA, 25 bp, Homo sapien
tgagtgtaatttaggccccaggcca

SEQ ID NO: 3645967 - DNA, 25 bp, Homo sapien
tcagcatgggagtccttgccgaatc

SEQ ID NO: 3645968 - DNA, 25 bp, Homo sapien
ccttgccgaatctgggagcttggag

SEQ ID NO: 3645969 - DNA, 25 bp, Homo sapien
tgcagaataagccacgcatggtcag

SEQ ID NO: 3645970 - DNA, 25 bp, Homo sapien
ccaactacttggcaggttgaggcag

SEQ ID NO: 3645971 - DNA, 25 bp, Homo sapien
cttggcaggttgaggcagaagaatt

SEQ ID NO: 3645972 - DNA, 25 bp, Homo sapien
ctgagtgtgatggcacatgtgtagt

SEQ ID NO: 3645973 - DNA, 25 bp, Homo sapien
tgagtgtgatggcacatgtgtagtc

SEQ ID NO: 3645974 - DNA, 25 bp, Homo sapien
ggtcccagagctaggagctatattg

SEQ ID NO: 3645975 - DNA, 25 bp, Homo sapien
ttaatgccgaatacacaaaagccaa

SEQ ID NO: 3645976 - DNA, 25 bp, Homo sapien
tgaactttgagagcccatttgtaaa

SEQ ID NO: 3645977 - DNA, 25 bp, Homo sapien
taagtgtgcaaatgaattggagtct

SEQ ID NO: 3645978 - DNA, 25 bp, Homo sapien
aagttttagaacacggagagtgcat

SEQ ID NO: 3645979 - DNA, 25 bp, Homo sapien
tttccacatggatcacagacaaaag

SEQ ID NO: 3645980 - DNA, 25 bp, Homo sapien
ggtttccacatggatcacagacaaa

SEQ ID NO: 3645981 - DNA, 25 bp, Homo sapien
gtttccacatggatcacagacaaaa

SEQ ID NO: 3645982 - DNA, 25 bp, Homo sapien
tggtttccacatggatcacagacaa

SEQ ID NO: 3645983 - DNA, 25 bp, Homo sapien
tggaaaaagctgtaacaacctggaa

SEQ ID NO: 3645984 - DNA, 25 bp, Homo sapien
ttggaaaaagctgtaacaacctgga

SEQ ID NO: 3645985 - DNA, 25 bp, Homo sapien
ctgtaacaacctggaaaatattgca

SEQ ID NO: 3645986 - DNA, 25 bp, Homo sapien
gtaacaacctggaaaatattgcatt

SEQ ID NO: 3645987 - DNA, 25 bp, Homo sapien
gaggcaacgttcgacagacaatacc

SEQ ID NO: 3645988 - DNA, 25 bp, Homo sapien
cacttctcttaacaaagaggctggg

SEQ ID NO: 3645989 - DNA, 25 bp, Homo sapien
tactacttacttgacagcacttctc

SEQ ID NO: 3645990 - DNA, 25 bp, Homo sapien
tctttttatgactcacgaggcaacg

SEQ ID NO: 3645991 - DNA, 25 bp, Homo sapien
ggtagaggaacagggcagcagttca

SEQ ID NO: 3645992 - DNA, 25 bp, Homo sapien
tgggtagaggaacagggcagcagtt

SEQ ID NO: 3645993 - DNA, 25 bp, Homo sapien
gtagaggaacagggcagcagttcat

SEQ ID NO: 3645994 - DNA, 25 bp, Homo sapien
ctgggtagaggaacagggcagcagt

SEQ ID NO: 3645995 - DNA, 25 bp, Homo sapien
gaaatgccctgctattgcctttcct

SEQ ID NO: 3645996 - DNA, 25 bp, Homo sapien
aatgccctgctattgcctttcctct

SEQ ID NO: 3645997 - DNA, 25 bp, Homo sapien
ggaaatgccctgctattgcctttcc

SEQ ID NO: 3645998 - DNA, 25 bp, Homo sapien
aaatgccctgctattgcctttcctc

SEQ ID NO: 3645999 - DNA, 25 bp, Homo sapien
aagctatcaggtgcaattgtccggg

SEQ ID NO: 3646000 - DNA, 25 bp, Homo sapien
cccaggtagagggctacagagtatg

SEQ ID NO: 3646001 - DNA, 25 bp, Homo sapien
tgtcttttcacgtgcacaggagagc

SEQ ID NO: 3646002 - DNA, 25 bp, Homo sapien
acagagtatgggctgcagtcacccc

SEQ ID NO: 3646003 - DNA, 25 bp, Homo sapien
ttttgtgtagacttgtgtctgttcg

SEQ ID NO: 3646004 - DNA, 25 bp, Homo sapien
cgaaatgtgcgcttgtcattttgtg

SEQ ID NO: 3646005 - DNA, 25 bp, Homo sapien
cttgtgtctgttcgtaagaatgtaa

SEQ ID NO: 3646006 - DNA, 25 bp, Homo sapien
gttgccaccgaaatgtgcgcttgtc

SEQ ID NO: 3646007 - DNA, 25 bp, Homo sapien
cgcgccactaacaggtacagcggcg

SEQ ID NO: 3646008 - DNA, 25 bp, Homo sapien
ggcgaccgcggtaccgcgcgccact

SEQ ID NO: 3646009 - DNA, 25 bp, Homo sapien
ctgaggacgctccggagcccggcga

SEQ ID NO: 3646010 - DNA, 25 bp, Homo sapien
ggtaccgcgcgccactaacaggtac

SEQ ID NO: 3646011 - DNA, 25 bp, Homo sapien
tgggagccggggagtgcgagatctc

SEQ ID NO: 3646012 - DNA, 25 bp, Homo sapien
ctgggagccggggagtgcgagatct

SEQ ID NO: 3646013 - DNA, 25 bp, Homo sapien
gggagccggggagtgcgagatctcc

SEQ ID NO: 3646014 - DNA, 25 bp, Homo sapien
tccttcccgccctaaggctcttcca

SEQ ID NO: 3646015 - DNA, 25 bp, Homo sapien
tcgggttccgcatcaggatctcatg

SEQ ID NO: 3646016 - DNA, 25 bp, Homo sapien
ctgccgtcgggttccgcatcaggat

SEQ ID NO: 3646017 - DNA, 25 bp, Homo sapien
gccctaaggctcttccaactctggg

SEQ ID NO: 3646018 - DNA, 25 bp, Homo sapien
tgtgggcgaggcagctgtggagcgg

SEQ ID NO: 3646019 - DNA, 25 bp, Homo sapien
ctgtgggcgaggcagctgtggagcg

SEQ ID NO: 3646020 - DNA, 25 bp, Homo sapien
gggcgaggcagctgtggagcgggac

SEQ ID NO: 3646021 - DNA, 25 bp, Homo sapien
tgggcgaggcagctgtggagcggga

SEQ ID NO: 3646022 - DNA, 25 bp, Homo sapien
gggctgcgggggctctagcgcgcat

SEQ ID NO: 3646023 - DNA, 25 bp, Homo sapien
gctgcgggggctctagcgcgcatcg

SEQ ID NO: 3646024 - DNA, 25 bp, Homo sapien
ggctgcgggggctctagcgcgcatc

SEQ ID NO: 3646025 - DNA, 25 bp, Homo sapien
gcggcgacggcctgagagtggagtg

SEQ ID NO: 3646026 - DNA, 25 bp, Homo sapien
cctcgggcgcggagacttttggccg

SEQ ID NO: 3646027 - DNA, 25 bp, Homo sapien
ctccgaccggtggacggcggctggg

SEQ ID NO: 3646028 - DNA, 25 bp, Homo sapien
gggtcgcagggaggcgaccctccga

SEQ ID NO: 3646029 - DNA, 25 bp, Homo sapien
tgctctggtgcccggcagacgcgcc

SEQ ID NO: 3646030 - DNA, 25 bp, Homo sapien
gcggccggggggcgcactgctcgcc

SEQ ID NO: 3646031 - DNA, 25 bp, Homo sapien
tggtgcccggcagacgcgcccggcc

SEQ ID NO: 3646032 - DNA, 25 bp, Homo sapien
tctggtgcccggcagacgcgcccgg

SEQ ID NO: 3646033 - DNA, 25 bp, Homo sapien
ggcggcgggagccgcgagtcggggc

SEQ ID NO: 3646034 - DNA, 25 bp, Homo sapien
gcggcgggagccgcgagtcggggcc

SEQ ID NO: 3646035 - DNA, 25 bp, Homo sapien
cggcggcgggagccgcgagtcgggg

SEQ ID NO: 3646036 - DNA, 25 bp, Homo sapien
tgggaactcaacgtacagagacagc

SEQ ID NO: 3646037 - DNA, 25 bp, Homo sapien
ttggagcccaatcagcacggagttg

SEQ ID NO: 3646038 - DNA, 25 bp, Homo sapien
ccagctttcttcatgcgtgggagga

SEQ ID NO: 3646039 - DNA, 25 bp, Homo sapien
cacagtttattcgagcaaagggttc

SEQ ID NO: 3646040 - DNA, 25 bp, Homo sapien
gaataaaggtagttggggcagatgt

SEQ ID NO: 3646041 - DNA, 25 bp, Homo sapien
aggtagttggggcagatgtattatc

SEQ ID NO: 3646042 - DNA, 25 bp, Homo sapien
ataaaggtagttggggcagatgtat

SEQ ID NO: 3646043 - DNA, 25 bp, Homo sapien
aaaggtagttggggcagatgtatta

SEQ ID NO: 3646044 - DNA, 25 bp, Homo sapien
tctacggccgatagggtggcctcct

SEQ ID NO: 3646045 - DNA, 25 bp, Homo sapien
gattgtctgagtaccttgtagccac

SEQ ID NO: 3646046 - DNA, 25 bp, Homo sapien
actcttaaccttcaatctacggccg

SEQ ID NO: 3646047 - DNA, 25 bp, Homo sapien
aaatattacccttccccaggtcatg

SEQ ID NO: 3646048 - DNA, 25 bp, Homo sapien
tccaggctgagagtttacgcttccc

SEQ ID NO: 3646049 - DNA, 25 bp, Homo sapien
gaatgggtaccttccatgatgagag

SEQ ID NO: 3646050 - DNA, 25 bp, Homo sapien
ttgggaacgggtactccagccaaga

SEQ ID NO: 3646051 - DNA, 25 bp, Homo sapien
ggtatttttccatgccgagagtgtc

SEQ ID NO: 3646052 - DNA, 25 bp, Homo sapien
gcatatatgtctggttggctctctg

SEQ ID NO: 3646053 - DNA, 25 bp, Homo sapien
tactgtctcaggtacacttcaaaca

SEQ ID NO: 3646054 - DNA, 25 bp, Homo sapien
cctagcatcttccatatgtgaccag

SEQ ID NO: 3646055 - DNA, 25 bp, Homo sapien
ggctctctgtgatatcaatggccat

SEQ ID NO: 3646056 - DNA, 25 bp, Homo sapien
catgttggcagacaacaagttcttt

SEQ ID NO: 3646057 - DNA, 25 bp, Homo sapien
agttctttcgggtctatcttcctct

SEQ ID NO: 3646058 - DNA, 25 bp, Homo sapien
ttggcagacaacaagttctttcggg

SEQ ID NO: 3646059 - DNA, 25 bp, Homo sapien
ggcagacaacaagttctttcgggtc

SEQ ID NO: 3646060 - DNA, 25 bp, Homo sapien
taattactttgactactctggccag

SEQ ID NO: 3646061 - DNA, 25 bp, Homo sapien
cctaattactttgactactctggcc

SEQ ID NO: 3646062 - DNA, 25 bp, Homo sapien
attactttgactactctggccagag

SEQ ID NO: 3646063 - DNA, 25 bp, Homo sapien
aattactttgactactctggccaga

SEQ ID NO: 3646064 - DNA, 25 bp, Homo sapien
tgggatcagcgacttctcttgggcc

SEQ ID NO: 3646065 - DNA, 25 bp, Homo sapien
gggatcagcgacttctcttgggcct

SEQ ID NO: 3646066 - DNA, 25 bp, Homo sapien
gctgggatcagcgacttctcttggg

SEQ ID NO: 3646067 - DNA, 25 bp, Homo sapien
tacttcccttagctgggatcagcga

SEQ ID NO: 3646068 - DNA, 25 bp, Homo sapien
gtaaattgcaagcattctctttggg

SEQ ID NO: 3646069 - DNA, 25 bp, Homo sapien
gataaaagctgtaaatttctggcta

SEQ ID NO: 3646070 - DNA, 25 bp, Homo sapien
tgtttttcaaacgtatttgaatgcg

SEQ ID NO: 3646071 - DNA, 25 bp, Homo sapien
tttgaatgcgtttgataaaagctgt

SEQ ID NO: 3646072 - DNA, 25 bp, Homo sapien
tcatcagcagagcaaaaagtagcat

SEQ ID NO: 3646073 - DNA, 25 bp, Homo sapien
gaagatggattttcatcagcagagc

SEQ ID NO: 3646074 - DNA, 25 bp, Homo sapien
catcagcagagcaaaaagtagcatt

SEQ ID NO: 3646075 - DNA, 25 bp, Homo sapien
cagcagagcaaaaagtagcatttgt

SEQ ID NO: 3646076 - DNA, 25 bp, Homo sapien
caagcaggcattcagtggacgagcc

SEQ ID NO: 3646077 - DNA, 25 bp, Homo sapien
tacatgcatgactcccattcttggg

SEQ ID NO: 3646078 - DNA, 25 bp, Homo sapien
tatctggtagatggctctgtcctcg

SEQ ID NO: 3646079 - DNA, 25 bp, Homo sapien
aaattgcatcttggctaggtcccca

SEQ ID NO: 3646080 - DNA, 25 bp, Homo sapien
tctccttcctagttccacaggtacc

SEQ ID NO: 3646081 - DNA, 25 bp, Homo sapien
ctctccttcctagttccacaggtac

SEQ ID NO: 3646082 - DNA, 25 bp, Homo sapien
tattaagaatgatagtagctgcacg

SEQ ID NO: 3646083 - DNA, 25 bp, Homo sapien
gacttaggaggacaacattcaacag

SEQ ID NO: 3646084 - DNA, 25 bp, Homo sapien
gccgggcttgcactgaatctaaata

SEQ ID NO: 3646085 - DNA, 25 bp, Homo sapien
tgttgccacgttttatccagttgag

SEQ ID NO: 3646086 - DNA, 25 bp, Homo sapien
gaaacttggtgccaagactctttga

SEQ ID NO: 3646087 - DNA, 25 bp, Homo sapien
ggtgccaagactctttgacttgctc

SEQ ID NO: 3646088 - DNA, 25 bp, Homo sapien
tctgggcagtgaaacttggtgccaa

SEQ ID NO: 3646089 - DNA, 25 bp, Homo sapien
agcgttctgggcagtgaaacttggt

SEQ ID NO: 3646090 - DNA, 25 bp, Homo sapien
ggattatggcgcctaaaatgactgt

SEQ ID NO: 3646091 - DNA, 25 bp, Homo sapien
attaaggattatggcgcctaaaatg

SEQ ID NO: 3646092 - DNA, 25 bp, Homo sapien
attatggcgcctaaaatgactgtca

SEQ ID NO: 3646093 - DNA, 25 bp, Homo sapien
acaattaaggattatggcgcctaaa

SEQ ID NO: 3646094 - DNA, 25 bp, Homo sapien
tttggagatagcctagacggacatt

SEQ ID NO: 3646095 - DNA, 25 bp, Homo sapien
taaaatttggagatagcctagacgg

SEQ ID NO: 3646096 - DNA, 25 bp, Homo sapien
tattaaaatttggagatagcctaga

SEQ ID NO: 3646097 - DNA, 25 bp, Homo sapien
tagcctagacggacattatcactta

SEQ ID NO: 3646098 - DNA, 25 bp, Homo sapien
ttaatcctcttccactaaatccaag

SEQ ID NO: 3646099 - DNA, 25 bp, Homo sapien
gctgggagcaactggccactaaccg

SEQ ID NO: 3646100 - DNA, 25 bp, Homo sapien
ctgggagcaactggccactaaccgt

SEQ ID NO: 3646101 - DNA, 25 bp, Homo sapien
tccactaaatccaagggctgtgtct

SEQ ID NO: 3646102 - DNA, 25 bp, Homo sapien
aattaacagccacggtcaaagccca

SEQ ID NO: 3646103 - DNA, 25 bp, Homo sapien
tagactaaattaacagccacggtca

SEQ ID NO: 3646104 - DNA, 25 bp, Homo sapien
gtagtcatagactaaattaacagcc

SEQ ID NO: 3646105 - DNA, 25 bp, Homo sapien
acagccacggtcaaagcccagatga

SEQ ID NO: 3646106 - DNA, 25 bp, Homo sapien
agggttagtgccgtggatgctgtgt

SEQ ID NO: 3646107 - DNA, 25 bp, Homo sapien
ggttagtgccgtggatgctgtgtgc

SEQ ID NO: 3646108 - DNA, 25 bp, Homo sapien
gggttagtgccgtggatgctgtgtg

SEQ ID NO: 3646109 - DNA, 25 bp, Homo sapien
gttagtgccgtggatgctgtgtgca

SEQ ID NO: 3646110 - DNA, 25 bp, Homo sapien
gattcgcgttcaaagatcttctcca

SEQ ID NO: 3646111 - DNA, 25 bp, Homo sapien
catagattcgcgttcaaagatcttc

SEQ ID NO: 3646112 - DNA, 25 bp, Homo sapien
gcaagttcagccgtaagtccaaagc

SEQ ID NO: 3646113 - DNA, 25 bp, Homo sapien
ctgcaagttcagccgtaagtccaaa

SEQ ID NO: 3646114 - DNA, 25 bp, Homo sapien
aagttcagccgtaagtccaaagcac

SEQ ID NO: 3646115 - DNA, 25 bp, Homo sapien
caagttcagccgtaagtccaaagca

SEQ ID NO: 3646116 - DNA, 25 bp, Homo sapien
cacaaaccttaactccatggcttta

SEQ ID NO: 3646117 - DNA, 25 bp, Homo sapien
catagaggccacccacaaaccttaa

SEQ ID NO: 3646118 - DNA, 25 bp, Homo sapien
tatgttgccaccatagaggccaccc

SEQ ID NO: 3646119 - DNA, 25 bp, Homo sapien
tggttttatgttgccaccatagagg

SEQ ID NO: 3646120 - DNA, 25 bp, Homo sapien
aatgcctgttagcctcacgtaaaat

SEQ ID NO: 3646121 - DNA, 25 bp, Homo sapien
ctgttagcctcacgtaaaatgcccc

SEQ ID NO: 3646122 - DNA, 25 bp, Homo sapien
gcctgttagcctcacgtaaaatgcc

SEQ ID NO: 3646123 - DNA, 25 bp, Homo sapien
tgcctgttagcctcacgtaaaatgc

SEQ ID NO: 3646124 - DNA, 25 bp, Homo sapien
cttcactggactccacatcatccat

SEQ ID NO: 3646125 - DNA, 25 bp, Homo sapien
caacgggacttgtccaagtctccgt

SEQ ID NO: 3646126 - DNA, 25 bp, Homo sapien
gcaacgggacttgtccaagtctccg

SEQ ID NO: 3646127 - DNA, 25 bp, Homo sapien
agcaacgggacttgtccaagtctcc

SEQ ID NO: 3646128 - DNA, 25 bp, Homo sapien
cttctgggagaccgactcctactcc

SEQ ID NO: 3646129 - DNA, 25 bp, Homo sapien
ttctgggagaccgactcctactcct

SEQ ID NO: 3646130 - DNA, 25 bp, Homo sapien
tctgggagaccgactcctactcctt

SEQ ID NO: 3646131 - DNA, 25 bp, Homo sapien
tctccttttgggagatcgattccac

SEQ ID NO: 3646132 - DNA, 25 bp, Homo sapien
cttctccttttgggagatcgattcc

SEQ ID NO: 3646133 - DNA, 25 bp, Homo sapien
ttctccttttgggagatcgattcca

SEQ ID NO: 3646134 - DNA, 25 bp, Homo sapien
agtggttcttgtgtctgtgactaca

SEQ ID NO: 3646135 - DNA, 25 bp, Homo sapien
ccatgcctttctcgatgcagggagg

SEQ ID NO: 3646136 - DNA, 25 bp, Homo sapien
gttcttgtgtctgtgactacagtga

SEQ ID NO: 3646137 - DNA, 25 bp, Homo sapien
tgggatctgtgctgccaatctcggg

SEQ ID NO: 3646138 - DNA, 25 bp, Homo sapien
gctcttctcgtggctcttctaagac

SEQ ID NO: 3646139 - DNA, 25 bp, Homo sapien
cggctcttctcgtggctcttctaag

SEQ ID NO: 3646140 - DNA, 25 bp, Homo sapien
ggctcttctcgtggctcttctaaga

SEQ ID NO: 3646141 - DNA, 25 bp, Homo sapien
gccatgtggactaaaaccaaactga

SEQ ID NO: 3646142 - DNA, 25 bp, Homo sapien
gaggccatgtggactaaaaccaaac

SEQ ID NO: 3646143 - DNA, 25 bp, Homo sapien
ggccatgtggactaaaaccaaactg

SEQ ID NO: 3646144 - DNA, 25 bp, Homo sapien
ggaggccatgtggactaaaaccaaa

SEQ ID NO: 3646145 - DNA, 25 bp, Homo sapien
ctttgatgacccagaagaagcctta

SEQ ID NO: 3646146 - DNA, 25 bp, Homo sapien
ggctttgatgacccagaagaagcct

SEQ ID NO: 3646147 - DNA, 25 bp, Homo sapien
gctttgatgacccagaagaagcctt

SEQ ID NO: 3646148 - DNA, 25 bp, Homo sapien
cagcagctgatacattgtaaggatc

SEQ ID NO: 3646149 - DNA, 25 bp, Homo sapien
gaaactgaagacctcacaaaggaat

SEQ ID NO: 3646150 - DNA, 25 bp, Homo sapien
gactcagcagctgatacattgtaag

SEQ ID NO: 3646151 - DNA, 25 bp, Homo sapien
agacctcacaaaggaatctattcct

SEQ ID NO: 3646152 - DNA, 25 bp, Homo sapien
cggcggcaacagcaaggagccgagg

SEQ ID NO: 3646153 - DNA, 25 bp, Homo sapien
gactctacagggtccgcgacagctc

SEQ ID NO: 3646154 - DNA, 25 bp, Homo sapien
gagaccgactctacagggtccgcga

SEQ ID NO: 3646155 - DNA, 25 bp, Homo sapien
gcaacagagaccgactctacagggt

SEQ ID NO: 3646156 - DNA, 25 bp, Homo sapien
agcacgggagtcagagctcgacgta

SEQ ID NO: 3646157 - DNA, 25 bp, Homo sapien
gagctcgacgtaggatggaagactc

SEQ ID NO: 3646158 - DNA, 25 bp, Homo sapien
tcgacagcacgggagtcagagctcg

SEQ ID NO: 3646159 - DNA, 25 bp, Homo sapien
agtcagagctcgacgtaggatggaa

SEQ ID NO: 3646160 - DNA, 25 bp, Homo sapien
tccgctgcgtgccgaggtgtccccg

SEQ ID NO: 3646161 - DNA, 25 bp, Homo sapien
ctccgctgcgtgccgaggtgtcccc

SEQ ID NO: 3646162 - DNA, 25 bp, Homo sapien
tgcgtgccgaggtgtccccggggac

SEQ ID NO: 3646163 - DNA, 25 bp, Homo sapien
cgctgcgtgccgaggtgtccccggg

SEQ ID NO: 3646164 - DNA, 25 bp, Homo sapien
cctgatcgaagggattggtggcaaa

SEQ ID NO: 3646165 - DNA, 25 bp, Homo sapien
tgatcgaagggattggtggcaaaaa

SEQ ID NO: 3646166 - DNA, 25 bp, Homo sapien
atcgaagggattggtggcaaaaaga

SEQ ID NO: 3646167 - DNA, 25 bp, Homo sapien
atcctgatcgaagggattggtggca

SEQ ID NO: 3646168 - DNA, 25 bp, Homo sapien
gcaagcacttttggtacagggttta

SEQ ID NO: 3646169 - DNA, 25 bp, Homo sapien
ttatttgtctaggcaagcacttttg

SEQ ID NO: 3646170 - DNA, 25 bp, Homo sapien
aaaacattctgccagttccagacgc

SEQ ID NO: 3646171 - DNA, 25 bp, Homo sapien
gttccagacgctcaacatttatttg

SEQ ID NO: 3646172 - DNA, 25 bp, Homo sapien
ggttctgtccactgctaagattcag

SEQ ID NO: 3646173 - DNA, 25 bp, Homo sapien
taagtataatcggtgatctccaagg

SEQ ID NO: 3646174 - DNA, 25 bp, Homo sapien
cataaaggtactgtagcaggccctc

SEQ ID NO: 3646175 - DNA, 25 bp, Homo sapien
tgtgccaaggtagttcctacgtgcg

SEQ ID NO: 3646176 - DNA, 25 bp, Homo sapien
ggctagggtgcccagcttttattct

SEQ ID NO: 3646177 - DNA, 25 bp, Homo sapien
aaacctccagctagctacagagcac

SEQ ID NO: 3646178 - DNA, 25 bp, Homo sapien
tgctgctggctagggtgcccagctt

SEQ ID NO: 3646179 - DNA, 25 bp, Homo sapien
gcaccaagatttattgtgcagagtg

SEQ ID NO: 3646180 - DNA, 25 bp, Homo sapien
gcccgggtgcctcacatcggtaatc

SEQ ID NO: 3646181 - DNA, 25 bp, Homo sapien
aataatgaatgaagagccagactta

SEQ ID NO: 3646182 - DNA, 25 bp, Homo sapien
gaagagccagacttagaaagataac

SEQ ID NO: 3646183 - DNA, 25 bp, Homo sapien
aatattaccaaattggctgggcccg

SEQ ID NO: 3646184 - DNA, 25 bp, Homo sapien
ataatacctggtttagccgggcgcg

SEQ ID NO: 3646185 - DNA, 25 bp, Homo sapien
gaatgccaagagttccaaataagga

SEQ ID NO: 3646186 - DNA, 25 bp, Homo sapien
catgctctcagtctaagtgctcaaa

SEQ ID NO: 3646187 - DNA, 25 bp, Homo sapien
catgtatctgcaatatgaagccaca

SEQ ID NO: 3646188 - DNA, 25 bp, Homo sapien
ggcgtgaggaaactaccttctaatg

SEQ ID NO: 3646189 - DNA, 25 bp, Homo sapien
caggcgtgaggaaactaccttctaa

SEQ ID NO: 3646190 - DNA, 25 bp, Homo sapien
attgcaggcgtgaggaaactacctt

SEQ ID NO: 3646191 - DNA, 25 bp, Homo sapien
tgcaggcgtgaggaaactaccttct

SEQ ID NO: 3646192 - DNA, 25 bp, Homo sapien
agattgtaaaggggattgcagaaac

SEQ ID NO: 3646193 - DNA, 25 bp, Homo sapien
ctgtagattgtaaaggggattgcag

SEQ ID NO: 3646194 - DNA, 25 bp, Homo sapien
gtagattgtaaaggggattgcagaa

SEQ ID NO: 3646195 - DNA, 25 bp, Homo sapien
attgtaaaggggattgcagaaacat

SEQ ID NO: 3646196 - DNA, 25 bp, Homo sapien
agatatccaaaatgaggccccagtc

SEQ ID NO: 3646197 - DNA, 25 bp, Homo sapien
ccagtgcgagactgaccaactttat

SEQ ID NO: 3646198 - DNA, 25 bp, Homo sapien
cacagatatccaaaatgaggcccca

SEQ ID NO: 3646199 - DNA, 25 bp, Homo sapien
gagactgaccaactttatcacagat

SEQ ID NO: 3646200 - DNA, 25 bp, Homo sapien
ttagaatacctcaatggcagcctac

SEQ ID NO: 3646201 - DNA, 25 bp, Homo sapien
tcaacattcttatgcgaccatcagc

SEQ ID NO: 3646202 - DNA, 25 bp, Homo sapien
caaactacaaatgtttaagaggagc

SEQ ID NO: 3646203 - DNA, 25 bp, Homo sapien
tcttctctaaagcacatcaggtatt

SEQ ID NO: 3646204 - DNA, 25 bp, Homo sapien
taaagggtgggcaaatcctcatctc

SEQ ID NO: 3646205 - DNA, 25 bp, Homo sapien
tgtttaaagggtgggcaaatcctca

SEQ ID NO: 3646206 - DNA, 25 bp, Homo sapien
tttaaagggtgggcaaatcctcatc

SEQ ID NO: 3646207 - DNA, 25 bp, Homo sapien
aaagggtgggcaaatcctcatctct

SEQ ID NO: 3646208 - DNA, 25 bp, Homo sapien
cagaggccttgggtaagagtttcac

SEQ ID NO: 3646209 - DNA, 25 bp, Homo sapien
tcaacacttatggaactaacaggcc

SEQ ID NO: 3646210 - DNA, 25 bp, Homo sapien
gatgaccctagtcccaggcactatg

SEQ ID NO: 3646211 - DNA, 25 bp, Homo sapien
tgagaagctcaagccacaagcagag

SEQ ID NO: 3646212 - DNA, 25 bp, Homo sapien
gatgccagttaccaggcagtaatag

SEQ ID NO: 3646213 - DNA, 25 bp, Homo sapien
cagttaccaggcagtaataggcact

SEQ ID NO: 3646214 - DNA, 25 bp, Homo sapien
catgatgccagttaccaggcagtaa

SEQ ID NO: 3646215 - DNA, 25 bp, Homo sapien
gttaccaggcagtaataggcactaa

SEQ ID NO: 3646216 - DNA, 25 bp, Homo sapien
agcctgcatagcaacgtgaggatct

SEQ ID NO: 3646217 - DNA, 25 bp, Homo sapien
cactcttctcataatagaccgaaga

SEQ ID NO: 3646218 - DNA, 25 bp, Homo sapien
taatagaccgaagacaatccttagg

SEQ ID NO: 3646219 - DNA, 25 bp, Homo sapien
ggatctttgtggttcactcttctca

SEQ ID NO: 3646220 - DNA, 25 bp, Homo sapien
taaaagcacaaaatcagaagttaaa

SEQ ID NO: 3646221 - DNA, 25 bp, Homo sapien
aaaagcacaaaatcagaagttaaag

SEQ ID NO: 3646222 - DNA, 25 bp, Homo sapien
ctaaaagcacaaaatcagaagttaa

SEQ ID NO: 3646223 - DNA, 25 bp, Homo sapien
tacgttgcttacttcactagcaaaa

SEQ ID NO: 3646224 - DNA, 25 bp, Homo sapien
aattttgccacagtttgatacacat

SEQ ID NO: 3646225 - DNA, 25 bp, Homo sapien
ttatttaatacgttgcttacttcac

SEQ ID NO: 3646226 - DNA, 25 bp, Homo sapien
agtttgatacacatgctcctagaag

SEQ ID NO: 3646227 - DNA, 25 bp, Homo sapien
gagaagtcctcttgcctataggaag

SEQ ID NO: 3646228 - DNA, 25 bp, Homo sapien
tgtaatctcgatggacattcaggac

SEQ ID NO: 3646229 - DNA, 25 bp, Homo sapien
gaagtcgtttttggaaatggctgct

SEQ ID NO: 3646230 - DNA, 25 bp, Homo sapien
taaccatgatgttcgaaaagtacag

SEQ ID NO: 3646231 - DNA, 25 bp, Homo sapien
tctgctaacactacaaaaaccagcc

SEQ ID NO: 3646232 - DNA, 25 bp, Homo sapien
gactggcctgaccatccccatggtg

SEQ ID NO: 3646233 - DNA, 25 bp, Homo sapien
tggcctgaccatccccatggtgaaa

SEQ ID NO: 3646234 - DNA, 25 bp, Homo sapien
cagaggctatagtcagctgagatca

SEQ ID NO: 3646235 - DNA, 25 bp, Homo sapien
gcagggcattattcttccgtattaa

SEQ ID NO: 3646236 - DNA, 25 bp, Homo sapien
tactgatgtatcttcatagcggcaa

SEQ ID NO: 3646237 - DNA, 25 bp, Homo sapien
tctttctaagtgcacatgtaatctg

SEQ ID NO: 3646238 - DNA, 25 bp, Homo sapien
tgcaaacgctttattgagactatac

SEQ ID NO: 3646239 - DNA, 25 bp, Homo sapien
cctgtggcagaagccggactgcagt

SEQ ID NO: 3646240 - DNA, 25 bp, Homo sapien
tcaccctgtggcagaagccggactg

SEQ ID NO: 3646241 - DNA, 25 bp, Homo sapien
gtctcaccctgtggcagaagccgga

SEQ ID NO: 3646242 - DNA, 25 bp, Homo sapien
gggtgggggatgcggttcaagcgat

SEQ ID NO: 3646243 - DNA, 25 bp, Homo sapien
tagccaatgatttaatacagacatt

SEQ ID NO: 3646244 - DNA, 25 bp, Homo sapien
gaagcaaggtttgtacatcagtaag

SEQ ID NO: 3646245 - DNA, 25 bp, Homo sapien
tttgaatcacaagttatgcatagct

SEQ ID NO: 3646246 - DNA, 25 bp, Homo sapien
cagaatattttgcaacgaagcaagg

SEQ ID NO: 3646247 - DNA, 25 bp, Homo sapien
caatagctgggaacgtaactccttg

SEQ ID NO: 3646248 - DNA, 25 bp, Homo sapien
gttccttaaggttcttaatcattgc

SEQ ID NO: 3646249 - DNA, 25 bp, Homo sapien
tgtccattcaaccataagagccttt

SEQ ID NO: 3646250 - DNA, 25 bp, Homo sapien
gactaagctgtggatcattcttaaa

SEQ ID NO: 3646251 - DNA, 25 bp, Homo sapien
aagaaggcagactcgggcagcgaaa

SEQ ID NO: 3646252 - DNA, 25 bp, Homo sapien
gctgtcaactatgagctgtgtccct

SEQ ID NO: 3646253 - DNA, 25 bp, Homo sapien
cctgtgttctagttccagctgtcaa

SEQ ID NO: 3646254 - DNA, 25 bp, Homo sapien
ggcagcgaaaagaacactggactga

SEQ ID NO: 3646255 - DNA, 25 bp, Homo sapien
tttgttagccacagtaccaggatcc

SEQ ID NO: 3646256 - DNA, 25 bp, Homo sapien
tgggcttgcttttgcttgttctgca

SEQ ID NO: 3646257 - DNA, 25 bp, Homo sapien
ttagccacagtaccaggatccttgg

SEQ ID NO: 3646258 - DNA, 25 bp, Homo sapien
acaagagctgggcttgcttttgctt

SEQ ID NO: 3646259 - DNA, 25 bp, Homo sapien
cctggaaagtcaagaatatcaagct

SEQ ID NO: 3646260 - DNA, 25 bp, Homo sapien
taattcttaccagtctaaagactca

SEQ ID NO: 3646261 - DNA, 25 bp, Homo sapien
tcaagcttcactgcagacttaataa

SEQ ID NO: 3646262 - DNA, 25 bp, Homo sapien
gattttattgctccaagggtaattc

SEQ ID NO: 3646263 - DNA, 25 bp, Homo sapien
acaaagtggaaagggtggttgactg

SEQ ID NO: 3646264 - DNA, 25 bp, Homo sapien
agagactggatgtgcttggatacaa

SEQ ID NO: 3646265 - DNA, 25 bp, Homo sapien
tcatgttggtggttagttaagagac

SEQ ID NO: 3646266 - DNA, 25 bp, Homo sapien
gtcatatatagcacgaacttttcgg

SEQ ID NO: 3646267 - DNA, 25 bp, Homo sapien
ttcacctttccaccagttaggatca

SEQ ID NO: 3646268 - DNA, 25 bp, Homo sapien
ggttcagcagtgagatctgcagtca

SEQ ID NO: 3646269 - DNA, 25 bp, Homo sapien
tgatgggtttcacctttccaccagt

SEQ ID NO: 3646270 - DNA, 25 bp, Homo sapien
ggaaataaccctatgccttgatggg

SEQ ID NO: 3646271 - DNA, 25 bp, Homo sapien
ttcatcaataaaggctggttccggc

SEQ ID NO: 3646272 - DNA, 25 bp, Homo sapien
tgtctctacctgaacatcatcacta

SEQ ID NO: 3646273 - DNA, 25 bp, Homo sapien
tccggctctggttctattgtctcta

SEQ ID NO: 3646274 - DNA, 25 bp, Homo sapien
tcatcactaaattgtaccgtcttct

SEQ ID NO: 3646275 - DNA, 25 bp, Homo sapien
gctccaaaaagtatggtgtgtcacc

SEQ ID NO: 3646276 - DNA, 25 bp, Homo sapien
gctaaatttggcctaagagtttgcc

SEQ ID NO: 3646277 - DNA, 25 bp, Homo sapien
cacaaggaggaatcatgaatcatct

SEQ ID NO: 3646278 - DNA, 25 bp, Homo sapien
tgggtaccattatgtggctccaaaa

SEQ ID NO: 3646279 - DNA, 25 bp, Homo sapien
tgcctcccataaaagattgctaaaa

SEQ ID NO: 3646280 - DNA, 25 bp, Homo sapien
tccacagtctgtttcgctcttcaaa

SEQ ID NO: 3646281 - DNA, 25 bp, Homo sapien
tgcaatcagccaaacatcacttctc

SEQ ID NO: 3646282 - DNA, 25 bp, Homo sapien
gcaatctgcactcaccattaccatt

SEQ ID NO: 3646283 - DNA, 25 bp, Homo sapien
gcagctctggtaggtctggctgatc

SEQ ID NO: 3646284 - DNA, 25 bp, Homo sapien
gctctggtaggtctggctgatcatc

SEQ ID NO: 3646285 - DNA, 25 bp, Homo sapien
agctctggtaggtctggctgatcat

SEQ ID NO: 3646286 - DNA, 25 bp, Homo sapien
gaagcagctctggtaggtctggctg

SEQ ID NO: 3646287 - DNA, 25 bp, Homo sapien
tatcttccagcttttcatcaatgag

SEQ ID NO: 3646288 - DNA, 25 bp, Homo sapien
atgagaggtcccatctggtgacaca

SEQ ID NO: 3646289 - DNA, 25 bp, Homo sapien
cagcttttcatcaatgagaggtccc

SEQ ID NO: 3646290 - DNA, 25 bp, Homo sapien
tcatcaatgagaggtcccatctggt

SEQ ID NO: 3646291 - DNA, 25 bp, Homo sapien
tattgcaaaggtcgatcaaatcctc

SEQ ID NO: 3646292 - DNA, 25 bp, Homo sapien
tatagcccactttgcagtacagtga

SEQ ID NO: 3646293 - DNA, 25 bp, Homo sapien
gggaactccgtcttatcgtacctga

SEQ ID NO: 3646294 - DNA, 25 bp, Homo sapien
tggtaatgccacttcagcaaagaga

SEQ ID NO: 3646295 - DNA, 25 bp, Homo sapien
tcactttcacattaagttctgagag

SEQ ID NO: 3646296 - DNA, 25 bp, Homo sapien
ttggtatataaggaaagggcctcca

SEQ ID NO: 3646297 - DNA, 25 bp, Homo sapien
gggcctccatcactttcacattaag

SEQ ID NO: 3646298 - DNA, 25 bp, Homo sapien
ggaaagggcctccatcactttcaca

SEQ ID NO: 3646299 - DNA, 25 bp, Homo sapien
ctgattctgtaactttgcatacatg

SEQ ID NO: 3646300 - DNA, 25 bp, Homo sapien
gattctgtaactttgcatacatgga

SEQ ID NO: 3646301 - DNA, 25 bp, Homo sapien
atacatggaatacatcggatcttcg

SEQ ID NO: 3646302 - DNA, 25 bp, Homo sapien
gaatacatcggatcttcgttcatta

SEQ ID NO: 3646303 - DNA, 25 bp, Homo sapien
ccagaaacaccagatgactgcatat

SEQ ID NO: 3646304 - DNA, 25 bp, Homo sapien
gaaacaccagatgactgcatataat

SEQ ID NO: 3646305 - DNA, 25 bp, Homo sapien
caccagatgactgcatataatatgg

SEQ ID NO: 3646306 - DNA, 25 bp, Homo sapien
gaaccagaaacaccagatgactgca

SEQ ID NO: 3646307 - DNA, 25 bp, Homo sapien
gagctaccacacctcactgtgcatt

SEQ ID NO: 3646308 - DNA, 25 bp, Homo sapien
gaatttaaaacaacatgggcttcta

SEQ ID NO: 3646309 - DNA, 25 bp, Homo sapien
actgtgcatttgagaatttaaaaca

SEQ ID NO: 3646310 - DNA, 25 bp, Homo sapien
acaacatgggcttctaaaagcttac

SEQ ID NO: 3646311 - DNA, 25 bp, Homo sapien
ctgctccgggggaagactgtagctc

SEQ ID NO: 3646312 - DNA, 25 bp, Homo sapien
gaggtggctcatctgcgcgttccct

SEQ ID NO: 3646313 - DNA, 25 bp, Homo sapien
cgcgttccctgcaaccaggtaggca

SEQ ID NO: 3646314 - DNA, 25 bp, Homo sapien
ctgcaaccaggtaggcaccacttgg

SEQ ID NO: 3646315 - DNA, 25 bp, Homo sapien
ctgggtttgcggatggtgggaccac

SEQ ID NO: 3646316 - DNA, 25 bp, Homo sapien
tgggtttgcggatggtgggaccact

SEQ ID NO: 3646317 - DNA, 25 bp, Homo sapien
ggctgggtttgcggatggtgggacc

SEQ ID NO: 3646318 - DNA, 25 bp, Homo sapien
agggctgggtttgcggatggtggga

SEQ ID NO: 3646319 - DNA, 25 bp, Homo sapien
tttgggtaagcggcctgagtctgct

SEQ ID NO: 3646320 - DNA, 25 bp, Homo sapien
tccaaacaagaatcaacagtaaaat

SEQ ID NO: 3646321 - DNA, 25 bp, Homo sapien
actgggggcacttaaacagctgtaa

SEQ ID NO: 3646322 - DNA, 25 bp, Homo sapien
cactaactccaaacaagaatcaaca

SEQ ID NO: 3646323 - DNA, 25 bp, Homo sapien
cttaaacagctgtaacagcactaac

SEQ ID NO: 3646324 - DNA, 25 bp, Homo sapien
gagtctagcagtatgggcatcacca

SEQ ID NO: 3646325 - DNA, 25 bp, Homo sapien
agagcagctaagatcaccggcagga

SEQ ID NO: 3646326 - DNA, 25 bp, Homo sapien
aaatacgcatctgggaatcctcggc

SEQ ID NO: 3646327 - DNA, 25 bp, Homo sapien
ttgaaaatacggaagcacacgctcc

SEQ ID NO: 3646328 - DNA, 25 bp, Homo sapien
tcctgcattctggtacagagtgaca

SEQ ID NO: 3646329 - DNA, 25 bp, Homo sapien
ttccttgaacggaactgaccattgt

SEQ ID NO: 3646330 - DNA, 25 bp, Homo sapien
tacagagtgacatcggcagttgcag

SEQ ID NO: 3646331 - DNA, 25 bp, Homo sapien
ggactatatactggcgcctggctgg

SEQ ID NO: 3646332 - DNA, 25 bp, Homo sapien
tctgagaatatggttgctgtggctg

SEQ ID NO: 3646333 - DNA, 25 bp, Homo sapien
gcagagttgatgatgttaagttata

SEQ ID NO: 3646334 - DNA, 25 bp, Homo sapien
cttctgagaatatggttgctgtggc

SEQ ID NO: 3646335 - DNA, 25 bp, Homo sapien
tgatgatgttaagttatagtttggc

SEQ ID NO: 3646336 - DNA, 25 bp, Homo sapien
tgaaacacacgacaacataatgcgc

SEQ ID NO: 3646337 - DNA, 25 bp, Homo sapien
tatttgaacctgttgacctggagag

SEQ ID NO: 3646338 - DNA, 25 bp, Homo sapien
gtaagtttgactttctgcagaccag

SEQ ID NO: 3646339 - DNA, 25 bp, Homo sapien
tgcagaccaggtttacgagacaaat

SEQ ID NO: 3646340 - DNA, 25 bp, Homo sapien
gcctctatctttggtgtcactgcca

SEQ ID NO: 3646341 - DNA, 25 bp, Homo sapien
tggtcccacaatactctgaaatgtc

SEQ ID NO: 3646342 - DNA, 25 bp, Homo sapien
cagccagtagtatgcagaggctaca

SEQ ID NO: 3646343 - DNA, 25 bp, Homo sapien
actgtacgctggtgtgatgacagcc

SEQ ID NO: 3646344 - DNA, 25 bp, Homo sapien
tagtatagcccaaccagggaaatcg

SEQ ID NO: 3646345 - DNA, 25 bp, Homo sapien
tacaggtgactaatttcacaggctc

SEQ ID NO: 3646346 - DNA, 25 bp, Homo sapien
tatataaacgttaagcaaagccagg

SEQ ID NO: 3646347 - DNA, 25 bp, Homo sapien
gagcaacccaaaaatccagtgtgaa

SEQ ID NO: 3646348 - DNA, 25 bp, Homo sapien
tcaacgagacagaaagttaacaagg

SEQ ID NO: 3646349 - DNA, 25 bp, Homo sapien
cagaaagttaacaaggataaccagg

SEQ ID NO: 3646350 - DNA, 25 bp, Homo sapien
agttaacaaggataaccaggaattg

SEQ ID NO: 3646351 - DNA, 25 bp, Homo sapien
cgagacagaaagttaacaaggataa

SEQ ID NO: 3646352 - DNA, 25 bp, Homo sapien
ccaattaaaagacacagactggcaa

SEQ ID NO: 3646353 - DNA, 25 bp, Homo sapien
gtctctgataaaacagactttcaac

SEQ ID NO: 3646354 - DNA, 25 bp, Homo sapien
agactttcaaccaacaaagatcaaa

SEQ ID NO: 3646355 - DNA, 25 bp, Homo sapien
tttaaatgtacatggactaaatgct

SEQ ID NO: 3646356 - DNA, 25 bp, Homo sapien
tttcagccactcctttacagggtat

SEQ ID NO: 3646357 - DNA, 25 bp, Homo sapien
cactcctttacagggtattatgttt

SEQ ID NO: 3646358 - DNA, 25 bp, Homo sapien
tcagccactcctttacagggtatta

SEQ ID NO: 3646359 - DNA, 25 bp, Homo sapien
gccactcctttacagggtattatgt

SEQ ID NO: 3646360 - DNA, 25 bp, Homo sapien
ctgtattcctgattacaacttcttc

SEQ ID NO: 3646361 - DNA, 25 bp, Homo sapien
ttcctgattacaacttcttcagtca

SEQ ID NO: 3646362 - DNA, 25 bp, Homo sapien
gtattcctgattacaacttcttcag

SEQ ID NO: 3646363 - DNA, 25 bp, Homo sapien
tattcctgattacaacttcttcagt

SEQ ID NO: 3646364 - DNA, 25 bp, Homo sapien
catgagccatccaccttttatagaa

SEQ ID NO: 3646365 - DNA, 25 bp, Homo sapien
taaaagaaatccacgtactcacaaa

SEQ ID NO: 3646366 - DNA, 25 bp, Homo sapien
gaaaccattttttcatgagccatcc

SEQ ID NO: 3646367 - DNA, 25 bp, Homo sapien
taatggttcctctaagtgaatttac

SEQ ID NO: 3646368 - DNA, 25 bp, Homo sapien
catagtactctagcatctcagcaat

SEQ ID NO: 3646369 - DNA, 25 bp, Homo sapien
gaagcgcttctacttggaatgcaga

SEQ ID NO: 3646370 - DNA, 25 bp, Homo sapien
ggttttgcaccttacttggtagaca

SEQ ID NO: 3646371 - DNA, 25 bp, Homo sapien
tacaacagctaaagaacggcaagtg

SEQ ID NO: 3646372 - DNA, 25 bp, Homo sapien
cgttcactgcaagtactgagtcaca

SEQ ID NO: 3646373 - DNA, 25 bp, Homo sapien
tctcatccaggagcaacgctaggtg

SEQ ID NO: 3646374 - DNA, 25 bp, Homo sapien
actacaaggaatatgagcagaacgc

SEQ ID NO: 3646375 - DNA, 25 bp, Homo sapien
cacacagaacacgagtgagcagcct

SEQ ID NO: 3646376 - DNA, 25 bp, Homo sapien
aagacttgtgcaaaagatcttctaa

SEQ ID NO: 3646377 - DNA, 25 bp, Homo sapien
caaatgagcttgtggaacacgtaaa

SEQ ID NO: 3646378 - DNA, 25 bp, Homo sapien
gacttgtgcaaaagatcttctaaca

SEQ ID NO: 3646379 - DNA, 25 bp, Homo sapien
tgtggaacacgtaaatgagggaaga

SEQ ID NO: 3646380 - DNA, 25 bp, Homo sapien
gaaaaccacaaagagttgcttcagg

SEQ ID NO: 3646381 - DNA, 25 bp, Homo sapien
gagaaattgtctttagtctttccat

SEQ ID NO: 3646382 - DNA, 25 bp, Homo sapien
gtctttagtctttccatggatcagg

SEQ ID NO: 3646383 - DNA, 25 bp, Homo sapien
gccttcaatccactggaaaaccaca

SEQ ID NO: 3646384 - DNA, 25 bp, Homo sapien
ccgggccacgtgttttctattgctg

SEQ ID NO: 3646385 - DNA, 25 bp, Homo sapien
ttccgggccacgtgttttctattgc

SEQ ID NO: 3646386 - DNA, 25 bp, Homo sapien
tccgggccacgtgttttctattgct

SEQ ID NO: 3646387 - DNA, 25 bp, Homo sapien
cttccgggccacgtgttttctattg

SEQ ID NO: 3646388 - DNA, 25 bp, Homo sapien
cagccttcctcccaactattttagg

SEQ ID NO: 3646389 - DNA, 25 bp, Homo sapien
ccatgcccagccttcctcccaacta

SEQ ID NO: 3646390 - DNA, 25 bp, Homo sapien
ccagccttcctcccaactattttag

SEQ ID NO: 3646391 - DNA, 25 bp, Homo sapien
atgcccagccttcctcccaactatt

SEQ ID NO: 3646392 - DNA, 25 bp, Homo sapien
gaaagtaatcatcaccaaggacagt

SEQ ID NO: 3646393 - DNA, 25 bp, Homo sapien
aacagcttattcacgggaccaggat

SEQ ID NO: 3646394 - DNA, 25 bp, Homo sapien
cctgaagcagaccaacgtaggatga

SEQ ID NO: 3646395 - DNA, 25 bp, Homo sapien
caaggacagtcagctaatcagcacc

SEQ ID NO: 3646396 - DNA, 25 bp, Homo sapien
tgtcaagacctatgaaggcaagctg

SEQ ID NO: 3646397 - DNA, 25 bp, Homo sapien
cagttcccggaatgctgacagaagg

SEQ ID NO: 3646398 - DNA, 25 bp, Homo sapien
gctgaaaagtcagccggccacagtt

SEQ ID NO: 3646399 - DNA, 25 bp, Homo sapien
taagccgctgcgaaaggtgtgatca

SEQ ID NO: 3646400 - DNA, 25 bp, Homo sapien
gttgtaagaatgacttctgctgtgc

SEQ ID NO: 3646401 - DNA, 25 bp, Homo sapien
cagggggttgtaagaatgacttctg

SEQ ID NO: 3646402 - DNA, 25 bp, Homo sapien
gggttgtaagaatgacttctgctgt

SEQ ID NO: 3646403 - DNA, 25 bp, Homo sapien
gtaagaatgacttctgctgtgccat

SEQ ID NO: 3646404 - DNA, 25 bp, Homo sapien
catttgtaatctcaaggtttgctca

SEQ ID NO: 3646405 - DNA, 25 bp, Homo sapien
ggcaggaagtcaaaaatcgagtctc

SEQ ID NO: 3646406 - DNA, 25 bp, Homo sapien
aacacaatgtacaaactgccaggaa

SEQ ID NO: 3646407 - DNA, 25 bp, Homo sapien
caggaatgttctggcatatccgtgg

SEQ ID NO: 3646408 - DNA, 25 bp, Homo sapien
tgattcgaggaactctgcgccttac

SEQ ID NO: 3646409 - DNA, 25 bp, Homo sapien
tactgtggtaactggaaagacatgg

SEQ ID NO: 3646410 - DNA, 25 bp, Homo sapien
tctaagtcctctgataagtgtgcca

SEQ ID NO: 3646411 - DNA, 25 bp, Homo sapien
ggattaacccagtactgattcgagg

SEQ ID NO: 3646412 - DNA, 25 bp, Homo sapien
tgcacttcaattatccttttaacgg

SEQ ID NO: 3646413 - DNA, 25 bp, Homo sapien
tatagaagccaaataatcaaactgc

SEQ ID NO: 3646414 - DNA, 25 bp, Homo sapien
taatcaaactgcacttcaattatcc

SEQ ID NO: 3646415 - DNA, 25 bp, Homo sapien
agccaaataatcaaactgcacttca

SEQ ID NO: 3646416 - DNA, 25 bp, Homo sapien
gagataacacaagtgccccgcaaag

SEQ ID NO: 3646417 - DNA, 25 bp, Homo sapien
ttcttgaatgaatgggtcctgggcc

SEQ ID NO: 3646418 - DNA, 25 bp, Homo sapien
gcaaagacccgaggacactggtgga

SEQ ID NO: 3646419 - DNA, 25 bp, Homo sapien
tactctgggcgagttaggactggga

SEQ ID NO: 3646420 - DNA, 25 bp, Homo sapien
gcgtgcagatcacggcagtccctgt

SEQ ID NO: 3646421 - DNA, 25 bp, Homo sapien
gatcacggcagtccctgttaactca

SEQ ID NO: 3646422 - DNA, 25 bp, Homo sapien
tgcagatcacggcagtccctgttaa

SEQ ID NO: 3646423 - DNA, 25 bp, Homo sapien
ctgcgtgcagatcacggcagtccct

SEQ ID NO: 3646424 - DNA, 25 bp, Homo sapien
acagttgcatgtgttcgcattgtcc

SEQ ID NO: 3646425 - DNA, 25 bp, Homo sapien
cagttgcatgtgttcgcattgtcct

SEQ ID NO: 3646426 - DNA, 25 bp, Homo sapien
gttgcatgtgttcgcattgtccttt

SEQ ID NO: 3646427 - DNA, 25 bp, Homo sapien
aacagttgcatgtgttcgcattgtc

SEQ ID NO: 3646428 - DNA, 25 bp, Homo sapien
ctgtggtgtcggtgacatttcagac

SEQ ID NO: 3646429 - DNA, 25 bp, Homo sapien
acataagcacggtcaggatggacgg

SEQ ID NO: 3646430 - DNA, 25 bp, Homo sapien
ttgcttcaccttggggttgtgggaa

SEQ ID NO: 3646431 - DNA, 25 bp, Homo sapien
gatgggcacataagcacggtcagga

SEQ ID NO: 3646432 - DNA, 25 bp, Homo sapien
aagaggatgggcacataagcacggt

SEQ ID NO: 3646433 - DNA, 25 bp, Homo sapien
aaatgaagtgctacagggacacagg

SEQ ID NO: 3646434 - DNA, 25 bp, Homo sapien
gccagaagagtgtaaatgaagtgct

SEQ ID NO: 3646435 - DNA, 25 bp, Homo sapien
gagtgtaaatgaagtgctacaggga

SEQ ID NO: 3646436 - DNA, 25 bp, Homo sapien
aaaccaaggccagaagagtgtaaat

SEQ ID NO: 3646437 - DNA, 25 bp, Homo sapien
gcaagctgccaagaacctgggactc

SEQ ID NO: 3646438 - DNA, 25 bp, Homo sapien
gaaaagcaagctgccaagaacctgg

SEQ ID NO: 3646439 - DNA, 25 bp, Homo sapien
aagcaagctgccaagaacctgggac

SEQ ID NO: 3646440 - DNA, 25 bp, Homo sapien
gaggaaaagcaagctgccaagaacc

SEQ ID NO: 3646441 - DNA, 25 bp, Homo sapien
gagaaagcggcaaactctaggagct

SEQ ID NO: 3646442 - DNA, 25 bp, Homo sapien
ccttggtaggcggtggcaaactgtt

SEQ ID NO: 3646443 - DNA, 25 bp, Homo sapien
caggataacttttacaggaacccag

SEQ ID NO: 3646444 - DNA, 25 bp, Homo sapien
tagagtcactaacgcaacataggca

SEQ ID NO: 3646445 - DNA, 25 bp, Homo sapien
ttaatggtcaaagtatgacgtaagc

SEQ ID NO: 3646446 - DNA, 25 bp, Homo sapien
cacaggggaggtacctgagccagat

SEQ ID NO: 3646447 - DNA, 25 bp, Homo sapien
ctaaagactggaagtgtatttccca

SEQ ID NO: 3646448 - DNA, 25 bp, Homo sapien
gcaacaccggcaaaacagaaactaa

SEQ ID NO: 3646449 - DNA, 25 bp, Homo sapien
gacaacccgaaacactttagcacag

SEQ ID NO: 3646450 - DNA, 25 bp, Homo sapien
ctcagtcactgctatggaaaaggtg

SEQ ID NO: 3646451 - DNA, 25 bp, Homo sapien
tggtgaggaccacacacatcatcag

SEQ ID NO: 3646452 - DNA, 25 bp, Homo sapien
cagtgtggtgaggaccacacacatc

SEQ ID NO: 3646453 - DNA, 25 bp, Homo sapien
cacacacatcatcagaacaggtctc

SEQ ID NO: 3646454 - DNA, 25 bp, Homo sapien
taacagaaccagagatacgggcagg

SEQ ID NO: 3646455 - DNA, 25 bp, Homo sapien
tacgggcaggtcaggtaacatatca

SEQ ID NO: 3646456 - DNA, 25 bp, Homo sapien
tcttttgactccctctaagaggata

SEQ ID NO: 3646457 - DNA, 25 bp, Homo sapien
catatcaggtaagacatcagcggac

SEQ ID NO: 3646458 - DNA, 25 bp, Homo sapien
aaccgcctcctttgcagggagctga

SEQ ID NO: 3646459 - DNA, 25 bp, Homo sapien
ccgggcacctctcgctgatgtgata

SEQ ID NO: 3646460 - DNA, 25 bp, Homo sapien
tgatgtgatagtggaaaccgcctcc

SEQ ID NO: 3646461 - DNA, 25 bp, Homo sapien
aatagcctgttgacctcacctctag

SEQ ID NO: 3646462 - DNA, 25 bp, Homo sapien
ttaccaatattagaattcacagtgg

SEQ ID NO: 3646463 - DNA, 25 bp, Homo sapien
tcagcacccatgaccttagaaactt

SEQ ID NO: 3646464 - DNA, 25 bp, Homo sapien
ccagtatgaatcattgataggtaaa

SEQ ID NO: 3646465 - DNA, 25 bp, Homo sapien
cattgataggtaaatgtcagcaccc

SEQ ID NO: 3646466 - DNA, 25 bp, Homo sapien
ttatgtgttgcaaagaggttgaatg

SEQ ID NO: 3646467 - DNA, 25 bp, Homo sapien
gaatggatgtgtccattttcactac

SEQ ID NO: 3646468 - DNA, 25 bp, Homo sapien
ggactttgcctcacttgctccgtca

SEQ ID NO: 3646469 - DNA, 25 bp, Homo sapien
gagatgcagcgttttctggactttg

SEQ ID NO: 3646470 - DNA, 25 bp, Homo sapien
cctgatggctgcgacacctgggtgc

SEQ ID NO: 3646471 - DNA, 25 bp, Homo sapien
ctcctgatggctgcgacacctgggt

SEQ ID NO: 3646472 - DNA, 25 bp, Homo sapien
ggctcctgatggctgcgacacctgg

SEQ ID NO: 3646473 - DNA, 25 bp, Homo sapien
gctcctgatggctgcgacacctggg

SEQ ID NO: 3646474 - DNA, 25 bp, Homo sapien
atctcgccgggacatcattctcagg

SEQ ID NO: 3646475 - DNA, 25 bp, Homo sapien
catttctatcgtgtcagaccacagg

SEQ ID NO: 3646476 - DNA, 25 bp, Homo sapien
tcctggggtcccatgaacacagact

SEQ ID NO: 3646477 - DNA, 25 bp, Homo sapien
taagaataactctgcccggacatct

SEQ ID NO: 3646478 - DNA, 25 bp, Homo sapien
gagagtcacgaggatatttttacac

SEQ ID NO: 3646479 - DNA, 25 bp, Homo sapien
cccagtacgggtgtgatagtcccca

SEQ ID NO: 3646480 - DNA, 25 bp, Homo sapien
cgaatggtaaatcttgcagcaggac

SEQ ID NO: 3646481 - DNA, 25 bp, Homo sapien
tgggtatagccagcttgacttgtac

SEQ ID NO: 3646482 - DNA, 25 bp, Homo sapien
tattaaatcccatagacttgcagtc

SEQ ID NO: 3646483 - DNA, 25 bp, Homo sapien
gcatgcaccaccactttcaatggca

SEQ ID NO: 3646484 - DNA, 25 bp, Homo sapien
ggcactaaaaagtgtattacaggta

SEQ ID NO: 3646485 - DNA, 25 bp, Homo sapien
tgtagaactatcaatgttttcgcag

SEQ ID NO: 3646486 - DNA, 25 bp, Homo sapien
cctcattgcaattgtcattcagtga

SEQ ID NO: 3646487 - DNA, 25 bp, Homo sapien
tcattgcaattgtcattcagtgaaa

SEQ ID NO: 3646488 - DNA, 25 bp, Homo sapien
ctatgcctcattgcaattgtcattc

SEQ ID NO: 3646489 - DNA, 25 bp, Homo sapien
tgcctcattgcaattgtcattcagt

SEQ ID NO: 3646490 - DNA, 25 bp, Homo sapien
tatgtaaggccctgctccaaggtac

SEQ ID NO: 3646491 - DNA, 25 bp, Homo sapien
tccaaggtacacagcacaaggcaat

SEQ ID NO: 3646492 - DNA, 25 bp, Homo sapien
tagtaggacttcagcaagcaatttc

SEQ ID NO: 3646493 - DNA, 25 bp, Homo sapien
taacatgtaaaaacagccccattgt

SEQ ID NO: 3646494 - DNA, 25 bp, Homo sapien
cctttcgaatgcagttggatctggt

SEQ ID NO: 3646495 - DNA, 25 bp, Homo sapien
gaatgcagttggatctggttctcag

SEQ ID NO: 3646496 - DNA, 25 bp, Homo sapien
aaacattggaaacacctttcgaatg

SEQ ID NO: 3646497 - DNA, 25 bp, Homo sapien
gaaacacctttcgaatgcagttgga

SEQ ID NO: 3646498 - DNA, 25 bp, Homo sapien
acaacctccactctgaagtgacagc

SEQ ID NO: 3646499 - DNA, 25 bp, Homo sapien
ctgtgccggaagacggagcttcccc

SEQ ID NO: 3646500 - DNA, 25 bp, Homo sapien
gaagacggagcttcccctgggaagc

SEQ ID NO: 3646501 - DNA, 25 bp, Homo sapien
tgccggaagacggagcttcccctgg

SEQ ID NO: 3646502 - DNA, 25 bp, Homo sapien
actgcctctccacctaatccaagtt

SEQ ID NO: 3646503 - DNA, 25 bp, Homo sapien
cctgatggacaggagggcggaacta

SEQ ID NO: 3646504 - DNA, 25 bp, Homo sapien
acaggagggcggaactaagacgcaa

SEQ ID NO: 3646505 - DNA, 25 bp, Homo sapien
gaactaagacgcaaaacaacgaggc

SEQ ID NO: 3646506 - DNA, 25 bp, Homo sapien
gcacccggaatgacagaggcaaaaa

SEQ ID NO: 3646507 - DNA, 25 bp, Homo sapien
ccagtaggagaacagcacccggaat

SEQ ID NO: 3646508 - DNA, 25 bp, Homo sapien
ttgatctaacagcgcagcaagaaat

SEQ ID NO: 3646509 - DNA, 25 bp, Homo sapien
tcctgtctagctgagcttccttcca

SEQ ID NO: 3646510 - DNA, 25 bp, Homo sapien
actctgagatcagttctagacccat

SEQ ID NO: 3646511 - DNA, 25 bp, Homo sapien
taaacccgatcccttgtagagcata

SEQ ID NO: 3646512 - DNA, 25 bp, Homo sapien
caggcatagagagtgatagcaaccc

SEQ ID NO: 3646513 - DNA, 25 bp, Homo sapien
taatctgagattcggacacccatcg

SEQ ID NO: 3646514 - DNA, 25 bp, Homo sapien
tttggacggcactgggactcactgc

SEQ ID NO: 3646515 - DNA, 25 bp, Homo sapien
cacgccaaacaagaacatgatgatt

SEQ ID NO: 3646516 - DNA, 25 bp, Homo sapien
aaacacaaagatgctgatcaattga

SEQ ID NO: 3646517 - DNA, 25 bp, Homo sapien
tcaattgatatttctagtacacgcc

SEQ ID NO: 3646518 - DNA, 25 bp, Homo sapien
gaatcaggttccaactaagaagacg

SEQ ID NO: 3646519 - DNA, 25 bp, Homo sapien
attcctactctcccttcttctgtgc

SEQ ID NO: 3646520 - DNA, 25 bp, Homo sapien
gtacttcaattcctactctcccttc

SEQ ID NO: 3646521 - DNA, 25 bp, Homo sapien
tcaattcctactctcccttcttctg

SEQ ID NO: 3646522 - DNA, 25 bp, Homo sapien
cgtacttcaattcctactctccctt

SEQ ID NO: 3646523 - DNA, 25 bp, Homo sapien
tattgacttgaacttggaatgtgag

SEQ ID NO: 3646524 - DNA, 25 bp, Homo sapien
ttgacttgaacttggaatgtgagtg

SEQ ID NO: 3646525 - DNA, 25 bp, Homo sapien
acatattgacttgaacttggaatgt

SEQ ID NO: 3646526 - DNA, 25 bp, Homo sapien
gacttgaacttggaatgtgagtgat

SEQ ID NO: 3646527 - DNA, 25 bp, Homo sapien
tgaacgggaatgcacaggttgctcc

SEQ ID NO: 3646528 - DNA, 25 bp, Homo sapien
tcatagtcagtagtggttccgcacc

SEQ ID NO: 3646529 - DNA, 25 bp, Homo sapien
aatagcttgtctgtgtcatagtcag

SEQ ID NO: 3646530 - DNA, 25 bp, Homo sapien
cagcactcgtgcaatctgcgtacca

SEQ ID NO: 3646531 - DNA, 25 bp, Homo sapien
tcaaaccacatgcttgtggcttcct

SEQ ID NO: 3646532 - DNA, 25 bp, Homo sapien
gaccttcacgtctttctccatcaaa

SEQ ID NO: 3646533 - DNA, 25 bp, Homo sapien
attgacacaaaattcaggaccttca

SEQ ID NO: 3646534 - DNA, 25 bp, Homo sapien
aattcaggaccttcacgtctttctc

SEQ ID NO: 3646535 - DNA, 25 bp, Homo sapien
tggtgccacgttaaagcggatttgg

SEQ ID NO: 3646536 - DNA, 25 bp, Homo sapien
tgatgctcaggagctcagcgttctg

SEQ ID NO: 3646537 - DNA, 25 bp, Homo sapien
gtttatctggtaggaaacgctggtc

SEQ ID NO: 3646538 - DNA, 25 bp, Homo sapien
tctgttgttggcagcttttcctcgc

SEQ ID NO: 3646539 - DNA, 25 bp, Homo sapien
cactgccaaccgctgttgaagctca

SEQ ID NO: 3646540 - DNA, 25 bp, Homo sapien
ctggtaaccagttcaaatatcggaa

SEQ ID NO: 3646541 - DNA, 25 bp, Homo sapien
aaaggactgcggtcactccactgcc

SEQ ID NO: 3646542 - DNA, 25 bp, Homo sapien
caaccgctgttgaagctcagactgt

SEQ ID NO: 3646543 - DNA, 25 bp, Homo sapien
tctagcatagatttcaaaacaaggt

SEQ ID NO: 3646544 - DNA, 25 bp, Homo sapien
tcttcagggcgtctagatgacttaa

SEQ ID NO: 3646545 - DNA, 25 bp, Homo sapien
ggattaattcgacacaaacaggctt

SEQ ID NO: 3646546 - DNA, 25 bp, Homo sapien
gctggtataaccttacaattcagta

SEQ ID NO: 3646547 - DNA, 25 bp, Homo sapien
tttagtgacacacagctttttccag

SEQ ID NO: 3646548 - DNA, 25 bp, Homo sapien
taaagtggtgttgccctttttgcaa

SEQ ID NO: 3646549 - DNA, 25 bp, Homo sapien
ttttccaggatttagtgacacacag

SEQ ID NO: 3646550 - DNA, 25 bp, Homo sapien
gcaaatatagcccagtttctgaaca

SEQ ID NO: 3646551 - DNA, 25 bp, Homo sapien
cactgtacttggctatgggaaatct

SEQ ID NO: 3646552 - DNA, 25 bp, Homo sapien
tcagcaaacctgaactaagcatctg

SEQ ID NO: 3646553 - DNA, 25 bp, Homo sapien
catctgttatgcactgtttaaatgc

SEQ ID NO: 3646554 - DNA, 25 bp, Homo sapien
agctgctactacagggcataagcca

SEQ ID NO: 3646555 - DNA, 25 bp, Homo sapien
tggtcagagcatccctctggatttt

SEQ ID NO: 3646556 - DNA, 25 bp, Homo sapien
ggcatacggccaccactgactagga

SEQ ID NO: 3646557 - DNA, 25 bp, Homo sapien
cttgtaacagtgaccggcatacggc

SEQ ID NO: 3646558 - DNA, 25 bp, Homo sapien
ctgactaggacagtgagtaggcaca

SEQ ID NO: 3646559 - DNA, 25 bp, Homo sapien
agccaagtatattatcactgtcaag

SEQ ID NO: 3646560 - DNA, 25 bp, Homo sapien
catacgttgttcgttgaattattga

SEQ ID NO: 3646561 - DNA, 25 bp, Homo sapien
gtgctcccaggattaaagccaagta

SEQ ID NO: 3646562 - DNA, 25 bp, Homo sapien
tgtgattaaattcatacgttgttcg

SEQ ID NO: 3646563 - DNA, 25 bp, Homo sapien
caccatcatgaaagatagtcctcat

SEQ ID NO: 3646564 - DNA, 25 bp, Homo sapien
tcccttgatatgatcaccatcatga

SEQ ID NO: 3646565 - DNA, 25 bp, Homo sapien
gatcaccatcatgaaagatagtcct

SEQ ID NO: 3646566 - DNA, 25 bp, Homo sapien
ctcccttgatatgatcaccatcatg

SEQ ID NO: 3646567 - DNA, 25 bp, Homo sapien
tgttttcatggcttggttctccacg

SEQ ID NO: 3646568 - DNA, 25 bp, Homo sapien
taatgtcatttaagccgatccacaa

SEQ ID NO: 3646569 - DNA, 25 bp, Homo sapien
catcactccactcaaagtacatttg

SEQ ID NO: 3646570 - DNA, 25 bp, Homo sapien
cgaagccatttggtaaacgttacag

SEQ ID NO: 3646571 - DNA, 25 bp, Homo sapien
tcatcttgcagatgtagccaagagg

SEQ ID NO: 3646572 - DNA, 25 bp, Homo sapien
cctttttcgacttccactatttctg

SEQ ID NO: 3646573 - DNA, 25 bp, Homo sapien
tctggaccttggcttcgtgatttca

SEQ ID NO: 3646574 - DNA, 25 bp, Homo sapien
agatgtagccaagaggccactcaca

SEQ ID NO: 3646575 - DNA, 25 bp, Homo sapien
gacattctgaaaggagctaccggcc

SEQ ID NO: 3646576 - DNA, 25 bp, Homo sapien
tgttcttaacaacccataggatgac

SEQ ID NO: 3646577 - DNA, 25 bp, Homo sapien
tttcacagggaccactgagttaccg

SEQ ID NO: 3646578 - DNA, 25 bp, Homo sapien
tgcggtgacctactgagaagaatcc

SEQ ID NO: 3646579 - DNA, 25 bp, Homo sapien
tatgaacgtatgctggaactgaaac

SEQ ID NO: 3646580 - DNA, 25 bp, Homo sapien
aattgtacttcataagggactgcta

SEQ ID NO: 3646581 - DNA, 25 bp, Homo sapien
gagacctgggttctacccttgcctc

SEQ ID NO: 3646582 - DNA, 25 bp, Homo sapien
gcttgtgtaaacatatgatcaggca

SEQ ID NO: 3646583 - DNA, 25 bp, Homo sapien
gtccaatcatatagcagtaaaagtg

SEQ ID NO: 3646584 - DNA, 25 bp, Homo sapien
tgcaaatgttgaaagcgtatgtcca

SEQ ID NO: 3646585 - DNA, 25 bp, Homo sapien
tctcattattacaggtttggtttgc

SEQ ID NO: 3646586 - DNA, 25 bp, Homo sapien
tattacaggtttggtttgcttctgc

SEQ ID NO: 3646587 - DNA, 25 bp, Homo sapien
ggccttaagccaacgaaactagtca

SEQ ID NO: 3646588 - DNA, 25 bp, Homo sapien
tcctcgatggtccactgaaaagtcc

SEQ ID NO: 3646589 - DNA, 25 bp, Homo sapien
tccagtgggtgaaccgaacctcttc

SEQ ID NO: 3646590 - DNA, 25 bp, Homo sapien
gtttgtatatctgaaagtcctgtcc

SEQ ID NO: 3646591 - DNA, 25 bp, Homo sapien
caatcctccggacatttgggttcgg

SEQ ID NO: 3646592 - DNA, 25 bp, Homo sapien
cctgcaatcccggttctcatggcaa

SEQ ID NO: 3646593 - DNA, 25 bp, Homo sapien
agcttgttctactgctggcgcccca

SEQ ID NO: 3646594 - DNA, 25 bp, Homo sapien
tcgggagtcgtcgtgggcttcggtg

SEQ ID NO: 3646595 - DNA, 25 bp, Homo sapien
taatcgccatattgtttgctgttcc

SEQ ID NO: 3646596 - DNA, 25 bp, Homo sapien
cacccagagctcgacaaaaatctcg

SEQ ID NO: 3646597 - DNA, 25 bp, Homo sapien
tattgatgctagctaagtctccacc

SEQ ID NO: 3646598 - DNA, 25 bp, Homo sapien
atctcgagattcaaaccacgttttc

SEQ ID NO: 3646599 - DNA, 25 bp, Homo sapien
tcactccaagtaaaaccttctgaag

SEQ ID NO: 3646600 - DNA, 25 bp, Homo sapien
aaacagtttgtggtagcttccacta

SEQ ID NO: 3646601 - DNA, 25 bp, Homo sapien
tctgaagggcttccatatgtcaatc

SEQ ID NO: 3646602 - DNA, 25 bp, Homo sapien
ccatatgtcaatcccaaccaaaaca

SEQ ID NO: 3646603 - DNA, 25 bp, Homo sapien
tataaaacccaaatgtcaatgaagc

SEQ ID NO: 3646604 - DNA, 25 bp, Homo sapien
gactaagcacggtgatgtgttttcc

SEQ ID NO: 3646605 - DNA, 25 bp, Homo sapien
aatataaaacccaaatgtcaatgaa

SEQ ID NO: 3646606 - DNA, 25 bp, Homo sapien
ggttctggactaagcacggtgatgt

SEQ ID NO: 3646607 - DNA, 25 bp, Homo sapien
caaatccagttgttaaggtgttcac

SEQ ID NO: 3646608 - DNA, 25 bp, Homo sapien
aatatcattccaagacatagtaggg

SEQ ID NO: 3646609 - DNA, 25 bp, Homo sapien
catagtagggtcacctttcagctca

SEQ ID NO: 3646610 - DNA, 25 bp, Homo sapien
tattaggttctccataagcccagtt

SEQ ID NO: 3646611 - DNA, 25 bp, Homo sapien
ctatgcaatgatggccactgacagt

SEQ ID NO: 3646612 - DNA, 25 bp, Homo sapien
ggcacatttatctgtgcttatcaac

SEQ ID NO: 3646613 - DNA, 25 bp, Homo sapien
catgcttatcctatgcaatgatggc

SEQ ID NO: 3646614 - DNA, 25 bp, Homo sapien
tatcaacttcatgcttatcctatgc

SEQ ID NO: 3646615 - DNA, 25 bp, Homo sapien
ggaactatttggaaggacgtgactc

SEQ ID NO: 3646616 - DNA, 25 bp, Homo sapien
tctactgctatggaacctgggccag

SEQ ID NO: 3646617 - DNA, 25 bp, Homo sapien
ggatcagagctgctcgtgggaacta

SEQ ID NO: 3646618 - DNA, 25 bp, Homo sapien
gaaggacgtgactcttgcccagaac

SEQ ID NO: 3646619 - DNA, 25 bp, Homo sapien
tcagaggccacagataatggctgtc

SEQ ID NO: 3646620 - DNA, 25 bp, Homo sapien
tctgttgacagcataggacactcac

SEQ ID NO: 3646621 - DNA, 25 bp, Homo sapien
gccactccagggtgattgttcactg

SEQ ID NO: 3646622 - DNA, 25 bp, Homo sapien
cagcatgcgtattgtttggccatca

SEQ ID NO: 3646623 - DNA, 25 bp, Homo sapien
tgtcttgaggagctggtgttggctc

SEQ ID NO: 3646624 - DNA, 25 bp, Homo sapien
ggagctggtgttggctcaggttttg

SEQ ID NO: 3646625 - DNA, 25 bp, Homo sapien
tggtgttggctcaggttttggtgtt

SEQ ID NO: 3646626 - DNA, 25 bp, Homo sapien
tgaggagctggtgttggctcaggtt

SEQ ID NO: 3646627 - DNA, 25 bp, Homo sapien
cacccatcttcagtaactggtggat

SEQ ID NO: 3646628 - DNA, 25 bp, Homo sapien
gctgaaataatactggtagtctttg

SEQ ID NO: 3646629 - DNA, 25 bp, Homo sapien
tttgaatagaaacaagatcaccaaa

SEQ ID NO: 3646630 - DNA, 25 bp, Homo sapien
tcttgcaaaacgctcgcgcattgtc

SEQ ID NO: 3646631 - DNA, 25 bp, Homo sapien
ttatccaagctgatcaataaaccaa

SEQ ID NO: 3646632 - DNA, 25 bp, Homo sapien
tccaagctgatcaataaaccaataa

SEQ ID NO: 3646633 - DNA, 25 bp, Homo sapien
caagctgatcaataaaccaataaaa

SEQ ID NO: 3646634 - DNA, 25 bp, Homo sapien
aatatgcagactgtgcatcatttct

SEQ ID NO: 3646635 - DNA, 25 bp, Homo sapien
gcaaaattgggttcacctgtggccc

SEQ ID NO: 3646636 - DNA, 25 bp, Homo sapien
agacacgtaatccactttgcttcca

SEQ ID NO: 3646637 - DNA, 25 bp, Homo sapien
gaatttgaatacatggtcacacagt

SEQ ID NO: 3646638 - DNA, 25 bp, Homo sapien
tcatttgcaaaattgggttcacctg

SEQ ID NO: 3646639 - DNA, 25 bp, Homo sapien
caaatgaaggcgtttggatagccac

SEQ ID NO: 3646640 - DNA, 25 bp, Homo sapien
gatactactgttatgtcgctggcaa

SEQ ID NO: 3646641 - DNA, 25 bp, Homo sapien
ttccttgcaccctgatgggaccgag

SEQ ID NO: 3646642 - DNA, 25 bp, Homo sapien
gatagccacagttaatgtcattcca

SEQ ID NO: 3646643 - DNA, 25 bp, Homo sapien
ctccaaagcctatacaagcttttcg

SEQ ID NO: 3646644 - DNA, 25 bp, Homo sapien
tcattttgtatggagaccagattcc

SEQ ID NO: 3646645 - DNA, 25 bp, Homo sapien
ttcattttgtatggagaccagattc

SEQ ID NO: 3646646 - DNA, 25 bp, Homo sapien
acaagcttttcgtgcctcttgccaa

SEQ ID NO: 3646647 - DNA, 25 bp, Homo sapien
ggaacgtgtgttctgaattgacatc

SEQ ID NO: 3646648 - DNA, 25 bp, Homo sapien
tcgtccatccgtccaaaggaacgtg

SEQ ID NO: 3646649 - DNA, 25 bp, Homo sapien
cagtttgtgtaatggactcctcgtc

SEQ ID NO: 3646650 - DNA, 25 bp, Homo sapien
tccttcatgtgataggtaagaaatg

SEQ ID NO: 3646651 - DNA, 25 bp, Homo sapien
acagtagggttcacgtttctatgag

SEQ ID NO: 3646652 - DNA, 25 bp, Homo sapien
tccattctaatcctcatacctggtc

SEQ ID NO: 3646653 - DNA, 25 bp, Homo sapien
tgtgaatgtgtttgccattccaaat

SEQ ID NO: 3646654 - DNA, 25 bp, Homo sapien
gaatgtgtttgccattccaaatcct

SEQ ID NO: 3646655 - DNA, 25 bp, Homo sapien
tatttccattctaatcctcatacct

SEQ ID NO: 3646656 - DNA, 25 bp, Homo sapien
ctccaataataacaacacagtcagc

SEQ ID NO: 3646657 - DNA, 25 bp, Homo sapien
tactgtcgcaggtatcatccatcca

SEQ ID NO: 3646658 - DNA, 25 bp, Homo sapien
cggatcgtgtctggcatatgtagcc

SEQ ID NO: 3646659 - DNA, 25 bp, Homo sapien
tcgtgtctggcatatgtagcctcgt

SEQ ID NO: 3646660 - DNA, 25 bp, Homo sapien
tatgtagcctcgtttactgtcgcag

SEQ ID NO: 3646661 - DNA, 25 bp, Homo sapien
gccacgcaaatgcattactgtaggg

SEQ ID NO: 3646662 - DNA, 25 bp, Homo sapien
tactgtagggatccagaatgctggc

SEQ ID NO: 3646663 - DNA, 25 bp, Homo sapien
tgtgaagcttgcagtatgtctccgc

SEQ ID NO: 3646664 - DNA, 25 bp, Homo sapien
ttcagggcgatccacacacgttcat

SEQ ID NO: 3646665 - DNA, 25 bp, Homo sapien
taaactcataagagaatcgtgaaca

SEQ ID NO: 3646666 - DNA, 25 bp, Homo sapien
tttaaactcataagagaatcgtgaa

SEQ ID NO: 3646667 - DNA, 25 bp, Homo sapien
actcataagagaatcgtgaacatgt

SEQ ID NO: 3646668 - DNA, 25 bp, Homo sapien
aactcataagagaatcgtgaacatg

SEQ ID NO: 3646669 - DNA, 25 bp, Homo sapien
tatggaagagagaagccttagtctc

SEQ ID NO: 3646670 - DNA, 25 bp, Homo sapien
tattctagtgaggtggtctttcggc

SEQ ID NO: 3646671 - DNA, 25 bp, Homo sapien
gccagtcattttagtctacttgcac

SEQ ID NO: 3646672 - DNA, 25 bp, Homo sapien
cttgatttctagtgaggcagtcttt

SEQ ID NO: 3646673 - DNA, 25 bp, Homo sapien
gtgctgtcttccagtagccatcaag

SEQ ID NO: 3646674 - DNA, 25 bp, Homo sapien
tcatcagcagcccagttagtgtacc

SEQ ID NO: 3646675 - DNA, 25 bp, Homo sapien
tgatttcaatttgggctcatcagca

SEQ ID NO: 3646676 - DNA, 25 bp, Homo sapien
cagtccaagtgtattgattatcagt

SEQ ID NO: 3646677 - DNA, 25 bp, Homo sapien
cattcgaagacattccagagaagct

SEQ ID NO: 3646678 - DNA, 25 bp, Homo sapien
ggaaaggaatccatgctgtgtgatc

SEQ ID NO: 3646679 - DNA, 25 bp, Homo sapien
tgtgatctgactccgggcatctgcc

SEQ ID NO: 3646680 - DNA, 25 bp, Homo sapien
gactcaatatagtaacagtgaccat

SEQ ID NO: 3646681 - DNA, 25 bp, Homo sapien
tcagtggaccccagaatagatgatt

SEQ ID NO: 3646682 - DNA, 25 bp, Homo sapien
cagtggaccccagaatagatgatta

SEQ ID NO: 3646683 - DNA, 25 bp, Homo sapien
gtcagtggaccccagaatagatgat

SEQ ID NO: 3646684 - DNA, 25 bp, Homo sapien
tcatgtatagtgtcagtggacccca

SEQ ID NO: 3646685 - DNA, 25 bp, Homo sapien
tcatcggctaagatactgccactgt

SEQ ID NO: 3646686 - DNA, 25 bp, Homo sapien
cctcggataaacctcatcggctaag

SEQ ID NO: 3646687 - DNA, 25 bp, Homo sapien
cggataaacctcatcggctaagata

SEQ ID NO: 3646688 - DNA, 25 bp, Homo sapien
catcggctaagatactgccactgtg

SEQ ID NO: 3646689 - DNA, 25 bp, Homo sapien
tctgcagcactttcaatggaaacca

SEQ ID NO: 3646690 - DNA, 25 bp, Homo sapien
acttttaagtggctcaacccgatat

SEQ ID NO: 3646691 - DNA, 25 bp, Homo sapien
tgaacaatcctatccaaaaattggt

SEQ ID NO: 3646692 - DNA, 25 bp, Homo sapien
caacccgatatgacagaaaactgga

SEQ ID NO: 3646693 - DNA, 25 bp, Homo sapien
tattactccaaaacccagaagacgc

SEQ ID NO: 3646694 - DNA, 25 bp, Homo sapien
tcctgtgttccagttgacaaaggag

SEQ ID NO: 3646695 - DNA, 25 bp, Homo sapien
aatcattccgttcaccagagggatc

SEQ ID NO: 3646696 - DNA, 25 bp, Homo sapien
gagaccggactgttatttatccaca

SEQ ID NO: 3646697 - DNA, 25 bp, Homo sapien
agtaattcatgagtaggtttagcat

SEQ ID NO: 3646698 - DNA, 25 bp, Homo sapien
cttttgttgtaagtaattcatgagt

SEQ ID NO: 3646699 - DNA, 25 bp, Homo sapien
tcatgagtaggtttagcatcaataa

SEQ ID NO: 3646700 - DNA, 25 bp, Homo sapien
aattcatgagtaggtttagcatcaa

SEQ ID NO: 3646701 - DNA, 25 bp, Homo sapien
cctcttgaggtaggtgcacacgtct

SEQ ID NO: 3646702 - DNA, 25 bp, Homo sapien
aatgatgactactccggccacgttg

SEQ ID NO: 3646703 - DNA, 25 bp, Homo sapien
tataaaagaaataggcggcaaggcc

SEQ ID NO: 3646704 - DNA, 25 bp, Homo sapien
ggccagcacccgttaaaatcaggag

SEQ ID NO: 3646705 - DNA, 25 bp, Homo sapien
actcagcctgtaaaactctcttggg

SEQ ID NO: 3646706 - DNA, 25 bp, Homo sapien
gaacacatttgcaacactcagcctg

SEQ ID NO: 3646707 - DNA, 25 bp, Homo sapien
aaatccacatgaagctgacatcagc

SEQ ID NO: 3646708 - DNA, 25 bp, Homo sapien
gggaaacaagattctcagctgcctt

SEQ ID NO: 3646709 - DNA, 25 bp, Homo sapien
gttgtaagaatgacttctgctgtgc

SEQ ID NO: 3646710 - DNA, 25 bp, Homo sapien
cagggggttgtaagaatgacttctg

SEQ ID NO: 3646711 - DNA, 25 bp, Homo sapien
gggttgtaagaatgacttctgctgt

SEQ ID NO: 3646712 - DNA, 25 bp, Homo sapien
gtaagaatgacttctgctgtgccat

SEQ ID NO: 3646713 - DNA, 25 bp, Homo sapien
catttgtaatctcaaggtttgctca

SEQ ID NO: 3646714 - DNA, 25 bp, Homo sapien
ggcaggaagtcaaaaatcgagtctc

SEQ ID NO: 3646715 - DNA, 25 bp, Homo sapien
aacacaatgtacaaactgccaggaa

SEQ ID NO: 3646716 - DNA, 25 bp, Homo sapien
caggaatgttctggcatatccgtgg

SEQ ID NO: 3646717 - DNA, 25 bp, Homo sapien
tgattcgaggaactctgcgccttac

SEQ ID NO: 3646718 - DNA, 25 bp, Homo sapien
tactgtggtaactggaaagacatgg

SEQ ID NO: 3646719 - DNA, 25 bp, Homo sapien
tctaagtcctctgataagtgtgcca

SEQ ID NO: 3646720 - DNA, 25 bp, Homo sapien
ggattaacccagtactgattcgagg

SEQ ID NO: 3646721 - DNA, 25 bp, Homo sapien
tgcacttcaattatccttttaacgg

SEQ ID NO: 3646722 - DNA, 25 bp, Homo sapien
tatagaagccaaataatcaaactgc

SEQ ID NO: 3646723 - DNA, 25 bp, Homo sapien
agccaaataatcaaactgcacttca

SEQ ID NO: 3646724 - DNA, 25 bp, Homo sapien
taatcaaactgcacttcaattatcc

SEQ ID NO: 3646725 - DNA, 25 bp, Homo sapien
gagataacacaagtgccccgcaaag

SEQ ID NO: 3646726 - DNA, 25 bp, Homo sapien
ttcttgaatgaatgggtcctgggcc

SEQ ID NO: 3646727 - DNA, 25 bp, Homo sapien
gcaaagacccgaggacactggtgga

SEQ ID NO: 3646728 - DNA, 25 bp, Homo sapien
tactctgggcgagttaggactggga

SEQ ID NO: 3646729 - DNA, 25 bp, Homo sapien
gcgtgcagatcacggcagtccctgt

SEQ ID NO: 3646730 - DNA, 25 bp, Homo sapien
gatcacggcagtccctgttaactca

SEQ ID NO: 3646731 - DNA, 25 bp, Homo sapien
tgcagatcacggcagtccctgttaa

SEQ ID NO: 3646732 - DNA, 25 bp, Homo sapien
ctgcgtgcagatcacggcagtccct

SEQ ID NO: 3646733 - DNA, 25 bp, Homo sapien
acagttgcatgtgttcgcattgtcc

SEQ ID NO: 3646734 - DNA, 25 bp, Homo sapien
cagttgcatgtgttcgcattgtcct

SEQ ID NO: 3646735 - DNA, 25 bp, Homo sapien
gttgcatgtgttcgcattgtccttt

SEQ ID NO: 3646736 - DNA, 25 bp, Homo sapien
aacagttgcatgtgttcgcattgtc

SEQ ID NO: 3646737 - DNA, 25 bp, Homo sapien
ctgtggtgtcggtgacatttcagac

SEQ ID NO: 3646738 - DNA, 25 bp, Homo sapien
acataagcacggtcaggatggacgg

SEQ ID NO: 3646739 - DNA, 25 bp, Homo sapien
aagaggatgggcacataagcacggt

SEQ ID NO: 3646740 - DNA, 25 bp, Homo sapien
ttgcttcaccttggggttgtgggaa

SEQ ID NO: 3646741 - DNA, 25 bp, Homo sapien
gatgggcacataagcacggtcagga

SEQ ID NO: 3646742 - DNA, 25 bp, Homo sapien
aaaccaaggccagaagagtgtaaat

SEQ ID NO: 3646743 - DNA, 25 bp, Homo sapien
aaatgaagtgctacagggacacagg

SEQ ID NO: 3646744 - DNA, 25 bp, Homo sapien
gagtgtaaatgaagtgctacaggga

SEQ ID NO: 3646745 - DNA, 25 bp, Homo sapien
gccagaagagtgtaaatgaagtgct

SEQ ID NO: 3646746 - DNA, 25 bp, Homo sapien
gcaagctgccaagaacctgggactc

SEQ ID NO: 3646747 - DNA, 25 bp, Homo sapien
aagcaagctgccaagaacctgggac

SEQ ID NO: 3646748 - DNA, 25 bp, Homo sapien
gaaaagcaagctgccaagaacctgg

SEQ ID NO: 3646749 - DNA, 25 bp, Homo sapien
gaggaaaagcaagctgccaagaacc

SEQ ID NO: 3646750 - DNA, 25 bp, Homo sapien
gagaaagcggcaaactctaggagct

SEQ ID NO: 3646751 - DNA, 25 bp, Homo sapien
caggataacttttacaggaacccag

SEQ ID NO: 3646752 - DNA, 25 bp, Homo sapien
ccttggtaggcggtggcaaactgtt

SEQ ID NO: 3646753 - DNA, 25 bp, Homo sapien
tagagtcactaacgcaacataggca

SEQ ID NO: 3646754 - DNA, 25 bp, Homo sapien
ttaatggtcaaagtatgacgtaagc

SEQ ID NO: 3646755 - DNA, 25 bp, Homo sapien
ctaaagactggaagtgtatttccca

SEQ ID NO: 3646756 - DNA, 25 bp, Homo sapien
cacaggggaggtacctgagccagat

SEQ ID NO: 3646757 - DNA, 25 bp, Homo sapien
gcaacaccggcaaaacagaaactaa

SEQ ID NO: 3646758 - DNA, 25 bp, Homo sapien
gacaacccgaaacactttagcacag

SEQ ID NO: 3646759 - DNA, 25 bp, Homo sapien
tctggcaggcatccctagaatggag

SEQ ID NO: 3646760 - DNA, 25 bp, Homo sapien
gatctgctccagtttcaggctagcc

SEQ ID NO: 3646761 - DNA, 25 bp, Homo sapien
tcttttaaacttgccctgcccagga

SEQ ID NO: 3646762 - DNA, 25 bp, Homo sapien
cttaagccaggtaaaatgttgccca

SEQ ID NO: 3646763 - DNA, 25 bp, Homo sapien
ctcagtcactgctatggaaaaggtg

SEQ ID NO: 3646764 - DNA, 25 bp, Homo sapien
tggtgaggaccacacacatcatcag

SEQ ID NO: 3646765 - DNA, 25 bp, Homo sapien
cacacacatcatcagaacaggtctc

SEQ ID NO: 3646766 - DNA, 25 bp, Homo sapien
cagtgtggtgaggaccacacacatc

SEQ ID NO: 3646767 - DNA, 25 bp, Homo sapien
taacagaaccagagatacgggcagg

SEQ ID NO: 3646768 - DNA, 25 bp, Homo sapien
tcttttgactccctctaagaggata

SEQ ID NO: 3646769 - DNA, 25 bp, Homo sapien
catatcaggtaagacatcagcggac

SEQ ID NO: 3646770 - DNA, 25 bp, Homo sapien
tacgggcaggtcaggtaacatatca

SEQ ID NO: 3646771 - DNA, 25 bp, Homo sapien
aaccgcctcctttgcagggagctga

SEQ ID NO: 3646772 - DNA, 25 bp, Homo sapien
ccgggcacctctcgctgatgtgata

SEQ ID NO: 3646773 - DNA, 25 bp, Homo sapien
tgatgtgatagtggaaaccgcctcc

SEQ ID NO: 3646774 - DNA, 25 bp, Homo sapien
aatagcctgttgacctcacctctag

SEQ ID NO: 3646775 - DNA, 25 bp, Homo sapien
gggagccccttaagcaaggccatga

SEQ ID NO: 3646776 - DNA, 25 bp, Homo sapien
agtcctggagggagccccttaagca

SEQ ID NO: 3646777 - DNA, 25 bp, Homo sapien
tgacgattgattccactaacatacc

SEQ ID NO: 3646778 - DNA, 25 bp, Homo sapien
taagcaaggccatgacgattgattc

SEQ ID NO: 3646779 - DNA, 25 bp, Homo sapien
ttaccaatattagaattcacagtgg

SEQ ID NO: 3646780 - DNA, 25 bp, Homo sapien
tcagcacccatgaccttagaaactt

SEQ ID NO: 3646781 - DNA, 25 bp, Homo sapien
ccagtatgaatcattgataggtaaa

SEQ ID NO: 3646782 - DNA, 25 bp, Homo sapien
cattgataggtaaatgtcagcaccc

SEQ ID NO: 3646783 - DNA, 25 bp, Homo sapien
ttatgtgttgcaaagaggttgaatg

SEQ ID NO: 3646784 - DNA, 25 bp, Homo sapien
gaatggatgtgtccattttcactac

SEQ ID NO: 3646785 - DNA, 25 bp, Homo sapien
ggactttgcctcacttgctccgtca

SEQ ID NO: 3646786 - DNA, 25 bp, Homo sapien
gagatgcagcgttttctggactttg

SEQ ID NO: 3646787 - DNA, 25 bp, Homo sapien
cctgatggctgcgacacctgggtgc

SEQ ID NO: 3646788 - DNA, 25 bp, Homo sapien
ctcctgatggctgcgacacctgggt

SEQ ID NO: 3646789 - DNA, 25 bp, Homo sapien
ggctcctgatggctgcgacacctgg

SEQ ID NO: 3646790 - DNA, 25 bp, Homo sapien
gctcctgatggctgcgacacctggg

SEQ ID NO: 3646791 - DNA, 25 bp, Homo sapien
atctcgccgggacatcattctcagg

SEQ ID NO: 3646792 - DNA, 25 bp, Homo sapien
catttctatcgtgtcagaccacagg

SEQ ID NO: 3646793 - DNA, 25 bp, Homo sapien
tcctggggtcccatgaacacagact

SEQ ID NO: 3646794 - DNA, 25 bp, Homo sapien
taagaataactctgcccggacatct

SEQ ID NO: 3646795 - DNA, 25 bp, Homo sapien
gagagtcacgaggatatttttacac

SEQ ID NO: 3646796 - DNA, 25 bp, Homo sapien
tgggtatagccagcttgacttgtac

SEQ ID NO: 3646797 - DNA, 25 bp, Homo sapien
cgaatggtaaatcttgcagcaggac

SEQ ID NO: 3646798 - DNA, 25 bp, Homo sapien
cccagtacgggtgtgatagtcccca

SEQ ID NO: 3646799 - DNA, 25 bp, Homo sapien
tccgaaactgttggcacttgaggca

SEQ ID NO: 3646800 - DNA, 25 bp, Homo sapien
gagatgcattgttaaacaagatgcc

SEQ ID NO: 3646801 - DNA, 25 bp, Homo sapien
aaacaagatgccctcaggctttcct

SEQ ID NO: 3646802 - DNA, 25 bp, Homo sapien
gaataaagattaataggacactcag

SEQ ID NO: 3646803 - DNA, 25 bp, Homo sapien
aaaacaagacgagataacatttaca

SEQ ID NO: 3646804 - DNA, 25 bp, Homo sapien
gaaaaacaagacgagataacattta

SEQ ID NO: 3646805 - DNA, 25 bp, Homo sapien
acaagacgagataacatttacacat

SEQ ID NO: 3646806 - DNA, 25 bp, Homo sapien
taagaaaaacaagacgagataacat

SEQ ID NO: 3646807 - DNA, 25 bp, Homo sapien
cctcattgcaattgtcattcagtga

SEQ ID NO: 3646808 - DNA, 25 bp, Homo sapien
tgcctcattgcaattgtcattcagt

SEQ ID NO: 3646809 - DNA, 25 bp, Homo sapien
tcattgcaattgtcattcagtgaaa

SEQ ID NO: 3646810 - DNA, 25 bp, Homo sapien
ctatgcctcattgcaattgtcattc

SEQ ID NO: 3646811 - DNA, 25 bp, Homo sapien
tatgtaaggccctgctccaaggtac

SEQ ID NO: 3646812 - DNA, 25 bp, Homo sapien
taacatgtaaaaacagccccattgt

SEQ ID NO: 3646813 - DNA, 25 bp, Homo sapien
tagtaggacttcagcaagcaatttc

SEQ ID NO: 3646814 - DNA, 25 bp, Homo sapien
tccaaggtacacagcacaaggcaat

SEQ ID NO: 3646815 - DNA, 25 bp, Homo sapien
gaatgcagttggatctggttctcag

SEQ ID NO: 3646816 - DNA, 25 bp, Homo sapien
cctttcgaatgcagttggatctggt

SEQ ID NO: 3646817 - DNA, 25 bp, Homo sapien
aaacattggaaacacctttcgaatg

SEQ ID NO: 3646818 - DNA, 25 bp, Homo sapien
gaaacacctttcgaatgcagttgga

SEQ ID NO: 3646819 - DNA, 25 bp, Homo sapien
gaagacggagcttcccctgggaagc

SEQ ID NO: 3646820 - DNA, 25 bp, Homo sapien
acaacctccactctgaagtgacagc

SEQ ID NO: 3646821 - DNA, 25 bp, Homo sapien
ctgtgccggaagacggagcttcccc

SEQ ID NO: 3646822 - DNA, 25 bp, Homo sapien
tgccggaagacggagcttcccctgg

SEQ ID NO: 3646823 - DNA, 25 bp, Homo sapien
cctgatggacaggagggcggaacta

SEQ ID NO: 3646824 - DNA, 25 bp, Homo sapien
acaggagggcggaactaagacgcaa

SEQ ID NO: 3646825 - DNA, 25 bp, Homo sapien
gaactaagacgcaaaacaacgaggc

SEQ ID NO: 3646826 - DNA, 25 bp, Homo sapien
actgcctctccacctaatccaagtt

SEQ ID NO: 3646827 - DNA, 25 bp, Homo sapien
gcacccggaatgacagaggcaaaaa

SEQ ID NO: 3646828 - DNA, 25 bp, Homo sapien
ccagtaggagaacagcacccggaat

SEQ ID NO: 3646829 - DNA, 25 bp, Homo sapien
ttgatctaacagcgcagcaagaaat

SEQ ID NO: 3646830 - DNA, 25 bp, Homo sapien
agcggaggcatcttaactagtaacc

SEQ ID NO: 3646831 - DNA, 25 bp, Homo sapien
ccattaggaagcagtgtaagtttga

SEQ ID NO: 3646832 - DNA, 25 bp, Homo sapien
gaaaaggttctgtttcaatacacac

SEQ ID NO: 3646833 - DNA, 25 bp, Homo sapien
tcttctccccaagtaatcagcatgt

SEQ ID NO: 3646834 - DNA, 25 bp, Homo sapien
tcctgtctagctgagcttccttcca

SEQ ID NO: 3646835 - DNA, 25 bp, Homo sapien
taatctgagattcggacacccatcg

SEQ ID NO: 3646836 - DNA, 25 bp, Homo sapien
taaacccgatcccttgtagagcata

SEQ ID NO: 3646837 - DNA, 25 bp, Homo sapien
caggcatagagagtgatagcaaccc

SEQ ID NO: 3646838 - DNA, 25 bp, Homo sapien
tttggacggcactgggactcactgc

SEQ ID NO: 3646839 - DNA, 25 bp, Homo sapien
aaacacaaagatgctgatcaattga

SEQ ID NO: 3646840 - DNA, 25 bp, Homo sapien
cacgccaaacaagaacatgatgatt

SEQ ID NO: 3646841 - DNA, 25 bp, Homo sapien
tcaattgatatttctagtacacgcc

SEQ ID NO: 3646842 - DNA, 25 bp, Homo sapien
gaatcaggttccaactaagaagacg

SEQ ID NO: 3646843 - DNA, 25 bp, Homo sapien
attcctactctcccttcttctgtgc

SEQ ID NO: 3646844 - DNA, 25 bp, Homo sapien
tcaattcctactctcccttcttctg

SEQ ID NO: 3646845 - DNA, 25 bp, Homo sapien
cgtacttcaattcctactctccctt

SEQ ID NO: 3646846 - DNA, 25 bp, Homo sapien
gtacttcaattcctactctcccttc

SEQ ID NO: 3646847 - DNA, 25 bp, Homo sapien
tattgacttgaacttggaatgtgag

SEQ ID NO: 3646848 - DNA, 25 bp, Homo sapien
ttgacttgaacttggaatgtgagtg

SEQ ID NO: 3646849 - DNA, 25 bp, Homo sapien
acatattgacttgaacttggaatgt

SEQ ID NO: 3646850 - DNA, 25 bp, Homo sapien
gacttgaacttggaatgtgagtgat

SEQ ID NO: 3646851 - DNA, 25 bp, Homo sapien
tcatagtcagtagtggttccgcacc

SEQ ID NO: 3646852 - DNA, 25 bp, Homo sapien
aatagcttgtctgtgtcatagtcag

SEQ ID NO: 3646853 - DNA, 25 bp, Homo sapien
tgaacgggaatgcacaggttgctcc

SEQ ID NO: 3646854 - DNA, 25 bp, Homo sapien
cagcactcgtgcaatctgcgtacca

SEQ ID NO: 3646855 - DNA, 25 bp, Homo sapien
tcaaaccacatgcttgtggcttcct

SEQ ID NO: 3646856 - DNA, 25 bp, Homo sapien
gaccttcacgtctttctccatcaaa

SEQ ID NO: 3646857 - DNA, 25 bp, Homo sapien
aattcaggaccttcacgtctttctc

SEQ ID NO: 3646858 - DNA, 25 bp, Homo sapien
attgacacaaaattcaggaccttca

SEQ ID NO: 3646859 - DNA, 25 bp, Homo sapien
tggtgccacgttaaagcggatttgg

SEQ ID NO: 3646860 - DNA, 25 bp, Homo sapien
tctgttgttggcagcttttcctcgc

SEQ ID NO: 3646861 - DNA, 25 bp, Homo sapien
tgatgctcaggagctcagcgttctg

SEQ ID NO: 3646862 - DNA, 25 bp, Homo sapien
gtttatctggtaggaaacgctggtc

SEQ ID NO: 3646863 - DNA, 25 bp, Homo sapien
tacttgcacagacgtattctacagg

SEQ ID NO: 3646864 - DNA, 25 bp, Homo sapien
gcctgacatatggtatatgccccat

SEQ ID NO: 3646865 - DNA, 25 bp, Homo sapien
acaggacatgctcctaaaagtagca

SEQ ID NO: 3646866 - DNA, 25 bp, Homo sapien
taattcgcggattaaagaagaactg

SEQ ID NO: 3646867 - DNA, 25 bp, Homo sapien
ctggtaaccagttcaaatatcggaa

SEQ ID NO: 3646868 - DNA, 25 bp, Homo sapien
cactgccaaccgctgttgaagctca

SEQ ID NO: 3646869 - DNA, 25 bp, Homo sapien
aaaggactgcggtcactccactgcc

SEQ ID NO: 3646870 - DNA, 25 bp, Homo sapien
caaccgctgttgaagctcagactgt

SEQ ID NO: 3646871 - DNA, 25 bp, Homo sapien
tttagtgacacacagctttttccag

SEQ ID NO: 3646872 - DNA, 25 bp, Homo sapien
ttttccaggatttagtgacacacag

SEQ ID NO: 3646873 - DNA, 25 bp, Homo sapien
taaagtggtgttgccctttttgcaa

SEQ ID NO: 3646874 - DNA, 25 bp, Homo sapien
gcaaatatagcccagtttctgaaca

SEQ ID NO: 3646875 - DNA, 25 bp, Homo sapien
tcagcaaacctgaactaagcatctg

SEQ ID NO: 3646876 - DNA, 25 bp, Homo sapien
cactgtacttggctatgggaaatct

SEQ ID NO: 3646877 - DNA, 25 bp, Homo sapien
catctgttatgcactgtttaaatgc

SEQ ID NO: 3646878 - DNA, 25 bp, Homo sapien
agctgctactacagggcataagcca

SEQ ID NO: 3646879 - DNA, 25 bp, Homo sapien
ggacagtgagtaggcacatcacttt

SEQ ID NO: 3646880 - DNA, 25 bp, Homo sapien
taggacagtgagtaggcacatcact

SEQ ID NO: 3646881 - DNA, 25 bp, Homo sapien
ctaggacagtgagtaggcacatcac

SEQ ID NO: 3646882 - DNA, 25 bp, Homo sapien
aggacagtgagtaggcacatcactt

SEQ ID NO: 3646883 - DNA, 25 bp, Homo sapien
aacagtgaccggcatacggccacca

SEQ ID NO: 3646884 - DNA, 25 bp, Homo sapien
cttgtaacagtgaccggcatacggc

SEQ ID NO: 3646885 - DNA, 25 bp, Homo sapien
tggtcagagcatccctctggatttt

SEQ ID NO: 3646886 - DNA, 25 bp, Homo sapien
gtgaccggcatacggccaccactga

SEQ ID NO: 3646887 - DNA, 25 bp, Homo sapien
agccaagtatattatcactgtcaag

SEQ ID NO: 3646888 - DNA, 25 bp, Homo sapien
tgtgattaaattcatacgttgttcg

SEQ ID NO: 3646889 - DNA, 25 bp, Homo sapien
gtgctcccaggattaaagccaagta

SEQ ID NO: 3646890 - DNA, 25 bp, Homo sapien
catacgttgttcgttgaattattga

SEQ ID NO: 3646891 - DNA, 25 bp, Homo sapien
taatgtcatttaagccgatccacaa

SEQ ID NO: 3646892 - DNA, 25 bp, Homo sapien
catcactccactcaaagtacatttg

SEQ ID NO: 3646893 - DNA, 25 bp, Homo sapien
cgaagccatttggtaaacgttacag

SEQ ID NO: 3646894 - DNA, 25 bp, Homo sapien
tgttttcatggcttggttctccacg

SEQ ID NO: 3646895 - DNA, 25 bp, Homo sapien
tcatcttgcagatgtagccaagagg

SEQ ID NO: 3646896 - DNA, 25 bp, Homo sapien
agatgtagccaagaggccactcaca

SEQ ID NO: 3646897 - DNA, 25 bp, Homo sapien
tctggaccttggcttcgtgatttca

SEQ ID NO: 3646898 - DNA, 25 bp, Homo sapien
cctttttcgacttccactatttctg

SEQ ID NO: 3646899 - DNA, 25 bp, Homo sapien
gacattctgaaaggagctaccggcc

SEQ ID NO: 3646900 - DNA, 25 bp, Homo sapien
tgttcttaacaacccataggatgac

SEQ ID NO: 3646901 - DNA, 25 bp, Homo sapien
tttcacagggaccactgagttaccg

SEQ ID NO: 3646902 - DNA, 25 bp, Homo sapien
tgcggtgacctactgagaagaatcc

SEQ ID NO: 3646903 - DNA, 25 bp, Homo sapien
aattgtacttcataagggactgcta

SEQ ID NO: 3646904 - DNA, 25 bp, Homo sapien
tatgaacgtatgctggaactgaaac

SEQ ID NO: 3646905 - DNA, 25 bp, Homo sapien
gcttgtgtaaacatatgatcaggca

SEQ ID NO: 3646906 - DNA, 25 bp, Homo sapien
gagacctgggttctacccttgcctc

SEQ ID NO: 3646907 - DNA, 25 bp, Homo sapien
gtccaatcatatagcagtaaaagtg

SEQ ID NO: 3646908 - DNA, 25 bp, Homo sapien
tgcaaatgttgaaagcgtatgtcca

SEQ ID NO: 3646909 - DNA, 25 bp, Homo sapien
tctcattattacaggtttggtttgc

SEQ ID NO: 3646910 - DNA, 25 bp, Homo sapien
tattacaggtttggtttgcttctgc

SEQ ID NO: 3646911 - DNA, 25 bp, Homo sapien
tcctcgatggtccactgaaaagtcc

SEQ ID NO: 3646912 - DNA, 25 bp, Homo sapien
ggccttaagccaacgaaactagtca

SEQ ID NO: 3646913 - DNA, 25 bp, Homo sapien
tccagtgggtgaaccgaacctcttc

SEQ ID NO: 3646914 - DNA, 25 bp, Homo sapien
gtttgtatatctgaaagtcctgtcc

SEQ ID NO: 3646915 - DNA, 25 bp, Homo sapien
caatcctccggacatttgggttcgg

SEQ ID NO: 3646916 - DNA, 25 bp, Homo sapien
cctgcaatcccggttctcatggcaa

SEQ ID NO: 3646917 - DNA, 25 bp, Homo sapien
agcttgttctactgctggcgcccca

SEQ ID NO: 3646918 - DNA, 25 bp, Homo sapien
tcgggagtcgtcgtgggcttcggtg

SEQ ID NO: 3646919 - DNA, 25 bp, Homo sapien
taatcgccatattgtttgctgttcc

SEQ ID NO: 3646920 - DNA, 25 bp, Homo sapien
cacccagagctcgacaaaaatctcg

SEQ ID NO: 3646921 - DNA, 25 bp, Homo sapien
atctcgagattcaaaccacgttttc

SEQ ID NO: 3646922 - DNA, 25 bp, Homo sapien
tattgatgctagctaagtctccacc

SEQ ID NO: 3646923 - DNA, 25 bp, Homo sapien
tctgaagggcttccatatgtcaatc

SEQ ID NO: 3646924 - DNA, 25 bp, Homo sapien
aaacagtttgtggtagcttccacta

SEQ ID NO: 3646925 - DNA, 25 bp, Homo sapien
ccatatgtcaatcccaaccaaaaca

SEQ ID NO: 3646926 - DNA, 25 bp, Homo sapien
tcactccaagtaaaaccttctgaag

SEQ ID NO: 3646927 - DNA, 25 bp, Homo sapien
tataaaacccaaatgtcaatgaagc

SEQ ID NO: 3646928 - DNA, 25 bp, Homo sapien
aatataaaacccaaatgtcaatgaa

SEQ ID NO: 3646929 - DNA, 25 bp, Homo sapien
ggttctggactaagcacggtgatgt

SEQ ID NO: 3646930 - DNA, 25 bp, Homo sapien
gactaagcacggtgatgtgttttcc

SEQ ID NO: 3646931 - DNA, 25 bp, Homo sapien
aatatcattccaagacatagtaggg

SEQ ID NO: 3646932 - DNA, 25 bp, Homo sapien
caaatccagttgttaaggtgttcac

SEQ ID NO: 3646933 - DNA, 25 bp, Homo sapien
catagtagggtcacctttcagctca

SEQ ID NO: 3646934 - DNA, 25 bp, Homo sapien
tattaggttctccataagcccagtt

SEQ ID NO: 3646935 - DNA, 25 bp, Homo sapien
ctatgcaatgatggccactgacagt

SEQ ID NO: 3646936 - DNA, 25 bp, Homo sapien
catgcttatcctatgcaatgatggc

SEQ ID NO: 3646937 - DNA, 25 bp, Homo sapien
ggcacatttatctgtgcttatcaac

SEQ ID NO: 3646938 - DNA, 25 bp, Homo sapien
tatcaacttcatgcttatcctatgc

SEQ ID NO: 3646939 - DNA, 25 bp, Homo sapien
ggatcagagctgctcgtgggaacta

SEQ ID NO: 3646940 - DNA, 25 bp, Homo sapien
gaaggacgtgactcttgcccagaac

SEQ ID NO: 3646941 - DNA, 25 bp, Homo sapien
tctactgctatggaacctgggccag

SEQ ID NO: 3646942 - DNA, 25 bp, Homo sapien
ggaactatttggaaggacgtgactc

SEQ ID NO: 3646943 - DNA, 25 bp, Homo sapien
tcagaggccacagataatggctgtc

SEQ ID NO: 3646944 - DNA, 25 bp, Homo sapien
cagcatgcgtattgtttggccatca

SEQ ID NO: 3646945 - DNA, 25 bp, Homo sapien
gccactccagggtgattgttcactg

SEQ ID NO: 3646946 - DNA, 25 bp, Homo sapien
tctgttgacagcataggacactcac

SEQ ID NO: 3646947 - DNA, 25 bp, Homo sapien
tgtcttgaggagctggtgttggctc

SEQ ID NO: 3646948 - DNA, 25 bp, Homo sapien
ggagctggtgttggctcaggttttg

SEQ ID NO: 3646949 - DNA, 25 bp, Homo sapien
tggtgttggctcaggttttggtgtt

SEQ ID NO: 3646950 - DNA, 25 bp, Homo sapien
tgaggagctggtgttggctcaggtt

SEQ ID NO: 3646951 - DNA, 25 bp, Homo sapien
cacccatcttcagtaactggtggat

SEQ ID NO: 3646952 - DNA, 25 bp, Homo sapien
tcttgcaaaacgctcgcgcattgtc

SEQ ID NO: 3646953 - DNA, 25 bp, Homo sapien
tttgaatagaaacaagatcaccaaa

SEQ ID NO: 3646954 - DNA, 25 bp, Homo sapien
gctgaaataatactggtagtctttg

SEQ ID NO: 3646955 - DNA, 25 bp, Homo sapien
ttatccaagctgatcaataaaccaa

SEQ ID NO: 3646956 - DNA, 25 bp, Homo sapien
tccaagctgatcaataaaccaataa

SEQ ID NO: 3646957 - DNA, 25 bp, Homo sapien
caagctgatcaataaaccaataaaa

SEQ ID NO: 3646958 - DNA, 25 bp, Homo sapien
aatatgcagactgtgcatcatttct

SEQ ID NO: 3646959 - DNA, 25 bp, Homo sapien
gcaaaattgggttcacctgtggccc

SEQ ID NO: 3646960 - DNA, 25 bp, Homo sapien
agacacgtaatccactttgcttcca

SEQ ID NO: 3646961 - DNA, 25 bp, Homo sapien
tcatttgcaaaattgggttcacctg

SEQ ID NO: 3646962 - DNA, 25 bp, Homo sapien
gaatttgaatacatggtcacacagt

SEQ ID NO: 3646963 - DNA, 25 bp, Homo sapien
caaatgaaggcgtttggatagccac

SEQ ID NO: 3646964 - DNA, 25 bp, Homo sapien
gatactactgttatgtcgctggcaa

SEQ ID NO: 3646965 - DNA, 25 bp, Homo sapien
ttccttgcaccctgatgggaccgag

SEQ ID NO: 3646966 - DNA, 25 bp, Homo sapien
gatagccacagttaatgtcattcca

SEQ ID NO: 3646967 - DNA, 25 bp, Homo sapien
ctccaaagcctatacaagcttttcg

SEQ ID NO: 3646968 - DNA, 25 bp, Homo sapien
tcattttgtatggagaccagattcc

SEQ ID NO: 3646969 - DNA, 25 bp, Homo sapien
ttcattttgtatggagaccagattc

SEQ ID NO: 3646970 - DNA, 25 bp, Homo sapien
acaagcttttcgtgcctcttgccaa

SEQ ID NO: 3646971 - DNA, 25 bp, Homo sapien
ggaacgtgtgttctgaattgacatc

SEQ ID NO: 3646972 - DNA, 25 bp, Homo sapien
tcgtccatccgtccaaaggaacgtg

SEQ ID NO: 3646973 - DNA, 25 bp, Homo sapien
cagtttgtgtaatggactcctcgtc

SEQ ID NO: 3646974 - DNA, 25 bp, Homo sapien
tccttcatgtgataggtaagaaatg

SEQ ID NO: 3646975 - DNA, 25 bp, Homo sapien
acagtagggttcacgtttctatgag

SEQ ID NO: 3646976 - DNA, 25 bp, Homo sapien
gggctcccgtatgataacaggcaga

SEQ ID NO: 3646977 - DNA, 25 bp, Homo sapien
gctcccgtatgataacaggcagata

SEQ ID NO: 3646978 - DNA, 25 bp, Homo sapien
cttggggctcccgtatgataacagg

SEQ ID NO: 3646979 - DNA, 25 bp, Homo sapien
cccgtatgataacaggcagatacag

SEQ ID NO: 3646980 - DNA, 25 bp, Homo sapien
tccattctaatcctcatacctggtc

SEQ ID NO: 3646981 - DNA, 25 bp, Homo sapien
gaatgtgtttgccattccaaatcct

SEQ ID NO: 3646982 - DNA, 25 bp, Homo sapien
tgtgaatgtgtttgccattccaaat

SEQ ID NO: 3646983 - DNA, 25 bp, Homo sapien
tatttccattctaatcctcatacct

SEQ ID NO: 3646984 - DNA, 25 bp, Homo sapien
ctccaataataacaacacagtcagc

SEQ ID NO: 3646985 - DNA, 25 bp, Homo sapien
tcgtgtctggcatatgtagcctcgt

SEQ ID NO: 3646986 - DNA, 25 bp, Homo sapien
tactgtcgcaggtatcatccatcca

SEQ ID NO: 3646987 - DNA, 25 bp, Homo sapien
cggatcgtgtctggcatatgtagcc

SEQ ID NO: 3646988 - DNA, 25 bp, Homo sapien
tatgtagcctcgtttactgtcgcag

SEQ ID NO: 3646989 - DNA, 25 bp, Homo sapien
gccacgcaaatgcattactgtaggg

SEQ ID NO: 3646990 - DNA, 25 bp, Homo sapien
tactgtagggatccagaatgctggc

SEQ ID NO: 3646991 - DNA, 25 bp, Homo sapien
ttcagggcgatccacacacgttcat

SEQ ID NO: 3646992 - DNA, 25 bp, Homo sapien
tgtgaagcttgcagtatgtctccgc

SEQ ID NO: 3646993 - DNA, 25 bp, Homo sapien
tttaaactcataagagaatcgtgaa

SEQ ID NO: 3646994 - DNA, 25 bp, Homo sapien
taaactcataagagaatcgtgaaca

SEQ ID NO: 3646995 - DNA, 25 bp, Homo sapien
actcataagagaatcgtgaacatgt

SEQ ID NO: 3646996 - DNA, 25 bp, Homo sapien
aactcataagagaatcgtgaacatg

SEQ ID NO: 3646997 - DNA, 25 bp, Homo sapien
gccagtcattttagtctacttgcac

SEQ ID NO: 3646998 - DNA, 25 bp, Homo sapien
tatggaagagagaagccttagtctc

SEQ ID NO: 3646999 - DNA, 25 bp, Homo sapien
tattctagtgaggtggtctttcggc

SEQ ID NO: 3647000 - DNA, 25 bp, Homo sapien
cttgatttctagtgaggcagtcttt

SEQ ID NO: 3647001 - DNA, 25 bp, Homo sapien
gtgctgtcttccagtagccatcaag

SEQ ID NO: 3647002 - DNA, 25 bp, Homo sapien
tcatcagcagcccagttagtgtacc

SEQ ID NO: 3647003 - DNA, 25 bp, Homo sapien
tgatttcaatttgggctcatcagca

SEQ ID NO: 3647004 - DNA, 25 bp, Homo sapien
cagtccaagtgtattgattatcagt

SEQ ID NO: 3647005 - DNA, 25 bp, Homo sapien
cattcgaagacattccagagaagct

SEQ ID NO: 3647006 - DNA, 25 bp, Homo sapien
ggaaaggaatccatgctgtgtgatc

SEQ ID NO: 3647007 - DNA, 25 bp, Homo sapien
tgtgatctgactccgggcatctgcc

SEQ ID NO: 3647008 - DNA, 25 bp, Homo sapien
gactcaatatagtaacagtgaccat

SEQ ID NO: 3647009 - DNA, 25 bp, Homo sapien
cagtggaccccagaatagatgatta

SEQ ID NO: 3647010 - DNA, 25 bp, Homo sapien
tcagtggaccccagaatagatgatt

SEQ ID NO: 3647011 - DNA, 25 bp, Homo sapien
tcatgtatagtgtcagtggacccca

SEQ ID NO: 3647012 - DNA, 25 bp, Homo sapien
gtcagtggaccccagaatagatgat

SEQ ID NO: 3647013 - DNA, 25 bp, Homo sapien
gtgataagaggtgagtacaacactt

SEQ ID NO: 3647014 - DNA, 25 bp, Homo sapien
gataagaggtgagtacaacacttgg

SEQ ID NO: 3647015 - DNA, 25 bp, Homo sapien
cagtgataagaggtgagtacaacac

SEQ ID NO: 3647016 - DNA, 25 bp, Homo sapien
taagaggtgagtacaacacttggaa

SEQ ID NO: 3647017 - DNA, 25 bp, Homo sapien
tcatcggctaagatactgccactgt

SEQ ID NO: 3647018 - DNA, 25 bp, Homo sapien
catcggctaagatactgccactgta

SEQ ID NO: 3647019 - DNA, 25 bp, Homo sapien
cggctaagatactgccactgtacaa

SEQ ID NO: 3647020 - DNA, 25 bp, Homo sapien
tcggataaacctcatcggctaagat

SEQ ID NO: 3647021 - DNA, 25 bp, Homo sapien
acttttaagtggctcaacccgatat

SEQ ID NO: 3647022 - DNA, 25 bp, Homo sapien
tgaacaatcctatccaaaaattggt

SEQ ID NO: 3647023 - DNA, 25 bp, Homo sapien
tctgcagcactttcaatggaaacca

SEQ ID NO: 3647024 - DNA, 25 bp, Homo sapien
caacccgatatgacagaaaactgga

SEQ ID NO: 3647025 - DNA, 25 bp, Homo sapien
tagcatgatatgaaactcattttaa

SEQ ID NO: 3647026 - DNA, 25 bp, Homo sapien
cctcaaactatcttagctacaaaag

SEQ ID NO: 3647027 - DNA, 25 bp, Homo sapien
tgactaattattacagggaaggaaa

SEQ ID NO: 3647028 - DNA, 25 bp, Homo sapien
tataaccagacttaacaggcaagac

SEQ ID NO: 3647029 - DNA, 25 bp, Homo sapien
aatcattccgttcaccagagggatc

SEQ ID NO: 3647030 - DNA, 25 bp, Homo sapien
tattactccaaaacccagaagacgc

SEQ ID NO: 3647031 - DNA, 25 bp, Homo sapien
tcctgtgttccagttgacaaaggag

SEQ ID NO: 3647032 - DNA, 25 bp, Homo sapien
gagaccggactgttatttatccaca

SEQ ID NO: 3647033 - DNA, 25 bp, Homo sapien
agtaattcatgagtaggtttagcat

SEQ ID NO: 3647034 - DNA, 25 bp, Homo sapien
cttttgttgtaagtaattcatgagt

SEQ ID NO: 3647035 - DNA, 25 bp, Homo sapien
tcatgagtaggtttagcatcaataa

SEQ ID NO: 3647036 - DNA, 25 bp, Homo sapien
aattcatgagtaggtttagcatcaa

SEQ ID NO: 3647037 - DNA, 25 bp, Homo sapien
aatgatgactactccggccacgttg

SEQ ID NO: 3647038 - DNA, 25 bp, Homo sapien
tataaaagaaataggcggcaaggcc

SEQ ID NO: 3647039 - DNA, 25 bp, Homo sapien
ggccagcacccgttaaaatcaggag

SEQ ID NO: 3647040 - DNA, 25 bp, Homo sapien
cctcttgaggtaggtgcacacgtct

SEQ ID NO: 3647041 - DNA, 25 bp, Homo sapien
gaacacatttgcaacactcagcctg

SEQ ID NO: 3647042 - DNA, 25 bp, Homo sapien
actcagcctgtaaaactctcttggg

SEQ ID NO: 3647043 - DNA, 25 bp, Homo sapien
aaatccacatgaagctgacatcagc

SEQ ID NO: 3647044 - DNA, 25 bp, Homo sapien
gggaaacaagattctcagctgcctt

SEQ ID NO: 3647045 - DNA, 25 bp, Homo sapien
tgtactcaagaaagtcacgcaatgg

SEQ ID NO: 3647046 - DNA, 25 bp, Homo sapien
gaaggtgagcaaaccttggcccaag

SEQ ID NO: 3647047 - DNA, 25 bp, Homo sapien
tactgttgggctaggcgaggttccc

SEQ ID NO: 3647048 - DNA, 25 bp, Homo sapien
tggtcaggagtatcagaaagtttcc

SEQ ID NO: 3647049 - DNA, 25 bp, Homo sapien
tatgagtctatacgggcgatggcat

SEQ ID NO: 3647050 - DNA, 25 bp, Homo sapien
catccctgtggttatagttttggtc

SEQ ID NO: 3647051 - DNA, 25 bp, Homo sapien
gacctctagggtgatagtctttgct

SEQ ID NO: 3647052 - DNA, 25 bp, Homo sapien
gttttggtcccaaagctcgagcaga

SEQ ID NO: 3647053 - DNA, 25 bp, Homo sapien
cttaagcagtgggtcttgatcttgt

SEQ ID NO: 3647054 - DNA, 25 bp, Homo sapien
agtttcagcacagtgggttaggctc

SEQ ID NO: 3647055 - DNA, 25 bp, Homo sapien
tcactggaaccaatgcctgtgtggg

SEQ ID NO: 3647056 - DNA, 25 bp, Homo sapien
actggaaccaatgcctgtgtgggtg

SEQ ID NO: 3647057 - DNA, 25 bp, Homo sapien
ggttaggctccggttctcactggaa

SEQ ID NO: 3647058 - DNA, 25 bp, Homo sapien
tttaaatcctggagagtatttcaca

SEQ ID NO: 3647059 - DNA, 25 bp, Homo sapien
aattctttgactgtgcactgggagc

SEQ ID NO: 3647060 - DNA, 25 bp, Homo sapien
gattctttatctggagctccacagc

SEQ ID NO: 3647061 - DNA, 25 bp, Homo sapien
cttcagaagaaagataaacgattct

SEQ ID NO: 3647062 - DNA, 25 bp, Homo sapien
caccttgagtctgtcttggatggag

SEQ ID NO: 3647063 - DNA, 25 bp, Homo sapien
gagtctgtcttggatggaggtgagt

SEQ ID NO: 3647064 - DNA, 25 bp, Homo sapien
cttgagtctgtcttggatggaggtg

SEQ ID NO: 3647065 - DNA, 25 bp, Homo sapien
ccttgagtctgtcttggatggaggt

SEQ ID NO: 3647066 - DNA, 25 bp, Homo sapien
gagtagaagaaacaatggcacccag

SEQ ID NO: 3647067 - DNA, 25 bp, Homo sapien
tggcacccaggatactgagagcttt

SEQ ID NO: 3647068 - DNA, 25 bp, Homo sapien
gaaacaatggcacccaggatactga

SEQ ID NO: 3647069 - DNA, 25 bp, Homo sapien
actgagagctttgtccggaagcaca

SEQ ID NO: 3647070 - DNA, 25 bp, Homo sapien
ccacggcttctgctatcctgggctg

SEQ ID NO: 3647071 - DNA, 25 bp, Homo sapien
ttgatgaggcttcttgagtggttgt

SEQ ID NO: 3647072 - DNA, 25 bp, Homo sapien
aggtctgccggttggcctgaactcc

SEQ ID NO: 3647073 - DNA, 25 bp, Homo sapien
gagagaacctgtagcaggtctgccg

SEQ ID NO: 3647074 - DNA, 25 bp, Homo sapien
tgactcccagacagatttgtcccat

SEQ ID NO: 3647075 - DNA, 25 bp, Homo sapien
tgagaaacgcctgtcgtgactccca

SEQ ID NO: 3647076 - DNA, 25 bp, Homo sapien
cacagagtgaaagcattgagaaacg

SEQ ID NO: 3647077 - DNA, 25 bp, Homo sapien
gccccacgacatagccacagagtga

SEQ ID NO: 3647078 - DNA, 25 bp, Homo sapien
gaaagaggaatcttcatcctgcctg

SEQ ID NO: 3647079 - DNA, 25 bp, Homo sapien
gaacagatctcttcctgatgaataa

SEQ ID NO: 3647080 - DNA, 25 bp, Homo sapien
agtaatagtgcatctggttcaaagc

SEQ ID NO: 3647081 - DNA, 25 bp, Homo sapien
tgtcaaagtactgcctggtgaaagc

SEQ ID NO: 3647082 - DNA, 25 bp, Homo sapien
gacaaagtaatgatcatggctgcca

SEQ ID NO: 3647083 - DNA, 25 bp, Homo sapien
tgaggaagcgtactttcattagcac

SEQ ID NO: 3647084 - DNA, 25 bp, Homo sapien
taggcggagggtattcgtacgattc

SEQ ID NO: 3647085 - DNA, 25 bp, Homo sapien
tgtcccagacaaacaccctggaggg

SEQ ID NO: 3647086 - DNA, 25 bp, Homo sapien
tggaagttaaattcgtgaaaacatc

SEQ ID NO: 3647087 - DNA, 25 bp, Homo sapien
cagtcatcaagagctttggcctttg

SEQ ID NO: 3647088 - DNA, 25 bp, Homo sapien
gcatagtttatttagcaggtgtgac

SEQ ID NO: 3647089 - DNA, 25 bp, Homo sapien
tgaacgaattcagtcatcaagagct

SEQ ID NO: 3647090 - DNA, 25 bp, Homo sapien
tttccatggatgaagagaaattaga

SEQ ID NO: 3647091 - DNA, 25 bp, Homo sapien
cagagagtgttgaggagttggtcta

SEQ ID NO: 3647092 - DNA, 25 bp, Homo sapien
gaaattagaatagtcctgatcatgg

SEQ ID NO: 3647093 - DNA, 25 bp, Homo sapien
gatacaagtacttctggtccagaga

SEQ ID NO: 3647094 - DNA, 25 bp, Homo sapien
tgatcccaggaaactggaccatcct

SEQ ID NO: 3647095 - DNA, 25 bp, Homo sapien
gatcccaggaaactggaccatcctc

SEQ ID NO: 3647096 - DNA, 25 bp, Homo sapien
ctgatcccaggaaactggaccatcc

SEQ ID NO: 3647097 - DNA, 25 bp, Homo sapien
atcccaggaaactggaccatcctca

SEQ ID NO: 3647098 - DNA, 25 bp, Homo sapien
ctgagccttatttagtatgagtttt

SEQ ID NO: 3647099 - DNA, 25 bp, Homo sapien
ttcattctgagccttatttagtatg

SEQ ID NO: 3647100 - DNA, 25 bp, Homo sapien
ttctgagccttatttagtatgagtt

SEQ ID NO: 3647101 - DNA, 25 bp, Homo sapien
cattctgagccttatttagtatgag

SEQ ID NO: 3647102 - DNA, 25 bp, Homo sapien
cttagaaatgagtgagaggcccttc

SEQ ID NO: 3647103 - DNA, 25 bp, Homo sapien
ttagaaatgagtgagaggcccttct

SEQ ID NO: 3647104 - DNA, 25 bp, Homo sapien
ggatgatccctggactcatttgctt

SEQ ID NO: 3647105 - DNA, 25 bp, Homo sapien
tggatgatccctggactcatttgct

SEQ ID NO: 3647106 - DNA, 25 bp, Homo sapien
tggcagctttgcttgttggtccttg

SEQ ID NO: 3647107 - DNA, 25 bp, Homo sapien
gtggcagctttgcttgttggtcctt

SEQ ID NO: 3647108 - DNA, 25 bp, Homo sapien
ggcagctttgcttgttggtccttgg

SEQ ID NO: 3647109 - DNA, 25 bp, Homo sapien
gacagccaccgtgctgtagccgtat

SEQ ID NO: 3647110 - DNA, 25 bp, Homo sapien
tgacagccaccgtgctgtagccgta

SEQ ID NO: 3647111 - DNA, 25 bp, Homo sapien
ggtgacagccaccgtgctgtagccg

SEQ ID NO: 3647112 - DNA, 25 bp, Homo sapien
acagccaccgtgctgtagccgtatt

SEQ ID NO: 3647113 - DNA, 25 bp, Homo sapien
acagctgtaagataagcctgtagtt

SEQ ID NO: 3647114 - DNA, 25 bp, Homo sapien
agacagtgtcccgacggccaagccc

SEQ ID NO: 3647115 - DNA, 25 bp, Homo sapien
aagataagcctgtagttctcctcac

SEQ ID NO: 3647116 - DNA, 25 bp, Homo sapien
gttctcctcacagctatggaaaagg

SEQ ID NO: 3647117 - DNA, 25 bp, Homo sapien
tgtcatttggtgatacaagaagaat

SEQ ID NO: 3647118 - DNA, 25 bp, Homo sapien
gcttcctgcttatgtaaaccaagaa

SEQ ID NO: 3647119 - DNA, 25 bp, Homo sapien
catggatgcctccaattaatcccat

SEQ ID NO: 3647120 - DNA, 25 bp, Homo sapien
tttgctttcatggaaatgcccaaat

SEQ ID NO: 3647121 - DNA, 25 bp, Homo sapien
gaatgacccacgtgcccattaacca

SEQ ID NO: 3647122 - DNA, 25 bp, Homo sapien
cctggtcacttaattcagagttgag

SEQ ID NO: 3647123 - DNA, 25 bp, Homo sapien
actggatagttgaagcagatttgcc

SEQ ID NO: 3647124 - DNA, 25 bp, Homo sapien
gttgaagcagatttgcctctgcctg

SEQ ID NO: 3647125 - DNA, 25 bp, Homo sapien
gagatttggttatatgcatcttggg

SEQ ID NO: 3647126 - DNA, 25 bp, Homo sapien
cttcagagatttggttatatgcatc

SEQ ID NO: 3647127 - DNA, 25 bp, Homo sapien
agatttggttatatgcatcttgggg

SEQ ID NO: 3647128 - DNA, 25 bp, Homo sapien
gatttggttatatgcatcttggggc

SEQ ID NO: 3647129 - DNA, 25 bp, Homo sapien
tgcctataggcatttcagctgcctg

SEQ ID NO: 3647130 - DNA, 25 bp, Homo sapien
gaggctgtcatactgcctataggca

SEQ ID NO: 3647131 - DNA, 25 bp, Homo sapien
tcatactgcctataggcatttcagc

SEQ ID NO: 3647132 - DNA, 25 bp, Homo sapien
gttggaggctgtcatactgcctata

SEQ ID NO: 3647133 - DNA, 25 bp, Homo sapien
attcatgtacttggcagtcatattg

SEQ ID NO: 3647134 - DNA, 25 bp, Homo sapien
catgtacttggcagtcatattgagt

SEQ ID NO: 3647135 - DNA, 25 bp, Homo sapien
tacttggcagtcatattgagttcca

SEQ ID NO: 3647136 - DNA, 25 bp, Homo sapien
tgtacttggcagtcatattgagttc

SEQ ID NO: 3647137 - DNA, 25 bp, Homo sapien
cggatgatgatgagaaggctgctcc

SEQ ID NO: 3647138 - DNA, 25 bp, Homo sapien
tggctaggccatctgcaaaattatg

SEQ ID NO: 3647139 - DNA, 25 bp, Homo sapien
ggctgtccccaaccagaatcatgat

SEQ ID NO: 3647140 - DNA, 25 bp, Homo sapien
caagatagcaatcgtagtggtcact

SEQ ID NO: 3647141 - DNA, 25 bp, Homo sapien
ccagggaggaccttggataaactgc

SEQ ID NO: 3647142 - DNA, 25 bp, Homo sapien
tccaagcacaagagggcaagcgttt

SEQ ID NO: 3647143 - DNA, 25 bp, Homo sapien
ctttgagcaacggactccaagcaca

SEQ ID NO: 3647144 - DNA, 25 bp, Homo sapien
gagtcagtgtcaggactttgagcaa

SEQ ID NO: 3647145 - DNA, 25 bp, Homo sapien
aaattcaatagacagcttggggacc

SEQ ID NO: 3647146 - DNA, 25 bp, Homo sapien
tgttacagtagcaaaactcaggacc

SEQ ID NO: 3647147 - DNA, 25 bp, Homo sapien
tggcctgctgcagacggtcacactg

SEQ ID NO: 3647148 - DNA, 25 bp, Homo sapien
gcttgaaacatctctgctggcctgc

SEQ ID NO: 3647149 - DNA, 25 bp, Homo sapien
taaatataagaacatcccagcagtg

SEQ ID NO: 3647150 - DNA, 25 bp, Homo sapien
tataatcccatgaaggcagttaggg

SEQ ID NO: 3647151 - DNA, 25 bp, Homo sapien
tcttgaacacatggatcagctgaca

SEQ ID NO: 3647152 - DNA, 25 bp, Homo sapien
tcagctgacacggaaaggccaatgt

SEQ ID NO: 3647153 - DNA, 25 bp, Homo sapien
tattttggctggctaccaccacgaa

SEQ ID NO: 3647154 - DNA, 25 bp, Homo sapien
ttggctggctaccaccacgaaggga

SEQ ID NO: 3647155 - DNA, 25 bp, Homo sapien
gtggtattttggctggctaccacca

SEQ ID NO: 3647156 - DNA, 25 bp, Homo sapien
tctttgtggtattttggctggctac

SEQ ID NO: 3647157 - DNA, 25 bp, Homo sapien
cggaacattcagctctcagacaaaa

SEQ ID NO: 3647158 - DNA, 25 bp, Homo sapien
ttaggcggaacattcagctctcaga

SEQ ID NO: 3647159 - DNA, 25 bp, Homo sapien
tcagctctcagacaaaatgagatgc

SEQ ID NO: 3647160 - DNA, 25 bp, Homo sapien
gacaaaatgagatgctcttacacag

SEQ ID NO: 3647161 - DNA, 25 bp, Homo sapien
tcaatagtctgcagggttttctact

SEQ ID NO: 3647162 - DNA, 25 bp, Homo sapien
ctacttctaatttctttgtgatggt

SEQ ID NO: 3647163 - DNA, 25 bp, Homo sapien
gtctgcagggttttctacttctaat

SEQ ID NO: 3647164 - DNA, 25 bp, Homo sapien
tagtctgcagggttttctacttcta

SEQ ID NO: 3647165 - DNA, 25 bp, Homo sapien
gaaagccaacctaggatcaatccaa

SEQ ID NO: 3647166 - DNA, 25 bp, Homo sapien
ccagggtcgttgtgtttgaacatga

SEQ ID NO: 3647167 - DNA, 25 bp, Homo sapien
ctaggatcaatccaaagttttgcag

SEQ ID NO: 3647168 - DNA, 25 bp, Homo sapien
gccaacctaggatcaatccaaagtt

SEQ ID NO: 3647169 - DNA, 25 bp, Homo sapien
acaggcatctgtccactttaaattc

SEQ ID NO: 3647170 - DNA, 25 bp, Homo sapien
tacatttgcttgtcacttaacttgc

SEQ ID NO: 3647171 - DNA, 25 bp, Homo sapien
gcagttgattttactccaacaggca

SEQ ID NO: 3647172 - DNA, 25 bp, Homo sapien
aatttcaattaaggacagtctgata

SEQ ID NO: 3647173 - DNA, 25 bp, Homo sapien
caggagaaattagttgaactgcttt

SEQ ID NO: 3647174 - DNA, 25 bp, Homo sapien
tcagaggtggtttgatttcctcagc

SEQ ID NO: 3647175 - DNA, 25 bp, Homo sapien
tgatggtgttggactcttttcagag

SEQ ID NO: 3647176 - DNA, 25 bp, Homo sapien
gcattggtaacaggagaaattagtt

SEQ ID NO: 3647177 - DNA, 25 bp, Homo sapien
cagctgcagtgctatggtcagggcc

SEQ ID NO: 3647178 - DNA, 25 bp, Homo sapien
gctgcagtgctatggtcagggccat

SEQ ID NO: 3647179 - DNA, 25 bp, Homo sapien
agctgcagtgctatggtcagggcca

SEQ ID NO: 3647180 - DNA, 25 bp, Homo sapien
gaagtgctgattttcgcttctccag

SEQ ID NO: 3647181 - DNA, 25 bp, Homo sapien
gcaggctgaagtgctgattttcgct

SEQ ID NO: 3647182 - DNA, 25 bp, Homo sapien
ggcttggcaaccttcctgcgctctg

SEQ ID NO: 3647183 - DNA, 25 bp, Homo sapien
tatctgagaggcattatgcgatcaa

SEQ ID NO: 3647184 - DNA, 25 bp, Homo sapien
gatcggcacatttgtattattgtca

SEQ ID NO: 3647185 - DNA, 25 bp, Homo sapien
gattttttctactggcacaaagtct

SEQ ID NO: 3647186 - DNA, 25 bp, Homo sapien
ctgcacaaccatctcgattgtgtgt

SEQ ID NO: 3647187 - DNA, 25 bp, Homo sapien
tagatagtggttggagatcggcaca

SEQ ID NO: 3647188 - DNA, 25 bp, Homo sapien
tccagttttaggttgagggagccat

SEQ ID NO: 3647189 - DNA, 25 bp, Homo sapien
gcacggtcagactactttttgctga

SEQ ID NO: 3647190 - DNA, 25 bp, Homo sapien
tcaaggtccgtgagctccagtttta

SEQ ID NO: 3647191 - DNA, 25 bp, Homo sapien
gccatttctcagtttggagcacggt

SEQ ID NO: 3647192 - DNA, 25 bp, Homo sapien
cagatacgttcctcattggtcccat

SEQ ID NO: 3647193 - DNA, 25 bp, Homo sapien
ttatgctggctatttctgatggagg

SEQ ID NO: 3647194 - DNA, 25 bp, Homo sapien
ttgagccctcactaggtgtccaaaa

SEQ ID NO: 3647195 - DNA, 25 bp, Homo sapien
aggctcccatttcccgtgttatgct

SEQ ID NO: 3647196 - DNA, 25 bp, Homo sapien
tgatggaaagcaatgctggtgatta

SEQ ID NO: 3647197 - DNA, 25 bp, Homo sapien
gtgatggaaagcaatgctggtgatt

SEQ ID NO: 3647198 - DNA, 25 bp, Homo sapien
agtgatggaaagcaatgctggtgat

SEQ ID NO: 3647199 - DNA, 25 bp, Homo sapien
catcacaccctcttgacatttctgc

SEQ ID NO: 3647200 - DNA, 25 bp, Homo sapien
atcacaccctcttgacatttctgct

SEQ ID NO: 3647201 - DNA, 25 bp, Homo sapien
gggcatcgggcgaagcgagccgctc

SEQ ID NO: 3647202 - DNA, 25 bp, Homo sapien
ggggccggggcatcgggcgaagcga

SEQ ID NO: 3647203 - DNA, 25 bp, Homo sapien
atcgggcgaagcgagccgctcggga

SEQ ID NO: 3647204 - DNA, 25 bp, Homo sapien
cgggcgaagcgagccgctcgggagg

SEQ ID NO: 3647205 - DNA, 25 bp, Homo sapien
agcgaagcagccagcccccggcggc

SEQ ID NO: 3647206 - DNA, 25 bp, Homo sapien
ctcggagcgaagcagccagcccccg

SEQ ID NO: 3647207 - DNA, 25 bp, Homo sapien
cggagcgaagcagccagcccccggc

SEQ ID NO: 3647208 - DNA, 25 bp, Homo sapien
gagcgaagcagccagcccccggcgg

SEQ ID NO: 3647209 - DNA, 25 bp, Homo sapien
gcagttccatctggatctcctgcgc

SEQ ID NO: 3647210 - DNA, 25 bp, Homo sapien
cgggagccacgttctctagcagttc

SEQ ID NO: 3647211 - DNA, 25 bp, Homo sapien
ctctagcagttccatctggatctcc

SEQ ID NO: 3647212 - DNA, 25 bp, Homo sapien
ccgcgggagccacgttctctagcag

SEQ ID NO: 3647213 - DNA, 25 bp, Homo sapien
ggaggactggcaggtctcccccgcc

SEQ ID NO: 3647214 - DNA, 25 bp, Homo sapien
ctggagcaacccgggagaagtctgg

SEQ ID NO: 3647215 - DNA, 25 bp, Homo sapien
gcaacccgggagaagtctgggagga

SEQ ID NO: 3647216 - DNA, 25 bp, Homo sapien
ccgggagaagtctgggaggactggc

SEQ ID NO: 3647217 - DNA, 25 bp, Homo sapien
ctccatgtgcctctcccgggaaggg

SEQ ID NO: 3647218 - DNA, 25 bp, Homo sapien
ccatgtgcctctcccgggaaggggc

SEQ ID NO: 3647219 - DNA, 25 bp, Homo sapien
gtctctccatgtgcctctcccggga

SEQ ID NO: 3647220 - DNA, 25 bp, Homo sapien
ctctccatgtgcctctcccgggaag

SEQ ID NO: 3647221 - DNA, 25 bp, Homo sapien
gcaggtccagtccactcccctgatt

SEQ ID NO: 3647222 - DNA, 25 bp, Homo sapien
ggtccagtccactcccctgattcat

SEQ ID NO: 3647223 - DNA, 25 bp, Homo sapien
cagcaggtccagtccactcccctga

SEQ ID NO: 3647224 - DNA, 25 bp, Homo sapien
gatcttcagcaggtccagtccactc

SEQ ID NO: 3647225 - DNA, 25 bp, Homo sapien
caggagagtcggcatcgtagaaagc

SEQ ID NO: 3647226 - DNA, 25 bp, Homo sapien
agtcggcatcgtagaaagcgctgcg

SEQ ID NO: 3647227 - DNA, 25 bp, Homo sapien
gtagaaagcgctgcgggaagcgggc

SEQ ID NO: 3647228 - DNA, 25 bp, Homo sapien
tcggagcgtggccaggagagtcggc

SEQ ID NO: 3647229 - DNA, 25 bp, Homo sapien
attgcccagcgcctacaactgacat

SEQ ID NO: 3647230 - DNA, 25 bp, Homo sapien
gaaaccgcaaacactcaacggagag

SEQ ID NO: 3647231 - DNA, 25 bp, Homo sapien
tgctgaagccttacgtaaaaacgta

SEQ ID NO: 3647232 - DNA, 25 bp, Homo sapien
ttcacaacaacctgcagcgaagctg

SEQ ID NO: 3647233 - DNA, 25 bp, Homo sapien
ctgccgggagaaaagttgagcgact

SEQ ID NO: 3647234 - DNA, 25 bp, Homo sapien
tgagcgactcctcatcgctgagacc

SEQ ID NO: 3647235 - DNA, 25 bp, Homo sapien
gactcctcatcgctgagacctggag

SEQ ID NO: 3647236 - DNA, 25 bp, Homo sapien
gaaaagttgagcgactcctcatcgc

SEQ ID NO: 3647237 - DNA, 25 bp, Homo sapien
cagctaggagtctgaagtcatttcc

SEQ ID NO: 3647238 - DNA, 25 bp, Homo sapien
cagcccgcagctaggagtctgaagt

SEQ ID NO: 3647239 - DNA, 25 bp, Homo sapien
ccgcagctaggagtctgaagtcatt

SEQ ID NO: 3647240 - DNA, 25 bp, Homo sapien
acagccagcccgcagctaggagtct

SEQ ID NO: 3647241 - DNA, 25 bp, Homo sapien
aaaaatatctggtgtaatctgaccc

SEQ ID NO: 3647242 - DNA, 25 bp, Homo sapien
gaatattcccaaatgagctgctatg

SEQ ID NO: 3647243 - DNA, 25 bp, Homo sapien
gggactctgtttcatgtacgactgc

SEQ ID NO: 3647244 - DNA, 25 bp, Homo sapien
gttttacgcctgtgtccaatcttga

SEQ ID NO: 3647245 - DNA, 25 bp, Homo sapien
ggataaagctccttgctacagccat

SEQ ID NO: 3647246 - DNA, 25 bp, Homo sapien
aagctccttgctacagccattcagg

SEQ ID NO: 3647247 - DNA, 25 bp, Homo sapien
taaagctccttgctacagccattca

SEQ ID NO: 3647248 - DNA, 25 bp, Homo sapien
aaaagcatctggcagactcggctgg

SEQ ID NO: 3647249 - DNA, 25 bp, Homo sapien
gatgacgtgcttccatcagatcctt

SEQ ID NO: 3647250 - DNA, 25 bp, Homo sapien
tatttgaggtagtatcagatgacgt

SEQ ID NO: 3647251 - DNA, 25 bp, Homo sapien
tatcagatgacgtgcttccatcaga

SEQ ID NO: 3647252 - DNA, 25 bp, Homo sapien
ggtagtatcagatgacgtgcttcca

SEQ ID NO: 3647253 - DNA, 25 bp, Homo sapien
tctaaggacagtgcaaagaagcagc

SEQ ID NO: 3647254 - DNA, 25 bp, Homo sapien
ggcatccaaatgacacgaggcagct

SEQ ID NO: 3647255 - DNA, 25 bp, Homo sapien
tccctgggccacaagaacagattct

SEQ ID NO: 3647256 - DNA, 25 bp, Homo sapien
catgatgatggactcaagcggcact

SEQ ID NO: 3647257 - DNA, 25 bp, Homo sapien
caattcccaattggcacggaccagg

SEQ ID NO: 3647258 - DNA, 25 bp, Homo sapien
tcctgctgacaccattagaacatag

SEQ ID NO: 3647259 - DNA, 25 bp, Homo sapien
tagctctagggttgagcctcacgtg

SEQ ID NO: 3647260 - DNA, 25 bp, Homo sapien
ggattctgcccacgaaaacatgagg

SEQ ID NO: 3647261 - DNA, 25 bp, Homo sapien
gcgttcgccactaaccagcttcttg

SEQ ID NO: 3647262 - DNA, 25 bp, Homo sapien
gaattcagactcatgtagcctggct

SEQ ID NO: 3647263 - DNA, 25 bp, Homo sapien
tttgtctgcaacctaaaagaatgac

SEQ ID NO: 3647264 - DNA, 25 bp, Homo sapien
tgatcatgtattgcacctaggtaac

SEQ ID NO: 3647265 - DNA, 25 bp, Homo sapien
gagtgaaacatgctagaagagaccc

SEQ ID NO: 3647266 - DNA, 25 bp, Homo sapien
tatcaaagccgggaagaagggagcc

SEQ ID NO: 3647267 - DNA, 25 bp, Homo sapien
tatagagaatcaaatacccatgcgg

SEQ ID NO: 3647268 - DNA, 25 bp, Homo sapien
tgtgcgtttaatgatgcagccagcg

SEQ ID NO: 3647269 - DNA, 25 bp, Homo sapien
ctctgtggataaagcataggttgca

SEQ ID NO: 3647270 - DNA, 25 bp, Homo sapien
cctcacatggaagctggtacgtgga

SEQ ID NO: 3647271 - DNA, 25 bp, Homo sapien
tgtcccctgaaacaccgaactgcag

SEQ ID NO: 3647272 - DNA, 25 bp, Homo sapien
taggttgcagatcctactgaggcac

SEQ ID NO: 3647273 - DNA, 25 bp, Homo sapien
aatgtgcccagtgttaagtgaggtt

SEQ ID NO: 3647274 - DNA, 25 bp, Homo sapien
taagtgaggttctcctagctgccat

SEQ ID NO: 3647275 - DNA, 25 bp, Homo sapien
cccagtgttaagtgaggttctccta

SEQ ID NO: 3647276 - DNA, 25 bp, Homo sapien
tgttaagtgaggttctcctagctgc

SEQ ID NO: 3647277 - DNA, 25 bp, Homo sapien
tcatttaagacttctccacaattac

SEQ ID NO: 3647278 - DNA, 25 bp, Homo sapien
gttgtcagcccttcatttaagactt

SEQ ID NO: 3647279 - DNA, 25 bp, Homo sapien
ctcaagaaacccacactgccgccat

SEQ ID NO: 3647280 - DNA, 25 bp, Homo sapien
cttgttcgccaccaccactgttgtc

SEQ ID NO: 3647281 - DNA, 25 bp, Homo sapien
tctttgtccatagcacatccccagt

SEQ ID NO: 3647282 - DNA, 25 bp, Homo sapien
taagagaatcagctccttgcttctt

SEQ ID NO: 3647283 - DNA, 25 bp, Homo sapien
gcttcgggggtaagagaatcagctc

SEQ ID NO: 3647284 - DNA, 25 bp, Homo sapien
tcaaggagctccacccatgaagggc

SEQ ID NO: 3647285 - DNA, 25 bp, Homo sapien
gaagaatgaagtatggctgcaatgt

SEQ ID NO: 3647286 - DNA, 25 bp, Homo sapien
ggataggaagaaattgcttaatggg

SEQ ID NO: 3647287 - DNA, 25 bp, Homo sapien
agaatgaagtatggctgcaatgtgg

SEQ ID NO: 3647288 - DNA, 25 bp, Homo sapien
acacaaaaggttacatgttgtctaa

SEQ ID NO: 3647289 - DNA, 25 bp, Homo sapien
aatgtctatcttcccctgcagaatg

SEQ ID NO: 3647290 - DNA, 25 bp, Homo sapien
tgactgatgcttcatgagcacccag

SEQ ID NO: 3647291 - DNA, 25 bp, Homo sapien
gaggagtacccagcatataatcagg

SEQ ID NO: 3647292 - DNA, 25 bp, Homo sapien
tgtagtgagcccctcagaggtaaaa

SEQ ID NO: 3647293 - DNA, 25 bp, Homo sapien
gggtcatcctgctaattcttggcca

SEQ ID NO: 3647294 - DNA, 25 bp, Homo sapien
tgtcctgactccagagatggctctt

SEQ ID NO: 3647295 - DNA, 25 bp, Homo sapien
tgtagccagtggaaagacatcagca

SEQ ID NO: 3647296 - DNA, 25 bp, Homo sapien
taaactgggaatcttctgtagccag

SEQ ID NO: 3647297 - DNA, 25 bp, Homo sapien
ccataagcacaattgttcacagagc

SEQ ID NO: 3647298 - DNA, 25 bp, Homo sapien
ttcacagagcatctagacccgatct

SEQ ID NO: 3647299 - DNA, 25 bp, Homo sapien
tcaccaaggattctaaaagtctaca

SEQ ID NO: 3647300 - DNA, 25 bp, Homo sapien
cacctggcctcaagacttactttaa

SEQ ID NO: 3647301 - DNA, 25 bp, Homo sapien
tatttcactagatggaagagttccc

SEQ ID NO: 3647302 - DNA, 25 bp, Homo sapien
cgattgctcctgaaaatcgtgtaaa

SEQ ID NO: 3647303 - DNA, 25 bp, Homo sapien
taaaaagaagggaacataggagcat

SEQ ID NO: 3647304 - DNA, 25 bp, Homo sapien
tcccattttctaagagcctagcagt

SEQ ID NO: 3647305 - DNA, 25 bp, Homo sapien
cacattgctgcagccttaccaattt

SEQ ID NO: 3647306 - DNA, 25 bp, Homo sapien
ttttcacattgctgcagccttacca

SEQ ID NO: 3647307 - DNA, 25 bp, Homo sapien
taccaatttgtagaaactgtttatg

SEQ ID NO: 3647308 - DNA, 25 bp, Homo sapien
cagccttaccaatttgtagaaactg

SEQ ID NO: 3647309 - DNA, 25 bp, Homo sapien
aaagatgaggacacttgggctggcc

SEQ ID NO: 3647310 - DNA, 25 bp, Homo sapien
gaagggtatcttcagacaacaggga

SEQ ID NO: 3647311 - DNA, 25 bp, Homo sapien
tatgtgccaatacccaagtcatgtg

SEQ ID NO: 3647312 - DNA, 25 bp, Homo sapien
tagagacagacatcggctgctgggc

SEQ ID NO: 3647313 - DNA, 25 bp, Homo sapien
gagtctagactcgaattcactgtgg

SEQ ID NO: 3647314 - DNA, 25 bp, Homo sapien
cacagttgtttggtgctcgctggca

SEQ ID NO: 3647315 - DNA, 25 bp, Homo sapien
gaaacatcctccaaaccgtcagatg

SEQ ID NO: 3647316 - DNA, 25 bp, Homo sapien
ttcactgtggattcctaggactaca

SEQ ID NO: 3647317 - DNA, 25 bp, Homo sapien
tacagtagccattctcaactcggga

SEQ ID NO: 3647318 - DNA, 25 bp, Homo sapien
ctaaaaaagccaccgttcctgcagg

SEQ ID NO: 3647319 - DNA, 25 bp, Homo sapien
cgcagtcagcgtgtggcttcaccaa

SEQ ID NO: 3647320 - DNA, 25 bp, Homo sapien
tactcccaggtaagaggcatgagca

SEQ ID NO: 3647321 - DNA, 25 bp, Homo sapien
ataggacacccgtactcgccggcga

SEQ ID NO: 3647322 - DNA, 25 bp, Homo sapien
aggacacccgtactcgccggcgatg

SEQ ID NO: 3647323 - DNA, 25 bp, Homo sapien
gccggcgatgcaccagcccgcagca

SEQ ID NO: 3647324 - DNA, 25 bp, Homo sapien
gtactcgccggcgatgcaccagccc

SEQ ID NO: 3647325 - DNA, 25 bp, Homo sapien
ccttgaaaactcatggtacgaaatg

SEQ ID NO: 3647326 - DNA, 25 bp, Homo sapien
tcagattccttgaaaactcatggta

SEQ ID NO: 3647327 - DNA, 25 bp, Homo sapien
ctcatggtacgaaatgatcgactgt

SEQ ID NO: 3647328 - DNA, 25 bp, Homo sapien
gaaaactcatggtacgaaatgatcg

SEQ ID NO: 3647329 - DNA, 25 bp, Homo sapien
cacacttattttaactgtcgggaca

SEQ ID NO: 3647330 - DNA, 25 bp, Homo sapien
gatttttatacccaaaagcactaca

SEQ ID NO: 3647331 - DNA, 25 bp, Homo sapien
tgtcgggacaattctgatcacttgt

SEQ ID NO: 3647332 - DNA, 25 bp, Homo sapien
acttctctagcccagtgataattga

SEQ ID NO: 3647333 - DNA, 25 bp, Homo sapien
atgtcattatgtagtgaggtttata

SEQ ID NO: 3647334 - DNA, 25 bp, Homo sapien
catgtagtttgtatatacagaactg

SEQ ID NO: 3647335 - DNA, 25 bp, Homo sapien
agggtgccgtccatgtagtttgtat

SEQ ID NO: 3647336 - DNA, 25 bp, Homo sapien
agtgactgtgagttgggcagcttca

SEQ ID NO: 3647337 - DNA, 25 bp, Homo sapien
tgactgtgagttgggcagcttcatg

SEQ ID NO: 3647338 - DNA, 25 bp, Homo sapien
tggaactataggcacatgccaccag

SEQ ID NO: 3647339 - DNA, 25 bp, Homo sapien
gaactataggcacatgccaccaggc

SEQ ID NO: 3647340 - DNA, 25 bp, Homo sapien
gcctccctaagtagctggaactata

SEQ ID NO: 3647341 - DNA, 25 bp, Homo sapien
ataggcacatgccaccaggcctagc

SEQ ID NO: 3647342 - DNA, 25 bp, Homo sapien
tctgggcattaagcacgtgaacaca

SEQ ID NO: 3647343 - DNA, 25 bp, Homo sapien
tggaaacgtccaaaatcacagaggt

SEQ ID NO: 3647344 - DNA, 25 bp, Homo sapien
tccattttaggaggcactagtgccg

SEQ ID NO: 3647345 - DNA, 25 bp, Homo sapien
gatgaaaccgctccatgaaaggctg

SEQ ID NO: 3647346 - DNA, 25 bp, Homo sapien
tagcaattggtatgaaggctgccat

SEQ ID NO: 3647347 - DNA, 25 bp, Homo sapien
tagatacaagacgataaatccccga

SEQ ID NO: 3647348 - DNA, 25 bp, Homo sapien
caaattacttttatgcgctggcact

SEQ ID NO: 3647349 - DNA, 25 bp, Homo sapien
tataatcggtagtggcaggctgtat

SEQ ID NO: 3647350 - DNA, 25 bp, Homo sapien
tcgtcagactcagaaatacctgggc

SEQ ID NO: 3647351 - DNA, 25 bp, Homo sapien
cttctgtggagggatagtgcactcc

SEQ ID NO: 3647352 - DNA, 25 bp, Homo sapien
tggaggaattcagtcggcctggaaa

SEQ ID NO: 3647353 - DNA, 25 bp, Homo sapien
tcatctcacctaaaatctgggctca

SEQ ID NO: 3647354 - DNA, 25 bp, Homo sapien
aaaggtccggtgacctgctggtcaa

SEQ ID NO: 3647355 - DNA, 25 bp, Homo sapien
tgcagttgaactacaagaaggtggc

SEQ ID NO: 3647356 - DNA, 25 bp, Homo sapien
tctaagagctcaaaggtgtgcccac

SEQ ID NO: 3647357 - DNA, 25 bp, Homo sapien
tcaagacatctaatgtccaccaggg

SEQ ID NO: 3647358 - DNA, 25 bp, Homo sapien
cttagctgccacttacggttgagaa

SEQ ID NO: 3647359 - DNA, 25 bp, Homo sapien
ctgccacttacggttgagaacatat

SEQ ID NO: 3647360 - DNA, 25 bp, Homo sapien
tacggttgagaacatatgaatataa

SEQ ID NO: 3647361 - DNA, 25 bp, Homo sapien
cacttacggttgagaacatatgaat

SEQ ID NO: 3647362 - DNA, 25 bp, Homo sapien
tctgtctcaacaagcaatactaata

SEQ ID NO: 3647363 - DNA, 25 bp, Homo sapien
acactggcggtttttctagatcttg

SEQ ID NO: 3647364 - DNA, 25 bp, Homo sapien
actctgtctcaacaagcaatactaa

SEQ ID NO: 3647365 - DNA, 25 bp, Homo sapien
gattaaaacattagaaggatgtggg

SEQ ID NO: 3647366 - DNA, 25 bp, Homo sapien
tttctactgcaacaaggctgatggg

SEQ ID NO: 3647367 - DNA, 25 bp, Homo sapien
ttctactgcaacaaggctgatggga

SEQ ID NO: 3647368 - DNA, 25 bp, Homo sapien
gatctcatgaaagtgaccttgtggg

SEQ ID NO: 3647369 - DNA, 25 bp, Homo sapien
caagagccagatctcatgaaagtga

SEQ ID NO: 3647370 - DNA, 25 bp, Homo sapien
gggaagctgagtggtaacccaagaa

SEQ ID NO: 3647371 - DNA, 25 bp, Homo sapien
ttacaatgatctttcaagaaatgtg

SEQ ID NO: 3647372 - DNA, 25 bp, Homo sapien
tctgtaacgttgctggctcccatac

SEQ ID NO: 3647373 - DNA, 25 bp, Homo sapien
gatgcgtatccaacctacaattcat

SEQ ID NO: 3647374 - DNA, 25 bp, Homo sapien
gtttttggcaggctgatgcgtatcc

SEQ ID NO: 3647375 - DNA, 25 bp, Homo sapien
ccatacttggcacacttggggttgt

SEQ ID NO: 3647376 - DNA, 25 bp, Homo sapien
gaaggacagcatcacttccgaggaa

SEQ ID NO: 3647377 - DNA, 25 bp, Homo sapien
ccaaacccaaatgagaatcagtgga

SEQ ID NO: 3647378 - DNA, 25 bp, Homo sapien
aatacacatcagtgagctgatgaca

SEQ ID NO: 3647379 - DNA, 25 bp, Homo sapien
aaagttgtcaagtcatacccttggc

SEQ ID NO: 3647380 - DNA, 25 bp, Homo sapien
acatttttgactctattggtctccc

SEQ ID NO: 3647381 - DNA, 25 bp, Homo sapien
ctttctcccgtcataaatacaagag

SEQ ID NO: 3647382 - DNA, 25 bp, Homo sapien
ctctgtttctgaattgtcccctctt

SEQ ID NO: 3647383 - DNA, 25 bp, Homo sapien
ggtgcttatgtaactgttggagaca

SEQ ID NO: 3647384 - DNA, 25 bp, Homo sapien
ggtgactgtttatccggacatctat

SEQ ID NO: 3647385 - DNA, 25 bp, Homo sapien
tcaggtgactgtttatccggacatc

SEQ ID NO: 3647386 - DNA, 25 bp, Homo sapien
tcctcattctcaggtgactgtttat

SEQ ID NO: 3647387 - DNA, 25 bp, Homo sapien
cattctcaggtgactgtttatccgg

SEQ ID NO: 3647388 - DNA, 25 bp, Homo sapien
aaagattccagaggaacccatgcca

SEQ ID NO: 3647389 - DNA, 25 bp, Homo sapien
tacctatctacatggagccgcagct

SEQ ID NO: 3647390 - DNA, 25 bp, Homo sapien
gccacctgcctataatgaaccaaag

SEQ ID NO: 3647391 - DNA, 25 bp, Homo sapien
tccaactgtgcaatgggtcaacgcc

SEQ ID NO: 3647392 - DNA, 25 bp, Homo sapien
agtcacttgctcttctcttggtccg

SEQ ID NO: 3647393 - DNA, 25 bp, Homo sapien
tcttctcttggtccgtaatcgtcag

SEQ ID NO: 3647394 - DNA, 25 bp, Homo sapien
tggtccgtaatcgtcagtagcatga

SEQ ID NO: 3647395 - DNA, 25 bp, Homo sapien
cacttgctcttctcttggtccgtaa

SEQ ID NO: 3647396 - DNA, 25 bp, Homo sapien
gaccctttaagtgcctgtgtagaca

SEQ ID NO: 3647397 - DNA, 25 bp, Homo sapien
gatgtgaattgaaccctagtaagca

SEQ ID NO: 3647398 - DNA, 25 bp, Homo sapien
caacttaattggtctgggatgcaac

SEQ ID NO: 3647399 - DNA, 25 bp, Homo sapien
cacagggagctttaagttataccaa

SEQ ID NO: 3647400 - DNA, 25 bp, Homo sapien
tttggaatgtacaagcaagacgttc

SEQ ID NO: 3647401 - DNA, 25 bp, Homo sapien
aattgcttagcactttaccagggag

SEQ ID NO: 3647402 - DNA, 25 bp, Homo sapien
tctgtaatacagttgagggtccaca

SEQ ID NO: 3647403 - DNA, 25 bp, Homo sapien
gagtgcattgagtaccacagctgag

SEQ ID NO: 3647404 - DNA, 25 bp, Homo sapien
tagctacaccgaggggctgtagtaa

SEQ ID NO: 3647405 - DNA, 25 bp, Homo sapien
tgaatgaaatgtccctagctacacc

SEQ ID NO: 3647406 - DNA, 25 bp, Homo sapien
aatgaaatgtccctagctacaccga

SEQ ID NO: 3647407 - DNA, 25 bp, Homo sapien
tgaaatgtccctagctacaccgagg

SEQ ID NO: 3647408 - DNA, 25 bp, Homo sapien
taaagttcgtcggatcacaacagct

SEQ ID NO: 3647409 - DNA, 25 bp, Homo sapien
ctagaccaattccaagtgcgcccag

SEQ ID NO: 3647410 - DNA, 25 bp, Homo sapien
tcacaggagcaagaattcaggacta

SEQ ID NO: 3647411 - DNA, 25 bp, Homo sapien
ttcaggactagctaaaaggcagcca

SEQ ID NO: 3647412 - DNA, 25 bp, Homo sapien
gaggagctataaggcgtctgtcaag

SEQ ID NO: 3647413 - DNA, 25 bp, Homo sapien
taatgtatttagtttgaggagctat

SEQ ID NO: 3647414 - DNA, 25 bp, Homo sapien
tagtttgaggagctataaggcgtct

SEQ ID NO: 3647415 - DNA, 25 bp, Homo sapien
gagctataaggcgtctgtcaagcat

SEQ ID NO: 3647416 - DNA, 25 bp, Homo sapien
ttaaaccgcaccgtgcatctggccg

SEQ ID NO: 3647417 - DNA, 25 bp, Homo sapien
gacaagtgctggtctatagctggaa

SEQ ID NO: 3647418 - DNA, 25 bp, Homo sapien
tctcagacacacaagaagtcagtgg

SEQ ID NO: 3647419 - DNA, 25 bp, Homo sapien
gattttagctcaagctcggcaacag

SEQ ID NO: 3647420 - DNA, 25 bp, Homo sapien
caacgtcaagtctgactggatccaa

SEQ ID NO: 3647421 - DNA, 25 bp, Homo sapien
tctgggtctaagaataatggcactc

SEQ ID NO: 3647422 - DNA, 25 bp, Homo sapien
cacagtttgggatttcagagctaag

SEQ ID NO: 3647423 - DNA, 25 bp, Homo sapien
gcctatcagaagtatcacagtttgg

SEQ ID NO: 3647424 - DNA, 25 bp, Homo sapien
gagaagtcaggcaaactcagttgtg

SEQ ID NO: 3647425 - DNA, 25 bp, Homo sapien
cactcgctgtggtctattaacttag

SEQ ID NO: 3647426 - DNA, 25 bp, Homo sapien
tcattgtagtatgccggagctccgg

SEQ ID NO: 3647427 - DNA, 25 bp, Homo sapien
gatactgcatcaacaattggaccca

SEQ ID NO: 3647428 - DNA, 25 bp, Homo sapien
gaaggctcatcgtcatcgtagtaca

SEQ ID NO: 3647429 - DNA, 25 bp, Homo sapien
cacttcagaaggctcatcgtcatcg

SEQ ID NO: 3647430 - DNA, 25 bp, Homo sapien
cttcagaaggctcatcgtcatcgta

SEQ ID NO: 3647431 - DNA, 25 bp, Homo sapien
tcagaaggctcatcgtcatcgtagt

SEQ ID NO: 3647432 - DNA, 25 bp, Homo sapien
atttttccctctggtctacttggca

SEQ ID NO: 3647433 - DNA, 25 bp, Homo sapien
tcttattaattcaggatcaatccct

SEQ ID NO: 3647434 - DNA, 25 bp, Homo sapien
tttatactcatcacaggggacacct

SEQ ID NO: 3647435 - DNA, 25 bp, Homo sapien
cagaggcaacacctcatgttcaaat

SEQ ID NO: 3647436 - DNA, 25 bp, Homo sapien
aaatctatgtcaaaggtatttggag

SEQ ID NO: 3647437 - DNA, 25 bp, Homo sapien
tccaaatctatgtcaaaggtatttg

SEQ ID NO: 3647438 - DNA, 25 bp, Homo sapien
tatgtcaaaggtatttggaggcaat

SEQ ID NO: 3647439 - DNA, 25 bp, Homo sapien
tctatgtcaaaggtatttggaggca

SEQ ID NO: 3647440 - DNA, 25 bp, Homo sapien
gggatacctttctccactctcgatt

SEQ ID NO: 3647441 - DNA, 25 bp, Homo sapien
tttttcacgtaatatacacagccat

SEQ ID NO: 3647442 - DNA, 25 bp, Homo sapien
cgcctggccaaccatattcatacta

SEQ ID NO: 3647443 - DNA, 25 bp, Homo sapien
ttttctatgaaagacttgggatacc

SEQ ID NO: 3647444 - DNA, 25 bp, Homo sapien
cagacagcgcctttatcgtccgcag

SEQ ID NO: 3647445 - DNA, 25 bp, Homo sapien
ggcacaggttctcagtgcgcgctga

SEQ ID NO: 3647446 - DNA, 25 bp, Homo sapien
gctcctttcctatccatgctctggg

SEQ ID NO: 3647447 - DNA, 25 bp, Homo sapien
gagattcttattttcccattccagg

SEQ ID NO: 3647448 - DNA, 25 bp, Homo sapien
ttttcagaagcctgatccaggtggc

SEQ ID NO: 3647449 - DNA, 25 bp, Homo sapien
tcctcccttggctcttttcagaagc

SEQ ID NO: 3647450 - DNA, 25 bp, Homo sapien
gaagcctgatccaggtggccttcat

SEQ ID NO: 3647451 - DNA, 25 bp, Homo sapien
tatcagaattcttcagccttcctcc

SEQ ID NO: 3647452 - DNA, 25 bp, Homo sapien
gaaactaggaggacattaagcttaa

SEQ ID NO: 3647453 - DNA, 25 bp, Homo sapien
gctaaagcaggtatttgaaactagg

SEQ ID NO: 3647454 - DNA, 25 bp, Homo sapien
taaacagcttgatggtgcagtgcag

SEQ ID NO: 3647455 - DNA, 25 bp, Homo sapien
gaactgaaggacaacgatgggtttc

SEQ ID NO: 3647456 - DNA, 25 bp, Homo sapien
catcggaatcggatggacggctagt

SEQ ID NO: 3647457 - DNA, 25 bp, Homo sapien
ctccagagatacatcggaatcggat

SEQ ID NO: 3647458 - DNA, 25 bp, Homo sapien
ggctagtgtaggagtctgccgaacc

SEQ ID NO: 3647459 - DNA, 25 bp, Homo sapien
ctgccgctccgcttctctgcgcact

SEQ ID NO: 3647460 - DNA, 25 bp, Homo sapien
gaagaccagtcttacataccacact

SEQ ID NO: 3647461 - DNA, 25 bp, Homo sapien
tgtatgtgtccaaataagccatcca

SEQ ID NO: 3647462 - DNA, 25 bp, Homo sapien
taaaacatgttgatattaggtgcag

SEQ ID NO: 3647463 - DNA, 25 bp, Homo sapien
gggcacagcacaacttgcaaagatc

SEQ ID NO: 3647464 - DNA, 25 bp, Homo sapien
tctattgggctgtatcatgatggca

SEQ ID NO: 3647465 - DNA, 25 bp, Homo sapien
gagcaacatttcgatccatgcttgg

SEQ ID NO: 3647466 - DNA, 25 bp, Homo sapien
gcatataagcccgagaaactgttca

SEQ ID NO: 3647467 - DNA, 25 bp, Homo sapien
tgtaggacaagtaacacgaccctgg

SEQ ID NO: 3647468 - DNA, 25 bp, Homo sapien
tttggggatggttttgggatgattc

SEQ ID NO: 3647469 - DNA, 25 bp, Homo sapien
atggttttgggatgattcaagcaca

SEQ ID NO: 3647470 - DNA, 25 bp, Homo sapien
gttttgggatgattcaagcacatta

SEQ ID NO: 3647471 - DNA, 25 bp, Homo sapien
tttgggatgattcaagcacattaca

SEQ ID NO: 3647472 - DNA, 25 bp, Homo sapien
tggaagagaacgagacacacatgct

SEQ ID NO: 3647473 - DNA, 25 bp, Homo sapien
ggtaattcccatttgactccaggct

SEQ ID NO: 3647474 - DNA, 25 bp, Homo sapien
gctatcagcctccagacacatgtga

SEQ ID NO: 3647475 - DNA, 25 bp, Homo sapien
gaaccctagccagcctgttggagga

SEQ ID NO: 3647476 - DNA, 25 bp, Homo sapien
taagaccgcacataactacagagga

SEQ ID NO: 3647477 - DNA, 25 bp, Homo sapien
gtgtgccccagttgcctgtgcccat

SEQ ID NO: 3647478 - DNA, 25 bp, Homo sapien
caactaagctgatagtgaccatgta

SEQ ID NO: 3647479 - DNA, 25 bp, Homo sapien
gctgtgagatcaagcaagtgtgtca

SEQ ID NO: 3647480 - DNA, 25 bp, Homo sapien
taagctctgcgtaaaagtcttcatg

SEQ ID NO: 3647481 - DNA, 25 bp, Homo sapien
tgtagccattgatggggcaaaaact

SEQ ID NO: 3647482 - DNA, 25 bp, Homo sapien
aagtcttcatgtcgttccctgttaa

SEQ ID NO: 3647483 - DNA, 25 bp, Homo sapien
cagagagggttgactgttttaagct

SEQ ID NO: 3647484 - DNA, 25 bp, Homo sapien
tgtggtgatctcctcaagtatctga

SEQ ID NO: 3647485 - DNA, 25 bp, Homo sapien
gaaaaaggacaatcgggcatccgta

SEQ ID NO: 3647486 - DNA, 25 bp, Homo sapien
tatctgctgaacttgaaacggtctt

SEQ ID NO: 3647487 - DNA, 25 bp, Homo sapien
tatctgagagcaaaggaatacaccc

SEQ ID NO: 3647488 - DNA, 25 bp, Homo sapien
cccaatatgctgtgaaaaaggctgt

SEQ ID NO: 3647489 - DNA, 25 bp, Homo sapien
tcagtcccaggtacgccaaattgta

SEQ ID NO: 3647490 - DNA, 25 bp, Homo sapien
gagatccgccattgcactcatacta

SEQ ID NO: 3647491 - DNA, 25 bp, Homo sapien
caaattgtacatgtttggcaagaga

SEQ ID NO: 3647492 - DNA, 25 bp, Homo sapien
aaattgcatgtctcgtatcctgtga

SEQ ID NO: 3647493 - DNA, 25 bp, Homo sapien
ttcagcatctcgtgaaatgcagaca

SEQ ID NO: 3647494 - DNA, 25 bp, Homo sapien
taccaccaattcacgtgctggccta

SEQ ID NO: 3647495 - DNA, 25 bp, Homo sapien
ccttttctgtgaactccagtgcatg

SEQ ID NO: 3647496 - DNA, 25 bp, Homo sapien
gaaggagcctgtccatccttttttg

SEQ ID NO: 3647497 - DNA, 25 bp, Homo sapien
caaggctatagttatcagcaggtgg

SEQ ID NO: 3647498 - DNA, 25 bp, Homo sapien
gaagcagagatcaaaccttccccag

SEQ ID NO: 3647499 - DNA, 25 bp, Homo sapien
gacacagcaacaagaggccacatgt

SEQ ID NO: 3647500 - DNA, 25 bp, Homo sapien
tgtgcatcgctatgcccagctgtat

SEQ ID NO: 3647501 - DNA, 25 bp, Homo sapien
tatgacattagcacctagcattctg

SEQ ID NO: 3647502 - DNA, 25 bp, Homo sapien
aacgcaggtttcactagcttgtcaa

SEQ ID NO: 3647503 - DNA, 25 bp, Homo sapien
tattatgacttgttctgaaaggcca

SEQ ID NO: 3647504 - DNA, 25 bp, Homo sapien
caatgagttgggacatagatgacag

SEQ ID NO: 3647505 - DNA, 25 bp, Homo sapien
cctcatggagggacagaaagagctc

SEQ ID NO: 3647506 - DNA, 25 bp, Homo sapien
gctgacacgagctagtttacgcact

SEQ ID NO: 3647507 - DNA, 25 bp, Homo sapien
caagagtacctgctaggcaatgagg

SEQ ID NO: 3647508 - DNA, 25 bp, Homo sapien
tagcggggggcagtctttctatgtt

SEQ ID NO: 3647509 - DNA, 25 bp, Homo sapien
tgtgcttttgaaatactacacagtc

SEQ ID NO: 3647510 - DNA, 25 bp, Homo sapien
gtatccatcgatatcacacttttga

SEQ ID NO: 3647511 - DNA, 25 bp, Homo sapien
tgaaatactacacagtccattgaca

SEQ ID NO: 3647512 - DNA, 25 bp, Homo sapien
agtagttcaaaatcagcctaggcaa

SEQ ID NO: 3647513 - DNA, 25 bp, Homo sapien
cagtagttcaaaatcagcctaggca

SEQ ID NO: 3647514 - DNA, 25 bp, Homo sapien
ccagtagttcaaaatcagcctaggc

SEQ ID NO: 3647515 - DNA, 25 bp, Homo sapien
catggtgtctcagaagccaagagca

SEQ ID NO: 3647516 - DNA, 25 bp, Homo sapien
ttcaacgattgtgaaggccgctgac

SEQ ID NO: 3647517 - DNA, 25 bp, Homo sapien
cagagggataggagtctgtctgtcc

SEQ ID NO: 3647518 - DNA, 25 bp, Homo sapien
gggagaagttaagtgcagaccactc

SEQ ID NO: 3647519 - DNA, 25 bp, Homo sapien
taaggacagatggtttcctttatct

SEQ ID NO: 3647520 - DNA, 25 bp, Homo sapien
ctttccccttgcatgtcagtctctg

SEQ ID NO: 3647521 - DNA, 25 bp, Homo sapien
tgagttcctttaaggacagatggtt

SEQ ID NO: 3647522 - DNA, 25 bp, Homo sapien
cagtctctgtgaccagggtgagttc

SEQ ID NO: 3647523 - DNA, 25 bp, Homo sapien
cactaataagtccagagtctgttcc

SEQ ID NO: 3647524 - DNA, 25 bp, Homo sapien
gagaaggcacgcatttctggcatcc

SEQ ID NO: 3647525 - DNA, 25 bp, Homo sapien
tccgggtgactgataagagaaggca

SEQ ID NO: 3647526 - DNA, 25 bp, Homo sapien
cagaaaagtattgactgatggctcc

SEQ ID NO: 3647527 - DNA, 25 bp, Homo sapien
tgggatccctttctagtaacacaac

SEQ ID NO: 3647528 - DNA, 25 bp, Homo sapien
tgaagtgagtctgaacacacaaagc

SEQ ID NO: 3647529 - DNA, 25 bp, Homo sapien
cattcaaagatcaataagtggagcc

SEQ ID NO: 3647530 - DNA, 25 bp, Homo sapien
caacattggctatgaactggaccgt

SEQ ID NO: 3647531 - DNA, 25 bp, Homo sapien
cagaggcaccaaagagaccaatggt

SEQ ID NO: 3647532 - DNA, 25 bp, Homo sapien
ttggccaggatgctgtataagcttc

SEQ ID NO: 3647533 - DNA, 25 bp, Homo sapien
taggatcagaactcaccgcaacctt

SEQ ID NO: 3647534 - DNA, 25 bp, Homo sapien
tctccccgtgtgcatgttaaataca

SEQ ID NO: 3647535 - DNA, 25 bp, Homo sapien
ccaggagatattataacttccgtag

SEQ ID NO: 3647536 - DNA, 25 bp, Homo sapien
cttccgtaggttcttctgtcagttg

SEQ ID NO: 3647537 - DNA, 25 bp, Homo sapien
tctgtcagttgatgtttcagaagca

SEQ ID NO: 3647538 - DNA, 25 bp, Homo sapien
taatctgaacttccctgaggtatac

SEQ ID NO: 3647539 - DNA, 25 bp, Homo sapien
gcaaaagttcctacaatatgttttg

SEQ ID NO: 3647540 - DNA, 25 bp, Homo sapien
cttctctctatcatcttgctaactt

SEQ ID NO: 3647541 - DNA, 25 bp, Homo sapien
tgggcaaaagttcctacaatatgtt

SEQ ID NO: 3647542 - DNA, 25 bp, Homo sapien
caaaagttcctacaatatgttttga

SEQ ID NO: 3647543 - DNA, 25 bp, Homo sapien
tgctacatagcatgagggcgactgg

SEQ ID NO: 3647544 - DNA, 25 bp, Homo sapien
ccaatttgtagaagagtggcatctc

SEQ ID NO: 3647545 - DNA, 25 bp, Homo sapien
gactaaagccgaacagatcctcaaa

SEQ ID NO: 3647546 - DNA, 25 bp, Homo sapien
tactttcgacatgacgtatgagcac

SEQ ID NO: 3647547 - DNA, 25 bp, Homo sapien
tccatgaaaccatttgttaatcaaa

SEQ ID NO: 3647548 - DNA, 25 bp, Homo sapien
gggctcttgcccttgttcgaactac

SEQ ID NO: 3647549 - DNA, 25 bp, Homo sapien
ttcctcttaccattcagggctcttg

SEQ ID NO: 3647550 - DNA, 25 bp, Homo sapien
ccatttgttaatcaaatatatcctg

SEQ ID NO: 3647551 - DNA, 25 bp, Homo sapien
cttcatgggccgcactgtagctgac

SEQ ID NO: 3647552 - DNA, 25 bp, Homo sapien
tgtagctgacatttgtccgaaccgc

SEQ ID NO: 3647553 - DNA, 25 bp, Homo sapien
ttgcttcgaatgagatggccatgcc

SEQ ID NO: 3647554 - DNA, 25 bp, Homo sapien
catgcagaaaatcttttgcttcgaa

SEQ ID NO: 3647555 - DNA, 25 bp, Homo sapien
tttatattagcagaggttgagagcc

SEQ ID NO: 3647556 - DNA, 25 bp, Homo sapien
tgtgttatacaactgcagcgatgtg

SEQ ID NO: 3647557 - DNA, 25 bp, Homo sapien
gctacttcacagaaacggcatatga

SEQ ID NO: 3647558 - DNA, 25 bp, Homo sapien
cccagggagcgctgaagttattgca

SEQ ID NO: 3647559 - DNA, 25 bp, Homo sapien
cagccctaggttcttttaatcggca

SEQ ID NO: 3647560 - DNA, 25 bp, Homo sapien
cagttatcaactcctttgctgacag

SEQ ID NO: 3647561 - DNA, 25 bp, Homo sapien
taatcggcagttatcaactcctttg

SEQ ID NO: 3647562 - DNA, 25 bp, Homo sapien
taggttcttttaatcggcagttatc

SEQ ID NO: 3647563 - DNA, 25 bp, Homo sapien
tcagcatcaatcatcaagaagagac

SEQ ID NO: 3647564 - DNA, 25 bp, Homo sapien
tattgttcccacctagccagtattt

SEQ ID NO: 3647565 - DNA, 25 bp, Homo sapien
tgagattctaggcacagctgataac

SEQ ID NO: 3647566 - DNA, 25 bp, Homo sapien
tgtccttgaacacgtcgaagaagaa

SEQ ID NO: 3647567 - DNA, 25 bp, Homo sapien
caatctatcaaaggctctgcgttcc

SEQ ID NO: 3647568 - DNA, 25 bp, Homo sapien
cagctgctgtcaccatgagtaggga

SEQ ID NO: 3647569 - DNA, 25 bp, Homo sapien
ttcaagaaacccttcggctcatggg

SEQ ID NO: 3647570 - DNA, 25 bp, Homo sapien
aagaaatgcatttagcgtcctcagc

SEQ ID NO: 3647571 - DNA, 25 bp, Homo sapien
ctgggcttggaatgaatccgatttc

SEQ ID NO: 3647572 - DNA, 25 bp, Homo sapien
gccctatccaccagtcattgttaaa

SEQ ID NO: 3647573 - DNA, 25 bp, Homo sapien
agccttcttttaccaatcgccctat

SEQ ID NO: 3647574 - DNA, 25 bp, Homo sapien
gcctcatgttttctagtttgactgg

SEQ ID NO: 3647575 - DNA, 25 bp, Homo sapien
caaacacttgacatctgtctcatac

SEQ ID NO: 3647576 - DNA, 25 bp, Homo sapien
gcaaacacttgacatctgtctcata

SEQ ID NO: 3647577 - DNA, 25 bp, Homo sapien
aaactaacggatgacaagagctgcc

SEQ ID NO: 3647578 - DNA, 25 bp, Homo sapien
gccataccaggcagctacagacagt

SEQ ID NO: 3647579 - DNA, 25 bp, Homo sapien
gccactgcctgatgatgtctgagaa

SEQ ID NO: 3647580 - DNA, 25 bp, Homo sapien
tagtcaccagggctatgatgtgcca

SEQ ID NO: 3647581 - DNA, 25 bp, Homo sapien
ttccctcaaatacggataactcaga

SEQ ID NO: 3647582 - DNA, 25 bp, Homo sapien
ccctcaaatacggataactcagagt

SEQ ID NO: 3647583 - DNA, 25 bp, Homo sapien
attccctcaaatacggataactcag

SEQ ID NO: 3647584 - DNA, 25 bp, Homo sapien
cctcaaatacggataactcagagtc

SEQ ID NO: 3647585 - DNA, 25 bp, Homo sapien
tctggagtaagttctgagatgttac

SEQ ID NO: 3647586 - DNA, 25 bp, Homo sapien
ttctctggagtaagttctgagatgt

SEQ ID NO: 3647587 - DNA, 25 bp, Homo sapien
ctagttctctggagtaagttctgag

SEQ ID NO: 3647588 - DNA, 25 bp, Homo sapien
tagttctctggagtaagttctgaga

SEQ ID NO: 3647589 - DNA, 25 bp, Homo sapien
aactaggtactatgtcacccaaact

SEQ ID NO: 3647590 - DNA, 25 bp, Homo sapien
agcatgttgtcagcgctttcctgga

SEQ ID NO: 3647591 - DNA, 25 bp, Homo sapien
gaaggacaaaatctgcgtcaggaat

SEQ ID NO: 3647592 - DNA, 25 bp, Homo sapien
tagggctttatccagtgctgacttt

SEQ ID NO: 3647593 - DNA, 25 bp, Homo sapien
tcagctattgcttgcataatgcagg

SEQ ID NO: 3647594 - DNA, 25 bp, Homo sapien
tctacggttaagaatcagtcaagga

SEQ ID NO: 3647595 - DNA, 25 bp, Homo sapien
aacttggtgttacaatacagctacc

SEQ ID NO: 3647596 - DNA, 25 bp, Homo sapien
gatgacatcatagagctggactagc

SEQ ID NO: 3647597 - DNA, 25 bp, Homo sapien
aaatgagtctgtaaccgtccctata

SEQ ID NO: 3647598 - DNA, 25 bp, Homo sapien
aaaggagtcatacacaaggccaatg

SEQ ID NO: 3647599 - DNA, 25 bp, Homo sapien
caagatatccgagtgaaatctgtct

SEQ ID NO: 3647600 - DNA, 25 bp, Homo sapien
cacgaggacccaagaggatatgcca

SEQ ID NO: 3647601 - DNA, 25 bp, Homo sapien
gattcagacctactcctcctgcgta

SEQ ID NO: 3647602 - DNA, 25 bp, Homo sapien
ggagcggtggtttgctggaatatca

SEQ ID NO: 3647603 - DNA, 25 bp, Homo sapien
cactgtttgcactgggtttagggga

SEQ ID NO: 3647604 - DNA, 25 bp, Homo sapien
ctttggagtggggtgacgttacact

SEQ ID NO: 3647605 - DNA, 25 bp, Homo sapien
tgcatctaagccagtagcatctatg

SEQ ID NO: 3647606 - DNA, 25 bp, Homo sapien
aaacaaataacagagcatgcacgtt

SEQ ID NO: 3647607 - DNA, 25 bp, Homo sapien
aataacagagcatgcacgttattgg

SEQ ID NO: 3647608 - DNA, 25 bp, Homo sapien
aacaaataacagagcatgcacgtta

SEQ ID NO: 3647609 - DNA, 25 bp, Homo sapien
caaataacagagcatgcacgttatt

SEQ ID NO: 3647610 - DNA, 25 bp, Homo sapien
agtaaaccgccaaaacaagcctgca

SEQ ID NO: 3647611 - DNA, 25 bp, Homo sapien
gcccaaatgtcttagcgatgccgat

SEQ ID NO: 3647612 - DNA, 25 bp, Homo sapien
tagacactgttagtcacttggctgc

SEQ ID NO: 3647613 - DNA, 25 bp, Homo sapien
caagctgaggctatgttaacacaaa

SEQ ID NO: 3647614 - DNA, 25 bp, Homo sapien
tagctgtaacaagaagatcggaccc

SEQ ID NO: 3647615 - DNA, 25 bp, Homo sapien
tatttgatggaatattggtgctttg

SEQ ID NO: 3647616 - DNA, 25 bp, Homo sapien
tttgatggaatattggtgctttgtg

SEQ ID NO: 3647617 - DNA, 25 bp, Homo sapien
tgatggaatattggtgctttgtgcc

SEQ ID NO: 3647618 - DNA, 25 bp, Homo sapien
cttatttgatggaatattggtgctt

SEQ ID NO: 3647619 - DNA, 25 bp, Homo sapien
tcgtagcccttcagagaagggccca

SEQ ID NO: 3647620 - DNA, 25 bp, Homo sapien
agaagggcccactaggaccactggt

SEQ ID NO: 3647621 - DNA, 25 bp, Homo sapien
catcatacggaggagtgtgctctgt

SEQ ID NO: 3647622 - DNA, 25 bp, Homo sapien
cactggtcgcatggaaggtaccaca

SEQ ID NO: 3647623 - DNA, 25 bp, Homo sapien
aaaaaatcaaacagcgctttttgca

SEQ ID NO: 3647624 - DNA, 25 bp, Homo sapien
aacagcgctttttgcatcatatctg

SEQ ID NO: 3647625 - DNA, 25 bp, Homo sapien
aaacagcgctttttgcatcatatct

SEQ ID NO: 3647626 - DNA, 25 bp, Homo sapien
aatcaaacagcgctttttgcatcat

SEQ ID NO: 3647627 - DNA, 25 bp, Homo sapien
tggctgatacactcgaacatgggtc

SEQ ID NO: 3647628 - DNA, 25 bp, Homo sapien
caggctttaagggaacaaccacaga

SEQ ID NO: 3647629 - DNA, 25 bp, Homo sapien
cacatcttaacagggtcatgcagca

SEQ ID NO: 3647630 - DNA, 25 bp, Homo sapien
gtgacacactagatatgacccttgg

SEQ ID NO: 3647631 - DNA, 25 bp, Homo sapien
cgcctatgagcacagaacctctgat

SEQ ID NO: 3647632 - DNA, 25 bp, Homo sapien
caaagttgacaagctccgcctatga

SEQ ID NO: 3647633 - DNA, 25 bp, Homo sapien
gcacaggacagtttgtcaggcatct

SEQ ID NO: 3647634 - DNA, 25 bp, Homo sapien
tagcaagattgccatacacagaaac

SEQ ID NO: 3647635 - DNA, 25 bp, Homo sapien
tacaagtgtcagataagtactgagc

SEQ ID NO: 3647636 - DNA, 25 bp, Homo sapien
cagagagattttttatccaagggta

SEQ ID NO: 3647637 - DNA, 25 bp, Homo sapien
tatcccactgttgctgatgaaaaat

SEQ ID NO: 3647638 - DNA, 25 bp, Homo sapien
tccaagggtatgtatgtaactaagt

SEQ ID NO: 3647639 - DNA, 25 bp, Homo sapien
attggtctaatcaaaggggatagaa

SEQ ID NO: 3647640 - DNA, 25 bp, Homo sapien
tattggtctaatcaaaggggataga

SEQ ID NO: 3647641 - DNA, 25 bp, Homo sapien
ttattggtctaatcaaaggggatag

SEQ ID NO: 3647642 - DNA, 25 bp, Homo sapien
caaaggggatagaagtgtatgcccc

SEQ ID NO: 3647643 - DNA, 25 bp, Homo sapien
tctattattgcgtgcttactgggat

SEQ ID NO: 3647644 - DNA, 25 bp, Homo sapien
gaccttgtgttggatctttctatta

SEQ ID NO: 3647645 - DNA, 25 bp, Homo sapien
tactgggattgtttaataccgagcg

SEQ ID NO: 3647646 - DNA, 25 bp, Homo sapien
agcgtttggcaagcgagatgtcagc

SEQ ID NO: 3647647 - DNA, 25 bp, Homo sapien
tcttgcaagttcaaaaatcctttcg

SEQ ID NO: 3647648 - DNA, 25 bp, Homo sapien
aattgtatccgcgtcaaggaccacc

SEQ ID NO: 3647649 - DNA, 25 bp, Homo sapien
aggaccaccaactgcaatgttcttg

SEQ ID NO: 3647650 - DNA, 25 bp, Homo sapien
ggttttactgagttgagctggatga

SEQ ID NO: 3647651 - DNA, 25 bp, Homo sapien
gacgttgaggtgtttagcttgagat

SEQ ID NO: 3647652 - DNA, 25 bp, Homo sapien
tcagctgctaccatctggacgttga

SEQ ID NO: 3647653 - DNA, 25 bp, Homo sapien
gagatttccctcgagattttattaa

SEQ ID NO: 3647654 - DNA, 25 bp, Homo sapien
gagccagtttatcagctgctaccat

SEQ ID NO: 3647655 - DNA, 25 bp, Homo sapien
cctccagatagtcggcaaggtgctc

SEQ ID NO: 3647656 - DNA, 25 bp, Homo sapien
ggtggccttccagtaggcctccaga

SEQ ID NO: 3647657 - DNA, 25 bp, Homo sapien
gctaagaggcagacttgaagtggct

SEQ ID NO: 3647658 - DNA, 25 bp, Homo sapien
gaagtggctaatgtacggctaagga

SEQ ID NO: 3647659 - DNA, 25 bp, Homo sapien
gataggagcggagcgatcagtcctc

SEQ ID NO: 3647660 - DNA, 25 bp, Homo sapien
ccttttcacagtagcgatccttgga

SEQ ID NO: 3647661 - DNA, 25 bp, Homo sapien
gacttgtcccactgcgatggttgtg

SEQ ID NO: 3647662 - DNA, 25 bp, Homo sapien
gagtctcgactctcctgggtttccg

SEQ ID NO: 3647663 - DNA, 25 bp, Homo sapien
tatgattgcagtgtagaccccaaag

SEQ ID NO: 3647664 - DNA, 25 bp, Homo sapien
tgtccccaaatttagtcagccagag

SEQ ID NO: 3647665 - DNA, 25 bp, Homo sapien
gattttgttcaagtggcagctaccc

SEQ ID NO: 3647666 - DNA, 25 bp, Homo sapien
tgaagagtccagtatgcaaccggag

SEQ ID NO: 3647667 - DNA, 25 bp, Homo sapien
tgagacacggaaaaggtcttagcct

SEQ ID NO: 3647668 - DNA, 25 bp, Homo sapien
tacagcagtgtaattgaggcatgga

SEQ ID NO: 3647669 - DNA, 25 bp, Homo sapien
caaacaacaggaacaataggcaagg

SEQ ID NO: 3647670 - DNA, 25 bp, Homo sapien
tttcctgggacaaacttcaagtgcc

SEQ ID NO: 3647671 - DNA, 25 bp, Homo sapien
tctaggttgactacaaaaatggctc

SEQ ID NO: 3647672 - DNA, 25 bp, Homo sapien
ttgccccaagaaagatgccctgcag

SEQ ID NO: 3647673 - DNA, 25 bp, Homo sapien
tgtaactttacattccgcaggtcag

SEQ ID NO: 3647674 - DNA, 25 bp, Homo sapien
tagttaaaagtacagcgcagcagaa

SEQ ID NO: 3647675 - DNA, 25 bp, Homo sapien
taggccttgggcttaagaaatggac

SEQ ID NO: 3647676 - DNA, 25 bp, Homo sapien
cagaatacttacttcccagccatag

SEQ ID NO: 3647677 - DNA, 25 bp, Homo sapien
gcaaggtctcttggatcaggtaaga

SEQ ID NO: 3647678 - DNA, 25 bp, Homo sapien
taaggctgtctcatggtgttaaatc

SEQ ID NO: 3647679 - DNA, 25 bp, Homo sapien
ccagctgttttaccagggatccaga

SEQ ID NO: 3647680 - DNA, 25 bp, Homo sapien
ttcagggcatgggaagtaaaacatt

SEQ ID NO: 3647681 - DNA, 25 bp, Homo sapien
ctttcaaatgaagtctggacctcct

SEQ ID NO: 3647682 - DNA, 25 bp, Homo sapien
cctagtttcttaaggattcagggca

SEQ ID NO: 3647683 - DNA, 25 bp, Homo sapien
caaatgcacatatgattgccttctc

SEQ ID NO: 3647684 - DNA, 25 bp, Homo sapien
caccttaccggagaaccagtgtaca

SEQ ID NO: 3647685 - DNA, 25 bp, Homo sapien
tttattgaggcagactaaattgtgt

SEQ ID NO: 3647686 - DNA, 25 bp, Homo sapien
tgtctcttagctactcctaacctgg

SEQ ID NO: 3647687 - DNA, 25 bp, Homo sapien
tgtggacagctccattactccaaag

SEQ ID NO: 3647688 - DNA, 25 bp, Homo sapien
gactgttggattccctagatctagg

SEQ ID NO: 3647689 - DNA, 25 bp, Homo sapien
tggacgatatccctaattggtggaa

SEQ ID NO: 3647690 - DNA, 25 bp, Homo sapien
tagatctaggtagcagcactttcca

SEQ ID NO: 3647691 - DNA, 25 bp, Homo sapien
gaatgcacatgtacagtcatttgta

SEQ ID NO: 3647692 - DNA, 25 bp, Homo sapien
aatgcacatgtacagtcatttgtac

SEQ ID NO: 3647693 - DNA, 25 bp, Homo sapien
tgcacatgtacagtcatttgtactc

SEQ ID NO: 3647694 - DNA, 25 bp, Homo sapien
atgcacatgtacagtcatttgtact

SEQ ID NO: 3647695 - DNA, 25 bp, Homo sapien
ttgatattttctgaactgtctctgt

SEQ ID NO: 3647696 - DNA, 25 bp, Homo sapien
gatattttctgaactgtctctgtgc

SEQ ID NO: 3647697 - DNA, 25 bp, Homo sapien
tctgagcatccaatttgatattttc

SEQ ID NO: 3647698 - DNA, 25 bp, Homo sapien
ttctgaactgtctctgtgcttacat

SEQ ID NO: 3647699 - DNA, 25 bp, Homo sapien
tttatagaccgtctctgtgcttata

SEQ ID NO: 3647700 - DNA, 25 bp, Homo sapien
gattttttatagaccgtctctgtgc

SEQ ID NO: 3647701 - DNA, 25 bp, Homo sapien
tttttatagaccgtctctgtgctta

SEQ ID NO: 3647702 - DNA, 25 bp, Homo sapien
tatagaccgtctctgtgcttatagc

SEQ ID NO: 3647703 - DNA, 25 bp, Homo sapien
gtcactagataggaaaccaatggta

SEQ ID NO: 3647704 - DNA, 25 bp, Homo sapien
gaagcttcggtcagagtcactagat

SEQ ID NO: 3647705 - DNA, 25 bp, Homo sapien
tggtaaagcagtacccgattctagt

SEQ ID NO: 3647706 - DNA, 25 bp, Homo sapien
agttcacgtgtcctaaagagatgtc

SEQ ID NO: 3647707 - DNA, 25 bp, Homo sapien
catcaacacatgtagtcctttaggg

SEQ ID NO: 3647708 - DNA, 25 bp, Homo sapien
gcttgtatcatcaacacatgtagtc

SEQ ID NO: 3647709 - DNA, 25 bp, Homo sapien
tcaaagcttgtatcatcaacacatg

SEQ ID NO: 3647710 - DNA, 25 bp, Homo sapien
cctttaggggctcggctgctcagtg

SEQ ID NO: 3647711 - DNA, 25 bp, Homo sapien
ttcctacatttgataaatgctcctt

SEQ ID NO: 3647712 - DNA, 25 bp, Homo sapien
cctacatttgataaatgctccttcc

SEQ ID NO: 3647713 - DNA, 25 bp, Homo sapien
gccttcctacatttgataaatgctc

SEQ ID NO: 3647714 - DNA, 25 bp, Homo sapien
cagccttcctacatttgataaatgc

SEQ ID NO: 3647715 - DNA, 25 bp, Homo sapien
gcaggataatatgctccaacgttac

SEQ ID NO: 3647716 - DNA, 25 bp, Homo sapien
gaccctttaagacttagatgcagga

SEQ ID NO: 3647717 - DNA, 25 bp, Homo sapien
caacattaaaggcaagtttcaacct

SEQ ID NO: 3647718 - DNA, 25 bp, Homo sapien
cagtgctatggtttaaagacccttt

SEQ ID NO: 3647719 - DNA, 25 bp, Homo sapien
ccagttgacggaggagcaagcttaa

SEQ ID NO: 3647720 - DNA, 25 bp, Homo sapien
tggattttaaccttggcaacgtggc

SEQ ID NO: 3647721 - DNA, 25 bp, Homo sapien
gatcgaagtccacgcataagccaat

SEQ ID NO: 3647722 - DNA, 25 bp, Homo sapien
gcattaggtatgttcgtggatccca

SEQ ID NO: 3647723 - DNA, 25 bp, Homo sapien
cgccttcgacgtggcgttttcttcg

SEQ ID NO: 3647724 - DNA, 25 bp, Homo sapien
gggaaatttcccttggtgcgtgctc

SEQ ID NO: 3647725 - DNA, 25 bp, Homo sapien
tttcacttccggtaggagagtccca

SEQ ID NO: 3647726 - DNA, 25 bp, Homo sapien
tcccaaacggccagcggctgggaat

SEQ ID NO: 3647727 - DNA, 25 bp, Homo sapien
ccatcgccggaagctaggcgcgtga

SEQ ID NO: 3647728 - DNA, 25 bp, Homo sapien
aagctaggcgcgtgacgacggcgca

SEQ ID NO: 3647729 - DNA, 25 bp, Homo sapien
catcgccggaagctaggcgcgtgac

SEQ ID NO: 3647730 - DNA, 25 bp, Homo sapien
cacccatcgccggaagctaggcgcg

SEQ ID NO: 3647731 - DNA, 25 bp, Homo sapien
gagccgaggagaacccgcctgagat

SEQ ID NO: 3647732 - DNA, 25 bp, Homo sapien
gaccactcagaaggcgccgcgacga

SEQ ID NO: 3647733 - DNA, 25 bp, Homo sapien
agggcactgctaggccgagaagcct

SEQ ID NO: 3647734 - DNA, 25 bp, Homo sapien
agccctttgtttcgagcccactgag

SEQ ID NO: 3647735 - DNA, 25 bp, Homo sapien
gccgcggggtccctcggcagcaggt

SEQ ID NO: 3647736 - DNA, 25 bp, Homo sapien
cacgagcaccggggcgggccgcggg

SEQ ID NO: 3647737 - DNA, 25 bp, Homo sapien
cctcggcagcaggtgccgctgcgcc

SEQ ID NO: 3647738 - DNA, 25 bp, Homo sapien
gggtccctcggcagcaggtgccgct

SEQ ID NO: 3647739 - DNA, 25 bp, Homo sapien
gctccacagtttggcgaagatcagc

SEQ ID NO: 3647740 - DNA, 25 bp, Homo sapien
acagtttggcgaagatcagccccat

SEQ ID NO: 3647741 - DNA, 25 bp, Homo sapien
aggctccacagtttggcgaagatca

SEQ ID NO: 3647742 - DNA, 25 bp, Homo sapien
ccacagtttggcgaagatcagcccc

SEQ ID NO: 3647743 - DNA, 25 bp, Homo sapien
gcggcgggaccctctgcctcggatt

SEQ ID NO: 3647744 - DNA, 25 bp, Homo sapien
gggaccctctgcctcggattcgagc

SEQ ID NO: 3647745 - DNA, 25 bp, Homo sapien
tctccgaacgctctgtcccctgtct

SEQ ID NO: 3647746 - DNA, 25 bp, Homo sapien
tccggtgtccccatcggcggcggga

SEQ ID NO: 3647747 - DNA, 25 bp, Homo sapien
acactgagtttctgcccgccccctg

SEQ ID NO: 3647748 - DNA, 25 bp, Homo sapien
aacactgagtttctgcccgccccct

SEQ ID NO: 3647749 - DNA, 25 bp, Homo sapien
cactgagtttctgcccgccccctgg

SEQ ID NO: 3647750 - DNA, 25 bp, Homo sapien
ccctgcattatccagtcccactata

SEQ ID NO: 3647751 - DNA, 25 bp, Homo sapien
taaagaatggtggttttccctgcat

SEQ ID NO: 3647752 - DNA, 25 bp, Homo sapien
tatccagtcccactataattacttt

SEQ ID NO: 3647753 - DNA, 25 bp, Homo sapien
cagtcccactataattactttgtgt

SEQ ID NO: 3647754 - DNA, 25 bp, Homo sapien
aaaacagacaccgtaaaagctcttg

SEQ ID NO: 3647755 - DNA, 25 bp, Homo sapien
tcttgtaaatcttgagaatctgaag

SEQ ID NO: 3647756 - DNA, 25 bp, Homo sapien
tgaaaaacagacaccgtaaaagctc

SEQ ID NO: 3647757 - DNA, 25 bp, Homo sapien
cagacaccgtaaaagctcttgtaaa

SEQ ID NO: 3647758 - DNA, 25 bp, Homo sapien
tctgtatttgagtaatatgtgttcc

SEQ ID NO: 3647759 - DNA, 25 bp, Homo sapien
aggatgatcgcagagactcctgacc

SEQ ID NO: 3647760 - DNA, 25 bp, Homo sapien
tgtatttgagtaatatgtgttccag

SEQ ID NO: 3647761 - DNA, 25 bp, Homo sapien
tatgtgttccaggatgatcgcagag

SEQ ID NO: 3647762 - DNA, 25 bp, Homo sapien
tgtataagctaccctttaactatat

SEQ ID NO: 3647763 - DNA, 25 bp, Homo sapien
aatgtataagctaccctttaactat

SEQ ID NO: 3647764 - DNA, 25 bp, Homo sapien
ataagctaccctttaactatattat

SEQ ID NO: 3647765 - DNA, 25 bp, Homo sapien
ctaacttattctagtttcagaacat

SEQ ID NO: 3647766 - DNA, 25 bp, Homo sapien
ttcactaaaacttcaaagtactcca

SEQ ID NO: 3647767 - DNA, 25 bp, Homo sapien
tcactaaaacttcaaagtactccat

SEQ ID NO: 3647768 - DNA, 25 bp, Homo sapien
ctactcaagtaatctaagtactttc

SEQ ID NO: 3647769 - DNA, 25 bp, Homo sapien
aactactcaagtaatctaagtactt

SEQ ID NO: 3647770 - DNA, 25 bp, Homo sapien
taaaacatctactgctttttcacca

SEQ ID NO: 3647771 - DNA, 25 bp, Homo sapien
aaacatctactgctttttcaccata

SEQ ID NO: 3647772 - DNA, 25 bp, Homo sapien
gtcaatgctatcaacaacaagaatg

SEQ ID NO: 3647773 - DNA, 25 bp, Homo sapien
tccctgtcaatgctatcaacaacaa

SEQ ID NO: 3647774 - DNA, 25 bp, Homo sapien
aatagctagtcgttccctgtcaatg

SEQ ID NO: 3647775 - DNA, 25 bp, Homo sapien
aattcttcttttgtaatagctagtc

SEQ ID NO: 3647776 - DNA, 25 bp, Homo sapien
aagcaaaggcaacgtacagatactt

SEQ ID NO: 3647777 - DNA, 25 bp, Homo sapien
ttaatctttgcaaaaaagcaaaggc

SEQ ID NO: 3647778 - DNA, 25 bp, Homo sapien
catcagtttagtacataaagttgtg

SEQ ID NO: 3647779 - DNA, 25 bp, Homo sapien
aacgtacagatactttactacactg

SEQ ID NO: 3647780 - DNA, 25 bp, Homo sapien
catggatgatccttaattgaactaa

SEQ ID NO: 3647781 - DNA, 25 bp, Homo sapien
acagcaggattgaatgtgccatgga

SEQ ID NO: 3647782 - DNA, 25 bp, Homo sapien
gataaggactgcagccttccgtaaa

SEQ ID NO: 3647783 - DNA, 25 bp, Homo sapien
gatttcagctgctgtcatacaccct

SEQ ID NO: 3647784 - DNA, 25 bp, Homo sapien
aaatgtgaaatttctttcaagcttc

SEQ ID NO: 3647785 - DNA, 25 bp, Homo sapien
ttaagtccttgcagaaaatgtgaaa

SEQ ID NO: 3647786 - DNA, 25 bp, Homo sapien
cagaaaatgtgaaatttctttcaag

SEQ ID NO: 3647787 - DNA, 25 bp, Homo sapien
gaaaatgtgaaatttctttcaagct

SEQ ID NO: 3647788 - DNA, 25 bp, Homo sapien
ttatctcacaccaatccgggaggtc

SEQ ID NO: 3647789 - DNA, 25 bp, Homo sapien
acaccaatccgggaggtcatccact

SEQ ID NO: 3647790 - DNA, 25 bp, Homo sapien
cgggaggtcatccactctagacctt

SEQ ID NO: 3647791 - DNA, 25 bp, Homo sapien
aatccgggaggtcatccactctaga

SEQ ID NO: 3647792 - DNA, 25 bp, Homo sapien
taaaaggcaagtactcatgatgtgg

SEQ ID NO: 3647793 - DNA, 25 bp, Homo sapien
tagagcagtctctttcaagcaaaaa

SEQ ID NO: 3647794 - DNA, 25 bp, Homo sapien
tcaggacagacttagggaaactacc

SEQ ID NO: 3647795 - DNA, 25 bp, Homo sapien
caagggtgtgctccaactaaagata

SEQ ID NO: 3647796 - DNA, 25 bp, Homo sapien
gggtggcatcaaacggcaataaact

SEQ ID NO: 3647797 - DNA, 25 bp, Homo sapien
caactagacaattgagaaacggcca

SEQ ID NO: 3647798 - DNA, 25 bp, Homo sapien
aaaagtctgcctcataaagttggtc

SEQ ID NO: 3647799 - DNA, 25 bp, Homo sapien
taataaatactgagtacagggcctg

SEQ ID NO: 3647800 - DNA, 25 bp, Homo sapien
gcttaaggagtaacaacagtttgta

SEQ ID NO: 3647801 - DNA, 25 bp, Homo sapien
gctttcgcagaaagcctgaagctta

SEQ ID NO: 3647802 - DNA, 25 bp, Homo sapien
attcttagagctttcgcagaaagcc

SEQ ID NO: 3647803 - DNA, 25 bp, Homo sapien
ccagttgaccaagcatagtaatgaa

SEQ ID NO: 3647804 - DNA, 25 bp, Homo sapien
gttaagtaggcatgcaaacaactca

SEQ ID NO: 3647805 - DNA, 25 bp, Homo sapien
tgagtactggcaacctaaacttaac

SEQ ID NO: 3647806 - DNA, 25 bp, Homo sapien
gcaaacagcatcgttttacttgggt

SEQ ID NO: 3647807 - DNA, 25 bp, Homo sapien
tgagccaaaacctgtctaaaagatg

SEQ ID NO: 3647808 - DNA, 25 bp, Homo sapien
ttgatggcccctgaagcttaaagtt

SEQ ID NO: 3647809 - DNA, 25 bp, Homo sapien
tcttgatggcccctgaagcttaaag

SEQ ID NO: 3647810 - DNA, 25 bp, Homo sapien
gcccctgaagcttaaagttagaaga

SEQ ID NO: 3647811 - DNA, 25 bp, Homo sapien
gatggcccctgaagcttaaagttag

SEQ ID NO: 3647812 - DNA, 25 bp, Homo sapien
taaatctaaaattccgaaatcagtc

SEQ ID NO: 3647813 - DNA, 25 bp, Homo sapien
agacctcagatctcaatacgggtaa

SEQ ID NO: 3647814 - DNA, 25 bp, Homo sapien
aattccgaaatcagtctttgttact

SEQ ID NO: 3647815 - DNA, 25 bp, Homo sapien
cagatctcaatacgggtaaatctaa

SEQ ID NO: 3647816 - DNA, 25 bp, Homo sapien
gcacaaatgcccctccatagagctg

SEQ ID NO: 3647817 - DNA, 25 bp, Homo sapien
gcttccttcggagaaagtgtgcaaa

SEQ ID NO: 3647818 - DNA, 25 bp, Homo sapien
cagaactgacagctatatgtgccat

SEQ ID NO: 3647819 - DNA, 25 bp, Homo sapien
catagagctgctcacaacatgccag

SEQ ID NO: 3647820 - DNA, 25 bp, Homo sapien
aaaatatactcgcagaaactcagag

SEQ ID NO: 3647821 - DNA, 25 bp, Homo sapien
taattggatttagcccagatgcttt

SEQ ID NO: 3647822 - DNA, 25 bp, Homo sapien
cttgatgtttagctaaaagaactat

SEQ ID NO: 3647823 - DNA, 25 bp, Homo sapien
gcctgaagcatggtcttgatgttta

SEQ ID NO: 3647824 - DNA, 25 bp, Homo sapien
ggctccagatgttgtttcccctttc

SEQ ID NO: 3647825 - DNA, 25 bp, Homo sapien
tgccccgggttttcattactctctc

SEQ ID NO: 3647826 - DNA, 25 bp, Homo sapien
tctctaaagaaattgtcccacaact

SEQ ID NO: 3647827 - DNA, 25 bp, Homo sapien
ccaccacgatgacagggctccagat

SEQ ID NO: 3647828 - DNA, 25 bp, Homo sapien
tgaggagggcaacgtctggggtcgc

SEQ ID NO: 3647829 - DNA, 25 bp, Homo sapien
gaggagggcaacgtctggggtcgct

SEQ ID NO: 3647830 - DNA, 25 bp, Homo sapien
ggagggcaacgtctggggtcgctgt

SEQ ID NO: 3647831 - DNA, 25 bp, Homo sapien
agggcaacgtctggggtcgctgtgg

SEQ ID NO: 3647832 - DNA, 25 bp, Homo sapien
tactgcatgggacacccgccagccg

SEQ ID NO: 3647833 - DNA, 25 bp, Homo sapien
gccctactgcatgggacacccgcca

SEQ ID NO: 3647834 - DNA, 25 bp, Homo sapien
ctgcatgggacacccgccagccgca

SEQ ID NO: 3647835 - DNA, 25 bp, Homo sapien
cctactgcatgggacacccgccagc

SEQ ID NO: 3647836 - DNA, 25 bp, Homo sapien
tcagctcccaagactgaattccaag

SEQ ID NO: 3647837 - DNA, 25 bp, Homo sapien
gaattccaagacagtcgtgtggtcc

SEQ ID NO: 3647838 - DNA, 25 bp, Homo sapien
tcagtgagtggctttcagctcccaa

SEQ ID NO: 3647839 - DNA, 25 bp, Homo sapien
gacagtcgtgtggtcccatcttgat

SEQ ID NO: 3647840 - DNA, 25 bp, Homo sapien
tctgtgctgatagggcaccctcaag

SEQ ID NO: 3647841 - DNA, 25 bp, Homo sapien
ctggcagatctgtgctgatagggca

SEQ ID NO: 3647842 - DNA, 25 bp, Homo sapien
gctgatagggcaccctcaaggctca

SEQ ID NO: 3647843 - DNA, 25 bp, Homo sapien
gatctgtgctgatagggcaccctca

SEQ ID NO: 3647844 - DNA, 25 bp, Homo sapien
caagtggcgatggagtagcaaagca

SEQ ID NO: 3647845 - DNA, 25 bp, Homo sapien
gaatgacaagatgatgcaggcgctt

SEQ ID NO: 3647846 - DNA, 25 bp, Homo sapien
tcgactttctggaacgctctctggg

SEQ ID NO: 3647847 - DNA, 25 bp, Homo sapien
cggattcattgatccagggagccaa

SEQ ID NO: 3647848 - DNA, 25 bp, Homo sapien
gggctcttacactgattagaaaacc

SEQ ID NO: 3647849 - DNA, 25 bp, Homo sapien
agggtctcgggctcttacactgatt

SEQ ID NO: 3647850 - DNA, 25 bp, Homo sapien
tctcgggctcttacactgattagaa

SEQ ID NO: 3647851 - DNA, 25 bp, Homo sapien
ggtctcgggctcttacactgattag

SEQ ID NO: 3647852 - DNA, 25 bp, Homo sapien
ctttatagtcttgcaggcatatgca

SEQ ID NO: 3647853 - DNA, 25 bp, Homo sapien
tatcctttatagtcttgcaggcata

SEQ ID NO: 3647854 - DNA, 25 bp, Homo sapien
ttttggttatcctttatagtcttgc

SEQ ID NO: 3647855 - DNA, 25 bp, Homo sapien
ggttatcctttatagtcttgcaggc

SEQ ID NO: 3647856 - DNA, 25 bp, Homo sapien
acagcagttcttccgccagttagca

SEQ ID NO: 3647857 - DNA, 25 bp, Homo sapien
tctagagcagataatgtggcccttt

SEQ ID NO: 3647858 - DNA, 25 bp, Homo sapien
tcttcagacataatgaggaccccgg

SEQ ID NO: 3647859 - DNA, 25 bp, Homo sapien
catgatttggcaagctgccttgagg

SEQ ID NO: 3647860 - DNA, 25 bp, Homo sapien
ctgggcttcaggctcacggctgctg

SEQ ID NO: 3647861 - DNA, 25 bp, Homo sapien
caacgtgatgagtaacttgccactg

SEQ ID NO: 3647862 - DNA, 25 bp, Homo sapien
cggttgcacaacagcaatgggtatc

SEQ ID NO: 3647863 - DNA, 25 bp, Homo sapien
agttctcggccaactcagcactggg

SEQ ID NO: 3647864 - DNA, 25 bp, Homo sapien
aagccaccaaaatctgggcctattt

SEQ ID NO: 3647865 - DNA, 25 bp, Homo sapien
ccaaaatctgggcctatttccagcc

SEQ ID NO: 3647866 - DNA, 25 bp, Homo sapien
ccaccaaaatctgggcctatttcca

SEQ ID NO: 3647867 - DNA, 25 bp, Homo sapien
aaatctgggcctatttccagcccac

SEQ ID NO: 3647868 - DNA, 25 bp, Homo sapien
cacactgactgatgccaatacggct

SEQ ID NO: 3647869 - DNA, 25 bp, Homo sapien
ccagatttatatcatagaagcatgc

SEQ ID NO: 3647870 - DNA, 25 bp, Homo sapien
gctcacaaaagcttgatcatggtgc

SEQ ID NO: 3647871 - DNA, 25 bp, Homo sapien
tagccagcatcagggctcaaatcat

SEQ ID NO: 3647872 - DNA, 25 bp, Homo sapien
cagctcctgattgctctttggcaga

SEQ ID NO: 3647873 - DNA, 25 bp, Homo sapien
gcagataacagctcctgattgctct

SEQ ID NO: 3647874 - DNA, 25 bp, Homo sapien
taacagctcctgattgctctttggc

SEQ ID NO: 3647875 - DNA, 25 bp, Homo sapien
attttgggttgtcttgcacagctgc

SEQ ID NO: 3647876 - DNA, 25 bp, Homo sapien
ctaggaggaagagtaatttctgagg

SEQ ID NO: 3647877 - DNA, 25 bp, Homo sapien
aggaagagtaatttctgaggcctcg

SEQ ID NO: 3647878 - DNA, 25 bp, Homo sapien
ggaggaagagtaatttctgaggcct

SEQ ID NO: 3647879 - DNA, 25 bp, Homo sapien
aagagtaatttctgaggcctcgtac

SEQ ID NO: 3647880 - DNA, 25 bp, Homo sapien
agaggagccttggaactgcaggggt

SEQ ID NO: 3647881 - DNA, 25 bp, Homo sapien
ctttgccgtagtcttctccctggag

SEQ ID NO: 3647882 - DNA, 25 bp, Homo sapien
ttgccgtagtcttctccctggagag

SEQ ID NO: 3647883 - DNA, 25 bp, Homo sapien
tggagaggagccttggaactgcagg

SEQ ID NO: 3647884 - DNA, 25 bp, Homo sapien
aagatgttccatatagcatgagccc

SEQ ID NO: 3647885 - DNA, 25 bp, Homo sapien
catatagcatgagccccatgaccac

SEQ ID NO: 3647886 - DNA, 25 bp, Homo sapien
tgttccatatagcatgagccccatg

SEQ ID NO: 3647887 - DNA, 25 bp, Homo sapien
tagcatgagccccatgaccactttg

SEQ ID NO: 3647888 - DNA, 25 bp, Homo sapien
ttgctcaccatcctcagtggtcttc

SEQ ID NO: 3647889 - DNA, 25 bp, Homo sapien
ttggccacttcattgagatcttcaa

SEQ ID NO: 3647890 - DNA, 25 bp, Homo sapien
catgaatgttgaatagtttggccac

SEQ ID NO: 3647891 - DNA, 25 bp, Homo sapien
gccacttcattgagatcttcaagtt

SEQ ID NO: 3647892 - DNA, 25 bp, Homo sapien
gactcttctacaaaggttctctgac

SEQ ID NO: 3647893 - DNA, 25 bp, Homo sapien
gggaggagacttgagaattcactgt

SEQ ID NO: 3647894 - DNA, 25 bp, Homo sapien
cattttaattgtgtacagtgcctag

SEQ ID NO: 3647895 - DNA, 25 bp, Homo sapien
cctagcatggcatcttgcagaaaca

SEQ ID NO: 3647896 - DNA, 25 bp, Homo sapien
gtttgtgcgctgccttcaagttaac

SEQ ID NO: 3647897 - DNA, 25 bp, Homo sapien
tttgtgcgctgccttcaagttaaca

SEQ ID NO: 3647898 - DNA, 25 bp, Homo sapien
cgtttgtgcgctgccttcaagttaa

SEQ ID NO: 3647899 - DNA, 25 bp, Homo sapien
gttgtacagtaggtgacaacttcaa

SEQ ID NO: 3647900 - DNA, 25 bp, Homo sapien
caacaaatcctccaaaggagtgata

SEQ ID NO: 3647901 - DNA, 25 bp, Homo sapien
gtaggtgacaacttcaattgcctcc

SEQ ID NO: 3647902 - DNA, 25 bp, Homo sapien
agttaagcccaagttgctgatggcc

SEQ ID NO: 3647903 - DNA, 25 bp, Homo sapien
gactatgcaactgacttctggccaa

SEQ ID NO: 3647904 - DNA, 25 bp, Homo sapien
gatgctactctacttccagtcccgg

SEQ ID NO: 3647905 - DNA, 25 bp, Homo sapien
gaatggccatgtggatcagagctcc

SEQ ID NO: 3647906 - DNA, 25 bp, Homo sapien
ctacacggaagaattctgggaccct

SEQ ID NO: 3647907 - DNA, 25 bp, Homo sapien
ggttataatccaggctcagacactt

SEQ ID NO: 3647908 - DNA, 25 bp, Homo sapien
tcagacactttagatcaccaatttc

SEQ ID NO: 3647909 - DNA, 25 bp, Homo sapien
tttagatcaccaatttccccagggc

SEQ ID NO: 3647910 - DNA, 25 bp, Homo sapien
gggttataatccaggctcagacact

SEQ ID NO: 3647911 - DNA, 25 bp, Homo sapien
ggtgatcatcggctcacccttccac

SEQ ID NO: 3647912 - DNA, 25 bp, Homo sapien
ccttggtgatcatcggctcaccctt

SEQ ID NO: 3647913 - DNA, 25 bp, Homo sapien
ttggtgatcatcggctcacccttcc

SEQ ID NO: 3647914 - DNA, 25 bp, Homo sapien
tccttggtgatcatcggctcaccct

SEQ ID NO: 3647915 - DNA, 25 bp, Homo sapien
aagcatcatcaagttgattaatcat

SEQ ID NO: 3647916 - DNA, 25 bp, Homo sapien
tgcccagggtgaagcatcatcaagt

SEQ ID NO: 3647917 - DNA, 25 bp, Homo sapien
atgcccagggtgaagcatcatcaag

SEQ ID NO: 3647918 - DNA, 25 bp, Homo sapien
cagtggaatgagggatgcccagggt

SEQ ID NO: 3647919 - DNA, 25 bp, Homo sapien
tggtctataactggacctgcagcat

SEQ ID NO: 3647920 - DNA, 25 bp, Homo sapien
caagattggcttgatgcaaggctat

SEQ ID NO: 3647921 - DNA, 25 bp, Homo sapien
gatgcaaggctatcacatggtctct

SEQ ID NO: 3647922 - DNA, 25 bp, Homo sapien
tacaagaagctgatgcaagattggc

SEQ ID NO: 3647923 - DNA, 25 bp, Homo sapien
acgttgtaaaaggacttgtggccat

SEQ ID NO: 3647924 - DNA, 25 bp, Homo sapien
tctaaagctgtacttgtgctcaagc

SEQ ID NO: 3647925 - DNA, 25 bp, Homo sapien
taactgttctaaagctgtacttgtg

SEQ ID NO: 3647926 - DNA, 25 bp, Homo sapien
aaattgtgccccagtgaacgttgta

SEQ ID NO: 3647927 - DNA, 25 bp, Homo sapien
tccactatagaccttaaaacagcat

SEQ ID NO: 3647928 - DNA, 25 bp, Homo sapien
ttccactatagaccttaaaacagca

SEQ ID NO: 3647929 - DNA, 25 bp, Homo sapien
acttccactatagaccttaaaacag

SEQ ID NO: 3647930 - DNA, 25 bp, Homo sapien
tgaaacttccactatagaccttaaa

SEQ ID NO: 3647931 - DNA, 25 bp, Homo sapien
gcaccctatcctaaggtcatcactt

SEQ ID NO: 3647932 - DNA, 25 bp, Homo sapien
tggggggaaacttcatcacgccagc

SEQ ID NO: 3647933 - DNA, 25 bp, Homo sapien
ttcgatcagtaatgcaaattatctg

SEQ ID NO: 3647934 - DNA, 25 bp, Homo sapien
ccagtcgtggggagaatcagcaaaa

SEQ ID NO: 3647935 - DNA, 25 bp, Homo sapien
tacttttggctattggtgcaacatc

SEQ ID NO: 3647936 - DNA, 25 bp, Homo sapien
ttttattacttttggctattggtgc

SEQ ID NO: 3647937 - DNA, 25 bp, Homo sapien
tattacttttggctattggtgcaac

SEQ ID NO: 3647938 - DNA, 25 bp, Homo sapien
taatctgtctctatcacttactttt

SEQ ID NO: 3647939 - DNA, 25 bp, Homo sapien
tgagggaatttaaattctgtgtagt

SEQ ID NO: 3647940 - DNA, 25 bp, Homo sapien
tccagcactagcatcggtggctgct

SEQ ID NO: 3647941 - DNA, 25 bp, Homo sapien
caggtaaagttggaagatgatgcag

SEQ ID NO: 3647942 - DNA, 25 bp, Homo sapien
gccagaggtagattagttggcagtt

SEQ ID NO: 3647943 - DNA, 25 bp, Homo sapien
tctccagcactagcatcggtggctg

SEQ ID NO: 3647944 - DNA, 25 bp, Homo sapien
gactctcaccacttcgggcttgctg

SEQ ID NO: 3647945 - DNA, 25 bp, Homo sapien
cccatggcgtatattcttggaaaaa

SEQ ID NO: 3647946 - DNA, 25 bp, Homo sapien
gagtccaaaaaagtggcgtcctggc

SEQ ID NO: 3647947 - DNA, 25 bp, Homo sapien
tgcccacatagactgcagagtccaa

SEQ ID NO: 3647948 - DNA, 25 bp, Homo sapien
agattataatctgttacccataatt

SEQ ID NO: 3647949 - DNA, 25 bp, Homo sapien
gattataatctgttacccataattt

SEQ ID NO: 3647950 - DNA, 25 bp, Homo sapien
gtataaaagactcaggctctgagaa

SEQ ID NO: 3647951 - DNA, 25 bp, Homo sapien
gagtataaaagactcaggctctgag

SEQ ID NO: 3647952 - DNA, 25 bp, Homo sapien
agagtataaaagactcaggctctga

SEQ ID NO: 3647953 - DNA, 25 bp, Homo sapien
ctttgaaaggtttcaattctctcca

SEQ ID NO: 3647954 - DNA, 25 bp, Homo sapien
tttgaaaggtttcaattctctccat

SEQ ID NO: 3647955 - DNA, 25 bp, Homo sapien
caactttgaaaggtttcaattctct

SEQ ID NO: 3647956 - DNA, 25 bp, Homo sapien
ctttaagaagcagtatatctttaaa

SEQ ID NO: 3647957 - DNA, 25 bp, Homo sapien
gaagcagtatatctttaaaagctga

SEQ ID NO: 3647958 - DNA, 25 bp, Homo sapien
atctttaaaagctgatgaatgccca

SEQ ID NO: 3647959 - DNA, 25 bp, Homo sapien
tatctttaaaagctgatgaatgccc

SEQ ID NO: 3647960 - DNA, 25 bp, Homo sapien
acagaaacttttcaaaatctagcat

SEQ ID NO: 3647961 - DNA, 25 bp, Homo sapien
aacagaaacttttcaaaatctagca

SEQ ID NO: 3647962 - DNA, 25 bp, Homo sapien
caaacagaaacttttcaaaatctag

SEQ ID NO: 3647963 - DNA, 25 bp, Homo sapien
tagccaaacactttaactggtattc

SEQ ID NO: 3647964 - DNA, 25 bp, Homo sapien
gctctgtagctgagtttcactaccg

SEQ ID NO: 3647965 - DNA, 25 bp, Homo sapien
catgtttagccaaacactttaactg

SEQ ID NO: 3647966 - DNA, 25 bp, Homo sapien
cgttgatttcccctgggcatccttc

SEQ ID NO: 3647967 - DNA, 25 bp, Homo sapien
ttggctgctccccactagaactgag

SEQ ID NO: 3647968 - DNA, 25 bp, Homo sapien
ggctgctccccactagaactgagga

SEQ ID NO: 3647969 - DNA, 25 bp, Homo sapien
tccccactagaactgaggacaaggg

SEQ ID NO: 3647970 - DNA, 25 bp, Homo sapien
tgctccccactagaactgaggacaa

SEQ ID NO: 3647971 - DNA, 25 bp, Homo sapien
tcagcatgtttctggtactcacaac

SEQ ID NO: 3647972 - DNA, 25 bp, Homo sapien
tgcaaggctcaatgcttccctatgc

SEQ ID NO: 3647973 - DNA, 25 bp, Homo sapien
gattgttcctggactactctcacct

SEQ ID NO: 3647974 - DNA, 25 bp, Homo sapien
ttctgtccaattacccaagtaagga

SEQ ID NO: 3647975 - DNA, 25 bp, Homo sapien
ttgtttgtttgtctgtctatagccc

SEQ ID NO: 3647976 - DNA, 25 bp, Homo sapien
gtttgtttgtctgtctatagcccat

SEQ ID NO: 3647977 - DNA, 25 bp, Homo sapien
cttgcttgtttttgtcttcttttgt

SEQ ID NO: 3647978 - DNA, 25 bp, Homo sapien
ttttgtttgtttgtctgtctatagc

SEQ ID NO: 3647979 - DNA, 25 bp, Homo sapien
ggaagaagagcattacttggtattg

SEQ ID NO: 3647980 - DNA, 25 bp, Homo sapien
gaagaagagcattacttggtattgt

SEQ ID NO: 3647981 - DNA, 25 bp, Homo sapien
aaaagtttcattcatggggaatgcc

SEQ ID NO: 3647982 - DNA, 25 bp, Homo sapien
ttcattcatggggaatgccaacatt

SEQ ID NO: 3647983 - DNA, 25 bp, Homo sapien
acaggcaatccaaaggcaacaaaaa

SEQ ID NO: 3647984 - DNA, 25 bp, Homo sapien
aggcaatccaaaggcaacaaaaagt

SEQ ID NO: 3647985 - DNA, 25 bp, Homo sapien
gaggcaaggagactccattgtcaca

SEQ ID NO: 3647986 - DNA, 25 bp, Homo sapien
gactccattgtcacactgaaagctt

SEQ ID NO: 3647987 - DNA, 25 bp, Homo sapien
ggagactccattgtcacactgaaag

SEQ ID NO: 3647988 - DNA, 25 bp, Homo sapien
gcaaggagactccattgtcacactg

SEQ ID NO: 3647989 - DNA, 25 bp, Homo sapien
gccgttcatcactgctatccccaca

SEQ ID NO: 3647990 - DNA, 25 bp, Homo sapien
gacttttactcccaagcctgtggtg

SEQ ID NO: 3647991 - DNA, 25 bp, Homo sapien
catctactcctttctggccttcaag

SEQ ID NO: 3647992 - DNA, 25 bp, Homo sapien
aacagtcggaaattgagagggactt

SEQ ID NO: 3647993 - DNA, 25 bp, Homo sapien
ttctggccttcaagtttttccaaca

SEQ ID NO: 3647994 - DNA, 25 bp, Homo sapien
gccctgacatggctcttgaatccac

SEQ ID NO: 3647995 - DNA, 25 bp, Homo sapien
tgaatccaccatgccatcaaagcta

SEQ ID NO: 3647996 - DNA, 25 bp, Homo sapien
ctgacatggctcttgaatccaccat

SEQ ID NO: 3647997 - DNA, 25 bp, Homo sapien
ttgctagccctgacatggctcttga

SEQ ID NO: 3647998 - DNA, 25 bp, Homo sapien
ttcctgccgaggatcttgagaagca

SEQ ID NO: 3647999 - DNA, 25 bp, Homo sapien
caatttcggggatctgctgtccaca

SEQ ID NO: 3648000 - DNA, 25 bp, Homo sapien
agcttctttcttaattcctgccgag

SEQ ID NO: 3648001 - DNA, 25 bp, Homo sapien
ggcatgcaccggattcaagtttctt

SEQ ID NO: 3648002 - DNA, 25 bp, Homo sapien
gcaatggacttgcaaatggatttcc

SEQ ID NO: 3648003 - DNA, 25 bp, Homo sapien
tgaaatgatgattaccagacactgg

SEQ ID NO: 3648004 - DNA, 25 bp, Homo sapien
tataggcggcaataatgggaagata

SEQ ID NO: 3648005 - DNA, 25 bp, Homo sapien
caaagtttcggatagataagcagag

SEQ ID NO: 3648006 - DNA, 25 bp, Homo sapien
gaaactatccgctgtaataaaatct

SEQ ID NO: 3648007 - DNA, 25 bp, Homo sapien
tctgtcacaatgtagattacagcca

SEQ ID NO: 3648008 - DNA, 25 bp, Homo sapien
ttcaagtctgaaactatccgctgta

SEQ ID NO: 3648009 - DNA, 25 bp, Homo sapien
aaatctgtcacaatgtagattacag

SEQ ID NO: 3648010 - DNA, 25 bp, Homo sapien
taaatacagcgcctcatcattgaat

SEQ ID NO: 3648011 - DNA, 25 bp, Homo sapien
gcctcatcattgaatctgtgtttga

SEQ ID NO: 3648012 - DNA, 25 bp, Homo sapien
tctgtgtttgaggaaagtttagtgt

SEQ ID NO: 3648013 - DNA, 25 bp, Homo sapien
gttttcaatcacaataaagacattt

SEQ ID NO: 3648014 - DNA, 25 bp, Homo sapien
catgttgatcatttgttggaaggaa

SEQ ID NO: 3648015 - DNA, 25 bp, Homo sapien
catttgttggaaggaaaactctgct

SEQ ID NO: 3648016 - DNA, 25 bp, Homo sapien
aactctgcttcttaaacttgaggaa

SEQ ID NO: 3648017 - DNA, 25 bp, Homo sapien
tctggaaaccagtgagaggaagtga

SEQ ID NO: 3648018 - DNA, 25 bp, Homo sapien
ctcacttggcaggagaagtaataaa

SEQ ID NO: 3648019 - DNA, 25 bp, Homo sapien
cataaatgctgaataggacctccac

SEQ ID NO: 3648020 - DNA, 25 bp, Homo sapien
ggacctccacatgcagtttgaagcc

SEQ ID NO: 3648021 - DNA, 25 bp, Homo sapien
gtttgaagcccaaccattaatttgc

SEQ ID NO: 3648022 - DNA, 25 bp, Homo sapien
ccaagacaccgctaagaaaagatac

SEQ ID NO: 3648023 - DNA, 25 bp, Homo sapien
tgacattaggatgtggagcccgccc

SEQ ID NO: 3648024 - DNA, 25 bp, Homo sapien
gatactctggtatgattgatctgag

SEQ ID NO: 3648025 - DNA, 25 bp, Homo sapien
tgttgatggcagacattatcccacc

SEQ ID NO: 3648026 - DNA, 25 bp, Homo sapien
tttggatccatgctccatcctgagc

SEQ ID NO: 3648027 - DNA, 25 bp, Homo sapien
tggatccatgctccatcctgagctc

SEQ ID NO: 3648028 - DNA, 25 bp, Homo sapien
gcttttggatccatgctccatcctg

SEQ ID NO: 3648029 - DNA, 25 bp, Homo sapien
ctgcttttggatccatgctccatcc

SEQ ID NO: 3648030 - DNA, 25 bp, Homo sapien
atgacttcatcctgttcatacgttg

SEQ ID NO: 3648031 - DNA, 25 bp, Homo sapien
tgaaagatatatcatcaatagcaat

SEQ ID NO: 3648032 - DNA, 25 bp, Homo sapien
gcctgaactgaaagatatatcatca

SEQ ID NO: 3648033 - DNA, 25 bp, Homo sapien
tgacttcatcctgttcatacgttga

SEQ ID NO: 3648034 - DNA, 25 bp, Homo sapien
tcctgcccaaaatttgagatgtaca

SEQ ID NO: 3648035 - DNA, 25 bp, Homo sapien
agatgtacaggcctttaacggtcat

SEQ ID NO: 3648036 - DNA, 25 bp, Homo sapien
aatttgagatgtacaggcctttaac

SEQ ID NO: 3648037 - DNA, 25 bp, Homo sapien
cccaaaatttgagatgtacaggcct

SEQ ID NO: 3648038 - DNA, 25 bp, Homo sapien
tcagcattcaatgcttcttgacaca

SEQ ID NO: 3648039 - DNA, 25 bp, Homo sapien
ccgctcagcattcaatgcttcttga

SEQ ID NO: 3648040 - DNA, 25 bp, Homo sapien
tggatggcatagctcccgctcagca

SEQ ID NO: 3648041 - DNA, 25 bp, Homo sapien
gagatctgtatctggatggcatagc

SEQ ID NO: 3648042 - DNA, 25 bp, Homo sapien
tctcgcttttgtgcgcatccaggaa

SEQ ID NO: 3648043 - DNA, 25 bp, Homo sapien
aggaaatttggccagcagatgcttc

SEQ ID NO: 3648044 - DNA, 25 bp, Homo sapien
aggtgtggattcgaatgcagggatc

SEQ ID NO: 3648045 - DNA, 25 bp, Homo sapien
gaatgcagggatctctctcgctttt

SEQ ID NO: 3648046 - DNA, 25 bp, Homo sapien
taaatggttaagagtgaaaccatgc

SEQ ID NO: 3648047 - DNA, 25 bp, Homo sapien
ctgctgtctaaatggttaagagtga

SEQ ID NO: 3648048 - DNA, 25 bp, Homo sapien
agtgaaaccatgcttagcgcctacc

SEQ ID NO: 3648049 - DNA, 25 bp, Homo sapien
gcttagcgcctacccatacataata

SEQ ID NO: 3648050 - DNA, 25 bp, Homo sapien
cactgctttccattgcataatagaa

SEQ ID NO: 3648051 - DNA, 25 bp, Homo sapien
ctctcaggacactgctttccattgc

SEQ ID NO: 3648052 - DNA, 25 bp, Homo sapien
attgaagatgacagctcttgcccag

SEQ ID NO: 3648053 - DNA, 25 bp, Homo sapien
cataatagaattgaagatgacagct

SEQ ID NO: 3648054 - DNA, 25 bp, Homo sapien
taagccaagttcatagtacacagtg

SEQ ID NO: 3648055 - DNA, 25 bp, Homo sapien
ccagtctgatggcactagcaatgtt

SEQ ID NO: 3648056 - DNA, 25 bp, Homo sapien
aaaatatatctttgctccaccggtc

SEQ ID NO: 3648057 - DNA, 25 bp, Homo sapien
tccaccggtccaggatcaataatgc

SEQ ID NO: 3648058 - DNA, 25 bp, Homo sapien
aagacatcactcattacccgtattc

SEQ ID NO: 3648059 - DNA, 25 bp, Homo sapien
taatcttcacatttacatacatgct

SEQ ID NO: 3648060 - DNA, 25 bp, Homo sapien
tttgatttgaagagaaagacatcac

SEQ ID NO: 3648061 - DNA, 25 bp, Homo sapien
tcattacccgtattctaatcttcac

SEQ ID NO: 3648062 - DNA, 25 bp, Homo sapien
aatgtcttcagatcttctggtatta

SEQ ID NO: 3648063 - DNA, 25 bp, Homo sapien
gagttgatatgttgtatgtccaaaa

SEQ ID NO: 3648064 - DNA, 25 bp, Homo sapien
ttcagatcttctggtattaacacat

SEQ ID NO: 3648065 - DNA, 25 bp, Homo sapien
tgtcttcagatcttctggtattaac

SEQ ID NO: 3648066 - DNA, 25 bp, Homo sapien
tgtttccctggggcacagcatggtg

SEQ ID NO: 3648067 - DNA, 25 bp, Homo sapien
aatgcaatttgtttccctggggcac

SEQ ID NO: 3648068 - DNA, 25 bp, Homo sapien
caatttgtttccctggggcacagca

SEQ ID NO: 3648069 - DNA, 25 bp, Homo sapien
ttcataatgcaatttgtttccctgg

SEQ ID NO: 3648070 - DNA, 25 bp, Homo sapien
tggctcaaaagagtcccttcaaaaa

SEQ ID NO: 3648071 - DNA, 25 bp, Homo sapien
gacccagaggtgatcaagggcaata

SEQ ID NO: 3648072 - DNA, 25 bp, Homo sapien
atagacccagaggtgatcaagggca

SEQ ID NO: 3648073 - DNA, 25 bp, Homo sapien
gggcaataaaacttctctggctcaa

SEQ ID NO: 3648074 - DNA, 25 bp, Homo sapien
tgcagagcaaagctttctggattgg

SEQ ID NO: 3648075 - DNA, 25 bp, Homo sapien
cagagcaaagctttctggattgggt

SEQ ID NO: 3648076 - DNA, 25 bp, Homo sapien
ctgcagagcaaagctttctggattg

SEQ ID NO: 3648077 - DNA, 25 bp, Homo sapien
gcagagcaaagctttctggattggg

SEQ ID NO: 3648078 - DNA, 25 bp, Homo sapien
agtcctgccgagagtcacagacaga

SEQ ID NO: 3648079 - DNA, 25 bp, Homo sapien
ttcatcactctcatcggagcagtcc

SEQ ID NO: 3648080 - DNA, 25 bp, Homo sapien
gattctttggcgatgcactggccac

SEQ ID NO: 3648081 - DNA, 25 bp, Homo sapien
tggccactagtgcaagggaattcgt

SEQ ID NO: 3648082 - DNA, 25 bp, Homo sapien
tcagctgcaggaaagtggtgctctc

SEQ ID NO: 3648083 - DNA, 25 bp, Homo sapien
aatcctttcatcagcttccagtgtg

SEQ ID NO: 3648084 - DNA, 25 bp, Homo sapien
caaccgcagaaacccgactcaaagt

SEQ ID NO: 3648085 - DNA, 25 bp, Homo sapien
aacccgactcaaagtcacaggtgag

SEQ ID NO: 3648086 - DNA, 25 bp, Homo sapien
ggggagcgctgtgcctccaaataaa

SEQ ID NO: 3648087 - DNA, 25 bp, Homo sapien
caagcttggccaccccgggggagcg

SEQ ID NO: 3648088 - DNA, 25 bp, Homo sapien
aagaacaggacttccaagcttggcc

SEQ ID NO: 3648089 - DNA, 25 bp, Homo sapien
tgtaagaacaggacttccaagcttg

SEQ ID NO: 3648090 - DNA, 25 bp, Homo sapien
attccattgacctgtctctggtagt

SEQ ID NO: 3648091 - DNA, 25 bp, Homo sapien
gaatgttgagacaaatgataccaaa

SEQ ID NO: 3648092 - DNA, 25 bp, Homo sapien
tgaatgttgagacaaatgataccaa

SEQ ID NO: 3648093 - DNA, 25 bp, Homo sapien
gagatttgaatgttgagacaaatga

SEQ ID NO: 3648094 - DNA, 25 bp, Homo sapien
ctgagagatttgaatgttgagacaa

SEQ ID NO: 3648095 - DNA, 25 bp, Homo sapien
gagatcaatttttgcgtggctccac

SEQ ID NO: 3648096 - DNA, 25 bp, Homo sapien
ccatctagagacgttcttgtaaaaa

SEQ ID NO: 3648097 - DNA, 25 bp, Homo sapien
tgcttttgcaagtttccatctagag

SEQ ID NO: 3648098 - DNA, 25 bp, Homo sapien
gaaaaggtagagtagattctcccgc

SEQ ID NO: 3648099 - DNA, 25 bp, Homo sapien
ccttggtagtgatttataggaaatt

SEQ ID NO: 3648100 - DNA, 25 bp, Homo sapien
tcacattcctgggacacactgatgt

SEQ ID NO: 3648101 - DNA, 25 bp, Homo sapien
acttgctttgtgtactggtccttgg

SEQ ID NO: 3648102 - DNA, 25 bp, Homo sapien
cactgatgtcatctagagcaacggt

SEQ ID NO: 3648103 - DNA, 25 bp, Homo sapien
tcaaaattgagattaagagcataca

SEQ ID NO: 3648104 - DNA, 25 bp, Homo sapien
gagcatacaacaggctctctccctt

SEQ ID NO: 3648105 - DNA, 25 bp, Homo sapien
tgagattaagagcatacaacaggct

SEQ ID NO: 3648106 - DNA, 25 bp, Homo sapien
tctggcttcaaaattgagattaaga

SEQ ID NO: 3648107 - DNA, 25 bp, Homo sapien
cttcctggatgaaatacaacctgca

SEQ ID NO: 3648108 - DNA, 25 bp, Homo sapien
caattagtttcatgtgctccctttg

SEQ ID NO: 3648109 - DNA, 25 bp, Homo sapien
gaaaatcgcgtatcttcctggatga

SEQ ID NO: 3648110 - DNA, 25 bp, Homo sapien
gctccctttgggcactcagttggaa

SEQ ID NO: 3648111 - DNA, 25 bp, Homo sapien
acgcatcatgtggttgaactttgaa

SEQ ID NO: 3648112 - DNA, 25 bp, Homo sapien
ttctggtattagccacagaggcaag

SEQ ID NO: 3648113 - DNA, 25 bp, Homo sapien
gaactttgaacagttgaactccttc

SEQ ID NO: 3648114 - DNA, 25 bp, Homo sapien
ctcctaacgcatcatgtggttgaac

SEQ ID NO: 3648115 - DNA, 25 bp, Homo sapien
gagagctccgtatccagtcaaaatg

SEQ ID NO: 3648116 - DNA, 25 bp, Homo sapien
actatgatcccgaggtggagcctgg

SEQ ID NO: 3648117 - DNA, 25 bp, Homo sapien
gcttcaaaccaatcacagctgtttg

SEQ ID NO: 3648118 - DNA, 25 bp, Homo sapien
caaaatggtcaccactaattgcttc

SEQ ID NO: 3648119 - DNA, 25 bp, Homo sapien
tgaagcttagcaacttgccacaagc

SEQ ID NO: 3648120 - DNA, 25 bp, Homo sapien
cctgtctggctgaaagttgggctct

SEQ ID NO: 3648121 - DNA, 25 bp, Homo sapien
ggctctgaagcttagcaacttgcca

SEQ ID NO: 3648122 - DNA, 25 bp, Homo sapien
agaaggaaagtatgcatccaggtcc

SEQ ID NO: 3648123 - DNA, 25 bp, Homo sapien
gatgtcatcaatagctgagacccca

SEQ ID NO: 3648124 - DNA, 25 bp, Homo sapien
tatgcaagccctggtgtggcgacac

SEQ ID NO: 3648125 - DNA, 25 bp, Homo sapien
gaattttccatatgtagctgcagct

SEQ ID NO: 3648126 - DNA, 25 bp, Homo sapien
aaaggcgccctagctgaatggttgc

SEQ ID NO: 3648127 - DNA, 25 bp, Homo sapien
gatagtgtcctttagctgtgcccag

SEQ ID NO: 3648128 - DNA, 25 bp, Homo sapien
tcaaagttacactgcagctcaggtg

SEQ ID NO: 3648129 - DNA, 25 bp, Homo sapien
agctgtccccttgagtcactccaga

SEQ ID NO: 3648130 - DNA, 25 bp, Homo sapien
taagtgttggagttggaccctggct

SEQ ID NO: 3648131 - DNA, 25 bp, Homo sapien
tgtacattataaaatctattatcca

SEQ ID NO: 3648132 - DNA, 25 bp, Homo sapien
tcaaatgtacattataaaatctatt

SEQ ID NO: 3648133 - DNA, 25 bp, Homo sapien
acattataaaatctattatccatac

SEQ ID NO: 3648134 - DNA, 25 bp, Homo sapien
caaatgtacattataaaatctatta

SEQ ID NO: 3648135 - DNA, 25 bp, Homo sapien
ttgaggttcatgacgaaagtgttcc

SEQ ID NO: 3648136 - DNA, 25 bp, Homo sapien
ccacgtcgatctggctatgaagctg

SEQ ID NO: 3648137 - DNA, 25 bp, Homo sapien
cttggttagtcccacgtcgatctgg

SEQ ID NO: 3648138 - DNA, 25 bp, Homo sapien
tgacgaaagtgttccttggttagtc

SEQ ID NO: 3648139 - DNA, 25 bp, Homo sapien
ggataacaccaacggttacagagga

SEQ ID NO: 3648140 - DNA, 25 bp, Homo sapien
acaccaacggttacagaggaagctg

SEQ ID NO: 3648141 - DNA, 25 bp, Homo sapien
cagggataacaccaacggttacaga

SEQ ID NO: 3648142 - DNA, 25 bp, Homo sapien
cggttacagaggaagctgtcattac

SEQ ID NO: 3648143 - DNA, 25 bp, Homo sapien
gagactccaatatagagcatagctg

SEQ ID NO: 3648144 - DNA, 25 bp, Homo sapien
aatgttgcaaaactacgtgcctttt

SEQ ID NO: 3648145 - DNA, 25 bp, Homo sapien
taaagacttaccaaaaatgttgcaa

SEQ ID NO: 3648146 - DNA, 25 bp, Homo sapien
catgcattccccatacaggcctttt

SEQ ID NO: 3648147 - DNA, 25 bp, Homo sapien
tattgtgacttctcctctcttgatg

SEQ ID NO: 3648148 - DNA, 25 bp, Homo sapien
ctattgtgacttctcctctcttgat

SEQ ID NO: 3648149 - DNA, 25 bp, Homo sapien
attgtgacttctcctctcttgatgg

SEQ ID NO: 3648150 - DNA, 25 bp, Homo sapien
gattccaattcgatttctacctaca

SEQ ID NO: 3648151 - DNA, 25 bp, Homo sapien
atacagttttgccatgactgtcctc

SEQ ID NO: 3648152 - DNA, 25 bp, Homo sapien
atggcctagttcctggattccaatt

SEQ ID NO: 3648153 - DNA, 25 bp, Homo sapien
catttatacagttttgccatgactg

SEQ ID NO: 3648154 - DNA, 25 bp, Homo sapien
ctgccgcttgcccacaaagcctttt

SEQ ID NO: 3648155 - DNA, 25 bp, Homo sapien
gccgcttgcccacaaagccttttcc

SEQ ID NO: 3648156 - DNA, 25 bp, Homo sapien
gcttgcccacaaagccttttcccat

SEQ ID NO: 3648157 - DNA, 25 bp, Homo sapien
cgcttgcccacaaagccttttccca

SEQ ID NO: 3648158 - DNA, 25 bp, Homo sapien
tagagggtgcagtccataaatgaca

SEQ ID NO: 3648159 - DNA, 25 bp, Homo sapien
tgacagatcatcaatcgcaatatct

SEQ ID NO: 3648160 - DNA, 25 bp, Homo sapien
aatcgcaatatctccagtgaagcca

SEQ ID NO: 3648161 - DNA, 25 bp, Homo sapien
gtagagggtgcagtccataaatgac

SEQ ID NO: 3648162 - DNA, 25 bp, Homo sapien
gagctggtgctccgcagaccagtga

SEQ ID NO: 3648163 - DNA, 25 bp, Homo sapien
agctggtgctccgcagaccagtgag

SEQ ID NO: 3648164 - DNA, 25 bp, Homo sapien
gctggtgctccgcagaccagtgagg

SEQ ID NO: 3648165 - DNA, 25 bp, Homo sapien
ggagctggtgctccgcagaccagtg

SEQ ID NO: 3648166 - DNA, 25 bp, Homo sapien
tcttgcattgaagagaagagcacta

SEQ ID NO: 3648167 - DNA, 25 bp, Homo sapien
ttcttcttctggagctgaactttgc

SEQ ID NO: 3648168 - DNA, 25 bp, Homo sapien
gatggagttgcagctgatttcacag

SEQ ID NO: 3648169 - DNA, 25 bp, Homo sapien
gactctgtgatgtggaagtaaaata

SEQ ID NO: 3648170 - DNA, 25 bp, Homo sapien
caatccattgttgctcttccttcct

SEQ ID NO: 3648171 - DNA, 25 bp, Homo sapien
ctgcagataaattcattgtctgtgc

SEQ ID NO: 3648172 - DNA, 25 bp, Homo sapien
caatgcagtgaccatcagacctgca

SEQ ID NO: 3648173 - DNA, 25 bp, Homo sapien
ggaactgacgtttctggtggagttg

SEQ ID NO: 3648174 - DNA, 25 bp, Homo sapien
ggtggagttgggaggtctgctggca

SEQ ID NO: 3648175 - DNA, 25 bp, Homo sapien
aatgtactgggattggttgatacca

SEQ ID NO: 3648176 - DNA, 25 bp, Homo sapien
actgggattggttgataccatttac

SEQ ID NO: 3648177 - DNA, 25 bp, Homo sapien
gggattggttgataccatttacaca

SEQ ID NO: 3648178 - DNA, 25 bp, Homo sapien
ttggttgataccatttacacaggct

SEQ ID NO: 3648179 - DNA, 25 bp, Homo sapien
tgctgatcccgttcccaagccccca

SEQ ID NO: 3648180 - DNA, 25 bp, Homo sapien
gtgtatgatccactgatggcctgtg

SEQ ID NO: 3648181 - DNA, 25 bp, Homo sapien
tgtgtatgatccactgatggcctgt

SEQ ID NO: 3648182 - DNA, 25 bp, Homo sapien
gctgatcccgttcccaagcccccac

SEQ ID NO: 3648183 - DNA, 25 bp, Homo sapien
gcagaaggaggtcccacacagagca

SEQ ID NO: 3648184 - DNA, 25 bp, Homo sapien
tgcagaaggaggtcccacacagagc

SEQ ID NO: 3648185 - DNA, 25 bp, Homo sapien
gcagcagagacaccattagttttct

SEQ ID NO: 3648186 - DNA, 25 bp, Homo sapien
gcagcagctacagagtctgggggtt

SEQ ID NO: 3648187 - DNA, 25 bp, Homo sapien
tcaagccttccttggctgaggaatg

SEQ ID NO: 3648188 - DNA, 25 bp, Homo sapien
aagccttccttggctgaggaatgag

SEQ ID NO: 3648189 - DNA, 25 bp, Homo sapien
agccttccttggctgaggaatgagc

SEQ ID NO: 3648190 - DNA, 25 bp, Homo sapien
caagccttccttggctgaggaatga

SEQ ID NO: 3648191 - DNA, 25 bp, Homo sapien
ctgcagtagcatttcccagattctt

SEQ ID NO: 3648192 - DNA, 25 bp, Homo sapien
tccacagtatatttcaaatgtaccc

SEQ ID NO: 3648193 - DNA, 25 bp, Homo sapien
cacagtatatttcaaatgtaccctc

SEQ ID NO: 3648194 - DNA, 25 bp, Homo sapien
ccacagtatatttcaaatgtaccct

SEQ ID NO: 3648195 - DNA, 25 bp, Homo sapien
agagtttggaaacagctctggccaa

SEQ ID NO: 3648196 - DNA, 25 bp, Homo sapien
tggaaacagctctggccaaccccat

SEQ ID NO: 3648197 - DNA, 25 bp, Homo sapien
gactccccagagtttggaaacagct

SEQ ID NO: 3648198 - DNA, 25 bp, Homo sapien
gtttggaaacagctctggccaaccc

SEQ ID NO: 3648199 - DNA, 25 bp, Homo sapien
gttgtctacacagggtctagcagac

SEQ ID NO: 3648200 - DNA, 25 bp, Homo sapien
ttgttgtctacacagggtctagcag

SEQ ID NO: 3648201 - DNA, 25 bp, Homo sapien
tgttgtctacacagggtctagcaga

SEQ ID NO: 3648202 - DNA, 25 bp, Homo sapien
attttgttgtctacacagggtctag

SEQ ID NO: 3648203 - DNA, 25 bp, Homo sapien
caacggtggccccattcatatgtgt

SEQ ID NO: 3648204 - DNA, 25 bp, Homo sapien
taggagtgagaatgtcagccgtgtc

SEQ ID NO: 3648205 - DNA, 25 bp, Homo sapien
tatgtgtccagaacaccaaggtaca

SEQ ID NO: 3648206 - DNA, 25 bp, Homo sapien
ggtacattttggtcccgtgagtgaa

SEQ ID NO: 3648207 - DNA, 25 bp, Homo sapien
tgtccagtttgagcccacaatttag

SEQ ID NO: 3648208 - DNA, 25 bp, Homo sapien
tgcaccttgctgtccagtttgagcc

SEQ ID NO: 3648209 - DNA, 25 bp, Homo sapien
ccacaatttagaagtaacgttatct

SEQ ID NO: 3648210 - DNA, 25 bp, Homo sapien
ctgtgtatgtgaacgaatgcctaaa

SEQ ID NO: 3648211 - DNA, 25 bp, Homo sapien
ggaaggaaatatcatccactgctac

SEQ ID NO: 3648212 - DNA, 25 bp, Homo sapien
atgatcagtacactttctctctggg

SEQ ID NO: 3648213 - DNA, 25 bp, Homo sapien
cttgtctttggcaatgcagtgctta

SEQ ID NO: 3648214 - DNA, 25 bp, Homo sapien
taactgataccacgtttggctctga

SEQ ID NO: 3648215 - DNA, 25 bp, Homo sapien
aattcgaaatcacagcgcccactgg

SEQ ID NO: 3648216 - DNA, 25 bp, Homo sapien
atgtaatgaccagatgaatttccca

SEQ ID NO: 3648217 - DNA, 25 bp, Homo sapien
gctagctttcaggttccagtcaaag

SEQ ID NO: 3648218 - DNA, 25 bp, Homo sapien
tataactggacttgaaattctggca

SEQ ID NO: 3648219 - DNA, 25 bp, Homo sapien
tccgtatgtcaatttataaacttgc

SEQ ID NO: 3648220 - DNA, 25 bp, Homo sapien
ccccttcacatatccaaagttgaat

SEQ ID NO: 3648221 - DNA, 25 bp, Homo sapien
gccactctgttttccgtatgtcaat

SEQ ID NO: 3648222 - DNA, 25 bp, Homo sapien
ccttcacatatccaaagttgaataa

SEQ ID NO: 3648223 - DNA, 25 bp, Homo sapien
ggtgagtgccccaatgccatttcca

SEQ ID NO: 3648224 - DNA, 25 bp, Homo sapien
taaggtgagtgccccaatgccattt

SEQ ID NO: 3648225 - DNA, 25 bp, Homo sapien
aggtgagtgccccaatgccatttcc

SEQ ID NO: 3648226 - DNA, 25 bp, Homo sapien
gtgagtgccccaatgccatttccat

SEQ ID NO: 3648227 - DNA, 25 bp, Homo sapien
aaatttgagttggaagtcttcatca

SEQ ID NO: 3648228 - DNA, 25 bp, Homo sapien
gtgacagttcttctctccgccagaa

SEQ ID NO: 3648229 - DNA, 25 bp, Homo sapien
ttcccaactctaccttcaaatttga

SEQ ID NO: 3648230 - DNA, 25 bp, Homo sapien
gaaccttcgtttggtttgtgactga

SEQ ID NO: 3648231 - DNA, 25 bp, Homo sapien
tcttgcacggaatcatggagtgata

SEQ ID NO: 3648232 - DNA, 25 bp, Homo sapien
tcttcttgcacggaatcatggagtg

SEQ ID NO: 3648233 - DNA, 25 bp, Homo sapien
tgccagttcttcttgcacggaatca

SEQ ID NO: 3648234 - DNA, 25 bp, Homo sapien
cacggaatcatggagtgatagacaa

SEQ ID NO: 3648235 - DNA, 25 bp, Homo sapien
catatccagccaactcatcaacttc

SEQ ID NO: 3648236 - DNA, 25 bp, Homo sapien
tatgacattccctatagccaagtgg

SEQ ID NO: 3648237 - DNA, 25 bp, Homo sapien
tccacagttatctacgaagttacag

SEQ ID NO: 3648238 - DNA, 25 bp, Homo sapien
tgggagttttgccagccacaccagc

SEQ ID NO: 3648239 - DNA, 25 bp, Homo sapien
ttgatgagagccaacccctaaaacc

SEQ ID NO: 3648240 - DNA, 25 bp, Homo sapien
gtagcttccagatacatgaagtgcc

SEQ ID NO: 3648241 - DNA, 25 bp, Homo sapien
cagtagcttccagatacatgaagtg

SEQ ID NO: 3648242 - DNA, 25 bp, Homo sapien
cacatggtactcctgaagtgtgctt

SEQ ID NO: 3648243 - DNA, 25 bp, Homo sapien
tgcactggattctcgccacatggta

SEQ ID NO: 3648244 - DNA, 25 bp, Homo sapien
ttcagccacaggagatggcaccttt

SEQ ID NO: 3648245 - DNA, 25 bp, Homo sapien
aagtcaactccctcaggccacatgc

SEQ ID NO: 3648246 - DNA, 25 bp, Homo sapien
gggccttctctagccaagtcaactc

SEQ ID NO: 3648247 - DNA, 25 bp, Homo sapien
caaaccccatagatcatttcagcca

SEQ ID NO: 3648248 - DNA, 25 bp, Homo sapien
cattgtattgaattagtgagttaaa

SEQ ID NO: 3648249 - DNA, 25 bp, Homo sapien
tgttacatgcattcagctcactgag

SEQ ID NO: 3648250 - DNA, 25 bp, Homo sapien
gaattagtgagttaaaactacgctc

SEQ ID NO: 3648251 - DNA, 25 bp, Homo sapien
tacgctcaattaactgctgctcaag

SEQ ID NO: 3648252 - DNA, 25 bp, Homo sapien
ctggagacgtactaatttaatacag

SEQ ID NO: 3648253 - DNA, 25 bp, Homo sapien
gagacgtactaatttaatacaggag

SEQ ID NO: 3648254 - DNA, 25 bp, Homo sapien
gacgtactaatttaatacaggagaa

SEQ ID NO: 3648255 - DNA, 25 bp, Homo sapien
tggagacgtactaatttaatacagg

SEQ ID NO: 3648256 - DNA, 25 bp, Homo sapien
catggatagctgagggtggttaact

SEQ ID NO: 3648257 - DNA, 25 bp, Homo sapien
tattctaggtctagccctttctggg

SEQ ID NO: 3648258 - DNA, 25 bp, Homo sapien
tgaacagtcccagtacaaggtaaca

SEQ ID NO: 3648259 - DNA, 25 bp, Homo sapien
gagcacaggacaaggctgagattgt

SEQ ID NO: 3648260 - DNA, 25 bp, Homo sapien
gccatacttttgatagtcctttctc

SEQ ID NO: 3648261 - DNA, 25 bp, Homo sapien
taactttcctagcaggatgtcagcc

SEQ ID NO: 3648262 - DNA, 25 bp, Homo sapien
tgtcagccttttgccaatgattacc

SEQ ID NO: 3648263 - DNA, 25 bp, Homo sapien
caatgattaccagggttctgcttac

SEQ ID NO: 3648264 - DNA, 25 bp, Homo sapien
tgtctctgagcagttcacagagggg

SEQ ID NO: 3648265 - DNA, 25 bp, Homo sapien
tctctgagcagttcacagaggggtc

SEQ ID NO: 3648266 - DNA, 25 bp, Homo sapien
agtgtctctgagcagttcacagagg

SEQ ID NO: 3648267 - DNA, 25 bp, Homo sapien
cagtgtctctgagcagttcacagag

SEQ ID NO: 3648268 - DNA, 25 bp, Homo sapien
tgtcatttgagaagcattgcgtact

SEQ ID NO: 3648269 - DNA, 25 bp, Homo sapien
gcattgcagtgtataaagaaaccta

SEQ ID NO: 3648270 - DNA, 25 bp, Homo sapien
ttagctctaggtacaaaaggtgcat

SEQ ID NO: 3648271 - DNA, 25 bp, Homo sapien
gaaagaaactgctatgacctgggtc

SEQ ID NO: 3648272 - DNA, 25 bp, Homo sapien
tagttaacatagagatttccaagaa

SEQ ID NO: 3648273 - DNA, 25 bp, Homo sapien
tttgacagtgttggcagttagagta

SEQ ID NO: 3648274 - DNA, 25 bp, Homo sapien
tcttcctgacgttgtaccatattct

SEQ ID NO: 3648275 - DNA, 25 bp, Homo sapien
tgaactccttttacgtttgacagtg

SEQ ID NO: 3648276 - DNA, 25 bp, Homo sapien
cccaaggatggcttccacaattgtt

SEQ ID NO: 3648277 - DNA, 25 bp, Homo sapien
tctccccaaggatggcttccacaat

SEQ ID NO: 3648278 - DNA, 25 bp, Homo sapien
caaggatggcttccacaattgtttc

SEQ ID NO: 3648279 - DNA, 25 bp, Homo sapien
ccccaaggatggcttccacaattgt

SEQ ID NO: 3648280 - DNA, 25 bp, Homo sapien
tgtacaggtggggaccgaggctgat

SEQ ID NO: 3648281 - DNA, 25 bp, Homo sapien
ggtggggaccgaggctgatcattac

SEQ ID NO: 3648282 - DNA, 25 bp, Homo sapien
caggtggggaccgaggctgatcatt

SEQ ID NO: 3648283 - DNA, 25 bp, Homo sapien
cgttgtacaggtggggaccgaggct

SEQ ID NO: 3648284 - DNA, 25 bp, Homo sapien
cctcttgggcattctggctccggaa

SEQ ID NO: 3648285 - DNA, 25 bp, Homo sapien
tcctcttgggcattctggctccgga

SEQ ID NO: 3648286 - DNA, 25 bp, Homo sapien
cttgggcattctggctccggaaagg

SEQ ID NO: 3648287 - DNA, 25 bp, Homo sapien
attctggctccggaaaggcgcgtgc

SEQ ID NO: 3648288 - DNA, 25 bp, Homo sapien
gcgctgacctcctgttaggcttttc

SEQ ID NO: 3648289 - DNA, 25 bp, Homo sapien
ctgacaacagcgctgacctcctgtt

SEQ ID NO: 3648290 - DNA, 25 bp, Homo sapien
gcttttcctgtggcggccccttcag

SEQ ID NO: 3648291 - DNA, 25 bp, Homo sapien
aacagcgctgacctcctgttaggct

SEQ ID NO: 3648292 - DNA, 25 bp, Homo sapien
ctttttcggcttcgcctgcactttt

SEQ ID NO: 3648293 - DNA, 25 bp, Homo sapien
ttcggcttcgcctgcacttttgcag

SEQ ID NO: 3648294 - DNA, 25 bp, Homo sapien
tgcctttttcggcttcgcctgcact

SEQ ID NO: 3648295 - DNA, 25 bp, Homo sapien
gcttcgcctgcacttttgcaggagc

SEQ ID NO: 3648296 - DNA, 25 bp, Homo sapien
gctgctcgtaatgctcctggtgatc

SEQ ID NO: 3648297 - DNA, 25 bp, Homo sapien
gtgctgctcgtaatgctcctggtga

SEQ ID NO: 3648298 - DNA, 25 bp, Homo sapien
tgctgctcgtaatgctcctggtgat

SEQ ID NO: 3648299 - DNA, 25 bp, Homo sapien
cagcctgccaccaaatcctgctcat

SEQ ID NO: 3648300 - DNA, 25 bp, Homo sapien
ctggtaaagggtatgtgcagcctgc

SEQ ID NO: 3648301 - DNA, 25 bp, Homo sapien
atgcactgatgagatttcctggcca

SEQ ID NO: 3648302 - DNA, 25 bp, Homo sapien
tgcactgatgagatttcctggccat

SEQ ID NO: 3648303 - DNA, 25 bp, Homo sapien
tatagtcacaaagaaggtgggatgc

SEQ ID NO: 3648304 - DNA, 25 bp, Homo sapien
cagtgatttccggacaaagctcaga

SEQ ID NO: 3648305 - DNA, 25 bp, Homo sapien
gtgagcttcatcagacctatcagag

SEQ ID NO: 3648306 - DNA, 25 bp, Homo sapien
gatgcaatgcacttcttgtcccggc

SEQ ID NO: 3648307 - DNA, 25 bp, Homo sapien
ggcttggaaggtaaaagattcactg

SEQ ID NO: 3648308 - DNA, 25 bp, Homo sapien
gctgaaagattcactattagtctga

SEQ ID NO: 3648309 - DNA, 25 bp, Homo sapien
tttgaccttgggaaatgtgattatt

SEQ ID NO: 3648310 - DNA, 25 bp, Homo sapien
cttgggaaatgtgattattatggcc

SEQ ID NO: 3648311 - DNA, 25 bp, Homo sapien
ggcaggaattctgctgccaatggcc

SEQ ID NO: 3648312 - DNA, 25 bp, Homo sapien
tcctcagagtcttgagtaagactgc

SEQ ID NO: 3648313 - DNA, 25 bp, Homo sapien
cctgaacttgtttcaaaattgcagc

SEQ ID NO: 3648314 - DNA, 25 bp, Homo sapien
ggcccagtccaagtcatcctcagag

SEQ ID NO: 3648315 - DNA, 25 bp, Homo sapien
gcagactttaagatgagtgggtttc

SEQ ID NO: 3648316 - DNA, 25 bp, Homo sapien
tttgcaatagaagagactagccctc

SEQ ID NO: 3648317 - DNA, 25 bp, Homo sapien
taagaaatgcacactgaaattcaca

SEQ ID NO: 3648318 - DNA, 25 bp, Homo sapien
gtcagctctgggtctatttagtaat

SEQ ID NO: 3648319 - DNA, 25 bp, Homo sapien
attggaggaggccacattatgaagg

SEQ ID NO: 3648320 - DNA, 25 bp, Homo sapien
gattacaagcttactcctactttga

SEQ ID NO: 3648321 - DNA, 25 bp, Homo sapien
aagggcaatccactttactcaaagt

SEQ ID NO: 3648322 - DNA, 25 bp, Homo sapien
cacttgtgaagattatgctgatact

SEQ ID NO: 3648323 - DNA, 25 bp, Homo sapien
aagctacataaatgtcacccttgcc

SEQ ID NO: 3648324 - DNA, 25 bp, Homo sapien
caacttcgtcaatgtctccaaaaag

SEQ ID NO: 3648325 - DNA, 25 bp, Homo sapien
tgtagaccagagagtcgactgatgt

SEQ ID NO: 3648326 - DNA, 25 bp, Homo sapien
taaacagtattcatgtgtagaccag

SEQ ID NO: 3648327 - DNA, 25 bp, Homo sapien
tgacgtacaggaagtgctgaccact

SEQ ID NO: 3648328 - DNA, 25 bp, Homo sapien
gatcaatcatgtagaaccagaaccg

SEQ ID NO: 3648329 - DNA, 25 bp, Homo sapien
tccttggagccagatgagttgacgt

SEQ ID NO: 3648330 - DNA, 25 bp, Homo sapien
gaagtagtaattctggcaacggatc

SEQ ID NO: 3648331 - DNA, 25 bp, Homo sapien
tatatgggatgaagtgaagcagtgc

SEQ ID NO: 3648332 - DNA, 25 bp, Homo sapien
tatgcttaatcaaagtatatgggat

SEQ ID NO: 3648333 - DNA, 25 bp, Homo sapien
caaaggtcaacgaagttccaagaga

SEQ ID NO: 3648334 - DNA, 25 bp, Homo sapien
ggaaaattttacagcattgaatgca

SEQ ID NO: 3648335 - DNA, 25 bp, Homo sapien
cacaccaggatgtttagccccgatt

SEQ ID NO: 3648336 - DNA, 25 bp, Homo sapien
aacggactgttactggagagaggca

SEQ ID NO: 3648337 - DNA, 25 bp, Homo sapien
tcaaatgccaccttaaacggactgt

SEQ ID NO: 3648338 - DNA, 25 bp, Homo sapien
ggcacagagccatatgtccatcccg

SEQ ID NO: 3648339 - DNA, 25 bp, Homo sapien
aataggtagccacaggggcctttgc

SEQ ID NO: 3648340 - DNA, 25 bp, Homo sapien
gtctggaagataataggtagccaca

SEQ ID NO: 3648341 - DNA, 25 bp, Homo sapien
ataggtagccacaggggcctttgcc

SEQ ID NO: 3648342 - DNA, 25 bp, Homo sapien
acagtctggaagataataggtagcc

SEQ ID NO: 3648343 - DNA, 25 bp, Homo sapien
gtctgagccttaatggcttccaggg

SEQ ID NO: 3648344 - DNA, 25 bp, Homo sapien
tctgagccttaatggcttccagggc

SEQ ID NO: 3648345 - DNA, 25 bp, Homo sapien
agggccatggtgatgtgagtctgag

SEQ ID NO: 3648346 - DNA, 25 bp, Homo sapien
catggtgatgtgagtctgagcctta

SEQ ID NO: 3648347 - DNA, 25 bp, Homo sapien
acaaatgggtaactgtctctggcag

SEQ ID NO: 3648348 - DNA, 25 bp, Homo sapien
gttacaaatgggtaactgtctctgg

SEQ ID NO: 3648349 - DNA, 25 bp, Homo sapien
tacaaatgggtaactgtctctggca

SEQ ID NO: 3648350 - DNA, 25 bp, Homo sapien
ctgttacaaatgggtaactgtctct

SEQ ID NO: 3648351 - DNA, 25 bp, Homo sapien
ctgatattgtaggtgtttctttgcc

SEQ ID NO: 3648352 - DNA, 25 bp, Homo sapien
gttccagttcctgatattgtaggtg

SEQ ID NO: 3648353 - DNA, 25 bp, Homo sapien
cctcccacaagacgttaagtttcat

SEQ ID NO: 3648354 - DNA, 25 bp, Homo sapien
tgtttctttgccctcccacaagacg

SEQ ID NO: 3648355 - DNA, 25 bp, Homo sapien
tcttcattaaagtggcagtcgggca

SEQ ID NO: 3648356 - DNA, 25 bp, Homo sapien
tcgtctgtagagcacgggaactcca

SEQ ID NO: 3648357 - DNA, 25 bp, Homo sapien
tccatcacatttccctgagagaggg

SEQ ID NO: 3648358 - DNA, 25 bp, Homo sapien
tccatcgcatagcaggagggaaggt

SEQ ID NO: 3648359 - DNA, 25 bp, Homo sapien
gcatgccttcccttacacattgagt

SEQ ID NO: 3648360 - DNA, 25 bp, Homo sapien
cacattgagttagtgaaaataactc

SEQ ID NO: 3648361 - DNA, 25 bp, Homo sapien
aagcagcatgccttcccttacacat

SEQ ID NO: 3648362 - DNA, 25 bp, Homo sapien
gcagcatgccttcccttacacattg

SEQ ID NO: 3648363 - DNA, 25 bp, Homo sapien
ggtgccctactacatgttcaaaaaa

SEQ ID NO: 3648364 - DNA, 25 bp, Homo sapien
ctctagtggcaaactatagacatga

SEQ ID NO: 3648365 - DNA, 25 bp, Homo sapien
ttctggtgccctactacatgttcaa

SEQ ID NO: 3648366 - DNA, 25 bp, Homo sapien
tctggtgccctactacatgttcaaa

SEQ ID NO: 3648367 - DNA, 25 bp, Homo sapien
aaaaccatcacagcgctggtgggct

SEQ ID NO: 3648368 - DNA, 25 bp, Homo sapien
ctggtgggctgggatacagctgttg

SEQ ID NO: 3648369 - DNA, 25 bp, Homo sapien
agtcggcaaaaccatcacagcgctg

SEQ ID NO: 3648370 - DNA, 25 bp, Homo sapien
agctggaaatccatgcagtcggcaa

SEQ ID NO: 3648371 - DNA, 25 bp, Homo sapien
caggttaagttgctggttcatatca

SEQ ID NO: 3648372 - DNA, 25 bp, Homo sapien
taagttgctggttcatatcacaaga

SEQ ID NO: 3648373 - DNA, 25 bp, Homo sapien
tttcattgtgttgcaggttaagttg

SEQ ID NO: 3648374 - DNA, 25 bp, Homo sapien
tgttgcaggttaagttgctggttca

SEQ ID NO: 3648375 - DNA, 25 bp, Homo sapien
tttctccactacacaagtcccacca

SEQ ID NO: 3648376 - DNA, 25 bp, Homo sapien
tttttctccactacacaagtcccac

SEQ ID NO: 3648377 - DNA, 25 bp, Homo sapien
ttttctccactacacaagtcccacc

SEQ ID NO: 3648378 - DNA, 25 bp, Homo sapien
cattcagtagagtgcgttggccaca

SEQ ID NO: 3648379 - DNA, 25 bp, Homo sapien
catagttaaactcatgctggctgag

SEQ ID NO: 3648380 - DNA, 25 bp, Homo sapien
tcagccacctagcaacagcacaaaa

SEQ ID NO: 3648381 - DNA, 25 bp, Homo sapien
aagctgtgtaggatcagagcagagc

SEQ ID NO: 3648382 - DNA, 25 bp, Homo sapien
cagaacaatgccgagctgaagatct

SEQ ID NO: 3648383 - DNA, 25 bp, Homo sapien
gaagatctaagtctccatattccgc

SEQ ID NO: 3648384 - DNA, 25 bp, Homo sapien
ctaagtctccatattccgcaagcat

SEQ ID NO: 3648385 - DNA, 25 bp, Homo sapien
gccgagctgaagatctaagtctcca

SEQ ID NO: 3648386 - DNA, 25 bp, Homo sapien
ccttttgttgacaaattagcatgga

SEQ ID NO: 3648387 - DNA, 25 bp, Homo sapien
aaattagcatggatagttttgccat

SEQ ID NO: 3648388 - DNA, 25 bp, Homo sapien
caaattagcatggatagttttgcca

SEQ ID NO: 3648389 - DNA, 25 bp, Homo sapien
tccttttgttgacaaattagcatgg

SEQ ID NO: 3648390 - DNA, 25 bp, Homo sapien
gagcctgagctgaattgaaaggtgc

SEQ ID NO: 3648391 - DNA, 25 bp, Homo sapien
gaattgaaaggtgcttgagaactgg

SEQ ID NO: 3648392 - DNA, 25 bp, Homo sapien
gctgaattgaaaggtgcttgagaac

SEQ ID NO: 3648393 - DNA, 25 bp, Homo sapien
cctgagctgaattgaaaggtgcttg

SEQ ID NO: 3648394 - DNA, 25 bp, Homo sapien
tctcactcttagtagaaactgctgc

SEQ ID NO: 3648395 - DNA, 25 bp, Homo sapien
ggtttggaaaccactcctgatgcat

SEQ ID NO: 3648396 - DNA, 25 bp, Homo sapien
tgactgtcaggccaaaaggacacct

SEQ ID NO: 3648397 - DNA, 25 bp, Homo sapien
gcagtacactctcctgctgtcagga

SEQ ID NO: 3648398 - DNA, 25 bp, Homo sapien
ggcaaaatattattcgatccgtatc

SEQ ID NO: 3648399 - DNA, 25 bp, Homo sapien
tagtagcaactatgctcttagatcc

SEQ ID NO: 3648400 - DNA, 25 bp, Homo sapien
cattggtgcaatacattgatttagt

SEQ ID NO: 3648401 - DNA, 25 bp, Homo sapien
tattcgatccgtatctacattggtg

SEQ ID NO: 3648402 - DNA, 25 bp, Homo sapien
gaatactcgcaataatggatcatgg

SEQ ID NO: 3648403 - DNA, 25 bp, Homo sapien
gaatctgaataagaacagggaatac

SEQ ID NO: 3648404 - DNA, 25 bp, Homo sapien
aagataggtagttgggttcatttcg

SEQ ID NO: 3648405 - DNA, 25 bp, Homo sapien
tagctgctctaatgcagttatagaa

SEQ ID NO: 3648406 - DNA, 25 bp, Homo sapien
gttttcatggcttaccaattctgcc

SEQ ID NO: 3648407 - DNA, 25 bp, Homo sapien
aaggcaggctccgatcccattgtga

SEQ ID NO: 3648408 - DNA, 25 bp, Homo sapien
taaaaagtgactgccatagtttctg

SEQ ID NO: 3648409 - DNA, 25 bp, Homo sapien
cagggagctggatctaacaaaggca

SEQ ID NO: 3648410 - DNA, 25 bp, Homo sapien
tctggttgtggcttttccccgctga

SEQ ID NO: 3648411 - DNA, 25 bp, Homo sapien
ctggttgtggcttttccccgctgac

SEQ ID NO: 3648412 - DNA, 25 bp, Homo sapien
taaacttgatatggcatcgatttcc

SEQ ID NO: 3648413 - DNA, 25 bp, Homo sapien
tctgagcgtatgtgaagtctgtagc

SEQ ID NO: 3648414 - DNA, 25 bp, Homo sapien
ctgtagcaggaggattaaacttgat

SEQ ID NO: 3648415 - DNA, 25 bp, Homo sapien
tattctgagcgtatgtgaagtctgt

SEQ ID NO: 3648416 - DNA, 25 bp, Homo sapien
aagactgcaactgtgatgtgagtca

SEQ ID NO: 3648417 - DNA, 25 bp, Homo sapien
ggaatgctaatccaatacccaggag

SEQ ID NO: 3648418 - DNA, 25 bp, Homo sapien
tccaatacccaggagagtccatgta

SEQ ID NO: 3648419 - DNA, 25 bp, Homo sapien
gactgcaactgtgatgtgagtcatc

SEQ ID NO: 3648420 - DNA, 25 bp, Homo sapien
tggtacctttctgtttgcaagaaaa

SEQ ID NO: 3648421 - DNA, 25 bp, Homo sapien
cttattggtacctttctgtttgcaa

SEQ ID NO: 3648422 - DNA, 25 bp, Homo sapien
ttattggtacctttctgtttgcaag

SEQ ID NO: 3648423 - DNA, 25 bp, Homo sapien
tacctttctgtttgcaagaaaacac

SEQ ID NO: 3648424 - DNA, 25 bp, Homo sapien
cttggaacccatactaggaatgaga

SEQ ID NO: 3648425 - DNA, 25 bp, Homo sapien
gattggcagggtctctgagtcttgc

SEQ ID NO: 3648426 - DNA, 25 bp, Homo sapien
taatgggttgaaaagatccaggacc

SEQ ID NO: 3648427 - DNA, 25 bp, Homo sapien
catcaggcggttgtataatttgaca

SEQ ID NO: 3648428 - DNA, 25 bp, Homo sapien
cttgagtgcaacttgtaagaacttc

SEQ ID NO: 3648429 - DNA, 25 bp, Homo sapien
cacttctattaggtagcagagacca

SEQ ID NO: 3648430 - DNA, 25 bp, Homo sapien
cctaagagcaggtgtggatcaaatg

SEQ ID NO: 3648431 - DNA, 25 bp, Homo sapien
cagatattatcttggacctaaccca

SEQ ID NO: 3648432 - DNA, 25 bp, Homo sapien
tcccttcgtccagggtgtattcctc

SEQ ID NO: 3648433 - DNA, 25 bp, Homo sapien
cttcgtccagggtgtattcctccat

SEQ ID NO: 3648434 - DNA, 25 bp, Homo sapien
tgctcccttcgtccagggtgtattc

SEQ ID NO: 3648435 - DNA, 25 bp, Homo sapien
ctctgctcccttcgtccagggtgta

SEQ ID NO: 3648436 - DNA, 25 bp, Homo sapien
tcatttgactctgaacaaggaggtc

SEQ ID NO: 3648437 - DNA, 25 bp, Homo sapien
gaccttcaagtcatatatcaaggtg

SEQ ID NO: 3648438 - DNA, 25 bp, Homo sapien
tatcaaggtgcacctctcatttgac

SEQ ID NO: 3648439 - DNA, 25 bp, Homo sapien
gctggctcttcagtatccagtatga

SEQ ID NO: 3648440 - DNA, 25 bp, Homo sapien
ttttaagagccatctttgatttgcc

SEQ ID NO: 3648441 - DNA, 25 bp, Homo sapien
gattgcttgtacaagaaaacaatgc

SEQ ID NO: 3648442 - DNA, 25 bp, Homo sapien
gcctacaacacattcatctacactg

SEQ ID NO: 3648443 - DNA, 25 bp, Homo sapien
caatgcaacccagcaatgtcagaga

SEQ ID NO: 3648444 - DNA, 25 bp, Homo sapien
tcaagtggcagcccagagccgcttg

SEQ ID NO: 3648445 - DNA, 25 bp, Homo sapien
tggcagcccagagccgcttggcggc

SEQ ID NO: 3648446 - DNA, 25 bp, Homo sapien
aagtggcagcccagagccgcttggc

SEQ ID NO: 3648447 - DNA, 25 bp, Homo sapien
agtggcagcccagagccgcttggcg

SEQ ID NO: 3648448 - DNA, 25 bp, Homo sapien
tccatggccagtgagcattaacacc

SEQ ID NO: 3648449 - DNA, 25 bp, Homo sapien
tatacaattcaatgccattaattcc

SEQ ID NO: 3648450 - DNA, 25 bp, Homo sapien
ggagctataaatcacatgccataca

SEQ ID NO: 3648451 - DNA, 25 bp, Homo sapien
ggccagtgagcattaacaccccatt

SEQ ID NO: 3648452 - DNA, 25 bp, Homo sapien
cccgtaaactggattgacaaaggca

SEQ ID NO: 3648453 - DNA, 25 bp, Homo sapien
cgtaaactggattgacaaaggcaca

SEQ ID NO: 3648454 - DNA, 25 bp, Homo sapien
tcccgtaaactggattgacaaaggc

SEQ ID NO: 3648455 - DNA, 25 bp, Homo sapien
ttgacaaaggcacagttaccacttc

SEQ ID NO: 3648456 - DNA, 25 bp, Homo sapien
tcctgatgttgtgccatataatggg

SEQ ID NO: 3648457 - DNA, 25 bp, Homo sapien
tttgagatgatgtgacagggtctcc

SEQ ID NO: 3648458 - DNA, 25 bp, Homo sapien
gaagatgagtttctatcagattgtg

SEQ ID NO: 3648459 - DNA, 25 bp, Homo sapien
gtctcgatgctgctatttgagatga

SEQ ID NO: 3648460 - DNA, 25 bp, Homo sapien
tcacaaggtgcttcacagctactct

SEQ ID NO: 3648461 - DNA, 25 bp, Homo sapien
taagtgaagagttccagccaatcat

SEQ ID NO: 3648462 - DNA, 25 bp, Homo sapien
cagcggcagggggtataagtgaaga

SEQ ID NO: 3648463 - DNA, 25 bp, Homo sapien
cgtcatctgcttcacaaggtgcttc

SEQ ID NO: 3648464 - DNA, 25 bp, Homo sapien
tttggggctccttgtatgtcatgaa

SEQ ID NO: 3648465 - DNA, 25 bp, Homo sapien
gggctccttgtatgtcatgaattct

SEQ ID NO: 3648466 - DNA, 25 bp, Homo sapien
tgtatgtcatgaattctctcaatat

SEQ ID NO: 3648467 - DNA, 25 bp, Homo sapien
tatgtcatgaattctctcaatatcc

SEQ ID NO: 3648468 - DNA, 25 bp, Homo sapien
agagaataattatgaggctggcatc

SEQ ID NO: 3648469 - DNA, 25 bp, Homo sapien
tatgcttgaaaaaactccagtactg

SEQ ID NO: 3648470 - DNA, 25 bp, Homo sapien
cttgtatgcttgaaaaaactccagt

SEQ ID NO: 3648471 - DNA, 25 bp, Homo sapien
ggctggcatctagaaggtagatgtc

SEQ ID NO: 3648472 - DNA, 25 bp, Homo sapien
cttgtgtggccattcatacaagccc

SEQ ID NO: 3648473 - DNA, 25 bp, Homo sapien
cctcttcatggatacgtcgatttca

SEQ ID NO: 3648474 - DNA, 25 bp, Homo sapien
ggatacgtcgatttcattgattaaa

SEQ ID NO: 3648475 - DNA, 25 bp, Homo sapien
ccttgtgtggccattcatacaagcc

SEQ ID NO: 3648476 - DNA, 25 bp, Homo sapien
aataagagcattttaacctctattg

SEQ ID NO: 3648477 - DNA, 25 bp, Homo sapien
ataagagcattttaacctctattgt

SEQ ID NO: 3648478 - DNA, 25 bp, Homo sapien
gaaataagagcattttaacctctat

SEQ ID NO: 3648479 - DNA, 25 bp, Homo sapien
tagaaataagagcattttaacctct

SEQ ID NO: 3648480 - DNA, 25 bp, Homo sapien
acctacatttgtgaggtatgggccc

SEQ ID NO: 3648481 - DNA, 25 bp, Homo sapien
taacctacatttgtgaggtatgggc

SEQ ID NO: 3648482 - DNA, 25 bp, Homo sapien
ggaagggtgtaacctacatttgtga

SEQ ID NO: 3648483 - DNA, 25 bp, Homo sapien
tacatttgtgaggtatgggcccgat

SEQ ID NO: 3648484 - DNA, 25 bp, Homo sapien
gaaggagaccacagaactccctcca

SEQ ID NO: 3648485 - DNA, 25 bp, Homo sapien
cagccccgagggccaagaaggagac

SEQ ID NO: 3648486 - DNA, 25 bp, Homo sapien
acacacacaggccagaaggagaccc

SEQ ID NO: 3648487 - DNA, 25 bp, Homo sapien
aggagacccagccccgagggccaag

SEQ ID NO: 3648488 - DNA, 25 bp, Homo sapien
ccgggagctcagctgaaaatccatg

SEQ ID NO: 3648489 - DNA, 25 bp, Homo sapien
gcgatgtagaagacttaattaaatc

SEQ ID NO: 3648490 - DNA, 25 bp, Homo sapien
cttgtccatataccgggagctcagc

SEQ ID NO: 3648491 - DNA, 25 bp, Homo sapien
taaatcactggaataggggcagcaa

SEQ ID NO: 3648492 - DNA, 25 bp, Homo sapien
agctcaagttcacttcctctgagag

SEQ ID NO: 3648493 - DNA, 25 bp, Homo sapien
ctggagacaactctacattggtcaa

SEQ ID NO: 3648494 - DNA, 25 bp, Homo sapien
cctgcctggagacaactctacattg

SEQ ID NO: 3648495 - DNA, 25 bp, Homo sapien
ggtcaaatgccagctcaagttcact

SEQ ID NO: 3648496 - DNA, 25 bp, Homo sapien
ctgctggaccaatcactgtgaggct

SEQ ID NO: 3648497 - DNA, 25 bp, Homo sapien
tgaggctaggtgatgtgagatgcat

SEQ ID NO: 3648498 - DNA, 25 bp, Homo sapien
ggctgagagataagaccttgaggct

SEQ ID NO: 3648499 - DNA, 25 bp, Homo sapien
gagataagaccttgaggctaggtga

SEQ ID NO: 3648500 - DNA, 25 bp, Homo sapien
gaatcagtcgccaaaattgctttct

SEQ ID NO: 3648501 - DNA, 25 bp, Homo sapien
gaagaaagaatcagtcgccaaaatt

SEQ ID NO: 3648502 - DNA, 25 bp, Homo sapien
ttcctggtctaagcgggagtcttcc

SEQ ID NO: 3648503 - DNA, 25 bp, Homo sapien
cacttcctggtctaagcgggagtct

SEQ ID NO: 3648504 - DNA, 25 bp, Homo sapien
tcctatgtttctagtttcaattgaa

SEQ ID NO: 3648505 - DNA, 25 bp, Homo sapien
aaatcccaaatcactgacacctcta

SEQ ID NO: 3648506 - DNA, 25 bp, Homo sapien
ttactctatagtgtcatatggaagc

SEQ ID NO: 3648507 - DNA, 25 bp, Homo sapien
gacccgagatctagattttacttat

SEQ ID NO: 3648508 - DNA, 25 bp, Homo sapien
tggccacttgactcggtatctgcat

SEQ ID NO: 3648509 - DNA, 25 bp, Homo sapien
gacttgtgtagccaattttataaac

SEQ ID NO: 3648510 - DNA, 25 bp, Homo sapien
tgtgtagccaattttataaactcta

SEQ ID NO: 3648511 - DNA, 25 bp, Homo sapien
attagatccaagattaataatggcc

SEQ ID NO: 3648512 - DNA, 25 bp, Homo sapien
gtaaatattccataacctctaaatc

SEQ ID NO: 3648513 - DNA, 25 bp, Homo sapien
tcttgtaaatattccataacctcta

SEQ ID NO: 3648514 - DNA, 25 bp, Homo sapien
catcttgtaaatattccataacctc

SEQ ID NO: 3648515 - DNA, 25 bp, Homo sapien
tacatcttgtaaatattccataacc

SEQ ID NO: 3648516 - DNA, 25 bp, Homo sapien
ggcacatggaaaagttctcaagcga

SEQ ID NO: 3648517 - DNA, 25 bp, Homo sapien
ggaaaatgggcaagtgctcagcaag

SEQ ID NO: 3648518 - DNA, 25 bp, Homo sapien
tggtggaaatatctaaactgcagga

SEQ ID NO: 3648519 - DNA, 25 bp, Homo sapien
caagcgattattgctttggacacag

SEQ ID NO: 3648520 - DNA, 25 bp, Homo sapien
ctgaggagtcgcggccaacagatta

SEQ ID NO: 3648521 - DNA, 25 bp, Homo sapien
gagtcgcggccaacagattaagccg

SEQ ID NO: 3648522 - DNA, 25 bp, Homo sapien
gtcgcggccaacagattaagccggg

SEQ ID NO: 3648523 - DNA, 25 bp, Homo sapien
aggagtcgcggccaacagattaagc

SEQ ID NO: 3648524 - DNA, 25 bp, Homo sapien
tcctccctgaaaccggcagcccgca

SEQ ID NO: 3648525 - DNA, 25 bp, Homo sapien
gcacagacctgtccaatggctgcac

SEQ ID NO: 3648526 - DNA, 25 bp, Homo sapien
cttcctccctgaaaccggcagcccg

SEQ ID NO: 3648527 - DNA, 25 bp, Homo sapien
agacctgtccaatggctgcactttc

SEQ ID NO: 3648528 - DNA, 25 bp, Homo sapien
ggaggcgctgccgtcgccacgctcc

SEQ ID NO: 3648529 - DNA, 25 bp, Homo sapien
gttcctccgggctcaggaggaggtg

SEQ ID NO: 3648530 - DNA, 25 bp, Homo sapien
tcacgctggaacctatcgggagagg

SEQ ID NO: 3648531 - DNA, 25 bp, Homo sapien
gagagggttcctccgggctcaggag

SEQ ID NO: 3648532 - DNA, 25 bp, Homo sapien
tctgaggtccgaagccaggaaaaaa

SEQ ID NO: 3648533 - DNA, 25 bp, Homo sapien
ggaaggttagggctgcagcagtctg

SEQ ID NO: 3648534 - DNA, 25 bp, Homo sapien
agtctgaggtccgaagccaggaaaa

SEQ ID NO: 3648535 - DNA, 25 bp, Homo sapien
ctgggaaggttagggctgcagcagt

SEQ ID NO: 3648536 - DNA, 25 bp, Homo sapien
ttttcttcgcccgacgcagggcgcg

SEQ ID NO: 3648537 - DNA, 25 bp, Homo sapien
tcctttctcgcagccggaggaatgg

SEQ ID NO: 3648538 - DNA, 25 bp, Homo sapien
ttcttttcttcgcccgacgcagggc

SEQ ID NO: 3648539 - DNA, 25 bp, Homo sapien
gcagggcgcgcgtcctttctcgcag

SEQ ID NO: 3648540 - DNA, 25 bp, Homo sapien
ctagggatggccccggcaggaggtt

SEQ ID NO: 3648541 - DNA, 25 bp, Homo sapien
aaacgctgcggatcggtctcggtag

SEQ ID NO: 3648542 - DNA, 25 bp, Homo sapien
cgaggctcgcaaactgtcggttcca

SEQ ID NO: 3648543 - DNA, 25 bp, Homo sapien
tgtcgctgcgatttcacagtaggga

SEQ ID NO: 3648544 - DNA, 25 bp, Homo sapien
agcgatgcgctccactgggttcaaa

SEQ ID NO: 3648545 - DNA, 25 bp, Homo sapien
gaactgaaactggtccgtgaagaag

SEQ ID NO: 3648546 - DNA, 25 bp, Homo sapien
tttcccatcggcgaactgaaactgg

SEQ ID NO: 3648547 - DNA, 25 bp, Homo sapien
gaagtggcaaagtaacataactcct

SEQ ID NO: 3648548 - DNA, 25 bp, Homo sapien
ataactcctgcagcggccaggtcgg

SEQ ID NO: 3648549 - DNA, 25 bp, Homo sapien
gatgtatccacggaagaagctttgc

SEQ ID NO: 3648550 - DNA, 25 bp, Homo sapien
cccataccacacacgcttagtttaa

SEQ ID NO: 3648551 - DNA, 25 bp, Homo sapien
tagtttaaccagcagcgaggaagga

SEQ ID NO: 3648552 - DNA, 25 bp, Homo sapien
gctactttggggagacagtaccacc

SEQ ID NO: 3648553 - DNA, 25 bp, Homo sapien
ttccagcgcccgcttggcccaggtc

SEQ ID NO: 3648554 - DNA, 25 bp, Homo sapien
ccaggtcactagacggagctagtgg

SEQ ID NO: 3648555 - DNA, 25 bp, Homo sapien
ctggcaggcggaggacaatgggagc

SEQ ID NO: 3648556 - DNA, 25 bp, Homo sapien
gggtaggtctccagaggcgagcccg

SEQ ID NO: 3648557 - DNA, 25 bp, Homo sapien
tctgcgcgttcaggcctgtctgtga

SEQ ID NO: 3648558 - DNA, 25 bp, Homo sapien
cagccactaagaggatgcggaggtt

SEQ ID NO: 3648559 - DNA, 25 bp, Homo sapien
gcactccaaggaactctctgcgcgt

SEQ ID NO: 3648560 - DNA, 25 bp, Homo sapien
aggacagccactaagaggatgcgga

SEQ ID NO: 3648561 - DNA, 25 bp, Homo sapien
cggggcgcaactccccgcaggacgc

SEQ ID NO: 3648562 - DNA, 25 bp, Homo sapien
gaaatggggagtaggcacccagttc

SEQ ID NO: 3648563 - DNA, 25 bp, Homo sapien
ttcgcggtgggcagggttccaggag

SEQ ID NO: 3648564 - DNA, 25 bp, Homo sapien
ggagtaggcacccagttcgcggtgg

SEQ ID NO: 3648565 - DNA, 25 bp, Homo sapien
caatttctgccaagatctctttctg

SEQ ID NO: 3648566 - DNA, 25 bp, Homo sapien
tcaccaatttctgccaagatctctt

SEQ ID NO: 3648567 - DNA, 25 bp, Homo sapien
tctgccaagatctctttctgcctgt

SEQ ID NO: 3648568 - DNA, 25 bp, Homo sapien
ttctgccaagatctctttctgcctg

SEQ ID NO: 3648569 - DNA, 25 bp, Homo sapien
gcgcccggccggacacatattttct

SEQ ID NO: 3648570 - DNA, 25 bp, Homo sapien
ccggccggacacatattttctacat

SEQ ID NO: 3648571 - DNA, 25 bp, Homo sapien
tttctacatactctgtgagtatctg

SEQ ID NO: 3648572 - DNA, 25 bp, Homo sapien
tctgatgcttacagtgaagaaacct

SEQ ID NO: 3648573 - DNA, 25 bp, Homo sapien
ccttttgtggagagtgtcacttgag

SEQ ID NO: 3648574 - DNA, 25 bp, Homo sapien
gacaacacgtccttttgtggagagt

SEQ ID NO: 3648575 - DNA, 25 bp, Homo sapien
cacgtccttttgtggagagtgtcac

SEQ ID NO: 3648576 - DNA, 25 bp, Homo sapien
aattctaagacaacacgtccttttg

SEQ ID NO: 3648577 - DNA, 25 bp, Homo sapien
cctcgaacaacatggattctaagga

SEQ ID NO: 3648578 - DNA, 25 bp, Homo sapien
gaactgagtaataagattccagaca

SEQ ID NO: 3648579 - DNA, 25 bp, Homo sapien
caaactcttaacattctctccatat

SEQ ID NO: 3648580 - DNA, 25 bp, Homo sapien
cttacctacaggacgagacctcgaa

SEQ ID NO: 3648581 - DNA, 25 bp, Homo sapien
gaaaatatgatacctatacactagg

SEQ ID NO: 3648582 - DNA, 25 bp, Homo sapien
caagatagacctttgtgggctattc

SEQ ID NO: 3648583 - DNA, 25 bp, Homo sapien
aaagctctgggtgtatatgcagtaa

SEQ ID NO: 3648584 - DNA, 25 bp, Homo sapien
tacatgctaggtgctatgtctgaag

SEQ ID NO: 3648585 - DNA, 25 bp, Homo sapien
tagaaccatttcgtagccccagact

SEQ ID NO: 3648586 - DNA, 25 bp, Homo sapien
taattcccgatctccttattggcga

SEQ ID NO: 3648587 - DNA, 25 bp, Homo sapien
gagacagtgatcctaacatggtttc

SEQ ID NO: 3648588 - DNA, 25 bp, Homo sapien
gcaagggactattttaatcaccaca

SEQ ID NO: 3648589 - DNA, 25 bp, Homo sapien
tacttcaacctggtgaggaatgtct

SEQ ID NO: 3648590 - DNA, 25 bp, Homo sapien
gataacctactgataagaagggctt

SEQ ID NO: 3648591 - DNA, 25 bp, Homo sapien
gaaacaaccgtatgatctatcctga

SEQ ID NO: 3648592 - DNA, 25 bp, Homo sapien
ttcacctcgcaagcaatacttggag

SEQ ID NO: 3648593 - DNA, 25 bp, Homo sapien
gacagtgaccttttataggacctca

SEQ ID NO: 3648594 - DNA, 25 bp, Homo sapien
agcaagaccctcctctatttgtgag

SEQ ID NO: 3648595 - DNA, 25 bp, Homo sapien
taggacctcaacatcgcattagaaa

SEQ ID NO: 3648596 - DNA, 25 bp, Homo sapien
ttggacaggtgtattggctcttgcc

SEQ ID NO: 3648597 - DNA, 25 bp, Homo sapien
caggcccactagtatggcatgccaa

SEQ ID NO: 3648598 - DNA, 25 bp, Homo sapien
taaatagcctccatagatagagacc

SEQ ID NO: 3648599 - DNA, 25 bp, Homo sapien
gaagtgaaaggttggactcaagcaa

SEQ ID NO: 3648600 - DNA, 25 bp, Homo sapien
gaaacagctttaaatcaggcccact

SEQ ID NO: 3648601 - DNA, 25 bp, Homo sapien
ggaaggtatcacatcaataacgcag

SEQ ID NO: 3648602 - DNA, 25 bp, Homo sapien
tcataacccatcagtaagacttgac

SEQ ID NO: 3648603 - DNA, 25 bp, Homo sapien
ccatgcagggtttattatggacaaa

SEQ ID NO: 3648604 - DNA, 25 bp, Homo sapien
aaacagctttcctgccactaacaga

SEQ ID NO: 3648605 - DNA, 25 bp, Homo sapien
caattatgtcagtgaagtcaggcag

SEQ ID NO: 3648606 - DNA, 25 bp, Homo sapien
taatgctgctagagatggccgtact

SEQ ID NO: 3648607 - DNA, 25 bp, Homo sapien
gctaaggtgagtgacagttactgac

SEQ ID NO: 3648608 - DNA, 25 bp, Homo sapien
tgaagcagacctccctttaggaaga

SEQ ID NO: 3648609 - DNA, 25 bp, Homo sapien
tgcccagccttgataaatggtttac

SEQ ID NO: 3648610 - DNA, 25 bp, Homo sapien
cctcgttcagtaggtctgcagagat

SEQ ID NO: 3648611 - DNA, 25 bp, Homo sapien
taactcccaagtgaaactgatgttg

SEQ ID NO: 3648612 - DNA, 25 bp, Homo sapien
cactttgaacaagatcctagattac

SEQ ID NO: 3648613 - DNA, 25 bp, Homo sapien
gtcacaacacctccggtgcccaggt

SEQ ID NO: 3648614 - DNA, 25 bp, Homo sapien
tcaaccagaatcagggaaatgctgg

SEQ ID NO: 3648615 - DNA, 25 bp, Homo sapien
caggtctgactcaaccagaatcagg

SEQ ID NO: 3648616 - DNA, 25 bp, Homo sapien
ggtgcccaggtctgactcaaccaga

SEQ ID NO: 3648617 - DNA, 25 bp, Homo sapien
ttctgtgctgattccatggcaccca

SEQ ID NO: 3648618 - DNA, 25 bp, Homo sapien
tctgtgctgattccatggcacccac

SEQ ID NO: 3648619 - DNA, 25 bp, Homo sapien
cattctgtgctgattccatggcacc

SEQ ID NO: 3648620 - DNA, 25 bp, Homo sapien
agcattctgtgctgattccatggca

SEQ ID NO: 3648621 - DNA, 25 bp, Homo sapien
gcagaacctcgagtacagtaaagct

SEQ ID NO: 3648622 - DNA, 25 bp, Homo sapien
tataccctgagaggctaaatggcag

SEQ ID NO: 3648623 - DNA, 25 bp, Homo sapien
cagatgcttggaggtactttcgacg

SEQ ID NO: 3648624 - DNA, 25 bp, Homo sapien
caggtttaactttggctacaggtga

SEQ ID NO: 3648625 - DNA, 25 bp, Homo sapien
taatgcctggaaacgataaaagcat

SEQ ID NO: 3648626 - DNA, 25 bp, Homo sapien
cctggaaacgataaaagcatttgca

SEQ ID NO: 3648627 - DNA, 25 bp, Homo sapien
ggaaacgataaaagcatttgcattt

SEQ ID NO: 3648628 - DNA, 25 bp, Homo sapien
tgcctggaaacgataaaagcatttg

SEQ ID NO: 3648629 - DNA, 25 bp, Homo sapien
catgtcctggactatttcatggcta

SEQ ID NO: 3648630 - DNA, 25 bp, Homo sapien
tttgcagatgtcttcgttcatgtcc

SEQ ID NO: 3648631 - DNA, 25 bp, Homo sapien
tatttcatggctaatggtccctgaa

SEQ ID NO: 3648632 - DNA, 25 bp, Homo sapien
ttcgttcatgtcctggactatttca

SEQ ID NO: 3648633 - DNA, 25 bp, Homo sapien
catcagggttgatcattatgggaca

SEQ ID NO: 3648634 - DNA, 25 bp, Homo sapien
tgctcaagcccagtctaaatgtctt

SEQ ID NO: 3648635 - DNA, 25 bp, Homo sapien
taggacatgctactccattgatgca

SEQ ID NO: 3648636 - DNA, 25 bp, Homo sapien
gacatattgtggcaatgctgctgga

SEQ ID NO: 3648637 - DNA, 25 bp, Homo sapien
tgacttaggatagcataagagactg

SEQ ID NO: 3648638 - DNA, 25 bp, Homo sapien
tgtaggtgtccctgagatcctttca

SEQ ID NO: 3648639 - DNA, 25 bp, Homo sapien
gaatacagagggagatatgcaaatc

SEQ ID NO: 3648640 - DNA, 25 bp, Homo sapien
tatacagtgaaattgtccagaggtt

SEQ ID NO: 3648641 - DNA, 25 bp, Homo sapien
aagaccatttcaactaggccaacag

SEQ ID NO: 3648642 - DNA, 25 bp, Homo sapien
gagacttattgttgtgccggcccag

SEQ ID NO: 3648643 - DNA, 25 bp, Homo sapien
cagaaagtgaccatcaaatacggga

SEQ ID NO: 3648644 - DNA, 25 bp, Homo sapien
tctgattgggtcttagctcgtactg

SEQ ID NO: 3648645 - DNA, 25 bp, Homo sapien
caaagttcacttgtgaggtttccag

SEQ ID NO: 3648646 - DNA, 25 bp, Homo sapien
agggttcaagggatttgagctgtta

SEQ ID NO: 3648647 - DNA, 25 bp, Homo sapien
ttgagctgttagcatggttgacccc

SEQ ID NO: 3648648 - DNA, 25 bp, Homo sapien
cccctaactggtgaagtcatttact

SEQ ID NO: 3648649 - DNA, 25 bp, Homo sapien
cagattgggcattgacttcctcctc

SEQ ID NO: 3648650 - DNA, 25 bp, Homo sapien
cagttctgcactatagcctgtggtg

SEQ ID NO: 3648651 - DNA, 25 bp, Homo sapien
tgattcagaaggtttctcacagttc

SEQ ID NO: 3648652 - DNA, 25 bp, Homo sapien
tactccattcgtgggaagagaatca

SEQ ID NO: 3648653 - DNA, 25 bp, Homo sapien
tcagggacactgcagaaatttcttt

SEQ ID NO: 3648654 - DNA, 25 bp, Homo sapien
gggatttctgggatcttgaagactt

SEQ ID NO: 3648655 - DNA, 25 bp, Homo sapien
atcttgaagacttcagggacactgc

SEQ ID NO: 3648656 - DNA, 25 bp, Homo sapien
cgtttccaagggatttctgggatct

SEQ ID NO: 3648657 - DNA, 25 bp, Homo sapien
tcttgaaggtgcccagctctaccat

SEQ ID NO: 3648658 - DNA, 25 bp, Homo sapien
ctgtcttgaaggtgcccagctctac

SEQ ID NO: 3648659 - DNA, 25 bp, Homo sapien
tgtcttgaaggtgcccagctctacc

SEQ ID NO: 3648660 - DNA, 25 bp, Homo sapien
gtcttgaaggtgcccagctctacca

SEQ ID NO: 3648661 - DNA, 25 bp, Homo sapien
ttcttggactcagcctgattggtgg

SEQ ID NO: 3648662 - DNA, 25 bp, Homo sapien
tggctgagtcagctctcaatggctg

SEQ ID NO: 3648663 - DNA, 25 bp, Homo sapien
gagtcagctctcaatggctgtggaa

SEQ ID NO: 3648664 - DNA, 25 bp, Homo sapien
gaggagttggataccttttgaactg

SEQ ID NO: 3648665 - DNA, 25 bp, Homo sapien
gctacattagtagctagagtggcta

SEQ ID NO: 3648666 - DNA, 25 bp, Homo sapien
aaggtgtgggactagactttgacta

SEQ ID NO: 3648667 - DNA, 25 bp, Homo sapien
taggtcattacatgaaagtaccaag

SEQ ID NO: 3648668 - DNA, 25 bp, Homo sapien
gactattgtacttgtgtgaccctgg

SEQ ID NO: 3648669 - DNA, 25 bp, Homo sapien
tcaattcacaatgggtaggcagagg

SEQ ID NO: 3648670 - DNA, 25 bp, Homo sapien
ggacagccccataaagtacaagtta

SEQ ID NO: 3648671 - DNA, 25 bp, Homo sapien
taggcagaggcatatgtctagctcc

SEQ ID NO: 3648672 - DNA, 25 bp, Homo sapien
ccacactggaacactatctctcaat

SEQ ID NO: 3648673 - DNA, 25 bp, Homo sapien
catagtgcagcaagcccgtgaattt

SEQ ID NO: 3648674 - DNA, 25 bp, Homo sapien
tttctcaggcaagatgaacatagtg

SEQ ID NO: 3648675 - DNA, 25 bp, Homo sapien
tccgcctgctgacgcctctattaag

SEQ ID NO: 3648676 - DNA, 25 bp, Homo sapien
tcaatcagccctttccgataactgg

SEQ ID NO: 3648677 - DNA, 25 bp, Homo sapien
catacaatgaaggaatgacctgtct

SEQ ID NO: 3648678 - DNA, 25 bp, Homo sapien
gatgtgctcagacctacccaagtaa

SEQ ID NO: 3648679 - DNA, 25 bp, Homo sapien
tttgcccaatgataagaccctctag

SEQ ID NO: 3648680 - DNA, 25 bp, Homo sapien
gcaaccagcttaaacatccatgtaa

SEQ ID NO: 3648681 - DNA, 25 bp, Homo sapien
cccctttgaactggcttaagagaga

SEQ ID NO: 3648682 - DNA, 25 bp, Homo sapien
tcaaaaggataaacacggattaggc

SEQ ID NO: 3648683 - DNA, 25 bp, Homo sapien
ggttcagtggtgtgctaaatagtca

SEQ ID NO: 3648684 - DNA, 25 bp, Homo sapien
tcaacacgttagcagagtcaaaagg

SEQ ID NO: 3648685 - DNA, 25 bp, Homo sapien
aagccagctgtctagaatcttcaaa

SEQ ID NO: 3648686 - DNA, 25 bp, Homo sapien
ctcagttccgctttttacttataag

SEQ ID NO: 3648687 - DNA, 25 bp, Homo sapien
ccgacaagtataggtccgtggtttg

SEQ ID NO: 3648688 - DNA, 25 bp, Homo sapien
cagggccatggacccgacaagtata

SEQ ID NO: 3648689 - DNA, 25 bp, Homo sapien
tatacactctaacataagctgcatt

SEQ ID NO: 3648690 - DNA, 25 bp, Homo sapien
tatcccctcctattcctattagtag

SEQ ID NO: 3648691 - DNA, 25 bp, Homo sapien
atttaccaagcaccattcttgttat

SEQ ID NO: 3648692 - DNA, 25 bp, Homo sapien
gtgcatctctgatctatcccctcct

SEQ ID NO: 3648693 - DNA, 25 bp, Homo sapien
ggccaacaggacacacacattacta

SEQ ID NO: 3648694 - DNA, 25 bp, Homo sapien
cctagggatactgtatgtgtggcta

SEQ ID NO: 3648695 - DNA, 25 bp, Homo sapien
atatgagtgcagagagtgggcatcc

SEQ ID NO: 3648696 - DNA, 25 bp, Homo sapien
tctgcctatcatatattgagcatgg

SEQ ID NO: 3648697 - DNA, 25 bp, Homo sapien
gccagtctggtatcaaactttgagg

SEQ ID NO: 3648698 - DNA, 25 bp, Homo sapien
tataagtgatacatagaccccaggt

SEQ ID NO: 3648699 - DNA, 25 bp, Homo sapien
gacgagctctagatatgttgccagt

SEQ ID NO: 3648700 - DNA, 25 bp, Homo sapien
taagtaagtatcaaggagacaagcc

SEQ ID NO: 3648701 - DNA, 25 bp, Homo sapien
aaaatcattaagcaccaattctccc

SEQ ID NO: 3648702 - DNA, 25 bp, Homo sapien
aatcattaagcaccaattctcccta

SEQ ID NO: 3648703 - DNA, 25 bp, Homo sapien
acaaaaatcattaagcaccaattct

SEQ ID NO: 3648704 - DNA, 25 bp, Homo sapien
ttaagcaccaattctccctattgaa

SEQ ID NO: 3648705 - DNA, 25 bp, Homo sapien
tcaaggtctaggatgtgaaacagag

SEQ ID NO: 3648706 - DNA, 25 bp, Homo sapien
agttggctgcaacctaacaaaaagg

SEQ ID NO: 3648707 - DNA, 25 bp, Homo sapien
caaaaaggcgcatgctgaattagcc

SEQ ID NO: 3648708 - DNA, 25 bp, Homo sapien
tctccaacggaatgaggttcaagtc

SEQ ID NO: 3648709 - DNA, 25 bp, Homo sapien
tgcatttcggacgagcctcctggtg

SEQ ID NO: 3648710 - DNA, 25 bp, Homo sapien
tgtcatcatatggaaaaccgctgga

SEQ ID NO: 3648711 - DNA, 25 bp, Homo sapien
gacacttcgacgacccatgggaata

SEQ ID NO: 3648712 - DNA, 25 bp, Homo sapien
ccatggaccgtactttgagcagcaa

SEQ ID NO: 3648713 - DNA, 25 bp, Homo sapien
gagaatgctaatcctaactcgactg

SEQ ID NO: 3648714 - DNA, 25 bp, Homo sapien
cagtttctaagcttggattcaggtc

SEQ ID NO: 3648715 - DNA, 25 bp, Homo sapien
aactcgactgtatttaaactcattg

SEQ ID NO: 3648716 - DNA, 25 bp, Homo sapien
tatcaatcgaatacttcatgaagtt

SEQ ID NO: 3648717 - DNA, 25 bp, Homo sapien
tgaagtcattgcaggaatttgggcc

SEQ ID NO: 3648718 - DNA, 25 bp, Homo sapien
gaagtcattgcaggaatttgggcca

SEQ ID NO: 3648719 - DNA, 25 bp, Homo sapien
tgcctttgaagtcattgcaggaatt

SEQ ID NO: 3648720 - DNA, 25 bp, Homo sapien
aagtcattgcaggaatttgggccat

SEQ ID NO: 3648721 - DNA, 25 bp, Homo sapien
tgttaccattgacagctgttacagt

SEQ ID NO: 3648722 - DNA, 25 bp, Homo sapien
cccactgtttagcagcgttttatga

SEQ ID NO: 3648723 - DNA, 25 bp, Homo sapien
tatgattttgtatctctcgcttgct

SEQ ID NO: 3648724 - DNA, 25 bp, Homo sapien
tggtctctagacagctgaggtttga

SEQ ID NO: 3648725 - DNA, 25 bp, Homo sapien
aaaacagatgtgcagccctgaagca

SEQ ID NO: 3648726 - DNA, 25 bp, Homo sapien
taaatgggcgaaactaccttgtagc

SEQ ID NO: 3648727 - DNA, 25 bp, Homo sapien
tgtgacagtggttaacgggcagatc

SEQ ID NO: 3648728 - DNA, 25 bp, Homo sapien
catgcaagtgctatcggctcgagaa

SEQ ID NO: 3648729 - DNA, 25 bp, Homo sapien
cctcctctgtgtgagggaaggcctg

SEQ ID NO: 3648730 - DNA, 25 bp, Homo sapien
ctcctctgtgtgagggaaggcctga

SEQ ID NO: 3648731 - DNA, 25 bp, Homo sapien
aaggcctgagtaactccatactgcc

SEQ ID NO: 3648732 - DNA, 25 bp, Homo sapien
gggaaggcctgagtaactccatact

SEQ ID NO: 3648733 - DNA, 25 bp, Homo sapien
tcaggagagtcttggccgacgcttg

SEQ ID NO: 3648734 - DNA, 25 bp, Homo sapien
tgtctaccgccttgagaaagtccaa

SEQ ID NO: 3648735 - DNA, 25 bp, Homo sapien
gatctgagtgttattgtcctgccca

SEQ ID NO: 3648736 - DNA, 25 bp, Homo sapien
cctgtggctgtacgcgtgtgaatca

SEQ ID NO: 3648737 - DNA, 25 bp, Homo sapien
ccccaaaagagatgcaaccgtgttc

SEQ ID NO: 3648738 - DNA, 25 bp, Homo sapien
cctacactcccgtgctcatgcaatt

SEQ ID NO: 3648739 - DNA, 25 bp, Homo sapien
caagaccttgtaacaatgccaggca

SEQ ID NO: 3648740 - DNA, 25 bp, Homo sapien
gccaggcacagagtattcactttat

SEQ ID NO: 3648741 - DNA, 25 bp, Homo sapien
gatgccaacacaactggcagtgtat

SEQ ID NO: 3648742 - DNA, 25 bp, Homo sapien
gatagccgaagatcaaagagagttt

SEQ ID NO: 3648743 - DNA, 25 bp, Homo sapien
tgaaacatactgttggcaggcacct

SEQ ID NO: 3648744 - DNA, 25 bp, Homo sapien
caacagttgctggatacaactgaca

SEQ ID NO: 3648745 - DNA, 25 bp, Homo sapien
gcccacttgaatttgctcatcaaat

SEQ ID NO: 3648746 - DNA, 25 bp, Homo sapien
tgctcatcaaatgtaagtgcagtga

SEQ ID NO: 3648747 - DNA, 25 bp, Homo sapien
aagctcatacacaggagtaatgtga

SEQ ID NO: 3648748 - DNA, 25 bp, Homo sapien
caaagcctcgaatgtctgtcccgaa

SEQ ID NO: 3648749 - DNA, 25 bp, Homo sapien
ttgaggacagtttgatatgccaaaa

SEQ ID NO: 3648750 - DNA, 25 bp, Homo sapien
caaaattagaatgcacaaagcctcg

SEQ ID NO: 3648751 - DNA, 25 bp, Homo sapien
taagaagatgccgtcaaatcgccta

SEQ ID NO: 3648752 - DNA, 25 bp, Homo sapien
tccaaaccagtagaagataaccgct

SEQ ID NO: 3648753 - DNA, 25 bp, Homo sapien
tgctctctagaagtctgcagcctag

SEQ ID NO: 3648754 - DNA, 25 bp, Homo sapien
gataaccgctgaactaaagacaaga

SEQ ID NO: 3648755 - DNA, 25 bp, Homo sapien
gagggaaaaccttgttgccaactca

SEQ ID NO: 3648756 - DNA, 25 bp, Homo sapien
gagagcttgcaatcctttcgtgagt

SEQ ID NO: 3648757 - DNA, 25 bp, Homo sapien
aatctctaagagtgccttcatttgg

SEQ ID NO: 3648758 - DNA, 25 bp, Homo sapien
gcatagaggaacttttagcagtgta

SEQ ID NO: 3648759 - DNA, 25 bp, Homo sapien
tatacacgatttagtctaattacga

SEQ ID NO: 3648760 - DNA, 25 bp, Homo sapien
taattacgaagtctaccactgacat

SEQ ID NO: 3648761 - DNA, 25 bp, Homo sapien
tagtctaattacgaagtctaccact

SEQ ID NO: 3648762 - DNA, 25 bp, Homo sapien
gtctaccactgacatactatgtgaa

SEQ ID NO: 3648763 - DNA, 25 bp, Homo sapien
cttaagcaactttgaacaaggccac

SEQ ID NO: 3648764 - DNA, 25 bp, Homo sapien
tggtcaacgaaaagaatcataactg

SEQ ID NO: 3648765 - DNA, 25 bp, Homo sapien
acaaggccacctagaattcatttca

SEQ ID NO: 3648766 - DNA, 25 bp, Homo sapien
caccttgaattaggttatggtcaac

SEQ ID NO: 3648767 - DNA, 25 bp, Homo sapien
cttagtgcctgtcacaaagccttta

SEQ ID NO: 3648768 - DNA, 25 bp, Homo sapien
tagtgcctgtcacaaagcctttatt

SEQ ID NO: 3648769 - DNA, 25 bp, Homo sapien
ctgtcacaaagcctttattcttcat

SEQ ID NO: 3648770 - DNA, 25 bp, Homo sapien
gcctgtcacaaagcctttattcttc

SEQ ID NO: 3648771 - DNA, 25 bp, Homo sapien
tcacccataaatcccggctggcaga

SEQ ID NO: 3648772 - DNA, 25 bp, Homo sapien
tatagtaattgtggtctgtatcctc

SEQ ID NO: 3648773 - DNA, 25 bp, Homo sapien
ggctggcagaatcagatggaccata

SEQ ID NO: 3648774 - DNA, 25 bp, Homo sapien
gcagcttgccgatgagtattggaca

SEQ ID NO: 3648775 - DNA, 25 bp, Homo sapien
tagcttttagcaatggatctcctga

SEQ ID NO: 3648776 - DNA, 25 bp, Homo sapien
tacaccgaaaattcagtgaatcatc

SEQ ID NO: 3648777 - DNA, 25 bp, Homo sapien
aagcatgtgctctacaccgaaaatt

SEQ ID NO: 3648778 - DNA, 25 bp, Homo sapien
gaatcatcatggtatactattctta

SEQ ID NO: 3648779 - DNA, 25 bp, Homo sapien
tgttgaataagaatgacgacagagg

SEQ ID NO: 3648780 - DNA, 25 bp, Homo sapien
gacgacagaggtcatccttgtgttg

SEQ ID NO: 3648781 - DNA, 25 bp, Homo sapien
taagaatgacgacagaggtcatcct

SEQ ID NO: 3648782 - DNA, 25 bp, Homo sapien
cagaggtcatccttgtgttgtgcca

SEQ ID NO: 3648783 - DNA, 25 bp, Homo sapien
aaccatcgtaagtcttcataggctc

SEQ ID NO: 3648784 - DNA, 25 bp, Homo sapien
ttaataactttaggatgagaatatg

SEQ ID NO: 3648785 - DNA, 25 bp, Homo sapien
tatgttttacactcatgttatgtaa

SEQ ID NO: 3648786 - DNA, 25 bp, Homo sapien
actttaggatgagaatatgttttac

SEQ ID NO: 3648787 - DNA, 25 bp, Homo sapien
tattatcaggcaagaaacaagagaa

SEQ ID NO: 3648788 - DNA, 25 bp, Homo sapien
gggccacgaactttagctcttaata

SEQ ID NO: 3648789 - DNA, 25 bp, Homo sapien
aattagctggttgagagcccaacag

SEQ ID NO: 3648790 - DNA, 25 bp, Homo sapien
tatccagaaggaaagtaattagctg

SEQ ID NO: 3648791 - DNA, 25 bp, Homo sapien
tcaaatacaatcagctctccaaatt

SEQ ID NO: 3648792 - DNA, 25 bp, Homo sapien
atattggttactggagacctacttt

SEQ ID NO: 3648793 - DNA, 25 bp, Homo sapien
gcccggctgacctgcagacattttc

SEQ ID NO: 3648794 - DNA, 25 bp, Homo sapien
catgcccggctgacctgcagacatt

SEQ ID NO: 3648795 - DNA, 25 bp, Homo sapien
taaaatggaaaatcgaaggacagat

SEQ ID NO: 3648796 - DNA, 25 bp, Homo sapien
ccccggttgccacagtgatttcacg

SEQ ID NO: 3648797 - DNA, 25 bp, Homo sapien
tggaaaatcgaaggacagattcact

SEQ ID NO: 3648798 - DNA, 25 bp, Homo sapien
cacgtaggaagtggccataaaatgg

SEQ ID NO: 3648799 - DNA, 25 bp, Homo sapien
cacctgggcatatttcatcatttgt

SEQ ID NO: 3648800 - DNA, 25 bp, Homo sapien
gtatttcctaagcaattccccatat

SEQ ID NO: 3648801 - DNA, 25 bp, Homo sapien
actgcacctgggcatatttcatcat

SEQ ID NO: 3648802 - DNA, 25 bp, Homo sapien
tatttcctaagcaattccccatatt

SEQ ID NO: 3648803 - DNA, 25 bp, Homo sapien
ttcagaaaacatgcctaatgtcggt

SEQ ID NO: 3648804 - DNA, 25 bp, Homo sapien
gatcctgccagttccgctaggagaa

SEQ ID NO: 3648805 - DNA, 25 bp, Homo sapien
ggcactttgaaatcgcaaggatgat

SEQ ID NO: 3648806 - DNA, 25 bp, Homo sapien
aaatgcctggcactatactggatat

SEQ ID NO: 3648807 - DNA, 25 bp, Homo sapien
tttaactcagcatccccttgtctgg

SEQ ID NO: 3648808 - DNA, 25 bp, Homo sapien
ccttgtctggaatgcctcttccttc

SEQ ID NO: 3648809 - DNA, 25 bp, Homo sapien
gttgacagccctccaaatataccca

SEQ ID NO: 3648810 - DNA, 25 bp, Homo sapien
tctcttcaggataaactaatttagt

SEQ ID NO: 3648811 - DNA, 25 bp, Homo sapien
cctaagactagaatcctcaggagtt

SEQ ID NO: 3648812 - DNA, 25 bp, Homo sapien
tctcttaagggtgtctctagtggaa

SEQ ID NO: 3648813 - DNA, 25 bp, Homo sapien
gggctcaagcccacagaagtttaaa

SEQ ID NO: 3648814 - DNA, 25 bp, Homo sapien
ccagcagagccatccgggagtttca

SEQ ID NO: 3648815 - DNA, 25 bp, Homo sapien
tggataacgatacattgtcatcagc

SEQ ID NO: 3648816 - DNA, 25 bp, Homo sapien
agtctttagcagtggatatccttat

SEQ ID NO: 3648817 - DNA, 25 bp, Homo sapien
gttcacaaacaaatacacctacaag

SEQ ID NO: 3648818 - DNA, 25 bp, Homo sapien
taacctgtccaaaacctgaacatcc

SEQ ID NO: 3648819 - DNA, 25 bp, Homo sapien
ttttctgctcacttggaagcatatc

SEQ ID NO: 3648820 - DNA, 25 bp, Homo sapien
tagagatagcttatacatgtataaa

SEQ ID NO: 3648821 - DNA, 25 bp, Homo sapien
cgcccggccgcacatagtaataatt

SEQ ID NO: 3648822 - DNA, 25 bp, Homo sapien
gattgtgaaaattacatctctttcc

SEQ ID NO: 3648823 - DNA, 25 bp, Homo sapien
gatagggatacttttccagaaccag

SEQ ID NO: 3648824 - DNA, 25 bp, Homo sapien
tgtccttgacccgagggttgtgcca

SEQ ID NO: 3648825 - DNA, 25 bp, Homo sapien
tttattgcataggaaagacactgaa

SEQ ID NO: 3648826 - DNA, 25 bp, Homo sapien
aaggtacagctttctcgatagggat

SEQ ID NO: 3648827 - DNA, 25 bp, Homo sapien
acagatgagagcttggtactaacgg

SEQ ID NO: 3648828 - DNA, 25 bp, Homo sapien
tagaaggtaccattggacaaaacaa

SEQ ID NO: 3648829 - DNA, 25 bp, Homo sapien
tactaacggtgccaagctgcttgga

SEQ ID NO: 3648830 - DNA, 25 bp, Homo sapien
gtaccattggacaaaacaacccagc

SEQ ID NO: 3648831 - DNA, 25 bp, Homo sapien
cctaaatcacataggctccccccac

SEQ ID NO: 3648832 - DNA, 25 bp, Homo sapien
acctaaatcacataggctcccccca

SEQ ID NO: 3648833 - DNA, 25 bp, Homo sapien
tcttgggtacaaagatcatgccttt

SEQ ID NO: 3648834 - DNA, 25 bp, Homo sapien
gcagtgtcccatgtaaacagcagac

SEQ ID NO: 3648835 - DNA, 25 bp, Homo sapien
tggtttcctcaacagtacccagcag

SEQ ID NO: 3648836 - DNA, 25 bp, Homo sapien
actctgttgcctacctatgaggtgg

SEQ ID NO: 3648837 - DNA, 25 bp, Homo sapien
ggctggagttggtctacagaaaatt

SEQ ID NO: 3648838 - DNA, 25 bp, Homo sapien
cctttgagaaacttgctccgggttg

SEQ ID NO: 3648839 - DNA, 25 bp, Homo sapien
aaccaaggtgatacccatttcagct

SEQ ID NO: 3648840 - DNA, 25 bp, Homo sapien
cttaatgaggatgttgagagcctga

SEQ ID NO: 3648841 - DNA, 25 bp, Homo sapien
gatgttgagagcctgacaaccaagg

SEQ ID NO: 3648842 - DNA, 25 bp, Homo sapien
cttctctccagctttgtcttcttcc

SEQ ID NO: 3648843 - DNA, 25 bp, Homo sapien
tgtcttcttcctgagcagtctccat

SEQ ID NO: 3648844 - DNA, 25 bp, Homo sapien
gctttgtcttcttcctgagcagtct

SEQ ID NO: 3648845 - DNA, 25 bp, Homo sapien
ttgtcttcttcctgagcagtctcca

SEQ ID NO: 3648846 - DNA, 25 bp, Homo sapien
tgaccggcgttcagagccgagccag

SEQ ID NO: 3648847 - DNA, 25 bp, Homo sapien
gactgtgacagtgaccggcgttcag

SEQ ID NO: 3648848 - DNA, 25 bp, Homo sapien
ctgctgagaccagtcttggtgatgc

SEQ ID NO: 3648849 - DNA, 25 bp, Homo sapien
acagtgaccggcgttcagagccgag

SEQ ID NO: 3648850 - DNA, 25 bp, Homo sapien
tgctgattccccaatcctgaggtcc

SEQ ID NO: 3648851 - DNA, 25 bp, Homo sapien
aggagatgctgattccccaatcctg

SEQ ID NO: 3648852 - DNA, 25 bp, Homo sapien
tagagagcaagggttaggagaggag

SEQ ID NO: 3648853 - DNA, 25 bp, Homo sapien
gagcaagggttaggagaggagatgc

SEQ ID NO: 3648854 - DNA, 25 bp, Homo sapien
gttgtctttgcattaagccgttgca

SEQ ID NO: 3648855 - DNA, 25 bp, Homo sapien
aagaatccgattcctctgatcagta

SEQ ID NO: 3648856 - DNA, 25 bp, Homo sapien
ttgaagtgaaaagtctggagatctg

SEQ ID NO: 3648857 - DNA, 25 bp, Homo sapien
cattaagccgttgcactttgaagtg

SEQ ID NO: 3648858 - DNA, 25 bp, Homo sapien
gaggcgtagacaaaatgttctagag

SEQ ID NO: 3648859 - DNA, 25 bp, Homo sapien
tctctactgttgttaccaaataggg

SEQ ID NO: 3648860 - DNA, 25 bp, Homo sapien
gaaagatgaccctcgttaagctaaa

SEQ ID NO: 3648861 - DNA, 25 bp, Homo sapien
tctacccgggtaagtatgactatta

SEQ ID NO: 3648862 - DNA, 25 bp, Homo sapien
gaacatttagaagggatgtcattgc

SEQ ID NO: 3648863 - DNA, 25 bp, Homo sapien
tctttcaagccaccaatctgtaggt

SEQ ID NO: 3648864 - DNA, 25 bp, Homo sapien
ttacttctagtgacatcatacacac

SEQ ID NO: 3648865 - DNA, 25 bp, Homo sapien
gaatttacttgcaattaggcaataa

SEQ ID NO: 3648866 - DNA, 25 bp, Homo sapien
ccataccatctcccaaaattttcgc

SEQ ID NO: 3648867 - DNA, 25 bp, Homo sapien
cataccatctcccaaaattttcgct

SEQ ID NO: 3648868 - DNA, 25 bp, Homo sapien
cttccttcatcttaatctctcccac

SEQ ID NO: 3648869 - DNA, 25 bp, Homo sapien
ataggtggtctctagtcgtgtgaat

SEQ ID NO: 3648870 - DNA, 25 bp, Homo sapien
taggtggtctctagtcgtgtgaata

SEQ ID NO: 3648871 - DNA, 25 bp, Homo sapien
ggtggtctctagtcgtgtgaataat

SEQ ID NO: 3648872 - DNA, 25 bp, Homo sapien
aggtggtctctagtcgtgtgaataa

SEQ ID NO: 3648873 - DNA, 25 bp, Homo sapien
agcattcgatgtacgacttctccag

SEQ ID NO: 3648874 - DNA, 25 bp, Homo sapien
ttaaaggtgctatgtactgtgtggc

SEQ ID NO: 3648875 - DNA, 25 bp, Homo sapien
tactgtgtggctgttagcattcgat

SEQ ID NO: 3648876 - DNA, 25 bp, Homo sapien
tggatacactgggatcgaaatttgc

SEQ ID NO: 3648877 - DNA, 25 bp, Homo sapien
tacatggtcccactggaccacaagt

SEQ ID NO: 3648878 - DNA, 25 bp, Homo sapien
cttcccaggttataattatcctgga

SEQ ID NO: 3648879 - DNA, 25 bp, Homo sapien
tttgtatccaaagatgattcgtcca

SEQ ID NO: 3648880 - DNA, 25 bp, Homo sapien
cgtccatccatgagcagggttgcct

SEQ ID NO: 3648881 - DNA, 25 bp, Homo sapien
gcagcaaatgtgacaccaaggaaca

SEQ ID NO: 3648882 - DNA, 25 bp, Homo sapien
attggcaatggtgatttattaacta

SEQ ID NO: 3648883 - DNA, 25 bp, Homo sapien
taactatgcattcttccatagaagc

SEQ ID NO: 3648884 - DNA, 25 bp, Homo sapien
tgacaccaaggaacattaggtttaa

SEQ ID NO: 3648885 - DNA, 25 bp, Homo sapien
tatgcagggaacaacatatgcagct

SEQ ID NO: 3648886 - DNA, 25 bp, Homo sapien
tatgcagctctcaagaccagtcctg

SEQ ID NO: 3648887 - DNA, 25 bp, Homo sapien
gaagtgtcctttcgatatgcaggga

SEQ ID NO: 3648888 - DNA, 25 bp, Homo sapien
gatttaataaagacagcgagggaca

SEQ ID NO: 3648889 - DNA, 25 bp, Homo sapien
cactggatgattggttgaacttatc

SEQ ID NO: 3648890 - DNA, 25 bp, Homo sapien
cggacagtccgactttcactggatg

SEQ ID NO: 3648891 - DNA, 25 bp, Homo sapien
caacgacaaatgcatcggacagtcc

SEQ ID NO: 3648892 - DNA, 25 bp, Homo sapien
tgggaatttgttggatcctgtggac

SEQ ID NO: 3648893 - DNA, 25 bp, Homo sapien
attgcgactgcccttcttctacgta

SEQ ID NO: 3648894 - DNA, 25 bp, Homo sapien
ttgcgactgcccttcttctacgtac

SEQ ID NO: 3648895 - DNA, 25 bp, Homo sapien
tcattgcgactgcccttcttctacg

SEQ ID NO: 3648896 - DNA, 25 bp, Homo sapien
cattgcgactgcccttcttctacgt

SEQ ID NO: 3648897 - DNA, 25 bp, Homo sapien
ggtgacagagatagcccaatcggag

SEQ ID NO: 3648898 - DNA, 25 bp, Homo sapien
attcaggtacagctgccatagacca

SEQ ID NO: 3648899 - DNA, 25 bp, Homo sapien
tagcccaatcggagttataaagcaa

SEQ ID NO: 3648900 - DNA, 25 bp, Homo sapien
cctgagttagctcaagggtgacaga

SEQ ID NO: 3648901 - DNA, 25 bp, Homo sapien
gaacagggttctatgtaacacacct

SEQ ID NO: 3648902 - DNA, 25 bp, Homo sapien
gaaaactgatcttatgagaacaggg

SEQ ID NO: 3648903 - DNA, 25 bp, Homo sapien
taacataggtctgtaggaatcaact

SEQ ID NO: 3648904 - DNA, 25 bp, Homo sapien
tcttgggttatcctaatctctggca

SEQ ID NO: 3648905 - DNA, 25 bp, Homo sapien
gctcgcctgggtttggtcaatgtaa

SEQ ID NO: 3648906 - DNA, 25 bp, Homo sapien
gaaatgcctgtactgataagaatgc

SEQ ID NO: 3648907 - DNA, 25 bp, Homo sapien
aatccatcaatgtccctgaggaaga

SEQ ID NO: 3648908 - DNA, 25 bp, Homo sapien
gccttatactaatgtgctcgcctgg

SEQ ID NO: 3648909 - DNA, 25 bp, Homo sapien
tttttgacatttgtagctctactcg

SEQ ID NO: 3648910 - DNA, 25 bp, Homo sapien
actcggtggtattcataaattgttc

SEQ ID NO: 3648911 - DNA, 25 bp, Homo sapien
gggtcatctccacagccgaaatgtt

SEQ ID NO: 3648912 - DNA, 25 bp, Homo sapien
gccgaaatgttggtaatttttgaca

SEQ ID NO: 3648913 - DNA, 25 bp, Homo sapien
tgagaagatacacaggggccacatc

SEQ ID NO: 3648914 - DNA, 25 bp, Homo sapien
ctttgaagtttactacaccaactgc

SEQ ID NO: 3648915 - DNA, 25 bp, Homo sapien
caggggccacatctgttaaactgga

SEQ ID NO: 3648916 - DNA, 25 bp, Homo sapien
caactgcagttgaagccaatctgag

SEQ ID NO: 3648917 - DNA, 25 bp, Homo sapien
aaatgctaatgatggcggcttgccc

SEQ ID NO: 3648918 - DNA, 25 bp, Homo sapien
cagtcccaggtatgttcttaggctc

SEQ ID NO: 3648919 - DNA, 25 bp, Homo sapien
cttgggaaaccctttgtgctagaca

SEQ ID NO: 3648920 - DNA, 25 bp, Homo sapien
cttagagcctagcaaagaagacgac

SEQ ID NO: 3648921 - DNA, 25 bp, Homo sapien
cacaaagacggaggtttgattccaa

SEQ ID NO: 3648922 - DNA, 25 bp, Homo sapien
gtattaacagtagaagcagattcca

SEQ ID NO: 3648923 - DNA, 25 bp, Homo sapien
aatggtcagtggtaagcaggtttct

SEQ ID NO: 3648924 - DNA, 25 bp, Homo sapien
tgagaccctgcacacgtagctcagc

SEQ ID NO: 3648925 - DNA, 25 bp, Homo sapien
ctcccatcccctgacgggtcccagt

SEQ ID NO: 3648926 - DNA, 25 bp, Homo sapien
cccatcccctgacgggtcccagtgt

SEQ ID NO: 3648927 - DNA, 25 bp, Homo sapien
tcccatcccctgacgggtcccagtg

SEQ ID NO: 3648928 - DNA, 25 bp, Homo sapien
tatatgcccctgaaggatgagcatg

SEQ ID NO: 3648929 - DNA, 25 bp, Homo sapien
gctgccccttgttggaaggctaggc

SEQ ID NO: 3648930 - DNA, 25 bp, Homo sapien
gtccaagagaatgctttatatgccc

SEQ ID NO: 3648931 - DNA, 25 bp, Homo sapien
tcttatagctaaattagtccaagag

SEQ ID NO: 3648932 - DNA, 25 bp, Homo sapien
ctacgtgtagcaaaaatttcaacct

SEQ ID NO: 3648933 - DNA, 25 bp, Homo sapien
aggctacgtgtagcaaaaatttcaa

SEQ ID NO: 3648934 - DNA, 25 bp, Homo sapien
gctacgtgtagcaaaaatttcaacc

SEQ ID NO: 3648935 - DNA, 25 bp, Homo sapien
ggctacgtgtagcaaaaatttcaac

SEQ ID NO: 3648936 - DNA, 25 bp, Homo sapien
taatatgtatgtatttacaaagcat

SEQ ID NO: 3648937 - DNA, 25 bp, Homo sapien
ctaatatgtatgtatttacaaagca

SEQ ID NO: 3648938 - DNA, 25 bp, Homo sapien
ccaaagtaaaggctcaatctttcct

SEQ ID NO: 3648939 - DNA, 25 bp, Homo sapien
gcatcttgcagaggtgcaggttttc

SEQ ID NO: 3648940 - DNA, 25 bp, Homo sapien
tcatccgtacacgtggcatcttgca

SEQ ID NO: 3648941 - DNA, 25 bp, Homo sapien
taatcaccagaatgtagtcatccgt

SEQ ID NO: 3648942 - DNA, 25 bp, Homo sapien
gatgacgatcaaatccactggaaca

SEQ ID NO: 3648943 - DNA, 25 bp, Homo sapien
tcctgccgatgacgatcaaatccac

SEQ ID NO: 3648944 - DNA, 25 bp, Homo sapien
cccagtcctgccgatgacgatcaaa

SEQ ID NO: 3648945 - DNA, 25 bp, Homo sapien
tgccgatgacgatcaaatccactgg

SEQ ID NO: 3648946 - DNA, 25 bp, Homo sapien
ccctgaactgggtggttgtcgctcc

SEQ ID NO: 3648947 - DNA, 25 bp, Homo sapien
tggttcgagaagaagtttccactgg

SEQ ID NO: 3648948 - DNA, 25 bp, Homo sapien
tcctacggttgtggtggttcgagaa

SEQ ID NO: 3648949 - DNA, 25 bp, Homo sapien
cttctggtggtagttaggaccctga

SEQ ID NO: 3648950 - DNA, 25 bp, Homo sapien
aagttggatttgcttagtacaaaat

SEQ ID NO: 3648951 - DNA, 25 bp, Homo sapien
aatttagccacacaggaagaaatct

SEQ ID NO: 3648952 - DNA, 25 bp, Homo sapien
caaaatttagccacacaggaagaaa

SEQ ID NO: 3648953 - DNA, 25 bp, Homo sapien
gatttgcttagtacaaaatttagcc

SEQ ID NO: 3648954 - DNA, 25 bp, Homo sapien
ctccattatcttttagatgtagtgc

SEQ ID NO: 3648955 - DNA, 25 bp, Homo sapien
ccattatcttttagatgtagtgcta

SEQ ID NO: 3648956 - DNA, 25 bp, Homo sapien
ttatcttttagatgtagtgctatct

SEQ ID NO: 3648957 - DNA, 25 bp, Homo sapien
ttttagatgtagtgctatcttggta

SEQ ID NO: 3648958 - DNA, 25 bp, Homo sapien
gggcccctcatatatctcagattcc

SEQ ID NO: 3648959 - DNA, 25 bp, Homo sapien
caaaatctaatggtatatggaagtt

SEQ ID NO: 3648960 - DNA, 25 bp, Homo sapien
tcctccagtagaaggttccctggtc

SEQ ID NO: 3648961 - DNA, 25 bp, Homo sapien
ctaatggtatatggaagtttctttc

SEQ ID NO: 3648962 - DNA, 25 bp, Homo sapien
tgggccttttacacatcagcagttg

SEQ ID NO: 3648963 - DNA, 25 bp, Homo sapien
caaggaatgctaccaagtttaggag

SEQ ID NO: 3648964 - DNA, 25 bp, Homo sapien
cattcatgctgattggctccaccca

SEQ ID NO: 3648965 - DNA, 25 bp, Homo sapien
tttaggaggctgcaaacacaacctg

SEQ ID NO: 3648966 - DNA, 25 bp, Homo sapien
tagtcttaacgggaggagcaaacca

SEQ ID NO: 3648967 - DNA, 25 bp, Homo sapien
cctagctgtttcgaagaagattaac

SEQ ID NO: 3648968 - DNA, 25 bp, Homo sapien
taacattcggtcacagtagcttaca

SEQ ID NO: 3648969 - DNA, 25 bp, Homo sapien
gcaaaccattgaaaacctagctgtt

SEQ ID NO: 3648970 - DNA, 25 bp, Homo sapien
tgtgaccatgcgctcaccatggtgt

SEQ ID NO: 3648971 - DNA, 25 bp, Homo sapien
ctggtgtgaccatgcgctcaccatg

SEQ ID NO: 3648972 - DNA, 25 bp, Homo sapien
ccatgcgctcaccatggtgtgaact

SEQ ID NO: 3648973 - DNA, 25 bp, Homo sapien
gaccatgcgctcaccatggtgtgaa

SEQ ID NO: 3648974 - DNA, 25 bp, Homo sapien
gggcatatgacacttccacgagttg

SEQ ID NO: 3648975 - DNA, 25 bp, Homo sapien
cacttccacgagttgtatagttgca

SEQ ID NO: 3648976 - DNA, 25 bp, Homo sapien
gactctgctgtgtgggcatatgaca

SEQ ID NO: 3648977 - DNA, 25 bp, Homo sapien
gttgtatagttgcaagggctttggt

SEQ ID NO: 3648978 - DNA, 25 bp, Homo sapien
cacgtttagttgagggagtgcgcac

SEQ ID NO: 3648979 - DNA, 25 bp, Homo sapien
aatataaagctgtatgtcttgaatg

SEQ ID NO: 3648980 - DNA, 25 bp, Homo sapien
gaacagaacacgtttagttgaggga

SEQ ID NO: 3648981 - DNA, 25 bp, Homo sapien
tgtcttgaatgtggaacagaacacg

SEQ ID NO: 3648982 - DNA, 25 bp, Homo sapien
tgcaaccacctgaagggaaccatgt

SEQ ID NO: 3648983 - DNA, 25 bp, Homo sapien
tcccaaacggtagcttggacatagg

SEQ ID NO: 3648984 - DNA, 25 bp, Homo sapien
tccgcagttatctgtaagcagcttc

SEQ ID NO: 3648985 - DNA, 25 bp, Homo sapien
taaataagatcaacccttccgcagt

SEQ ID NO: 3648986 - DNA, 25 bp, Homo sapien
tacacagtacaagcatctctattcc

SEQ ID NO: 3648987 - DNA, 25 bp, Homo sapien
gctcatcaacggtagattggatcaa

SEQ ID NO: 3648988 - DNA, 25 bp, Homo sapien
cagacagaatttagagtatcctggg

SEQ ID NO: 3648989 - DNA, 25 bp, Homo sapien
tatattagcaggtattatgacggct

SEQ ID NO: 3648990 - DNA, 25 bp, Homo sapien
tttcaaaatgctttagagtgaccat

SEQ ID NO: 3648991 - DNA, 25 bp, Homo sapien
caatgactatttcaaaatgctttag

SEQ ID NO: 3648992 - DNA, 25 bp, Homo sapien
tatttcaaaatgctttagagtgacc

SEQ ID NO: 3648993 - DNA, 25 bp, Homo sapien
gactatttcaaaatgctttagagtg

SEQ ID NO: 3648994 - DNA, 25 bp, Homo sapien
tgttgggtggtgatacatatagact

SEQ ID NO: 3648995 - DNA, 25 bp, Homo sapien
tgaggattccaatgatgaggccagc

SEQ ID NO: 3648996 - DNA, 25 bp, Homo sapien
tagactgtcacaagaatggctgtgg

SEQ ID NO: 3648997 - DNA, 25 bp, Homo sapien
tttcttctcagctgcactgtcatct

SEQ ID NO: 3648998 - DNA, 25 bp, Homo sapien
tgagtcaccatacctcaccaggagg

SEQ ID NO: 3648999 - DNA, 25 bp, Homo sapien
cataagattgagagtgccaaggcct

SEQ ID NO: 3649000 - DNA, 25 bp, Homo sapien
aaggagacggcactttcttctacag

SEQ ID NO: 3649001 - DNA, 25 bp, Homo sapien
ccagattagggagccaagggaataa

SEQ ID NO: 3649002 - DNA, 25 bp, Homo sapien
gcagaataaatcatgcgcatactgg

SEQ ID NO: 3649003 - DNA, 25 bp, Homo sapien
tgcagggcagaataaatcatgcgca

SEQ ID NO: 3649004 - DNA, 25 bp, Homo sapien
tcatgcgcatactggactctaatgc

SEQ ID NO: 3649005 - DNA, 25 bp, Homo sapien
catactggactctaatgcaaaacag

SEQ ID NO: 3649006 - DNA, 25 bp, Homo sapien
cactcagcagctctttgaagaatgc

SEQ ID NO: 3649007 - DNA, 25 bp, Homo sapien
gtcactcagcagctctttgaagaat

SEQ ID NO: 3649008 - DNA, 25 bp, Homo sapien
gaatgcatttgtaactttgagaagg

SEQ ID NO: 3649009 - DNA, 25 bp, Homo sapien
tcagcagctctttgaagaatgcatt

SEQ ID NO: 3649010 - DNA, 25 bp, Homo sapien
ccccagcagcatgtcagataggtag

SEQ ID NO: 3649011 - DNA, 25 bp, Homo sapien
acacctatggacatacaggctctga

SEQ ID NO: 3649012 - DNA, 25 bp, Homo sapien
gaactatgactctttgaccttggat

SEQ ID NO: 3649013 - DNA, 25 bp, Homo sapien
tccactattttgcagtcatacaggg

SEQ ID NO: 3649014 - DNA, 25 bp, Homo sapien
gattgcccaggctgcgaccagtgca

SEQ ID NO: 3649015 - DNA, 25 bp, Homo sapien
gctcccggcctagcatcattcaatt

SEQ ID NO: 3649016 - DNA, 25 bp, Homo sapien
gctgtttagcacaggaactaactca

SEQ ID NO: 3649017 - DNA, 25 bp, Homo sapien
caccatattatatacgctgtttagc

SEQ ID NO: 3649018 - DNA, 25 bp, Homo sapien
gaaactgcccagtctaagatctgag

SEQ ID NO: 3649019 - DNA, 25 bp, Homo sapien
gaaatgcaagccagtcagttgaaga

SEQ ID NO: 3649020 - DNA, 25 bp, Homo sapien
tggaactcttgtacctaatcttgta

SEQ ID NO: 3649021 - DNA, 25 bp, Homo sapien
aaaataggctattctgcttgactga

SEQ ID NO: 3649022 - DNA, 25 bp, Homo sapien
cctcctgaaatacaagggccattgt

SEQ ID NO: 3649023 - DNA, 25 bp, Homo sapien
tccattgcccttgcacgatatcagt

SEQ ID NO: 3649024 - DNA, 25 bp, Homo sapien
tcagattttaagagctcagaagtcc

SEQ ID NO: 3649025 - DNA, 25 bp, Homo sapien
tcagaagtccatataggcagcagcc

SEQ ID NO: 3649026 - DNA, 25 bp, Homo sapien
taatcatattctccacaggttcttg

SEQ ID NO: 3649027 - DNA, 25 bp, Homo sapien
tttaatcatattctccacaggttct

SEQ ID NO: 3649028 - DNA, 25 bp, Homo sapien
tgccaggaaaagttgagggccacag

SEQ ID NO: 3649029 - DNA, 25 bp, Homo sapien
cttcccagcagtctttgaattcttg

SEQ ID NO: 3649030 - DNA, 25 bp, Homo sapien
cccaacaacattcaggtcttgtggc

SEQ ID NO: 3649031 - DNA, 25 bp, Homo sapien
tggctatgggcggtttgttattaca

SEQ ID NO: 3649032 - DNA, 25 bp, Homo sapien
ccagtcctgctagacaccttgtgga

SEQ ID NO: 3649033 - DNA, 25 bp, Homo sapien
tccaggcaatgagtattggcttact

SEQ ID NO: 3649034 - DNA, 25 bp, Homo sapien
taaacgtcttatgtgaccttatgtg

SEQ ID NO: 3649035 - DNA, 25 bp, Homo sapien
gggttagtcactataaatatattga

SEQ ID NO: 3649036 - DNA, 25 bp, Homo sapien
tatattgataatcttaatctgcctt

SEQ ID NO: 3649037 - DNA, 25 bp, Homo sapien
tttgctaaaacacacccagtccatt

SEQ ID NO: 3649038 - DNA, 25 bp, Homo sapien
cagaatcacatagttagtaaaagct

SEQ ID NO: 3649039 - DNA, 25 bp, Homo sapien
tttagctcctggttgagttacatag

SEQ ID NO: 3649040 - DNA, 25 bp, Homo sapien
gaatggttcaggattgaccagaatc

SEQ ID NO: 3649041 - DNA, 25 bp, Homo sapien
tagtaaaagctggaatttttgcaaa

SEQ ID NO: 3649042 - DNA, 25 bp, Homo sapien
ttgttgttcaaaccgagcatgactg

SEQ ID NO: 3649043 - DNA, 25 bp, Homo sapien
caaaccgagcatgactgtgtgataa

SEQ ID NO: 3649044 - DNA, 25 bp, Homo sapien
tgcattcagtcatccgataaaatta

SEQ ID NO: 3649045 - DNA, 25 bp, Homo sapien
ttggccactttgttgttcaaaccga

SEQ ID NO: 3649046 - DNA, 25 bp, Homo sapien
ttaattgtggtgtacagttccttgc

SEQ ID NO: 3649047 - DNA, 25 bp, Homo sapien
gagtgaagcacacagggtcggtctc

SEQ ID NO: 3649048 - DNA, 25 bp, Homo sapien
tacagttccttgcttgcgtgcgctc

SEQ ID NO: 3649049 - DNA, 25 bp, Homo sapien
acacagggtcggtctcctttaattg

SEQ ID NO: 3649050 - DNA, 25 bp, Homo sapien
agcactgctctgatacaataaagcc

SEQ ID NO: 3649051 - DNA, 25 bp, Homo sapien
cagagcctcttctaaacttcatcgc

SEQ ID NO: 3649052 - DNA, 25 bp, Homo sapien
ttagcactgctctgatacaataaag

SEQ ID NO: 3649053 - DNA, 25 bp, Homo sapien
tctaaacttcatcgcaggccatctg

SEQ ID NO: 3649054 - DNA, 25 bp, Homo sapien
ccagtactggtgttgttctgtccta

SEQ ID NO: 3649055 - DNA, 25 bp, Homo sapien
tcaggctacagcagcttagagcttg

SEQ ID NO: 3649056 - DNA, 25 bp, Homo sapien
catacttcagataagtccacgggag

SEQ ID NO: 3649057 - DNA, 25 bp, Homo sapien
tccacgggagatgttccgagtgaac

SEQ ID NO: 3649058 - DNA, 25 bp, Homo sapien
tactctgtgagtggactgatgacca

SEQ ID NO: 3649059 - DNA, 25 bp, Homo sapien
tagtcaagaacatgatgggcgcggc

SEQ ID NO: 3649060 - DNA, 25 bp, Homo sapien
gaaaatggcattcgttcacgtcaga

SEQ ID NO: 3649061 - DNA, 25 bp, Homo sapien
tgggcgcggcaatgaactgaaccac

SEQ ID NO: 3649062 - DNA, 25 bp, Homo sapien
tgtcaaacagttgctattggaagcc

SEQ ID NO: 3649063 - DNA, 25 bp, Homo sapien
tgtagaataccagttgcaccagtaa

SEQ ID NO: 3649064 - DNA, 25 bp, Homo sapien
gccacagctaccacaaaaggtagtg

SEQ ID NO: 3649065 - DNA, 25 bp, Homo sapien
tcctaaaaggaagtcgtctatgtgt

SEQ ID NO: 3649066 - DNA, 25 bp, Homo sapien
tggcaaatgcccttgatacctcaaa

SEQ ID NO: 3649067 - DNA, 25 bp, Homo sapien
caagccaggcgtggctattgagcct

SEQ ID NO: 3649068 - DNA, 25 bp, Homo sapien
gcaaatttgtgctggtactcgacca

SEQ ID NO: 3649069 - DNA, 25 bp, Homo sapien
tgatgaactgattacctttgaacgc

SEQ ID NO: 3649070 - DNA, 25 bp, Homo sapien
aaagttaccgttgagtggactgcgc

SEQ ID NO: 3649071 - DNA, 25 bp, Homo sapien
tgctaacttagatggccacagatgg

SEQ ID NO: 3649072 - DNA, 25 bp, Homo sapien
caatagcagcctccttaagtcagca

SEQ ID NO: 3649073 - DNA, 25 bp, Homo sapien
taatgatcggttacatgcctggact

SEQ ID NO: 3649074 - DNA, 25 bp, Homo sapien
gaagttaataactcggccaggcacg

SEQ ID NO: 3649075 - DNA, 25 bp, Homo sapien
taggcacagaaggtttacagctgca

SEQ ID NO: 3649076 - DNA, 25 bp, Homo sapien
cagctgcatggtcagtaagcgatac

SEQ ID NO: 3649077 - DNA, 25 bp, Homo sapien
cattgcttgcagaatatgtgcccca

SEQ ID NO: 3649078 - DNA, 25 bp, Homo sapien
agtgtcctcttgtagcagtgccgca

SEQ ID NO: 3649079 - DNA, 25 bp, Homo sapien
gacacgtccttggtttggcacacag

SEQ ID NO: 3649080 - DNA, 25 bp, Homo sapien
cagaaggtcaccgagaagtatgggc

SEQ ID NO: 3649081 - DNA, 25 bp, Homo sapien
caggctcaggtacgttcaacagaag

SEQ ID NO: 3649082 - DNA, 25 bp, Homo sapien
aatcccatctgtctgatccaggaga

SEQ ID NO: 3649083 - DNA, 25 bp, Homo sapien
gacttgaacgcttgggcactgtggc

SEQ ID NO: 3649084 - DNA, 25 bp, Homo sapien
caagattagtgacagaggcaagagc

SEQ ID NO: 3649085 - DNA, 25 bp, Homo sapien
tgccactgacaggaattcccgacag

SEQ ID NO: 3649086 - DNA, 25 bp, Homo sapien
gaataatttatgcagcccatcctct

SEQ ID NO: 3649087 - DNA, 25 bp, Homo sapien
ccaggcatcctgacgcagatttaaa

SEQ ID NO: 3649088 - DNA, 25 bp, Homo sapien
ttctatcaagactcacgccacaatg

SEQ ID NO: 3649089 - DNA, 25 bp, Homo sapien
tacagccaaattccaggaggagaat

SEQ ID NO: 3649090 - DNA, 25 bp, Homo sapien
tttatagatgaagtagcctgggctg

SEQ ID NO: 3649091 - DNA, 25 bp, Homo sapien
tcgttgcatagctaacggttcttga

SEQ ID NO: 3649092 - DNA, 25 bp, Homo sapien
taattgttacatgggcagatatcac

SEQ ID NO: 3649093 - DNA, 25 bp, Homo sapien
tgtgagaagtcacacgcacaatgtc

SEQ ID NO: 3649094 - DNA, 25 bp, Homo sapien
gtgacaacccaagagtcactctgaa

SEQ ID NO: 3649095 - DNA, 25 bp, Homo sapien
tctttggtcagttaaactctgaaaa

SEQ ID NO: 3649096 - DNA, 25 bp, Homo sapien
gggggctggccgattctcaaattgt

SEQ ID NO: 3649097 - DNA, 25 bp, Homo sapien
aacctattctagttcagggggctgg

SEQ ID NO: 3649098 - DNA, 25 bp, Homo sapien
agaaagagggtagttccacatgtct

SEQ ID NO: 3649099 - DNA, 25 bp, Homo sapien
tgtctgcaaaacgagacatctcttg

SEQ ID NO: 3649100 - DNA, 25 bp, Homo sapien
tctagcaagcttcaatatgggaacc

SEQ ID NO: 3649101 - DNA, 25 bp, Homo sapien
tgggaaccagtgcttgcagaaagag

SEQ ID NO: 3649102 - DNA, 25 bp, Homo sapien
gaagactttcacaactgtcccgatt

SEQ ID NO: 3649103 - DNA, 25 bp, Homo sapien
tgtcccgattaggtcatcataggag

SEQ ID NO: 3649104 - DNA, 25 bp, Homo sapien
cattgctgctttgcaaaaccggtaa

SEQ ID NO: 3649105 - DNA, 25 bp, Homo sapien
aaacatggtgtgacatttagagctc

SEQ ID NO: 3649106 - DNA, 25 bp, Homo sapien
cctgtgcacctaggatgtgatatct

SEQ ID NO: 3649107 - DNA, 25 bp, Homo sapien
caatacatccatgcatttgtgagga

SEQ ID NO: 3649108 - DNA, 25 bp, Homo sapien
tgagtgcctctctttgtaaaactgg

SEQ ID NO: 3649109 - DNA, 25 bp, Homo sapien
gagagaagacctttcaggctcgtgc

SEQ ID NO: 3649110 - DNA, 25 bp, Homo sapien
tatgatcacctaacagaaaggtggg

SEQ ID NO: 3649111 - DNA, 25 bp, Homo sapien
tcatataaggtggatagctgtcagc

SEQ ID NO: 3649112 - DNA, 25 bp, Homo sapien
cccattgcagtctcaaagcttatga

SEQ ID NO: 3649113 - DNA, 25 bp, Homo sapien
tgtggacacttcatctggcatactt

SEQ ID NO: 3649114 - DNA, 25 bp, Homo sapien
atttagcatgttgtgctcctttatc

SEQ ID NO: 3649115 - DNA, 25 bp, Homo sapien
ctcgtctcagtgcaatgccaggaat

SEQ ID NO: 3649116 - DNA, 25 bp, Homo sapien
gcatgttgtgctcctttatcttctc

SEQ ID NO: 3649117 - DNA, 25 bp, Homo sapien
gtctcagtgcaatgccaggaattta

SEQ ID NO: 3649118 - DNA, 25 bp, Homo sapien
tgaacccttgccttcatggaaacac

SEQ ID NO: 3649119 - DNA, 25 bp, Homo sapien
ggaatatcctctctatgaacccttg

SEQ ID NO: 3649120 - DNA, 25 bp, Homo sapien
tttccctccacgctgtttgagttga

SEQ ID NO: 3649121 - DNA, 25 bp, Homo sapien
ttgagttgagtagaagaaatttcca

SEQ ID NO: 3649122 - DNA, 25 bp, Homo sapien
acgggctagtatctccagtggctca

SEQ ID NO: 3649123 - DNA, 25 bp, Homo sapien
cacgggctagtatctccagtggctc

SEQ ID NO: 3649124 - DNA, 25 bp, Homo sapien
tcctccacgggctagtatctccagt

SEQ ID NO: 3649125 - DNA, 25 bp, Homo sapien
tccacgggctagtatctccagtggc

SEQ ID NO: 3649126 - DNA, 25 bp, Homo sapien
gttacatcaccgagaagcacttcta

SEQ ID NO: 3649127 - DNA, 25 bp, Homo sapien
ctgaacgaggtagttttcaatcaaa

SEQ ID NO: 3649128 - DNA, 25 bp, Homo sapien
gcagaaagaaatggttgcagttaca

SEQ ID NO: 3649129 - DNA, 25 bp, Homo sapien
atcctgatggttgtactggttgtac

SEQ ID NO: 3649130 - DNA, 25 bp, Homo sapien
tactttaacccatcctgctccattt

SEQ ID NO: 3649131 - DNA, 25 bp, Homo sapien
gtagtactttaacccatcctgctcc

SEQ ID NO: 3649132 - DNA, 25 bp, Homo sapien
agtactttaacccatcctgctccat

SEQ ID NO: 3649133 - DNA, 25 bp, Homo sapien
ctttaacccatcctgctccatttct

SEQ ID NO: 3649134 - DNA, 25 bp, Homo sapien
tgtgagtggcagtatctggtaatac

SEQ ID NO: 3649135 - DNA, 25 bp, Homo sapien
catagtaatgtgagtggcagtatct

SEQ ID NO: 3649136 - DNA, 25 bp, Homo sapien
tggtaatacaacctggtgaaaagat

SEQ ID NO: 3649137 - DNA, 25 bp, Homo sapien
catggtccgtggacatagtaatgtg

SEQ ID NO: 3649138 - DNA, 25 bp, Homo sapien
tctctgcctatattgtccctgtaac

SEQ ID NO: 3649139 - DNA, 25 bp, Homo sapien
tgtaaccctctatggagcacgacca

SEQ ID NO: 3649140 - DNA, 25 bp, Homo sapien
tagataaatgtggacgttttaagcc

SEQ ID NO: 3649141 - DNA, 25 bp, Homo sapien
cgaccataggtctcttacacataga

SEQ ID NO: 3649142 - DNA, 25 bp, Homo sapien
tcttaccatcagtgaatgcggattc

SEQ ID NO: 3649143 - DNA, 25 bp, Homo sapien
tgtgccattatgcattcttaccatc

SEQ ID NO: 3649144 - DNA, 25 bp, Homo sapien
tcactagcatttgattatgtcagta

SEQ ID NO: 3649145 - DNA, 25 bp, Homo sapien
tcctgttgcttcgtattttcactag

SEQ ID NO: 3649146 - DNA, 25 bp, Homo sapien
tatgaagcatggtgtttgcccaaag

SEQ ID NO: 3649147 - DNA, 25 bp, Homo sapien
gatgcacaatgctaaccaggtagaa

SEQ ID NO: 3649148 - DNA, 25 bp, Homo sapien
ggactctggattcttcatacttgca

SEQ ID NO: 3649149 - DNA, 25 bp, Homo sapien
tgggaactagaaggcaaagtcactc

SEQ ID NO: 3649150 - DNA, 25 bp, Homo sapien
tccaaggactttgccgtctgacatc

SEQ ID NO: 3649151 - DNA, 25 bp, Homo sapien
cactttgtgatactcttagtcgcca

SEQ ID NO: 3649152 - DNA, 25 bp, Homo sapien
atcttgagagctgcctcggtggtcc

SEQ ID NO: 3649153 - DNA, 25 bp, Homo sapien
ggcaaccttgaaatgatcttgagag

SEQ ID NO: 3649154 - DNA, 25 bp, Homo sapien
tctagaggcgagtagtttcctgtca

SEQ ID NO: 3649155 - DNA, 25 bp, Homo sapien
tagctatttgttctagggcaagacc

SEQ ID NO: 3649156 - DNA, 25 bp, Homo sapien
tgtcatgtatgttcttgccgagcac

SEQ ID NO: 3649157 - DNA, 25 bp, Homo sapien
tagtgtggagctaactcaggccctc

SEQ ID NO: 3649158 - DNA, 25 bp, Homo sapien
tctcctacaatctgagaagctcctg

SEQ ID NO: 3649159 - DNA, 25 bp, Homo sapien
ttcatgttgcagtccctcagcgagt

SEQ ID NO: 3649160 - DNA, 25 bp, Homo sapien
cagagacctacttggctgtggtcac

SEQ ID NO: 3649161 - DNA, 25 bp, Homo sapien
tgaatttcccggagatcccaacatc

SEQ ID NO: 3649162 - DNA, 25 bp, Homo sapien
catacattcgcctgtaagcagataa

SEQ ID NO: 3649163 - DNA, 25 bp, Homo sapien
taagagacccgcctgaagctctttt

SEQ ID NO: 3649164 - DNA, 25 bp, Homo sapien
cttctggaagatctcctaagagacc

SEQ ID NO: 3649165 - DNA, 25 bp, Homo sapien
cagtcactctttccggaaatatgtc

SEQ ID NO: 3649166 - DNA, 25 bp, Homo sapien
gaatgacagcttcctctcgtgagga

SEQ ID NO: 3649167 - DNA, 25 bp, Homo sapien
ggcagtgtataatgtggtcacaagg

SEQ ID NO: 3649168 - DNA, 25 bp, Homo sapien
ggctcaaatgtaccaaattggagga

SEQ ID NO: 3649169 - DNA, 25 bp, Homo sapien
tgtaaagtgcatcgggaatgacagc

SEQ ID NO: 3649170 - DNA, 25 bp, Homo sapien
gtccccagagtgtccccttcctgtg

SEQ ID NO: 3649171 - DNA, 25 bp, Homo sapien
ccccagagtgtccccttcctgtgtc

SEQ ID NO: 3649172 - DNA, 25 bp, Homo sapien
tccccagagtgtccccttcctgtgt

SEQ ID NO: 3649173 - DNA, 25 bp, Homo sapien
cagtccccagagtgtccccttcctg

SEQ ID NO: 3649174 - DNA, 25 bp, Homo sapien
gaaatatgtcatgttgtgctaattc

SEQ ID NO: 3649175 - DNA, 25 bp, Homo sapien
tagacctggcccacttgcaccataa

SEQ ID NO: 3649176 - DNA, 25 bp, Homo sapien
tccggcttggtgctccctggcacct

SEQ ID NO: 3649177 - DNA, 25 bp, Homo sapien
cgttgagccacccattatagacctg

SEQ ID NO: 3649178 - DNA, 25 bp, Homo sapien
catttgtgagttgcctgaggtctga

SEQ ID NO: 3649179 - DNA, 25 bp, Homo sapien
tcattaatgtaaaagtgactactca

SEQ ID NO: 3649180 - DNA, 25 bp, Homo sapien
cggtgctaagcctatgatgagtgtg

SEQ ID NO: 3649181 - DNA, 25 bp, Homo sapien
tctgagttggtgacttatggtcttc

SEQ ID NO: 3649182 - DNA, 25 bp, Homo sapien
ttcaaaaaacatcagcagcatctta

SEQ ID NO: 3649183 - DNA, 25 bp, Homo sapien
ctgaaacttcaaaaaacatcagcag

SEQ ID NO: 3649184 - DNA, 25 bp, Homo sapien
gaaacttcaaaaaacatcagcagca

SEQ ID NO: 3649185 - DNA, 25 bp, Homo sapien
aacttcaaaaaacatcagcagcatc

SEQ ID NO: 3649186 - DNA, 25 bp, Homo sapien
gacactgtatgtatttagatgataa

SEQ ID NO: 3649187 - DNA, 25 bp, Homo sapien
tgataaattgtgtggccattctggt

SEQ ID NO: 3649188 - DNA, 25 bp, Homo sapien
tttagatgataaattgtgtggccat

SEQ ID NO: 3649189 - DNA, 25 bp, Homo sapien
cttggacactgtatgtatttagatg

SEQ ID NO: 3649190 - DNA, 25 bp, Homo sapien
gcctgtggtccaggcataattaata

SEQ ID NO: 3649191 - DNA, 25 bp, Homo sapien
tcagtctttatgaggtgtagtgaga

SEQ ID NO: 3649192 - DNA, 25 bp, Homo sapien
ttatgaggtgtagtgagaagctcag

SEQ ID NO: 3649193 - DNA, 25 bp, Homo sapien
caggtaggatgcagatgtgtctcag

SEQ ID NO: 3649194 - DNA, 25 bp, Homo sapien
tccagcaatacttggaggagaaatt

SEQ ID NO: 3649195 - DNA, 25 bp, Homo sapien
gatcagcatgatattaatgtgaccc

SEQ ID NO: 3649196 - DNA, 25 bp, Homo sapien
ggtgattttgggttatgcaatttaa

SEQ ID NO: 3649197 - DNA, 25 bp, Homo sapien
caatttaagagctaagatcagcatg

SEQ ID NO: 3649198 - DNA, 25 bp, Homo sapien
actgccctcggtagctgtgactgca

SEQ ID NO: 3649199 - DNA, 25 bp, Homo sapien
agcactgccctcggtagctgtgact

SEQ ID NO: 3649200 - DNA, 25 bp, Homo sapien
cactgccctcggtagctgtgactgc

SEQ ID NO: 3649201 - DNA, 25 bp, Homo sapien
gcactgccctcggtagctgtgactg

SEQ ID NO: 3649202 - DNA, 25 bp, Homo sapien
acagccccggagagtctgaccaggg

SEQ ID NO: 3649203 - DNA, 25 bp, Homo sapien
ccagggctatggttgaccagcagga

SEQ ID NO: 3649204 - DNA, 25 bp, Homo sapien
tgcatgagaagtcctgctggtcaat

SEQ ID NO: 3649205 - DNA, 25 bp, Homo sapien
ctaagactcagtgcatgagaagtcc

SEQ ID NO: 3649206 - DNA, 25 bp, Homo sapien
ctctgctgtagcatggtcccggagc

SEQ ID NO: 3649207 - DNA, 25 bp, Homo sapien
ctgctgtagcatggtcccggagctg

SEQ ID NO: 3649208 - DNA, 25 bp, Homo sapien
gctgtagcatggtcccggagctgag

SEQ ID NO: 3649209 - DNA, 25 bp, Homo sapien
tgctgtagcatggtcccggagctga

SEQ ID NO: 3649210 - DNA, 25 bp, Homo sapien
aggccacgctcagcctggcttcttg

SEQ ID NO: 3649211 - DNA, 25 bp, Homo sapien
agccaggccacgctcagcctggctt

SEQ ID NO: 3649212 - DNA, 25 bp, Homo sapien
cagccaggccacgctcagcctggct

SEQ ID NO: 3649213 - DNA, 25 bp, Homo sapien
ccaggccacgctcagcctggcttct

SEQ ID NO: 3649214 - DNA, 25 bp, Homo sapien
cacgaaagccaccttataaagtagg

SEQ ID NO: 3649215 - DNA, 25 bp, Homo sapien
gatttcctgcgtagctcaaagcact

SEQ ID NO: 3649216 - DNA, 25 bp, Homo sapien
ttactcagtaagtggcacgaaagcc

SEQ ID NO: 3649217 - DNA, 25 bp, Homo sapien
tcttctacctgacttaaagggagac

SEQ ID NO: 3649218 - DNA, 25 bp, Homo sapien
cgtagacctgctacaaagattccat

SEQ ID NO: 3649219 - DNA, 25 bp, Homo sapien
tctgcagcttttccggaagccgtag

SEQ ID NO: 3649220 - DNA, 25 bp, Homo sapien
gttgtgatagattgtcgaaaggttc

SEQ ID NO: 3649221 - DNA, 25 bp, Homo sapien
gatagattgtcgaaaggttcaagat

SEQ ID NO: 3649222 - DNA, 25 bp, Homo sapien
tggcttccagtttggcctgactctg

SEQ ID NO: 3649223 - DNA, 25 bp, Homo sapien
gctgagagatatacacttgttctgg

SEQ ID NO: 3649224 - DNA, 25 bp, Homo sapien
gactctggaattttatctcggcacg

SEQ ID NO: 3649225 - DNA, 25 bp, Homo sapien
tctggtaaagttaaggcattggcca

SEQ ID NO: 3649226 - DNA, 25 bp, Homo sapien
acttttccaatcatgggtaaagaga

SEQ ID NO: 3649227 - DNA, 25 bp, Homo sapien
gacttttccaatcatgggtaaagag

SEQ ID NO: 3649228 - DNA, 25 bp, Homo sapien
cttttccaatcatgggtaaagagag

SEQ ID NO: 3649229 - DNA, 25 bp, Homo sapien
taagtggtcttggagtttcatagtc

SEQ ID NO: 3649230 - DNA, 25 bp, Homo sapien
gatctgcattctcacagccttgagg

SEQ ID NO: 3649231 - DNA, 25 bp, Homo sapien
tgtagcaggctaaaaagttcgcgta

SEQ ID NO: 3649232 - DNA, 25 bp, Homo sapien
gtttcacagcctcaagttgtagcag

SEQ ID NO: 3649233 - DNA, 25 bp, Homo sapien
ctgtgtacatcattttgcttgagtt

SEQ ID NO: 3649234 - DNA, 25 bp, Homo sapien
gtgtacatcattttgcttgagtttc

SEQ ID NO: 3649235 - DNA, 25 bp, Homo sapien
ttcctgtgtacatcattttgcttga

SEQ ID NO: 3649236 - DNA, 25 bp, Homo sapien
tcctgtgtacatcattttgcttgag

SEQ ID NO: 3649237 - DNA, 25 bp, Homo sapien
tattcatctccacggcattgcacca

SEQ ID NO: 3649238 - DNA, 25 bp, Homo sapien
ctcaacctttccatctacacctcct

SEQ ID NO: 3649239 - DNA, 25 bp, Homo sapien
ctttccatctacacctcctttctcc

SEQ ID NO: 3649240 - DNA, 25 bp, Homo sapien
tccacggcattgcaccatcttttct

SEQ ID NO: 3649241 - DNA, 25 bp, Homo sapien
aatgcgggaaatccaagaccctcct

SEQ ID NO: 3649242 - DNA, 25 bp, Homo sapien
ctgggtagaaggctctggacggcaa

SEQ ID NO: 3649243 - DNA, 25 bp, Homo sapien
acggcaatgcgggaaatccaagacc

SEQ ID NO: 3649244 - DNA, 25 bp, Homo sapien
gctctggacggcaatgcgggaaatc

SEQ ID NO: 3649245 - DNA, 25 bp, Homo sapien
actgagttgaaggttttcctgggct

SEQ ID NO: 3649246 - DNA, 25 bp, Homo sapien
gcgtccattggctgtaccattacat

SEQ ID NO: 3649247 - DNA, 25 bp, Homo sapien
cagaaggttgactatgtgaagatat

SEQ ID NO: 3649248 - DNA, 25 bp, Homo sapien
tacatccagttagagactgtgccta

SEQ ID NO: 3649249 - DNA, 25 bp, Homo sapien
tagagactgtgcctaagaatgcgtc

SEQ ID NO: 3649250 - DNA, 25 bp, Homo sapien
aatgtgttccctgcaagtggtctcc

SEQ ID NO: 3649251 - DNA, 25 bp, Homo sapien
ccttggtggactagagcaacatcgt

SEQ ID NO: 3649252 - DNA, 25 bp, Homo sapien
caacatcgtgctgcccaaaggacta

SEQ ID NO: 3649253 - DNA, 25 bp, Homo sapien
cttaaatgacggcaaaccaggaatg

SEQ ID NO: 3649254 - DNA, 25 bp, Homo sapien
gttatgcaaattgttaacaccagct

SEQ ID NO: 3649255 - DNA, 25 bp, Homo sapien
gcgagactaactttgagagtgtaac

SEQ ID NO: 3649256 - DNA, 25 bp, Homo sapien
tgtggttgatgattaatttgcgaga

SEQ ID NO: 3649257 - DNA, 25 bp, Homo sapien
ggggcttcacggaatgttacaatgt

SEQ ID NO: 3649258 - DNA, 25 bp, Homo sapien
aaatgtgtgtgatctttaataacac

SEQ ID NO: 3649259 - DNA, 25 bp, Homo sapien
ccctatagaaagtggataaaagata

SEQ ID NO: 3649260 - DNA, 25 bp, Homo sapien
atataggtgcctttttgattactct

SEQ ID NO: 3649261 - DNA, 25 bp, Homo sapien
gcaagttgctgcctattctatagta

SEQ ID NO: 3649262 - DNA, 25 bp, Homo sapien
ctggccaaaaagttgactctttggg

SEQ ID NO: 3649263 - DNA, 25 bp, Homo sapien
tgcccacaaaagagccatatgaatt

SEQ ID NO: 3649264 - DNA, 25 bp, Homo sapien
gcaaaagtcaagatgtaccaataag

SEQ ID NO: 3649265 - DNA, 25 bp, Homo sapien
ggccaagatgctctgtctttaggga

SEQ ID NO: 3649266 - DNA, 25 bp, Homo sapien
ggattcacatctgccaagggtcttc

SEQ ID NO: 3649267 - DNA, 25 bp, Homo sapien
cattcatgaggcagagcgctatggc

SEQ ID NO: 3649268 - DNA, 25 bp, Homo sapien
tagcacctggtcaaaatcatgaatg

SEQ ID NO: 3649269 - DNA, 25 bp, Homo sapien
gagtgcttgcacatgccttagagga

SEQ ID NO: 3649270 - DNA, 25 bp, Homo sapien
gccaaccattgtgatggcttacata

SEQ ID NO: 3649271 - DNA, 25 bp, Homo sapien
tgttgtgtgttattatacttcccga

SEQ ID NO: 3649272 - DNA, 25 bp, Homo sapien
tttataaaccgaagtaagatgagga

SEQ ID NO: 3649273 - DNA, 25 bp, Homo sapien
taaacagtatattgcttaaaaagcc

SEQ ID NO: 3649274 - DNA, 25 bp, Homo sapien
tctttgtaactaaaatcgataattg

SEQ ID NO: 3649275 - DNA, 25 bp, Homo sapien
gactatgttgtagcttgttacattc

SEQ ID NO: 3649276 - DNA, 25 bp, Homo sapien
taaaatcgataattgtgttgggaac

SEQ ID NO: 3649277 - DNA, 25 bp, Homo sapien
gtatttgttgtggattttaactcag

SEQ ID NO: 3649278 - DNA, 25 bp, Homo sapien
tctttgagataacaggctttggact

SEQ ID NO: 3649279 - DNA, 25 bp, Homo sapien
tgttatttccacttgtgaggccagc

SEQ ID NO: 3649280 - DNA, 25 bp, Homo sapien
actgtggtatggaaaaggacgccac

SEQ ID NO: 3649281 - DNA, 25 bp, Homo sapien
cagagcaccagagacgtcagcatct

SEQ ID NO: 3649282 - DNA, 25 bp, Homo sapien
ttttctcggtacctggtataggtca

SEQ ID NO: 3649283 - DNA, 25 bp, Homo sapien
tataggtcagtggagagttcaagaa

SEQ ID NO: 3649284 - DNA, 25 bp, Homo sapien
cctggtataggtcagtggagagttc

SEQ ID NO: 3649285 - DNA, 25 bp, Homo sapien
tcggtacctggtataggtcagtgga

SEQ ID NO: 3649286 - DNA, 25 bp, Homo sapien
aacgcgcaaaacacattctcattgg

SEQ ID NO: 3649287 - DNA, 25 bp, Homo sapien
aatgtctcttagttcaaacgcgcaa

SEQ ID NO: 3649288 - DNA, 25 bp, Homo sapien
ctcattggtcaccaaatgaccagtg

SEQ ID NO: 3649289 - DNA, 25 bp, Homo sapien
tcctctcctcaagtgcagtgtctgc

SEQ ID NO: 3649290 - DNA, 25 bp, Homo sapien
tgtgtatgctgggtgaggacaaaat

SEQ ID NO: 3649291 - DNA, 25 bp, Homo sapien
gaatggaatgtatcaggctaatgtg

SEQ ID NO: 3649292 - DNA, 25 bp, Homo sapien
gctaaaccaggtctagttcccataa

SEQ ID NO: 3649293 - DNA, 25 bp, Homo sapien
cacacatggataagtaggctaaacc

SEQ ID NO: 3649294 - DNA, 25 bp, Homo sapien
ggtggtcactgttgagaccctcgtc

SEQ ID NO: 3649295 - DNA, 25 bp, Homo sapien
gaatgtaaaggatgatagaatatgg

SEQ ID NO: 3649296 - DNA, 25 bp, Homo sapien
ggtcactgttgagaccctcgtccat

SEQ ID NO: 3649297 - DNA, 25 bp, Homo sapien
cttggtggtcactgttgagaccctc

SEQ ID NO: 3649298 - DNA, 25 bp, Homo sapien
caaagtccgtgtgatttccaggcga

SEQ ID NO: 3649299 - DNA, 25 bp, Homo sapien
atattttaaggctcactaccgaggg

SEQ ID NO: 3649300 - DNA, 25 bp, Homo sapien
gagatgctgataatcgtctgctgcc

SEQ ID NO: 3649301 - DNA, 25 bp, Homo sapien
tccatgtggtgcttagtgaattcga

SEQ ID NO: 3649302 - DNA, 25 bp, Homo sapien
taaatagctgaatcagtgtggcccg

SEQ ID NO: 3649303 - DNA, 25 bp, Homo sapien
tgttaacgacaaaccactgggacat

SEQ ID NO: 3649304 - DNA, 25 bp, Homo sapien
tgtggcccgaatcttgatcctgctg

SEQ ID NO: 3649305 - DNA, 25 bp, Homo sapien
tgggacatcccctcagtgctgtggg

SEQ ID NO: 3649306 - DNA, 25 bp, Homo sapien
gtcatgtgactcttgccagccaatg

SEQ ID NO: 3649307 - DNA, 25 bp, Homo sapien
cttgccagccaatgggctttgaaca

SEQ ID NO: 3649308 - DNA, 25 bp, Homo sapien
ccagccaatgggctttgaacaaaca

SEQ ID NO: 3649309 - DNA, 25 bp, Homo sapien
ggtcatgtgactcttgccagccaat

SEQ ID NO: 3649310 - DNA, 25 bp, Homo sapien
tagagaaggtactgttgccccattg

SEQ ID NO: 3649311 - DNA, 25 bp, Homo sapien
catctttgccatgtgactctgtaga

SEQ ID NO: 3649312 - DNA, 25 bp, Homo sapien
tttgaatcgtatgcccacatctttg

SEQ ID NO: 3649313 - DNA, 25 bp, Homo sapien
cccctttttgaatcgtatgcccaca

SEQ ID NO: 3649314 - DNA, 25 bp, Homo sapien
acggctgcaattgctaatctgttgc

SEQ ID NO: 3649315 - DNA, 25 bp, Homo sapien
ggtgctgctgcaaatcccctcataa

SEQ ID NO: 3649316 - DNA, 25 bp, Homo sapien
gctgcaaatcccctcataattacac

SEQ ID NO: 3649317 - DNA, 25 bp, Homo sapien
gcggtgctgctgcaaatcccctcat

SEQ ID NO: 3649318 - DNA, 25 bp, Homo sapien
gctgctgcaaatcccctcataatta

SEQ ID NO: 3649319 - DNA, 25 bp, Homo sapien
tggcgtcgtcttgattatattcctt

SEQ ID NO: 3649320 - DNA, 25 bp, Homo sapien
ctggcggtctgtcggctggctggac

SEQ ID NO: 3649321 - DNA, 25 bp, Homo sapien
ccaggtgctgttagctttttgtctc

SEQ ID NO: 3649322 - DNA, 25 bp, Homo sapien
ctttttgtctctggcggtctgtcgg

SEQ ID NO: 3649323 - DNA, 25 bp, Homo sapien
tttcacctggaatgtgacaaccagg

SEQ ID NO: 3649324 - DNA, 25 bp, Homo sapien
gccgattttcctctagcactaggta

SEQ ID NO: 3649325 - DNA, 25 bp, Homo sapien
ttgccgattttcctctagcactagg

SEQ ID NO: 3649326 - DNA, 25 bp, Homo sapien
ccgattttcctctagcactaggtac

SEQ ID NO: 3649327 - DNA, 25 bp, Homo sapien
tgccgattttcctctagcactaggt

SEQ ID NO: 3649328 - DNA, 25 bp, Homo sapien
aatgtctgtgggacaagacattctc

SEQ ID NO: 3649329 - DNA, 25 bp, Homo sapien
atgtctgtgggacaagacattctct

SEQ ID NO: 3649330 - DNA, 25 bp, Homo sapien
tgtctgtgggacaagacattctctt

SEQ ID NO: 3649331 - DNA, 25 bp, Homo sapien
ctaagaagcacctactcctttttgg

SEQ ID NO: 3649332 - DNA, 25 bp, Homo sapien
ggttgacatttacatcgagcgagta

SEQ ID NO: 3649333 - DNA, 25 bp, Homo sapien
tacatcgagcgagtacctttcatct

SEQ ID NO: 3649334 - DNA, 25 bp, Homo sapien
cctactcctttttggaggttgacat

SEQ ID NO: 3649335 - DNA, 25 bp, Homo sapien
tagccacatgccttggaggtatgcc

SEQ ID NO: 3649336 - DNA, 25 bp, Homo sapien
gacagcaccgtttgtagtagcacaa

SEQ ID NO: 3649337 - DNA, 25 bp, Homo sapien
actggaaacagagcgaaaggtcatc

SEQ ID NO: 3649338 - DNA, 25 bp, Homo sapien
gaaaagcgtagagatgaccaaaccc

SEQ ID NO: 3649339 - DNA, 25 bp, Homo sapien
tctttctctgtgtagtttgttcatt

SEQ ID NO: 3649340 - DNA, 25 bp, Homo sapien
tctctgtgtagtttgttcattaatt

SEQ ID NO: 3649341 - DNA, 25 bp, Homo sapien
ctgtgtagtttgttcattaatttaa

SEQ ID NO: 3649342 - DNA, 25 bp, Homo sapien
ctgttttagtgggtctttctctgtg

SEQ ID NO: 3649343 - DNA, 25 bp, Homo sapien
agagcacccattagcttcagaagga

SEQ ID NO: 3649344 - DNA, 25 bp, Homo sapien
ctcagaactttgtttagagcaccca

SEQ ID NO: 3649345 - DNA, 25 bp, Homo sapien
aggaccttcccaccggaattctctg

SEQ ID NO: 3649346 - DNA, 25 bp, Homo sapien
tctgggggccttgcaaaaggataaa

SEQ ID NO: 3649347 - DNA, 25 bp, Homo sapien
tcccatagtgtggaaggcgatggca

SEQ ID NO: 3649348 - DNA, 25 bp, Homo sapien
gaatcttagtctctcccatagtgtg

SEQ ID NO: 3649349 - DNA, 25 bp, Homo sapien
gctgcaatgtgccttgtagaaggat

SEQ ID NO: 3649350 - DNA, 25 bp, Homo sapien
agaatgtgggttgcatttcccagaa

SEQ ID NO: 3649351 - DNA, 25 bp, Homo sapien
cccggtcttgaattgtcctgatatt

SEQ ID NO: 3649352 - DNA, 25 bp, Homo sapien
gaaagtgttgaacatctgtactgtt

SEQ ID NO: 3649353 - DNA, 25 bp, Homo sapien
ttgtcttcgtactgttcctgctggg

SEQ ID NO: 3649354 - DNA, 25 bp, Homo sapien
gcctgtgtgggaattccgggtgaaa

SEQ ID NO: 3649355 - DNA, 25 bp, Homo sapien
cgaagcagtccttcaccacggtggc

SEQ ID NO: 3649356 - DNA, 25 bp, Homo sapien
ccgaagcagtccttcaccacggtgg

SEQ ID NO: 3649357 - DNA, 25 bp, Homo sapien
gaagcagtccttcaccacggtggca

SEQ ID NO: 3649358 - DNA, 25 bp, Homo sapien
taagaggccgctgaatgtttgcaca

SEQ ID NO: 3649359 - DNA, 25 bp, Homo sapien
tgagtctttacctgcacacagggag

SEQ ID NO: 3649360 - DNA, 25 bp, Homo sapien
tgtttgcacaaatgcgacgacatgc

SEQ ID NO: 3649361 - DNA, 25 bp, Homo sapien
gacatgccttataggacacgctgaa

SEQ ID NO: 3649362 - DNA, 25 bp, Homo sapien
caggagagtcgagtttgaaacagtg

SEQ ID NO: 3649363 - DNA, 25 bp, Homo sapien
gagagtcgagtttgaaacagtgagg

SEQ ID NO: 3649364 - DNA, 25 bp, Homo sapien
cagtgaggatgttagagaagccaca

SEQ ID NO: 3649365 - DNA, 25 bp, Homo sapien
acagtgaggatgttagagaagccac

SEQ ID NO: 3649366 - DNA, 25 bp, Homo sapien
ggtcatctgttgcatcagcccagct

SEQ ID NO: 3649367 - DNA, 25 bp, Homo sapien
tcaaatcgttgaaacatctccttcc

SEQ ID NO: 3649368 - DNA, 25 bp, Homo sapien
cccagtcctcagctagaaagtctgt

SEQ ID NO: 3649369 - DNA, 25 bp, Homo sapien
tcttcttattcgtcttttttgctga

SEQ ID NO: 3649370 - DNA, 25 bp, Homo sapien
agaaagctccagttgatattgggtt

SEQ ID NO: 3649371 - DNA, 25 bp, Homo sapien
gaagaaagctccagttgatattggg

SEQ ID NO: 3649372 - DNA, 25 bp, Homo sapien
aagaaagctccagttgatattgggt

SEQ ID NO: 3649373 - DNA, 25 bp, Homo sapien
aaagaacgatcgtccctgtctgtat

SEQ ID NO: 3649374 - DNA, 25 bp, Homo sapien
aaacctatcatcaccccttctaggc

SEQ ID NO: 3649375 - DNA, 25 bp, Homo sapien
aacgatcgtccctgtctgtatcctg

SEQ ID NO: 3649376 - DNA, 25 bp, Homo sapien
aacctatcatcaccccttctaggcg

SEQ ID NO: 3649377 - DNA, 25 bp, Homo sapien
gggccatcccgatactcataccaat

SEQ ID NO: 3649378 - DNA, 25 bp, Homo sapien
atactcataccaatacccacggcca

SEQ ID NO: 3649379 - DNA, 25 bp, Homo sapien
ctcataccaatacccacggccagac

SEQ ID NO: 3649380 - DNA, 25 bp, Homo sapien
tactcataccaatacccacggccag

SEQ ID NO: 3649381 - DNA, 25 bp, Homo sapien
tgtccctgggtacccactgccaaat

SEQ ID NO: 3649382 - DNA, 25 bp, Homo sapien
ctgcacgacccatcatcccatctgt

SEQ ID NO: 3649383 - DNA, 25 bp, Homo sapien
cattgtccctgggtacccactgcca

SEQ ID NO: 3649384 - DNA, 25 bp, Homo sapien
agctgcacgacccatcatcccatct

SEQ ID NO: 3649385 - DNA, 25 bp, Homo sapien
cccttaggagtattatgaggcttta

SEQ ID NO: 3649386 - DNA, 25 bp, Homo sapien
agaatcatctcccttaggagtatta

SEQ ID NO: 3649387 - DNA, 25 bp, Homo sapien
aagacaaaataagctcgaccggact

SEQ ID NO: 3649388 - DNA, 25 bp, Homo sapien
taagctcgaccggactgggaggtac

SEQ ID NO: 3649389 - DNA, 25 bp, Homo sapien
gttccttctgtagccattcttctac

SEQ ID NO: 3649390 - DNA, 25 bp, Homo sapien
aacttatcttgttccttctgtagcc

SEQ ID NO: 3649391 - DNA, 25 bp, Homo sapien
tccagctgatgctgcaacttatctt

SEQ ID NO: 3649392 - DNA, 25 bp, Homo sapien
tctagttttgcctcatccagctgat

SEQ ID NO: 3649393 - DNA, 25 bp, Homo sapien
ctggtctgattgacttttgccgggt

SEQ ID NO: 3649394 - DNA, 25 bp, Homo sapien
cttgggtgcctctccggttcctggg

SEQ ID NO: 3649395 - DNA, 25 bp, Homo sapien
ggtctgattgacttttgccgggtgt

SEQ ID NO: 3649396 - DNA, 25 bp, Homo sapien
gcttgggtgcctctccggttcctgg

SEQ ID NO: 3649397 - DNA, 25 bp, Homo sapien
gatcagttttggtagatttagaagt

SEQ ID NO: 3649398 - DNA, 25 bp, Homo sapien
cagttttggtagatttagaagttgg

SEQ ID NO: 3649399 - DNA, 25 bp, Homo sapien
tcagttttggtagatttagaagttg

SEQ ID NO: 3649400 - DNA, 25 bp, Homo sapien
atcagttttggtagatttagaagtt

SEQ ID NO: 3649401 - DNA, 25 bp, Homo sapien
ccaccacttgtagggtattcgtgct

SEQ ID NO: 3649402 - DNA, 25 bp, Homo sapien
tgtagggtattcgtgctgtgtgtct

SEQ ID NO: 3649403 - DNA, 25 bp, Homo sapien
tctcagacggttgagctggagttac

SEQ ID NO: 3649404 - DNA, 25 bp, Homo sapien
ggtattcgtgctgtgtgtctgagct

SEQ ID NO: 3649405 - DNA, 25 bp, Homo sapien
tggtcttttgggacattcaccacac

SEQ ID NO: 3649406 - DNA, 25 bp, Homo sapien
gtgtggtcttttgggacattcacca

SEQ ID NO: 3649407 - DNA, 25 bp, Homo sapien
tgtggtcttttgggacattcaccac

SEQ ID NO: 3649408 - DNA, 25 bp, Homo sapien
gtggtcttttgggacattcaccaca

SEQ ID NO: 3649409 - DNA, 25 bp, Homo sapien
tcacaaattccgtatttcacatatt

SEQ ID NO: 3649410 - DNA, 25 bp, Homo sapien
atttcacatattggctcaggtgcag

SEQ ID NO: 3649411 - DNA, 25 bp, Homo sapien
tggagtcatgctcctttttgccatc

SEQ ID NO: 3649412 - DNA, 25 bp, Homo sapien
cgtatttcacatattggctcaggtg

SEQ ID NO: 3649413 - DNA, 25 bp, Homo sapien
gcatggagacatgactaatatcatt

SEQ ID NO: 3649414 - DNA, 25 bp, Homo sapien
catggagacatgactaatatcattg

SEQ ID NO: 3649415 - DNA, 25 bp, Homo sapien
tgcatggagacatgactaatatcat

SEQ ID NO: 3649416 - DNA, 25 bp, Homo sapien
tgattggtgagtgccatgatgtaca

SEQ ID NO: 3649417 - DNA, 25 bp, Homo sapien
aatggtaatttgtagccaggcctgc

SEQ ID NO: 3649418 - DNA, 25 bp, Homo sapien
gcacaccggtgtgtcctaatggtaa

SEQ ID NO: 3649419 - DNA, 25 bp, Homo sapien
tatggcacacgtgggcatcacgctt

SEQ ID NO: 3649420 - DNA, 25 bp, Homo sapien
tgggtgacccccatagggttcatca

SEQ ID NO: 3649421 - DNA, 25 bp, Homo sapien
tgagcaggtgatgggtgacccccat

SEQ ID NO: 3649422 - DNA, 25 bp, Homo sapien
ccccatagggttcatcatcatcctc

SEQ ID NO: 3649423 - DNA, 25 bp, Homo sapien
agctttctcatggtgagcaggtgat

SEQ ID NO: 3649424 - DNA, 25 bp, Homo sapien
accagaggtgtacaccagcacgcct

SEQ ID NO: 3649425 - DNA, 25 bp, Homo sapien
cacgttggtctctgggatcaagcaa

SEQ ID NO: 3649426 - DNA, 25 bp, Homo sapien
ttgcccacgttggtctctgggatca

SEQ ID NO: 3649427 - DNA, 25 bp, Homo sapien
tcttttgagactccagctgtgtccc

SEQ ID NO: 3649428 - DNA, 25 bp, Homo sapien
tgatgtggagatacccaagtcacct

SEQ ID NO: 3649429 - DNA, 25 bp, Homo sapien
gatggtcgctggctgcttgttcatt

SEQ ID NO: 3649430 - DNA, 25 bp, Homo sapien
tggatggtcgctggctgcttgttca

SEQ ID NO: 3649431 - DNA, 25 bp, Homo sapien
actggatggtcgctggctgcttgtt

SEQ ID NO: 3649432 - DNA, 25 bp, Homo sapien
atggtcgctggctgcttgttcattt

SEQ ID NO: 3649433 - DNA, 25 bp, Homo sapien
tcatgcttctccccgtactgcagtg

SEQ ID NO: 3649434 - DNA, 25 bp, Homo sapien
gcttctccccgtactgcagtgacat

SEQ ID NO: 3649435 - DNA, 25 bp, Homo sapien
ttctccccgtactgcagtgacatct

SEQ ID NO: 3649436 - DNA, 25 bp, Homo sapien
atgcttctccccgtactgcagtgac

SEQ ID NO: 3649437 - DNA, 25 bp, Homo sapien
gtttctttgatatgtgcaaggtccc

SEQ ID NO: 3649438 - DNA, 25 bp, Homo sapien
ccaaatggtttttctcggtgttgct

SEQ ID NO: 3649439 - DNA, 25 bp, Homo sapien
ttttctcggtgttgcttggtgtttc

SEQ ID NO: 3649440 - DNA, 25 bp, Homo sapien
tgacacacagttaagataaaggtcc

SEQ ID NO: 3649441 - DNA, 25 bp, Homo sapien
agtgatagggttgcagggagggtga

SEQ ID NO: 3649442 - DNA, 25 bp, Homo sapien
cagggagggtgatgcaccattacta

SEQ ID NO: 3649443 - DNA, 25 bp, Homo sapien
aaagatgtgccagatggagtgatag

SEQ ID NO: 3649444 - DNA, 25 bp, Homo sapien
gatgcaccattactagccccatctg

SEQ ID NO: 3649445 - DNA, 25 bp, Homo sapien
gatggaggtgtagaaggataaagag

SEQ ID NO: 3649446 - DNA, 25 bp, Homo sapien
gagttggcagaactattagtctaag

SEQ ID NO: 3649447 - DNA, 25 bp, Homo sapien
ccatccagcttatgctcatatggaa

SEQ ID NO: 3649448 - DNA, 25 bp, Homo sapien
ttagtctaagaggagggtgaattga

SEQ ID NO: 3649449 - DNA, 25 bp, Homo sapien
taaagtcccactcaaatgagcaggt

SEQ ID NO: 3649450 - DNA, 25 bp, Homo sapien
tgagcaggtcataggagtagatacc

SEQ ID NO: 3649451 - DNA, 25 bp, Homo sapien
tgttgtagagcttggatacatgatt

SEQ ID NO: 3649452 - DNA, 25 bp, Homo sapien
ttcttctggcatgttgtagagcttg

SEQ ID NO: 3649453 - DNA, 25 bp, Homo sapien
tgtgctagtgcgtatgcccctgtgc

SEQ ID NO: 3649454 - DNA, 25 bp, Homo sapien
caagcttcctaatgagttgaccaag

SEQ ID NO: 3649455 - DNA, 25 bp, Homo sapien
caagaaccatgaccagaccaggtgg

SEQ ID NO: 3649456 - DNA, 25 bp, Homo sapien
catgttgagtcttggcagcaaccgg

SEQ ID NO: 3649457 - DNA, 25 bp, Homo sapien
cagtcactttgttccaacgcagtct

SEQ ID NO: 3649458 - DNA, 25 bp, Homo sapien
gctagctctaagctgatgatgctca

SEQ ID NO: 3649459 - DNA, 25 bp, Homo sapien
acttccatggctagctctaagctga

SEQ ID NO: 3649460 - DNA, 25 bp, Homo sapien
tgcgtgtcccagtcactttgttcca

SEQ ID NO: 3649461 - DNA, 25 bp, Homo sapien
ccttctccagtaacattcctccaag

SEQ ID NO: 3649462 - DNA, 25 bp, Homo sapien
cttctccagtaacattcctccaagc

SEQ ID NO: 3649463 - DNA, 25 bp, Homo sapien
tccagtaacattcctccaagctctg

SEQ ID NO: 3649464 - DNA, 25 bp, Homo sapien
caggctttcacccactttttgccag

SEQ ID NO: 3649465 - DNA, 25 bp, Homo sapien
tcttgccacactcacccgtgtcacc

SEQ ID NO: 3649466 - DNA, 25 bp, Homo sapien
ctttttgccaggtaccagtacacca

SEQ ID NO: 3649467 - DNA, 25 bp, Homo sapien
caggtaccagtacaccactttttga

SEQ ID NO: 3649468 - DNA, 25 bp, Homo sapien
tgtggggagctcagatgaaatagct

SEQ ID NO: 3649469 - DNA, 25 bp, Homo sapien
cttggagatttttgattgagccttt

SEQ ID NO: 3649470 - DNA, 25 bp, Homo sapien
atttgtggggagctcagatgaaata

SEQ ID NO: 3649471 - DNA, 25 bp, Homo sapien
tgagcctttttgtaatagagaaggg

SEQ ID NO: 3649472 - DNA, 25 bp, Homo sapien
tttgcctcttttcagtagacccatt

SEQ ID NO: 3649473 - DNA, 25 bp, Homo sapien
gcctcttttcagtagacccattgtt

SEQ ID NO: 3649474 - DNA, 25 bp, Homo sapien
cttttcagtagacccattgttactg

SEQ ID NO: 3649475 - DNA, 25 bp, Homo sapien
ctcttttcagtagacccattgttac

SEQ ID NO: 3649476 - DNA, 25 bp, Homo sapien
ggcagcccgcacagctgacaatgga

SEQ ID NO: 3649477 - DNA, 25 bp, Homo sapien
cagagtttgcgagtgagctcctcat

SEQ ID NO: 3649478 - DNA, 25 bp, Homo sapien
gcagagtttgcgagtgagctcctca

SEQ ID NO: 3649479 - DNA, 25 bp, Homo sapien
taacaactgcggcagcccgcacagc

SEQ ID NO: 3649480 - DNA, 25 bp, Homo sapien
gagatctgaatagcctcctggtcag

SEQ ID NO: 3649481 - DNA, 25 bp, Homo sapien
tcctggtcagtcatccagaagcaac

SEQ ID NO: 3649482 - DNA, 25 bp, Homo sapien
ctggtcagtcatccagaagcaactc

SEQ ID NO: 3649483 - DNA, 25 bp, Homo sapien
ccacctttttctgtgtttgtttgca

SEQ ID NO: 3649484 - DNA, 25 bp, Homo sapien
cattgggagagacatagtatctgtc

SEQ ID NO: 3649485 - DNA, 25 bp, Homo sapien
gatttagctgtatacctggtccacc

SEQ ID NO: 3649486 - DNA, 25 bp, Homo sapien
tataaggttcctcatcagccataca

SEQ ID NO: 3649487 - DNA, 25 bp, Homo sapien
tctctagaagtcacaaactggaaat

SEQ ID NO: 3649488 - DNA, 25 bp, Homo sapien
gacttggcaaggaggagttgaccac

SEQ ID NO: 3649489 - DNA, 25 bp, Homo sapien
gaccactgaccattggaaatctcga

SEQ ID NO: 3649490 - DNA, 25 bp, Homo sapien
ttaccctctaggtggaggacttggc

SEQ ID NO: 3649491 - DNA, 25 bp, Homo sapien
ctttagggttatagatatcattacc

SEQ ID NO: 3649492 - DNA, 25 bp, Homo sapien
tgttgagcttggtgggaatccataa

SEQ ID NO: 3649493 - DNA, 25 bp, Homo sapien
gaatccataagccatcattccgctc

SEQ ID NO: 3649494 - DNA, 25 bp, Homo sapien
gggcttctttgtgttgagcttggtg

SEQ ID NO: 3649495 - DNA, 25 bp, Homo sapien
gaaatttccagtggaacatgcacac

SEQ ID NO: 3649496 - DNA, 25 bp, Homo sapien
tctctaatagctgtgcattgcctct

SEQ ID NO: 3649497 - DNA, 25 bp, Homo sapien
gaggattaggctgattttggaacac

SEQ ID NO: 3649498 - DNA, 25 bp, Homo sapien
tctcggagcctcctgtgggtacctt

SEQ ID NO: 3649499 - DNA, 25 bp, Homo sapien
tgttttggaatcagctgcacttgag

SEQ ID NO: 3649500 - DNA, 25 bp, Homo sapien
catggactgagtggtaaggtgatct

SEQ ID NO: 3649501 - DNA, 25 bp, Homo sapien
taactgacgctgttggaaaacttct

SEQ ID NO: 3649502 - DNA, 25 bp, Homo sapien
tagtagacagggctggtgcaaccca

SEQ ID NO: 3649503 - DNA, 25 bp, Homo sapien
gctgtcagagtaagccaagctggag

SEQ ID NO: 3649504 - DNA, 25 bp, Homo sapien
cttgtagggcgatttggatggttga

SEQ ID NO: 3649505 - DNA, 25 bp, Homo sapien
taaggaaggggaacggtgcccagca

SEQ ID NO: 3649506 - DNA, 25 bp, Homo sapien
gttgaatgcagtaccagggaagcca

SEQ ID NO: 3649507 - DNA, 25 bp, Homo sapien
agccccatctgcaggtgttacctaa

SEQ ID NO: 3649508 - DNA, 25 bp, Homo sapien
gtgtttgttactaagcaacggttgc

SEQ ID NO: 3649509 - DNA, 25 bp, Homo sapien
caaggtaacaatgcccaaacacagc

SEQ ID NO: 3649510 - DNA, 25 bp, Homo sapien
tactaagcaacggttgctaagagct

SEQ ID NO: 3649511 - DNA, 25 bp, Homo sapien
aagcaacggttgctaagagcttctg

SEQ ID NO: 3649512 - DNA, 25 bp, Homo sapien
tttaggcctcaactgtcaacaggga

SEQ ID NO: 3649513 - DNA, 25 bp, Homo sapien
gaagctgggacatttgcacgtgtta

SEQ ID NO: 3649514 - DNA, 25 bp, Homo sapien
gcacgtgttattccctttctggaac

SEQ ID NO: 3649515 - DNA, 25 bp, Homo sapien
gacattattgtatcatcactgccta

SEQ ID NO: 3649516 - DNA, 25 bp, Homo sapien
tcttgtcatgcagtgggcgttaatc

SEQ ID NO: 3649517 - DNA, 25 bp, Homo sapien
tctgttcttgtcatgcagtgggcgt

SEQ ID NO: 3649518 - DNA, 25 bp, Homo sapien
tcccaatattgcttttgagcggtgg

SEQ ID NO: 3649519 - DNA, 25 bp, Homo sapien
tgagcggtggcaataatcagtaggt

SEQ ID NO: 3649520 - DNA, 25 bp, Homo sapien
ctcaagatttgcacacgggggctgc

SEQ ID NO: 3649521 - DNA, 25 bp, Homo sapien
tggcccgtaaaaagcactcaagatt

SEQ ID NO: 3649522 - DNA, 25 bp, Homo sapien
ttggcagacgttgaaagaaaagcat

SEQ ID NO: 3649523 - DNA, 25 bp, Homo sapien
gcagaatggcagtttggcagacgtt

SEQ ID NO: 3649524 - DNA, 25 bp, Homo sapien
gctgctggtcactcctcattagtgc

SEQ ID NO: 3649525 - DNA, 25 bp, Homo sapien
catttcgctgctggtcactcctcat

SEQ ID NO: 3649526 - DNA, 25 bp, Homo sapien
tgctggtcactcctcattagtgcct

SEQ ID NO: 3649527 - DNA, 25 bp, Homo sapien
tcgctgctggtcactcctcattagt

SEQ ID NO: 3649528 - DNA, 25 bp, Homo sapien
atggagggcccttggttaattcatg

SEQ ID NO: 3649529 - DNA, 25 bp, Homo sapien
tggagggcccttggttaattcatgc

SEQ ID NO: 3649530 - DNA, 25 bp, Homo sapien
gagggcccttggttaattcatgctt

SEQ ID NO: 3649531 - DNA, 25 bp, Homo sapien
ggcccttggttaattcatgcttcat

SEQ ID NO: 3649532 - DNA, 25 bp, Homo sapien
cagagattcatcctccctacagttt

SEQ ID NO: 3649533 - DNA, 25 bp, Homo sapien
gaagtaggttcatcattcaggtctc

SEQ ID NO: 3649534 - DNA, 25 bp, Homo sapien
ggctggaatgttgccagagattcat

SEQ ID NO: 3649535 - DNA, 25 bp, Homo sapien
ccctgtgtggttggcatagtctgga

SEQ ID NO: 3649536 - DNA, 25 bp, Homo sapien
tcattaaccgagctcagaaatcgtt

SEQ ID NO: 3649537 - DNA, 25 bp, Homo sapien
ggtttcgaagccactctctgggccc

SEQ ID NO: 3649538 - DNA, 25 bp, Homo sapien
cctgcatttagacactttgaactgg

SEQ ID NO: 3649539 - DNA, 25 bp, Homo sapien
gaagtgctgtttcgacagaaccttg

SEQ ID NO: 3649540 - DNA, 25 bp, Homo sapien
gcacctgggatggaaagcaatgagt

SEQ ID NO: 3649541 - DNA, 25 bp, Homo sapien
gagtgtcagagaccacgcttggcga

SEQ ID NO: 3649542 - DNA, 25 bp, Homo sapien
gcttcgagaagttttggcacctggg

SEQ ID NO: 3649543 - DNA, 25 bp, Homo sapien
gcttggcgattgtgatgttggaacc

SEQ ID NO: 3649544 - DNA, 25 bp, Homo sapien
ggcgcgaggctcactccccaggccg

SEQ ID NO: 3649545 - DNA, 25 bp, Homo sapien
cggtggcgcgaggctcactccccag

SEQ ID NO: 3649546 - DNA, 25 bp, Homo sapien
ctccccggcctgcagcggcggtggc

SEQ ID NO: 3649547 - DNA, 25 bp, Homo sapien
gtggcgcgaggctcactccccaggc

SEQ ID NO: 3649548 - DNA, 25 bp, Homo sapien
ccagggacgtcagtcagcctgggat

SEQ ID NO: 3649549 - DNA, 25 bp, Homo sapien
ctccccgcgacatttgggtgccagg

SEQ ID NO: 3649550 - DNA, 25 bp, Homo sapien
ttgggtgccagggacgtcagtcagc

SEQ ID NO: 3649551 - DNA, 25 bp, Homo sapien
cgcactccccgcgacatttgggtgc

SEQ ID NO: 3649552 - DNA, 25 bp, Homo sapien
atttattaatcaagagaggctcgac

SEQ ID NO: 3649553 - DNA, 25 bp, Homo sapien
gacacgagggagaagcgtcctctcg

SEQ ID NO: 3649554 - DNA, 25 bp, Homo sapien
tcgggcctaaaatgaccagtcgctc

SEQ ID NO: 3649555 - DNA, 25 bp, Homo sapien
tctcatccaggatccgaggacttcc

SEQ ID NO: 3649556 - DNA, 25 bp, Homo sapien
ttttattggatgaagttcccctagc

SEQ ID NO: 3649557 - DNA, 25 bp, Homo sapien
aggctcttttctccatccatcgcca

SEQ ID NO: 3649558 - DNA, 25 bp, Homo sapien
ttattggatgaagttcccctagcag

SEQ ID NO: 3649559 - DNA, 25 bp, Homo sapien
attggatgaagttcccctagcagca

SEQ ID NO: 3649560 - DNA, 25 bp, Homo sapien
ggtgacctctctccatacagaggtg

SEQ ID NO: 3649561 - DNA, 25 bp, Homo sapien
cttgggtgttaccagccggctgcat

SEQ ID NO: 3649562 - DNA, 25 bp, Homo sapien
tgcagtctctgggaacggtgacctt

SEQ ID NO: 3649563 - DNA, 25 bp, Homo sapien
tgtaaggagccagaacaagggctgt

SEQ ID NO: 3649564 - DNA, 25 bp, Homo sapien
tcccattcttcctccctgtcagcct

SEQ ID NO: 3649565 - DNA, 25 bp, Homo sapien
attcttcctccctgtcagccttcca

SEQ ID NO: 3649566 - DNA, 25 bp, Homo sapien
tcctccctgtcagccttccactcca

SEQ ID NO: 3649567 - DNA, 25 bp, Homo sapien
tctcccattcttcctccctgtcagc

SEQ ID NO: 3649568 - DNA, 25 bp, Homo sapien
ccctgctggtttccgaccatttcag

SEQ ID NO: 3649569 - DNA, 25 bp, Homo sapien
aggtgccttatacaaacagtaccca

SEQ ID NO: 3649570 - DNA, 25 bp, Homo sapien
ccttgatctacatcattagcttcct

SEQ ID NO: 3649571 - DNA, 25 bp, Homo sapien
ttttcccttgatctacatcattagc

SEQ ID NO: 3649572 - DNA, 25 bp, Homo sapien
gaatctgtccccactacaggtgcct

SEQ ID NO: 3649573 - DNA, 25 bp, Homo sapien
gtgactgcttggattgatttgacag

SEQ ID NO: 3649574 - DNA, 25 bp, Homo sapien
gacatttctagggtgactgcttgga

SEQ ID NO: 3649575 - DNA, 25 bp, Homo sapien
caagttgagctaggtgtatttcctc

SEQ ID NO: 3649576 - DNA, 25 bp, Homo sapien
ttgtggtttagtcttgttgagtgat

SEQ ID NO: 3649577 - DNA, 25 bp, Homo sapien
gcctacattggtccaggtatgccag

SEQ ID NO: 3649578 - DNA, 25 bp, Homo sapien
gtccaggtatgccagctgaccacag

SEQ ID NO: 3649579 - DNA, 25 bp, Homo sapien
cattcagctggcctacattggtcca

SEQ ID NO: 3649580 - DNA, 25 bp, Homo sapien
acagctcgcctctgctctgactcca

SEQ ID NO: 3649581 - DNA, 25 bp, Homo sapien
tgaagttgacgtaactgggtttggc

SEQ ID NO: 3649582 - DNA, 25 bp, Homo sapien
gaagttgacgtaactgggtttggca

SEQ ID NO: 3649583 - DNA, 25 bp, Homo sapien
aagttgacgtaactgggtttggcat

SEQ ID NO: 3649584 - DNA, 25 bp, Homo sapien
gctaccgtgtagctctgcaccatga

SEQ ID NO: 3649585 - DNA, 25 bp, Homo sapien
tgagaacggtagtcaagccagctat

SEQ ID NO: 3649586 - DNA, 25 bp, Homo sapien
gttttgaagtattgacacagcagct

SEQ ID NO: 3649587 - DNA, 25 bp, Homo sapien
cagcagctaaaggagtgagaacggt

SEQ ID NO: 3649588 - DNA, 25 bp, Homo sapien
tccgcagcagactgaaagcttgtaa

SEQ ID NO: 3649589 - DNA, 25 bp, Homo sapien
tgctgtaggttgcacccttagagta

SEQ ID NO: 3649590 - DNA, 25 bp, Homo sapien
tagctggctagtactgtgatggaca

SEQ ID NO: 3649591 - DNA, 25 bp, Homo sapien
aagcttgtaacaaactttagctggc

SEQ ID NO: 3649592 - DNA, 25 bp, Homo sapien
tgacgatcgccacaggatgttggga

SEQ ID NO: 3649593 - DNA, 25 bp, Homo sapien
tccctgtacttgtggcctggcttgg

SEQ ID NO: 3649594 - DNA, 25 bp, Homo sapien
tcttccggtagctttatgaaaagta

SEQ ID NO: 3649595 - DNA, 25 bp, Homo sapien
gggccaaggctcttgcgcctacaga

SEQ ID NO: 3649596 - DNA, 25 bp, Homo sapien
cttggcaaattcgttttgcctcggg

SEQ ID NO: 3649597 - DNA, 25 bp, Homo sapien
tttgaacttggcaaattcgttttgc

SEQ ID NO: 3649598 - DNA, 25 bp, Homo sapien
tgcctcggggctttgactgccttat

SEQ ID NO: 3649599 - DNA, 25 bp, Homo sapien
gactgccttatttggctttcaggaa

SEQ ID NO: 3649600 - DNA, 25 bp, Homo sapien
gatcccagtcggctgaggttctctg

SEQ ID NO: 3649601 - DNA, 25 bp, Homo sapien
ttctctgggagatggatagcagtgt

SEQ ID NO: 3649602 - DNA, 25 bp, Homo sapien
gaagccagatttctgatcccagtcg

SEQ ID NO: 3649603 - DNA, 25 bp, Homo sapien
ctgatttggtctctgtttaggaagc

SEQ ID NO: 3649604 - DNA, 25 bp, Homo sapien
cctgagtttcctatgttgtcaaggt

SEQ ID NO: 3649605 - DNA, 25 bp, Homo sapien
gtaacttgaaccttccaaatcaaca

SEQ ID NO: 3649606 - DNA, 25 bp, Homo sapien
tcaaacacgctgtagccctgagttt

SEQ ID NO: 3649607 - DNA, 25 bp, Homo sapien
tgtcaaggtaaccaaagcgtctgtt

SEQ ID NO: 3649608 - DNA, 25 bp, Homo sapien
aacccagggggccgaacaagctcat

SEQ ID NO: 3649609 - DNA, 25 bp, Homo sapien
atgcaacccagggggccgaacaagc

SEQ ID NO: 3649610 - DNA, 25 bp, Homo sapien
gaatgcaacccagggggccgaacaa

SEQ ID NO: 3649611 - DNA, 25 bp, Homo sapien
gcaacccagggggccgaacaagctc

SEQ ID NO: 3649612 - DNA, 25 bp, Homo sapien
ggaagcagaacagccacagatgcgc

SEQ ID NO: 3649613 - DNA, 25 bp, Homo sapien
gatgtttccaaaagctacaggaagc

SEQ ID NO: 3649614 - DNA, 25 bp, Homo sapien
tgcttgaagtaggagagatgtttcc

SEQ ID NO: 3649615 - DNA, 25 bp, Homo sapien
tccctctaggggaatgcttgaagta

SEQ ID NO: 3649616 - DNA, 25 bp, Homo sapien
ggctctccagatgtggagaaaaatc

SEQ ID NO: 3649617 - DNA, 25 bp, Homo sapien
aaaaatcttgcatgtctttctccct

SEQ ID NO: 3649618 - DNA, 25 bp, Homo sapien
tggagaaaaatcttgcatgtctttc

SEQ ID NO: 3649619 - DNA, 25 bp, Homo sapien
catctggctctccagatgtggagaa

SEQ ID NO: 3649620 - DNA, 25 bp, Homo sapien
tcctgttcactaccaagttgttctg

SEQ ID NO: 3649621 - DNA, 25 bp, Homo sapien
cactaccaagttgttctgatgaagt

SEQ ID NO: 3649622 - DNA, 25 bp, Homo sapien
cacagcgcactcctcctgttcacta

SEQ ID NO: 3649623 - DNA, 25 bp, Homo sapien
actcctcctgttcactaccaagttg

SEQ ID NO: 3649624 - DNA, 25 bp, Homo sapien
taggagaagttgatgccctttagtc

SEQ ID NO: 3649625 - DNA, 25 bp, Homo sapien
gagaagtaggagaagttgatgccct

SEQ ID NO: 3649626 - DNA, 25 bp, Homo sapien
taagccaaggctatgaggtacatga

SEQ ID NO: 3649627 - DNA, 25 bp, Homo sapien
tcaaaagccggagacttttctataa

SEQ ID NO: 3649628 - DNA, 25 bp, Homo sapien
tattcagagacacagcgatcctcct

SEQ ID NO: 3649629 - DNA, 25 bp, Homo sapien
aagcatttcgtgatggcgtattcag

SEQ ID NO: 3649630 - DNA, 25 bp, Homo sapien
tcaatcagtttaacctcttccccag

SEQ ID NO: 3649631 - DNA, 25 bp, Homo sapien
gcagaggcacttgttcaatcagttt

SEQ ID NO: 3649632 - DNA, 25 bp, Homo sapien
ctgggttggcggggcaagaaacaga

SEQ ID NO: 3649633 - DNA, 25 bp, Homo sapien
caatgaaggaattgcttcttagaca

SEQ ID NO: 3649634 - DNA, 25 bp, Homo sapien
gggtcttccttgtggaaatctggtg

SEQ ID NO: 3649635 - DNA, 25 bp, Homo sapien
tctggtgtctattttttcggcaatg

SEQ ID NO: 3649636 - DNA, 25 bp, Homo sapien
aaagacccatgtcaacggagccctg

SEQ ID NO: 3649637 - DNA, 25 bp, Homo sapien
tgattttgatacatcggctccatag

SEQ ID NO: 3649638 - DNA, 25 bp, Homo sapien
tcaaggagtgaattctgcatgaaca

SEQ ID NO: 3649639 - DNA, 25 bp, Homo sapien
caactctgtcttgggtgtgattttg

SEQ ID NO: 3649640 - DNA, 25 bp, Homo sapien
tgaacaacgtcagggacatcaaaga

SEQ ID NO: 3649641 - DNA, 25 bp, Homo sapien
ggtggtagaggaacagatgttcaaa

SEQ ID NO: 3649642 - DNA, 25 bp, Homo sapien
ccagatgttgggacaatgggttgat

SEQ ID NO: 3649643 - DNA, 25 bp, Homo sapien
gtagaggaacagatgttcaaacaga

SEQ ID NO: 3649644 - DNA, 25 bp, Homo sapien
gttcaaacagaaacgaaggaatctg

SEQ ID NO: 3649645 - DNA, 25 bp, Homo sapien
aagactggggatgggtaagtgtgaa

SEQ ID NO: 3649646 - DNA, 25 bp, Homo sapien
actggggatgggtaagtgtgaaggc

SEQ ID NO: 3649647 - DNA, 25 bp, Homo sapien
ctaggatgtaagcttgaggctccag

SEQ ID NO: 3649648 - DNA, 25 bp, Homo sapien
gaggaattggggtgctctaggatgt

SEQ ID NO: 3649649 - DNA, 25 bp, Homo sapien
tgcgcgaggaccgagcagccggtcc

SEQ ID NO: 3649650 - DNA, 25 bp, Homo sapien
ggctgtgcgcgaggaccgagcagcc

SEQ ID NO: 3649651 - DNA, 25 bp, Homo sapien
taagcctcgctgtttccactggttg

SEQ ID NO: 3649652 - DNA, 25 bp, Homo sapien
cttaccataagcctcgctgtttcca

SEQ ID NO: 3649653 - DNA, 25 bp, Homo sapien
gatgcagagatggacaatgtcactc

SEQ ID NO: 3649654 - DNA, 25 bp, Homo sapien
aaacccgcgtgggagcagatgcaga

SEQ ID NO: 3649655 - DNA, 25 bp, Homo sapien
cataggagtcagctgttagcatcgg

SEQ ID NO: 3649656 - DNA, 25 bp, Homo sapien
tgcccgtgcacttcaaagacactgg

SEQ ID NO: 3649657 - DNA, 25 bp, Homo sapien
cagtgatgctgagagtcaattggtg

SEQ ID NO: 3649658 - DNA, 25 bp, Homo sapien
gatgctgagagtcaattggtgtaac

SEQ ID NO: 3649659 - DNA, 25 bp, Homo sapien
gtcaattggtgtaacttgatgagcc

SEQ ID NO: 3649660 - DNA, 25 bp, Homo sapien
tgtaacttgatgagccgaaatcccc

SEQ ID NO: 3649661 - DNA, 25 bp, Homo sapien
ctgataagaggcgacaggagactca

SEQ ID NO: 3649662 - DNA, 25 bp, Homo sapien
aagcaccagctttgggtccttgatg

SEQ ID NO: 3649663 - DNA, 25 bp, Homo sapien
tcatctttctgtctagcctgtccct

SEQ ID NO: 3649664 - DNA, 25 bp, Homo sapien
tagcctgtcccttaatcgggctctg

SEQ ID NO: 3649665 - DNA, 25 bp, Homo sapien
gggtcacactggcatgggctccatc

SEQ ID NO: 3649666 - DNA, 25 bp, Homo sapien
tcacactggcatgggctccatctgt

SEQ ID NO: 3649667 - DNA, 25 bp, Homo sapien
ccctgggtcacactggcatgggctc

SEQ ID NO: 3649668 - DNA, 25 bp, Homo sapien
tgccctgggtcacactggcatgggc

SEQ ID NO: 3649669 - DNA, 25 bp, Homo sapien
agaccagggacacacgaaacagaac

SEQ ID NO: 3649670 - DNA, 25 bp, Homo sapien
gaccagggacacacgaaacagaaca

SEQ ID NO: 3649671 - DNA, 25 bp, Homo sapien
accagggacacacgaaacagaacag

SEQ ID NO: 3649672 - DNA, 25 bp, Homo sapien
ccagggacacacgaaacagaacagc

SEQ ID NO: 3649673 - DNA, 25 bp, Homo sapien
gtctgagttggaggacattgaggct

SEQ ID NO: 3649674 - DNA, 25 bp, Homo sapien
aacaaacagcagagaagatgtctga

SEQ ID NO: 3649675 - DNA, 25 bp, Homo sapien
gaggggcacccgcatggaggcggta

SEQ ID NO: 3649676 - DNA, 25 bp, Homo sapien
tggaggcggtatgcagctggctgca

SEQ ID NO: 3649677 - DNA, 25 bp, Homo sapien
tcatcttgaaccgaatatgcgcccc

SEQ ID NO: 3649678 - DNA, 25 bp, Homo sapien
tactgtttatagcagggctgacaca

SEQ ID NO: 3649679 - DNA, 25 bp, Homo sapien
ggtcctccctgaaggtcatcttgaa

SEQ ID NO: 3649680 - DNA, 25 bp, Homo sapien
tgtgtgacttagcaggacactgaca

SEQ ID NO: 3649681 - DNA, 25 bp, Homo sapien
tatcctccttaggaagagtctggaa

SEQ ID NO: 3649682 - DNA, 25 bp, Homo sapien
cactgaactgagagcaaacgtccca

SEQ ID NO: 3649683 - DNA, 25 bp, Homo sapien
ccaggtaccttctcaatgcttcaaa

SEQ ID NO: 3649684 - DNA, 25 bp, Homo sapien
taacgatttaccgtgtgccatcagt

SEQ ID NO: 3649685 - DNA, 25 bp, Homo sapien
gaaagaagagaacttatagggtgaa

SEQ ID NO: 3649686 - DNA, 25 bp, Homo sapien
agagaacttatagggtgaatttgca

SEQ ID NO: 3649687 - DNA, 25 bp, Homo sapien
ttatctagcctctcccccttcgggc

SEQ ID NO: 3649688 - DNA, 25 bp, Homo sapien
ttcgggcgcaaccacggggcttctg

SEQ ID NO: 3649689 - DNA, 25 bp, Homo sapien
gcaacggtggcacaacaaactgcgc

SEQ ID NO: 3649690 - DNA, 25 bp, Homo sapien
ggtggcacaacaaactgcgcgggtt

SEQ ID NO: 3649691 - DNA, 25 bp, Homo sapien
gcacaacaaactgcgcgggtttcac

SEQ ID NO: 3649692 - DNA, 25 bp, Homo sapien
tgcagcaacggtggcacaacaaact

SEQ ID NO: 3649693 - DNA, 25 bp, Homo sapien
gggacacctcaagcggctgtgtctc

SEQ ID NO: 3649694 - DNA, 25 bp, Homo sapien
aagcggctgtgtctctcgtagctca

SEQ ID NO: 3649695 - DNA, 25 bp, Homo sapien
ggctgtgtctctcgtagctcatggg

SEQ ID NO: 3649696 - DNA, 25 bp, Homo sapien
ctcaagcggctgtgtctctcgtagc

SEQ ID NO: 3649697 - DNA, 25 bp, Homo sapien
aaacgttattgtagcgaagtccaga

SEQ ID NO: 3649698 - DNA, 25 bp, Homo sapien
aaaacgttattgtagcgaagtccag

SEQ ID NO: 3649699 - DNA, 25 bp, Homo sapien
aacgttattgtagcgaagtccagac

SEQ ID NO: 3649700 - DNA, 25 bp, Homo sapien
cgttattgtagcgaagtccagactc

SEQ ID NO: 3649701 - DNA, 25 bp, Homo sapien
caaatttcaccttaatgaggctgac

SEQ ID NO: 3649702 - DNA, 25 bp, Homo sapien
aaatttcaccttaatgaggctgaca

SEQ ID NO: 3649703 - DNA, 25 bp, Homo sapien
ggccgcgtggtaccctctgacaaga

SEQ ID NO: 3649704 - DNA, 25 bp, Homo sapien
tacaatacaatatgatgggaggctc

SEQ ID NO: 3649705 - DNA, 25 bp, Homo sapien
ggatgtgcggataacctttgtctta

SEQ ID NO: 3649706 - DNA, 25 bp, Homo sapien
gaatgaacacgcacaacctgggtgg

SEQ ID NO: 3649707 - DNA, 25 bp, Homo sapien
tgcttcttatatcatcacctggtgg

SEQ ID NO: 3649708 - DNA, 25 bp, Homo sapien
cacctggtggttatcactgctgaag

SEQ ID NO: 3649709 - DNA, 25 bp, Homo sapien
gatggtactgctatttcagatctct

SEQ ID NO: 3649710 - DNA, 25 bp, Homo sapien
ccggccccactgctacaatgatggt

SEQ ID NO: 3649711 - DNA, 25 bp, Homo sapien
agttgcaaatacctctgtactcgga

SEQ ID NO: 3649712 - DNA, 25 bp, Homo sapien
aatacctctgtactcggaccaacct

SEQ ID NO: 3649713 - DNA, 25 bp, Homo sapien
gtaatcaatcagttgcaaatacctc

SEQ ID NO: 3649714 - DNA, 25 bp, Homo sapien
caatcagttgcaaatacctctgtac

SEQ ID NO: 3649715 - DNA, 25 bp, Homo sapien
ctttggtaaccaataaaacgatcat

SEQ ID NO: 3649716 - DNA, 25 bp, Homo sapien
tgttcttcaccatgcgtgcactttg

SEQ ID NO: 3649717 - DNA, 25 bp, Homo sapien
caccatgcgtgcactttgccaagga

SEQ ID NO: 3649718 - DNA, 25 bp, Homo sapien
cactttgccaaggatctttggtaac

SEQ ID NO: 3649719 - DNA, 25 bp, Homo sapien
tcgcgccctgctagggggtgttggg

SEQ ID NO: 3649720 - DNA, 25 bp, Homo sapien
ctcgcgccctgctagggggtgttgg

SEQ ID NO: 3649721 - DNA, 25 bp, Homo sapien
cgcgccctgctagggggtgttgggg

SEQ ID NO: 3649722 - DNA, 25 bp, Homo sapien
aggcacatgttggagctcgatgttg

SEQ ID NO: 3649723 - DNA, 25 bp, Homo sapien
ctcagggtgtggttgatttgtctgc

SEQ ID NO: 3649724 - DNA, 25 bp, Homo sapien
cgccgaggctatatgctgcttgcaa

SEQ ID NO: 3649725 - DNA, 25 bp, Homo sapien
tccgcgctttctcgttcggcgggaa

SEQ ID NO: 3649726 - DNA, 25 bp, Homo sapien
gggcgcgcagtttcccggctccgtg

SEQ ID NO: 3649727 - DNA, 25 bp, Homo sapien
ggtcgggccgcgacgagggaagctc

SEQ ID NO: 3649728 - DNA, 25 bp, Homo sapien
ggttgcaaaccgcaagcgaaagtcg

SEQ ID NO: 3649729 - DNA, 25 bp, Homo sapien
cccacctagtgggtcctgacctggg

SEQ ID NO: 3649730 - DNA, 25 bp, Homo sapien
tgcgagggcgcgagggaagggaggc

SEQ ID NO: 3649731 - DNA, 25 bp, Homo sapien
aggttccggtgccatccgcagtaaa

SEQ ID NO: 3649732 - DNA, 25 bp, Homo sapien
gtgccatccgcagtaaattcccttc

SEQ ID NO: 3649733 - DNA, 25 bp, Homo sapien
gcagagggcgggtgcgagggcgcga

SEQ ID NO: 3649734 - DNA, 25 bp, Homo sapien
ccgcaaactcgtgggcagtgcagtg

SEQ ID NO: 3649735 - DNA, 25 bp, Homo sapien
gactggcacatccacaaccgtagga

SEQ ID NO: 3649736 - DNA, 25 bp, Homo sapien
tttttaggctgagactgggcggtcc

SEQ ID NO: 3649737 - DNA, 25 bp, Homo sapien
cagggtaaccttgtctcgcgcacct

SEQ ID NO: 3649738 - DNA, 25 bp, Homo sapien
aattccgggcgagtatatgaggttg

SEQ ID NO: 3649739 - DNA, 25 bp, Homo sapien
tccgcggatgcgcagctagcgattt

SEQ ID NO: 3649740 - DNA, 25 bp, Homo sapien
atccaggacttcttccgcggatgcg

SEQ ID NO: 3649741 - DNA, 25 bp, Homo sapien
tcgacaggcgagattgaaaattccg

SEQ ID NO: 3649742 - DNA, 25 bp, Homo sapien
gagtgtgctgatgcctgctgctatc

SEQ ID NO: 3649743 - DNA, 25 bp, Homo sapien
cggaacggccggagtgtgctgatgc

SEQ ID NO: 3649744 - DNA, 25 bp, Homo sapien
cttctccctgtagcggcgggcctga

SEQ ID NO: 3649745 - DNA, 25 bp, Homo sapien
tgcgcggacccgactcttaaggtgg

SEQ ID NO: 3649746 - DNA, 25 bp, Homo sapien
ctgcaggtgccgggcgcctccgcag

SEQ ID NO: 3649747 - DNA, 25 bp, Homo sapien
tgcaggtgccgggcgcctccgcagc

SEQ ID NO: 3649748 - DNA, 25 bp, Homo sapien
caggtgccgggcgcctccgcagccg

SEQ ID NO: 3649749 - DNA, 25 bp, Homo sapien
gcaggtgccgggcgcctccgcagcc

SEQ ID NO: 3649750 - DNA, 25 bp, Homo sapien
acgcggcggcgcgggagaaaccacg

SEQ ID NO: 3649751 - DNA, 25 bp, Homo sapien
gcggcgcgggagaaaccacggggca

SEQ ID NO: 3649752 - DNA, 25 bp, Homo sapien
tgcacgcggcggcgcgggagaaacc

SEQ ID NO: 3649753 - DNA, 25 bp, Homo sapien
cggcgcgggagaaaccacggggcag

SEQ ID NO: 3649754 - DNA, 25 bp, Homo sapien
ctaacggctgcacttcgctcccttc

SEQ ID NO: 3649755 - DNA, 25 bp, Homo sapien
gccgcttctgaatccgggagggttc

SEQ ID NO: 3649756 - DNA, 25 bp, Homo sapien
aggccgcttctgaatccgggagggt

SEQ ID NO: 3649757 - DNA, 25 bp, Homo sapien
gaggccgcttctgaatccgggaggg

SEQ ID NO: 3649758 - DNA, 25 bp, Homo sapien
cgcttctgaatccgggagggttcgg

SEQ ID NO: 3649759 - DNA, 25 bp, Homo sapien
tgcggggcaggcgacagtcccttcc

SEQ ID NO: 3649760 - DNA, 25 bp, Homo sapien
tctcgcggccgaatgatggaaagct

SEQ ID NO: 3649761 - DNA, 25 bp, Homo sapien
cagccgttcccaacctcgagaacaa

SEQ ID NO: 3649762 - DNA, 25 bp, Homo sapien
cctcgagaacaaagggtctgggaag

SEQ ID NO: 3649763 - DNA, 25 bp, Homo sapien
gagttgggggagtccgagtgagaac

SEQ ID NO: 3649764 - DNA, 25 bp, Homo sapien
tgtggtttctcctcccccacacgtc

SEQ ID NO: 3649765 - DNA, 25 bp, Homo sapien
cctgggaatgctccgcgccgagaag

SEQ ID NO: 3649766 - DNA, 25 bp, Homo sapien
cgggcttgcagaccgtgcaggctgg

SEQ ID NO: 3649767 - DNA, 25 bp, Homo sapien
tgcaattagcctccccagggcgcgg

SEQ ID NO: 3649768 - DNA, 25 bp, Homo sapien
tgagaggccgcaccttgccttgctg

SEQ ID NO: 3649769 - DNA, 25 bp, Homo sapien
gggtctcgggtcctggcgctgagag

SEQ ID NO: 3649770 - DNA, 25 bp, Homo sapien
gggcgttcgtgtgcaattagcctcc

SEQ ID NO: 3649771 - DNA, 25 bp, Homo sapien
gtgctcaagaagatgcaatcgcggg

SEQ ID NO: 3649772 - DNA, 25 bp, Homo sapien
ctcagggtggcgcacggcggagagg

SEQ ID NO: 3649773 - DNA, 25 bp, Homo sapien
aagaagatgcaatcgcgggagccct

SEQ ID NO: 3649774 - DNA, 25 bp, Homo sapien
tggcgcacggcggagaggcgacgcg

SEQ ID NO: 3649775 - DNA, 25 bp, Homo sapien
gaaacgaagctgaacgcattggtaa

SEQ ID NO: 3649776 - DNA, 25 bp, Homo sapien
tgtctccatccgagtaagaaacgaa

SEQ ID NO: 3649777 - DNA, 25 bp, Homo sapien
tccgcgatgtctccatccgagtaag

SEQ ID NO: 3649778 - DNA, 25 bp, Homo sapien
tccgagtaagaaacgaagctgaacg

SEQ ID NO: 3649779 - DNA, 25 bp, Homo sapien
ctctctgctcggtttcccgccccac

SEQ ID NO: 3649780 - DNA, 25 bp, Homo sapien
ctggtgccattgcctcagccaagtc

SEQ ID NO: 3649781 - DNA, 25 bp, Homo sapien
aagtctcccacctctctgctcggtt

SEQ ID NO: 3649782 - DNA, 25 bp, Homo sapien
tggtgccattgcctcagccaagtct

SEQ ID NO: 3649783 - DNA, 25 bp, Homo sapien
tcgcggacctggactcgggactccg

SEQ ID NO: 3649784 - DNA, 25 bp, Homo sapien
tgtgactggcgctccgcggactcgt

SEQ ID NO: 3649785 - DNA, 25 bp, Homo sapien
cgcggactcgtgtccacagtacaga

SEQ ID NO: 3649786 - DNA, 25 bp, Homo sapien
tacagaggacatgtagggttcggcc

SEQ ID NO: 3649787 - DNA, 25 bp, Homo sapien
tttgtgaccaggatggtgccgagcc

SEQ ID NO: 3649788 - DNA, 25 bp, Homo sapien
ttgtgaccaggatggtgccgagccc

SEQ ID NO: 3649789 - DNA, 25 bp, Homo sapien
tgaccaggatggtgccgagccccct

SEQ ID NO: 3649790 - DNA, 25 bp, Homo sapien
tgtgaccaggatggtgccgagcccc

SEQ ID NO: 3649791 - DNA, 25 bp, Homo sapien
gctttcccgagcctgggacgcaact

SEQ ID NO: 3649792 - DNA, 25 bp, Homo sapien
tgccgagagagcagctagcgcagct

SEQ ID NO: 3649793 - DNA, 25 bp, Homo sapien
agccattgaggaccagggtcgcgcc

SEQ ID NO: 3649794 - DNA, 25 bp, Homo sapien
gctttgtaagcgagtcccaagcccg

SEQ ID NO: 3649795 - DNA, 25 bp, Homo sapien
aaattgaagtgatacggagcaggaa

SEQ ID NO: 3649796 - DNA, 25 bp, Homo sapien
aagtgatacggagcaggaattcaac

SEQ ID NO: 3649797 - DNA, 25 bp, Homo sapien
aattaaaattgaagtgatacggagc

SEQ ID NO: 3649798 - DNA, 25 bp, Homo sapien
gtgacagcggtgttttaaaagatta

SEQ ID NO: 3649799 - DNA, 25 bp, Homo sapien
gatgtttcagtgtctcagcgagaac

SEQ ID NO: 3649800 - DNA, 25 bp, Homo sapien
tatgctttgcggaaaccccttaaca

SEQ ID NO: 3649801 - DNA, 25 bp, Homo sapien
ggagcttcatgaccccagagaatag

SEQ ID NO: 3649802 - DNA, 25 bp, Homo sapien
gaagacttctctccaacgcgggagg

SEQ ID NO: 3649803 - DNA, 25 bp, Homo sapien
actgggacattggtgcgtgcctcct

SEQ ID NO: 3649804 - DNA, 25 bp, Homo sapien
aacgtgagcacccagcacctgagcg

SEQ ID NO: 3649805 - DNA, 25 bp, Homo sapien
ctctaagtgtgcgtggaggtcgcgc

SEQ ID NO: 3649806 - DNA, 25 bp, Homo sapien
ggtcgtgcatttggcgctctgtgct

SEQ ID NO: 3649807 - DNA, 25 bp, Homo sapien
gcccctgctagcagaacaggtcgca

SEQ ID NO: 3649808 - DNA, 25 bp, Homo sapien
tttcttaggaatttgcacggtccgc

SEQ ID NO: 3649809 - DNA, 25 bp, Homo sapien
cagggagctcaggtttccgccgaag

SEQ ID NO: 3649810 - DNA, 25 bp, Homo sapien
taggaatttgcacggtccgcctctg

SEQ ID NO: 3649811 - DNA, 25 bp, Homo sapien
tcttgtgtgaccgaggggtaatttg

SEQ ID NO: 3649812 - DNA, 25 bp, Homo sapien
ggtggcacagagcgcagagattctt

SEQ ID NO: 3649813 - DNA, 25 bp, Homo sapien
tgaccgaggggtaatttggagagaa

SEQ ID NO: 3649814 - DNA, 25 bp, Homo sapien
ggcacagagcgcagagattcttgtt

SEQ ID NO: 3649815 - DNA, 25 bp, Homo sapien
ggaagacatgcagcatcatagaaag

SEQ ID NO: 3649816 - DNA, 25 bp, Homo sapien
gacatgcagcatcatagaaaggatt

SEQ ID NO: 3649817 - DNA, 25 bp, Homo sapien
ctgaggaagacatgcagcatcatag

SEQ ID NO: 3649818 - DNA, 25 bp, Homo sapien
gaagacatgcagcatcatagaaagg

SEQ ID NO: 3649819 - DNA, 25 bp, Homo sapien
tgttggatgcctgcatgcagcagcg

SEQ ID NO: 3649820 - DNA, 25 bp, Homo sapien
ctccttcagtgtggctgccacaaat

SEQ ID NO: 3649821 - DNA, 25 bp, Homo sapien
tggatgcctgcatgcagcagcggca

SEQ ID NO: 3649822 - DNA, 25 bp, Homo sapien
gatgcctgcatgcagcagcggcagc

SEQ ID NO: 3649823 - DNA, 25 bp, Homo sapien
agatagctgtgcttccaccgtccct

SEQ ID NO: 3649824 - DNA, 25 bp, Homo sapien
tgattaacgcactctcagatagctg

SEQ ID NO: 3649825 - DNA, 25 bp, Homo sapien
tcaatactaagtcgaaatgctccaa

SEQ ID NO: 3649826 - DNA, 25 bp, Homo sapien
cgatgcatgcaaatactgggataac

SEQ ID NO: 3649827 - DNA, 25 bp, Homo sapien
ttcctcttgtgattgtccctgcctc

SEQ ID NO: 3649828 - DNA, 25 bp, Homo sapien
ttctgctattcctcttgtgattgtc

SEQ ID NO: 3649829 - DNA, 25 bp, Homo sapien
tattcctcttgtgattgtccctgcc

SEQ ID NO: 3649830 - DNA, 25 bp, Homo sapien
tgctattcctcttgtgattgtccct

SEQ ID NO: 3649831 - DNA, 25 bp, Homo sapien
agctattacgtgaaatccccctggg

SEQ ID NO: 3649832 - DNA, 25 bp, Homo sapien
gtttcacggattcgcgtacaaccca

SEQ ID NO: 3649833 - DNA, 25 bp, Homo sapien
caaattagctattacgtgaaatccc

SEQ ID NO: 3649834 - DNA, 25 bp, Homo sapien
tttaaggcacttgtttcacggattc

SEQ ID NO: 3649835 - DNA, 25 bp, Homo sapien
tccagacgcttggaacgcgggatct

SEQ ID NO: 3649836 - DNA, 25 bp, Homo sapien
caggcctgcggaacctgaaaaagcc

SEQ ID NO: 3649837 - DNA, 25 bp, Homo sapien
ccgctctgcggtgggattggatctt

SEQ ID NO: 3649838 - DNA, 25 bp, Homo sapien
tgaaaaagcctaccgggcctggaga

SEQ ID NO: 3649839 - DNA, 25 bp, Homo sapien
cgttgccggccgagagtgccgcggg

SEQ ID NO: 3649840 - DNA, 25 bp, Homo sapien
tggtcctcggcgcaatcacagggca

SEQ ID NO: 3649841 - DNA, 25 bp, Homo sapien
agggcagtaaatggccgctcggcct

SEQ ID NO: 3649842 - DNA, 25 bp, Homo sapien
tcggcgcaatcacagggcagtaaat

SEQ ID NO: 3649843 - DNA, 25 bp, Homo sapien
gagtgacctggaaagccaccctcgg

SEQ ID NO: 3649844 - DNA, 25 bp, Homo sapien
aacgggaaacgtgagagagtgacct

SEQ ID NO: 3649845 - DNA, 25 bp, Homo sapien
ctggaaacgggaaacgtgagagagt

SEQ ID NO: 3649846 - DNA, 25 bp, Homo sapien
agtgacctggaaagccaccctcggt

SEQ ID NO: 3649847 - DNA, 25 bp, Homo sapien
ccgtgcatctgcaaggggaatgatg

SEQ ID NO: 3649848 - DNA, 25 bp, Homo sapien
ctctccgtgcatctgcaaggggaat

SEQ ID NO: 3649849 - DNA, 25 bp, Homo sapien
ctccgtgcatctgcaaggggaatga

SEQ ID NO: 3649850 - DNA, 25 bp, Homo sapien
gtgcatctgcaaggggaatgatggc

SEQ ID NO: 3649851 - DNA, 25 bp, Homo sapien
ggcccagctcttcgcattgggcgga

SEQ ID NO: 3649852 - DNA, 25 bp, Homo sapien
tccaaaaggcgcgtgtggatcgcca

SEQ ID NO: 3649853 - DNA, 25 bp, Homo sapien
cgaacgccttctgggaagtggttca

SEQ ID NO: 3649854 - DNA, 25 bp, Homo sapien
tggatcgccagtggcaaagggttgg

SEQ ID NO: 3649855 - DNA, 25 bp, Homo sapien
ttgtaaacagcggtcagtggccggg

SEQ ID NO: 3649856 - DNA, 25 bp, Homo sapien
tgtgtttgtaaacagcggtcagtgg

SEQ ID NO: 3649857 - DNA, 25 bp, Homo sapien
tgtttgtaaacagcggtcagtggcc

SEQ ID NO: 3649858 - DNA, 25 bp, Homo sapien
acccccaggctgtgtttgtaaacag

SEQ ID NO: 3649859 - DNA, 25 bp, Homo sapien
tgagatgttttgcatgaagccctca

SEQ ID NO: 3649860 - DNA, 25 bp, Homo sapien
tctcgcaccaactcctcgttcctct

SEQ ID NO: 3649861 - DNA, 25 bp, Homo sapien
cagtttcaaaaacaaggcgttcagt

SEQ ID NO: 3649862 - DNA, 25 bp, Homo sapien
tttccagctgccgagcccgctctct

SEQ ID NO: 3649863 - DNA, 25 bp, Homo sapien
ccaatcataccaggattctcccctt

SEQ ID NO: 3649864 - DNA, 25 bp, Homo sapien
tccacccggtcaccccaatcatacc

SEQ ID NO: 3649865 - DNA, 25 bp, Homo sapien
aacagggcatccaccttagcgagtc

SEQ ID NO: 3649866 - DNA, 25 bp, Homo sapien
tgctccctaggccaaagggcatttt

SEQ ID NO: 3649867 - DNA, 25 bp, Homo sapien
gattgaagaacggttaacaggattg

SEQ ID NO: 3649868 - DNA, 25 bp, Homo sapien
gaagaacggttaacaggattgaatg

SEQ ID NO: 3649869 - DNA, 25 bp, Homo sapien
agaacggttaacaggattgaatggt

SEQ ID NO: 3649870 - DNA, 25 bp, Homo sapien
caggattgaatggttttgttgacat

SEQ ID NO: 3649871 - DNA, 25 bp, Homo sapien
cttccttttgttgtaaactgcacag

SEQ ID NO: 3649872 - DNA, 25 bp, Homo sapien
aaactgcacaggatggtttgtacaa

SEQ ID NO: 3649873 - DNA, 25 bp, Homo sapien
ccttttgttgtaaactgcacaggat

SEQ ID NO: 3649874 - DNA, 25 bp, Homo sapien
ttgttgtaaactgcacaggatggtt

SEQ ID NO: 3649875 - DNA, 25 bp, Homo sapien
agagtagtgtcaaagcggagtcgcc

SEQ ID NO: 3649876 - DNA, 25 bp, Homo sapien
gctttcgaggatgccggcagacttc

SEQ ID NO: 3649877 - DNA, 25 bp, Homo sapien
tcggattccagtgaagtcagctcgg

SEQ ID NO: 3649878 - DNA, 25 bp, Homo sapien
cagtgcagagcatccgattcaggcg

SEQ ID NO: 3649879 - DNA, 25 bp, Homo sapien
ttgcctggagaggtttcatctggtc

SEQ ID NO: 3649880 - DNA, 25 bp, Homo sapien
gagaggtttcatctggtcaacggct

SEQ ID NO: 3649881 - DNA, 25 bp, Homo sapien
ggtcaacggcttctgcccgcctccg

SEQ ID NO: 3649882 - DNA, 25 bp, Homo sapien
cctggagaggtttcatctggtcaac

SEQ ID NO: 3649883 - DNA, 25 bp, Homo sapien
ggagatcgtgcgctcgccgtgcaaa

SEQ ID NO: 3649884 - DNA, 25 bp, Homo sapien
aaggacaagcaccaactttggcggg

SEQ ID NO: 3649885 - DNA, 25 bp, Homo sapien
tttttagcaaataccccggctcgca

SEQ ID NO: 3649886 - DNA, 25 bp, Homo sapien
ggaccctgcttattttcggagcctg

SEQ ID NO: 3649887 - DNA, 25 bp, Homo sapien
ttgagacacacgcagcatctggctg

SEQ ID NO: 3649888 - DNA, 25 bp, Homo sapien
cactggcagatcagaaaccggatgg

SEQ ID NO: 3649889 - DNA, 25 bp, Homo sapien
ccttcgccgggaataacagtctttg

SEQ ID NO: 3649890 - DNA, 25 bp, Homo sapien
catttagtgcccgagatgggagacc

SEQ ID NO: 3649891 - DNA, 25 bp, Homo sapien
tggtaatgcgactgggaggaccctt

SEQ ID NO: 3649892 - DNA, 25 bp, Homo sapien
tttggatatccttgaaaacgacacc

SEQ ID NO: 3649893 - DNA, 25 bp, Homo sapien
agccgccttgggatcgtggtaatgc

SEQ ID NO: 3649894 - DNA, 25 bp, Homo sapien
ttcttttaatcacgcggatgtgtct

SEQ ID NO: 3649895 - DNA, 25 bp, Homo sapien
tggtagctattgatcgaaatccccg

SEQ ID NO: 3649896 - DNA, 25 bp, Homo sapien
gaagaccccggatatgcaacgtgtg

SEQ ID NO: 3649897 - DNA, 25 bp, Homo sapien
gcaacgtgtgctgatggcccaagaa

SEQ ID NO: 3649898 - DNA, 25 bp, Homo sapien
gaaatccccggtgtgcatgcaaatc

SEQ ID NO: 3649899 - DNA, 25 bp, Homo sapien
caaacgtatatggtgaagagctggt

SEQ ID NO: 3649900 - DNA, 25 bp, Homo sapien
caatagtgtgtagattaggcattcc

SEQ ID NO: 3649901 - DNA, 25 bp, Homo sapien
ggtaaatctagcacattcatatggg

SEQ ID NO: 3649902 - DNA, 25 bp, Homo sapien
tgtgcattacttcgctccagaggaa

SEQ ID NO: 3649903 - DNA, 25 bp, Homo sapien
attgttgaggcctttgtgatgttcc

SEQ ID NO: 3649904 - DNA, 25 bp, Homo sapien
ttgaacaaaatgtgcccagcaatca

SEQ ID NO: 3649905 - DNA, 25 bp, Homo sapien
tgaggcctttgtgatgttccttact

SEQ ID NO: 3649906 - DNA, 25 bp, Homo sapien
ctttgaacaaaatgtgcccagcaat

SEQ ID NO: 3649907 - DNA, 25 bp, Homo sapien
tgtcttatatcctcaactaattcag

SEQ ID NO: 3649908 - DNA, 25 bp, Homo sapien
taaacttagctaaagaactgttgag

SEQ ID NO: 3649909 - DNA, 25 bp, Homo sapien
agttacttttagttaatagcacaag

SEQ ID NO: 3649910 - DNA, 25 bp, Homo sapien
taattcagccatatgagactttatt

SEQ ID NO: 3649911 - DNA, 25 bp, Homo sapien
accatcataattatggtgtccttta

SEQ ID NO: 3649912 - DNA, 25 bp, Homo sapien
tatcaccatcataattatggtgtcc

SEQ ID NO: 3649913 - DNA, 25 bp, Homo sapien
ataattatggtgtcctttaaactgg

SEQ ID NO: 3649914 - DNA, 25 bp, Homo sapien
gttttatcaccatcataattatggt

SEQ ID NO: 3649915 - DNA, 25 bp, Homo sapien
aaaccagacgttcccatcagcctta

SEQ ID NO: 3649916 - DNA, 25 bp, Homo sapien
cagacgttcccatcagccttaaaat

SEQ ID NO: 3649917 - DNA, 25 bp, Homo sapien
gacgttcccatcagccttaaaatac

SEQ ID NO: 3649918 - DNA, 25 bp, Homo sapien
tttgctccacaaaccagacgttccc

SEQ ID NO: 3649919 - DNA, 25 bp, Homo sapien
tcttctattagcaaacagtaacgtg

SEQ ID NO: 3649920 - DNA, 25 bp, Homo sapien
taacgtgatacttgaatcccctttc

SEQ ID NO: 3649921 - DNA, 25 bp, Homo sapien
gccatgagatcatttttcgacctaa

SEQ ID NO: 3649922 - DNA, 25 bp, Homo sapien
gcatttcaatacgaatccctctcct

SEQ ID NO: 3649923 - DNA, 25 bp, Homo sapien
gggcgtcgagggctctcgggctccg

SEQ ID NO: 3649924 - DNA, 25 bp, Homo sapien
acacaattcgctggggacgccgctg

SEQ ID NO: 3649925 - DNA, 25 bp, Homo sapien
aaagtggaacgtggccgagggagct

SEQ ID NO: 3649926 - DNA, 25 bp, Homo sapien
agaaaagcgacacaattcgctgggg

SEQ ID NO: 3649927 - DNA, 25 bp, Homo sapien
aaacaagcccaagaatatgttaatt

SEQ ID NO: 3649928 - DNA, 25 bp, Homo sapien
agaaacaagcccaagaatatgttaa

SEQ ID NO: 3649929 - DNA, 25 bp, Homo sapien
acaagcccaagaatatgttaattaa

SEQ ID NO: 3649930 - DNA, 25 bp, Homo sapien
gaaacaagcccaagaatatgttaat

SEQ ID NO: 3649931 - DNA, 25 bp, Homo sapien
ggtacaaaatggttctttatcagca

SEQ ID NO: 3649932 - DNA, 25 bp, Homo sapien
caggtacaaaatggttctttatcag

SEQ ID NO: 3649933 - DNA, 25 bp, Homo sapien
cttgcaggtacaaaatggttcttta

SEQ ID NO: 3649934 - DNA, 25 bp, Homo sapien
tacaaaatggttctttatcagcaat

SEQ ID NO: 3649935 - DNA, 25 bp, Homo sapien
agccactccacccattaaattcacg

SEQ ID NO: 3649936 - DNA, 25 bp, Homo sapien
ctccacccattaaattcacgtcctg

SEQ ID NO: 3649937 - DNA, 25 bp, Homo sapien
cactccacccattaaattcacgtcc

SEQ ID NO: 3649938 - DNA, 25 bp, Homo sapien
gccactccacccattaaattcacgt

SEQ ID NO: 3649939 - DNA, 25 bp, Homo sapien
cctgcagttggccgcgctaacttca

SEQ ID NO: 3649940 - DNA, 25 bp, Homo sapien
tgcagttggccgcgctaacttcaca

SEQ ID NO: 3649941 - DNA, 25 bp, Homo sapien
ttcctgcagttggccgcgctaactt

SEQ ID NO: 3649942 - DNA, 25 bp, Homo sapien
agttggccgcgctaacttcacagtg

SEQ ID NO: 3649943 - DNA, 25 bp, Homo sapien
gggcgagtgtgccagcttccatgaa

SEQ ID NO: 3649944 - DNA, 25 bp, Homo sapien
ttccatgaagggtgtaatgaagcat

SEQ ID NO: 3649945 - DNA, 25 bp, Homo sapien
tcctccaagactggcccgtggaaaa

SEQ ID NO: 3649946 - DNA, 25 bp, Homo sapien
caagactggcccgtggaaaacgagg

SEQ ID NO: 3649947 - DNA, 25 bp, Homo sapien
gtcacttggcgtgcgcgcccgtcct

SEQ ID NO: 3649948 - DNA, 25 bp, Homo sapien
tcctcggagcgtcacttggcgtgcg

SEQ ID NO: 3649949 - DNA, 25 bp, Homo sapien
gcttcctcctcggagcgtcacttgg

SEQ ID NO: 3649950 - DNA, 25 bp, Homo sapien
ggctgcgcttcctcctcggagcgtc

SEQ ID NO: 3649951 - DNA, 25 bp, Homo sapien
gcacacataatcaagagggcctccg

SEQ ID NO: 3649952 - DNA, 25 bp, Homo sapien
gagagggcacacataatcaagaggg

SEQ ID NO: 3649953 - DNA, 25 bp, Homo sapien
acataatcaagagggcctccgcaca

SEQ ID NO: 3649954 - DNA, 25 bp, Homo sapien
ggcgcccggagagggcacacataat

SEQ ID NO: 3649955 - DNA, 25 bp, Homo sapien
atgtccttgctgattccccccacct

SEQ ID NO: 3649956 - DNA, 25 bp, Homo sapien
caggagtcaggagccatgtccttgc

SEQ ID NO: 3649957 - DNA, 25 bp, Homo sapien
gttccgcacaggagtcaggagccat

SEQ ID NO: 3649958 - DNA, 25 bp, Homo sapien
tccgcacaggagtcaggagccatgt

SEQ ID NO: 3649959 - DNA, 25 bp, Homo sapien
cgggctttgccgctcagtcactcac

SEQ ID NO: 3649960 - DNA, 25 bp, Homo sapien
tcgggctttgccgctcagtcactca

SEQ ID NO: 3649961 - DNA, 25 bp, Homo sapien
ccttcatactatgggagacctcgtc

SEQ ID NO: 3649962 - DNA, 25 bp, Homo sapien
ggagacctcgtcctccagtgacacg

SEQ ID NO: 3649963 - DNA, 25 bp, Homo sapien
gtcgcaataaaccagcgggttctcg

SEQ ID NO: 3649964 - DNA, 25 bp, Homo sapien
gcctctctcgtctgagcaaacgcaa

SEQ ID NO: 3649965 - DNA, 25 bp, Homo sapien
ttcctgcaaaaccacggtccagtgg

SEQ ID NO: 3649966 - DNA, 25 bp, Homo sapien
tgcaaaaccacggtccagtgggtac

SEQ ID NO: 3649967 - DNA, 25 bp, Homo sapien
ctgcaaaaccacggtccagtgggta

SEQ ID NO: 3649968 - DNA, 25 bp, Homo sapien
tttcctgcaaaaccacggtccagtg

SEQ ID NO: 3649969 - DNA, 25 bp, Homo sapien
tgtagagactaagttgaccaggctg

SEQ ID NO: 3649970 - DNA, 25 bp, Homo sapien
tataggcacgcgctgccacatccag

SEQ ID NO: 3649971 - DNA, 25 bp, Homo sapien
gattctcccgtcttagcccccagag

SEQ ID NO: 3649972 - DNA, 25 bp, Homo sapien
tagctagactataggcacgcgctgc

SEQ ID NO: 3649973 - DNA, 25 bp, Homo sapien
gcagtgagcaatgattgcgccactc

SEQ ID NO: 3649974 - DNA, 25 bp, Homo sapien
ctcttgagctcaggacttcaaggct

SEQ ID NO: 3649975 - DNA, 25 bp, Homo sapien
agtgagcaatgattgcgccactcca

SEQ ID NO: 3649976 - DNA, 25 bp, Homo sapien
gagcaatgattgcgccactccactc

SEQ ID NO: 3649977 - DNA, 25 bp, Homo sapien
taataaaccatacgttccactgcgt

SEQ ID NO: 3649978 - DNA, 25 bp, Homo sapien
gacactttgaccatgtcctcagaga

SEQ ID NO: 3649979 - DNA, 25 bp, Homo sapien
taaaagagtggaagcacgtaacaag

SEQ ID NO: 3649980 - DNA, 25 bp, Homo sapien
gatgctggcattctgacactcccta

SEQ ID NO: 3649981 - DNA, 25 bp, Homo sapien
atctccaactcaggcgtgatcctct

SEQ ID NO: 3649982 - DNA, 25 bp, Homo sapien
cgggttcgggcggatctcctgcttc

SEQ ID NO: 3649983 - DNA, 25 bp, Homo sapien
ggttcgggcggatctcctgcttcag

SEQ ID NO: 3649984 - DNA, 25 bp, Homo sapien
tggcctgatctccaactcaggcgtg

SEQ ID NO: 3649985 - DNA, 25 bp, Homo sapien
caaaacggtccagtgctaggtatct

SEQ ID NO: 3649986 - DNA, 25 bp, Homo sapien
aaacggtccagtgctaggtatctca

SEQ ID NO: 3649987 - DNA, 25 bp, Homo sapien
catagcaaaacggtccagtgctagg

SEQ ID NO: 3649988 - DNA, 25 bp, Homo sapien
gtccagtgctaggtatctcatccaa

SEQ ID NO: 3649989 - DNA, 25 bp, Homo sapien
taaatttctaataagtcactgcagc

SEQ ID NO: 3649990 - DNA, 25 bp, Homo sapien
aattcagaacaaatgctcactaaat

SEQ ID NO: 3649991 - DNA, 25 bp, Homo sapien
aaattcttctgtatctcatcaaaat

SEQ ID NO: 3649992 - DNA, 25 bp, Homo sapien
taagtagataaatttctaataagtc

SEQ ID NO: 3649993 - DNA, 25 bp, Homo sapien
gccatgctttgactatgggataacc

SEQ ID NO: 3649994 - DNA, 25 bp, Homo sapien
ttgtagtcacaatgactgcagttcc

SEQ ID NO: 3649995 - DNA, 25 bp, Homo sapien
gcagttccagctgccatgctttgac

SEQ ID NO: 3649996 - DNA, 25 bp, Homo sapien
ttttgtagtcacaatgactgcagtt

SEQ ID NO: 3649997 - DNA, 25 bp, Homo sapien
taaggagcaaacagaccagatggga

SEQ ID NO: 3649998 - DNA, 25 bp, Homo sapien
gatgggagcaagcagatggtaccca

SEQ ID NO: 3649999 - DNA, 25 bp, Homo sapien
caagcagatggtacccagaagaagg

SEQ ID NO: 3650000 - DNA, 25 bp, Homo sapien
aacagaccagatgggagcaagcaga

SEQ ID NO: 3650001 - DNA, 25 bp, Homo sapien
gactgaggaccgaagaaagctgctg

SEQ ID NO: 3650002 - DNA, 25 bp, Homo sapien
tgcatcagagcaccagaaactggag

SEQ ID NO: 3650003 - DNA, 25 bp, Homo sapien
caggagtgacgttttcagatgaggc

SEQ ID NO: 3650004 - DNA, 25 bp, Homo sapien
gaaactggaggaacgttagacacca

SEQ ID NO: 3650005 - DNA, 25 bp, Homo sapien
cacatgatccaagacaggccaatca

SEQ ID NO: 3650006 - DNA, 25 bp, Homo sapien
caatcagagtcctttccaggattct

SEQ ID NO: 3650007 - DNA, 25 bp, Homo sapien
tagttctagtgagggttgccattca

SEQ ID NO: 3650008 - DNA, 25 bp, Homo sapien
ttcttctagagagccccttcttctg

SEQ ID NO: 3650009 - DNA, 25 bp, Homo sapien
cttcatgacttcgaggttaggcaaa

SEQ ID NO: 3650010 - DNA, 25 bp, Homo sapien
aactgtcttagctcacagtaagcaa

SEQ ID NO: 3650011 - DNA, 25 bp, Homo sapien
gacttcgaggttaggcaaaactgtc

SEQ ID NO: 3650012 - DNA, 25 bp, Homo sapien
tgtcttagctcacagtaagcaataa

SEQ ID NO: 3650013 - DNA, 25 bp, Homo sapien
gacgactgccgtcaagtaggtctgg

SEQ ID NO: 3650014 - DNA, 25 bp, Homo sapien
gctaggacgactgccgtcaagtagg

SEQ ID NO: 3650015 - DNA, 25 bp, Homo sapien
actgccgtcaagtaggtctggtttc

SEQ ID NO: 3650016 - DNA, 25 bp, Homo sapien
tatggtcagctaggacgactgccgt

SEQ ID NO: 3650017 - DNA, 25 bp, Homo sapien
ttttaaagctccatccttatgggga

SEQ ID NO: 3650018 - DNA, 25 bp, Homo sapien
tttaaagctccatccttatggggac

SEQ ID NO: 3650019 - DNA, 25 bp, Homo sapien
taaagacaaagccttggtctgtcgc

SEQ ID NO: 3650020 - DNA, 25 bp, Homo sapien
ctcactacaacttcctccttccagt

SEQ ID NO: 3650021 - DNA, 25 bp, Homo sapien
tttaaagacaaagccttggtctgtc

SEQ ID NO: 3650022 - DNA, 25 bp, Homo sapien
acttcctccttccagttcaaccaat

SEQ ID NO: 3650023 - DNA, 25 bp, Homo sapien
tataacgatcatgcggaacagactg

SEQ ID NO: 3650024 - DNA, 25 bp, Homo sapien
cttattataacgatcatgcggaaca

SEQ ID NO: 3650025 - DNA, 25 bp, Homo sapien
ttataacgatcatgcggaacagact

SEQ ID NO: 3650026 - DNA, 25 bp, Homo sapien
tattataacgatcatgcggaacaga

SEQ ID NO: 3650027 - DNA, 25 bp, Homo sapien
taacaggctcttgatacttgaaagc

SEQ ID NO: 3650028 - DNA, 25 bp, Homo sapien
cacagatgctagcagtgtatactaa

SEQ ID NO: 3650029 - DNA, 25 bp, Homo sapien
aaaacctggatgaacctgaataaga

SEQ ID NO: 3650030 - DNA, 25 bp, Homo sapien
cttgaaagcgcaaaagaggtcagta

SEQ ID NO: 3650031 - DNA, 25 bp, Homo sapien
gggtaaggccgtgtcaatgcaccta

SEQ ID NO: 3650032 - DNA, 25 bp, Homo sapien
tgcacctagagaacggaatatcaag

SEQ ID NO: 3650033 - DNA, 25 bp, Homo sapien
tgtcccaccattgcatctcagaaac

SEQ ID NO: 3650034 - DNA, 25 bp, Homo sapien
caaataatactcctgccttatcaga

SEQ ID NO: 3650035 - DNA, 25 bp, Homo sapien
caatcaggaactatggaggccggaa

SEQ ID NO: 3650036 - DNA, 25 bp, Homo sapien
gctctgataaggaccatgtaggaag

SEQ ID NO: 3650037 - DNA, 25 bp, Homo sapien
ggccggaaggcaatggaataacata

SEQ ID NO: 3650038 - DNA, 25 bp, Homo sapien
gattttcttgctccagatgtgacaa

SEQ ID NO: 3650039 - DNA, 25 bp, Homo sapien
gaaagcctgtcgacatccatgttta

SEQ ID NO: 3650040 - DNA, 25 bp, Homo sapien
ttattacatgtcatgcaagcaccag

SEQ ID NO: 3650041 - DNA, 25 bp, Homo sapien
gcctgtcgacatccatgtttattac

SEQ ID NO: 3650042 - DNA, 25 bp, Homo sapien
catgtcatgcaagcaccagtggctg

SEQ ID NO: 3650043 - DNA, 25 bp, Homo sapien
cagactgctctttaactcaagcgat

SEQ ID NO: 3650044 - DNA, 25 bp, Homo sapien
actgctctttaactcaagcgatcct

SEQ ID NO: 3650045 - DNA, 25 bp, Homo sapien
cccagactgctctttaactcaagcg

SEQ ID NO: 3650046 - DNA, 25 bp, Homo sapien
gactgctctttaactcaagcgatcc

SEQ ID NO: 3650047 - DNA, 25 bp, Homo sapien
gtatttacagtagccacagtattgg

SEQ ID NO: 3650048 - DNA, 25 bp, Homo sapien
cttcacaaagcagtccggcaaactg

SEQ ID NO: 3650049 - DNA, 25 bp, Homo sapien
tcacaaagcagtccggcaaactgag

SEQ ID NO: 3650050 - DNA, 25 bp, Homo sapien
gacattatcggcaccattaccttct

SEQ ID NO: 3650051 - DNA, 25 bp, Homo sapien
gacctattagatccccgtttgctct

SEQ ID NO: 3650052 - DNA, 25 bp, Homo sapien
catatgacctattagatccccgttt

SEQ ID NO: 3650053 - DNA, 25 bp, Homo sapien
atcatatgacctattagatccccgt

SEQ ID NO: 3650054 - DNA, 25 bp, Homo sapien
tatgacctattagatccccgtttgc

SEQ ID NO: 3650055 - DNA, 25 bp, Homo sapien
tttttctctttctcatgatgtttat

SEQ ID NO: 3650056 - DNA, 25 bp, Homo sapien
ttttttctctttctcatgatgttta

SEQ ID NO: 3650057 - DNA, 25 bp, Homo sapien
ttttctctttctcatgatgtttatc

SEQ ID NO: 3650058 - DNA, 25 bp, Homo sapien
caatttgttctttgatgtgattgta

SEQ ID NO: 3650059 - DNA, 25 bp, Homo sapien
acaatttgttctttgatgtgattgt

SEQ ID NO: 3650060 - DNA, 25 bp, Homo sapien
ttgagaaacgcagctgaaaccagga

SEQ ID NO: 3650061 - DNA, 25 bp, Homo sapien
ctgcactggccagtaacaggtaagc

SEQ ID NO: 3650062 - DNA, 25 bp, Homo sapien
cactggccagtaacaggtaagcgca

SEQ ID NO: 3650063 - DNA, 25 bp, Homo sapien
gcactgagagccaatttgagaaacg

SEQ ID NO: 3650064 - DNA, 25 bp, Homo sapien
tagtaacagtcaaggatggaaccaa

SEQ ID NO: 3650065 - DNA, 25 bp, Homo sapien
tttctgtagtaacagtcaaggatgg

SEQ ID NO: 3650066 - DNA, 25 bp, Homo sapien
tgcaggtgatggttctggctgcttc

SEQ ID NO: 3650067 - DNA, 25 bp, Homo sapien
aaggatggaaccaatgcaggtgatg

SEQ ID NO: 3650068 - DNA, 25 bp, Homo sapien
aagtgcctgatatgtggttgaaaag

SEQ ID NO: 3650069 - DNA, 25 bp, Homo sapien
taagtgcctgatatgtggttgaaaa

SEQ ID NO: 3650070 - DNA, 25 bp, Homo sapien
ctaagtgcctgatatgtggttgaaa

SEQ ID NO: 3650071 - DNA, 25 bp, Homo sapien
ctcatgccctgatcacatcctagat

SEQ ID NO: 3650072 - DNA, 25 bp, Homo sapien
catatatcctactcttaaataccac

SEQ ID NO: 3650073 - DNA, 25 bp, Homo sapien
catcctagattctgatatgattaaa

SEQ ID NO: 3650074 - DNA, 25 bp, Homo sapien
taattcactctttactactccaaca

SEQ ID NO: 3650075 - DNA, 25 bp, Homo sapien
ggtgtgagctaccccacctggcatc

SEQ ID NO: 3650076 - DNA, 25 bp, Homo sapien
aggtgtgagctaccccacctggcat

SEQ ID NO: 3650077 - DNA, 25 bp, Homo sapien
taggtgtgagctaccccacctggca

SEQ ID NO: 3650078 - DNA, 25 bp, Homo sapien
tccctgaaaacattcgatctagaaa

SEQ ID NO: 3650079 - DNA, 25 bp, Homo sapien
tctcatcacaccactcaaaacagtg

SEQ ID NO: 3650080 - DNA, 25 bp, Homo sapien
gcagaaagaactaatcactagcaga

SEQ ID NO: 3650081 - DNA, 25 bp, Homo sapien
tagcagaccaacactacaataaatg

SEQ ID NO: 3650082 - DNA, 25 bp, Homo sapien
gcaggtcaatttggaaaccacccca

SEQ ID NO: 3650083 - DNA, 25 bp, Homo sapien
actttttccaattacttgagttgat

SEQ ID NO: 3650084 - DNA, 25 bp, Homo sapien
tcaatttggaaaccaccccacctca

SEQ ID NO: 3650085 - DNA, 25 bp, Homo sapien
ttgagttgatcctgaggttctccat

SEQ ID NO: 3650086 - DNA, 25 bp, Homo sapien
agcgcttcaatgatccagatataga

SEQ ID NO: 3650087 - DNA, 25 bp, Homo sapien
gtagtatcttccaagcgcttcaatg

SEQ ID NO: 3650088 - DNA, 25 bp, Homo sapien
catttgtaaatcgtgcagtagtatc

SEQ ID NO: 3650089 - DNA, 25 bp, Homo sapien
gatatagagttgttgctagtgcttg

SEQ ID NO: 3650090 - DNA, 25 bp, Homo sapien
tccactagaggtgtgtgcagagact

SEQ ID NO: 3650091 - DNA, 25 bp, Homo sapien
ttccactagaggtgtgtgcagagac

SEQ ID NO: 3650092 - DNA, 25 bp, Homo sapien
cactagaggtgtgtgcagagacttc

SEQ ID NO: 3650093 - DNA, 25 bp, Homo sapien
cttttccactagaggtgtgtgcaga

SEQ ID NO: 3650094 - DNA, 25 bp, Homo sapien
ggaaaagggctagctgctgacacag

SEQ ID NO: 3650095 - DNA, 25 bp, Homo sapien
gggctagctgctgacacagttgttc

SEQ ID NO: 3650096 - DNA, 25 bp, Homo sapien
tagctgctgacacagttgttcctgg

SEQ ID NO: 3650097 - DNA, 25 bp, Homo sapien
aaagggctagctgctgacacagttg

SEQ ID NO: 3650098 - DNA, 25 bp, Homo sapien
tattaaccatcttaaacacaagtat

SEQ ID NO: 3650099 - DNA, 25 bp, Homo sapien
catccattagttataagttcaaaaa

SEQ ID NO: 3650100 - DNA, 25 bp, Homo sapien
tataataatctagaacatccattag

SEQ ID NO: 3650101 - DNA, 25 bp, Homo sapien
attattaaccatcttaaacacaagt

SEQ ID NO: 3650102 - DNA, 25 bp, Homo sapien
taaaattacaattcaactctggaag

SEQ ID NO: 3650103 - DNA, 25 bp, Homo sapien
gcattattccatatctagttaaaca

SEQ ID NO: 3650104 - DNA, 25 bp, Homo sapien
tacaattcaactctggaagcacaaa

SEQ ID NO: 3650105 - DNA, 25 bp, Homo sapien
caaagcaaagctccagcttttatta

SEQ ID NO: 3650106 - DNA, 25 bp, Homo sapien
aaaagaaggactgttctacagaact

SEQ ID NO: 3650107 - DNA, 25 bp, Homo sapien
acaaaaagaaggactgttctacaga

SEQ ID NO: 3650108 - DNA, 25 bp, Homo sapien
caaaaagaaggactgttctacagaa

SEQ ID NO: 3650109 - DNA, 25 bp, Homo sapien
cctgactgagcctcataatactggg

SEQ ID NO: 3650110 - DNA, 25 bp, Homo sapien
ctgcctggagttcctgaaaaactgc

SEQ ID NO: 3650111 - DNA, 25 bp, Homo sapien
gggagactgcactgaacttccagaa

SEQ ID NO: 3650112 - DNA, 25 bp, Homo sapien
tccagaagatgactttacactgcct

SEQ ID NO: 3650113 - DNA, 25 bp, Homo sapien
gatgactttacactgcctggagttc

SEQ ID NO: 3650114 - DNA, 25 bp, Homo sapien
ctgttgggagtgagagtaactgtca

SEQ ID NO: 3650115 - DNA, 25 bp, Homo sapien
gagtaactgtcattacgcagatctg

SEQ ID NO: 3650116 - DNA, 25 bp, Homo sapien
tgtcattacgcagatctgagtctgt

SEQ ID NO: 3650117 - DNA, 25 bp, Homo sapien
ctgagtctgtaaagctcaggaaatc

SEQ ID NO: 3650118 - DNA, 25 bp, Homo sapien
ctttatgtacatctttggttgctga

SEQ ID NO: 3650119 - DNA, 25 bp, Homo sapien
tttatgtacatctttggttgctgat

SEQ ID NO: 3650120 - DNA, 25 bp, Homo sapien
cctttatgtacatctttggttgctg

SEQ ID NO: 3650121 - DNA, 25 bp, Homo sapien
ctcctttatgtacatctttggttgc

SEQ ID NO: 3650122 - DNA, 25 bp, Homo sapien
tgaagggaggccaattaaggtacta

SEQ ID NO: 3650123 - DNA, 25 bp, Homo sapien
taggaaggctggaattacccaaatc

SEQ ID NO: 3650124 - DNA, 25 bp, Homo sapien
ctgtaggaaggctggaattacccaa

SEQ ID NO: 3650125 - DNA, 25 bp, Homo sapien
gctggaattacccaaatctccaggt

SEQ ID NO: 3650126 - DNA, 25 bp, Homo sapien
gaaggctggaattacccaaatctcc

SEQ ID NO: 3650127 - DNA, 25 bp, Homo sapien
cttcttctatgccagaagtttgagc

SEQ ID NO: 3650128 - DNA, 25 bp, Homo sapien
gagatttctgcagactagagcttgt

SEQ ID NO: 3650129 - DNA, 25 bp, Homo sapien
gccaggcccatgcttactttgttta

SEQ ID NO: 3650130 - DNA, 25 bp, Homo sapien
tccattcctgagcaatgtaggagat

SEQ ID NO: 3650131 - DNA, 25 bp, Homo sapien
gtattatcgtaacaacagttgaaaa

SEQ ID NO: 3650132 - DNA, 25 bp, Homo sapien
tttcaagtattatcgtaacaacagt

SEQ ID NO: 3650133 - DNA, 25 bp, Homo sapien
caagtattatcgtaacaacagttga

SEQ ID NO: 3650134 - DNA, 25 bp, Homo sapien
aatttcaagtattatcgtaacaaca

SEQ ID NO: 3650135 - DNA, 25 bp, Homo sapien
tcagttaacatcaactgttaagggt

SEQ ID NO: 3650136 - DNA, 25 bp, Homo sapien
ttaacatcaactgttaagggtctgt

SEQ ID NO: 3650137 - DNA, 25 bp, Homo sapien
gttaacatcaactgttaagggtctg

SEQ ID NO: 3650138 - DNA, 25 bp, Homo sapien
cagttaacatcaactgttaagggtc

SEQ ID NO: 3650139 - DNA, 25 bp, Homo sapien
tagtgagcctcaaccagaggtagtt

SEQ ID NO: 3650140 - DNA, 25 bp, Homo sapien
taacacatgaagacttgtcccatcc

SEQ ID NO: 3650141 - DNA, 25 bp, Homo sapien
tattcccactgtaggaagggagagt

SEQ ID NO: 3650142 - DNA, 25 bp, Homo sapien
ggtaaatatcctgcaatacacaggg

SEQ ID NO: 3650143 - DNA, 25 bp, Homo sapien
ccatcctatgaggaacactattcct

SEQ ID NO: 3650144 - DNA, 25 bp, Homo sapien
gtgtttcaaataagcattccaatgt

SEQ ID NO: 3650145 - DNA, 25 bp, Homo sapien
tctgccacaggagtaccacaaacac

SEQ ID NO: 3650146 - DNA, 25 bp, Homo sapien
tcaggaattcccagactatgcttca

SEQ ID NO: 3650147 - DNA, 25 bp, Homo sapien
gtaagtcaccatgcccagccccaga

SEQ ID NO: 3650148 - DNA, 25 bp, Homo sapien
gacctgcccacctcggcctcccaaa

SEQ ID NO: 3650149 - DNA, 25 bp, Homo sapien
aggcgtaagtcaccatgcccagccc

SEQ ID NO: 3650150 - DNA, 25 bp, Homo sapien
gacggtctagatctcttgacctcag

SEQ ID NO: 3650151 - DNA, 25 bp, Homo sapien
ggcaagctccatcatgccgatactg

SEQ ID NO: 3650152 - DNA, 25 bp, Homo sapien
tattgcattcagcaactctgagaac

SEQ ID NO: 3650153 - DNA, 25 bp, Homo sapien
tgtattgcattcagcaactctgaga

SEQ ID NO: 3650154 - DNA, 25 bp, Homo sapien
gtgtattgcattcagcaactctgag

SEQ ID NO: 3650155 - DNA, 25 bp, Homo sapien
attgcattcagcaactctgagaacg

SEQ ID NO: 3650156 - DNA, 25 bp, Homo sapien
cagtcatagatattgagtttaaagc

SEQ ID NO: 3650157 - DNA, 25 bp, Homo sapien
tcttttgggtatgtgaaataacttc

SEQ ID NO: 3650158 - DNA, 25 bp, Homo sapien
tctcagagaggatcttaggacttaa

SEQ ID NO: 3650159 - DNA, 25 bp, Homo sapien
tcaaacaccaatttaggtccaccag

SEQ ID NO: 3650160 - DNA, 25 bp, Homo sapien
tgtactgcttccctcactcagttgg

SEQ ID NO: 3650161 - DNA, 25 bp, Homo sapien
gaagcctatcttcaaggaaccaaga

SEQ ID NO: 3650162 - DNA, 25 bp, Homo sapien
gatcatcagggttaaaatccccatg

SEQ ID NO: 3650163 - DNA, 25 bp, Homo sapien
gccaaatgtgtttatcccttaagag

SEQ ID NO: 3650164 - DNA, 25 bp, Homo sapien
taagttcttgctttgttagtgtaga

SEQ ID NO: 3650165 - DNA, 25 bp, Homo sapien
tgctttgttagtgtagaactgtcac

SEQ ID NO: 3650166 - DNA, 25 bp, Homo sapien
aatttaagttcttgctttgttagtg

SEQ ID NO: 3650167 - DNA, 25 bp, Homo sapien
gttagtgtagaactgtcacctctgt

SEQ ID NO: 3650168 - DNA, 25 bp, Homo sapien
aaccatgctggagtttggtacatac

SEQ ID NO: 3650169 - DNA, 25 bp, Homo sapien
tgggaaggtttccaagctacaatag

SEQ ID NO: 3650170 - DNA, 25 bp, Homo sapien
ctattatgtttagaaccatgctgga

SEQ ID NO: 3650171 - DNA, 25 bp, Homo sapien
ttgtatgggaaggtttccaagctac

SEQ ID NO: 3650172 - DNA, 25 bp, Homo sapien
tagaaacagcccaccaaggacatgg

SEQ ID NO: 3650173 - DNA, 25 bp, Homo sapien
taggaatgggcacatacatatatcc

SEQ ID NO: 3650174 - DNA, 25 bp, Homo sapien
taaaatgaccctctgagtgtgaaac

SEQ ID NO: 3650175 - DNA, 25 bp, Homo sapien
gacctaatctgggtggaaaatcaga

SEQ ID NO: 3650176 - DNA, 25 bp, Homo sapien
gacgacgccctgaaagacaacagag

SEQ ID NO: 3650177 - DNA, 25 bp, Homo sapien
gcagcggctcgaggaatttcaatac

SEQ ID NO: 3650178 - DNA, 25 bp, Homo sapien
tttggctacagtgtggacgacgccc

SEQ ID NO: 3650179 - DNA, 25 bp, Homo sapien
tctcacaggctacaaaggactttta

SEQ ID NO: 3650180 - DNA, 25 bp, Homo sapien
tagcaatgcctaccacagagtaagt

SEQ ID NO: 3650181 - DNA, 25 bp, Homo sapien
tcaaatgctggatctgtcacctaca

SEQ ID NO: 3650182 - DNA, 25 bp, Homo sapien
gcaaaatcgtggtgattaaggacct

SEQ ID NO: 3650183 - DNA, 25 bp, Homo sapien
tgaaaagtgtactacacagggagtc

SEQ ID NO: 3650184 - DNA, 25 bp, Homo sapien
gatcccgagccagatactacatttg

SEQ ID NO: 3650185 - DNA, 25 bp, Homo sapien
gagagagcgctcctacttgttgcaa

SEQ ID NO: 3650186 - DNA, 25 bp, Homo sapien
gagacaggagtactagatcccgagc

SEQ ID NO: 3650187 - DNA, 25 bp, Homo sapien
gttgcaaatgcccagaagactgctg

SEQ ID NO: 3650188 - DNA, 25 bp, Homo sapien
cagataaaaggggtacacaaatgga

SEQ ID NO: 3650189 - DNA, 25 bp, Homo sapien
gactaggtcacctatcaaactacaa

SEQ ID NO: 3650190 - DNA, 25 bp, Homo sapien
ggaaaaatgtgtagtgcttgaagcg

SEQ ID NO: 3650191 - DNA, 25 bp, Homo sapien
caatttctcttatatgactctttta

SEQ ID NO: 3650192 - DNA, 25 bp, Homo sapien
gcacgcatccataaagctcaagttg

SEQ ID NO: 3650193 - DNA, 25 bp, Homo sapien
aacattgtgcttgccggaaaagcgt

SEQ ID NO: 3650194 - DNA, 25 bp, Homo sapien
caaactcctctatatcaagttggga

SEQ ID NO: 3650195 - DNA, 25 bp, Homo sapien
tatatcctaacaacacacgcaatgg

SEQ ID NO: 3650196 - DNA, 25 bp, Homo sapien
actgagagaagatccagatagagta

SEQ ID NO: 3650197 - DNA, 25 bp, Homo sapien
gagaagatccagatagagtatttgc

SEQ ID NO: 3650198 - DNA, 25 bp, Homo sapien
gaatttgatctattgccatacatat

SEQ ID NO: 3650199 - DNA, 25 bp, Homo sapien
tgccatacatatgagatggtgcctg

SEQ ID NO: 3650200 - DNA, 25 bp, Homo sapien
ttcagactgagctataagagctgcc

SEQ ID NO: 3650201 - DNA, 25 bp, Homo sapien
ttgttttcagactgagctataagag

SEQ ID NO: 3650202 - DNA, 25 bp, Homo sapien
cagactgagctataagagctgccat

SEQ ID NO: 3650203 - DNA, 25 bp, Homo sapien
gttttcagactgagctataagagct

SEQ ID NO: 3650204 - DNA, 25 bp, Homo sapien
gacagtacaagagacaaatgcgaca

SEQ ID NO: 3650205 - DNA, 25 bp, Homo sapien
tccagtggctcattaagacagtaca

SEQ ID NO: 3650206 - DNA, 25 bp, Homo sapien
cattgcatagaactgagaactgaac

SEQ ID NO: 3650207 - DNA, 25 bp, Homo sapien
tgcgacaaaacgtcaactggtgaac

SEQ ID NO: 3650208 - DNA, 25 bp, Homo sapien
tgcggctattgtctccaagatcttg

SEQ ID NO: 3650209 - DNA, 25 bp, Homo sapien
tgccaactaggttgcggctattgtc

SEQ ID NO: 3650210 - DNA, 25 bp, Homo sapien
agcttcctctgccaactaggttgcg

SEQ ID NO: 3650211 - DNA, 25 bp, Homo sapien
taggttgcggctattgtctccaaga

SEQ ID NO: 3650212 - DNA, 25 bp, Homo sapien
ggtctcacttcgtcagccatgctag

SEQ ID NO: 3650213 - DNA, 25 bp, Homo sapien
caaacagcacttgtattaagatgaa

SEQ ID NO: 3650214 - DNA, 25 bp, Homo sapien
caggcctctctatctaactgctggg

SEQ ID NO: 3650215 - DNA, 25 bp, Homo sapien
tagatctatacttcaaatgataacc

SEQ ID NO: 3650216 - DNA, 25 bp, Homo sapien
ttgatcatagcgaatctgtaagctg

SEQ ID NO: 3650217 - DNA, 25 bp, Homo sapien
catagcgaatctgtaagctgcttac

SEQ ID NO: 3650218 - DNA, 25 bp, Homo sapien
tagcgaatctgtaagctgcttacag

SEQ ID NO: 3650219 - DNA, 25 bp, Homo sapien
ctggttgatcatagcgaatctgtaa

SEQ ID NO: 3650220 - DNA, 25 bp, Homo sapien
ctgttctatgctggctgctactgga

SEQ ID NO: 3650221 - DNA, 25 bp, Homo sapien
tgctactggaggcagattttccaaa

SEQ ID NO: 3650222 - DNA, 25 bp, Homo sapien
tgcctctccaaaagctgttctatgc

SEQ ID NO: 3650223 - DNA, 25 bp, Homo sapien
tgtcactaggagtaccctgttctag

SEQ ID NO: 3650224 - DNA, 25 bp, Homo sapien
atgagacggactaggatttgctgtt

SEQ ID NO: 3650225 - DNA, 25 bp, Homo sapien
gctgtgcattcaataactgaagccg

SEQ ID NO: 3650226 - DNA, 25 bp, Homo sapien
tctaatcttcggttttcaacttgaa

SEQ ID NO: 3650227 - DNA, 25 bp, Homo sapien
agttggtgtaatgacttcagcattc

SEQ ID NO: 3650228 - DNA, 25 bp, Homo sapien
gatttaatacaggaagagaattatc

SEQ ID NO: 3650229 - DNA, 25 bp, Homo sapien
aaagctgtttcctatatgagggctc

SEQ ID NO: 3650230 - DNA, 25 bp, Homo sapien
ctgctgttcaaggaatcagtagtag

SEQ ID NO: 3650231 - DNA, 25 bp, Homo sapien
cctatatgagggctcttactgctgt

SEQ ID NO: 3650232 - DNA, 25 bp, Homo sapien
atactattattcacaagtaaatcaa

SEQ ID NO: 3650233 - DNA, 25 bp, Homo sapien
tactattattcacaagtaaatcaac

SEQ ID NO: 3650234 - DNA, 25 bp, Homo sapien
tggtactttgtccactggaggttaa

SEQ ID NO: 3650235 - DNA, 25 bp, Homo sapien
ctgctggtactttgtccactggagg

SEQ ID NO: 3650236 - DNA, 25 bp, Homo sapien
tactttgtccactggaggttaagtc

SEQ ID NO: 3650237 - DNA, 25 bp, Homo sapien
gctggtactttgtccactggaggtt

SEQ ID NO: 3650238 - DNA, 25 bp, Homo sapien
aggctgcattccactagctagtgcc

SEQ ID NO: 3650239 - DNA, 25 bp, Homo sapien
ggctgcattccactagctagtgccc

SEQ ID NO: 3650240 - DNA, 25 bp, Homo sapien
tagtgcccccactgtcacgccattg

SEQ ID NO: 3650241 - DNA, 25 bp, Homo sapien
tgtcacgccattgacctgctgaact

SEQ ID NO: 3650242 - DNA, 25 bp, Homo sapien
ttctgggacattgtgacaggagtct

SEQ ID NO: 3650243 - DNA, 25 bp, Homo sapien
tgtagctggcattggatgtgttgca

SEQ ID NO: 3650244 - DNA, 25 bp, Homo sapien
ggagtctgcataaccccatttaaag

SEQ ID NO: 3650245 - DNA, 25 bp, Homo sapien
taaagctcctacaatgccattaatt

SEQ ID NO: 3650246 - DNA, 25 bp, Homo sapien
tacaaaggaacacattgaaagcccc

SEQ ID NO: 3650247 - DNA, 25 bp, Homo sapien
gacttcttaaggtgtatctacaaag

SEQ ID NO: 3650248 - DNA, 25 bp, Homo sapien
gattaagactaattttcagcacaga

SEQ ID NO: 3650249 - DNA, 25 bp, Homo sapien
taaggcatagacaacaccggtactc

SEQ ID NO: 3650250 - DNA, 25 bp, Homo sapien
cataccactgatttgacctatcctt

SEQ ID NO: 3650251 - DNA, 25 bp, Homo sapien
gaaatagctttctagtacccactgc

SEQ ID NO: 3650252 - DNA, 25 bp, Homo sapien
catccatgtgtacagctaaacaaga

SEQ ID NO: 3650253 - DNA, 25 bp, Homo sapien
tatccttttctaatggtcccaatgg

SEQ ID NO: 3650254 - DNA, 25 bp, Homo sapien
taagtatttgtcgttgctggtcaga

SEQ ID NO: 3650255 - DNA, 25 bp, Homo sapien
ctgaaactgctgttgatgaataagt

SEQ ID NO: 3650256 - DNA, 25 bp, Homo sapien
tgtgagctgttgagaatttaacaac

SEQ ID NO: 3650257 - DNA, 25 bp, Homo sapien
gctggtcagaaagtaatcctagtcc

SEQ ID NO: 3650258 - DNA, 25 bp, Homo sapien
catggtctccaagcaataatttgtg

SEQ ID NO: 3650259 - DNA, 25 bp, Homo sapien
tgaacaaactttagcccacgacatt

SEQ ID NO: 3650260 - DNA, 25 bp, Homo sapien
gcccacgacattggcagatgaagga

SEQ ID NO: 3650261 - DNA, 25 bp, Homo sapien
atttgtgctgaaaattccttaacca

SEQ ID NO: 3650262 - DNA, 25 bp, Homo sapien
caaaacaggacacacataggagagc

SEQ ID NO: 3650263 - DNA, 25 bp, Homo sapien
tatgccagcggagctactgagtgag

SEQ ID NO: 3650264 - DNA, 25 bp, Homo sapien
tactgctctgcgtcaagggaaacac

SEQ ID NO: 3650265 - DNA, 25 bp, Homo sapien
ttttaagcagattacccagggcagt

SEQ ID NO: 3650266 - DNA, 25 bp, Homo sapien
cattaactgatacaaaaaggcttga

SEQ ID NO: 3650267 - DNA, 25 bp, Homo sapien
atgttgcattaactgatacaaaaag

SEQ ID NO: 3650268 - DNA, 25 bp, Homo sapien
tgcattaactgatacaaaaaggctt

SEQ ID NO: 3650269 - DNA, 25 bp, Homo sapien
taactgatacaaaaaggcttgatgt

SEQ ID NO: 3650270 - DNA, 25 bp, Homo sapien
caagaaggttgtttatgggtatttg

SEQ ID NO: 3650271 - DNA, 25 bp, Homo sapien
agaaggttgtttatgggtatttgtg

SEQ ID NO: 3650272 - DNA, 25 bp, Homo sapien
gtgagaaatgggttggtggtagctg

SEQ ID NO: 3650273 - DNA, 25 bp, Homo sapien
gatggtgagaaatgggttggtggta

SEQ ID NO: 3650274 - DNA, 25 bp, Homo sapien
tccatggatggtgagaaatgggttg

SEQ ID NO: 3650275 - DNA, 25 bp, Homo sapien
tgtgtgaagtgggggtgcctgtgta

SEQ ID NO: 3650276 - DNA, 25 bp, Homo sapien
ttcttgtttcattagatgtagtaag

SEQ ID NO: 3650277 - DNA, 25 bp, Homo sapien
cttgtttcattagatgtagtaagga

SEQ ID NO: 3650278 - DNA, 25 bp, Homo sapien
gttcttgtttcattagatgtagtaa

SEQ ID NO: 3650279 - DNA, 25 bp, Homo sapien
catgtcagcagaacactggagaggt

SEQ ID NO: 3650280 - DNA, 25 bp, Homo sapien
tgtatcttgcaaggacacctggcac

SEQ ID NO: 3650281 - DNA, 25 bp, Homo sapien
catagcagggtactaagcaaacagc

SEQ ID NO: 3650282 - DNA, 25 bp, Homo sapien
tagccttcctctaacagggttctgc

SEQ ID NO: 3650283 - DNA, 25 bp, Homo sapien
gattccacatttgctatttgtcctt

SEQ ID NO: 3650284 - DNA, 25 bp, Homo sapien
tgtccttgggctttctttgcgtttc

SEQ ID NO: 3650285 - DNA, 25 bp, Homo sapien
ttatgggctaagaaagtcatcggct

SEQ ID NO: 3650286 - DNA, 25 bp, Homo sapien
aagtcatcggctgtgattccacatt

SEQ ID NO: 3650287 - DNA, 25 bp, Homo sapien
ctgcaggtaaacaaaagagcagatg

SEQ ID NO: 3650288 - DNA, 25 bp, Homo sapien
tgcaggtaaacaaaagagcagatgc

SEQ ID NO: 3650289 - DNA, 25 bp, Homo sapien
tcttgagctacaggcccagttttat

SEQ ID NO: 3650290 - DNA, 25 bp, Homo sapien
caggcccagttttatcactaagtct

SEQ ID NO: 3650291 - DNA, 25 bp, Homo sapien
ttttctcttgagctacaggcccagt

SEQ ID NO: 3650292 - DNA, 25 bp, Homo sapien
gctacaggcccagttttatcactaa

SEQ ID NO: 3650293 - DNA, 25 bp, Homo sapien
tgaatcaatgcaactccaggagaag

SEQ ID NO: 3650294 - DNA, 25 bp, Homo sapien
tacacagtggaggtctaattacagc

SEQ ID NO: 3650295 - DNA, 25 bp, Homo sapien
ggtactgtcacatcaaaagcgtggc

SEQ ID NO: 3650296 - DNA, 25 bp, Homo sapien
acaatggaggcacttgatcaagggc

SEQ ID NO: 3650297 - DNA, 25 bp, Homo sapien
taagtctgggataaaaagtctgagc

SEQ ID NO: 3650298 - DNA, 25 bp, Homo sapien
gaaggtaatccttcgccttgggaga

SEQ ID NO: 3650299 - DNA, 25 bp, Homo sapien
gaagcggacacttacaaacatgcag

SEQ ID NO: 3650300 - DNA, 25 bp, Homo sapien
cacaaggcgcacatgtgaaccagca

SEQ ID NO: 3650301 - DNA, 25 bp, Homo sapien
ccccagtcctcgcccccatggccat

SEQ ID NO: 3650302 - DNA, 25 bp, Homo sapien
gccccccagtcctcgcccccatggc

SEQ ID NO: 3650303 - DNA, 25 bp, Homo sapien
agtgaggtgctagtgtggttttctg

SEQ ID NO: 3650304 - DNA, 25 bp, Homo sapien
cacgggaatccgagtcttccccaga

SEQ ID NO: 3650305 - DNA, 25 bp, Homo sapien
acagtggctacatgtgagtgacaca

SEQ ID NO: 3650306 - DNA, 25 bp, Homo sapien
tgaggtgactgctgtgcagtcacag

SEQ ID NO: 3650307 - DNA, 25 bp, Homo sapien
ctagtcacgggaatccgagtcttcc

SEQ ID NO: 3650308 - DNA, 25 bp, Homo sapien
tacaagttgctggttgaactggtcc

SEQ ID NO: 3650309 - DNA, 25 bp, Homo sapien
gactgtatcgctaggtacaagttgc

SEQ ID NO: 3650310 - DNA, 25 bp, Homo sapien
caatatttctacgtcatgtgcctta

SEQ ID NO: 3650311 - DNA, 25 bp, Homo sapien
gctgaatattctgggagatgatgtt

SEQ ID NO: 3650312 - DNA, 25 bp, Homo sapien
tctgaccgctgggacaaaatagcca

SEQ ID NO: 3650313 - DNA, 25 bp, Homo sapien
gaaacttctggaactggcgttgcag

SEQ ID NO: 3650314 - DNA, 25 bp, Homo sapien
atgacatgatcacccagcgagagga

SEQ ID NO: 3650315 - DNA, 25 bp, Homo sapien
tagcagaacaaaacgagtccagcga

SEQ ID NO: 3650316 - DNA, 25 bp, Homo sapien
ctgaaggattcagtgacctgctccc

SEQ ID NO: 3650317 - DNA, 25 bp, Homo sapien
caaccaaagccaagcaactgaagga

SEQ ID NO: 3650318 - DNA, 25 bp, Homo sapien
actgaaggattcagtgacctgctcc

SEQ ID NO: 3650319 - DNA, 25 bp, Homo sapien
gtgacaaccaaagccaagcaactga

SEQ ID NO: 3650320 - DNA, 25 bp, Homo sapien
ggcagtattaccttgatgcaaaacc

SEQ ID NO: 3650321 - DNA, 25 bp, Homo sapien
aaataccaccaaactgaattcggca

SEQ ID NO: 3650322 - DNA, 25 bp, Homo sapien
ctatacataatgaaaagtccaagtc

SEQ ID NO: 3650323 - DNA, 25 bp, Homo sapien
caagtccagatagtttcaccactga

SEQ ID NO: 3650324 - DNA, 25 bp, Homo sapien
gggtctctggatgccccagatttgg

SEQ ID NO: 3650325 - DNA, 25 bp, Homo sapien
ggtgtctcataagtcttgtaagctt

SEQ ID NO: 3650326 - DNA, 25 bp, Homo sapien
ggagaaatctaatgggaatcctctt

SEQ ID NO: 3650327 - DNA, 25 bp, Homo sapien
tcttttgtagcttgcaaggtttctc

SEQ ID NO: 3650328 - DNA, 25 bp, Homo sapien
cacgaattgggtcgatctgtgacag

SEQ ID NO: 3650329 - DNA, 25 bp, Homo sapien
aggagggactccaggtcgatgggaa

SEQ ID NO: 3650330 - DNA, 25 bp, Homo sapien
aaaagattgcccacgaattgggtcg

SEQ ID NO: 3650331 - DNA, 25 bp, Homo sapien
gacaagaagtatggttaagttccca

SEQ ID NO: 3650332 - DNA, 25 bp, Homo sapien
tatcgatctcctgccctagtgatcc

SEQ ID NO: 3650333 - DNA, 25 bp, Homo sapien
gtatcgatctcctgccctagtgatc

SEQ ID NO: 3650334 - DNA, 25 bp, Homo sapien
atcgatctcctgccctagtgatcca

SEQ ID NO: 3650335 - DNA, 25 bp, Homo sapien
ctaacgcgcctggcttataaacaac

SEQ ID NO: 3650336 - DNA, 25 bp, Homo sapien
gagctaacgcgcctggcttataaac

SEQ ID NO: 3650337 - DNA, 25 bp, Homo sapien
gctaacgcgcctggcttataaacaa

SEQ ID NO: 3650338 - DNA, 25 bp, Homo sapien
gtgagctaacgcgcctggcttataa

SEQ ID NO: 3650339 - DNA, 25 bp, Homo sapien
gacaggcttactttctcgtcaggga

SEQ ID NO: 3650340 - DNA, 25 bp, Homo sapien
tttacggcatggtttactgaagccc

SEQ ID NO: 3650341 - DNA, 25 bp, Homo sapien
gaacattgtctatatgcccatacca

SEQ ID NO: 3650342 - DNA, 25 bp, Homo sapien
gaagccctatgtggagacttactgc

SEQ ID NO: 3650343 - DNA, 25 bp, Homo sapien
ctataacatctggtatggtcatctg

SEQ ID NO: 3650344 - DNA, 25 bp, Homo sapien
gtaccgtgaagtgcacacatgtaag

SEQ ID NO: 3650345 - DNA, 25 bp, Homo sapien
ttatttggggtaccgtgaagtgcac

SEQ ID NO: 3650346 - DNA, 25 bp, Homo sapien
tgatcagtgacctctgacgttactg

SEQ ID NO: 3650347 - DNA, 25 bp, Homo sapien
tatgatcatggaacttccatagaag

SEQ ID NO: 3650348 - DNA, 25 bp, Homo sapien
caaatggatgattggttggaaaaca

SEQ ID NO: 3650349 - DNA, 25 bp, Homo sapien
aatttcctgtatacacacctttaga

SEQ ID NO: 3650350 - DNA, 25 bp, Homo sapien
ttagaaactacatatattcagtctt

SEQ ID NO: 3650351 - DNA, 25 bp, Homo sapien
ggaagatgcactgactagaactgaa

SEQ ID NO: 3650352 - DNA, 25 bp, Homo sapien
gaagatgcactgactagaactgaac

SEQ ID NO: 3650353 - DNA, 25 bp, Homo sapien
aggaagatgcactgactagaactga

SEQ ID NO: 3650354 - DNA, 25 bp, Homo sapien
tataaagaaacaagattgaaggaaa

SEQ ID NO: 3650355 - DNA, 25 bp, Homo sapien
ttctcttggaatctgacaaaaacca

SEQ ID NO: 3650356 - DNA, 25 bp, Homo sapien
ttaaattgattatatgttctgtaac

SEQ ID NO: 3650357 - DNA, 25 bp, Homo sapien
tgggtttgaagaaagtacacattct

SEQ ID NO: 3650358 - DNA, 25 bp, Homo sapien
ttgtgttcggcttgtaaccccagga

SEQ ID NO: 3650359 - DNA, 25 bp, Homo sapien
ttgctgatgaaaccacagtggcatg

SEQ ID NO: 3650360 - DNA, 25 bp, Homo sapien
aaaagcattacctcacctcatccag

SEQ ID NO: 3650361 - DNA, 25 bp, Homo sapien
ttggttttgccttacactaaaagca

SEQ ID NO: 3650362 - DNA, 25 bp, Homo sapien
agtggcatgatttgcttccatgcaa

SEQ ID NO: 3650363 - DNA, 25 bp, Homo sapien
agagtgtggatgtatcaaaactcgg

SEQ ID NO: 3650364 - DNA, 25 bp, Homo sapien
gatgtatcaaaactcggtgcttcag

SEQ ID NO: 3650365 - DNA, 25 bp, Homo sapien
tatcaaaactcggtgcttcagaaaa

SEQ ID NO: 3650366 - DNA, 25 bp, Homo sapien
aaaagactggcagcaagagtgtgga

SEQ ID NO: 3650367 - DNA, 25 bp, Homo sapien
tacaggcgggtgagaaaaatgagca

SEQ ID NO: 3650368 - DNA, 25 bp, Homo sapien
caatggacttccagattggcgacag

SEQ ID NO: 3650369 - DNA, 25 bp, Homo sapien
tatgctgtggtttggtcaatctacc

SEQ ID NO: 3650370 - DNA, 25 bp, Homo sapien
gctgagctggcattactcttgttca

SEQ ID NO: 3650371 - DNA, 25 bp, Homo sapien
gaaaagcatatcgtaagctttcact

SEQ ID NO: 3650372 - DNA, 25 bp, Homo sapien
gcatatcgtaagctttcactaactt

SEQ ID NO: 3650373 - DNA, 25 bp, Homo sapien
taagctttcactaactttacatcca

SEQ ID NO: 3650374 - DNA, 25 bp, Homo sapien
taactttacatccagacaagaataa

SEQ ID NO: 3650375 - DNA, 25 bp, Homo sapien
tctgtctgcccaagctttttgagag

SEQ ID NO: 3650376 - DNA, 25 bp, Homo sapien
cacttttcagtctgtctgcccaagc

SEQ ID NO: 3650377 - DNA, 25 bp, Homo sapien
ccaaagcatgtcacttttcagtctg

SEQ ID NO: 3650378 - DNA, 25 bp, Homo sapien
agtccccaaagcatgtcacttttca

SEQ ID NO: 3650379 - DNA, 25 bp, Homo sapien
accttccatgcattctgtactgaga

SEQ ID NO: 3650380 - DNA, 25 bp, Homo sapien
aaggagaaggagctctgttatattc

SEQ ID NO: 3650381 - DNA, 25 bp, Homo sapien
gaaaccgggctgttgagagtaaaga

SEQ ID NO: 3650382 - DNA, 25 bp, Homo sapien
ttgaactagaaaggccaattcctca

SEQ ID NO: 3650383 - DNA, 25 bp, Homo sapien
tttttgagacgggtctcactcgatt

SEQ ID NO: 3650384 - DNA, 25 bp, Homo sapien
tgagacgggtctcactcgattgccc

SEQ ID NO: 3650385 - DNA, 25 bp, Homo sapien
tttgagacgggtctcactcgattgc

SEQ ID NO: 3650386 - DNA, 25 bp, Homo sapien
gagacgggtctcactcgattgccca

SEQ ID NO: 3650387 - DNA, 25 bp, Homo sapien
tatttcaaatggacttggtacatcc

SEQ ID NO: 3650388 - DNA, 25 bp, Homo sapien
caggaaattgtactggtgtccaaga

SEQ ID NO: 3650389 - DNA, 25 bp, Homo sapien
ggtacatccaggaaattgtactggt

SEQ ID NO: 3650390 - DNA, 25 bp, Homo sapien
caaatggacttggtacatccaggaa

SEQ ID NO: 3650391 - DNA, 25 bp, Homo sapien
ggagagcggagacctggagttgttt

SEQ ID NO: 3650392 - DNA, 25 bp, Homo sapien
ttctaccagttcctcggggtgcagc

SEQ ID NO: 3650393 - DNA, 25 bp, Homo sapien
ggctgggagagcggagacctggagt

SEQ ID NO: 3650394 - DNA, 25 bp, Homo sapien
cctggagttgtttgacttagtggag

SEQ ID NO: 3650395 - DNA, 25 bp, Homo sapien
gaggtgctccgccaaaacaatattt

SEQ ID NO: 3650396 - DNA, 25 bp, Homo sapien
taacctttgtcgactcaatgtaagt

SEQ ID NO: 3650397 - DNA, 25 bp, Homo sapien
caatggtatcttagaatttcaagct

SEQ ID NO: 3650398 - DNA, 25 bp, Homo sapien
gttactgagtgaagataacgttcca

SEQ ID NO: 3650399 - DNA, 25 bp, Homo sapien
cgcacccagcaacaaatgcttttaa

SEQ ID NO: 3650400 - DNA, 25 bp, Homo sapien
ccgcacccagcaacaaatgctttta

SEQ ID NO: 3650401 - DNA, 25 bp, Homo sapien
cgaacaagcatcaagcgggaaggaa

SEQ ID NO: 3650402 - DNA, 25 bp, Homo sapien
caagaaccaggaagtggagtagaca

SEQ ID NO: 3650403 - DNA, 25 bp, Homo sapien
tagacaggactcagtgccgaacaag

SEQ ID NO: 3650404 - DNA, 25 bp, Homo sapien
gatagaggcatggagcaaaaaccac

SEQ ID NO: 3650405 - DNA, 25 bp, Homo sapien
aagatgtatgaatcaaccggggctg

SEQ ID NO: 3650406 - DNA, 25 bp, Homo sapien
gaagcagcagatccctttttctatg

SEQ ID NO: 3650407 - DNA, 25 bp, Homo sapien
gggctgatatggttggtgaggaagg

SEQ ID NO: 3650408 - DNA, 25 bp, Homo sapien
ggtctcccctgaaggcgggaagcac

SEQ ID NO: 3650409 - DNA, 25 bp, Homo sapien
gcttccagatatcttccccacactt

SEQ ID NO: 3650410 - DNA, 25 bp, Homo sapien
gatgtcttccctacccacattccca

SEQ ID NO: 3650411 - DNA, 25 bp, Homo sapien
gaaactgcaagggatgaccccaggt

SEQ ID NO: 3650412 - DNA, 25 bp, Homo sapien
ccacacagaactcttgtccacgctt

SEQ ID NO: 3650413 - DNA, 25 bp, Homo sapien
taaagccagcgacttgccttttggg

SEQ ID NO: 3650414 - DNA, 25 bp, Homo sapien
tctcctcttagagtgccggctttga

SEQ ID NO: 3650415 - DNA, 25 bp, Homo sapien
ttgacagaacaagggctgccctcta

SEQ ID NO: 3650416 - DNA, 25 bp, Homo sapien
gacagctgagactctgagacccttg

SEQ ID NO: 3650417 - DNA, 25 bp, Homo sapien
ctgagggcttggcaaccacgtcagg

SEQ ID NO: 3650418 - DNA, 25 bp, Homo sapien
tgagggcttggcaaccacgtcaggg

SEQ ID NO: 3650419 - DNA, 25 bp, Homo sapien
ggcttggcaaccacgtcagggatgc

SEQ ID NO: 3650420 - DNA, 25 bp, Homo sapien
ctgtgcatacacagtagcctctttc

SEQ ID NO: 3650421 - DNA, 25 bp, Homo sapien
aggtgacacctaaactgcatcccca

SEQ ID NO: 3650422 - DNA, 25 bp, Homo sapien
cagaagaatcatgttgtctacaatc

SEQ ID NO: 3650423 - DNA, 25 bp, Homo sapien
ctctgaaatattgccgtttgtgtct

SEQ ID NO: 3650424 - DNA, 25 bp, Homo sapien
cagaagaagctttaagcgtagggtc

SEQ ID NO: 3650425 - DNA, 25 bp, Homo sapien
agctgcaggctgacccctggcccat

SEQ ID NO: 3650426 - DNA, 25 bp, Homo sapien
ctgcaggctgacccctggcccatcc

SEQ ID NO: 3650427 - DNA, 25 bp, Homo sapien
gaaagctgcaggctgacccctggcc

SEQ ID NO: 3650428 - DNA, 25 bp, Homo sapien
ttggccttgaaagctgcaggctgac

SEQ ID NO: 3650429 - DNA, 25 bp, Homo sapien
cgttggcttccaacatgtcgtgtca

SEQ ID NO: 3650430 - DNA, 25 bp, Homo sapien
catgttggagatgtgccttacggat

SEQ ID NO: 3650431 - DNA, 25 bp, Homo sapien
gttcacttaacgtctgttctccttg

SEQ ID NO: 3650432 - DNA, 25 bp, Homo sapien
gatggcaggttgttttaccgttggc

SEQ ID NO: 3650433 - DNA, 25 bp, Homo sapien
tccttttgcagttgctgacagctga

SEQ ID NO: 3650434 - DNA, 25 bp, Homo sapien
taagtcacagacaggcctccagact

SEQ ID NO: 3650435 - DNA, 25 bp, Homo sapien
aaaatctaagtcacagacaggcctc

SEQ ID NO: 3650436 - DNA, 25 bp, Homo sapien
tctaagtcacagacaggcctccaga

SEQ ID NO: 3650437 - DNA, 25 bp, Homo sapien
aatctaagtcacagacaggcctcca

SEQ ID NO: 3650438 - DNA, 25 bp, Homo sapien
gctgacccagcatgtgagggagcac

SEQ ID NO: 3650439 - DNA, 25 bp, Homo sapien
gaccccagtggctgatctcgacaac

SEQ ID NO: 3650440 - DNA, 25 bp, Homo sapien
tccacagagcctgagaatcagcctc

SEQ ID NO: 3650441 - DNA, 25 bp, Homo sapien
tctgtgagcatggacaaatgagcac

SEQ ID NO: 3650442 - DNA, 25 bp, Homo sapien
tcatttgctctgtactaacaaggaa

SEQ ID NO: 3650443 - DNA, 25 bp, Homo sapien
tttgctctgtactaacaaggaagtc

SEQ ID NO: 3650444 - DNA, 25 bp, Homo sapien
tttgctcttctcttctagcagggag

SEQ ID NO: 3650445 - DNA, 25 bp, Homo sapien
gggagtcccagttcaaccagttcca

SEQ ID NO: 3650446 - DNA, 25 bp, Homo sapien
ctagcagggagtcccagttcaacca

SEQ ID NO: 3650447 - DNA, 25 bp, Homo sapien
ttctcttctagcagggagtcccagt

SEQ ID NO: 3650448 - DNA, 25 bp, Homo sapien
tcctgagaccctagatctattccct

SEQ ID NO: 3650449 - DNA, 25 bp, Homo sapien
tctctttctcctgagaccctagatc

SEQ ID NO: 3650450 - DNA, 25 bp, Homo sapien
tttctcctgagaccctagatctatt

SEQ ID NO: 3650451 - DNA, 25 bp, Homo sapien
ctgagaccctagatctattccctct

SEQ ID NO: 3650452 - DNA, 25 bp, Homo sapien
tgtccctcccggatcttgtacacaa

SEQ ID NO: 3650453 - DNA, 25 bp, Homo sapien
gcatttgggatgatcttccaatgtc

SEQ ID NO: 3650454 - DNA, 25 bp, Homo sapien
ggatgatcttccaatgtccctcccg

SEQ ID NO: 3650455 - DNA, 25 bp, Homo sapien
tccaatgtccctcccggatcttgta

SEQ ID NO: 3650456 - DNA, 25 bp, Homo sapien
aaacagatctagccccagaaagatg

SEQ ID NO: 3650457 - DNA, 25 bp, Homo sapien
gaaagatgggaccagattgtttttg

SEQ ID NO: 3650458 - DNA, 25 bp, Homo sapien
ttcctgtttgtaaacagatctagcc

SEQ ID NO: 3650459 - DNA, 25 bp, Homo sapien
tgtttccatgaatgccataagcatc

SEQ ID NO: 3650460 - DNA, 25 bp, Homo sapien
tgttctattgaactgctagtcataa

SEQ ID NO: 3650461 - DNA, 25 bp, Homo sapien
ggctaattgaaatgactactctaca

SEQ ID NO: 3650462 - DNA, 25 bp, Homo sapien
tgcaatttatttcactacttggaag

SEQ ID NO: 3650463 - DNA, 25 bp, Homo sapien
tactagaagctcaatagaacaagca

SEQ ID NO: 3650464 - DNA, 25 bp, Homo sapien
ttcatgcttcagatgcaacataatt

SEQ ID NO: 3650465 - DNA, 25 bp, Homo sapien
ctcttctctgaatatctggtactca

SEQ ID NO: 3650466 - DNA, 25 bp, Homo sapien
gataaaatattgaaacactgagtct

SEQ ID NO: 3650467 - DNA, 25 bp, Homo sapien
aaacactgagtctgaaactcttctc

SEQ ID NO: 3650468 - DNA, 25 bp, Homo sapien
tattgaaacactgagtctgaaactc

SEQ ID NO: 3650469 - DNA, 25 bp, Homo sapien
tcgtcatggctcgtggcagtctcaa

SEQ ID NO: 3650470 - DNA, 25 bp, Homo sapien
gagatgtaccaatccaaggcaccag

SEQ ID NO: 3650471 - DNA, 25 bp, Homo sapien
cagttaacgagttcctagccggagt

SEQ ID NO: 3650472 - DNA, 25 bp, Homo sapien
cagtcattggattgtgggctaccct

SEQ ID NO: 3650473 - DNA, 25 bp, Homo sapien
tggtcccaaggtaaggctgcaagtt

SEQ ID NO: 3650474 - DNA, 25 bp, Homo sapien
ccaaggtaaggctgcaagtttttct

SEQ ID NO: 3650475 - DNA, 25 bp, Homo sapien
cctggtcccaaggtaaggctgcaag

SEQ ID NO: 3650476 - DNA, 25 bp, Homo sapien
cacctggtcccaaggtaaggctgca

SEQ ID NO: 3650477 - DNA, 25 bp, Homo sapien
gattacatggatccaacacctgatc

SEQ ID NO: 3650478 - DNA, 25 bp, Homo sapien
gtgattacatggatccaacacctga

SEQ ID NO: 3650479 - DNA, 25 bp, Homo sapien
ctggtgattacatggatccaacacc

SEQ ID NO: 3650480 - DNA, 25 bp, Homo sapien
ggtgattacatggatccaacacctg

SEQ ID NO: 3650481 - DNA, 25 bp, Homo sapien
tcttcaatcttgttaagccagaagt

SEQ ID NO: 3650482 - DNA, 25 bp, Homo sapien
catcttcaatcttgttaagccagaa

SEQ ID NO: 3650483 - DNA, 25 bp, Homo sapien
atcttcaatcttgttaagccagaag

SEQ ID NO: 3650484 - DNA, 25 bp, Homo sapien
ccatcttcaatcttgttaagccaga

SEQ ID NO: 3650485 - DNA, 25 bp, Homo sapien
gccttggccactgcatccccacgtt

SEQ ID NO: 3650486 - DNA, 25 bp, Homo sapien
ttggaggccttggccactgcatccc

SEQ ID NO: 3650487 - DNA, 25 bp, Homo sapien
gtctccttggaggccttggccactg

SEQ ID NO: 3650488 - DNA, 25 bp, Homo sapien
tccttggaggccttggccactgcat

SEQ ID NO: 3650489 - DNA, 25 bp, Homo sapien
cgctcatgcaccaagacccggtaat

SEQ ID NO: 3650490 - DNA, 25 bp, Homo sapien
taaagctcagcatagaaggccctca

SEQ ID NO: 3650491 - DNA, 25 bp, Homo sapien
gcctcatctcgctcatgcaccaaga

SEQ ID NO: 3650492 - DNA, 25 bp, Homo sapien
tctcgctcatgcaccaagacccggt

SEQ ID NO: 3650493 - DNA, 25 bp, Homo sapien
ctcttcaccctttgggtggacagtt

SEQ ID NO: 3650494 - DNA, 25 bp, Homo sapien
gtggacagttttctccaagttgctg

SEQ ID NO: 3650495 - DNA, 25 bp, Homo sapien
ttctcttcaccctttgggtggacag

SEQ ID NO: 3650496 - DNA, 25 bp, Homo sapien
ctttgggtggacagttttctccaag

SEQ ID NO: 3650497 - DNA, 25 bp, Homo sapien
cacacaacatatagatcatttattt

SEQ ID NO: 3650498 - DNA, 25 bp, Homo sapien
atccacacaacatatagatcattta

SEQ ID NO: 3650499 - DNA, 25 bp, Homo sapien
tttatccacacaacatatagatcat

SEQ ID NO: 3650500 - DNA, 25 bp, Homo sapien
ttttttatccacacaacatatagat

SEQ ID NO: 3650501 - DNA, 25 bp, Homo sapien
caacagtgtcaagttcaagctgcaa

SEQ ID NO: 3650502 - DNA, 25 bp, Homo sapien
gtcttcacggcggtctaggcctcgc

SEQ ID NO: 3650503 - DNA, 25 bp, Homo sapien
gcttcgtgacgcgtgaaatgtaacg

SEQ ID NO: 3650504 - DNA, 25 bp, Homo sapien
ggctggtcttgctcggcttcgtgac

SEQ ID NO: 3650505 - DNA, 25 bp, Homo sapien
gaaggatgtatttggggagatccaa

SEQ ID NO: 3650506 - DNA, 25 bp, Homo sapien
gggagatccaagcctgtctgcttgg

SEQ ID NO: 3650507 - DNA, 25 bp, Homo sapien
gatgtatttggggagatccaagcct

SEQ ID NO: 3650508 - DNA, 25 bp, Homo sapien
tatttggggagatccaagcctgtct

SEQ ID NO: 3650509 - DNA, 25 bp, Homo sapien
caatttcaagtgacgggcttccctc

SEQ ID NO: 3650510 - DNA, 25 bp, Homo sapien
gagtgactctccttagtcgtggtaa

SEQ ID NO: 3650511 - DNA, 25 bp, Homo sapien
gtttattctcacaccttctggttag

SEQ ID NO: 3650512 - DNA, 25 bp, Homo sapien
tagggaacctgctaatagaagcaat

SEQ ID NO: 3650513 - DNA, 25 bp, Homo sapien
tccactcccggttcctctttctcca

SEQ ID NO: 3650514 - DNA, 25 bp, Homo sapien
gaaaagcgaatatggcgctgctgaa

SEQ ID NO: 3650515 - DNA, 25 bp, Homo sapien
gcagaaatgtgctggcgcctgtcca

SEQ ID NO: 3650516 - DNA, 25 bp, Homo sapien
ccaaaagcggcgagaggaaaagcga

SEQ ID NO: 3650517 - DNA, 25 bp, Homo sapien
cacaccgtgggcgaaactagagggc

SEQ ID NO: 3650518 - DNA, 25 bp, Homo sapien
ccggactggcgtcccgaggccaggg

SEQ ID NO: 3650519 - DNA, 25 bp, Homo sapien
caagccccggtacccgcagcgtgcg

SEQ ID NO: 3650520 - DNA, 25 bp, Homo sapien
cgcaggtggaggtgaccccgtcacc

SEQ ID NO: 3650521 - DNA, 25 bp, Homo sapien
ggcgggcatcgatcgccggctccca

SEQ ID NO: 3650522 - DNA, 25 bp, Homo sapien
ggattcgacagacgccagcggtggg

SEQ ID NO: 3650523 - DNA, 25 bp, Homo sapien
ttctgagtcgtgagccgcctccagt

SEQ ID NO: 3650524 - DNA, 25 bp, Homo sapien
gcgagaagccccgactttctgagtc

SEQ ID NO: 3650525 - DNA, 25 bp, Homo sapien
gacgtaaccccgaggagctttcaga

SEQ ID NO: 3650526 - DNA, 25 bp, Homo sapien
ggacagagaaggagccggcggtcct

SEQ ID NO: 3650527 - DNA, 25 bp, Homo sapien
accttgagtgaagaacgatgtcaag

SEQ ID NO: 3650528 - DNA, 25 bp, Homo sapien
atggctgtggcctccttatctcccg

SEQ ID NO: 3650529 - DNA, 25 bp, Homo sapien
ggcttctctggcactagcgaggacc

SEQ ID NO: 3650530 - DNA, 25 bp, Homo sapien
tttcagggcgccaagtacgggtagc

SEQ ID NO: 3650531 - DNA, 25 bp, Homo sapien
ccttctaggagcaaaaccagcgacg

SEQ ID NO: 3650532 - DNA, 25 bp, Homo sapien
ggtttccttcgctgtgaccctgaca

SEQ ID NO: 3650533 - DNA, 25 bp, Homo sapien
tagcgcttctgatggattcccgggt

SEQ ID NO: 3650534 - DNA, 25 bp, Homo sapien
ggctgttagagaacatagatggtat

SEQ ID NO: 3650535 - DNA, 25 bp, Homo sapien
gccttggacctctatgaattttatg

SEQ ID NO: 3650536 - DNA, 25 bp, Homo sapien
catttccaggtaacataaagagttg

SEQ ID NO: 3650537 - DNA, 25 bp, Homo sapien
gcttggtatcaagtagacataatca

SEQ ID NO: 3650538 - DNA, 25 bp, Homo sapien
tggtgaatgcatcagtaaatgggtg

SEQ ID NO: 3650539 - DNA, 25 bp, Homo sapien
taaagtcctactatctagatgccat

SEQ ID NO: 3650540 - DNA, 25 bp, Homo sapien
tgaaattggatcaagtagccacttg

SEQ ID NO: 3650541 - DNA, 25 bp, Homo sapien
gcctactctgtctgctaggaaggca

SEQ ID NO: 3650542 - DNA, 25 bp, Homo sapien
gctgaaatatggcaataatctggtt

SEQ ID NO: 3650543 - DNA, 25 bp, Homo sapien
tacattcatgtcacgttcgtacccg

SEQ ID NO: 3650544 - DNA, 25 bp, Homo sapien
tctgttgctcagcaattcagccgtt

SEQ ID NO: 3650545 - DNA, 25 bp, Homo sapien
tgcccagctatagggaacagtatga

SEQ ID NO: 3650546 - DNA, 25 bp, Homo sapien
gcaagctattacaactgaactcagg

SEQ ID NO: 3650547 - DNA, 25 bp, Homo sapien
gacattaagaaatgctgcaccattg

SEQ ID NO: 3650548 - DNA, 25 bp, Homo sapien
gaaatcagaatccagtcatatggga

SEQ ID NO: 3650549 - DNA, 25 bp, Homo sapien
gaacaaagtttaccctgctatcaga

SEQ ID NO: 3650550 - DNA, 25 bp, Homo sapien
ctttgtcaagcctggtatcaacacg

SEQ ID NO: 3650551 - DNA, 25 bp, Homo sapien
gcctactccatggatgcatttctga

SEQ ID NO: 3650552 - DNA, 25 bp, Homo sapien
tcaagcctggtatcaacacgcacat

SEQ ID NO: 3650553 - DNA, 25 bp, Homo sapien
gaagcctactccatggatgcatttc

SEQ ID NO: 3650554 - DNA, 25 bp, Homo sapien
accaaagtatagaacttatttggtg

SEQ ID NO: 3650555 - DNA, 25 bp, Homo sapien
gcataggtaaccaaagtatagaact

SEQ ID NO: 3650556 - DNA, 25 bp, Homo sapien
ggtgcataggtaaccaaagtataga

SEQ ID NO: 3650557 - DNA, 25 bp, Homo sapien
aggtgcataggtaaccaaagtatag

SEQ ID NO: 3650558 - DNA, 25 bp, Homo sapien
gctgcccactcacaagtttggactc

SEQ ID NO: 3650559 - DNA, 25 bp, Homo sapien
tacttgatgcacatacatcgtccct

SEQ ID NO: 3650560 - DNA, 25 bp, Homo sapien
atcgtcccttggctatcatccctgt

SEQ ID NO: 3650561 - DNA, 25 bp, Homo sapien
tccccatctgttggcatggctagct

SEQ ID NO: 3650562 - DNA, 25 bp, Homo sapien
ggcatagtggaccattccattccct

SEQ ID NO: 3650563 - DNA, 25 bp, Homo sapien
ctctctctttagaaggcatagtgga

SEQ ID NO: 3650564 - DNA, 25 bp, Homo sapien
tgcttgtaaacatctctctctttag

SEQ ID NO: 3650565 - DNA, 25 bp, Homo sapien
tagaaggcatagtggaccattccat

SEQ ID NO: 3650566 - DNA, 25 bp, Homo sapien
ctcctgatccctcaagaatcttaga

SEQ ID NO: 3650567 - DNA, 25 bp, Homo sapien
cctgatccctcaagaatcttagagc

SEQ ID NO: 3650568 - DNA, 25 bp, Homo sapien
gatccctcaagaatcttagagccca

SEQ ID NO: 3650569 - DNA, 25 bp, Homo sapien
tgatccctcaagaatcttagagccc

SEQ ID NO: 3650570 - DNA, 25 bp, Homo sapien
tgtgagcgcgccgtgaccttcgaca

SEQ ID NO: 3650571 - DNA, 25 bp, Homo sapien
caccacgtgacacgcgccgcgcgct

SEQ ID NO: 3650572 - DNA, 25 bp, Homo sapien
ttcgacacgcacaccacgtgacacg

SEQ ID NO: 3650573 - DNA, 25 bp, Homo sapien
tgaccttcgacacgcacaccacgtg

SEQ ID NO: 3650574 - DNA, 25 bp, Homo sapien
gaaggcgttggagtcgaaggagcgg

SEQ ID NO: 3650575 - DNA, 25 bp, Homo sapien
cccggaggagaagcgtgaaggcgtt

SEQ ID NO: 3650576 - DNA, 25 bp, Homo sapien
cggggatccgccagcatctggaagc

SEQ ID NO: 3650577 - DNA, 25 bp, Homo sapien
agactctggaatgccgcccggagga

SEQ ID NO: 3650578 - DNA, 25 bp, Homo sapien
aacaccttagatgtttaggccacaa

SEQ ID NO: 3650579 - DNA, 25 bp, Homo sapien
gagctccccagatgaagtccaactg

SEQ ID NO: 3650580 - DNA, 25 bp, Homo sapien
actccgtccggagcgaagggcaaag

SEQ ID NO: 3650581 - DNA, 25 bp, Homo sapien
cctagccctggaagcttgaattgca

SEQ ID NO: 3650582 - DNA, 25 bp, Homo sapien
tctaggcgtagaacctgtgtaaaca

SEQ ID NO: 3650583 - DNA, 25 bp, Homo sapien
taaacatgctgaactagagcgctgg

SEQ ID NO: 3650584 - DNA, 25 bp, Homo sapien
gatcatagcaacttgaggtatgctc

SEQ ID NO: 3650585 - DNA, 25 bp, Homo sapien
catcatagtttaaggttctaggcgt

SEQ ID NO: 3650586 - DNA, 25 bp, Homo sapien
tcgcttaaaagacactcgcatcctg

SEQ ID NO: 3650587 - DNA, 25 bp, Homo sapien
aaaatcatctaaaagcgatcggtct

SEQ ID NO: 3650588 - DNA, 25 bp, Homo sapien
gagtttagggtaaccggctccatga

SEQ ID NO: 3650589 - DNA, 25 bp, Homo sapien
tagaaggtagggcatgagttcagaa

SEQ ID NO: 3650590 - DNA, 25 bp, Homo sapien
ggctccatgaacaaatacatcaagg

SEQ ID NO: 3650591 - DNA, 25 bp, Homo sapien
tgagatgagcaacaagatcaagtga

SEQ ID NO: 3650592 - DNA, 25 bp, Homo sapien
aaaacatcaactataaggacagtca

SEQ ID NO: 3650593 - DNA, 25 bp, Homo sapien
aataaattaacttccagtgatgcct

SEQ ID NO: 3650594 - DNA, 25 bp, Homo sapien
tctttacagtcatgttccaaaaagg

SEQ ID NO: 3650595 - DNA, 25 bp, Homo sapien
tagagttgacttgtcagctcggtgc

SEQ ID NO: 3650596 - DNA, 25 bp, Homo sapien
taaaaccactgggtcgatatgtttc

SEQ ID NO: 3650597 - DNA, 25 bp, Homo sapien
tgtcagctcggtgctttcctgcctc

SEQ ID NO: 3650598 - DNA, 25 bp, Homo sapien
gcctctagtatgtaagttgcagctg

SEQ ID NO: 3650599 - DNA, 25 bp, Homo sapien
aaagccaaagttctgtctccatttt

SEQ ID NO: 3650600 - DNA, 25 bp, Homo sapien
tcattaaggtagtatttgaaaataa

SEQ ID NO: 3650601 - DNA, 25 bp, Homo sapien
atcattaaggtagtatttgaaaata

SEQ ID NO: 3650602 - DNA, 25 bp, Homo sapien
aaaaaagccaaagttctgtctccat

SEQ ID NO: 3650603 - DNA, 25 bp, Homo sapien
ctgatattccgtgcaaaacagttct

SEQ ID NO: 3650604 - DNA, 25 bp, Homo sapien
gcaaaacagttctattcgctctctg

SEQ ID NO: 3650605 - DNA, 25 bp, Homo sapien
aacagttctattcgctctctgtcaa

SEQ ID NO: 3650606 - DNA, 25 bp, Homo sapien
tgatattccgtgcaaaacagttcta

SEQ ID NO: 3650607 - DNA, 25 bp, Homo sapien
tggagagaaaaaagaaagcaagaaa

SEQ ID NO: 3650608 - DNA, 25 bp, Homo sapien
gagagaaaaaagaaagcaagaaaga

SEQ ID NO: 3650609 - DNA, 25 bp, Homo sapien
ctggagagaaaaaagaaagcaagaa

SEQ ID NO: 3650610 - DNA, 25 bp, Homo sapien
agtaggatttctagggaattcttat

SEQ ID NO: 3650611 - DNA, 25 bp, Homo sapien
cccagtaggatttctagggaattct

SEQ ID NO: 3650612 - DNA, 25 bp, Homo sapien
cagtaggatttctagggaattctta

SEQ ID NO: 3650613 - DNA, 25 bp, Homo sapien
ccagtaggatttctagggaattctt

SEQ ID NO: 3650614 - DNA, 25 bp, Homo sapien
cctcagcttgacaccttatacagta

SEQ ID NO: 3650615 - DNA, 25 bp, Homo sapien
caagtgaaaagtgcctcagcttgac

SEQ ID NO: 3650616 - DNA, 25 bp, Homo sapien
gaaaagtgcctcagcttgacacctt

SEQ ID NO: 3650617 - DNA, 25 bp, Homo sapien
ctgcaagtgaaaagtgcctcagctt

SEQ ID NO: 3650618 - DNA, 25 bp, Homo sapien
tcgtacatagtctcctcagaagaac

SEQ ID NO: 3650619 - DNA, 25 bp, Homo sapien
gatgcaatgataacttcgtacatag

SEQ ID NO: 3650620 - DNA, 25 bp, Homo sapien
tttctttgggtcaagatcccgaaga

SEQ ID NO: 3650621 - DNA, 25 bp, Homo sapien
aaaacatgagcttaacttcaattgc

SEQ ID NO: 3650622 - DNA, 25 bp, Homo sapien
caagaaacatccgttatatgaggga

SEQ ID NO: 3650623 - DNA, 25 bp, Homo sapien
caagcgccaagaaacatccgttata

SEQ ID NO: 3650624 - DNA, 25 bp, Homo sapien
tatctgatattccaagcgccaagaa

SEQ ID NO: 3650625 - DNA, 25 bp, Homo sapien
catccgttatatgagggagagatct

SEQ ID NO: 3650626 - DNA, 25 bp, Homo sapien
taacacaacaaacacgcaacagctt

SEQ ID NO: 3650627 - DNA, 25 bp, Homo sapien
aaataacacaacaaacacgcaacag

SEQ ID NO: 3650628 - DNA, 25 bp, Homo sapien
acaaacacgcaacagcttttaactc

SEQ ID NO: 3650629 - DNA, 25 bp, Homo sapien
aaacacgcaacagcttttaactcta

SEQ ID NO: 3650630 - DNA, 25 bp, Homo sapien
tgtacatcctatgaagttgattggt

SEQ ID NO: 3650631 - DNA, 25 bp, Homo sapien
aacacgcaacaagaaacgctgttta

SEQ ID NO: 3650632 - DNA, 25 bp, Homo sapien
aaaaaacacgcaacaagaaacgctg

SEQ ID NO: 3650633 - DNA, 25 bp, Homo sapien
cgcaacaagaaacgctgtttattta

SEQ ID NO: 3650634 - DNA, 25 bp, Homo sapien
ttcattattggataagacttatcta

SEQ ID NO: 3650635 - DNA, 25 bp, Homo sapien
ttgttccatgctgcaactaaaacta

SEQ ID NO: 3650636 - DNA, 25 bp, Homo sapien
aattgttccatgctgcaactaaaac

SEQ ID NO: 3650637 - DNA, 25 bp, Homo sapien
ctgtaattgttccatgctgcaacta

SEQ ID NO: 3650638 - DNA, 25 bp, Homo sapien
gtaattgttccatgctgcaactaaa

SEQ ID NO: 3650639 - DNA, 25 bp, Homo sapien
acttttgacaaactactatcgggca

SEQ ID NO: 3650640 - DNA, 25 bp, Homo sapien
gaagtatccaagctcaagaaagatg

SEQ ID NO: 3650641 - DNA, 25 bp, Homo sapien
aaatcggttatttgccctcacactg

SEQ ID NO: 3650642 - DNA, 25 bp, Homo sapien
gaaacatgatttctaaccggatcct

SEQ ID NO: 3650643 - DNA, 25 bp, Homo sapien
actgagttgctctttccaggctttt

SEQ ID NO: 3650644 - DNA, 25 bp, Homo sapien
ttcgaagcatctttaagtttcccca

SEQ ID NO: 3650645 - DNA, 25 bp, Homo sapien
agcatctttaagtttccccaccaag

SEQ ID NO: 3650646 - DNA, 25 bp, Homo sapien
ctttccaggcttttcgaagcatctt

SEQ ID NO: 3650647 - DNA, 25 bp, Homo sapien
ttttctactgaaaaggacatccagc

SEQ ID NO: 3650648 - DNA, 25 bp, Homo sapien
tcagctgaaggcaaggcgtttctgg

SEQ ID NO: 3650649 - DNA, 25 bp, Homo sapien
tgcactcgggcggatcgttaacttc

SEQ ID NO: 3650650 - DNA, 25 bp, Homo sapien
catccagctcgcacaaacggtggtt

SEQ ID NO: 3650651 - DNA, 25 bp, Homo sapien
tgcctctcatactacgattatttca

SEQ ID NO: 3650652 - DNA, 25 bp, Homo sapien
ggcgcgatcggttttattctgcggg

SEQ ID NO: 3650653 - DNA, 25 bp, Homo sapien
gctgctaagccggaacggggctccc

SEQ ID NO: 3650654 - DNA, 25 bp, Homo sapien
ttgtctcgccccgatctctgcctct

SEQ ID NO: 3650655 - DNA, 25 bp, Homo sapien
gaaagttaaaagtcgttcagcagaa

SEQ ID NO: 3650656 - DNA, 25 bp, Homo sapien
cagaaaatgaatgcgagccaagcgg

SEQ ID NO: 3650657 - DNA, 25 bp, Homo sapien
tcgaagcgggcggaaaagacaatga

SEQ ID NO: 3650658 - DNA, 25 bp, Homo sapien
atcttgaagcgagctgcagacgccg

SEQ ID NO: 3650659 - DNA, 25 bp, Homo sapien
ctctcaacaaagggcgctgcggccg

SEQ ID NO: 3650660 - DNA, 25 bp, Homo sapien
ggcgctgcggccgggagagccgccg

SEQ ID NO: 3650661 - DNA, 25 bp, Homo sapien
ccctataaaatgggggcgttctctg

SEQ ID NO: 3650662 - DNA, 25 bp, Homo sapien
ccacgcaacccgtccctataaaatg

SEQ ID NO: 3650663 - DNA, 25 bp, Homo sapien
cacgcaacccgtccctataaaatgg

SEQ ID NO: 3650664 - DNA, 25 bp, Homo sapien
aaaccgtcagggctcaaattgcaga

SEQ ID NO: 3650665 - DNA, 25 bp, Homo sapien
gacttggtgcgcagagctggtttca

SEQ ID NO: 3650666 - DNA, 25 bp, Homo sapien
caatcactcggtcagaaatttcacg

SEQ ID NO: 3650667 - DNA, 25 bp, Homo sapien
gagaattgccaactgtgcacttagc

SEQ ID NO: 3650668 - DNA, 25 bp, Homo sapien
tggcatccggccaccgctgcaactc

SEQ ID NO: 3650669 - DNA, 25 bp, Homo sapien
gctgcaactccgcgcggagcccggc

SEQ ID NO: 3650670 - DNA, 25 bp, Homo sapien
caccgctgcaactccgcgcggagcc

SEQ ID NO: 3650671 - DNA, 25 bp, Homo sapien
gcaactccgcgcggagcccggcccg

SEQ ID NO: 3650672 - DNA, 25 bp, Homo sapien
caaccactagggcttgttccaggtc

SEQ ID NO: 3650673 - DNA, 25 bp, Homo sapien
ttattataaaacttcctcaagaatc

SEQ ID NO: 3650674 - DNA, 25 bp, Homo sapien
cagcaagcagaacctggcacgtttt

SEQ ID NO: 3650675 - DNA, 25 bp, Homo sapien
ttgttttagacggttccagcaagca

SEQ ID NO: 3650676 - DNA, 25 bp, Homo sapien
ctgcaagacacagaaataatggcca

SEQ ID NO: 3650677 - DNA, 25 bp, Homo sapien
tgcaagacacagaaataatggccat

SEQ ID NO: 3650678 - DNA, 25 bp, Homo sapien
cattctattatggttgtggcatcaa

SEQ ID NO: 3650679 - DNA, 25 bp, Homo sapien
tgtagacattctattatggttgtgg

SEQ ID NO: 3650680 - DNA, 25 bp, Homo sapien
tggggatttagctcagtgatcttga

SEQ ID NO: 3650681 - DNA, 25 bp, Homo sapien
tcttgattctcgttgttcgatgcat

SEQ ID NO: 3650682 - DNA, 25 bp, Homo sapien
caaaaagtcattagatgcaagagaa

SEQ ID NO: 3650683 - DNA, 25 bp, Homo sapien
taaatcattggtgttagaaacccag

SEQ ID NO: 3650684 - DNA, 25 bp, Homo sapien
catatcctgagaacacatatattgc

SEQ ID NO: 3650685 - DNA, 25 bp, Homo sapien
tccaggtcgaactgtgaaatacgca

SEQ ID NO: 3650686 - DNA, 25 bp, Homo sapien
tctggtcttgtgaacttggacatca

SEQ ID NO: 3650687 - DNA, 25 bp, Homo sapien
aataggacaatacttgctggtctcc

SEQ ID NO: 3650688 - DNA, 25 bp, Homo sapien
tatattcagtagtggtctggtcttg

SEQ ID NO: 3650689 - DNA, 25 bp, Homo sapien
gctggtctccaggtaacgaacaata

SEQ ID NO: 3650690 - DNA, 25 bp, Homo sapien
aagaagtgtgcctttcaagttacta

SEQ ID NO: 3650691 - DNA, 25 bp, Homo sapien
ttattcctgcctgtcatgaagtcca

SEQ ID NO: 3650692 - DNA, 25 bp, Homo sapien
tatggcaagaaattaaacggctacc

SEQ ID NO: 3650693 - DNA, 25 bp, Homo sapien
gaagaaataaagagggttgccttca

SEQ ID NO: 3650694 - DNA, 25 bp, Homo sapien
ctaatttgtatacaatatcttggag

SEQ ID NO: 3650695 - DNA, 25 bp, Homo sapien
ttgtatacaatatcttggagagttt

SEQ ID NO: 3650696 - DNA, 25 bp, Homo sapien
ggaactaatttgtatacaatatctt

SEQ ID NO: 3650697 - DNA, 25 bp, Homo sapien
aatatcttggagagttttatctgac

SEQ ID NO: 3650698 - DNA, 25 bp, Homo sapien
attcattttctaagcaagttactca

SEQ ID NO: 3650699 - DNA, 25 bp, Homo sapien
aaaagatgtaaacatttggcataac

SEQ ID NO: 3650700 - DNA, 25 bp, Homo sapien
ttcattttctaagcaagttactcac

SEQ ID NO: 3650701 - DNA, 25 bp, Homo sapien
aacatttggcataacacaaagaact

SEQ ID NO: 3650702 - DNA, 25 bp, Homo sapien
catcagcagaaggatgagctgcata

SEQ ID NO: 3650703 - DNA, 25 bp, Homo sapien
agctgcataaaaatcccttcttctc

SEQ ID NO: 3650704 - DNA, 25 bp, Homo sapien
gctgcataaaaatcccttcttctct

SEQ ID NO: 3650705 - DNA, 25 bp, Homo sapien
cagcagaaggatgagctgcataaaa

SEQ ID NO: 3650706 - DNA, 25 bp, Homo sapien
ctataacgatatagtgaaatgtaat

SEQ ID NO: 3650707 - DNA, 25 bp, Homo sapien
tataacgatatagtgaaatgtaatt

SEQ ID NO: 3650708 - DNA, 25 bp, Homo sapien
tctggtcaaagaattcaatggataa

SEQ ID NO: 3650709 - DNA, 25 bp, Homo sapien
ctcatcatcagttataattctctta

SEQ ID NO: 3650710 - DNA, 25 bp, Homo sapien
ggataagcttattatctcatcatca

SEQ ID NO: 3650711 - DNA, 25 bp, Homo sapien
ctatcttcattagagccattggcag

SEQ ID NO: 3650712 - DNA, 25 bp, Homo sapien
agtgaaacaatctaataaaacatta

SEQ ID NO: 3650713 - DNA, 25 bp, Homo sapien
tattagtgaaacaatctaataaaac

SEQ ID NO: 3650714 - DNA, 25 bp, Homo sapien
ctcctccttagatttctctttgtct

SEQ ID NO: 3650715 - DNA, 25 bp, Homo sapien
ttgtctttgtttactttccgatcca

SEQ ID NO: 3650716 - DNA, 25 bp, Homo sapien
cctccttagatttctctttgtcttt

SEQ ID NO: 3650717 - DNA, 25 bp, Homo sapien
tgtctttgtttactttccgatccaa

SEQ ID NO: 3650718 - DNA, 25 bp, Homo sapien
tggaaagtattaggtatgtccattt

SEQ ID NO: 3650719 - DNA, 25 bp, Homo sapien
gctgctgggcatcgtaagtatcttt

SEQ ID NO: 3650720 - DNA, 25 bp, Homo sapien
attaggtatgtccattttacttctg

SEQ ID NO: 3650721 - DNA, 25 bp, Homo sapien
aaactttcttaagtgcatcacagtc

SEQ ID NO: 3650722 - DNA, 25 bp, Homo sapien
tttaaaggttcctcctcatacatga

SEQ ID NO: 3650723 - DNA, 25 bp, Homo sapien
taaaggttcctcctcatacatgaca

SEQ ID NO: 3650724 - DNA, 25 bp, Homo sapien
ccattagtgtataataatcctttaa

SEQ ID NO: 3650725 - DNA, 25 bp, Homo sapien
ggcaatatccattagtgtataataa

SEQ ID NO: 3650726 - DNA, 25 bp, Homo sapien
gatgattttcgaggtctattggcaa

SEQ ID NO: 3650727 - DNA, 25 bp, Homo sapien
gctgttggccttgtcactcccagag

SEQ ID NO: 3650728 - DNA, 25 bp, Homo sapien
gaagttgctgatgacccatttactg

SEQ ID NO: 3650729 - DNA, 25 bp, Homo sapien
agagtcactttccagttctccagca

SEQ ID NO: 3650730 - DNA, 25 bp, Homo sapien
tatgggtatctgcaaaggtcgaacc

SEQ ID NO: 3650731 - DNA, 25 bp, Homo sapien
tagtacccgcttttaggcatacaga

SEQ ID NO: 3650732 - DNA, 25 bp, Homo sapien
tgctggtaagcaaggctcaacatag

SEQ ID NO: 3650733 - DNA, 25 bp, Homo sapien
gagattaacaaactatggcccaatg

SEQ ID NO: 3650734 - DNA, 25 bp, Homo sapien
caacatgcttgctctatttaaaaat

SEQ ID NO: 3650735 - DNA, 25 bp, Homo sapien
aattactgctataccacctattaaa

SEQ ID NO: 3650736 - DNA, 25 bp, Homo sapien
cttctattttcagacatagcagaga

SEQ ID NO: 3650737 - DNA, 25 bp, Homo sapien
gacatagcagagaaggcatattcca

SEQ ID NO: 3650738 - DNA, 25 bp, Homo sapien
cacttacaatgggactgtacaaatt

SEQ ID NO: 3650739 - DNA, 25 bp, Homo sapien
caacacttacaatgggactgtacaa

SEQ ID NO: 3650740 - DNA, 25 bp, Homo sapien
tgggactgtacaaatttaggtcaaa

SEQ ID NO: 3650741 - DNA, 25 bp, Homo sapien
tacaatgggactgtacaaatttagg

SEQ ID NO: 3650742 - DNA, 25 bp, Homo sapien
gagttaaattcaccaaaattggcaa

SEQ ID NO: 3650743 - DNA, 25 bp, Homo sapien
tagccacatcactataagtcagcaa

SEQ ID NO: 3650744 - DNA, 25 bp, Homo sapien
catcatgaaaaacttaagcctagaa

SEQ ID NO: 3650745 - DNA, 25 bp, Homo sapien
tataggttttccataacttctgcac

SEQ ID NO: 3650746 - DNA, 25 bp, Homo sapien
taagccataactgcagtatctgatt

SEQ ID NO: 3650747 - DNA, 25 bp, Homo sapien
aattcatcataaagagattgagatg

SEQ ID NO: 3650748 - DNA, 25 bp, Homo sapien
tagtgctaagtaagccataactgca

SEQ ID NO: 3650749 - DNA, 25 bp, Homo sapien
tttcacatatggttagtgctaagta

SEQ ID NO: 3650750 - DNA, 25 bp, Homo sapien
tcaaatttggcgggatccgagtccg

SEQ ID NO: 3650751 - DNA, 25 bp, Homo sapien
cgagtccgcagagccgagggcggcg

SEQ ID NO: 3650752 - DNA, 25 bp, Homo sapien
aatttggcgggatccgagtccgcag

SEQ ID NO: 3650753 - DNA, 25 bp, Homo sapien
gcgagcagcgcacgcgcaaaatggc

SEQ ID NO: 3650754 - DNA, 25 bp, Homo sapien
caaggacacctcgttcattaaggag

SEQ ID NO: 3650755 - DNA, 25 bp, Homo sapien
aaaggcgattatccggcctggctcc

SEQ ID NO: 3650756 - DNA, 25 bp, Homo sapien
gaaagggcattgattggactcgaag

SEQ ID NO: 3650757 - DNA, 25 bp, Homo sapien
tccaactttggagagcggcgtcgtt

SEQ ID NO: 3650758 - DNA, 25 bp, Homo sapien
cactcccagggtcgccttgtccggg

SEQ ID NO: 3650759 - DNA, 25 bp, Homo sapien
tcctctcctggttttagggcgcacg

SEQ ID NO: 3650760 - DNA, 25 bp, Homo sapien
cgtcccggcagctttcggaggcgat

SEQ ID NO: 3650761 - DNA, 25 bp, Homo sapien
tcccatgtccgagaagcttctgtgt

SEQ ID NO: 3650762 - DNA, 25 bp, Homo sapien
aagaggactcgcccgccgtcgccca

SEQ ID NO: 3650763 - DNA, 25 bp, Homo sapien
ataaagaggactcgcccgccgtcgc

SEQ ID NO: 3650764 - DNA, 25 bp, Homo sapien
ctgataaagaggactcgcccgccgt

SEQ ID NO: 3650765 - DNA, 25 bp, Homo sapien
agaggactcgcccgccgtcgcccat

SEQ ID NO: 3650766 - DNA, 25 bp, Homo sapien
cgagatccgccaccaaatggcggct

SEQ ID NO: 3650767 - DNA, 25 bp, Homo sapien
ccagttgtgacgttcagcacaacgt

SEQ ID NO: 3650768 - DNA, 25 bp, Homo sapien
gtgctactgaactaccgagatccgc

SEQ ID NO: 3650769 - DNA, 25 bp, Homo sapien
gacgttcagcacaacgtgctactga

SEQ ID NO: 3650770 - DNA, 25 bp, Homo sapien
gagtcgtcctagtctcgaaaaatcg

SEQ ID NO: 3650771 - DNA, 25 bp, Homo sapien
tgtcaagcgtgctttaggtctgcgc

SEQ ID NO: 3650772 - DNA, 25 bp, Homo sapien
gggaaggcgcctcgcagaaagtacc

SEQ ID NO: 3650773 - DNA, 25 bp, Homo sapien
attccaccaggctttggcgcgggca

SEQ ID NO: 3650774 - DNA, 25 bp, Homo sapien
cattctaccagcatatataccgcag

SEQ ID NO: 3650775 - DNA, 25 bp, Homo sapien
caatgggcatgtactgcagtctgcc

SEQ ID NO: 3650776 - DNA, 25 bp, Homo sapien
ccaggacatgaagtctagtagcaga

SEQ ID NO: 3650777 - DNA, 25 bp, Homo sapien
tctgcatcaagcctaacacgtattc

SEQ ID NO: 3650778 - DNA, 25 bp, Homo sapien
ggaacgcggccgtcttgctgcaacg

SEQ ID NO: 3650779 - DNA, 25 bp, Homo sapien
cccgagctcgaggactcggactgct

SEQ ID NO: 3650780 - DNA, 25 bp, Homo sapien
ggccgcggtgcctgggcgcactgag

SEQ ID NO: 3650781 - DNA, 25 bp, Homo sapien
agtcccgggcgtgacgtcacggccg

SEQ ID NO: 3650782 - DNA, 25 bp, Homo sapien
gcgatcgtggcgacgactcggcctc

SEQ ID NO: 3650783 - DNA, 25 bp, Homo sapien
ctgcgagtccaccaagggggcgatc

SEQ ID NO: 3650784 - DNA, 25 bp, Homo sapien
gagccgcttctctgtgtacccgcgt

SEQ ID NO: 3650785 - DNA, 25 bp, Homo sapien
cgacgggagccgcttctctgtgtac

SEQ ID NO: 3650786 - DNA, 25 bp, Homo sapien
ccgccgtctgccctcctcgagctct

SEQ ID NO: 3650787 - DNA, 25 bp, Homo sapien
gccgccgtctgccctcctcgagctc

SEQ ID NO: 3650788 - DNA, 25 bp, Homo sapien
cgccgtctgccctcctcgagctctg

SEQ ID NO: 3650789 - DNA, 25 bp, Homo sapien
cgccgccgtctgccctcctcgagct

SEQ ID NO: 3650790 - DNA, 25 bp, Homo sapien
ttttggggtctagtcgccagctccg

SEQ ID NO: 3650791 - DNA, 25 bp, Homo sapien
ttctgcagcgtctcgatgttttggg

SEQ ID NO: 3650792 - DNA, 25 bp, Homo sapien
cctggccttctggtattgctcgaac

SEQ ID NO: 3650793 - DNA, 25 bp, Homo sapien
caccatctgcacgaactgggtcctg

SEQ ID NO: 3650794 - DNA, 25 bp, Homo sapien
tccccaagagctccacgggcagggc

SEQ ID NO: 3650795 - DNA, 25 bp, Homo sapien
cccaaagacccgctgaaaagaatgg

SEQ ID NO: 3650796 - DNA, 25 bp, Homo sapien
gaatggatgcttttgcgaactccgg

SEQ ID NO: 3650797 - DNA, 25 bp, Homo sapien
gaagcttcaccctctcggcctgacc

SEQ ID NO: 3650798 - DNA, 25 bp, Homo sapien
gtgcaatgaagatggaaacagggac

SEQ ID NO: 3650799 - DNA, 25 bp, Homo sapien
tgtgcaatgaagatggaaacaggga

SEQ ID NO: 3650800 - DNA, 25 bp, Homo sapien
aagatggaaacagggacaacgcgca

SEQ ID NO: 3650801 - DNA, 25 bp, Homo sapien
ctgtgtgcaatgaagatggaaacag

SEQ ID NO: 3650802 - DNA, 25 bp, Homo sapien
gcctcgactttcaacctgacacttg

SEQ ID NO: 3650803 - DNA, 25 bp, Homo sapien
tcctagggcctcgactttcaacctg

SEQ ID NO: 3650804 - DNA, 25 bp, Homo sapien
ttagggtagagtcccattcacgtaa

SEQ ID NO: 3650805 - DNA, 25 bp, Homo sapien
cgtaaaatgactccaggcaattcct

SEQ ID NO: 3650806 - DNA, 25 bp, Homo sapien
aattttccagttattggacagccat

SEQ ID NO: 3650807 - DNA, 25 bp, Homo sapien
tcaaactccacgatagtcctcaaag

SEQ ID NO: 3650808 - DNA, 25 bp, Homo sapien
tattggacagccattggtactcaaa

SEQ ID NO: 3650809 - DNA, 25 bp, Homo sapien
tcaaagagacctccaaagccaccaa

SEQ ID NO: 3650810 - DNA, 25 bp, Homo sapien
gtccattaggtatccagagatccat

SEQ ID NO: 3650811 - DNA, 25 bp, Homo sapien
ctgcctgtccattaggtatccagag

SEQ ID NO: 3650812 - DNA, 25 bp, Homo sapien
gcctgtccattaggtatccagagat

SEQ ID NO: 3650813 - DNA, 25 bp, Homo sapien
ctgtccattaggtatccagagatcc

SEQ ID NO: 3650814 - DNA, 25 bp, Homo sapien
tttctccatgtttctattgcatctg

SEQ ID NO: 3650815 - DNA, 25 bp, Homo sapien
gcttatatgcgatgtttctgctcta

SEQ ID NO: 3650816 - DNA, 25 bp, Homo sapien
tattgtttagtttagacagtagcac

SEQ ID NO: 3650817 - DNA, 25 bp, Homo sapien
taatataaggccaataaaatgactc

SEQ ID NO: 3650818 - DNA, 25 bp, Homo sapien
catcattataattggccagtctccc

SEQ ID NO: 3650819 - DNA, 25 bp, Homo sapien
agcagcagtctgttgaattgttggg

SEQ ID NO: 3650820 - DNA, 25 bp, Homo sapien
cagcttctgctaggtcatcattata

SEQ ID NO: 3650821 - DNA, 25 bp, Homo sapien
ttgggaccacgtccagaagaagagt

SEQ ID NO: 3650822 - DNA, 25 bp, Homo sapien
aacaagctgtggaagaatgtcgcac

SEQ ID NO: 3650823 - DNA, 25 bp, Homo sapien
aaacaagctgtggaagaatgtcgca

SEQ ID NO: 3650824 - DNA, 25 bp, Homo sapien
taaacaagctgtggaagaatgtcgc

SEQ ID NO: 3650825 - DNA, 25 bp, Homo sapien
ataaacaagctgtggaagaatgtcg

SEQ ID NO: 3650826 - DNA, 25 bp, Homo sapien
ccaagcatatgaccagcgtatccag

SEQ ID NO: 3650827 - DNA, 25 bp, Homo sapien
gggagaatgtttaccaactgctcgt

SEQ ID NO: 3650828 - DNA, 25 bp, Homo sapien
tcgactattgcctgagctagctggg

SEQ ID NO: 3650829 - DNA, 25 bp, Homo sapien
caatatatctaagtgcccaggctgc

SEQ ID NO: 3650830 - DNA, 25 bp, Homo sapien
agtcaacacaatcctctcacaagag

SEQ ID NO: 3650831 - DNA, 25 bp, Homo sapien
tttaccaattgggtgagtcaacaca

SEQ ID NO: 3650832 - DNA, 25 bp, Homo sapien
cactcactcgtgctatgtctcctgg

SEQ ID NO: 3650833 - DNA, 25 bp, Homo sapien
tcctgcccagtatgagttgaatacc

SEQ ID NO: 3650834 - DNA, 25 bp, Homo sapien
tgtgtattcaataactggtgattca

SEQ ID NO: 3650835 - DNA, 25 bp, Homo sapien
ggtgattcaatcataaaacttaatg

SEQ ID NO: 3650836 - DNA, 25 bp, Homo sapien
ctgcaaagtcagaggtaaacattac

SEQ ID NO: 3650837 - DNA, 25 bp, Homo sapien
acctcagctgtcactaaggagcagg

SEQ ID NO: 3650838 - DNA, 25 bp, Homo sapien
gcccatcatgcttccagctggcaca

SEQ ID NO: 3650839 - DNA, 25 bp, Homo sapien
catcatgcttccagctggcacaggc

SEQ ID NO: 3650840 - DNA, 25 bp, Homo sapien
ccatcatgcttccagctggcacagg

SEQ ID NO: 3650841 - DNA, 25 bp, Homo sapien
ttgcccatcatgcttccagctggca

SEQ ID NO: 3650842 - DNA, 25 bp, Homo sapien
caagcgctgctcatctctggcgcag

SEQ ID NO: 3650843 - DNA, 25 bp, Homo sapien
ctgctcatctctggcgcagcaagct

SEQ ID NO: 3650844 - DNA, 25 bp, Homo sapien
agctcatctcccaactgccacagag

SEQ ID NO: 3650845 - DNA, 25 bp, Homo sapien
catctctggcgcagcaagctcatct

SEQ ID NO: 3650846 - DNA, 25 bp, Homo sapien
gcatgagtaacttaggaatctgagc

SEQ ID NO: 3650847 - DNA, 25 bp, Homo sapien
tatagtgggaaagatatgggaacac

SEQ ID NO: 3650848 - DNA, 25 bp, Homo sapien
ttataaagtcccacacacgaggtct

SEQ ID NO: 3650849 - DNA, 25 bp, Homo sapien
gattttattagccaagagttcccaa

SEQ ID NO: 3650850 - DNA, 25 bp, Homo sapien
tggaaaggtgatgttctttctactt

SEQ ID NO: 3650851 - DNA, 25 bp, Homo sapien
ttctgggtatggaaaggtgatgttc

SEQ ID NO: 3650852 - DNA, 25 bp, Homo sapien
ggtatggaaaggtgatgttctttct

SEQ ID NO: 3650853 - DNA, 25 bp, Homo sapien
ctgggtatggaaaggtgatgttctt

SEQ ID NO: 3650854 - DNA, 25 bp, Homo sapien
taacatcaatcttgtgccaataatg

SEQ ID NO: 3650855 - DNA, 25 bp, Homo sapien
aacattaacatcaatcttgtgccaa

SEQ ID NO: 3650856 - DNA, 25 bp, Homo sapien
cattaacatcaatcttgtgccaata

SEQ ID NO: 3650857 - DNA, 25 bp, Homo sapien
taaacattaacatcaatcttgtgcc

SEQ ID NO: 3650858 - DNA, 25 bp, Homo sapien
agggtgtacttcactctctcaacat

SEQ ID NO: 3650859 - DNA, 25 bp, Homo sapien
gagggtgtacttcactctctcaaca

SEQ ID NO: 3650860 - DNA, 25 bp, Homo sapien
gggagggtgtacttcactctctcaa

SEQ ID NO: 3650861 - DNA, 25 bp, Homo sapien
aaggggagggtgtacttcactctct

SEQ ID NO: 3650862 - DNA, 25 bp, Homo sapien
aagaaaagtaattaagtgagtatgg

SEQ ID NO: 3650863 - DNA, 25 bp, Homo sapien
ctgacccttgtgcaagccatttttc

SEQ ID NO: 3650864 - DNA, 25 bp, Homo sapien
aagtaattaagtgagtatgggtgac

SEQ ID NO: 3650865 - DNA, 25 bp, Homo sapien
aaaagtaattaagtgagtatgggtg

SEQ ID NO: 3650866 - DNA, 25 bp, Homo sapien
ctggctcctggatacagagtactaa

SEQ ID NO: 3650867 - DNA, 25 bp, Homo sapien
cagagtactaaaagaggaacagctc

SEQ ID NO: 3650868 - DNA, 25 bp, Homo sapien
acagagtactaaaagaggaacagct

SEQ ID NO: 3650869 - DNA, 25 bp, Homo sapien
ggctcctggatacagagtactaaaa

SEQ ID NO: 3650870 - DNA, 25 bp, Homo sapien
actgagggccgaagcagcaatcctt

SEQ ID NO: 3650871 - DNA, 25 bp, Homo sapien
ttcaggatcatctgggctaaatgag

SEQ ID NO: 3650872 - DNA, 25 bp, Homo sapien
ctttgcaatatcactgagggccgaa

SEQ ID NO: 3650873 - DNA, 25 bp, Homo sapien
tcaggatcatctgggctaaatgagc

SEQ ID NO: 3650874 - DNA, 25 bp, Homo sapien
agcatttttcttcacgtattcatcc

SEQ ID NO: 3650875 - DNA, 25 bp, Homo sapien
caatctctctaattaaagtagaagc

SEQ ID NO: 3650876 - DNA, 25 bp, Homo sapien
tgcttcaacaaccatttctgccaga

SEQ ID NO: 3650877 - DNA, 25 bp, Homo sapien
cagatccacggaatgttttgaaacc

SEQ ID NO: 3650878 - DNA, 25 bp, Homo sapien
attgtgccttgaagtttcttttcac

SEQ ID NO: 3650879 - DNA, 25 bp, Homo sapien
ttattgtgccttgaagtttcttttc

SEQ ID NO: 3650880 - DNA, 25 bp, Homo sapien
tattgtgccttgaagtttcttttca

SEQ ID NO: 3650881 - DNA, 25 bp, Homo sapien
gactgccattgctaggttctcagaa

SEQ ID NO: 3650882 - DNA, 25 bp, Homo sapien
gacccaatgcagtcaatcacggcag

SEQ ID NO: 3650883 - DNA, 25 bp, Homo sapien
caggcagccgtgtgttccctttgca

SEQ ID NO: 3650884 - DNA, 25 bp, Homo sapien
cctgcgttaactaccagctgtgaaa

SEQ ID NO: 3650885 - DNA, 25 bp, Homo sapien
tgtggcttgcccgaaactgctggag

SEQ ID NO: 3650886 - DNA, 25 bp, Homo sapien
actatgtggcttgcccgaaactgct

SEQ ID NO: 3650887 - DNA, 25 bp, Homo sapien
tggcttgcccgaaactgctggagtt

SEQ ID NO: 3650888 - DNA, 25 bp, Homo sapien
catactatgtggcttgcccgaaact

SEQ ID NO: 3650889 - DNA, 25 bp, Homo sapien
gatcttccggttcttctgacaagca

SEQ ID NO: 3650890 - DNA, 25 bp, Homo sapien
aatctgtcctaaggcccaagcagct

SEQ ID NO: 3650891 - DNA, 25 bp, Homo sapien
gcaacagcccgtgcgtgttcaggag

SEQ ID NO: 3650892 - DNA, 25 bp, Homo sapien
gctgcagccttaatatgatcttccg

SEQ ID NO: 3650893 - DNA, 25 bp, Homo sapien
ccgtatttcaaggtgacatcaggtg

SEQ ID NO: 3650894 - DNA, 25 bp, Homo sapien
cccctcctgcactccgtatttcaag

SEQ ID NO: 3650895 - DNA, 25 bp, Homo sapien
tgacatcaggtggtgctgacccttg

SEQ ID NO: 3650896 - DNA, 25 bp, Homo sapien
tatgtaccatttctaccccctcctg

SEQ ID NO: 3650897 - DNA, 25 bp, Homo sapien
tgggaggagcatcatatagaaatgg

SEQ ID NO: 3650898 - DNA, 25 bp, Homo sapien
gaactgtccaaccacatgtttcaga

SEQ ID NO: 3650899 - DNA, 25 bp, Homo sapien
gaaatggttcaagggctggtaagta

SEQ ID NO: 3650900 - DNA, 25 bp, Homo sapien
tcagaatattgggaggagcatcata

SEQ ID NO: 3650901 - DNA, 25 bp, Homo sapien
gtaacaactgttaatactgttgatg

SEQ ID NO: 3650902 - DNA, 25 bp, Homo sapien
tgttacaaaaagtcgtcgagctttg

SEQ ID NO: 3650903 - DNA, 25 bp, Homo sapien
cgagctttgctatcatgcggcagca

SEQ ID NO: 3650904 - DNA, 25 bp, Homo sapien
tcttgaaggagagaaccaggttctg

SEQ ID NO: 3650905 - DNA, 25 bp, Homo sapien
ttgacacagtggatataaaacctag

SEQ ID NO: 3650906 - DNA, 25 bp, Homo sapien
cattaggcttacaaggaccgaggct

SEQ ID NO: 3650907 - DNA, 25 bp, Homo sapien
aaaggtacatattggcctcacatcg

SEQ ID NO: 3650908 - DNA, 25 bp, Homo sapien
tatgcagggaactatgaaactcaga

SEQ ID NO: 3650909 - DNA, 25 bp, Homo sapien
gaagggacacatattccacgtataa

SEQ ID NO: 3650910 - DNA, 25 bp, Homo sapien
tgaagggacacatattccacgtata

SEQ ID NO: 3650911 - DNA, 25 bp, Homo sapien
tataaaataccattcttcgtgaagg

SEQ ID NO: 3650912 - DNA, 25 bp, Homo sapien
taccattcttcgtgaagggacacat

SEQ ID NO: 3650913 - DNA, 25 bp, Homo sapien
gcagaagtgtatctgaatatccagg

SEQ ID NO: 3650914 - DNA, 25 bp, Homo sapien
tggttgatagctgtccaccctctgc

SEQ ID NO: 3650915 - DNA, 25 bp, Homo sapien
ttaagtggttgatagctgtccaccc

SEQ ID NO: 3650916 - DNA, 25 bp, Homo sapien
cagaagtgtatctgaatatccaggg

SEQ ID NO: 3650917 - DNA, 25 bp, Homo sapien
aatatttagaaggatttaattactg

SEQ ID NO: 3650918 - DNA, 25 bp, Homo sapien
aaaactactctgctgtgaatttgag

SEQ ID NO: 3650919 - DNA, 25 bp, Homo sapien
tgaatttgagtatcacaatataact

SEQ ID NO: 3650920 - DNA, 25 bp, Homo sapien
tactgttactcaaaactactctgct

SEQ ID NO: 3650921 - DNA, 25 bp, Homo sapien
tattctgaattctaccctcgctggg

SEQ ID NO: 3650922 - DNA, 25 bp, Homo sapien
tactatatagttagcaaggccagct

SEQ ID NO: 3650923 - DNA, 25 bp, Homo sapien
aacaggttacccacagagtccgtgt

SEQ ID NO: 3650924 - DNA, 25 bp, Homo sapien
gaaagtgacgttaggacaaggatcc

SEQ ID NO: 3650925 - DNA, 25 bp, Homo sapien
gtgtcgctttccggagatctgccat

SEQ ID NO: 3650926 - DNA, 25 bp, Homo sapien
gaagtgtcgctttccggagatctgc

SEQ ID NO: 3650927 - DNA, 25 bp, Homo sapien
aagtgtcgctttccggagatctgcc

SEQ ID NO: 3650928 - DNA, 25 bp, Homo sapien
ctgttatgtcccaacccaggttctg

SEQ ID NO: 3650929 - DNA, 25 bp, Homo sapien
tgctgtcgagacctactacagagct

SEQ ID NO: 3650930 - DNA, 25 bp, Homo sapien
cctgtaataccatagggtctgttga

SEQ ID NO: 3650931 - DNA, 25 bp, Homo sapien
tgagattgatcaccagcaactatcc

SEQ ID NO: 3650932 - DNA, 25 bp, Homo sapien
cagggcttcttgtactgctgtcgag

SEQ ID NO: 3650933 - DNA, 25 bp, Homo sapien
tgtggttaaggatataaaacgtgtg

SEQ ID NO: 3650934 - DNA, 25 bp, Homo sapien
taattcagctcatatttgtggttaa

SEQ ID NO: 3650935 - DNA, 25 bp, Homo sapien
cagttggaggatgggtttgttggcc

SEQ ID NO: 3650936 - DNA, 25 bp, Homo sapien
atataaaacgtgtgaccaaaaatca

SEQ ID NO: 3650937 - DNA, 25 bp, Homo sapien
ttgctgtgccctctagagcgagcgg

SEQ ID NO: 3650938 - DNA, 25 bp, Homo sapien
tgttgcggccttgcagacgtctcag

SEQ ID NO: 3650939 - DNA, 25 bp, Homo sapien
tagagccgaggctttatagagccgc

SEQ ID NO: 3650940 - DNA, 25 bp, Homo sapien
gaaacgaagtctccggataccacag

SEQ ID NO: 3650941 - DNA, 25 bp, Homo sapien
gaggatgtggccaattttcagctga

SEQ ID NO: 3650942 - DNA, 25 bp, Homo sapien
tgttttgctcacgaggcatgccacc

SEQ ID NO: 3650943 - DNA, 25 bp, Homo sapien
tataaactttccctgccaagatgtg

SEQ ID NO: 3650944 - DNA, 25 bp, Homo sapien
tagagctttccagcagtactgacac

SEQ ID NO: 3650945 - DNA, 25 bp, Homo sapien
caacactcaactgaagaaaaccagc

SEQ ID NO: 3650946 - DNA, 25 bp, Homo sapien
aatcctgggaaagaacacctctatt

SEQ ID NO: 3650947 - DNA, 25 bp, Homo sapien
tgaaggaaacagtctcatggaagag

SEQ ID NO: 3650948 - DNA, 25 bp, Homo sapien
tggtcaaccaaagtcttgtgaagga

SEQ ID NO: 3650949 - DNA, 25 bp, Homo sapien
tcctaggacaccgaagatggcactg

SEQ ID NO: 3650950 - DNA, 25 bp, Homo sapien
taaaaagcatcttcggcatccagag

SEQ ID NO: 3650951 - DNA, 25 bp, Homo sapien
gatgtcccagcagcgaatcattcag

SEQ ID NO: 3650952 - DNA, 25 bp, Homo sapien
cttgactgtttgtactgacccctgg

SEQ ID NO: 3650953 - DNA, 25 bp, Homo sapien
aatctgattctgcaaatatgagaag

SEQ ID NO: 3650954 - DNA, 25 bp, Homo sapien
ccctgaacaatataaggaaagaatc

SEQ ID NO: 3650955 - DNA, 25 bp, Homo sapien
caatataaggaaagaatctgattct

SEQ ID NO: 3650956 - DNA, 25 bp, Homo sapien
aatgaccctgaacaatataaggaaa

SEQ ID NO: 3650957 - DNA, 25 bp, Homo sapien
cactgataagcacccttggaaaccc

SEQ ID NO: 3650958 - DNA, 25 bp, Homo sapien
cactgtttaacttacagaactttgg

SEQ ID NO: 3650959 - DNA, 25 bp, Homo sapien
cacattgaggtgaggagtaatcatt

SEQ ID NO: 3650960 - DNA, 25 bp, Homo sapien
gatggtgcttagaaaccgtttctcc

SEQ ID NO: 3650961 - DNA, 25 bp, Homo sapien
catgaatatggccacatcagaaaaa

SEQ ID NO: 3650962 - DNA, 25 bp, Homo sapien
tccttcatgaccataggaatcaggc

SEQ ID NO: 3650963 - DNA, 25 bp, Homo sapien
tctctgatgagattgcactgacacc

SEQ ID NO: 3650964 - DNA, 25 bp, Homo sapien
gtcaagtcacatggcagcttgagtg

SEQ ID NO: 3650965 - DNA, 25 bp, Homo sapien
atgactgcagagctactgtctccac

SEQ ID NO: 3650966 - DNA, 25 bp, Homo sapien
aactggacaccactctggtgagcga

SEQ ID NO: 3650967 - DNA, 25 bp, Homo sapien
actctggtgagcgaacggtatgaag

SEQ ID NO: 3650968 - DNA, 25 bp, Homo sapien
gctcctgaaactggacaccactctg

SEQ ID NO: 3650969 - DNA, 25 bp, Homo sapien
tgttttcttccgtgctcctgaaact

SEQ ID NO: 3650970 - DNA, 25 bp, Homo sapien
gacaagtccaacattggtggcaggc

SEQ ID NO: 3650971 - DNA, 25 bp, Homo sapien
aagcttcgcccaaacttggtgctca

SEQ ID NO: 3650972 - DNA, 25 bp, Homo sapien
ggatcctggctcacattagacaagt

SEQ ID NO: 3650973 - DNA, 25 bp, Homo sapien
gtggcaggcaaagtacagcaagtgt

SEQ ID NO: 3650974 - DNA, 25 bp, Homo sapien
ttttctggcatgtccatagagactg

SEQ ID NO: 3650975 - DNA, 25 bp, Homo sapien
ccatagagactgtctcttcatgttt

SEQ ID NO: 3650976 - DNA, 25 bp, Homo sapien
gcttctgggtgttgacaacaagcac

SEQ ID NO: 3650977 - DNA, 25 bp, Homo sapien
aggcttctgggtgttgacaacaagc

SEQ ID NO: 3650978 - DNA, 25 bp, Homo sapien
tgagtatcagcgatgtgtcgggcat

SEQ ID NO: 3650979 - DNA, 25 bp, Homo sapien
acagacaatgagtatcagcgatgtg

SEQ ID NO: 3650980 - DNA, 25 bp, Homo sapien
tcagcgatgtgtcgggcattgttca

SEQ ID NO: 3650981 - DNA, 25 bp, Homo sapien
caatgagtatcagcgatgtgtcggg

SEQ ID NO: 3650982 - DNA, 25 bp, Homo sapien
aaagccccagatagagaagctgcat

SEQ ID NO: 3650983 - DNA, 25 bp, Homo sapien
caaagccccagatagagaagctgca

SEQ ID NO: 3650984 - DNA, 25 bp, Homo sapien
ccaaagccccagatagagaagctgc

SEQ ID NO: 3650985 - DNA, 25 bp, Homo sapien
ttaaatgcctgctataaccaagtat

SEQ ID NO: 3650986 - DNA, 25 bp, Homo sapien
gccccattcaacctgcctgttttaa

SEQ ID NO: 3650987 - DNA, 25 bp, Homo sapien
aatccttaggtttgagccccattca

SEQ ID NO: 3650988 - DNA, 25 bp, Homo sapien
tcatagagcctaaaaactaaatcct

SEQ ID NO: 3650989 - DNA, 25 bp, Homo sapien
taggaaatacatagcacatgggaag

SEQ ID NO: 3650990 - DNA, 25 bp, Homo sapien
gaataggaaatacatagcacatggg

SEQ ID NO: 3650991 - DNA, 25 bp, Homo sapien
ggaaatacatagcacatgggaagca

SEQ ID NO: 3650992 - DNA, 25 bp, Homo sapien
gaaatacatagcacatgggaagcac

SEQ ID NO: 3650993 - DNA, 25 bp, Homo sapien
ccatgtgtccttaaatctttgagaa

SEQ ID NO: 3650994 - DNA, 25 bp, Homo sapien
gaatttgacacatggtgtaacccct

SEQ ID NO: 3650995 - DNA, 25 bp, Homo sapien
tgtgaaccagactataactgaaagc

SEQ ID NO: 3650996 - DNA, 25 bp, Homo sapien
gaaagcttgaggcagacacattttt

SEQ ID NO: 3650997 - DNA, 25 bp, Homo sapien
atctcggtctgagtgggctctggac

SEQ ID NO: 3650998 - DNA, 25 bp, Homo sapien
cttcctgctcatgcttttcctcatc

SEQ ID NO: 3650999 - DNA, 25 bp, Homo sapien
tacaaagaacgactctgagcccggg

SEQ ID NO: 3651000 - DNA, 25 bp, Homo sapien
cgaagaggcggcagctcgaatctgt

SEQ ID NO: 3651001 - DNA, 25 bp, Homo sapien
taaccggcgcagaggtgcagcatat

SEQ ID NO: 3651002 - DNA, 25 bp, Homo sapien
tgcagcatatgctttccaggttgga

SEQ ID NO: 3651003 - DNA, 25 bp, Homo sapien
tgctggacgagaagcggcctccccg

SEQ ID NO: 3651004 - DNA, 25 bp, Homo sapien
ttcttaggcggcgacaggtgtgtcc

SEQ ID NO: 3651005 - DNA, 25 bp, Homo sapien
tgtgtcctccggacgggctcctggc

SEQ ID NO: 3651006 - DNA, 25 bp, Homo sapien
gagtctgagcgaccaggtctgcgca

SEQ ID NO: 3651007 - DNA, 25 bp, Homo sapien
tgcgcatggagagcccggccttctt

SEQ ID NO: 3651008 - DNA, 25 bp, Homo sapien
gattcctctggtttagtaagcacag

SEQ ID NO: 3651009 - DNA, 25 bp, Homo sapien
gtgaagaatccttagcacagagctc

SEQ ID NO: 3651010 - DNA, 25 bp, Homo sapien
gctaaaatgtaatcaggagactgca

SEQ ID NO: 3651011 - DNA, 25 bp, Homo sapien
cattcgtttgatagtccagtgacac

SEQ ID NO: 3651012 - DNA, 25 bp, Homo sapien
ttaggcctctcagaatactttggca

SEQ ID NO: 3651013 - DNA, 25 bp, Homo sapien
taggcctctcagaatactttggcat

SEQ ID NO: 3651014 - DNA, 25 bp, Homo sapien
tttaggcctctcagaatactttggc

SEQ ID NO: 3651015 - DNA, 25 bp, Homo sapien
tggctgccttgtagtcagcaagcaa

SEQ ID NO: 3651016 - DNA, 25 bp, Homo sapien
ctggctgccttgtagtcagcaagca

SEQ ID NO: 3651017 - DNA, 25 bp, Homo sapien
ctgccttgtagtcagcaagcaactg

SEQ ID NO: 3651018 - DNA, 25 bp, Homo sapien
ggctgccttgtagtcagcaagcaac

SEQ ID NO: 3651019 - DNA, 25 bp, Homo sapien
cactacaagcttcggaataggatgc

SEQ ID NO: 3651020 - DNA, 25 bp, Homo sapien
ctacaagcttcggaataggatgcaa

SEQ ID NO: 3651021 - DNA, 25 bp, Homo sapien
tcactacaagcttcggaataggatg

SEQ ID NO: 3651022 - DNA, 25 bp, Homo sapien
ctcactacaagcttcggaataggat

SEQ ID NO: 3651023 - DNA, 25 bp, Homo sapien
tccaagaagggcaaatggattcagc

SEQ ID NO: 3651024 - DNA, 25 bp, Homo sapien
ggcaaatggattcagctacacataa

SEQ ID NO: 3651025 - DNA, 25 bp, Homo sapien
gatgtggccgttatctcctccttca

SEQ ID NO: 3651026 - DNA, 25 bp, Homo sapien
gggatatgatgtggccgttatctcc

SEQ ID NO: 3651027 - DNA, 25 bp, Homo sapien
cacagtgggagaatttgcatgcatg

SEQ ID NO: 3651028 - DNA, 25 bp, Homo sapien
ggcacagtgggagaatttgcatgca

SEQ ID NO: 3651029 - DNA, 25 bp, Homo sapien
aactgaatgatgctgtccaacagcc

SEQ ID NO: 3651030 - DNA, 25 bp, Homo sapien
catggcctccccgaaactgaatgat

SEQ ID NO: 3651031 - DNA, 25 bp, Homo sapien
cacagaaggcagttaggatcatgct

SEQ ID NO: 3651032 - DNA, 25 bp, Homo sapien
gcagttaggatcatgctgcccctcc

SEQ ID NO: 3651033 - DNA, 25 bp, Homo sapien
aaggcagttaggatcatgctgcccc

SEQ ID NO: 3651034 - DNA, 25 bp, Homo sapien
ccccacagaaggcagttaggatcat

SEQ ID NO: 3651035 - DNA, 25 bp, Homo sapien
tgagcattcacccatgagactggag

SEQ ID NO: 3651036 - DNA, 25 bp, Homo sapien
cattcacccatgagactggagagga

SEQ ID NO: 3651037 - DNA, 25 bp, Homo sapien
gagcattcacccatgagactggaga

SEQ ID NO: 3651038 - DNA, 25 bp, Homo sapien
aggttggtgacttgaaactgagcat

SEQ ID NO: 3651039 - DNA, 25 bp, Homo sapien
gctgctaaaggtgtgacccatttct

SEQ ID NO: 3651040 - DNA, 25 bp, Homo sapien
aataaaactagacttgccacacaaa

SEQ ID NO: 3651041 - DNA, 25 bp, Homo sapien
cattcttgtagagtgatgaacagga

SEQ ID NO: 3651042 - DNA, 25 bp, Homo sapien
acacaaaagctttgctccatcggtg

SEQ ID NO: 3651043 - DNA, 25 bp, Homo sapien
tcatggttcccaggtacctaggaac

SEQ ID NO: 3651044 - DNA, 25 bp, Homo sapien
ttacaatatgcccagtgacagtcat

SEQ ID NO: 3651045 - DNA, 25 bp, Homo sapien
ttctaaatcactatgccaatgttca

SEQ ID NO: 3651046 - DNA, 25 bp, Homo sapien
cctaggaactgccagatatctagta

SEQ ID NO: 3651047 - DNA, 25 bp, Homo sapien
tgtggccacaaaacctttcactctg

SEQ ID NO: 3651048 - DNA, 25 bp, Homo sapien
tttgtggccacaaaacctttcactc

SEQ ID NO: 3651049 - DNA, 25 bp, Homo sapien
ctttgtggccacaaaacctttcact

SEQ ID NO: 3651050 - DNA, 25 bp, Homo sapien
ttctttgtggccacaaaacctttca

SEQ ID NO: 3651051 - DNA, 25 bp, Homo sapien
tgatttctcggagcctgctctggga

SEQ ID NO: 3651052 - DNA, 25 bp, Homo sapien
tggtggttttgctcctggaaatctc

SEQ ID NO: 3651053 - DNA, 25 bp, Homo sapien
ttcaaagggctctcaaaaagaagag

SEQ ID NO: 3651054 - DNA, 25 bp, Homo sapien
tggccaactgttgatccttcaaagg

SEQ ID NO: 3651055 - DNA, 25 bp, Homo sapien
ggatggagtaaaggcctctaagctc

SEQ ID NO: 3651056 - DNA, 25 bp, Homo sapien
ttcctcaggaggcttaaatgctact

SEQ ID NO: 3651057 - DNA, 25 bp, Homo sapien
caggaggcttaaatgctactgctgc

SEQ ID NO: 3651058 - DNA, 25 bp, Homo sapien
ctctggaaggatggagtaaaggcct

SEQ ID NO: 3651059 - DNA, 25 bp, Homo sapien
ttggacagagtgaggacgtttgccc

SEQ ID NO: 3651060 - DNA, 25 bp, Homo sapien
tagatttggtatcctcagcagccag

SEQ ID NO: 3651061 - DNA, 25 bp, Homo sapien
aatacactccagtcatgagccgggc

SEQ ID NO: 3651062 - DNA, 25 bp, Homo sapien
tctttggaagccagcagtcgtgccc

SEQ ID NO: 3651063 - DNA, 25 bp, Homo sapien
taaaaagagatttcgccccagtctg

SEQ ID NO: 3651064 - DNA, 25 bp, Homo sapien
aatgctggcgtctccgtgtgtactg

SEQ ID NO: 3651065 - DNA, 25 bp, Homo sapien
taggttatccacttacatgctgcgc

SEQ ID NO: 3651066 - DNA, 25 bp, Homo sapien
tattttgagacgtatcctgcagcca

SEQ ID NO: 3651067 - DNA, 25 bp, Homo sapien
gcggagatctccaccgtgaacccag

SEQ ID NO: 3651068 - DNA, 25 bp, Homo sapien
acagtattcaaagcgctttttggac

SEQ ID NO: 3651069 - DNA, 25 bp, Homo sapien
caccgtgaacccagaacagtattca

SEQ ID NO: 3651070 - DNA, 25 bp, Homo sapien
gaacagtattcaaagcgctttttgg

SEQ ID NO: 3651071 - DNA, 25 bp, Homo sapien
ttgaggcagatatccttaacacccc

SEQ ID NO: 3651072 - DNA, 25 bp, Homo sapien
tacgaccctagtgcctgtgaaattc

SEQ ID NO: 3651073 - DNA, 25 bp, Homo sapien
tgtcacatgaggtaattctgctggg

SEQ ID NO: 3651074 - DNA, 25 bp, Homo sapien
tagtcatagagtacatggtgtccag

SEQ ID NO: 3651075 - DNA, 25 bp, Homo sapien
agctgagtgtgcatctcacttcgca

SEQ ID NO: 3651076 - DNA, 25 bp, Homo sapien
tgtgcatctcacttcgcacattcat

SEQ ID NO: 3651077 - DNA, 25 bp, Homo sapien
tctgactcagctgagtgtgcatctc

SEQ ID NO: 3651078 - DNA, 25 bp, Homo sapien
gactcagctgagtgtgcatctcact

SEQ ID NO: 3651079 - DNA, 25 bp, Homo sapien
cagcaccagctcttttcgtgaagcc

SEQ ID NO: 3651080 - DNA, 25 bp, Homo sapien
aaggaaatggtctgggcttgtctcc

SEQ ID NO: 3651081 - DNA, 25 bp, Homo sapien
gaagccttggcggtactgctcagag

SEQ ID NO: 3651082 - DNA, 25 bp, Homo sapien
tcttcgcccaagcaagccattttgt

SEQ ID NO: 3651083 - DNA, 25 bp, Homo sapien
tgtgttgatgacgtccttttgccag

SEQ ID NO: 3651084 - DNA, 25 bp, Homo sapien
ctgtcgagtctgtaaagcgagacat

SEQ ID NO: 3651085 - DNA, 25 bp, Homo sapien
cacatcttgtagaccgtggttgaaa

SEQ ID NO: 3651086 - DNA, 25 bp, Homo sapien
gagacattaccatcgcagaaaggga

SEQ ID NO: 3651087 - DNA, 25 bp, Homo sapien
ctcatctgccttgggacttcaaagt

SEQ ID NO: 3651088 - DNA, 25 bp, Homo sapien
atctggtgtgtgctcttaatttctg

SEQ ID NO: 3651089 - DNA, 25 bp, Homo sapien
gagaataagcccacttatctggtgt

SEQ ID NO: 3651090 - DNA, 25 bp, Homo sapien
acacgggacggccagcattgttcag

SEQ ID NO: 3651091 - DNA, 25 bp, Homo sapien
ctagccaacacagtgaaatccggtc

SEQ ID NO: 3651092 - DNA, 25 bp, Homo sapien
aaaattagctgggggtgtatgcctg

SEQ ID NO: 3651093 - DNA, 25 bp, Homo sapien
agccaacacagtgaaatccggtctc

SEQ ID NO: 3651094 - DNA, 25 bp, Homo sapien
attagctgggggtgtatgcctgtag

SEQ ID NO: 3651095 - DNA, 25 bp, Homo sapien
gttaggctgtaagaaactcggatcc

SEQ ID NO: 3651096 - DNA, 25 bp, Homo sapien
tctggtagactgtggcactgatgca

SEQ ID NO: 3651097 - DNA, 25 bp, Homo sapien
gaattacgaagacttcagccgtgag

SEQ ID NO: 3651098 - DNA, 25 bp, Homo sapien
gagcatcatctctcagaccaatgga

SEQ ID NO: 3651099 - DNA, 25 bp, Homo sapien
ggttgtcctgagtcaccttccgagg

SEQ ID NO: 3651100 - DNA, 25 bp, Homo sapien
gatcggactctgtttcttgggacgg

SEQ ID NO: 3651101 - DNA, 25 bp, Homo sapien
atttcctagagcaacgagtcgagtc

SEQ ID NO: 3651102 - DNA, 25 bp, Homo sapien
taggcccctgctgagatgatggttg

SEQ ID NO: 3651103 - DNA, 25 bp, Homo sapien
ccaggcagggaagcagcacggcagg

SEQ ID NO: 3651104 - DNA, 25 bp, Homo sapien
gggagatggaggctctgggcagggc

SEQ ID NO: 3651105 - DNA, 25 bp, Homo sapien
aagcagcacggcagggggagatgga

SEQ ID NO: 3651106 - DNA, 25 bp, Homo sapien
agggaagcagcacggcagggggaga

SEQ ID NO: 3651107 - DNA, 25 bp, Homo sapien
cctccttcagccctgtgttacgctg

SEQ ID NO: 3651108 - DNA, 25 bp, Homo sapien
cttcagccctgtgttacgctgtgtg

SEQ ID NO: 3651109 - DNA, 25 bp, Homo sapien
agccctgtgttacgctgtgtgagtg

SEQ ID NO: 3651110 - DNA, 25 bp, Homo sapien
cctgtgttacgctgtgtgagtgcct

SEQ ID NO: 3651111 - DNA, 25 bp, Homo sapien
tgctgttgagatggatcaccctgac

SEQ ID NO: 3651112 - DNA, 25 bp, Homo sapien
gatggatcaccctgacactctgagg

SEQ ID NO: 3651113 - DNA, 25 bp, Homo sapien
tgttgagatggatcaccctgacact

SEQ ID NO: 3651114 - DNA, 25 bp, Homo sapien
gatcaccctgacactctgaggctgc

SEQ ID NO: 3651115 - DNA, 25 bp, Homo sapien
tcatacagctttgccctagaacttg

SEQ ID NO: 3651116 - DNA, 25 bp, Homo sapien
ttgtccaactgttcgtttttctcta

SEQ ID NO: 3651117 - DNA, 25 bp, Homo sapien
gttcgtttttctctagctccctatg

SEQ ID NO: 3651118 - DNA, 25 bp, Homo sapien
agaacttgaatgtttgtccaactgt

SEQ ID NO: 3651119 - DNA, 25 bp, Homo sapien
tgtgctcgctcagatatgtcaactg

SEQ ID NO: 3651120 - DNA, 25 bp, Homo sapien
gaaagctattcttcacttgagatca

SEQ ID NO: 3651121 - DNA, 25 bp, Homo sapien
tgtcttgctcccctctataatgaaa

SEQ ID NO: 3651122 - DNA, 25 bp, Homo sapien
tttaatcatcgtgaaacagcagctg

SEQ ID NO: 3651123 - DNA, 25 bp, Homo sapien
tctgggtcacaactctgaatgaggt

SEQ ID NO: 3651124 - DNA, 25 bp, Homo sapien
gaatgaggttggagcagaggtccag

SEQ ID NO: 3651125 - DNA, 25 bp, Homo sapien
ctgggtcacaactctgaatgaggtt

SEQ ID NO: 3651126 - DNA, 25 bp, Homo sapien
tgggtcacaactctgaatgaggttg

SEQ ID NO: 3651127 - DNA, 25 bp, Homo sapien
gaggcttgtggcctgcattgggcat

SEQ ID NO: 3651128 - DNA, 25 bp, Homo sapien
cgtagtggtaggatacctggtgagg

SEQ ID NO: 3651129 - DNA, 25 bp, Homo sapien
agtaaacccacaggttcagtggcca

SEQ ID NO: 3651130 - DNA, 25 bp, Homo sapien
gtaaacccacaggttcagtggccag

SEQ ID NO: 3651131 - DNA, 25 bp, Homo sapien
gaagtaaacccacaggttcagtggc

SEQ ID NO: 3651132 - DNA, 25 bp, Homo sapien
aaggacaagagccacagaggcactg

SEQ ID NO: 3651133 - DNA, 25 bp, Homo sapien
ttccattcagccaagtgggtaaatg

SEQ ID NO: 3651134 - DNA, 25 bp, Homo sapien
tcttgtttgtgtgaccacctttttg

SEQ ID NO: 3651135 - DNA, 25 bp, Homo sapien
tcagccaagtgggtaaatggtcccg

SEQ ID NO: 3651136 - DNA, 25 bp, Homo sapien
aaatggtcccgacttgtcttgtttg

SEQ ID NO: 3651137 - DNA, 25 bp, Homo sapien
taaaattcttcagtagggtcaggga

SEQ ID NO: 3651138 - DNA, 25 bp, Homo sapien
tgagttccagctgaaaacaggatcg

SEQ ID NO: 3651139 - DNA, 25 bp, Homo sapien
aagaaaggagggtcgttgtgacagc

SEQ ID NO: 3651140 - DNA, 25 bp, Homo sapien
tggctacttggtttggaagaaagga

SEQ ID NO: 3651141 - DNA, 25 bp, Homo sapien
ctaattggcaagtccgttaaactct

SEQ ID NO: 3651142 - DNA, 25 bp, Homo sapien
gattaatcattcgaacactcctcct

SEQ ID NO: 3651143 - DNA, 25 bp, Homo sapien
tgtgattaatcattcgaacactcct

SEQ ID NO: 3651144 - DNA, 25 bp, Homo sapien
taaactcttcacatgagagctccct

SEQ ID NO: 3651145 - DNA, 25 bp, Homo sapien
tctgtatcactttagaaccattact

SEQ ID NO: 3651146 - DNA, 25 bp, Homo sapien
gagagaacttagatcacaattatgg

SEQ ID NO: 3651147 - DNA, 25 bp, Homo sapien
aagaggccacctgaaaatgaactag

SEQ ID NO: 3651148 - DNA, 25 bp, Homo sapien
tcctcccagagcatgagccagtgca

SEQ ID NO: 3651149 - DNA, 25 bp, Homo sapien
gttcatccctttcatgccacgcacc

SEQ ID NO: 3651150 - DNA, 25 bp, Homo sapien
catgccacgcaccttgtctatttct

SEQ ID NO: 3651151 - DNA, 25 bp, Homo sapien
tctaggactcgccttcttcctggaa

SEQ ID NO: 3651152 - DNA, 25 bp, Homo sapien
tctcctctgtctggtgcaattctac

SEQ ID NO: 3651153 - DNA, 25 bp, Homo sapien
gcggtggttacagtgaactaagatc

SEQ ID NO: 3651154 - DNA, 25 bp, Homo sapien
ttggaacatattgcagacagctctg

SEQ ID NO: 3651155 - DNA, 25 bp, Homo sapien
ccttggtgaccagttgtgtgaagca

SEQ ID NO: 3651156 - DNA, 25 bp, Homo sapien
gtgaattcgcttgcttggcctcccg

SEQ ID NO: 3651157 - DNA, 25 bp, Homo sapien
tgcttatgcccagttgcctccatac

SEQ ID NO: 3651158 - DNA, 25 bp, Homo sapien
ttttggccggtgcactttacactgc

SEQ ID NO: 3651159 - DNA, 25 bp, Homo sapien
tctgagttgtggtttcgtctgggca

SEQ ID NO: 3651160 - DNA, 25 bp, Homo sapien
tctttgtggccgagttgctttgctt

SEQ ID NO: 3651161 - DNA, 25 bp, Homo sapien
tttttacattgtccagcttgatggg

SEQ ID NO: 3651162 - DNA, 25 bp, Homo sapien
cctggatattaggatgtgcccatca

SEQ ID NO: 3651163 - DNA, 25 bp, Homo sapien
agcatcagcataatccactcccgga

SEQ ID NO: 3651164 - DNA, 25 bp, Homo sapien
taagcaacgtagtgtcaatcacccc

SEQ ID NO: 3651165 - DNA, 25 bp, Homo sapien
gcattagggaatacaaaactgagcc

SEQ ID NO: 3651166 - DNA, 25 bp, Homo sapien
cgttcctggtcttgccgctgaggga

SEQ ID NO: 3651167 - DNA, 25 bp, Homo sapien
cccgttcctggtcttgccgctgagg

SEQ ID NO: 3651168 - DNA, 25 bp, Homo sapien
ttatgtagctgtccaccccgttcct

SEQ ID NO: 3651169 - DNA, 25 bp, Homo sapien
taaatctgtcccattatgtagctgt

SEQ ID NO: 3651170 - DNA, 25 bp, Homo sapien
taatttagcgaggagactgatgtgg

SEQ ID NO: 3651171 - DNA, 25 bp, Homo sapien
tgtaatttagcgaggagactgatgt

SEQ ID NO: 3651172 - DNA, 25 bp, Homo sapien
ctgtgtaatttagcgaggagactga

SEQ ID NO: 3651173 - DNA, 25 bp, Homo sapien
gtgctgtgtaatttagcgaggagac

SEQ ID NO: 3651174 - DNA, 25 bp, Homo sapien
catacaaataccaatgatgacaact

SEQ ID NO: 3651175 - DNA, 25 bp, Homo sapien
caccggttccactgtccgggagaca

SEQ ID NO: 3651176 - DNA, 25 bp, Homo sapien
ctcagtagtcgtggccttgctctca

SEQ ID NO: 3651177 - DNA, 25 bp, Homo sapien
tcacacaagcagtgaggggtcgccc

SEQ ID NO: 3651178 - DNA, 25 bp, Homo sapien
acctcctgccgagggctccagctct

SEQ ID NO: 3651179 - DNA, 25 bp, Homo sapien
cagctctgaagatctcatcttgtgc

SEQ ID NO: 3651180 - DNA, 25 bp, Homo sapien
gctctgaagatctcatcttgtgcat

SEQ ID NO: 3651181 - DNA, 25 bp, Homo sapien
gggctccagctctgaagatctcatc

SEQ ID NO: 3651182 - DNA, 25 bp, Homo sapien
gggaggaaaaagtactgcgttgcca

SEQ ID NO: 3651183 - DNA, 25 bp, Homo sapien
ttgccaacagagttatctccaccag

SEQ ID NO: 3651184 - DNA, 25 bp, Homo sapien
tctggaggtgaaggcatcccattgc

SEQ ID NO: 3651185 - DNA, 25 bp, Homo sapien
aatgttctgttccaattgtggcctg

SEQ ID NO: 3651186 - DNA, 25 bp, Homo sapien
cattcattatcttaagtgctttggg

SEQ ID NO: 3651187 - DNA, 25 bp, Homo sapien
attcattatcttaagtgctttgggg

SEQ ID NO: 3651188 - DNA, 25 bp, Homo sapien
agtgggcacgcccgcaataaacccg

SEQ ID NO: 3651189 - DNA, 25 bp, Homo sapien
gcacgcccgcaataaacccggtgtc

SEQ ID NO: 3651190 - DNA, 25 bp, Homo sapien
ctccagtgggcacgcccgcaataaa

SEQ ID NO: 3651191 - DNA, 25 bp, Homo sapien
cgcccgcaataaacccggtgtccat

SEQ ID NO: 3651192 - DNA, 25 bp, Homo sapien
gcagaccgtctgtatcctgcatccg

SEQ ID NO: 3651193 - DNA, 25 bp, Homo sapien
aacttggcaagtcgcagaccgtctg

SEQ ID NO: 3651194 - DNA, 25 bp, Homo sapien
aagtcgcagaccgtctgtatcctgc

SEQ ID NO: 3651195 - DNA, 25 bp, Homo sapien
cgtctgtatcctgcatccgtggtgt

SEQ ID NO: 3651196 - DNA, 25 bp, Homo sapien
ctggacagggagacaggaaatgagg

SEQ ID NO: 3651197 - DNA, 25 bp, Homo sapien
ggttaatttttgctggccatagccc

SEQ ID NO: 3651198 - DNA, 25 bp, Homo sapien
caatccaatagcatttaatggcagg

SEQ ID NO: 3651199 - DNA, 25 bp, Homo sapien
ccagaagcaggtcgctgtccactgt

SEQ ID NO: 3651200 - DNA, 25 bp, Homo sapien
tctaagcagagagtgcctgcatccc

SEQ ID NO: 3651201 - DNA, 25 bp, Homo sapien
tgggcagtgtgggagtatcaggtct

SEQ ID NO: 3651202 - DNA, 25 bp, Homo sapien
tcagcagtttgaccaaagatgtacg

SEQ ID NO: 3651203 - DNA, 25 bp, Homo sapien
gagtctgccctctgaaaagagctgc

SEQ ID NO: 3651204 - DNA, 25 bp, Homo sapien
accaaagatgtacgcacatgggcag

SEQ ID NO: 3651205 - DNA, 25 bp, Homo sapien
gaggagcgttcaggtggtgttcagt

SEQ ID NO: 3651206 - DNA, 25 bp, Homo sapien
tcatgtcacgttcccaagcactggt

SEQ ID NO: 3651207 - DNA, 25 bp, Homo sapien
actggtgtctttggaggagcgttca

SEQ ID NO: 3651208 - DNA, 25 bp, Homo sapien
atgtcacgttcccaagcactggtgt

SEQ ID NO: 3651209 - DNA, 25 bp, Homo sapien
cacacgtgacaggagagggttccgt

SEQ ID NO: 3651210 - DNA, 25 bp, Homo sapien
gcttctgaaggctacaaccgcaaat

SEQ ID NO: 3651211 - DNA, 25 bp, Homo sapien
tgaggtaaaactggataggctcccc

SEQ ID NO: 3651212 - DNA, 25 bp, Homo sapien
ggttccgtgggtttgcagacttctg

SEQ ID NO: 3651213 - DNA, 25 bp, Homo sapien
gggccagatcaccattcagtgaata

SEQ ID NO: 3651214 - DNA, 25 bp, Homo sapien
tgaatatgccgtcttctctccaaca

SEQ ID NO: 3651215 - DNA, 25 bp, Homo sapien
ccattgggccagatcaccattcagt

SEQ ID NO: 3651216 - DNA, 25 bp, Homo sapien
gtgaatatgccgtcttctctccaac

SEQ ID NO: 3651217 - DNA, 25 bp, Homo sapien
ttggtggtagagaccccatcaaaga

SEQ ID NO: 3651218 - DNA, 25 bp, Homo sapien
aggggccaagccaattttgtctgta

SEQ ID NO: 3651219 - DNA, 25 bp, Homo sapien
ggggccaagccaattttgtctgtat

SEQ ID NO: 3651220 - DNA, 25 bp, Homo sapien
gcactttgcccaccctccttgggaa

SEQ ID NO: 3651221 - DNA, 25 bp, Homo sapien
accctccttgggaagtctttcatct

SEQ ID NO: 3651222 - DNA, 25 bp, Homo sapien
ccttgggaagtctttcatctggaat

SEQ ID NO: 3651223 - DNA, 25 bp, Homo sapien
cctccttgggaagtctttcatctgg

SEQ ID NO: 3651224 - DNA, 25 bp, Homo sapien
tgccactgaacatgagtatccctca

SEQ ID NO: 3651225 - DNA, 25 bp, Homo sapien
tgaacatgagtatccctcaggccgc

SEQ ID NO: 3651226 - DNA, 25 bp, Homo sapien
cctctctgcccatctatgtgcgttt

SEQ ID NO: 3651227 - DNA, 25 bp, Homo sapien
gcgtttccttcacgggctcttcttc

SEQ ID NO: 3651228 - DNA, 25 bp, Homo sapien
tataacttggtttgtgtatgtgggc

SEQ ID NO: 3651229 - DNA, 25 bp, Homo sapien
tctggccatgcctcctgagaaggct

SEQ ID NO: 3651230 - DNA, 25 bp, Homo sapien
tgggctagaccctcctgagtctgtc

SEQ ID NO: 3651231 - DNA, 25 bp, Homo sapien
tgtgtatgtgggctagaccctcctg

SEQ ID NO: 3651232 - DNA, 25 bp, Homo sapien
tgcttcctaacagagaccttccagg

SEQ ID NO: 3651233 - DNA, 25 bp, Homo sapien
agactctgcttcctaacagagacct

SEQ ID NO: 3651234 - DNA, 25 bp, Homo sapien
tgaaagggcttgtggttggagctca

SEQ ID NO: 3651235 - DNA, 25 bp, Homo sapien
ttgtggttggagctcagccacgttg

SEQ ID NO: 3651236 - DNA, 25 bp, Homo sapien
caagtcagtgtgcagtcaatttcca

SEQ ID NO: 3651237 - DNA, 25 bp, Homo sapien
agaaatcatttcagacccaaccaga

SEQ ID NO: 3651238 - DNA, 25 bp, Homo sapien
ccagacaataggttggtttattgcc

SEQ ID NO: 3651239 - DNA, 25 bp, Homo sapien
ttaggctggtccaactctttatggg

SEQ ID NO: 3651240 - DNA, 25 bp, Homo sapien
gctccctgaccagagttacttcaca

SEQ ID NO: 3651241 - DNA, 25 bp, Homo sapien
tattcacatgctccctgaccagagt

SEQ ID NO: 3651242 - DNA, 25 bp, Homo sapien
cacagagagtattcacatgctccct

SEQ ID NO: 3651243 - DNA, 25 bp, Homo sapien
cacatgctccctgaccagagttact

SEQ ID NO: 3651244 - DNA, 25 bp, Homo sapien
aagaaacttgaatgttccactgtct

SEQ ID NO: 3651245 - DNA, 25 bp, Homo sapien
cctatcccgcattgtaagaaacttg

SEQ ID NO: 3651246 - DNA, 25 bp, Homo sapien
tgtaagaaacttgaatgttccactg

SEQ ID NO: 3651247 - DNA, 25 bp, Homo sapien
ctatcccgcattgtaagaaacttga

SEQ ID NO: 3651248 - DNA, 25 bp, Homo sapien
ctgtcccatctggggagaattggat

SEQ ID NO: 3651249 - DNA, 25 bp, Homo sapien
tgtcccatctggggagaattggatg

SEQ ID NO: 3651250 - DNA, 25 bp, Homo sapien
gtcccatctggggagaattggatgg

SEQ ID NO: 3651251 - DNA, 25 bp, Homo sapien
gctccaaaatggcttattccagtgg

SEQ ID NO: 3651252 - DNA, 25 bp, Homo sapien
cttctacctggaatgtgtaattcat

SEQ ID NO: 3651253 - DNA, 25 bp, Homo sapien
tgagataacatcttctgtgagggat

SEQ ID NO: 3651254 - DNA, 25 bp, Homo sapien
actggtggataaacagtaggtactc

SEQ ID NO: 3651255 - DNA, 25 bp, Homo sapien
tgtgcctcgttgctaggcgacgcca

SEQ ID NO: 3651256 - DNA, 25 bp, Homo sapien
gtagctagctgctccgcaaacccag

SEQ ID NO: 3651257 - DNA, 25 bp, Homo sapien
ctgccgggagatcccgccgagtagc

SEQ ID NO: 3651258 - DNA, 25 bp, Homo sapien
cagtcccttgttgtgcctcgttgct

SEQ ID NO: 3651259 - DNA, 25 bp, Homo sapien
gcagtctgcgcccacgtggcacctt

SEQ ID NO: 3651260 - DNA, 25 bp, Homo sapien
ccaagcagtctgcgcccacgtggca

SEQ ID NO: 3651261 - DNA, 25 bp, Homo sapien
ctgcgcccacgtggcaccttctcct

SEQ ID NO: 3651262 - DNA, 25 bp, Homo sapien
agtctgcgcccacgtggcaccttct

SEQ ID NO: 3651263 - DNA, 25 bp, Homo sapien
tccttaggaggaggctctacttcct

SEQ ID NO: 3651264 - DNA, 25 bp, Homo sapien
catccttaggaggaggctctacttc

SEQ ID NO: 3651265 - DNA, 25 bp, Homo sapien
cacatccttaggaggaggctctact

SEQ ID NO: 3651266 - DNA, 25 bp, Homo sapien
ttaggaggaggctctacttccttct

SEQ ID NO: 3651267 - DNA, 25 bp, Homo sapien
taaggttccttgattgccccgcaaa

SEQ ID NO: 3651268 - DNA, 25 bp, Homo sapien
gattgccccgcaaactcctaagaac

SEQ ID NO: 3651269 - DNA, 25 bp, Homo sapien
cttcataaggttccttgattgcccc

SEQ ID NO: 3651270 - DNA, 25 bp, Homo sapien
atcttcaccacttagggcacttccc

SEQ ID NO: 3651271 - DNA, 25 bp, Homo sapien
tataaatggcttcacatgctttagc

SEQ ID NO: 3651272 - DNA, 25 bp, Homo sapien
gcattaacaccacagttgctgcttt

SEQ ID NO: 3651273 - DNA, 25 bp, Homo sapien
tgctttcaatcattaatgggtcaaa

SEQ ID NO: 3651274 - DNA, 25 bp, Homo sapien
gagaattaagcattaacaccacagt

SEQ ID NO: 3651275 - DNA, 25 bp, Homo sapien
ttgttccagccttgactattgggag

SEQ ID NO: 3651276 - DNA, 25 bp, Homo sapien
tattttccacttggatgataagcca

SEQ ID NO: 3651277 - DNA, 25 bp, Homo sapien
tgaaataattcatccgacagcaagt

SEQ ID NO: 3651278 - DNA, 25 bp, Homo sapien
gagagattgctcttaggtaatgcat

SEQ ID NO: 3651279 - DNA, 25 bp, Homo sapien
ctaagggatgcacaaatagctacta

SEQ ID NO: 3651280 - DNA, 25 bp, Homo sapien
gacagtgccggtcatgtaacagaca

SEQ ID NO: 3651281 - DNA, 25 bp, Homo sapien
aattttatgtgccaaagcgactgag

SEQ ID NO: 3651282 - DNA, 25 bp, Homo sapien
ccttgcataattaattagttctagc

SEQ ID NO: 3651283 - DNA, 25 bp, Homo sapien
cacacatggatattatcgatctcat

SEQ ID NO: 3651284 - DNA, 25 bp, Homo sapien
acacatggatattatcgatctcatc

SEQ ID NO: 3651285 - DNA, 25 bp, Homo sapien
ccacacatggatattatcgatctca

SEQ ID NO: 3651286 - DNA, 25 bp, Homo sapien
gtcttcatgggtgagtagcttagtt

SEQ ID NO: 3651287 - DNA, 25 bp, Homo sapien
catagtagcatttcttcttacaatt

SEQ ID NO: 3651288 - DNA, 25 bp, Homo sapien
gattccaaatatcatagtagcattt

SEQ ID NO: 3651289 - DNA, 25 bp, Homo sapien
tagttaaaggttccacagctccaag

SEQ ID NO: 3651290 - DNA, 25 bp, Homo sapien
ctggagcgagctgggcaatgacaga

SEQ ID NO: 3651291 - DNA, 25 bp, Homo sapien
tgacatctaactcccttaacaattt

SEQ ID NO: 3651292 - DNA, 25 bp, Homo sapien
tgacagaattcatgacatctaactc

SEQ ID NO: 3651293 - DNA, 25 bp, Homo sapien
gaattcatgacatctaactccctta

SEQ ID NO: 3651294 - DNA, 25 bp, Homo sapien
caaagactagcaaactcatggataa

SEQ ID NO: 3651295 - DNA, 25 bp, Homo sapien
gacaaagactagcaaactcatggat

SEQ ID NO: 3651296 - DNA, 25 bp, Homo sapien
acaaagactagcaaactcatggata

SEQ ID NO: 3651297 - DNA, 25 bp, Homo sapien
tatttgcactttactggtgtactct

SEQ ID NO: 3651298 - DNA, 25 bp, Homo sapien
tcagggctactcagtagtctgatga

SEQ ID NO: 3651299 - DNA, 25 bp, Homo sapien
caagttgtaaatgcattccatagag

SEQ ID NO: 3651300 - DNA, 25 bp, Homo sapien
ttcttctttacatccgggtcagggc

SEQ ID NO: 3651301 - DNA, 25 bp, Homo sapien
cagggttcagtcaatagtagctgcg

SEQ ID NO: 3651302 - DNA, 25 bp, Homo sapien
tcaatagtagctgcgcagtttccac

SEQ ID NO: 3651303 - DNA, 25 bp, Homo sapien
atgtgcttagaccaccagggttcag

SEQ ID NO: 3651304 - DNA, 25 bp, Homo sapien
gtagctgcgcagtttccacatatta

SEQ ID NO: 3651305 - DNA, 25 bp, Homo sapien
tcctgtcgagtagcaatggcatact

SEQ ID NO: 3651306 - DNA, 25 bp, Homo sapien
tgagggtgaaaccagtcctgtcgag

SEQ ID NO: 3651307 - DNA, 25 bp, Homo sapien
acaagccaagggatgccaccaatgg

SEQ ID NO: 3651308 - DNA, 25 bp, Homo sapien
caatggatggccactacatgaagct

SEQ ID NO: 3651309 - DNA, 25 bp, Homo sapien
ccttagtggtgtccttgtgcaatta

SEQ ID NO: 3651310 - DNA, 25 bp, Homo sapien
ggcccttagtggtgtccttgtgcaa

SEQ ID NO: 3651311 - DNA, 25 bp, Homo sapien
aggtgggcccttagtggtgtccttg

SEQ ID NO: 3651312 - DNA, 25 bp, Homo sapien
agtggtgtccttgtgcaattagtgt

SEQ ID NO: 3651313 - DNA, 25 bp, Homo sapien
tgcatgcaaatttacagcgggttta

SEQ ID NO: 3651314 - DNA, 25 bp, Homo sapien
agccaagaagccatgaaaagctccc

SEQ ID NO: 3651315 - DNA, 25 bp, Homo sapien
gaaaaggctccaattatagcttagc

SEQ ID NO: 3651316 - DNA, 25 bp, Homo sapien
catgcagtactgttgacaggccctc

SEQ ID NO: 3651317 - DNA, 25 bp, Homo sapien
ctaagataggaggtattgcatttag

SEQ ID NO: 3651318 - DNA, 25 bp, Homo sapien
tagttcttgaagtttagctcgacac

SEQ ID NO: 3651319 - DNA, 25 bp, Homo sapien
ggaggtattgcatttagttcttgaa

SEQ ID NO: 3651320 - DNA, 25 bp, Homo sapien
gaagtttagctcgacactgaaaatc

SEQ ID NO: 3651321 - DNA, 25 bp, Homo sapien
ggttttgagagccaacaactgaatc

SEQ ID NO: 3651322 - DNA, 25 bp, Homo sapien
tgagagccaacaactgaatcactgg

SEQ ID NO: 3651323 - DNA, 25 bp, Homo sapien
ccaacaactgaatcactggatattc

SEQ ID NO: 3651324 - DNA, 25 bp, Homo sapien
ctaaggttttgagagccaacaactg

SEQ ID NO: 3651325 - DNA, 25 bp, Homo sapien
ggatcttaataagatggtccaatcc

SEQ ID NO: 3651326 - DNA, 25 bp, Homo sapien
taagatggtccaatccttgattgtc

SEQ ID NO: 3651327 - DNA, 25 bp, Homo sapien
gttcgagactccttatcatttgcaa

SEQ ID NO: 3651328 - DNA, 25 bp, Homo sapien
ccttgattgtctcttagcattgttc

SEQ ID NO: 3651329 - DNA, 25 bp, Homo sapien
tgcaagtgcttctatatgaaggtca

SEQ ID NO: 3651330 - DNA, 25 bp, Homo sapien
tcttcaaggcaattggctatcactg

SEQ ID NO: 3651331 - DNA, 25 bp, Homo sapien
tgctgaatctgcaccatagtatcca

SEQ ID NO: 3651332 - DNA, 25 bp, Homo sapien
caggaattgtagagttttctgcaaa

SEQ ID NO: 3651333 - DNA, 25 bp, Homo sapien
gggctacaaggcacttttcaacctc

SEQ ID NO: 3651334 - DNA, 25 bp, Homo sapien
ggctacaaggcacttttcaacctct

SEQ ID NO: 3651335 - DNA, 25 bp, Homo sapien
tttgcattagcagggttgcaagtgg

SEQ ID NO: 3651336 - DNA, 25 bp, Homo sapien
gcttcccgtacctcttcattgtcac

SEQ ID NO: 3651337 - DNA, 25 bp, Homo sapien
cattagcagggttgcaagtggttag

SEQ ID NO: 3651338 - DNA, 25 bp, Homo sapien
ttcccgtacctcttcattgtcactt

SEQ ID NO: 3651339 - DNA, 25 bp, Homo sapien
gcttctacaagagtcctcttggtcc

SEQ ID NO: 3651340 - DNA, 25 bp, Homo sapien
tggaaaacagacccatctgatgatt

SEQ ID NO: 3651341 - DNA, 25 bp, Homo sapien
tttggaaaacagacccatctgatga

SEQ ID NO: 3651342 - DNA, 25 bp, Homo sapien
cttctacaagagtcctcttggtccc

SEQ ID NO: 3651343 - DNA, 25 bp, Homo sapien
gttaccatgacaacaccagcgatta

SEQ ID NO: 3651344 - DNA, 25 bp, Homo sapien
caaaaagcgttaccacaagtacatt

SEQ ID NO: 3651345 - DNA, 25 bp, Homo sapien
cctggaggaagttaactctgggctt

SEQ ID NO: 3651346 - DNA, 25 bp, Homo sapien
tcaatgcatgaaatgagcctccaat

SEQ ID NO: 3651347 - DNA, 25 bp, Homo sapien
tagggaatccacttgttctattgca

SEQ ID NO: 3651348 - DNA, 25 bp, Homo sapien
catcagacagggaggaatctaggct

SEQ ID NO: 3651349 - DNA, 25 bp, Homo sapien
caaactgttagtcaaggtcaggtgg

SEQ ID NO: 3651350 - DNA, 25 bp, Homo sapien
aatcagtagctaatcaaattcaaac

SEQ ID NO: 3651351 - DNA, 25 bp, Homo sapien
cttagcttccaagatgaagccaggg

SEQ ID NO: 3651352 - DNA, 25 bp, Homo sapien
caagatgaagccagggtggaagggc

SEQ ID NO: 3651353 - DNA, 25 bp, Homo sapien
cccatccaagttctagccagtcccc

SEQ ID NO: 3651354 - DNA, 25 bp, Homo sapien
ttccaagatgaagccagggtggaag

SEQ ID NO: 3651355 - DNA, 25 bp, Homo sapien
ctgtgtttgcagaacgcagtgggct

SEQ ID NO: 3651356 - DNA, 25 bp, Homo sapien
gcttcaacgtcacacgcagttgcgg

SEQ ID NO: 3651357 - DNA, 25 bp, Homo sapien
cggtgacagcgagagcagctttgct

SEQ ID NO: 3651358 - DNA, 25 bp, Homo sapien
tccatctcgtttactagacaggagg

SEQ ID NO: 3651359 - DNA, 25 bp, Homo sapien
aattcattggccgtcagctcgtcac

SEQ ID NO: 3651360 - DNA, 25 bp, Homo sapien
ttggagcgtagcagctctaccaggg

SEQ ID NO: 3651361 - DNA, 25 bp, Homo sapien
caactggcgtgcttcctcacttcat

SEQ ID NO: 3651362 - DNA, 25 bp, Homo sapien
acttcatcattcttggagcgtagca

SEQ ID NO: 3651363 - DNA, 25 bp, Homo sapien
aacttattataagctgcctcactga

SEQ ID NO: 3651364 - DNA, 25 bp, Homo sapien
tacttgatgacaaatagccagtctg

SEQ ID NO: 3651365 - DNA, 25 bp, Homo sapien
gaccataatcatagaatccatcgtt

SEQ ID NO: 3651366 - DNA, 25 bp, Homo sapien
cagggaaagattgttattgagcaac

SEQ ID NO: 3651367 - DNA, 25 bp, Homo sapien
tcttggcagcttttggcaaccctta

SEQ ID NO: 3651368 - DNA, 25 bp, Homo sapien
catgtaatacagataatagagcccc

SEQ ID NO: 3651369 - DNA, 25 bp, Homo sapien
gcagatcatatctgcttcctagttt

SEQ ID NO: 3651370 - DNA, 25 bp, Homo sapien
gaaaatactgactaaatcagtcatg

SEQ ID NO: 3651371 - DNA, 25 bp, Homo sapien
ttcaaaggcaacagtttggtgccgg

SEQ ID NO: 3651372 - DNA, 25 bp, Homo sapien
tgttgattaagagtacagcccgtag

SEQ ID NO: 3651373 - DNA, 25 bp, Homo sapien
taggtcacttggttcttgtaagcag

SEQ ID NO: 3651374 - DNA, 25 bp, Homo sapien
gcaacagtttggtgccgggatttat

SEQ ID NO: 3651375 - DNA, 25 bp, Homo sapien
gccaccgtgcccggccatggtcatt

SEQ ID NO: 3651376 - DNA, 25 bp, Homo sapien
caccatgttggcctcgatctcttga

SEQ ID NO: 3651377 - DNA, 25 bp, Homo sapien
tcaccatgttggcctcgatctcttg

SEQ ID NO: 3651378 - DNA, 25 bp, Homo sapien
accgtgcccggccatggtcatttta

SEQ ID NO: 3651379 - DNA, 25 bp, Homo sapien
gatggttttattccacgaaacagat

SEQ ID NO: 3651380 - DNA, 25 bp, Homo sapien
ttttttctgaaagtcataactgaag

SEQ ID NO: 3651381 - DNA, 25 bp, Homo sapien
aagtcataactgaagctgactttta

SEQ ID NO: 3651382 - DNA, 25 bp, Homo sapien
taacagtgacatactgtttttaaag

SEQ ID NO: 3651383 - DNA, 25 bp, Homo sapien
tgaagaagaaatacttcgtccataa

SEQ ID NO: 3651384 - DNA, 25 bp, Homo sapien
gaaatacttcgtccataaccaacat

SEQ ID NO: 3651385 - DNA, 25 bp, Homo sapien
tacttcgtccataaccaacatctga

SEQ ID NO: 3651386 - DNA, 25 bp, Homo sapien
tcgtccataaccaacatctgattta

SEQ ID NO: 3651387 - DNA, 25 bp, Homo sapien
aaaggggaagctgtttgcatacaga

SEQ ID NO: 3651388 - DNA, 25 bp, Homo sapien
ctttttctttggtggcgcttttgct

SEQ ID NO: 3651389 - DNA, 25 bp, Homo sapien
ctttggtggcgcttttgctgagaac

SEQ ID NO: 3651390 - DNA, 25 bp, Homo sapien
tgagaacagtatttcgtccagaagc

SEQ ID NO: 3651391 - DNA, 25 bp, Homo sapien
gtatttcgtccagaagctggctctg

SEQ ID NO: 3651392 - DNA, 25 bp, Homo sapien
ggactgattagagactgctgtccct

SEQ ID NO: 3651393 - DNA, 25 bp, Homo sapien
aggactgattagagactgctgtccc

SEQ ID NO: 3651394 - DNA, 25 bp, Homo sapien
caagttttaattaaagcgactgtag

SEQ ID NO: 3651395 - DNA, 25 bp, Homo sapien
taaagcgactgtaggaccctgttgt

SEQ ID NO: 3651396 - DNA, 25 bp, Homo sapien
taatctacccctcaatggaccaaag

SEQ ID NO: 3651397 - DNA, 25 bp, Homo sapien
caaggcccagttgtgtctgaatcca

SEQ ID NO: 3651398 - DNA, 25 bp, Homo sapien
agagagaagggacgcacattgagcc

SEQ ID NO: 3651399 - DNA, 25 bp, Homo sapien
ggacaacagggctatggctaatcta

SEQ ID NO: 3651400 - DNA, 25 bp, Homo sapien
gaaaatatctgatacacctccagga

SEQ ID NO: 3651401 - DNA, 25 bp, Homo sapien
tctttcccatgaagtctgccaggtt

SEQ ID NO: 3651402 - DNA, 25 bp, Homo sapien
tgtgtctcacagagcgtgctgcctg

SEQ ID NO: 3651403 - DNA, 25 bp, Homo sapien
atttccgggaactcctgaactgtag

SEQ ID NO: 3651404 - DNA, 25 bp, Homo sapien
tggtggtgtaagattggagagctca

SEQ ID NO: 3651405 - DNA, 25 bp, Homo sapien
caacagtcagtccaatacttcgtca

SEQ ID NO: 3651406 - DNA, 25 bp, Homo sapien
tctaaaattgcaaggtggtggtgta

SEQ ID NO: 3651407 - DNA, 25 bp, Homo sapien
gaatagagtgactattcagagttac

SEQ ID NO: 3651408 - DNA, 25 bp, Homo sapien
aattgactgaggtccagatgaattt

SEQ ID NO: 3651409 - DNA, 25 bp, Homo sapien
gaattgactgaggtccagatgaatt

SEQ ID NO: 3651410 - DNA, 25 bp, Homo sapien
ttgactgaggtccagatgaattttc

SEQ ID NO: 3651411 - DNA, 25 bp, Homo sapien
tgactgaggtccagatgaattttct

SEQ ID NO: 3651412 - DNA, 25 bp, Homo sapien
agtgaggctggacagccctctggga

SEQ ID NO: 3651413 - DNA, 25 bp, Homo sapien
cattgggagaaccagcagtgaggct

SEQ ID NO: 3651414 - DNA, 25 bp, Homo sapien
tagctgagagcccacattgggagaa

SEQ ID NO: 3651415 - DNA, 25 bp, Homo sapien
tgtccacagccactcactagagcag

SEQ ID NO: 3651416 - DNA, 25 bp, Homo sapien
ttatctgtcatttgtgccttggcaa

SEQ ID NO: 3651417 - DNA, 25 bp, Homo sapien
tgtcatttgtgccttggcaaggctt

SEQ ID NO: 3651418 - DNA, 25 bp, Homo sapien
tcatttgtgccttggcaaggcttac

SEQ ID NO: 3651419 - DNA, 25 bp, Homo sapien
tctgtcatttgtgccttggcaaggc

SEQ ID NO: 3651420 - DNA, 25 bp, Homo sapien
gataggcctgctaactgtaagttgt

SEQ ID NO: 3651421 - DNA, 25 bp, Homo sapien
tatttaaacagcatacagtcggatc

SEQ ID NO: 3651422 - DNA, 25 bp, Homo sapien
gaaatggatagtctactgcatggag

SEQ ID NO: 3651423 - DNA, 25 bp, Homo sapien
tagccaatctgttaggataggcctg

SEQ ID NO: 3651424 - DNA, 25 bp, Homo sapien
ctggacaggatgcatgcaacagctg

SEQ ID NO: 3651425 - DNA, 25 bp, Homo sapien
aagctggacaggatgcatgcaacag

SEQ ID NO: 3651426 - DNA, 25 bp, Homo sapien
ggacaggatgcatgcaacagctgtt

SEQ ID NO: 3651427 - DNA, 25 bp, Homo sapien
aaaagctggacaggatgcatgcaac

SEQ ID NO: 3651428 - DNA, 25 bp, Homo sapien
ctcctctttcactttttcctcttct

SEQ ID NO: 3651429 - DNA, 25 bp, Homo sapien
caccaacaaattttggtaccaccat

SEQ ID NO: 3651430 - DNA, 25 bp, Homo sapien
tcaccaacaaattttggtaccacca

SEQ ID NO: 3651431 - DNA, 25 bp, Homo sapien
ttggcagtattgatttggtcacctc

SEQ ID NO: 3651432 - DNA, 25 bp, Homo sapien
gcagtattgatttggtcacctcata

SEQ ID NO: 3651433 - DNA, 25 bp, Homo sapien
aatattggttattggcagtattgat

SEQ ID NO: 3651434 - DNA, 25 bp, Homo sapien
tattgatttggtcacctcatacaca

SEQ ID NO: 3651435 - DNA, 25 bp, Homo sapien
ttatttatggtgtatttgtctaaaa

SEQ ID NO: 3651436 - DNA, 25 bp, Homo sapien
taaatagaagttgaggacttttcca

SEQ ID NO: 3651437 - DNA, 25 bp, Homo sapien
tcagagtcagagtgctgtaaacttc

SEQ ID NO: 3651438 - DNA, 25 bp, Homo sapien
gaagttgaggacttttccaattcat

SEQ ID NO: 3651439 - DNA, 25 bp, Homo sapien
aaagatgcttttcatggtctagctg

SEQ ID NO: 3651440 - DNA, 25 bp, Homo sapien
aacaccccatccacctaagggatga

SEQ ID NO: 3651441 - DNA, 25 bp, Homo sapien
tctgcaggatcacattgaaagatgc

SEQ ID NO: 3651442 - DNA, 25 bp, Homo sapien
ctctgattcttagtgaacgtatgac

SEQ ID NO: 3651443 - DNA, 25 bp, Homo sapien
gacatggtgtgacttaacactgaag

SEQ ID NO: 3651444 - DNA, 25 bp, Homo sapien
ctgaagtcaggagcaaggaagaaga

SEQ ID NO: 3651445 - DNA, 25 bp, Homo sapien
cactaccttcttggagtaaaggcag

SEQ ID NO: 3651446 - DNA, 25 bp, Homo sapien
cctaatattaggctgtcactgaaga

SEQ ID NO: 3651447 - DNA, 25 bp, Homo sapien
gctcgatggtagaagattccttttt

SEQ ID NO: 3651448 - DNA, 25 bp, Homo sapien
cttgaaaagcaaagctcgatggtag

SEQ ID NO: 3651449 - DNA, 25 bp, Homo sapien
gacatgtccaatcggtataacattg

SEQ ID NO: 3651450 - DNA, 25 bp, Homo sapien
gaaatttcagttcacttatgtgaag

SEQ ID NO: 3651451 - DNA, 25 bp, Homo sapien
ctaccgtactctccgcgaactaggg

SEQ ID NO: 3651452 - DNA, 25 bp, Homo sapien
tgacttcattccacgctctaccgta

SEQ ID NO: 3651453 - DNA, 25 bp, Homo sapien
gggagcaaccaatgccaattctatc

SEQ ID NO: 3651454 - DNA, 25 bp, Homo sapien
ttccgagagtcattctgcagcatga

SEQ ID NO: 3651455 - DNA, 25 bp, Homo sapien
aatgaatctgtaaagatcagcctct

SEQ ID NO: 3651456 - DNA, 25 bp, Homo sapien
tctgtaaagatcagcctctcgactt

SEQ ID NO: 3651457 - DNA, 25 bp, Homo sapien
taaagatcagcctctcgacttctca

SEQ ID NO: 3651458 - DNA, 25 bp, Homo sapien
gatcagcctctcgacttctcaactt

SEQ ID NO: 3651459 - DNA, 25 bp, Homo sapien
aaaatcaatttggagaatgtcttag

SEQ ID NO: 3651460 - DNA, 25 bp, Homo sapien
agcctctcttgtgttcgtctgatgg

SEQ ID NO: 3651461 - DNA, 25 bp, Homo sapien
gagtgtacacagtgaatttcttgtt

SEQ ID NO: 3651462 - DNA, 25 bp, Homo sapien
gtgtacacagtgaatttcttgtttg

SEQ ID NO: 3651463 - DNA, 25 bp, Homo sapien
actggactttaagcgtgactaggca

SEQ ID NO: 3651464 - DNA, 25 bp, Homo sapien
tgactatacaggtcaacactggact

SEQ ID NO: 3651465 - DNA, 25 bp, Homo sapien
ggatgaatttcgacaacaatcagct

SEQ ID NO: 3651466 - DNA, 25 bp, Homo sapien
tgacagtcatgaggccacagtgttg

SEQ ID NO: 3651467 - DNA, 25 bp, Homo sapien
caggaggttggtttttgacgatgtt

SEQ ID NO: 3651468 - DNA, 25 bp, Homo sapien
agcatttgggggctgatacctttga

SEQ ID NO: 3651469 - DNA, 25 bp, Homo sapien
gattccatttgtatgccagctgttc

SEQ ID NO: 3651470 - DNA, 25 bp, Homo sapien
aaacaaactgggactttctcaagat

SEQ ID NO: 3651471 - DNA, 25 bp, Homo sapien
aaactgggactttctcaagattcag

SEQ ID NO: 3651472 - DNA, 25 bp, Homo sapien
ggttgcagctggacatgctctcaga

SEQ ID NO: 3651473 - DNA, 25 bp, Homo sapien
tcttggttgcagctggacatgctct

SEQ ID NO: 3651474 - DNA, 25 bp, Homo sapien
tgaagccttccaatttcttggttgc

SEQ ID NO: 3651475 - DNA, 25 bp, Homo sapien
catgctctcagagcagatcagacac

SEQ ID NO: 3651476 - DNA, 25 bp, Homo sapien
tgttgtcactatgagacccagggac

SEQ ID NO: 3651477 - DNA, 25 bp, Homo sapien
ccctgggcttctccctatacatgga

SEQ ID NO: 3651478 - DNA, 25 bp, Homo sapien
cttctccctatacatggagacactg

SEQ ID NO: 3651479 - DNA, 25 bp, Homo sapien
atggagacactgctaccacctaacc

SEQ ID NO: 3651480 - DNA, 25 bp, Homo sapien
acatggagacactgctaccacctaa

SEQ ID NO: 3651481 - DNA, 25 bp, Homo sapien
taatctgctccaggtggctaaactc

SEQ ID NO: 3651482 - DNA, 25 bp, Homo sapien
gattttaatctgctccaggtggcta

SEQ ID NO: 3651483 - DNA, 25 bp, Homo sapien
gctccaggtggctaaactcaggaag

SEQ ID NO: 3651484 - DNA, 25 bp, Homo sapien
tctgctccaggtggctaaactcagg

SEQ ID NO: 3651485 - DNA, 25 bp, Homo sapien
aggaaggtctagattatcctctagt

SEQ ID NO: 3651486 - DNA, 25 bp, Homo sapien
aacttctttgaaatcatgggggcaa

SEQ ID NO: 3651487 - DNA, 25 bp, Homo sapien
gaacaaggctttcagagcaaacatc

SEQ ID NO: 3651488 - DNA, 25 bp, Homo sapien
agcaccttcagcaacttctttgaaa

SEQ ID NO: 3651489 - DNA, 25 bp, Homo sapien
ctcccccattctctcccgtccgcct

SEQ ID NO: 3651490 - DNA, 25 bp, Homo sapien
gcgccgctccgccctctgccctctg

SEQ ID NO: 3651491 - DNA, 25 bp, Homo sapien
gacgcccgctccggcgccgctccgc

SEQ ID NO: 3651492 - DNA, 25 bp, Homo sapien
tgccctctgcccgtctctgcccctg

SEQ ID NO: 3651493 - DNA, 25 bp, Homo sapien
cgctccggcgccgctccgccctctg

SEQ ID NO: 3651494 - DNA, 25 bp, Homo sapien
aggccccggagcaaccagaggagcc

SEQ ID NO: 3651495 - DNA, 25 bp, Homo sapien
cgaggcgcagttccgagggtcaggc

SEQ ID NO: 3651496 - DNA, 25 bp, Homo sapien
ttccgagggtcaggccccggagcaa

SEQ ID NO: 3651497 - DNA, 25 bp, Homo sapien
ccgccgaggcgcagttccgagggtc

SEQ ID NO: 3651498 - DNA, 25 bp, Homo sapien
cgccgccgcccgcttggccccgcac

SEQ ID NO: 3651499 - DNA, 25 bp, Homo sapien
tgccgggcccgccgccgcccgcttg

SEQ ID NO: 3651500 - DNA, 25 bp, Homo sapien
ccgccgccgcccgcttggccccgca

SEQ ID NO: 3651501 - DNA, 25 bp, Homo sapien
gggcgcgccgaggagggcttagtag

SEQ ID NO: 3651502 - DNA, 25 bp, Homo sapien
aagccgaaagccgtaggcggcggcg

SEQ ID NO: 3651503 - DNA, 25 bp, Homo sapien
cagccggtgaaatgaagccgaaagc

SEQ ID NO: 3651504 - DNA, 25 bp, Homo sapien
ctcccgggtgcagccggtgaaatga

SEQ ID NO: 3651505 - DNA, 25 bp, Homo sapien
tttagggggatcatttgttcatttc

SEQ ID NO: 3651506 - DNA, 25 bp, Homo sapien
cgccaccaagtttacaatccactgt

SEQ ID NO: 3651507 - DNA, 25 bp, Homo sapien
ttcatttcctcggattctcacaggg

SEQ ID NO: 3651508 - DNA, 25 bp, Homo sapien
cctgccgccaccaagtttacaatcc

SEQ ID NO: 3651509 - DNA, 25 bp, Homo sapien
gccaagaaaaaaaaaattatgcgca

SEQ ID NO: 3651510 - DNA, 25 bp, Homo sapien
tgcccccactccccgagccaagaaa

SEQ ID NO: 3651511 - DNA, 25 bp, Homo sapien
ttatgcccccactccccgagccaag

SEQ ID NO: 3651512 - DNA, 25 bp, Homo sapien
tatgcccccactccccgagccaaga

SEQ ID NO: 3651513 - DNA, 25 bp, Homo sapien
gagggctgcaatgcaaaatactagg

SEQ ID NO: 3651514 - DNA, 25 bp, Homo sapien
atgctggaaggaagcccgcggaact

SEQ ID NO: 3651515 - DNA, 25 bp, Homo sapien
cccaagtctgaactgcctgcttctc

SEQ ID NO: 3651516 - DNA, 25 bp, Homo sapien
ttagacacatttatgggaagtcagc

SEQ ID NO: 3651517 - DNA, 25 bp, Homo sapien
agagaggatccaaaagtatttagca

SEQ ID NO: 3651518 - DNA, 25 bp, Homo sapien
cagatccaagagaggatccaaaagt

SEQ ID NO: 3651519 - DNA, 25 bp, Homo sapien
caagagaggatccaaaagtatttag

SEQ ID NO: 3651520 - DNA, 25 bp, Homo sapien
atccaagagaggatccaaaagtatt

SEQ ID NO: 3651521 - DNA, 25 bp, Homo sapien
tgctggagaacttcagatcccaggg

SEQ ID NO: 3651522 - DNA, 25 bp, Homo sapien
tattcgacactttgggaacaaaaca

SEQ ID NO: 3651523 - DNA, 25 bp, Homo sapien
ggaatatacctcagttaacacatga

SEQ ID NO: 3651524 - DNA, 25 bp, Homo sapien
tactattgctcaatggccttcagag

SEQ ID NO: 3651525 - DNA, 25 bp, Homo sapien
tcagagttatcacgcagaatgtcaa

SEQ ID NO: 3651526 - DNA, 25 bp, Homo sapien
gcagaataatccagtcccttcctct

SEQ ID NO: 3651527 - DNA, 25 bp, Homo sapien
cctctctctcccacgagtttattct

SEQ ID NO: 3651528 - DNA, 25 bp, Homo sapien
ctctctcccacgagtttattcttca

SEQ ID NO: 3651529 - DNA, 25 bp, Homo sapien
ttttccctaagtgtactgtcaccca

SEQ ID NO: 3651530 - DNA, 25 bp, Homo sapien
cttggcaagaggcagctcacacgtt

SEQ ID NO: 3651531 - DNA, 25 bp, Homo sapien
ttttctcttgtgacgtagaactgct

SEQ ID NO: 3651532 - DNA, 25 bp, Homo sapien
tcccttttctcttgtgacgtagaac

SEQ ID NO: 3651533 - DNA, 25 bp, Homo sapien
tcttgtgacgtagaactgctccggg

SEQ ID NO: 3651534 - DNA, 25 bp, Homo sapien
tctcttgtgacgtagaactgctccg

SEQ ID NO: 3651535 - DNA, 25 bp, Homo sapien
ttaaaaccctaaacttagctgcaga

SEQ ID NO: 3651536 - DNA, 25 bp, Homo sapien
agaaatccaaacagtagtgagctgg

SEQ ID NO: 3651537 - DNA, 25 bp, Homo sapien
gagctggtcctttatggccggtccc

SEQ ID NO: 3651538 - DNA, 25 bp, Homo sapien
tttatggccggtcccctcaaatgcc

SEQ ID NO: 3651539 - DNA, 25 bp, Homo sapien
tcacagggcctggcggcaggcactg

SEQ ID NO: 3651540 - DNA, 25 bp, Homo sapien
cagggcctggcggcaggcactgtcc

SEQ ID NO: 3651541 - DNA, 25 bp, Homo sapien
agggcctggcggcaggcactgtccc

SEQ ID NO: 3651542 - DNA, 25 bp, Homo sapien
gcctggcggcaggcactgtcccctc

SEQ ID NO: 3651543 - DNA, 25 bp, Homo sapien
gcttccttgttattcaggtagatcc

SEQ ID NO: 3651544 - DNA, 25 bp, Homo sapien
ccttgttattcaggtagatcccact

SEQ ID NO: 3651545 - DNA, 25 bp, Homo sapien
cacgcaatgatacattcctgcttcc

SEQ ID NO: 3651546 - DNA, 25 bp, Homo sapien
tggactgtcgcagcacacgcaatga

SEQ ID NO: 3651547 - DNA, 25 bp, Homo sapien
gaaagtgttcttgacccagacacct

SEQ ID NO: 3651548 - DNA, 25 bp, Homo sapien
tgaggagaatgacgctaagtctggt

SEQ ID NO: 3651549 - DNA, 25 bp, Homo sapien
aaactgtgcaccaaactcattccaa

SEQ ID NO: 3651550 - DNA, 25 bp, Homo sapien
acaattataggatgatgaggagaat

SEQ ID NO: 3651551 - DNA, 25 bp, Homo sapien
cttcactatcgaagccattgcctct

SEQ ID NO: 3651552 - DNA, 25 bp, Homo sapien
aaagacttctttctggatatccaac

SEQ ID NO: 3651553 - DNA, 25 bp, Homo sapien
gaaggacttcttgatcctttgatgc

SEQ ID NO: 3651554 - DNA, 25 bp, Homo sapien
gccattgcctctcgaagtggaagga

SEQ ID NO: 3651555 - DNA, 25 bp, Homo sapien
tgtggaagacataaacgatactaca

SEQ ID NO: 3651556 - DNA, 25 bp, Homo sapien
atgccaagaggtgccccgatgtgtt

SEQ ID NO: 3651557 - DNA, 25 bp, Homo sapien
gatcccatgcccagttattcgacag

SEQ ID NO: 3651558 - DNA, 25 bp, Homo sapien
taaacgatactacagctgctaatga

SEQ ID NO: 3651559 - DNA, 25 bp, Homo sapien
taccatgagcctcggaaaacgaagg

SEQ ID NO: 3651560 - DNA, 25 bp, Homo sapien
tttcatcagagccagacgtaccatg

SEQ ID NO: 3651561 - DNA, 25 bp, Homo sapien
tgtgcgagctgatcctaacgaggta

SEQ ID NO: 3651562 - DNA, 25 bp, Homo sapien
tgcttgcagacaacctctgtgcgag

SEQ ID NO: 3651563 - DNA, 25 bp, Homo sapien
ggtgctgacgtcacccgcagcattg

SEQ ID NO: 3651564 - DNA, 25 bp, Homo sapien
agaggtgctgacgtcacccgcagca

SEQ ID NO: 3651565 - DNA, 25 bp, Homo sapien
tgacgtcacccgcagcattgctctg

SEQ ID NO: 3651566 - DNA, 25 bp, Homo sapien
aggcagaggtgctgacgtcacccgc

SEQ ID NO: 3651567 - DNA, 25 bp, Homo sapien
tcaggaaacacgtgacctagatgag

SEQ ID NO: 3651568 - DNA, 25 bp, Homo sapien
caggaaacacgtgacctagatgagc

SEQ ID NO: 3651569 - DNA, 25 bp, Homo sapien
ggaaacacgtgacctagatgagctt

SEQ ID NO: 3651570 - DNA, 25 bp, Homo sapien
aacacgtgacctagatgagcttcac

SEQ ID NO: 3651571 - DNA, 25 bp, Homo sapien
gccacactgttgatgcaaaacctct

SEQ ID NO: 3651572 - DNA, 25 bp, Homo sapien
tccttggtttgaacttcaaagccac

SEQ ID NO: 3651573 - DNA, 25 bp, Homo sapien
tcaaagccacactgttgatgcaaaa

SEQ ID NO: 3651574 - DNA, 25 bp, Homo sapien
tttgaacttcaaagccacactgttg

SEQ ID NO: 3651575 - DNA, 25 bp, Homo sapien
caagtgaattgtggaaattgagggt

SEQ ID NO: 3651576 - DNA, 25 bp, Homo sapien
gtggcaagggaacgggactcttgaa

SEQ ID NO: 3651577 - DNA, 25 bp, Homo sapien
ggaaattgagggtgcacgtgaaggg

SEQ ID NO: 3651578 - DNA, 25 bp, Homo sapien
gcaagggaacgggactcttgaagat

SEQ ID NO: 3651579 - DNA, 25 bp, Homo sapien
cagcctaacacacaggattaagttg

SEQ ID NO: 3651580 - DNA, 25 bp, Homo sapien
agcctaacacacaggattaagttga

SEQ ID NO: 3651581 - DNA, 25 bp, Homo sapien
gcctaacacacaggattaagttgat

SEQ ID NO: 3651582 - DNA, 25 bp, Homo sapien
acagcctaacacacaggattaagtt

SEQ ID NO: 3651583 - DNA, 25 bp, Homo sapien
gattgatcaccatatatgctcccag

SEQ ID NO: 3651584 - DNA, 25 bp, Homo sapien
tgatgttcccagagtcatgccctcg

SEQ ID NO: 3651585 - DNA, 25 bp, Homo sapien
tgtgaagttctactccaagtgggag

SEQ ID NO: 3651586 - DNA, 25 bp, Homo sapien
tataattcctagtgccggaggtggg

SEQ ID NO: 3651587 - DNA, 25 bp, Homo sapien
agagcatgttcattgacttagccaa

SEQ ID NO: 3651588 - DNA, 25 bp, Homo sapien
gcatgttcattgacttagccaaaaa

SEQ ID NO: 3651589 - DNA, 25 bp, Homo sapien
tgttcattgacttagccaaaaagca

SEQ ID NO: 3651590 - DNA, 25 bp, Homo sapien
ttcattgacttagccaaaaagcaaa

SEQ ID NO: 3651591 - DNA, 25 bp, Homo sapien
tatgatggtaacaagtaaggaagca

SEQ ID NO: 3651592 - DNA, 25 bp, Homo sapien
tgcccataaagtcacaaagagaatg

SEQ ID NO: 3651593 - DNA, 25 bp, Homo sapien
gtgttctaaggctaacattcctgga

SEQ ID NO: 3651594 - DNA, 25 bp, Homo sapien
gttgctattagtcttggtataacca

SEQ ID NO: 3651595 - DNA, 25 bp, Homo sapien
cacaagataatagaactgcagagca

SEQ ID NO: 3651596 - DNA, 25 bp, Homo sapien
taagacccagatagtgaataaggca

SEQ ID NO: 3651597 - DNA, 25 bp, Homo sapien
gttgcaggatacatgttcaaaacac

SEQ ID NO: 3651598 - DNA, 25 bp, Homo sapien
gcaaagcaggcatatccactctcac

SEQ ID NO: 3651599 - DNA, 25 bp, Homo sapien
ccaaaactgcctcaagaaaatttgg

SEQ ID NO: 3651600 - DNA, 25 bp, Homo sapien
gcaaatttaccaaaactgcctcaag

SEQ ID NO: 3651601 - DNA, 25 bp, Homo sapien
tccagatctagatcacttcactggg

SEQ ID NO: 3651602 - DNA, 25 bp, Homo sapien
atttggcagccctatttaaattaat

SEQ ID NO: 3651603 - DNA, 25 bp, Homo sapien
tgtcaaggacaacacaacagtcgaa

SEQ ID NO: 3651604 - DNA, 25 bp, Homo sapien
agtagacatcaaaaggctagactgg

SEQ ID NO: 3651605 - DNA, 25 bp, Homo sapien
aatattaacatctctacctagcagc

SEQ ID NO: 3651606 - DNA, 25 bp, Homo sapien
gctagactggctagactgatatcag

SEQ ID NO: 3651607 - DNA, 25 bp, Homo sapien
ccacgcgggatgcttccatttagga

SEQ ID NO: 3651608 - DNA, 25 bp, Homo sapien
tcctccttcggaactagactcaaag

SEQ ID NO: 3651609 - DNA, 25 bp, Homo sapien
aagccttgcactggctctgctgtgg

SEQ ID NO: 3651610 - DNA, 25 bp, Homo sapien
gagaccccagaaccacatcttagat

SEQ ID NO: 3651611 - DNA, 25 bp, Homo sapien
gcctgtcgtttcaattactcaggag

SEQ ID NO: 3651612 - DNA, 25 bp, Homo sapien
aatgttagcaatacaaatactaagg

SEQ ID NO: 3651613 - DNA, 25 bp, Homo sapien
ggaagcttgtgcctgtcgtttcaat

SEQ ID NO: 3651614 - DNA, 25 bp, Homo sapien
atcatcctggagtgtaaatgttagc

SEQ ID NO: 3651615 - DNA, 25 bp, Homo sapien
gttctgaggtacacatggaggtttg

SEQ ID NO: 3651616 - DNA, 25 bp, Homo sapien
gattgtatgcctttgggtatgtccc

SEQ ID NO: 3651617 - DNA, 25 bp, Homo sapien
ggaggtggcctccaactgtatccat

SEQ ID NO: 3651618 - DNA, 25 bp, Homo sapien
tgaggaatcgccatgctgctctccg

SEQ ID NO: 3651619 - DNA, 25 bp, Homo sapien
ggattatgggggtaagccacctctg

SEQ ID NO: 3651620 - DNA, 25 bp, Homo sapien
cctctgtgggctaacttttaatgcc

SEQ ID NO: 3651621 - DNA, 25 bp, Homo sapien
ctaacttttaatgcccaaactacag

SEQ ID NO: 3651622 - DNA, 25 bp, Homo sapien
gggtaagccacctctgtgggctaac

SEQ ID NO: 3651623 - DNA, 25 bp, Homo sapien
tgaccaatggagtatgttagcaaac

SEQ ID NO: 3651624 - DNA, 25 bp, Homo sapien
ctgggtccaagtgtaaatgtatatt

SEQ ID NO: 3651625 - DNA, 25 bp, Homo sapien
tgattagcctgtggcgacaacccat

SEQ ID NO: 3651626 - DNA, 25 bp, Homo sapien
taggtatacaagctacatccaggct

SEQ ID NO: 3651627 - DNA, 25 bp, Homo sapien
ccaactggccttaggtaagtgtttg

SEQ ID NO: 3651628 - DNA, 25 bp, Homo sapien
tacatttcccatcccagatctggag

SEQ ID NO: 3651629 - DNA, 25 bp, Homo sapien
cccttaaagcactggaatcacaggc

SEQ ID NO: 3651630 - DNA, 25 bp, Homo sapien
tagagataacaaactgctcactgtc

SEQ ID NO: 3651631 - DNA, 25 bp, Homo sapien
gaagttgctgtctggtaagtagaca

SEQ ID NO: 3651632 - DNA, 25 bp, Homo sapien
tgctgtctggtaagtagacagtagc

SEQ ID NO: 3651633 - DNA, 25 bp, Homo sapien
gctgtctggtaagtagacagtagct

SEQ ID NO: 3651634 - DNA, 25 bp, Homo sapien
tgaagaagttgctgtctggtaagta

SEQ ID NO: 3651635 - DNA, 25 bp, Homo sapien
agtgggtggtggcggtggacagaca

SEQ ID NO: 3651636 - DNA, 25 bp, Homo sapien
gggtggtggcggtggacagacaggg

SEQ ID NO: 3651637 - DNA, 25 bp, Homo sapien
tgtgtccagagtgggtggtggcggt

SEQ ID NO: 3651638 - DNA, 25 bp, Homo sapien
gtggcggtggacagacaggggctca

SEQ ID NO: 3651639 - DNA, 25 bp, Homo sapien
aagatgacctatgggctcctacaac

SEQ ID NO: 3651640 - DNA, 25 bp, Homo sapien
gagacgaccctccaagatgacctat

SEQ ID NO: 3651641 - DNA, 25 bp, Homo sapien
tgttttttctcagctccctccgtct

SEQ ID NO: 3651642 - DNA, 25 bp, Homo sapien
tataagcaactgagaggagattcct

SEQ ID NO: 3651643 - DNA, 25 bp, Homo sapien
cccagcggcaacctcagccaagtaa

SEQ ID NO: 3651644 - DNA, 25 bp, Homo sapien
ttgtcatccccagcggcaacctcag

SEQ ID NO: 3651645 - DNA, 25 bp, Homo sapien
catccccagcggcaacctcagccaa

SEQ ID NO: 3651646 - DNA, 25 bp, Homo sapien
agtaacggtagtaatctccttccat

SEQ ID NO: 3651647 - DNA, 25 bp, Homo sapien
cagtgtcaggttgtccctcagtaat

SEQ ID NO: 3651648 - DNA, 25 bp, Homo sapien
taattttccactccttctcctgctt

SEQ ID NO: 3651649 - DNA, 25 bp, Homo sapien
ttttccactccttctcctgcttcac

SEQ ID NO: 3651650 - DNA, 25 bp, Homo sapien
ttaattttccactccttctcctgct

SEQ ID NO: 3651651 - DNA, 25 bp, Homo sapien
attttccactccttctcctgcttca

SEQ ID NO: 3651652 - DNA, 25 bp, Homo sapien
tgtgggacagcatggatgacaaatg

SEQ ID NO: 3651653 - DNA, 25 bp, Homo sapien
tgacaaatggtctactgtgtaaatt

SEQ ID NO: 3651654 - DNA, 25 bp, Homo sapien
tttgtgggacagcatggatgacaaa

SEQ ID NO: 3651655 - DNA, 25 bp, Homo sapien
ggatgacaaatggtctactgtgtaa

SEQ ID NO: 3651656 - DNA, 25 bp, Homo sapien
aaaatgagtgtagcaaaaataatga

SEQ ID NO: 3651657 - DNA, 25 bp, Homo sapien
aataggatgagggaaatagtctgtg

SEQ ID NO: 3651658 - DNA, 25 bp, Homo sapien
agtctgtgggatgcaagcaaaggaa

SEQ ID NO: 3651659 - DNA, 25 bp, Homo sapien
tctgtgggatgcaagcaaaggaagc

SEQ ID NO: 3651660 - DNA, 25 bp, Homo sapien
gcaaaggaagcagggtgccttagac

SEQ ID NO: 3651661 - DNA, 25 bp, Homo sapien
tctcacccttatcaagattcactgc

SEQ ID NO: 3651662 - DNA, 25 bp, Homo sapien
ttctcacccttatcaagattcactg

SEQ ID NO: 3651663 - DNA, 25 bp, Homo sapien
gagcaaattcgcatgcagagcagtg

SEQ ID NO: 3651664 - DNA, 25 bp, Homo sapien
cactgggacgaactgtcgtgggact

SEQ ID NO: 3651665 - DNA, 25 bp, Homo sapien
agagcagtgactggagcctatcact

SEQ ID NO: 3651666 - DNA, 25 bp, Homo sapien
gagcctatcacttgctgcgagaccg

SEQ ID NO: 3651667 - DNA, 25 bp, Homo sapien
ttatatgtatcaaagctcataccgc

SEQ ID NO: 3651668 - DNA, 25 bp, Homo sapien
tcataccgcacaatgagctctgagt

SEQ ID NO: 3651669 - DNA, 25 bp, Homo sapien
cacaatgagctctgagttgcaaaag

SEQ ID NO: 3651670 - DNA, 25 bp, Homo sapien
gtatcaaagctcataccgcacaatg

SEQ ID NO: 3651671 - DNA, 25 bp, Homo sapien
aagagaattatctgtgctgaggcag

SEQ ID NO: 3651672 - DNA, 25 bp, Homo sapien
acagtctagtcctctaagagaatta

SEQ ID NO: 3651673 - DNA, 25 bp, Homo sapien
gtgggtgttcccacaggccagtgct

SEQ ID NO: 3651674 - DNA, 25 bp, Homo sapien
gcagagcaaggtgctcagggtggtg

SEQ ID NO: 3651675 - DNA, 25 bp, Homo sapien
cccggtgatagagcctgagctgtga

SEQ ID NO: 3651676 - DNA, 25 bp, Homo sapien
aaatatggacagtttcccggtgata

SEQ ID NO: 3651677 - DNA, 25 bp, Homo sapien
gacagtttcccggtgatagagcctg

SEQ ID NO: 3651678 - DNA, 25 bp, Homo sapien
ctgtgattctctgcaattagatttc

SEQ ID NO: 3651679 - DNA, 25 bp, Homo sapien
ttgaactgccaacaaccccaaacaa

SEQ ID NO: 3651680 - DNA, 25 bp, Homo sapien
gaaggagtcgttcactatttgcata

SEQ ID NO: 3651681 - DNA, 25 bp, Homo sapien
acagtgaaggagtcgttcactattt

SEQ ID NO: 3651682 - DNA, 25 bp, Homo sapien
gtgaaggagtcgttcactatttgca

SEQ ID NO: 3651683 - DNA, 25 bp, Homo sapien
agggaccatccctgaatgacttgtt

SEQ ID NO: 3651684 - DNA, 25 bp, Homo sapien
gggaccatccctgaatgacttgttt

SEQ ID NO: 3651685 - DNA, 25 bp, Homo sapien
cagggaccatccctgaatgacttgt

SEQ ID NO: 3651686 - DNA, 25 bp, Homo sapien
ggaccatccctgaatgacttgtttt

SEQ ID NO: 3651687 - DNA, 25 bp, Homo sapien
tccaggggcacctgcgtcccgcggt

SEQ ID NO: 3651688 - DNA, 25 bp, Homo sapien
ctgcgtacccgcgcgcgctgagcag

SEQ ID NO: 3651689 - DNA, 25 bp, Homo sapien
cgcggtgcccgctgcgtacccgcgc

SEQ ID NO: 3651690 - DNA, 25 bp, Homo sapien
ctgcgtcccgcggtgcccgctgcgt

SEQ ID NO: 3651691 - DNA, 25 bp, Homo sapien
cccgcgctcgcgctgcgctggggag

SEQ ID NO: 3651692 - DNA, 25 bp, Homo sapien
ctgcgcgtgttagttcttggtgagt

SEQ ID NO: 3651693 - DNA, 25 bp, Homo sapien
tgcgcgtgttagttcttggtgagtt

SEQ ID NO: 3651694 - DNA, 25 bp, Homo sapien
cgcgtgttagttcttggtgagtttc

SEQ ID NO: 3651695 - DNA, 25 bp, Homo sapien
cgtgttagttcttggtgagtttcta

SEQ ID NO: 3651696 - DNA, 25 bp, Homo sapien
ctcgccgccgcagtgggcagcggga

SEQ ID NO: 3651697 - DNA, 25 bp, Homo sapien
gctcgccgccgcagtgggcagcggg

SEQ ID NO: 3651698 - DNA, 25 bp, Homo sapien
agactggtcggtgaagaagtcgtcc

SEQ ID NO: 3651699 - DNA, 25 bp, Homo sapien
ccggggaagtgctccagcaacaccg

SEQ ID NO: 3651700 - DNA, 25 bp, Homo sapien
tcgtcctcgtcgaagtacgaagaag

SEQ ID NO: 3651701 - DNA, 25 bp, Homo sapien
tacgaagaaggaaaggcgtctaggc

SEQ ID NO: 3651702 - DNA, 25 bp, Homo sapien
tcgcggtagcagtactcgtggagct

SEQ ID NO: 3651703 - DNA, 25 bp, Homo sapien
ggagctggtggctaaggaactccac

SEQ ID NO: 3651704 - DNA, 25 bp, Homo sapien
tggagctggtggctaaggaactcca

SEQ ID NO: 3651705 - DNA, 25 bp, Homo sapien
gcagcagcaggcacgccccgtcgcg

SEQ ID NO: 3651706 - DNA, 25 bp, Homo sapien
cgccccggcgcacgggtaggccagg

SEQ ID NO: 3651707 - DNA, 25 bp, Homo sapien
ggtaggccaggcacgagggcggcga

SEQ ID NO: 3651708 - DNA, 25 bp, Homo sapien
ccccgtctcgcagcagtagccgccg

SEQ ID NO: 3651709 - DNA, 25 bp, Homo sapien
ggccaggcacgagggcggcgagccg

SEQ ID NO: 3651710 - DNA, 25 bp, Homo sapien
ctcaggccgcgcagccgcgccccgg

SEQ ID NO: 3651711 - DNA, 25 bp, Homo sapien
ctcggagcgcacccgccgccggcgc

SEQ ID NO: 3651712 - DNA, 25 bp, Homo sapien
gcagccgccgctccgctcaggccgc

SEQ ID NO: 3651713 - DNA, 25 bp, Homo sapien
ccgccgctccgctcaggccgcgcag

SEQ ID NO: 3651714 - DNA, 25 bp, Homo sapien
cgccgccgctcgcgcacgttggccg

SEQ ID NO: 3651715 - DNA, 25 bp, Homo sapien
ccgccgctcgcgcacgttggccgcc

SEQ ID NO: 3651716 - DNA, 25 bp, Homo sapien
gccgctcgcgcacgttggccgcctg

SEQ ID NO: 3651717 - DNA, 25 bp, Homo sapien
catgcgccgccgctcgcgcacgttg

SEQ ID NO: 3651718 - DNA, 25 bp, Homo sapien
aggcgcagcgtgtccaccttggaga

SEQ ID NO: 3651719 - DNA, 25 bp, Homo sapien
cagcccctcgaaggcgtcgttgatg

SEQ ID NO: 3651720 - DNA, 25 bp, Homo sapien
ccaccttggagaggcgcttctcgta

SEQ ID NO: 3651721 - DNA, 25 bp, Homo sapien
aggaagttgatgtagccgatggcca

SEQ ID NO: 3651722 - DNA, 25 bp, Homo sapien
cgccgcgcaagggcaggtcggcctg

SEQ ID NO: 3651723 - DNA, 25 bp, Homo sapien
ccaccgccgcgcaagggcaggtcgg

SEQ ID NO: 3651724 - DNA, 25 bp, Homo sapien
accgccgcgcaagggcaggtcggcc

SEQ ID NO: 3651725 - DNA, 25 bp, Homo sapien
cgcgcaagggcaggtcggcctgcac

SEQ ID NO: 3651726 - DNA, 25 bp, Homo sapien
ggtgccccgatggcagatgatgacc

SEQ ID NO: 3651727 - DNA, 25 bp, Homo sapien
gggtgccccgatggcagatgatgac

SEQ ID NO: 3651728 - DNA, 25 bp, Homo sapien
gtcggtccgactgtctgcttggcag

SEQ ID NO: 3651729 - DNA, 25 bp, Homo sapien
gacaatccgtcggtccgactgtctg

SEQ ID NO: 3651730 - DNA, 25 bp, Homo sapien
agcccctccggagccttcgagtgcc

SEQ ID NO: 3651731 - DNA, 25 bp, Homo sapien
gagccttcgagtgcccgaccccttc

SEQ ID NO: 3651732 - DNA, 25 bp, Homo sapien
ctaggggagggaggccataatcagg

SEQ ID NO: 3651733 - DNA, 25 bp, Homo sapien
taggggagggaggccataatcaggg

SEQ ID NO: 3651734 - DNA, 25 bp, Homo sapien
gggagggaggccataatcagggtcg

SEQ ID NO: 3651735 - DNA, 25 bp, Homo sapien
ggggagggaggccataatcagggtc

SEQ ID NO: 3651736 - DNA, 25 bp, Homo sapien
cgttttctatgttgttgaaggaaga

SEQ ID NO: 3651737 - DNA, 25 bp, Homo sapien
tcagtccatgagagagagtgtcctg

SEQ ID NO: 3651738 - DNA, 25 bp, Homo sapien
cacaaactcaaatggtggttcgttt

SEQ ID NO: 3651739 - DNA, 25 bp, Homo sapien
ccagactttggctgttcggataata

SEQ ID NO: 3651740 - DNA, 25 bp, Homo sapien
taaacagttgattgccattcgaaaa

SEQ ID NO: 3651741 - DNA, 25 bp, Homo sapien
cgttttctggccagagttctcccaa

SEQ ID NO: 3651742 - DNA, 25 bp, Homo sapien
gagttcaggaaaatcataggctatt

SEQ ID NO: 3651743 - DNA, 25 bp, Homo sapien
cgcttagaaataaaccatatctggc

SEQ ID NO: 3651744 - DNA, 25 bp, Homo sapien
agcctgagttccaggtacctgatgc

SEQ ID NO: 3651745 - DNA, 25 bp, Homo sapien
gcctccgagtggtctctaggctttg

SEQ ID NO: 3651746 - DNA, 25 bp, Homo sapien
aagaccctggattttgttgagtggc

SEQ ID NO: 3651747 - DNA, 25 bp, Homo sapien
gctttggcaccgtagcctgtcccat

SEQ ID NO: 3651748 - DNA, 25 bp, Homo sapien
ctaggctttggcaccgtagcctgtc

SEQ ID NO: 3651749 - DNA, 25 bp, Homo sapien
tcccgggagccttgcgacccagaat

SEQ ID NO: 3651750 - DNA, 25 bp, Homo sapien
cgggctcgcggcctcgctttaattg

SEQ ID NO: 3651751 - DNA, 25 bp, Homo sapien
gacccagaatctccgcgtgtctggc

SEQ ID NO: 3651752 - DNA, 25 bp, Homo sapien
cggcctcgctttaattgctcttgga

SEQ ID NO: 3651753 - DNA, 25 bp, Homo sapien
gagaccctggtgttttgcatgctca

SEQ ID NO: 3651754 - DNA, 25 bp, Homo sapien
gagtgacaagatagagaccctggtg

SEQ ID NO: 3651755 - DNA, 25 bp, Homo sapien
tgcatgctcagctcggttcttccgc

SEQ ID NO: 3651756 - DNA, 25 bp, Homo sapien
tgctcagctcggttcttccgcttca

SEQ ID NO: 3651757 - DNA, 25 bp, Homo sapien
agtcccaggagcgggctcggcagga

SEQ ID NO: 3651758 - DNA, 25 bp, Homo sapien
agagtcccaggagcgggctcggcag

SEQ ID NO: 3651759 - DNA, 25 bp, Homo sapien
cagagtcccaggagcgggctcggca

SEQ ID NO: 3651760 - DNA, 25 bp, Homo sapien
ccagagtcccaggagcgggctcggc

SEQ ID NO: 3651761 - DNA, 25 bp, Homo sapien
cggaaccctgggaacgcggagcagc

SEQ ID NO: 3651762 - DNA, 25 bp, Homo sapien
aagtttggcgaggtttgccctggca

SEQ ID NO: 3651763 - DNA, 25 bp, Homo sapien
gaaccctgggaacgcggagcagcgg

SEQ ID NO: 3651764 - DNA, 25 bp, Homo sapien
tcgtccgactccaccccggctctcc

SEQ ID NO: 3651765 - DNA, 25 bp, Homo sapien
ttccagcctcaagcgaagacaggca

SEQ ID NO: 3651766 - DNA, 25 bp, Homo sapien
catgcgcaaagatagcagaactgcg

SEQ ID NO: 3651767 - DNA, 25 bp, Homo sapien
agagcaaggcgtcgggcagccactt

SEQ ID NO: 3651768 - DNA, 25 bp, Homo sapien
aggcagcacaggagtcccgaatgcc

SEQ ID NO: 3651769 - DNA, 25 bp, Homo sapien
gcactagccatggttattaggcact

SEQ ID NO: 3651770 - DNA, 25 bp, Homo sapien
ccatggttattaggcacttctacac

SEQ ID NO: 3651771 - DNA, 25 bp, Homo sapien
gggagcgcgcactagccatggttat

SEQ ID NO: 3651772 - DNA, 25 bp, Homo sapien
ctcgccattggggagcgcgcactag

SEQ ID NO: 3651773 - DNA, 25 bp, Homo sapien
ccaactcggtagaagaaggccagta

SEQ ID NO: 3651774 - DNA, 25 bp, Homo sapien
taattcagtcaaaggcacatccctg

SEQ ID NO: 3651775 - DNA, 25 bp, Homo sapien
ggtcagtgtcgttgtgtttggtcca

SEQ ID NO: 3651776 - DNA, 25 bp, Homo sapien
caagacgtctttatggctaattcag

SEQ ID NO: 3651777 - DNA, 25 bp, Homo sapien
tctgactccgcctcctcctctgtcc

SEQ ID NO: 3651778 - DNA, 25 bp, Homo sapien
ttagctctctgactccgcctcctcc

SEQ ID NO: 3651779 - DNA, 25 bp, Homo sapien
tgactccgcctcctcctctgtcctc

SEQ ID NO: 3651780 - DNA, 25 bp, Homo sapien
actccgcctcctcctctgtcctcac

SEQ ID NO: 3651781 - DNA, 25 bp, Homo sapien
caaacaactctagatgacaatgata

SEQ ID NO: 3651782 - DNA, 25 bp, Homo sapien
ctgcagataatctatcaaacaactc

SEQ ID NO: 3651783 - DNA, 25 bp, Homo sapien
ttgctgttgcaaagagagaactttg

SEQ ID NO: 3651784 - DNA, 25 bp, Homo sapien
tgctgttgcaaagagagaactttgg

SEQ ID NO: 3651785 - DNA, 25 bp, Homo sapien
aatttaacaggcaggcattgttctg

SEQ ID NO: 3651786 - DNA, 25 bp, Homo sapien
ggaaaacttgctttcgaatgcccca

SEQ ID NO: 3651787 - DNA, 25 bp, Homo sapien
ttgaaacaacccagttaaacagcaa

SEQ ID NO: 3651788 - DNA, 25 bp, Homo sapien
acaagaatcttcaacttgaccttga

SEQ ID NO: 3651789 - DNA, 25 bp, Homo sapien
tgtttgctgaatttagctcaagagg

SEQ ID NO: 3651790 - DNA, 25 bp, Homo sapien
tcctaagccttgtttgctgaattta

SEQ ID NO: 3651791 - DNA, 25 bp, Homo sapien
gccttgtttgctgaatttagctcaa

SEQ ID NO: 3651792 - DNA, 25 bp, Homo sapien
gctgaatttagctcaagaggatgaa

SEQ ID NO: 3651793 - DNA, 25 bp, Homo sapien
tgagcagatatgaaagacgacttaa

SEQ ID NO: 3651794 - DNA, 25 bp, Homo sapien
aaaattagtacacactttgagcaga

SEQ ID NO: 3651795 - DNA, 25 bp, Homo sapien
aagacgacttaatctctctggcatt

SEQ ID NO: 3651796 - DNA, 25 bp, Homo sapien
tagtacacactttgagcagatatga

SEQ ID NO: 3651797 - DNA, 25 bp, Homo sapien
tggtttaggggagtgtgttcactgc

SEQ ID NO: 3651798 - DNA, 25 bp, Homo sapien
ctgcttcccactggaataaagtcaa

SEQ ID NO: 3651799 - DNA, 25 bp, Homo sapien
agagtggccacaatttctttgcctt

SEQ ID NO: 3651800 - DNA, 25 bp, Homo sapien
aagtcaaagttgagatgtgtttggc

SEQ ID NO: 3651801 - DNA, 25 bp, Homo sapien
agctgactttattttaaaatgcctt

SEQ ID NO: 3651802 - DNA, 25 bp, Homo sapien
tagctgactttattttaaaatgcct

SEQ ID NO: 3651803 - DNA, 25 bp, Homo sapien
gctaggttgtaatgagttctatgtc

SEQ ID NO: 3651804 - DNA, 25 bp, Homo sapien
aaagaggtccgcagaactagctagg

SEQ ID NO: 3651805 - DNA, 25 bp, Homo sapien
tttctgccgcggaacaaagaggtcc

SEQ ID NO: 3651806 - DNA, 25 bp, Homo sapien
ggtgaaaaatgacgcatgctttagc

SEQ ID NO: 3651807 - DNA, 25 bp, Homo sapien
cagccatttccaccaaccaatcaac

SEQ ID NO: 3651808 - DNA, 25 bp, Homo sapien
ctgccagccatttccaccaaccaat

SEQ ID NO: 3651809 - DNA, 25 bp, Homo sapien
agccatttccaccaaccaatcaacc

SEQ ID NO: 3651810 - DNA, 25 bp, Homo sapien
tgccagccatttccaccaaccaatc

SEQ ID NO: 3651811 - DNA, 25 bp, Homo sapien
attgtgcaaaccattccattggttt

SEQ ID NO: 3651812 - DNA, 25 bp, Homo sapien
tgtactgctatgtgaatagcattgt

SEQ ID NO: 3651813 - DNA, 25 bp, Homo sapien
tttctgtactgctatgtgaatagca

SEQ ID NO: 3651814 - DNA, 25 bp, Homo sapien
actgctatgtgaatagcattgtgca

SEQ ID NO: 3651815 - DNA, 25 bp, Homo sapien
cttttgatgtgaacctgcttgaggg

SEQ ID NO: 3651816 - DNA, 25 bp, Homo sapien
tgtgaacctgcttgagggaaatcag

SEQ ID NO: 3651817 - DNA, 25 bp, Homo sapien
tccttccttttgatgtgaacctgct

SEQ ID NO: 3651818 - DNA, 25 bp, Homo sapien
gggaaatcagaacctgcttgctctc

SEQ ID NO: 3651819 - DNA, 25 bp, Homo sapien
ggtaccatattaatattcctttcag

SEQ ID NO: 3651820 - DNA, 25 bp, Homo sapien
gacatccttgtatatgaaaggtacc

SEQ ID NO: 3651821 - DNA, 25 bp, Homo sapien
caagtgtacccttaactgagtttga

SEQ ID NO: 3651822 - DNA, 25 bp, Homo sapien
aactgagtttgacatgacatccttg

SEQ ID NO: 3651823 - DNA, 25 bp, Homo sapien
ctgatgccgcggtgatgccgctgtt

SEQ ID NO: 3651824 - DNA, 25 bp, Homo sapien
tgttctgcctgatgggctctgggcc

SEQ ID NO: 3651825 - DNA, 25 bp, Homo sapien
aggcggcaatccacatgcatccacc

SEQ ID NO: 3651826 - DNA, 25 bp, Homo sapien
ctgagccaccctctgttctgcctga

SEQ ID NO: 3651827 - DNA, 25 bp, Homo sapien
cataagcattttgtttctcttccca

SEQ ID NO: 3651828 - DNA, 25 bp, Homo sapien
tcttcccagtgtcctctttgccttt

SEQ ID NO: 3651829 - DNA, 25 bp, Homo sapien
tcacataagcattttgtttctcttc

SEQ ID NO: 3651830 - DNA, 25 bp, Homo sapien
tcactcacataagcattttgtttct

SEQ ID NO: 3651831 - DNA, 25 bp, Homo sapien
tagtaaaaccatgcaatagcccctg

SEQ ID NO: 3651832 - DNA, 25 bp, Homo sapien
cagaaggacaatatggacgagcaaa

SEQ ID NO: 3651833 - DNA, 25 bp, Homo sapien
ggagtacagaaacccaacagacagt

SEQ ID NO: 3651834 - DNA, 25 bp, Homo sapien
gcagagtggtttacagtcctggacc

SEQ ID NO: 3651835 - DNA, 25 bp, Homo sapien
tgcagtcttctatccaggtcccaaa

SEQ ID NO: 3651836 - DNA, 25 bp, Homo sapien
gagtagacgttctcctaatcttcca

SEQ ID NO: 3651837 - DNA, 25 bp, Homo sapien
gggaccatggtcagtgagcctgcca

SEQ ID NO: 3651838 - DNA, 25 bp, Homo sapien
gaagcaatttctgggtttgtagctg

SEQ ID NO: 3651839 - DNA, 25 bp, Homo sapien
gctgataagattgcctccaggattg

SEQ ID NO: 3651840 - DNA, 25 bp, Homo sapien
cttttgggtccctaagctgataaga

SEQ ID NO: 3651841 - DNA, 25 bp, Homo sapien
ttgagtagggttgcagccgagttac

SEQ ID NO: 3651842 - DNA, 25 bp, Homo sapien
tgcatttggatgagcagacacttcc

SEQ ID NO: 3651843 - DNA, 25 bp, Homo sapien
tgaagtttgaggaccgactgaaaga

SEQ ID NO: 3651844 - DNA, 25 bp, Homo sapien
gaagtttgaggaccgactgaaagag

SEQ ID NO: 3651845 - DNA, 25 bp, Homo sapien
gctgaagtttgaggaccgactgaaa

SEQ ID NO: 3651846 - DNA, 25 bp, Homo sapien
ctgaagtttgaggaccgactgaaag

SEQ ID NO: 3651847 - DNA, 25 bp, Homo sapien
gggttcccgactccgactcaggaga

SEQ ID NO: 3651848 - DNA, 25 bp, Homo sapien
tcgccatggcaacggacgccgggtt

SEQ ID NO: 3651849 - DNA, 25 bp, Homo sapien
catggcaacggacgccgggttcccg

SEQ ID NO: 3651850 - DNA, 25 bp, Homo sapien
acgtccggggctgcaatggcgaact

SEQ ID NO: 3651851 - DNA, 25 bp, Homo sapien
tatttacgggggtgcagctttcctc

SEQ ID NO: 3651852 - DNA, 25 bp, Homo sapien
ctttcctctggggtatcgcagcagc

SEQ ID NO: 3651853 - DNA, 25 bp, Homo sapien
ggctgtgggagtcttgtggggaagc

SEQ ID NO: 3651854 - DNA, 25 bp, Homo sapien
tctggggtatcgcagcagcctccag

SEQ ID NO: 3651855 - DNA, 25 bp, Homo sapien
aatattttgtccaggaacgcctacg

SEQ ID NO: 3651856 - DNA, 25 bp, Homo sapien
tggagacagcttattaggcagcctg

SEQ ID NO: 3651857 - DNA, 25 bp, Homo sapien
tcttatgatggccttggtccgggat

SEQ ID NO: 3651858 - DNA, 25 bp, Homo sapien
ggatcgcagggctcattatgtcatg

SEQ ID NO: 3651859 - DNA, 25 bp, Homo sapien
cacagtttaagcatattgagcacca

SEQ ID NO: 3651860 - DNA, 25 bp, Homo sapien
cctgtgtaccggatgaaaggctata

SEQ ID NO: 3651861 - DNA, 25 bp, Homo sapien
gggacccactttctagcagtacaga

SEQ ID NO: 3651862 - DNA, 25 bp, Homo sapien
tctcagatagggaacggcaggagcc

SEQ ID NO: 3651863 - DNA, 25 bp, Homo sapien
aattcatgaaccctctaatctatta

SEQ ID NO: 3651864 - DNA, 25 bp, Homo sapien
taatgggatttacgttttaacatga

SEQ ID NO: 3651865 - DNA, 25 bp, Homo sapien
gaccagagcctttatgacccaatca

SEQ ID NO: 3651866 - DNA, 25 bp, Homo sapien
gccactagtgcctctcctctgataa

SEQ ID NO: 3651867 - DNA, 25 bp, Homo sapien
tacgagaacagcaacctgctaaaag

SEQ ID NO: 3651868 - DNA, 25 bp, Homo sapien
aatcgtagctactaaactgtttcgg

SEQ ID NO: 3651869 - DNA, 25 bp, Homo sapien
aaagtttgagccgtatttctacgag

SEQ ID NO: 3651870 - DNA, 25 bp, Homo sapien
aaagcattgccagaaagtcagaccc

SEQ ID NO: 3651871 - DNA, 25 bp, Homo sapien
agatgggtgtgacggtcaagaaaca

SEQ ID NO: 3651872 - DNA, 25 bp, Homo sapien
agggagagatgggtgtgacggtcaa

SEQ ID NO: 3651873 - DNA, 25 bp, Homo sapien
caagaaacagtccagagactccagt

SEQ ID NO: 3651874 - DNA, 25 bp, Homo sapien
tgacggtcaagaaacagtccagaga

SEQ ID NO: 3651875 - DNA, 25 bp, Homo sapien
gctttctattgtaattcgaaacaac

SEQ ID NO: 3651876 - DNA, 25 bp, Homo sapien
cctgcagctttctattgtaattcga

SEQ ID NO: 3651877 - DNA, 25 bp, Homo sapien
actatattaggcatgtgtttgtgtg

SEQ ID NO: 3651878 - DNA, 25 bp, Homo sapien
taattcgaaacaactatattaggca

SEQ ID NO: 3651879 - DNA, 25 bp, Homo sapien
catttctccagcctaactgcagagt

SEQ ID NO: 3651880 - DNA, 25 bp, Homo sapien
tcatttctccagcctaactgcagag

SEQ ID NO: 3651881 - DNA, 25 bp, Homo sapien
cctaactgcagagttgaatgcagct

SEQ ID NO: 3651882 - DNA, 25 bp, Homo sapien
taactgcagagttgaatgcagcttt

SEQ ID NO: 3651883 - DNA, 25 bp, Homo sapien
tgcctgccttggcctcccaaagtgc

SEQ ID NO: 3651884 - DNA, 25 bp, Homo sapien
cgtgcaccaacacgcccagctaatt

SEQ ID NO: 3651885 - DNA, 25 bp, Homo sapien
aagtagccagaactacaggcgtgca

SEQ ID NO: 3651886 - DNA, 25 bp, Homo sapien
ctgcctgccttggcctcccaaagtg

SEQ ID NO: 3651887 - DNA, 25 bp, Homo sapien
agcacttcacgcttaactctttcat

SEQ ID NO: 3651888 - DNA, 25 bp, Homo sapien
cttggatttcatcactgatttgttg

SEQ ID NO: 3651889 - DNA, 25 bp, Homo sapien
gtgcatgaagcacttcacgcttaac

SEQ ID NO: 3651890 - DNA, 25 bp, Homo sapien
gagcatctgttgctctgtgcatgaa

SEQ ID NO: 3651891 - DNA, 25 bp, Homo sapien
tatgccatttggcaaatatctggct

SEQ ID NO: 3651892 - DNA, 25 bp, Homo sapien
gagtccgctagtggattctcttgcc

SEQ ID NO: 3651893 - DNA, 25 bp, Homo sapien
aaaccaactttgcacctctgaccta

SEQ ID NO: 3651894 - DNA, 25 bp, Homo sapien
tgccttgctaagacaaaaccaactt

SEQ ID NO: 3651895 - DNA, 25 bp, Homo sapien
agcttgcgtggcaggaaagcttccg

SEQ ID NO: 3651896 - DNA, 25 bp, Homo sapien
tgggcactggtttctgcgctgcgcc

SEQ ID NO: 3651897 - DNA, 25 bp, Homo sapien
ggcgagttagcatgctcggaaagct

SEQ ID NO: 3651898 - DNA, 25 bp, Homo sapien
gcatgctcggaaagcttgcgtggca

SEQ ID NO: 3651899 - DNA, 25 bp, Homo sapien
gaatagagatgagcgaaaggcagcc

SEQ ID NO: 3651900 - DNA, 25 bp, Homo sapien
ccaacggccccagaatagagatgag

SEQ ID NO: 3651901 - DNA, 25 bp, Homo sapien
aaaggcagccggccgccgcgagtca

SEQ ID NO: 3651902 - DNA, 25 bp, Homo sapien
agcagccgcgaatagcgcccgggtc

SEQ ID NO: 3651903 - DNA, 25 bp, Homo sapien
cgggaacgggatcgggcccgtgcag

SEQ ID NO: 3651904 - DNA, 25 bp, Homo sapien
gtggacgtgtagtgcggcggcagcg

SEQ ID NO: 3651905 - DNA, 25 bp, Homo sapien
ccagggcccgcacggtgatctgtgc

SEQ ID NO: 3651906 - DNA, 25 bp, Homo sapien
tgatctgtgcggtggacgtgtagtg

SEQ ID NO: 3651907 - DNA, 25 bp, Homo sapien
cggggcagtcgggccgcagcagctc

SEQ ID NO: 3651908 - DNA, 25 bp, Homo sapien
tcggggcagtcgggccgcagcagct

SEQ ID NO: 3651909 - DNA, 25 bp, Homo sapien
gatcgggcccctcccgtgtcgcgtc

SEQ ID NO: 3651910 - DNA, 25 bp, Homo sapien
tcagtcggaagttccgatcgggccc

SEQ ID NO: 3651911 - DNA, 25 bp, Homo sapien
gccaagtgctcttcgccccacggac

SEQ ID NO: 3651912 - DNA, 25 bp, Homo sapien
cctggcggtgctcgctcagtcggaa

SEQ ID NO: 3651913 - DNA, 25 bp, Homo sapien
gcgtcgcagcgatcgccgcccctct

SEQ ID NO: 3651914 - DNA, 25 bp, Homo sapien
ccaccgggcgcgtcgcagcgatcgc

SEQ ID NO: 3651915 - DNA, 25 bp, Homo sapien
caccgggcgcgtcgcagcgatcgcc

SEQ ID NO: 3651916 - DNA, 25 bp, Homo sapien
gggcgcgtcgcagcgatcgccgccc

SEQ ID NO: 3651917 - DNA, 25 bp, Homo sapien
tagatttggcaagttcttcgtcgcg

SEQ ID NO: 3651918 - DNA, 25 bp, Homo sapien
tcatggtagacaccgtgggactctc

SEQ ID NO: 3651919 - DNA, 25 bp, Homo sapien
caggtatagggccagcttctcgtct

SEQ ID NO: 3651920 - DNA, 25 bp, Homo sapien
tgacagctcggtagaggcagttgcc

SEQ ID NO: 3651921 - DNA, 25 bp, Homo sapien
tctctggatttacgcctgaaagctg

SEQ ID NO: 3651922 - DNA, 25 bp, Homo sapien
gcaggaggcttatcttgtcacagag

SEQ ID NO: 3651923 - DNA, 25 bp, Homo sapien
cgtcatagatgaaggtacaccagtt

SEQ ID NO: 3651924 - DNA, 25 bp, Homo sapien
gaaacatcatttaggtgcccagcaa

SEQ ID NO: 3651925 - DNA, 25 bp, Homo sapien
cagacttatcctttgaaattactca

SEQ ID NO: 3651926 - DNA, 25 bp, Homo sapien
tgtgataatttaggaaacctctcta

SEQ ID NO: 3651927 - DNA, 25 bp, Homo sapien
ctctattgctgtggcatctttatgg

SEQ ID NO: 3651928 - DNA, 25 bp, Homo sapien
gattagcctatcctcttcatgtgat

SEQ ID NO: 3651929 - DNA, 25 bp, Homo sapien
tcagagtccagcagaaattgaacca

SEQ ID NO: 3651930 - DNA, 25 bp, Homo sapien
ttggctgagagtcagagtccagcag

SEQ ID NO: 3651931 - DNA, 25 bp, Homo sapien
catctggtttggctggctctcctag

SEQ ID NO: 3651932 - DNA, 25 bp, Homo sapien
aggaaaacagaaagatcatctggtt

SEQ ID NO: 3651933 - DNA, 25 bp, Homo sapien
ggcttcttaggcccgcctggaagaa

SEQ ID NO: 3651934 - DNA, 25 bp, Homo sapien
cgcctggaagaagagcctagtgatt

SEQ ID NO: 3651935 - DNA, 25 bp, Homo sapien
tcacctatagaagtggcttcttagg

SEQ ID NO: 3651936 - DNA, 25 bp, Homo sapien
cctggaagaagagcctagtgatttt

SEQ ID NO: 3651937 - DNA, 25 bp, Homo sapien
cagaggaacccatgtatgtaggagc

SEQ ID NO: 3651938 - DNA, 25 bp, Homo sapien
cctgcgacgagagagaggtacctga

SEQ ID NO: 3651939 - DNA, 25 bp, Homo sapien
caggattggtaagatgctacccgca

SEQ ID NO: 3651940 - DNA, 25 bp, Homo sapien
aattgttccacgtgtacagagggct

SEQ ID NO: 3651941 - DNA, 25 bp, Homo sapien
gaaattgccctcaagcactgatgag

SEQ ID NO: 3651942 - DNA, 25 bp, Homo sapien
agtcttggcaaagcagggtagccca

SEQ ID NO: 3651943 - DNA, 25 bp, Homo sapien
gaaagccccaggtggtgaaattgcc

SEQ ID NO: 3651944 - DNA, 25 bp, Homo sapien
tactgatggatgtgccactagcagg

SEQ ID NO: 3651945 - DNA, 25 bp, Homo sapien
tctttctgacaactgccagccgctc

SEQ ID NO: 3651946 - DNA, 25 bp, Homo sapien
attgaccatccaggccttctttctg

SEQ ID NO: 3651947 - DNA, 25 bp, Homo sapien
gattgaccatccaggccttctttct

SEQ ID NO: 3651948 - DNA, 25 bp, Homo sapien
catcggtacaaggagattgaccatc

SEQ ID NO: 3651949 - DNA, 25 bp, Homo sapien
cttggacaggttgaggtcgccaaat

SEQ ID NO: 3651950 - DNA, 25 bp, Homo sapien
aagacttggacaggttgaggtcgcc

SEQ ID NO: 3651951 - DNA, 25 bp, Homo sapien
gacttggacaggttgaggtcgccaa

SEQ ID NO: 3651952 - DNA, 25 bp, Homo sapien
gacaggttgaggtcgccaaatttcc

SEQ ID NO: 3651953 - DNA, 25 bp, Homo sapien
gaataaatccagagaaccggttcat

SEQ ID NO: 3651954 - DNA, 25 bp, Homo sapien
cccaggaactcaaagatggagcagc

SEQ ID NO: 3651955 - DNA, 25 bp, Homo sapien
ctagaataaatccagagaaccggtt

SEQ ID NO: 3651956 - DNA, 25 bp, Homo sapien
ttgactagaataaatccagagaacc

SEQ ID NO: 3651957 - DNA, 25 bp, Homo sapien
tttcttaacaaaagctcagggagcc

SEQ ID NO: 3651958 - DNA, 25 bp, Homo sapien
ctgcttttcttaacaaaagctcagg

SEQ ID NO: 3651959 - DNA, 25 bp, Homo sapien
catgccgtcaggatctgggtgccct

SEQ ID NO: 3651960 - DNA, 25 bp, Homo sapien
cacatgccgtcaggatctgggtgcc

SEQ ID NO: 3651961 - DNA, 25 bp, Homo sapien
ttttactgttaacaaatcttgacat

SEQ ID NO: 3651962 - DNA, 25 bp, Homo sapien
tttactgttaacaaatcttgacatt

SEQ ID NO: 3651963 - DNA, 25 bp, Homo sapien
actgttaacaaatcttgacattttc

SEQ ID NO: 3651964 - DNA, 25 bp, Homo sapien
tactgttaacaaatcttgacatttt

SEQ ID NO: 3651965 - DNA, 25 bp, Homo sapien
ccacaggttgtggaagcaagccctg

SEQ ID NO: 3651966 - DNA, 25 bp, Homo sapien
ccacaacaaacggtggaaggaatgt

SEQ ID NO: 3651967 - DNA, 25 bp, Homo sapien
ttcagtggccacaggttgtggaagc

SEQ ID NO: 3651968 - DNA, 25 bp, Homo sapien
tggaaggaatgtgaccttggcaggg

SEQ ID NO: 3651969 - DNA, 25 bp, Homo sapien
agtatcagagatgtggagtagtaac

SEQ ID NO: 3651970 - DNA, 25 bp, Homo sapien
gaactaacggacatccatcattgga

SEQ ID NO: 3651971 - DNA, 25 bp, Homo sapien
tgtggagtagtaactcagcttgaca

SEQ ID NO: 3651972 - DNA, 25 bp, Homo sapien
tgcaaaaacagcatcagtatcagag

SEQ ID NO: 3651973 - DNA, 25 bp, Homo sapien
agttgggcagaactctgtagagtgc

SEQ ID NO: 3651974 - DNA, 25 bp, Homo sapien
gctgcttgtttggacacagttgggc

SEQ ID NO: 3651975 - DNA, 25 bp, Homo sapien
ctcttggatggatctaacctctttg

SEQ ID NO: 3651976 - DNA, 25 bp, Homo sapien
ctgctgcagaaaagtctcttggatg

SEQ ID NO: 3651977 - DNA, 25 bp, Homo sapien
ggccttcctctattgttcagttcac

SEQ ID NO: 3651978 - DNA, 25 bp, Homo sapien
tatctgtgcaaggtgagcagccgtt

SEQ ID NO: 3651979 - DNA, 25 bp, Homo sapien
gttcacagtagctgcaatagttcat

SEQ ID NO: 3651980 - DNA, 25 bp, Homo sapien
gctttggaataattggccttcctct

SEQ ID NO: 3651981 - DNA, 25 bp, Homo sapien
ggtgtgtaggtcaccttgacacaca

SEQ ID NO: 3651982 - DNA, 25 bp, Homo sapien
ggcaaggtgtgtaggtcaccttgac

SEQ ID NO: 3651983 - DNA, 25 bp, Homo sapien
caaggtgtgtaggtcaccttgacac

SEQ ID NO: 3651984 - DNA, 25 bp, Homo sapien
aaggtgtgtaggtcaccttgacaca

SEQ ID NO: 3651985 - DNA, 25 bp, Homo sapien
ctggatctgaaaggaggaacccagg

SEQ ID NO: 3651986 - DNA, 25 bp, Homo sapien
cctgctgcctggatctgaaaggagg

SEQ ID NO: 3651987 - DNA, 25 bp, Homo sapien
ctgcctggatctgaaaggaggaacc

SEQ ID NO: 3651988 - DNA, 25 bp, Homo sapien
gcctggatctgaaaggaggaaccca

SEQ ID NO: 3651989 - DNA, 25 bp, Homo sapien
gatagccgccacttaattctttgtg

SEQ ID NO: 3651990 - DNA, 25 bp, Homo sapien
ggagaaatacgtatgggtgcaatgt

SEQ ID NO: 3651991 - DNA, 25 bp, Homo sapien
catcacttgcaattggagaaatacg

SEQ ID NO: 3651992 - DNA, 25 bp, Homo sapien
caacaacgagttctccctgcaagat

SEQ ID NO: 3651993 - DNA, 25 bp, Homo sapien
tttcctttctgaatacacggtcatc

SEQ ID NO: 3651994 - DNA, 25 bp, Homo sapien
tcctttctgaatacacggtcatcat

SEQ ID NO: 3651995 - DNA, 25 bp, Homo sapien
ttcctttctgaatacacggtcatca

SEQ ID NO: 3651996 - DNA, 25 bp, Homo sapien
ctttcctttctgaatacacggtcat

SEQ ID NO: 3651997 - DNA, 25 bp, Homo sapien
aataaactcatggaccaaattcact

SEQ ID NO: 3651998 - DNA, 25 bp, Homo sapien
ctcctgctgggtaccctctgttccc

SEQ ID NO: 3651999 - DNA, 25 bp, Homo sapien
aaactcatggaccaaattcactctt

SEQ ID NO: 3652000 - DNA, 25 bp, Homo sapien
tgttccctgatacaccaaacctgaa

SEQ ID NO: 3652001 - DNA, 25 bp, Homo sapien
caaactttctaggattataccaaag

SEQ ID NO: 3652002 - DNA, 25 bp, Homo sapien
tcctctagggccaaactttctagga

SEQ ID NO: 3652003 - DNA, 25 bp, Homo sapien
ggccaaactttctaggattatacca

SEQ ID NO: 3652004 - DNA, 25 bp, Homo sapien
tagggccaaactttctaggattata

SEQ ID NO: 3652005 - DNA, 25 bp, Homo sapien
tacaagctgtgtcaatatcctctgg

SEQ ID NO: 3652006 - DNA, 25 bp, Homo sapien
gtcaatatcctctggtatgtctcac

SEQ ID NO: 3652007 - DNA, 25 bp, Homo sapien
taaatccattacaagctgtgtcaat

SEQ ID NO: 3652008 - DNA, 25 bp, Homo sapien
gaaaaggatgcactaaatccattac

SEQ ID NO: 3652009 - DNA, 25 bp, Homo sapien
tcaggggacaagacgctggcaggtc

SEQ ID NO: 3652010 - DNA, 25 bp, Homo sapien
atctgaggcccagtcatgggtaaag

SEQ ID NO: 3652011 - DNA, 25 bp, Homo sapien
gctaaacacaaggatggggactact

SEQ ID NO: 3652012 - DNA, 25 bp, Homo sapien
gggactactactgaatggggcatat

SEQ ID NO: 3652013 - DNA, 25 bp, Homo sapien
tagcctactcgaagcaaatctccag

SEQ ID NO: 3652014 - DNA, 25 bp, Homo sapien
gaaagcactccgaacaagcgaaagg

SEQ ID NO: 3652015 - DNA, 25 bp, Homo sapien
tgaacctccgccagaagctgggcga

SEQ ID NO: 3652016 - DNA, 25 bp, Homo sapien
gcagagttccttgagctcatcagtg

SEQ ID NO: 3652017 - DNA, 25 bp, Homo sapien
tcccgcttgcttggcgagaagcgcg

SEQ ID NO: 3652018 - DNA, 25 bp, Homo sapien
gccgggtcgtttctgcccgacttgc

SEQ ID NO: 3652019 - DNA, 25 bp, Homo sapien
ggcgggtagcgtgacagtgggtgca

SEQ ID NO: 3652020 - DNA, 25 bp, Homo sapien
aacgactttcaattcacctggaggc

SEQ ID NO: 3652021 - DNA, 25 bp, Homo sapien
agcggcggggcaaccgacgcaaact

SEQ ID NO: 3652022 - DNA, 25 bp, Homo sapien
aaccgacgcaaacttctgctgcact

SEQ ID NO: 3652023 - DNA, 25 bp, Homo sapien
cgacgcaaacttctgctgcacttac

SEQ ID NO: 3652024 - DNA, 25 bp, Homo sapien
gggcaaccgacgcaaacttctgctg

SEQ ID NO: 3652025 - DNA, 25 bp, Homo sapien
tgttgctgggacaattgaatatcca

SEQ ID NO: 3652026 - DNA, 25 bp, Homo sapien
taaagaacacttaacaactcactca

SEQ ID NO: 3652027 - DNA, 25 bp, Homo sapien
tgaaaagatacctaacctcattagt

SEQ ID NO: 3652028 - DNA, 25 bp, Homo sapien
ggaataaatcttaatgaatctgcat

SEQ ID NO: 3652029 - DNA, 25 bp, Homo sapien
ccaactgcctagaggaggatccaca

SEQ ID NO: 3652030 - DNA, 25 bp, Homo sapien
ggaggatccacactgccctttttct

SEQ ID NO: 3652031 - DNA, 25 bp, Homo sapien
aacccaactgcctagaggaggatcc

SEQ ID NO: 3652032 - DNA, 25 bp, Homo sapien
tgcctagaggaggatccacactgcc

SEQ ID NO: 3652033 - DNA, 25 bp, Homo sapien
aattttcctccactactgctatagc

SEQ ID NO: 3652034 - DNA, 25 bp, Homo sapien
gagaattttcctccactactgctat

SEQ ID NO: 3652035 - DNA, 25 bp, Homo sapien
ggagaattttcctccactactgcta

SEQ ID NO: 3652036 - DNA, 25 bp, Homo sapien
gaattttcctccactactgctatag

SEQ ID NO: 3652037 - DNA, 25 bp, Homo sapien
tggcccagaagatctggtgcctcac

SEQ ID NO: 3652038 - DNA, 25 bp, Homo sapien
tgtggtgctcacatctagataaaga

SEQ ID NO: 3652039 - DNA, 25 bp, Homo sapien
ccatattcaagcacacggtattggg

SEQ ID NO: 3652040 - DNA, 25 bp, Homo sapien
aaagagtaagagtcaatagtctcac

SEQ ID NO: 3652041 - DNA, 25 bp, Homo sapien
caagatgttcattgacttggcttat

SEQ ID NO: 3652042 - DNA, 25 bp, Homo sapien
tggcttataatggtagccaagtcaa

SEQ ID NO: 3652043 - DNA, 25 bp, Homo sapien
gcttgctgctgactatcatactgag

SEQ ID NO: 3652044 - DNA, 25 bp, Homo sapien
caagtcaatgaacatcttggcttgc

SEQ ID NO: 3652045 - DNA, 25 bp, Homo sapien
cagttggctctaccaagagttcaca

SEQ ID NO: 3652046 - DNA, 25 bp, Homo sapien
cctctaacatgagggtggattgctc

SEQ ID NO: 3652047 - DNA, 25 bp, Homo sapien
tgatgtgaggtacagcatctgccct

SEQ ID NO: 3652048 - DNA, 25 bp, Homo sapien
taaaaagagacttgcttaagcccat

SEQ ID NO: 3652049 - DNA, 25 bp, Homo sapien
actgccctgcacctgaatggagcac

SEQ ID NO: 3652050 - DNA, 25 bp, Homo sapien
tctgcctgttagactgtgtgagaaa

SEQ ID NO: 3652051 - DNA, 25 bp, Homo sapien
tgagttctagcaaagcttcagtctg

SEQ ID NO: 3652052 - DNA, 25 bp, Homo sapien
gaagacactccttatgtgggtcaca

SEQ ID NO: 3652053 - DNA, 25 bp, Homo sapien
tatgataacaccaaagggacaggcc

SEQ ID NO: 3652054 - DNA, 25 bp, Homo sapien
tatgcctagtgtgaaagggagcccg

SEQ ID NO: 3652055 - DNA, 25 bp, Homo sapien
cccgttaagatagtgtgaaagcctg

SEQ ID NO: 3652056 - DNA, 25 bp, Homo sapien
tgaaggtcagccacactaggttgcc

SEQ ID NO: 3652057 - DNA, 25 bp, Homo sapien
ggaaagccttcattcgtagaaattc

SEQ ID NO: 3652058 - DNA, 25 bp, Homo sapien
gccttcattcgtagaaattcaatca

SEQ ID NO: 3652059 - DNA, 25 bp, Homo sapien
cacatctatatcaactaaaacatac

SEQ ID NO: 3652060 - DNA, 25 bp, Homo sapien
aaagccttcattcgtagaaattcaa

SEQ ID NO: 3652061 - DNA, 25 bp, Homo sapien
tatactgcttattgggacaaaataa

SEQ ID NO: 3652062 - DNA, 25 bp, Homo sapien
tttgcaacgaagaattatactgctt

SEQ ID NO: 3652063 - DNA, 25 bp, Homo sapien
gaagaattatactgcttattgggac

SEQ ID NO: 3652064 - DNA, 25 bp, Homo sapien
tctgtttttgcaacgaagaattata

SEQ ID NO: 3652065 - DNA, 25 bp, Homo sapien
ctaacttatgagtaaggccggatgc

SEQ ID NO: 3652066 - DNA, 25 bp, Homo sapien
tatgttcaatggcacagagtaatgc

SEQ ID NO: 3652067 - DNA, 25 bp, Homo sapien
cacagagtaatgcttcatctggcat

SEQ ID NO: 3652068 - DNA, 25 bp, Homo sapien
taaggccggatgcagtatgttcaat

SEQ ID NO: 3652069 - DNA, 25 bp, Homo sapien
aaagagttttgctcatgggtggtgg

SEQ ID NO: 3652070 - DNA, 25 bp, Homo sapien
ttcttgccatagaaagagttttgct

SEQ ID NO: 3652071 - DNA, 25 bp, Homo sapien
ccactacaggtgttcgatgtttctt

SEQ ID NO: 3652072 - DNA, 25 bp, Homo sapien
ggtgttcgatgtttcttgccataga

SEQ ID NO: 3652073 - DNA, 25 bp, Homo sapien
gcacaatatcgacctactgcaatct

SEQ ID NO: 3652074 - DNA, 25 bp, Homo sapien
cacaatatcgacctactgcaatctc

SEQ ID NO: 3652075 - DNA, 25 bp, Homo sapien
ggcacaatatcgacctactgcaatc

SEQ ID NO: 3652076 - DNA, 25 bp, Homo sapien
ttccacatagctagggaggcttcac

SEQ ID NO: 3652077 - DNA, 25 bp, Homo sapien
agttccacatagctagggaggcttc

SEQ ID NO: 3652078 - DNA, 25 bp, Homo sapien
gttccacatagctagggaggcttca

SEQ ID NO: 3652079 - DNA, 25 bp, Homo sapien
ccaggctgggcaacaaagtgaaacc

SEQ ID NO: 3652080 - DNA, 25 bp, Homo sapien
gcccagatcacgtgactgcactcca

SEQ ID NO: 3652081 - DNA, 25 bp, Homo sapien
agtgagcccagatcacgtgactgca

SEQ ID NO: 3652082 - DNA, 25 bp, Homo sapien
ctccaggctgggcaacaaagtgaaa

SEQ ID NO: 3652083 - DNA, 25 bp, Homo sapien
catgtgcagttacaaataatgcata

SEQ ID NO: 3652084 - DNA, 25 bp, Homo sapien
tttcatgtgcagttacaaataatgc

SEQ ID NO: 3652085 - DNA, 25 bp, Homo sapien
cttgttctgtcttgtccaaaatatg

SEQ ID NO: 3652086 - DNA, 25 bp, Homo sapien
aatatgacctatcttagtaaaattc

SEQ ID NO: 3652087 - DNA, 25 bp, Homo sapien
tagaagtcaggagagtatgcatcat

SEQ ID NO: 3652088 - DNA, 25 bp, Homo sapien
catgttgcatggactaggattttca

SEQ ID NO: 3652089 - DNA, 25 bp, Homo sapien
gacatctagcaatcttactgtgatg

SEQ ID NO: 3652090 - DNA, 25 bp, Homo sapien
ctgtgaagcctagccagaggatttt

SEQ ID NO: 3652091 - DNA, 25 bp, Homo sapien
tctttgtagtcaacgtagttaatca

SEQ ID NO: 3652092 - DNA, 25 bp, Homo sapien
tgctctttgtagtcaacgtagttaa

SEQ ID NO: 3652093 - DNA, 25 bp, Homo sapien
gactgctctttgtagtcaacgtagt

SEQ ID NO: 3652094 - DNA, 25 bp, Homo sapien
actgctctttgtagtcaacgtagtt

SEQ ID NO: 3652095 - DNA, 25 bp, Homo sapien
gagttctcaatggagccgtcacaga

SEQ ID NO: 3652096 - DNA, 25 bp, Homo sapien
cttagagcagctgggaatcactgaa

SEQ ID NO: 3652097 - DNA, 25 bp, Homo sapien
gattccgttgttctgcttagagcag

SEQ ID NO: 3652098 - DNA, 25 bp, Homo sapien
ctctggaaagcgtgaggtggattcc

SEQ ID NO: 3652099 - DNA, 25 bp, Homo sapien
gagacaccctactagatcactgaga

SEQ ID NO: 3652100 - DNA, 25 bp, Homo sapien
caggctcggtagtggatgagacacc

SEQ ID NO: 3652101 - DNA, 25 bp, Homo sapien
ggttcgagagcgtggctggcacaga

SEQ ID NO: 3652102 - DNA, 25 bp, Homo sapien
cacagagcacatcttccaggctcgg

SEQ ID NO: 3652103 - DNA, 25 bp, Homo sapien
agatccagtccagcagacaatgtca

SEQ ID NO: 3652104 - DNA, 25 bp, Homo sapien
gatccagtccagcagacaatgtcag

SEQ ID NO: 3652105 - DNA, 25 bp, Homo sapien
ctggtgggttggtatgtggacccgg

SEQ ID NO: 3652106 - DNA, 25 bp, Homo sapien
tggtgggttggtatgtggacccggc

SEQ ID NO: 3652107 - DNA, 25 bp, Homo sapien
ctgctgtcagctgacggtagacagc

SEQ ID NO: 3652108 - DNA, 25 bp, Homo sapien
agcacacgtgtgtcatactggcggc

SEQ ID NO: 3652109 - DNA, 25 bp, Homo sapien
cagcaggtagtctgatggctactgc

SEQ ID NO: 3652110 - DNA, 25 bp, Homo sapien
ggctactgcttgagagagcacacgt

SEQ ID NO: 3652111 - DNA, 25 bp, Homo sapien
catacatctgcttcatagcaagaat

SEQ ID NO: 3652112 - DNA, 25 bp, Homo sapien
cttcatacatctgcttcatagcaag

SEQ ID NO: 3652113 - DNA, 25 bp, Homo sapien
tcatacatctgcttcatagcaagaa

SEQ ID NO: 3652114 - DNA, 25 bp, Homo sapien
ttcatacatctgcttcatagcaaga

SEQ ID NO: 3652115 - DNA, 25 bp, Homo sapien
taacatctgattctaggattgtccc

SEQ ID NO: 3652116 - DNA, 25 bp, Homo sapien
gattgtcccagagagttgaacatgc

SEQ ID NO: 3652117 - DNA, 25 bp, Homo sapien
tctgattctaggattgtcccagaga

SEQ ID NO: 3652118 - DNA, 25 bp, Homo sapien
ttgaacatgcaggactggtcggaag

SEQ ID NO: 3652119 - DNA, 25 bp, Homo sapien
ttttcctttttgaatggacttctga

SEQ ID NO: 3652120 - DNA, 25 bp, Homo sapien
tcctttttgaatggacttctgaata

SEQ ID NO: 3652121 - DNA, 25 bp, Homo sapien
tagattcttcacttagtgagttttt

SEQ ID NO: 3652122 - DNA, 25 bp, Homo sapien
ctttttgaatggacttctgaataca

SEQ ID NO: 3652123 - DNA, 25 bp, Homo sapien
gatgatgctgaactatgctcagaaa

SEQ ID NO: 3652124 - DNA, 25 bp, Homo sapien
gatgctgaactatgctcagaaacct

SEQ ID NO: 3652125 - DNA, 25 bp, Homo sapien
ggtcaatcccagacatgatcttggc

SEQ ID NO: 3652126 - DNA, 25 bp, Homo sapien
tcagaaaccttccatcaaccttagg

SEQ ID NO: 3652127 - DNA, 25 bp, Homo sapien
aatgaagctccggttcaaggacaga

SEQ ID NO: 3652128 - DNA, 25 bp, Homo sapien
tgctcccagcaaaattgaatcctgt

SEQ ID NO: 3652129 - DNA, 25 bp, Homo sapien
gagaaaatccaacctacgcttaaca

SEQ ID NO: 3652130 - DNA, 25 bp, Homo sapien
tacagctcagggtaagggtattaca

SEQ ID NO: 3652131 - DNA, 25 bp, Homo sapien
tgagagccccgtgagattgtttacc

SEQ ID NO: 3652132 - DNA, 25 bp, Homo sapien
gattgtttaccacagtcggcatcag

SEQ ID NO: 3652133 - DNA, 25 bp, Homo sapien
cgtgagattgtttaccacagtcggc

SEQ ID NO: 3652134 - DNA, 25 bp, Homo sapien
gagccccgtgagattgtttaccaca

SEQ ID NO: 3652135 - DNA, 25 bp, Homo sapien
ttaggcggtaagagattgagggcaa

SEQ ID NO: 3652136 - DNA, 25 bp, Homo sapien
taggcggtaagagattgagggcaat

SEQ ID NO: 3652137 - DNA, 25 bp, Homo sapien
attaggcggtaagagattgagggca

SEQ ID NO: 3652138 - DNA, 25 bp, Homo sapien
ttgagggcaattgccacaaatctgc

SEQ ID NO: 3652139 - DNA, 25 bp, Homo sapien
gccagtgattgctggtttaatgtga

SEQ ID NO: 3652140 - DNA, 25 bp, Homo sapien
taacatctgaagtcggatggagcag

SEQ ID NO: 3652141 - DNA, 25 bp, Homo sapien
atggagcagaggtccccgccagagc

SEQ ID NO: 3652142 - DNA, 25 bp, Homo sapien
ttaatgtgaagcaaggtaacatctg

SEQ ID NO: 3652143 - DNA, 25 bp, Homo sapien
ccaggacacagtgcaatcggccaca

SEQ ID NO: 3652144 - DNA, 25 bp, Homo sapien
ggaagactccatggagaagtaatgc

SEQ ID NO: 3652145 - DNA, 25 bp, Homo sapien
gagaagtaatgcagtctttcaggga

SEQ ID NO: 3652146 - DNA, 25 bp, Homo sapien
tgcaatcggccacaaatttaggacc

SEQ ID NO: 3652147 - DNA, 25 bp, Homo sapien
atccagcacccgcatgccctccttc

SEQ ID NO: 3652148 - DNA, 25 bp, Homo sapien
aatccagcacccgcatgccctcctt

SEQ ID NO: 3652149 - DNA, 25 bp, Homo sapien
gctttctagctgcacaaaatccagc

SEQ ID NO: 3652150 - DNA, 25 bp, Homo sapien
ttctagctgcacaaaatccagcacc

SEQ ID NO: 3652151 - DNA, 25 bp, Homo sapien
tggcatctgtgtggaactagaggaa

SEQ ID NO: 3652152 - DNA, 25 bp, Homo sapien
agtgaaaggctctctacttcatgca

SEQ ID NO: 3652153 - DNA, 25 bp, Homo sapien
aagccaaggcaggagaagtcctaga

SEQ ID NO: 3652154 - DNA, 25 bp, Homo sapien
tagtccccttacattgaagtgaaag

SEQ ID NO: 3652155 - DNA, 25 bp, Homo sapien
tttgacaccagtggttgctcatgca

SEQ ID NO: 3652156 - DNA, 25 bp, Homo sapien
ctagccaagcgagagggtttggaca

SEQ ID NO: 3652157 - DNA, 25 bp, Homo sapien
tagccaagcgagagggtttggacat

SEQ ID NO: 3652158 - DNA, 25 bp, Homo sapien
tgtttgctgttcaaatcatcccgcc

SEQ ID NO: 3652159 - DNA, 25 bp, Homo sapien
gttgccgccgtttgcacctgctgct

SEQ ID NO: 3652160 - DNA, 25 bp, Homo sapien
tcatcccgcctagctgatggcagct

SEQ ID NO: 3652161 - DNA, 25 bp, Homo sapien
tttccgctgtgcaggagttgccgcc

SEQ ID NO: 3652162 - DNA, 25 bp, Homo sapien
tcaaacaattttcctgccacaccct

SEQ ID NO: 3652163 - DNA, 25 bp, Homo sapien
caattttcctgccacaccctcccag

SEQ ID NO: 3652164 - DNA, 25 bp, Homo sapien
caggctcgggtgcaggggtatgatc

SEQ ID NO: 3652165 - DNA, 25 bp, Homo sapien
ggctcgggtgcaggggtatgatctt

SEQ ID NO: 3652166 - DNA, 25 bp, Homo sapien
ctgatatactgaatttcaacagaat

SEQ ID NO: 3652167 - DNA, 25 bp, Homo sapien
ttcctgatatactgaatttcaacag

SEQ ID NO: 3652168 - DNA, 25 bp, Homo sapien
cctgatatactgaatttcaacagaa

SEQ ID NO: 3652169 - DNA, 25 bp, Homo sapien
tcctgatatactgaatttcaacaga

SEQ ID NO: 3652170 - DNA, 25 bp, Homo sapien
tctgaaattacaagtaagaatggaa

SEQ ID NO: 3652171 - DNA, 25 bp, Homo sapien
ttacaagtaagaatggaaggatgct

SEQ ID NO: 3652172 - DNA, 25 bp, Homo sapien
agtaggggtccccttagcaatgtgt

SEQ ID NO: 3652173 - DNA, 25 bp, Homo sapien
ggggtccccttagcaatgtgtgaga

SEQ ID NO: 3652174 - DNA, 25 bp, Homo sapien
tacggtgctacctaaaggactggct

SEQ ID NO: 3652175 - DNA, 25 bp, Homo sapien
gatgggacctgccttatgccagaca

SEQ ID NO: 3652176 - DNA, 25 bp, Homo sapien
tgggtgctgcccaaaggaaaagctt

SEQ ID NO: 3652177 - DNA, 25 bp, Homo sapien
gtcgaacattacaacctctacggtg

SEQ ID NO: 3652178 - DNA, 25 bp, Homo sapien
tcaaaggtttgctagagtatcagtg

SEQ ID NO: 3652179 - DNA, 25 bp, Homo sapien
tgcttccagagttaccttgatagtg

SEQ ID NO: 3652180 - DNA, 25 bp, Homo sapien
cagtgttctaagcatagcctaggca

SEQ ID NO: 3652181 - DNA, 25 bp, Homo sapien
tctgacaggctttattagggacacc

SEQ ID NO: 3652182 - DNA, 25 bp, Homo sapien
ccaaggtcaccagggcactgctcca

SEQ ID NO: 3652183 - DNA, 25 bp, Homo sapien
acttcccaaggtcaccagggcactg

SEQ ID NO: 3652184 - DNA, 25 bp, Homo sapien
caaggtcaccagggcactgctccat

SEQ ID NO: 3652185 - DNA, 25 bp, Homo sapien
ctgacttcccaaggtcaccagggca

SEQ ID NO: 3652186 - DNA, 25 bp, Homo sapien
tcatcccaaaagttatcacaaccat

SEQ ID NO: 3652187 - DNA, 25 bp, Homo sapien
caaattttgctacagtgccatgact

SEQ ID NO: 3652188 - DNA, 25 bp, Homo sapien
cagaagaaactgttacaccagtgtt

SEQ ID NO: 3652189 - DNA, 25 bp, Homo sapien
tgtttcaattcagttgtgcgtggcc

SEQ ID NO: 3652190 - DNA, 25 bp, Homo sapien
gctcagagccatactggacaatggg

SEQ ID NO: 3652191 - DNA, 25 bp, Homo sapien
tatcacacgagtcttctgctcagag

SEQ ID NO: 3652192 - DNA, 25 bp, Homo sapien
tatgaatatcacacgagtcttctgc

SEQ ID NO: 3652193 - DNA, 25 bp, Homo sapien
tgaatttggatactatgaatatcac

SEQ ID NO: 3652194 - DNA, 25 bp, Homo sapien
cttgcctagcagcggtgaagcattt

SEQ ID NO: 3652195 - DNA, 25 bp, Homo sapien
tttgggggtgtcagtagagcacctt

SEQ ID NO: 3652196 - DNA, 25 bp, Homo sapien
tcatgatgacatcatgttcaccctg

SEQ ID NO: 3652197 - DNA, 25 bp, Homo sapien
atgttcaccctgttatttaagagcc

SEQ ID NO: 3652198 - DNA, 25 bp, Homo sapien
actgtctccgctatctctgtttgaa

SEQ ID NO: 3652199 - DNA, 25 bp, Homo sapien
gaaggcgtcctcttgtattccttgt

SEQ ID NO: 3652200 - DNA, 25 bp, Homo sapien
tttctcttcactcagcccggtgctg

SEQ ID NO: 3652201 - DNA, 25 bp, Homo sapien
aagctagactctaattcagagtgta

SEQ ID NO: 3652202 - DNA, 25 bp, Homo sapien
tagtacaactgataacttcattgag

SEQ ID NO: 3652203 - DNA, 25 bp, Homo sapien
taatatgcaaaaaaggctgactagg

SEQ ID NO: 3652204 - DNA, 25 bp, Homo sapien
tgatctagttctactccctgggtcc

SEQ ID NO: 3652205 - DNA, 25 bp, Homo sapien
gggtatgcttcattactcaacagga

SEQ ID NO: 3652206 - DNA, 25 bp, Homo sapien
cataataattgcaagtatgtgaaaa

SEQ ID NO: 3652207 - DNA, 25 bp, Homo sapien
ctgtgtctacaaatagcttacaata

SEQ ID NO: 3652208 - DNA, 25 bp, Homo sapien
taactaagtcgattatataatatcc

SEQ ID NO: 3652209 - DNA, 25 bp, Homo sapien
accacaggaaattaactaagtcgat

SEQ ID NO: 3652210 - DNA, 25 bp, Homo sapien
caaagcctttggagtgctgtttgcg

SEQ ID NO: 3652211 - DNA, 25 bp, Homo sapien
tggttctgaccagccttatctacgg

SEQ ID NO: 3652212 - DNA, 25 bp, Homo sapien
tgccagcaggtgttcacatatgacc

SEQ ID NO: 3652213 - DNA, 25 bp, Homo sapien
tgtgtccagtgtgatcttcgtccag

SEQ ID NO: 3652214 - DNA, 25 bp, Homo sapien
gatcactgcagctgtggtgtccaga

SEQ ID NO: 3652215 - DNA, 25 bp, Homo sapien
taaagaatctacgtgagacaaccag

SEQ ID NO: 3652216 - DNA, 25 bp, Homo sapien
aaaagtggatactaggtcgggcctg

SEQ ID NO: 3652217 - DNA, 25 bp, Homo sapien
gaagcagaatgtagcttagccccaa

SEQ ID NO: 3652218 - DNA, 25 bp, Homo sapien
tttcatgactgaccgacatttgctg

SEQ ID NO: 3652219 - DNA, 25 bp, Homo sapien
atcgagattgtggagtcaccagggc

SEQ ID NO: 3652220 - DNA, 25 bp, Homo sapien
gaggcttgagaaaacccgaacacag

SEQ ID NO: 3652221 - DNA, 25 bp, Homo sapien
catttgctggactaaacgtactttg

SEQ ID NO: 3652222 - DNA, 25 bp, Homo sapien
caaggtatagctttagactcgtgtg

SEQ ID NO: 3652223 - DNA, 25 bp, Homo sapien
gatacctgggacacaccttttggtg

SEQ ID NO: 3652224 - DNA, 25 bp, Homo sapien
tcctctcccctagggtctggtgtgg

SEQ ID NO: 3652225 - DNA, 25 bp, Homo sapien
gcacatacgtgcacatagtttggat

SEQ ID NO: 3652226 - DNA, 25 bp, Homo sapien
gcacccggccgaggaatatgaagct

SEQ ID NO: 3652227 - DNA, 25 bp, Homo sapien
cccggccgaggaatatgaagctttg

SEQ ID NO: 3652228 - DNA, 25 bp, Homo sapien
cggccgaggaatatgaagctttgac

SEQ ID NO: 3652229 - DNA, 25 bp, Homo sapien
gccgaggaatatgaagctttgactc

SEQ ID NO: 3652230 - DNA, 25 bp, Homo sapien
cagcagcagcactgatacaaactgg

SEQ ID NO: 3652231 - DNA, 25 bp, Homo sapien
cactgatacaaactggtgtggaaaa

SEQ ID NO: 3652232 - DNA, 25 bp, Homo sapien
gcagcagcactgatacaaactggtg

SEQ ID NO: 3652233 - DNA, 25 bp, Homo sapien
gcagcactgatacaaactggtgtgg

SEQ ID NO: 3652234 - DNA, 25 bp, Homo sapien
gatcaggaggttgggggcgctcgag

SEQ ID NO: 3652235 - DNA, 25 bp, Homo sapien
tctcagaacaccaggaagaattggg

SEQ ID NO: 3652236 - DNA, 25 bp, Homo sapien
tgcgtgcagcctgcactccctcggg

SEQ ID NO: 3652237 - DNA, 25 bp, Homo sapien
tgtccagagactcaaagggctcact

SEQ ID NO: 3652238 - DNA, 25 bp, Homo sapien
ttccatgtcacccccgggaggctga

SEQ ID NO: 3652239 - DNA, 25 bp, Homo sapien
tccatgtcacccccgggaggctgac

SEQ ID NO: 3652240 - DNA, 25 bp, Homo sapien
tttccatgtcacccccgggaggctg

SEQ ID NO: 3652241 - DNA, 25 bp, Homo sapien
tggaatccacgagaatatgagagct

SEQ ID NO: 3652242 - DNA, 25 bp, Homo sapien
gcaaaaccatggcatatttcccaga

SEQ ID NO: 3652243 - DNA, 25 bp, Homo sapien
ggttgctaccttgctttacccacag

SEQ ID NO: 3652244 - DNA, 25 bp, Homo sapien
tacagatacaagcacctgggttgct

SEQ ID NO: 3652245 - DNA, 25 bp, Homo sapien
aactattttccactccggtgcaaag

SEQ ID NO: 3652246 - DNA, 25 bp, Homo sapien
agagccttcgctgggagccagtgcc

SEQ ID NO: 3652247 - DNA, 25 bp, Homo sapien
taaaagctcccagaaagcgcctggg

SEQ ID NO: 3652248 - DNA, 25 bp, Homo sapien
tcacacatgattaaggccgagagcc

SEQ ID NO: 3652249 - DNA, 25 bp, Homo sapien
ttgtctctgcctgccgcaaaagctc

SEQ ID NO: 3652250 - DNA, 25 bp, Homo sapien
tgccgcaaaagctcctcgctctctg

SEQ ID NO: 3652251 - DNA, 25 bp, Homo sapien
tccattgtctctgcctgccgcaaaa

SEQ ID NO: 3652252 - DNA, 25 bp, Homo sapien
gcctgccgcaaaagctcctcgctct

SEQ ID NO: 3652253 - DNA, 25 bp, Homo sapien
gctgagtaaggaaggcacggctcac

SEQ ID NO: 3652254 - DNA, 25 bp, Homo sapien
cctgcatctgtcttctgtctgctga

SEQ ID NO: 3652255 - DNA, 25 bp, Homo sapien
tctgctgagtaaggaaggcacggct

SEQ ID NO: 3652256 - DNA, 25 bp, Homo sapien
ttctgtctgctgagtaaggaaggca

SEQ ID NO: 3652257 - DNA, 25 bp, Homo sapien
cattgttatttacctggtagccggg

SEQ ID NO: 3652258 - DNA, 25 bp, Homo sapien
tgtggacagagtcatcccaaggaat

SEQ ID NO: 3652259 - DNA, 25 bp, Homo sapien
gtaagttacatgatcaccctaggga

SEQ ID NO: 3652260 - DNA, 25 bp, Homo sapien
tgagtgccttctacagtgcccagtg

SEQ ID NO: 3652261 - DNA, 25 bp, Homo sapien
ctaaatgtcatgtaacggtaagtgc

SEQ ID NO: 3652262 - DNA, 25 bp, Homo sapien
tccccaggcttgcactcgatgggag

SEQ ID NO: 3652263 - DNA, 25 bp, Homo sapien
tgaaacgggataagggtacagagac

SEQ ID NO: 3652264 - DNA, 25 bp, Homo sapien
taatgccctcatagaggagtccaca

SEQ ID NO: 3652265 - DNA, 25 bp, Homo sapien
aaaggcgttccttggttctgcggca

SEQ ID NO: 3652266 - DNA, 25 bp, Homo sapien
gacttggaaactgaaccacgactgt

SEQ ID NO: 3652267 - DNA, 25 bp, Homo sapien
tctccttgggatattgcgggaagac

SEQ ID NO: 3652268 - DNA, 25 bp, Homo sapien
tgacccatgattgcagaggcgtggt

SEQ ID NO: 3652269 - DNA, 25 bp, Homo sapien
tggctgtgtaatcttcctgcaaagg

SEQ ID NO: 3652270 - DNA, 25 bp, Homo sapien
ctggctgtgtaatcttcctgcaaag

SEQ ID NO: 3652271 - DNA, 25 bp, Homo sapien
cagctggctgtgtaatcttcctgca

SEQ ID NO: 3652272 - DNA, 25 bp, Homo sapien
tcacagctggctgtgtaatcttcct

SEQ ID NO: 3652273 - DNA, 25 bp, Homo sapien
tcaaggatacttctctgagaggaag

SEQ ID NO: 3652274 - DNA, 25 bp, Homo sapien
tattctctatcttgctgattggctc

SEQ ID NO: 3652275 - DNA, 25 bp, Homo sapien
gccagaagagcatctggtattaaga

SEQ ID NO: 3652276 - DNA, 25 bp, Homo sapien
tcttatcaaggatacttctctgaga

SEQ ID NO: 3652277 - DNA, 25 bp, Homo sapien
tattatcacgctaaaagctgccagt

SEQ ID NO: 3652278 - DNA, 25 bp, Homo sapien
taagccattaaggtcgggtgcagtg

SEQ ID NO: 3652279 - DNA, 25 bp, Homo sapien
tctcagtgctccatgatgtagatac

SEQ ID NO: 3652280 - DNA, 25 bp, Homo sapien
gattccatcgttgtatttctcagtg

SEQ ID NO: 3652281 - DNA, 25 bp, Homo sapien
ggctctattgcttgacccaatgtga

SEQ ID NO: 3652282 - DNA, 25 bp, Homo sapien
aatagtggctcattccttcacgcaa

SEQ ID NO: 3652283 - DNA, 25 bp, Homo sapien
gaaacggcaatggaagtcatgtcta

SEQ ID NO: 3652284 - DNA, 25 bp, Homo sapien
tctggccctggttcaaatgttgact

SEQ ID NO: 3652285 - DNA, 25 bp, Homo sapien
gcctccagtattccattaaatatac

SEQ ID NO: 3652286 - DNA, 25 bp, Homo sapien
ttctactgattcgatcctatcatat

SEQ ID NO: 3652287 - DNA, 25 bp, Homo sapien
gtttttctactgattcgatcctatc

SEQ ID NO: 3652288 - DNA, 25 bp, Homo sapien
attccattaaatatacactcgcaca

SEQ ID NO: 3652289 - DNA, 25 bp, Homo sapien
gaactgtgactaatagagctgatcc

SEQ ID NO: 3652290 - DNA, 25 bp, Homo sapien
taaatgctagtggacggaatttccc

SEQ ID NO: 3652291 - DNA, 25 bp, Homo sapien
tagcatgagccacatttaagagaga

SEQ ID NO: 3652292 - DNA, 25 bp, Homo sapien
tctagtcttgtttcctggcataggg

SEQ ID NO: 3652293 - DNA, 25 bp, Homo sapien
tacatggctattaagtgttggagct

SEQ ID NO: 3652294 - DNA, 25 bp, Homo sapien
cagcaatagtatgatgtaagaacaa

SEQ ID NO: 3652295 - DNA, 25 bp, Homo sapien
tgtacttaactaccaggcactgata

SEQ ID NO: 3652296 - DNA, 25 bp, Homo sapien
ggcactgatactcctagtttaataa

SEQ ID NO: 3652297 - DNA, 25 bp, Homo sapien
gcagccgcgagcaagatgtgacact

SEQ ID NO: 3652298 - DNA, 25 bp, Homo sapien
cagtctgctgttaacttgccacgga

SEQ ID NO: 3652299 - DNA, 25 bp, Homo sapien
gggaaatggtccgtaggctctaaga

SEQ ID NO: 3652300 - DNA, 25 bp, Homo sapien
tatcaggtcgctgtcatatgccaca

SEQ ID NO: 3652301 - DNA, 25 bp, Homo sapien
tacttgtagcctataggactttttg

SEQ ID NO: 3652302 - DNA, 25 bp, Homo sapien
ttaaatcggctgtcttgacatgctc

SEQ ID NO: 3652303 - DNA, 25 bp, Homo sapien
catgctctttcaagcatgacatcat

SEQ ID NO: 3652304 - DNA, 25 bp, Homo sapien
ttgagtagctacttgttaaatcggc

SEQ ID NO: 3652305 - DNA, 25 bp, Homo sapien
tccagggtcttccttcggagctgtc

SEQ ID NO: 3652306 - DNA, 25 bp, Homo sapien
agctccacaggtgaggcggcagtta

SEQ ID NO: 3652307 - DNA, 25 bp, Homo sapien
ggcggcagttaaagcagaaaatcta

SEQ ID NO: 3652308 - DNA, 25 bp, Homo sapien
tccttcggagctgtcaggtaaaacc

SEQ ID NO: 3652309 - DNA, 25 bp, Homo sapien
atagtttattatgtcgtatttccca

SEQ ID NO: 3652310 - DNA, 25 bp, Homo sapien
tgtaaagtggaaatagactgctagc

SEQ ID NO: 3652311 - DNA, 25 bp, Homo sapien
aatagactgctagccaaggccgggt

SEQ ID NO: 3652312 - DNA, 25 bp, Homo sapien
gtttattatgtcgtatttcccagta

SEQ ID NO: 3652313 - DNA, 25 bp, Homo sapien
caagcctttgctaaaacccactagg

SEQ ID NO: 3652314 - DNA, 25 bp, Homo sapien
taaagtgctctgctcaatgcgatcg

SEQ ID NO: 3652315 - DNA, 25 bp, Homo sapien
ttcactgggcttctaaaacaggatc

SEQ ID NO: 3652316 - DNA, 25 bp, Homo sapien
aagataatctctgaacgctacgaca

SEQ ID NO: 3652317 - DNA, 25 bp, Homo sapien
gcaagtagtaggtccaaagagagcc

SEQ ID NO: 3652318 - DNA, 25 bp, Homo sapien
agtgtcacactgcagccaacagaag

SEQ ID NO: 3652319 - DNA, 25 bp, Homo sapien
ccaaaaacgtatgaggctgcagccc

SEQ ID NO: 3652320 - DNA, 25 bp, Homo sapien
agccctttctggcaagtctacagtg

SEQ ID NO: 3652321 - DNA, 25 bp, Homo sapien
ggccacggaggcaagaagtcagtca

SEQ ID NO: 3652322 - DNA, 25 bp, Homo sapien
taaaatgagccaccggtttcacagc

SEQ ID NO: 3652323 - DNA, 25 bp, Homo sapien
gatctcagaaacatgccctaggctt

SEQ ID NO: 3652324 - DNA, 25 bp, Homo sapien
ggtttacaggtatctctccgcaggg

SEQ ID NO: 3652325 - DNA, 25 bp, Homo sapien
tttctgtttcttaggctagaatgca

SEQ ID NO: 3652326 - DNA, 25 bp, Homo sapien
ccaccacatcaggctcaattttaat

SEQ ID NO: 3652327 - DNA, 25 bp, Homo sapien
cccatcttaacttcctgcatagctg

SEQ ID NO: 3652328 - DNA, 25 bp, Homo sapien
accacatcaggctcaattttaattt

SEQ ID NO: 3652329 - DNA, 25 bp, Homo sapien
gttgtaacaaaggaatcggaactca

SEQ ID NO: 3652330 - DNA, 25 bp, Homo sapien
gatgcagaagcttacttggaccaag

SEQ ID NO: 3652331 - DNA, 25 bp, Homo sapien
gagccccatcttaatacagcagctg

SEQ ID NO: 3652332 - DNA, 25 bp, Homo sapien
tgtccaacaacaaaggtgaaattcc

SEQ ID NO: 3652333 - DNA, 25 bp, Homo sapien
tgagccatctcaccagttcaaaatg

SEQ ID NO: 3652334 - DNA, 25 bp, Homo sapien
aatcttgaaggagacaattcctcca

SEQ ID NO: 3652335 - DNA, 25 bp, Homo sapien
tgaagagccactggctatgaacctg

SEQ ID NO: 3652336 - DNA, 25 bp, Homo sapien
taggatgattcctcgagcagctccc

SEQ ID NO: 3652337 - DNA, 25 bp, Homo sapien
aaactcttgctcactctttgcccgg

SEQ ID NO: 3652338 - DNA, 25 bp, Homo sapien
gacagcttagtgaggagtccccact

SEQ ID NO: 3652339 - DNA, 25 bp, Homo sapien
gagctacgtagcaccctggagttcc

SEQ ID NO: 3652340 - DNA, 25 bp, Homo sapien
taatgacaagaacactcggcatggg

SEQ ID NO: 3652341 - DNA, 25 bp, Homo sapien
gatgtggacactaacaatgagggca

SEQ ID NO: 3652342 - DNA, 25 bp, Homo sapien
gattcacagctagaaaataccggtt

SEQ ID NO: 3652343 - DNA, 25 bp, Homo sapien
gacagtcagccgctcaggatttgaa

SEQ ID NO: 3652344 - DNA, 25 bp, Homo sapien
ccacccagtggcagtctttaaagaa

SEQ ID NO: 3652345 - DNA, 25 bp, Homo sapien
ggcatggaacatcagccagaccttt

SEQ ID NO: 3652346 - DNA, 25 bp, Homo sapien
tggaacatcagccagacctttaatg

SEQ ID NO: 3652347 - DNA, 25 bp, Homo sapien
ctccacaaccagctcgtccattctc

SEQ ID NO: 3652348 - DNA, 25 bp, Homo sapien
ccagatgtggcatggaacatcagcc

SEQ ID NO: 3652349 - DNA, 25 bp, Homo sapien
ctacagaagggcagacatgggtctt

SEQ ID NO: 3652350 - DNA, 25 bp, Homo sapien
tacagaagggcagacatgggtcttc

SEQ ID NO: 3652351 - DNA, 25 bp, Homo sapien
cagaagggcagacatgggtcttcat

SEQ ID NO: 3652352 - DNA, 25 bp, Homo sapien
acagaagggcagacatgggtcttca

SEQ ID NO: 3652353 - DNA, 25 bp, Homo sapien
tgctgctcggaagggccccccacag

SEQ ID NO: 3652354 - DNA, 25 bp, Homo sapien
gaaacatgtgatgcctcctttcttc

SEQ ID NO: 3652355 - DNA, 25 bp, Homo sapien
cccacagcagaaacatgtgatgcct

SEQ ID NO: 3652356 - DNA, 25 bp, Homo sapien
gcagaaacatgtgatgcctcctttc

SEQ ID NO: 3652357 - DNA, 25 bp, Homo sapien
cagagcccggcaaggtaagatgaac

SEQ ID NO: 3652358 - DNA, 25 bp, Homo sapien
taaacaaggtttaactgctgtgggc

SEQ ID NO: 3652359 - DNA, 25 bp, Homo sapien
tatcacacagcagtttagggacccc

SEQ ID NO: 3652360 - DNA, 25 bp, Homo sapien
gaagcgactgggaacaactgactct

SEQ ID NO: 3652361 - DNA, 25 bp, Homo sapien
cttctgtggccatctttgttgccca

SEQ ID NO: 3652362 - DNA, 25 bp, Homo sapien
tgggaggaacccctctctgcttctg

SEQ ID NO: 3652363 - DNA, 25 bp, Homo sapien
ctctctgcttctgtggccatctttg

SEQ ID NO: 3652364 - DNA, 25 bp, Homo sapien
ctgggaggaacccctctctgcttct

SEQ ID NO: 3652365 - DNA, 25 bp, Homo sapien
tgatcaccctcgtgatgacaccagg

SEQ ID NO: 3652366 - DNA, 25 bp, Homo sapien
ctggaaatagtgatcaccctcgtga

SEQ ID NO: 3652367 - DNA, 25 bp, Homo sapien
ctgtgggctcattaagatgtaagcc

SEQ ID NO: 3652368 - DNA, 25 bp, Homo sapien
tcattaagatgtaagccggccgggc

SEQ ID NO: 3652369 - DNA, 25 bp, Homo sapien
ttgtgcctcgctggaaccagtggct

SEQ ID NO: 3652370 - DNA, 25 bp, Homo sapien
ctccttgtgcctcgctggaaccagt

SEQ ID NO: 3652371 - DNA, 25 bp, Homo sapien
tcgctggaaccagtggctcgtcttc

SEQ ID NO: 3652372 - DNA, 25 bp, Homo sapien
aaccagtggctcgtcttccacgggc

SEQ ID NO: 3652373 - DNA, 25 bp, Homo sapien
catggtgtctctcctagcccagaag

SEQ ID NO: 3652374 - DNA, 25 bp, Homo sapien
caggatcgtctcgagcttctggact

SEQ ID NO: 3652375 - DNA, 25 bp, Homo sapien
gaatcacggagttcagttccaggct

SEQ ID NO: 3652376 - DNA, 25 bp, Homo sapien
gcaggactcgctttcaccgtcaagt

SEQ ID NO: 3652377 - DNA, 25 bp, Homo sapien
tcagactcctaggacttgatcagcc

SEQ ID NO: 3652378 - DNA, 25 bp, Homo sapien
gtcgtagccttccagacctcaaata

SEQ ID NO: 3652379 - DNA, 25 bp, Homo sapien
catgccaatgtttgattgctcagac

SEQ ID NO: 3652380 - DNA, 25 bp, Homo sapien
gacatctgaatgcaacccgtcgtag

SEQ ID NO: 3652381 - DNA, 25 bp, Homo sapien
gaagatgagccacctatgaccaagc

SEQ ID NO: 3652382 - DNA, 25 bp, Homo sapien
gagaaccagaactcggcaatctgtg

SEQ ID NO: 3652383 - DNA, 25 bp, Homo sapien
caagctcatatgagtgtcccacagc

SEQ ID NO: 3652384 - DNA, 25 bp, Homo sapien
aacagaccagacttgggtggactga

SEQ ID NO: 3652385 - DNA, 25 bp, Homo sapien
tgatcagcaaatggcatcaaactcc

SEQ ID NO: 3652386 - DNA, 25 bp, Homo sapien
ttctgcgttctgttcaatggcatca

SEQ ID NO: 3652387 - DNA, 25 bp, Homo sapien
tctaaggaataggaagggatgccct

SEQ ID NO: 3652388 - DNA, 25 bp, Homo sapien
caaaccgggcagaacgagatggaat

SEQ ID NO: 3652389 - DNA, 25 bp, Homo sapien
gctccactttgagtgggaaccacac

SEQ ID NO: 3652390 - DNA, 25 bp, Homo sapien
ctgcttgctccactttgagtgggaa

SEQ ID NO: 3652391 - DNA, 25 bp, Homo sapien
tgggaaccacaccagggtcaacctc

SEQ ID NO: 3652392 - DNA, 25 bp, Homo sapien
tttgagtgggaaccacaccagggtc

SEQ ID NO: 3652393 - DNA, 25 bp, Homo sapien
gcaagcactgctttctatcacaggg

SEQ ID NO: 3652394 - DNA, 25 bp, Homo sapien
cataggtccatagagctgctgtcca

SEQ ID NO: 3652395 - DNA, 25 bp, Homo sapien
gactgtgcgtccgtcctcaaaggac

SEQ ID NO: 3652396 - DNA, 25 bp, Homo sapien
aaaagcatcacaaagggaagccagc

SEQ ID NO: 3652397 - DNA, 25 bp, Homo sapien
gactgagtcagatgccatcaatgcc

SEQ ID NO: 3652398 - DNA, 25 bp, Homo sapien
caaaggacacaatagcctctgcaga

SEQ ID NO: 3652399 - DNA, 25 bp, Homo sapien
tggacttgggttatgcaaaggacac

SEQ ID NO: 3652400 - DNA, 25 bp, Homo sapien
catccccattaatttgagtaaacag

SEQ ID NO: 3652401 - DNA, 25 bp, Homo sapien
gggactacaggcgcctgtgaccatg

SEQ ID NO: 3652402 - DNA, 25 bp, Homo sapien
tcccaggttcactgcattctcctgc

SEQ ID NO: 3652403 - DNA, 25 bp, Homo sapien
ggactacaggcgcctgtgaccatgc

SEQ ID NO: 3652404 - DNA, 25 bp, Homo sapien
aggttcactgcattctcctgcttca

SEQ ID NO: 3652405 - DNA, 25 bp, Homo sapien
ggtacttcattgattcagccccagc

SEQ ID NO: 3652406 - DNA, 25 bp, Homo sapien
ccagtgcctacaggattaagtccaa

SEQ ID NO: 3652407 - DNA, 25 bp, Homo sapien
aagcatgtcccctacacacgctgtg

SEQ ID NO: 3652408 - DNA, 25 bp, Homo sapien
agctgtctcatgtccaagcatgtcc

SEQ ID NO: 3652409 - DNA, 25 bp, Homo sapien
tctttgttggaaaattcgatggcaa

SEQ ID NO: 3652410 - DNA, 25 bp, Homo sapien
ggaaactctctcaagcttgtccctt

SEQ ID NO: 3652411 - DNA, 25 bp, Homo sapien
ttttcagtggaagatctttgttgga

SEQ ID NO: 3652412 - DNA, 25 bp, Homo sapien
aattcgatggcaagcagtaaacctt

SEQ ID NO: 3652413 - DNA, 25 bp, Homo sapien
taaacaatgtccacggtaaactgcc

SEQ ID NO: 3652414 - DNA, 25 bp, Homo sapien
gaagaacttcaagtagcggccacac

SEQ ID NO: 3652415 - DNA, 25 bp, Homo sapien
tggaatgtaagaaccctcatggcct

SEQ ID NO: 3652416 - DNA, 25 bp, Homo sapien
cttctgatgagtgaggcaaatggcc

SEQ ID NO: 3652417 - DNA, 25 bp, Homo sapien
tgtaaagatgctaaatgccaggtgc

SEQ ID NO: 3652418 - DNA, 25 bp, Homo sapien
tatttcaaagacgtcggtcggagac

SEQ ID NO: 3652419 - DNA, 25 bp, Homo sapien
tgctcagggcagatatcaacaatga

SEQ ID NO: 3652420 - DNA, 25 bp, Homo sapien
taatgcagtctaccttaagaacagg

SEQ ID NO: 3652421 - DNA, 25 bp, Homo sapien
tctgcggtagcagagaaatcacagg

SEQ ID NO: 3652422 - DNA, 25 bp, Homo sapien
agtctaaatgggagggaggcaccac

SEQ ID NO: 3652423 - DNA, 25 bp, Homo sapien
tgaacagactcaggtggccatgtgg

SEQ ID NO: 3652424 - DNA, 25 bp, Homo sapien
catctctctgtacgtagcctcggca

SEQ ID NO: 3652425 - DNA, 25 bp, Homo sapien
tgaagctacagtgtcagcaggtgga

SEQ ID NO: 3652426 - DNA, 25 bp, Homo sapien
aaatgcttcggataattttctaggc

SEQ ID NO: 3652427 - DNA, 25 bp, Homo sapien
ccactttcagctgaagtgatctggg

SEQ ID NO: 3652428 - DNA, 25 bp, Homo sapien
tgagcactatgctgcacctggcact

SEQ ID NO: 3652429 - DNA, 25 bp, Homo sapien
tcggacgcctgctaatgctcagatg

SEQ ID NO: 3652430 - DNA, 25 bp, Homo sapien
tgtgttccagtcaaggctcaaagaa

SEQ ID NO: 3652431 - DNA, 25 bp, Homo sapien
taaaaagggcatagacacaagtaac

SEQ ID NO: 3652432 - DNA, 25 bp, Homo sapien
tattcaatgtaacaccctcggacgc

SEQ ID NO: 3652433 - DNA, 25 bp, Homo sapien
aatattaggaacagatcatgcacag

SEQ ID NO: 3652434 - DNA, 25 bp, Homo sapien
taaaaaccatgcttgagcacctggg

SEQ ID NO: 3652435 - DNA, 25 bp, Homo sapien
cagagaataactcccgctccagaaa

SEQ ID NO: 3652436 - DNA, 25 bp, Homo sapien
tcactcagacttaccaggtggccag

SEQ ID NO: 3652437 - DNA, 25 bp, Homo sapien
acattgaggcttccggccatgtctg

SEQ ID NO: 3652438 - DNA, 25 bp, Homo sapien
ttgagctggcccctcgttagctggg

SEQ ID NO: 3652439 - DNA, 25 bp, Homo sapien
gagagagcaggcatctcgggtgtga

SEQ ID NO: 3652440 - DNA, 25 bp, Homo sapien
agaaaaacacattgaggcttccggc

SEQ ID NO: 3652441 - DNA, 25 bp, Homo sapien
tgatgggctatgtcaagaagtaacc

SEQ ID NO: 3652442 - DNA, 25 bp, Homo sapien
gtatcactctccagaaaacaggcag

SEQ ID NO: 3652443 - DNA, 25 bp, Homo sapien
ggctcagaacctagcaacgggaggt

SEQ ID NO: 3652444 - DNA, 25 bp, Homo sapien
ttctgaagcgggagatcattctgtg

SEQ ID NO: 3652445 - DNA, 25 bp, Homo sapien
tcaggagttgatcgagtccactagg

SEQ ID NO: 3652446 - DNA, 25 bp, Homo sapien
caccttggatgaaggacagaggaca

SEQ ID NO: 3652447 - DNA, 25 bp, Homo sapien
cattcagatagaacacagagtcacc

SEQ ID NO: 3652448 - DNA, 25 bp, Homo sapien
aggcatctaatctctggctcggaaa

SEQ ID NO: 3652449 - DNA, 25 bp, Homo sapien
gagccactgagcccggcctctctgt

SEQ ID NO: 3652450 - DNA, 25 bp, Homo sapien
agccactgagcccggcctctctgta

SEQ ID NO: 3652451 - DNA, 25 bp, Homo sapien
cacgcccagccgtttctgcttattc

SEQ ID NO: 3652452 - DNA, 25 bp, Homo sapien
ggccattttctgtgtttcctgccat

SEQ ID NO: 3652453 - DNA, 25 bp, Homo sapien
tggccattttctgtgtttcctgcca

SEQ ID NO: 3652454 - DNA, 25 bp, Homo sapien
ctggccattttctgtgtttcctgcc

SEQ ID NO: 3652455 - DNA, 25 bp, Homo sapien
caggtcccagttggatggttagaca

SEQ ID NO: 3652456 - DNA, 25 bp, Homo sapien
gctgtatttactaacccactctcaa

SEQ ID NO: 3652457 - DNA, 25 bp, Homo sapien
gacttcgcaacactctaaatccttg

SEQ ID NO: 3652458 - DNA, 25 bp, Homo sapien
ccaaatggccaagagatcaggtccc

SEQ ID NO: 3652459 - DNA, 25 bp, Homo sapien
tattcctacgaagtgggcagctctg

SEQ ID NO: 3652460 - DNA, 25 bp, Homo sapien
tacagctgtccctaagtgccatctg

SEQ ID NO: 3652461 - DNA, 25 bp, Homo sapien
tgtggaactaacgagtgcctatgcc

SEQ ID NO: 3652462 - DNA, 25 bp, Homo sapien
gttgatgatggattagccacctgga

SEQ ID NO: 3652463 - DNA, 25 bp, Homo sapien
ggtgcccggccagaatattattaag

SEQ ID NO: 3652464 - DNA, 25 bp, Homo sapien
gcccggccagaatattattaagcct

SEQ ID NO: 3652465 - DNA, 25 bp, Homo sapien
acggtgcccggccagaatattatta

SEQ ID NO: 3652466 - DNA, 25 bp, Homo sapien
ggccagaatattattaagccttaaa

SEQ ID NO: 3652467 - DNA, 25 bp, Homo sapien
gcttagaggcctgaaaatgaccacg

SEQ ID NO: 3652468 - DNA, 25 bp, Homo sapien
tttggtgagaaagatcacgcactgc

SEQ ID NO: 3652469 - DNA, 25 bp, Homo sapien
caccaagtggttgcgacctttatct

SEQ ID NO: 3652470 - DNA, 25 bp, Homo sapien
catcatcagatggacaaaagtagtg

SEQ ID NO: 3652471 - DNA, 25 bp, Homo sapien
gaatgcttgggccaacccttgggag

SEQ ID NO: 3652472 - DNA, 25 bp, Homo sapien
ggagtagtaacttgctcagaacgct

SEQ ID NO: 3652473 - DNA, 25 bp, Homo sapien
ggtgggcttgcctgatatgtataca

SEQ ID NO: 3652474 - DNA, 25 bp, Homo sapien
tatctactctttgctagggccctaa

SEQ ID NO: 3652475 - DNA, 25 bp, Homo sapien
tccctccaggaccaggattctattc

SEQ ID NO: 3652476 - DNA, 25 bp, Homo sapien
ctccaggaccaggattctattcctg

SEQ ID NO: 3652477 - DNA, 25 bp, Homo sapien
ctgtctttccctccaggaccaggat

SEQ ID NO: 3652478 - DNA, 25 bp, Homo sapien
ttccctccaggaccaggattctatt

SEQ ID NO: 3652479 - DNA, 25 bp, Homo sapien
cacttgggtgtgaagagtgccacgc

SEQ ID NO: 3652480 - DNA, 25 bp, Homo sapien
caccggcatatgtagagtcctgtcc

SEQ ID NO: 3652481 - DNA, 25 bp, Homo sapien
ccagaaaagtgatcctgtgtgaggg

SEQ ID NO: 3652482 - DNA, 25 bp, Homo sapien
cccattgtgttaacagacaccggca

SEQ ID NO: 3652483 - DNA, 25 bp, Homo sapien
tccataatggctggccgtggtacga

SEQ ID NO: 3652484 - DNA, 25 bp, Homo sapien
gggctggccttcatacaaggtctac

SEQ ID NO: 3652485 - DNA, 25 bp, Homo sapien
acgagtggggcatcttatcttgcca

SEQ ID NO: 3652486 - DNA, 25 bp, Homo sapien
catacaaggtctaccctgaaagttt

SEQ ID NO: 3652487 - DNA, 25 bp, Homo sapien
gattctgaccagcttgcatccaaag

SEQ ID NO: 3652488 - DNA, 25 bp, Homo sapien
gtgattcgtactactccaggcccag

SEQ ID NO: 3652489 - DNA, 25 bp, Homo sapien
ccaaagcaaggtgattcgtactact

SEQ ID NO: 3652490 - DNA, 25 bp, Homo sapien
tgaccagcttgcatccaaagcaagg

SEQ ID NO: 3652491 - DNA, 25 bp, Homo sapien
cgactcccctatgcgttattgcttc

SEQ ID NO: 3652492 - DNA, 25 bp, Homo sapien
tattgcttcttggtcgctctcacac

SEQ ID NO: 3652493 - DNA, 25 bp, Homo sapien
ttccaatctatcaccccgactcccc

SEQ ID NO: 3652494 - DNA, 25 bp, Homo sapien
ttattgcttcttggtcgctctcaca

SEQ ID NO: 3652495 - DNA, 25 bp, Homo sapien
tcaaactcgggctgaatgtaaccag

SEQ ID NO: 3652496 - DNA, 25 bp, Homo sapien
gaggcttgattgctgcaagtctaag

SEQ ID NO: 3652497 - DNA, 25 bp, Homo sapien
cacgatagaagggagaggcttgatt

SEQ ID NO: 3652498 - DNA, 25 bp, Homo sapien
ctgcttgcatagttaaagcccacga

SEQ ID NO: 3652499 - DNA, 25 bp, Homo sapien
gcaaacccctagtctacctgttaca

SEQ ID NO: 3652500 - DNA, 25 bp, Homo sapien
gcctttgctaactaaggtcacggaa

SEQ ID NO: 3652501 - DNA, 25 bp, Homo sapien
tcacggaaacctagaagctggaaga

SEQ ID NO: 3652502 - DNA, 25 bp, Homo sapien
attgctcaaagcctccgaactgtgg

SEQ ID NO: 3652503 - DNA, 25 bp, Homo sapien
aggcgcccaccaccaaagctggcta

SEQ ID NO: 3652504 - DNA, 25 bp, Homo sapien
tatatttagtagagatggggtttaa

SEQ ID NO: 3652505 - DNA, 25 bp, Homo sapien
gctggctaatttttgtatatttagt

SEQ ID NO: 3652506 - DNA, 25 bp, Homo sapien
ctgaagagagatcagcatgcccttc

SEQ ID NO: 3652507 - DNA, 25 bp, Homo sapien
tcgctgagacgattcaattttcatc

SEQ ID NO: 3652508 - DNA, 25 bp, Homo sapien
cgctgagacgattcaattttcatca

SEQ ID NO: 3652509 - DNA, 25 bp, Homo sapien
gaagagagatcagcatgcccttcaa

SEQ ID NO: 3652510 - DNA, 25 bp, Homo sapien
tttattgcaagttgccttgaataca

SEQ ID NO: 3652511 - DNA, 25 bp, Homo sapien
cctcattggttgaggtctgagcaag

SEQ ID NO: 3652512 - DNA, 25 bp, Homo sapien
ggtctgagcaagactgcagatgctt

SEQ ID NO: 3652513 - DNA, 25 bp, Homo sapien
tgcaagttgccttgaatacaacaat

SEQ ID NO: 3652514 - DNA, 25 bp, Homo sapien
caacctcggcaacgtcccatctcta

SEQ ID NO: 3652515 - DNA, 25 bp, Homo sapien
aacctcggcaacgtcccatctctac

SEQ ID NO: 3652516 - DNA, 25 bp, Homo sapien
acctcggcaacgtcccatctctaca

SEQ ID NO: 3652517 - DNA, 25 bp, Homo sapien
accaacctcggcaacgtcccatctc

SEQ ID NO: 3652518 - DNA, 25 bp, Homo sapien
cacagggaagggttgttaatggtat

SEQ ID NO: 3652519 - DNA, 25 bp, Homo sapien
ccattgcagaaggtaataatccttg

SEQ ID NO: 3652520 - DNA, 25 bp, Homo sapien
tttccattgcagaaggtaataatcc

SEQ ID NO: 3652521 - DNA, 25 bp, Homo sapien
cattgcagaaggtaataatccttga

SEQ ID NO: 3652522 - DNA, 25 bp, Homo sapien
tgcagaaggtaataatccttgaaga

SEQ ID NO: 3652523 - DNA, 25 bp, Homo sapien
tgctcgaccgggtcacccagactgg

SEQ ID NO: 3652524 - DNA, 25 bp, Homo sapien
tctctgataaatgctcgaccgggtc

SEQ ID NO: 3652525 - DNA, 25 bp, Homo sapien
ggcttccaaagaatcagcggacgtc

SEQ ID NO: 3652526 - DNA, 25 bp, Homo sapien
gcggacgtctctgataaatgctcga

SEQ ID NO: 3652527 - DNA, 25 bp, Homo sapien
gggttggagcatccccctcagacat

SEQ ID NO: 3652528 - DNA, 25 bp, Homo sapien
ttgacctcaccacaggaaggctcgc

SEQ ID NO: 3652529 - DNA, 25 bp, Homo sapien
aaggctcgcacgagtccggctgcct

SEQ ID NO: 3652530 - DNA, 25 bp, Homo sapien
agagatctttctttcgtctggttgg

SEQ ID NO: 3652531 - DNA, 25 bp, Homo sapien
acagtcatgcagatgttagccacat

SEQ ID NO: 3652532 - DNA, 25 bp, Homo sapien
cacaccactgggtacaaatgccaac

SEQ ID NO: 3652533 - DNA, 25 bp, Homo sapien
gggaacagcctcgtgtttatggttc

SEQ ID NO: 3652534 - DNA, 25 bp, Homo sapien
cctccactggactaccagacaggtg

SEQ ID NO: 3652535 - DNA, 25 bp, Homo sapien
gctcaaagtatccagtcggcatatc

SEQ ID NO: 3652536 - DNA, 25 bp, Homo sapien
ttacagctcaaagtatccagtcggc

SEQ ID NO: 3652537 - DNA, 25 bp, Homo sapien
tctgaggccccatggagttgcagct

SEQ ID NO: 3652538 - DNA, 25 bp, Homo sapien
tgctggtagacaccctgctcatggc

SEQ ID NO: 3652539 - DNA, 25 bp, Homo sapien
gacaggcatttctaagacagcacca

SEQ ID NO: 3652540 - DNA, 25 bp, Homo sapien
cagggaacccatcactctgtggaag

SEQ ID NO: 3652541 - DNA, 25 bp, Homo sapien
tgaaaagaatttcagctgggctctg

SEQ ID NO: 3652542 - DNA, 25 bp, Homo sapien
taagactccagacctaatatcagcc

SEQ ID NO: 3652543 - DNA, 25 bp, Homo sapien
ggctatacagcctcttttttggttc

SEQ ID NO: 3652544 - DNA, 25 bp, Homo sapien
gggtttttaaatatacagtcatgtc

SEQ ID NO: 3652545 - DNA, 25 bp, Homo sapien
ttgtcttggctatacagcctctttt

SEQ ID NO: 3652546 - DNA, 25 bp, Homo sapien
ttttaaatatacagtcatgtcacct

SEQ ID NO: 3652547 - DNA, 25 bp, Homo sapien
gccctttgtcaggtgggtagattgt

SEQ ID NO: 3652548 - DNA, 25 bp, Homo sapien
ccctttgtcaggtgggtagattgta

SEQ ID NO: 3652549 - DNA, 25 bp, Homo sapien
cctccagaagtcatcaacctatacc

SEQ ID NO: 3652550 - DNA, 25 bp, Homo sapien
tccagaagtcatcaacctataccct

SEQ ID NO: 3652551 - DNA, 25 bp, Homo sapien
tcaacctataccctccagcacttgt

SEQ ID NO: 3652552 - DNA, 25 bp, Homo sapien
tataccctccagcacttgtcctatt

SEQ ID NO: 3652553 - DNA, 25 bp, Homo sapien
ggtgacttatactccaggtttaaca

SEQ ID NO: 3652554 - DNA, 25 bp, Homo sapien
ttccagttacttaaccctatagctc

SEQ ID NO: 3652555 - DNA, 25 bp, Homo sapien
ttataaaaaggtgacttatactcca

SEQ ID NO: 3652556 - DNA, 25 bp, Homo sapien
gttacttaaccctatagctccatct

SEQ ID NO: 3652557 - DNA, 25 bp, Homo sapien
cagatgttgagtctaagggtgtcca

SEQ ID NO: 3652558 - DNA, 25 bp, Homo sapien
cctgcaagggcctctatgttttcct

SEQ ID NO: 3652559 - DNA, 25 bp, Homo sapien
gcagatgaggtgattcagagatcaa

SEQ ID NO: 3652560 - DNA, 25 bp, Homo sapien
gcataagaaaagattaccctccaag

SEQ ID NO: 3652561 - DNA, 25 bp, Homo sapien
atccatgtccatggtgatttccact

SEQ ID NO: 3652562 - DNA, 25 bp, Homo sapien
ggagatttcctttcatcgctttcaa

SEQ ID NO: 3652563 - DNA, 25 bp, Homo sapien
cctttcatcgctttcaaacttgcca

SEQ ID NO: 3652564 - DNA, 25 bp, Homo sapien
gatttcctttcatcgctttcaaact

SEQ ID NO: 3652565 - DNA, 25 bp, Homo sapien
tttctagccttatcttccagaattc

SEQ ID NO: 3652566 - DNA, 25 bp, Homo sapien
catccactattgtctttccccaatt

SEQ ID NO: 3652567 - DNA, 25 bp, Homo sapien
tgtgtgtatgtttcttgcttggaat

SEQ ID NO: 3652568 - DNA, 25 bp, Homo sapien
tcctcagattgtgagatttcctcat

SEQ ID NO: 3652569 - DNA, 25 bp, Homo sapien
cactcttcatgaccatggccatagg

SEQ ID NO: 3652570 - DNA, 25 bp, Homo sapien
tatacaagtggacgcttttcacggg

SEQ ID NO: 3652571 - DNA, 25 bp, Homo sapien
cataggaatggcagttaaggactgc

SEQ ID NO: 3652572 - DNA, 25 bp, Homo sapien
taaggactgccatcaaggtcacgct

SEQ ID NO: 3652573 - DNA, 25 bp, Homo sapien
tccccattacatacagaggtagaag

SEQ ID NO: 3652574 - DNA, 25 bp, Homo sapien
tccagattcaccataaatcaccttt

SEQ ID NO: 3652575 - DNA, 25 bp, Homo sapien
catgatcaaaacgacaattgttggc

SEQ ID NO: 3652576 - DNA, 25 bp, Homo sapien
aattgttggctttccaactcaaggc

SEQ ID NO: 3652577 - DNA, 25 bp, Homo sapien
atgcagggccccatttgaacagctc

SEQ ID NO: 3652578 - DNA, 25 bp, Homo sapien
acaaatgtctgagggtggcgaaacc

SEQ ID NO: 3652579 - DNA, 25 bp, Homo sapien
tctggcgctgccttttaagagtcac

SEQ ID NO: 3652580 - DNA, 25 bp, Homo sapien
cgagtccgcaaggacaaggtgccca

SEQ ID NO: 3652581 - DNA, 25 bp, Homo sapien
tccatttcacaggacggacacccta

SEQ ID NO: 3652582 - DNA, 25 bp, Homo sapien
gaaaaccatggtgcttgctccttta

SEQ ID NO: 3652583 - DNA, 25 bp, Homo sapien
gtaaatgtgggatgcttagattcca

SEQ ID NO: 3652584 - DNA, 25 bp, Homo sapien
ccactgtgtctcaatggccagccgt

SEQ ID NO: 3652585 - DNA, 25 bp, Homo sapien
aacaccagctgacattttgtttcaa

SEQ ID NO: 3652586 - DNA, 25 bp, Homo sapien
ctaacaccagctgacattttgtttc

SEQ ID NO: 3652587 - DNA, 25 bp, Homo sapien
taacaccagctgacattttgtttca

SEQ ID NO: 3652588 - DNA, 25 bp, Homo sapien
tcattaattcactagacaagttccc

SEQ ID NO: 3652589 - DNA, 25 bp, Homo sapien
cctgtgccaggaactcgggagtaca

SEQ ID NO: 3652590 - DNA, 25 bp, Homo sapien
tacttagaggtaccctagaggcaac

SEQ ID NO: 3652591 - DNA, 25 bp, Homo sapien
tagaggcaacggtagaaatggcttc

SEQ ID NO: 3652592 - DNA, 25 bp, Homo sapien
ggtggtaagttcactcagatttcct

SEQ ID NO: 3652593 - DNA, 25 bp, Homo sapien
cgttaggttcaagttaagtctcctg

SEQ ID NO: 3652594 - DNA, 25 bp, Homo sapien
gaccccacattttgtgagccctgaa

SEQ ID NO: 3652595 - DNA, 25 bp, Homo sapien
gatgactataccctaaaatgtgaag

SEQ ID NO: 3652596 - DNA, 25 bp, Homo sapien
gagtgagtgtcgatatgaaccttgc

SEQ ID NO: 3652597 - DNA, 25 bp, Homo sapien
acactgaagggttctttcacctcca

SEQ ID NO: 3652598 - DNA, 25 bp, Homo sapien
tgtccccctgagaagcctgaacact

SEQ ID NO: 3652599 - DNA, 25 bp, Homo sapien
tgaaccttgcaatgctcagtgtccc

SEQ ID NO: 3652600 - DNA, 25 bp, Homo sapien
gcattctgtacatgcgtgtgcttga

SEQ ID NO: 3652601 - DNA, 25 bp, Homo sapien
cctcgctcccagaagatggtctgat

SEQ ID NO: 3652602 - DNA, 25 bp, Homo sapien
cagcctcgctcccagaagatggtct

SEQ ID NO: 3652603 - DNA, 25 bp, Homo sapien
gtgcttgaaatagaatttgtagtct

SEQ ID NO: 3652604 - DNA, 25 bp, Homo sapien
tgtgatttcattcggcatcctgagc

SEQ ID NO: 3652605 - DNA, 25 bp, Homo sapien
gaaaggcacttacgaagagagcacg

SEQ ID NO: 3652606 - DNA, 25 bp, Homo sapien
gcgacactgggcgattccagcattt

SEQ ID NO: 3652607 - DNA, 25 bp, Homo sapien
tctttgatgtaaatggcgacactgg

SEQ ID NO: 3652608 - DNA, 25 bp, Homo sapien
cgcatgtgcaggatccttgttgtac

SEQ ID NO: 3652609 - DNA, 25 bp, Homo sapien
tagtttttggtgtgtgattaaacgc

SEQ ID NO: 3652610 - DNA, 25 bp, Homo sapien
ttgtacactttgaggagtgatctgt

SEQ ID NO: 3652611 - DNA, 25 bp, Homo sapien
ttgttgtacactttgaggagtgatc

SEQ ID NO: 3652612 - DNA, 25 bp, Homo sapien
cttgagcatccagccaagtgctaat

SEQ ID NO: 3652613 - DNA, 25 bp, Homo sapien
aaaggtgagggcagctgaattccat

SEQ ID NO: 3652614 - DNA, 25 bp, Homo sapien
gaattccatgccttttagcgtctgc

SEQ ID NO: 3652615 - DNA, 25 bp, Homo sapien
gaggcagggctcaacaaagcttcct

SEQ ID NO: 3652616 - DNA, 25 bp, Homo sapien
ctgccctttaatggcaatgcagcca

SEQ ID NO: 3652617 - DNA, 25 bp, Homo sapien
tcaacagaatgcattggaaaccacg

SEQ ID NO: 3652618 - DNA, 25 bp, Homo sapien
cttggaaagttgtcttaaagcacac

SEQ ID NO: 3652619 - DNA, 25 bp, Homo sapien
tcaccctcaaagcagaattgtccag

SEQ ID NO: 3652620 - DNA, 25 bp, Homo sapien
caccaggtttggtgactagcaagtc

SEQ ID NO: 3652621 - DNA, 25 bp, Homo sapien
taacagaattaccagctatccctta

SEQ ID NO: 3652622 - DNA, 25 bp, Homo sapien
tatctcctgattcctaacacatgtt

SEQ ID NO: 3652623 - DNA, 25 bp, Homo sapien
ttgttattatggtacagaagacccc

SEQ ID NO: 3652624 - DNA, 25 bp, Homo sapien
aaagcaagtcccatttttcatgtca

SEQ ID NO: 3652625 - DNA, 25 bp, Homo sapien
taaaaccaatgctgaactaacgaga

SEQ ID NO: 3652626 - DNA, 25 bp, Homo sapien
tggtgactaaatgcaagccttgggt

SEQ ID NO: 3652627 - DNA, 25 bp, Homo sapien
aactatttcacggacattcagaggt

SEQ ID NO: 3652628 - DNA, 25 bp, Homo sapien
tctagacttgcagagacctcgaaac

SEQ ID NO: 3652629 - DNA, 25 bp, Homo sapien
tagatattacgtaaaccacattgga

SEQ ID NO: 3652630 - DNA, 25 bp, Homo sapien
ggcaatcactaaacctgctataaga

SEQ ID NO: 3652631 - DNA, 25 bp, Homo sapien
tattccatagggttatcatgatgac

SEQ ID NO: 3652632 - DNA, 25 bp, Homo sapien
gactgatttaaaaggacattgctct

SEQ ID NO: 3652633 - DNA, 25 bp, Homo sapien
ttacaagtctgcagtagccagctct

SEQ ID NO: 3652634 - DNA, 25 bp, Homo sapien
acatgcaagcagagatcacctgctc

SEQ ID NO: 3652635 - DNA, 25 bp, Homo sapien
caaaagcggacagagtatctatgac

SEQ ID NO: 3652636 - DNA, 25 bp, Homo sapien
cagagtatctatgacttctgcaaac

SEQ ID NO: 3652637 - DNA, 25 bp, Homo sapien
tgcccggccgtctcattcattcctg

SEQ ID NO: 3652638 - DNA, 25 bp, Homo sapien
gtttcttgagggagcaccggtggtg

SEQ ID NO: 3652639 - DNA, 25 bp, Homo sapien
ggtggtgcaggtcaggtttgtcttc

SEQ ID NO: 3652640 - DNA, 25 bp, Homo sapien
tggtgcaggtcaggtttgtcttctc

SEQ ID NO: 3652641 - DNA, 25 bp, Homo sapien
caacatttcagctatactcttttag

SEQ ID NO: 3652642 - DNA, 25 bp, Homo sapien
gtgccaacagagtaggtgtatatat

SEQ ID NO: 3652643 - DNA, 25 bp, Homo sapien
tgtgccaacagagtaggtgtatata

SEQ ID NO: 3652644 - DNA, 25 bp, Homo sapien
aacatttcagctatactcttttagt

SEQ ID NO: 3652645 - DNA, 25 bp, Homo sapien
tatcaagggtgcgtgaaaaggaaca

SEQ ID NO: 3652646 - DNA, 25 bp, Homo sapien
tagacgaagctatcagaccctgacc

SEQ ID NO: 3652647 - DNA, 25 bp, Homo sapien
gaagtttaagcaccctacagatcag

SEQ ID NO: 3652648 - DNA, 25 bp, Homo sapien
gcaaggactggcactagatgctcat

SEQ ID NO: 3652649 - DNA, 25 bp, Homo sapien
aaaaggtttaatcctcctcatcaat

SEQ ID NO: 3652650 - DNA, 25 bp, Homo sapien
caatcagtactcctccacaccatca

SEQ ID NO: 3652651 - DNA, 25 bp, Homo sapien
tcaatcagtactcctccacaccatc

SEQ ID NO: 3652652 - DNA, 25 bp, Homo sapien
atcaatcagtactcctccacaccat

SEQ ID NO: 3652653 - DNA, 25 bp, Homo sapien
tatgagtgtgtgcaaccactaacac

SEQ ID NO: 3652654 - DNA, 25 bp, Homo sapien
tattcaggattacctcaacaggaag

SEQ ID NO: 3652655 - DNA, 25 bp, Homo sapien
atggacgtgctaggaaatattcagg

SEQ ID NO: 3652656 - DNA, 25 bp, Homo sapien
gcctaaaagcaaagtggaagcaatg

SEQ ID NO: 3652657 - DNA, 25 bp, Homo sapien
tattacccagttttcggagagaagc

SEQ ID NO: 3652658 - DNA, 25 bp, Homo sapien
taacgccgtgagtaagcacattcgc

SEQ ID NO: 3652659 - DNA, 25 bp, Homo sapien
gaaatcacctgtgtaactaacgccg

SEQ ID NO: 3652660 - DNA, 25 bp, Homo sapien
tctcagctcgagtgttcacaaccaa

SEQ ID NO: 3652661 - DNA, 25 bp, Homo sapien
gaacccttacgatcagacaacttgg

SEQ ID NO: 3652662 - DNA, 25 bp, Homo sapien
aggcaactcgctcttaggatgtggg

SEQ ID NO: 3652663 - DNA, 25 bp, Homo sapien
ccagaatctgatagatggaagcagc

SEQ ID NO: 3652664 - DNA, 25 bp, Homo sapien
gctgtgactgactttctaagacgga

SEQ ID NO: 3652665 - DNA, 25 bp, Homo sapien
gcccctgccctgatgctccagccca

SEQ ID NO: 3652666 - DNA, 25 bp, Homo sapien
cccctgccctgatgctccagcccat

SEQ ID NO: 3652667 - DNA, 25 bp, Homo sapien
ggcccctgccctgatgctccagccc

SEQ ID NO: 3652668 - DNA, 25 bp, Homo sapien
atatgaaggttcgaggtcaggctcc

SEQ ID NO: 3652669 - DNA, 25 bp, Homo sapien
ggtctctctccccatgtgctagttc

SEQ ID NO: 3652670 - DNA, 25 bp, Homo sapien
tagttcttggggatccatatgaagg

SEQ ID NO: 3652671 - DNA, 25 bp, Homo sapien
tctctccccatgtgctagttcttgg

SEQ ID NO: 3652672 - DNA, 25 bp, Homo sapien
agcgggtgcccccataaggaattct

SEQ ID NO: 3652673 - DNA, 25 bp, Homo sapien
gatgagcagtagatccggggcgagg

SEQ ID NO: 3652674 - DNA, 25 bp, Homo sapien
gacggtggggaatttggaatcgcat

SEQ ID NO: 3652675 - DNA, 25 bp, Homo sapien
aatggggcactggagtagacggtgg

SEQ ID NO: 3652676 - DNA, 25 bp, Homo sapien
ttttaaaggcctggcggctcggaga

SEQ ID NO: 3652677 - DNA, 25 bp, Homo sapien
aataagcactcgctgaccggatggc

SEQ ID NO: 3652678 - DNA, 25 bp, Homo sapien
tccaccatgggatgaggctatgctc

SEQ ID NO: 3652679 - DNA, 25 bp, Homo sapien
tatatacaccaaggtgcctggctcc

SEQ ID NO: 3652680 - DNA, 25 bp, Homo sapien
tcggtttgacccctgtagagctgcc

SEQ ID NO: 3652681 - DNA, 25 bp, Homo sapien
gacatttattctgtcggtttgaccc

SEQ ID NO: 3652682 - DNA, 25 bp, Homo sapien
tattctgtcggtttgacccctgtag

SEQ ID NO: 3652683 - DNA, 25 bp, Homo sapien
tctgtcggtttgacccctgtagagc

SEQ ID NO: 3652684 - DNA, 25 bp, Homo sapien
aatgctcttagatccatgctccaga

SEQ ID NO: 3652685 - DNA, 25 bp, Homo sapien
tagaaactatttgcagacaatggtg

SEQ ID NO: 3652686 - DNA, 25 bp, Homo sapien
gcttaatgactgtaacccctgccaa

SEQ ID NO: 3652687 - DNA, 25 bp, Homo sapien
cagcagtagcagatcaattattatg

SEQ ID NO: 3652688 - DNA, 25 bp, Homo sapien
taaatattaaatctaagccattcta

SEQ ID NO: 3652689 - DNA, 25 bp, Homo sapien
aaatattaaatctaagccattctat

SEQ ID NO: 3652690 - DNA, 25 bp, Homo sapien
gataaatattaaatctaagccattc

SEQ ID NO: 3652691 - DNA, 25 bp, Homo sapien
agataaatattaaatctaagccatt

SEQ ID NO: 3652692 - DNA, 25 bp, Homo sapien
tttctgacagagtatccctggtgta

SEQ ID NO: 3652693 - DNA, 25 bp, Homo sapien
gacagacgacgccttttccttttga

SEQ ID NO: 3652694 - DNA, 25 bp, Homo sapien
tttgtttaaagtagcacacagacct

SEQ ID NO: 3652695 - DNA, 25 bp, Homo sapien
ctaattagtgacagacgacgccttt

SEQ ID NO: 3652696 - DNA, 25 bp, Homo sapien
ttagaattcatgcttagacccagct

SEQ ID NO: 3652697 - DNA, 25 bp, Homo sapien
tgcacccagttcaatacagactttt

SEQ ID NO: 3652698 - DNA, 25 bp, Homo sapien
aaaatgaagtccagaattcaaataa

SEQ ID NO: 3652699 - DNA, 25 bp, Homo sapien
tcaaataaggacaagtgtaatctcc

SEQ ID NO: 3652700 - DNA, 25 bp, Homo sapien
cttcaaatgagagacggtgtcagga

SEQ ID NO: 3652701 - DNA, 25 bp, Homo sapien
gagatggtctcttgagtggacctca

SEQ ID NO: 3652702 - DNA, 25 bp, Homo sapien
tcaaatgagagacggtgtcaggaga

SEQ ID NO: 3652703 - DNA, 25 bp, Homo sapien
tcaggagagatggtctcttgagtgg

SEQ ID NO: 3652704 - DNA, 25 bp, Homo sapien
agtgcaggaagacagacacatttaa

SEQ ID NO: 3652705 - DNA, 25 bp, Homo sapien
gcaggaagacagacacatttaagga

SEQ ID NO: 3652706 - DNA, 25 bp, Homo sapien
caggaagacagacacatttaaggat

SEQ ID NO: 3652707 - DNA, 25 bp, Homo sapien
ggaagacagacacatttaaggatac

SEQ ID NO: 3652708 - DNA, 25 bp, Homo sapien
tgctgttcccatgctatactgacgt

SEQ ID NO: 3652709 - DNA, 25 bp, Homo sapien
attatcccaactgaaccccattgca

SEQ ID NO: 3652710 - DNA, 25 bp, Homo sapien
agccttgctgttcccatgctatact

SEQ ID NO: 3652711 - DNA, 25 bp, Homo sapien
tcccatgctatactgacgttgcttt

SEQ ID NO: 3652712 - DNA, 25 bp, Homo sapien
ggtttaaagcgaggctatgcccttg

SEQ ID NO: 3652713 - DNA, 25 bp, Homo sapien
taaaactctttgatcttggcagtgc

SEQ ID NO: 3652714 - DNA, 25 bp, Homo sapien
cctattggtggaaaagctgtgtaac

SEQ ID NO: 3652715 - DNA, 25 bp, Homo sapien
tccaggatgcaatagtgaacaggtt

SEQ ID NO: 3652716 - DNA, 25 bp, Homo sapien
ccgagctgatgtgattagtccctaa

SEQ ID NO: 3652717 - DNA, 25 bp, Homo sapien
ggagtacagcacgaatgatcatagc

SEQ ID NO: 3652718 - DNA, 25 bp, Homo sapien
gagtccctactaggtggttccgcca

SEQ ID NO: 3652719 - DNA, 25 bp, Homo sapien
ggctgaaaccagctagccgagctga

SEQ ID NO: 3652720 - DNA, 25 bp, Homo sapien
agcctcaactcaccgagctcaagag

SEQ ID NO: 3652721 - DNA, 25 bp, Homo sapien
taatgtcttaagtcagcctgtctga

SEQ ID NO: 3652722 - DNA, 25 bp, Homo sapien
gaagcaaaattcataccgctggtgg

SEQ ID NO: 3652723 - DNA, 25 bp, Homo sapien
ctcaagtcaaattcagggaagtgct

SEQ ID NO: 3652724 - DNA, 25 bp, Homo sapien
gcaagctccatgtctgtctgtgaag

SEQ ID NO: 3652725 - DNA, 25 bp, Homo sapien
cttgacagtagaggggaagccattc

SEQ ID NO: 3652726 - DNA, 25 bp, Homo sapien
atgcttgacagtagaggggaagcca

SEQ ID NO: 3652727 - DNA, 25 bp, Homo sapien
tcagatgcttgacagtagaggggaa

SEQ ID NO: 3652728 - DNA, 25 bp, Homo sapien
gacagtagaggggaagccattctct

SEQ ID NO: 3652729 - DNA, 25 bp, Homo sapien
cagagatactgagtcaggtggcttc

SEQ ID NO: 3652730 - DNA, 25 bp, Homo sapien
atggcctcgttcagggcatgtcacc

SEQ ID NO: 3652731 - DNA, 25 bp, Homo sapien
gaaagagacacgctgcatcagagat

SEQ ID NO: 3652732 - DNA, 25 bp, Homo sapien
tggcctcgttcagggcatgtcacct

SEQ ID NO: 3652733 - DNA, 25 bp, Homo sapien
tccttggctcagtgagtactcagct

SEQ ID NO: 3652734 - DNA, 25 bp, Homo sapien
gagacaactcccaaacaacatccta

SEQ ID NO: 3652735 - DNA, 25 bp, Homo sapien
gagctcccaccaggtaatagtttta

SEQ ID NO: 3652736 - DNA, 25 bp, Homo sapien
taaggctgacattgacagagttgca

SEQ ID NO: 3652737 - DNA, 25 bp, Homo sapien
cagaccacgtcatctacacatggaa

SEQ ID NO: 3652738 - DNA, 25 bp, Homo sapien
aatcattctggataaacaacattgc

SEQ ID NO: 3652739 - DNA, 25 bp, Homo sapien
catcctcgaggttagaactatagaa

SEQ ID NO: 3652740 - DNA, 25 bp, Homo sapien
tagaatgtcacaacacagaccacgt

SEQ ID NO: 3652741 - DNA, 25 bp, Homo sapien
cgctggccacaagaacaatgctggt

SEQ ID NO: 3652742 - DNA, 25 bp, Homo sapien
ggtcaacaggtttcattacatcgtc

SEQ ID NO: 3652743 - DNA, 25 bp, Homo sapien
gaacaatgctggttagggctagacc

SEQ ID NO: 3652744 - DNA, 25 bp, Homo sapien
tacatcgtccaacaaaggagagcat

SEQ ID NO: 3652745 - DNA, 25 bp, Homo sapien
agtgtcctcattcgtcccacaggga

SEQ ID NO: 3652746 - DNA, 25 bp, Homo sapien
gagcagaggtgcattcagggctacc

SEQ ID NO: 3652747 - DNA, 25 bp, Homo sapien
gactctatccgcagtggtgctggag

SEQ ID NO: 3652748 - DNA, 25 bp, Homo sapien
caggtgaaagttgcccagtgtcctc

SEQ ID NO: 3652749 - DNA, 25 bp, Homo sapien
taaaggttgcaaatccaccaaggag

SEQ ID NO: 3652750 - DNA, 25 bp, Homo sapien
aagcattgcggccttgagttttgcc

SEQ ID NO: 3652751 - DNA, 25 bp, Homo sapien
gaaataagaaatctcaaacggtgag

SEQ ID NO: 3652752 - DNA, 25 bp, Homo sapien
tcatgcagtctggatagttaaaggt

SEQ ID NO: 3652753 - DNA, 25 bp, Homo sapien
agccaactgattaagctggtgcatc

SEQ ID NO: 3652754 - DNA, 25 bp, Homo sapien
ggcctgttcttccactagaaaaagc

SEQ ID NO: 3652755 - DNA, 25 bp, Homo sapien
tgattaagctggtgcatctgcatcc

SEQ ID NO: 3652756 - DNA, 25 bp, Homo sapien
ttcttccactagaaaaagccaactg

SEQ ID NO: 3652757 - DNA, 25 bp, Homo sapien
cactattaaatacatgctggctaat

SEQ ID NO: 3652758 - DNA, 25 bp, Homo sapien
tattcttacactattaaatacatgc

SEQ ID NO: 3652759 - DNA, 25 bp, Homo sapien
ctgattgtcagtggaaaaagtaatg

SEQ ID NO: 3652760 - DNA, 25 bp, Homo sapien
ggctaatttatctgattgtcagtgg

SEQ ID NO: 3652761 - DNA, 25 bp, Homo sapien
gaacaatgtatatggcatgggcatt

SEQ ID NO: 3652762 - DNA, 25 bp, Homo sapien
gagaacaatgtatatggcatgggca

SEQ ID NO: 3652763 - DNA, 25 bp, Homo sapien
agaacaatgtatatggcatgggcat

SEQ ID NO: 3652764 - DNA, 25 bp, Homo sapien
ggagaacaatgtatatggcatgggc

SEQ ID NO: 3652765 - DNA, 25 bp, Homo sapien
tagacctcagacaatggacgtttcg

SEQ ID NO: 3652766 - DNA, 25 bp, Homo sapien
cagggctctttgatgtttcattaca

SEQ ID NO: 3652767 - DNA, 25 bp, Homo sapien
tatagaatcacgcaggaacacgaat

SEQ ID NO: 3652768 - DNA, 25 bp, Homo sapien
gaacacgaatatccctaacagcttg

SEQ ID NO: 3652769 - DNA, 25 bp, Homo sapien
tttctatgccgtacacctcagctgg

SEQ ID NO: 3652770 - DNA, 25 bp, Homo sapien
tgttcagtatcaagccagtgacctg

SEQ ID NO: 3652771 - DNA, 25 bp, Homo sapien
tagaaggccgtggaagttcacccaa

SEQ ID NO: 3652772 - DNA, 25 bp, Homo sapien
aaaccagtttgtccgggtgaatgca

SEQ ID NO: 3652773 - DNA, 25 bp, Homo sapien
ggccagttaaactggcaatctgttt

SEQ ID NO: 3652774 - DNA, 25 bp, Homo sapien
gccctttaaaaagcgcagactgaac

SEQ ID NO: 3652775 - DNA, 25 bp, Homo sapien
gctataacttgtaatgggcccttta

SEQ ID NO: 3652776 - DNA, 25 bp, Homo sapien
ggccctttaaaaagcgcagactgaa

SEQ ID NO: 3652777 - DNA, 25 bp, Homo sapien
ctagacgcatctttgctataacttg

SEQ ID NO: 3652778 - DNA, 25 bp, Homo sapien
ctttcagatgatggcgacgtggaca

SEQ ID NO: 3652779 - DNA, 25 bp, Homo sapien
aaaataacgcccatgatccatagag

SEQ ID NO: 3652780 - DNA, 25 bp, Homo sapien
caattggcagtgatgggattaagca

SEQ ID NO: 3652781 - DNA, 25 bp, Homo sapien
gcatcagcatcacaattggccagga

SEQ ID NO: 3652782 - DNA, 25 bp, Homo sapien
gttggctgtggttttcatcattttc

SEQ ID NO: 3652783 - DNA, 25 bp, Homo sapien
atctgtgtggttcctgttggctgtg

SEQ ID NO: 3652784 - DNA, 25 bp, Homo sapien
cactatctgtgtggttcctgttggc

SEQ ID NO: 3652785 - DNA, 25 bp, Homo sapien
ctgcactatctgtgtggttcctgtt

SEQ ID NO: 3652786 - DNA, 25 bp, Homo sapien
tatttctaacccgatgagagggaag

SEQ ID NO: 3652787 - DNA, 25 bp, Homo sapien
tgaacgccactactaacagaactgg

SEQ ID NO: 3652788 - DNA, 25 bp, Homo sapien
cctggcttgagactgctggatgaga

SEQ ID NO: 3652789 - DNA, 25 bp, Homo sapien
aaagacctggatactagtgaacgcc

SEQ ID NO: 3652790 - DNA, 25 bp, Homo sapien
taaaatatgggtaatgacatcttcc

SEQ ID NO: 3652791 - DNA, 25 bp, Homo sapien
gctgtcactcttaatagctgtgtcg

SEQ ID NO: 3652792 - DNA, 25 bp, Homo sapien
gacatcttccttatagggttttgtg

SEQ ID NO: 3652793 - DNA, 25 bp, Homo sapien
tgtgtcgctttggaaaactaaccta

SEQ ID NO: 3652794 - DNA, 25 bp, Homo sapien
tctgcacagcaaatgtaacctaagg

SEQ ID NO: 3652795 - DNA, 25 bp, Homo sapien
ttaacggtatctccagctgtgcttt

SEQ ID NO: 3652796 - DNA, 25 bp, Homo sapien
cagagattcagccaatcgccaaggg

SEQ ID NO: 3652797 - DNA, 25 bp, Homo sapien
agaactgggtactgtcctgaatccc

SEQ ID NO: 3652798 - DNA, 25 bp, Homo sapien
tggagctgccgcatctgctggagct

SEQ ID NO: 3652799 - DNA, 25 bp, Homo sapien
ctggctgggaggcaccgtggactcc

SEQ ID NO: 3652800 - DNA, 25 bp, Homo sapien
acgctccgcctcatctcaagcaggc

SEQ ID NO: 3652801 - DNA, 25 bp, Homo sapien
ttcccaccagacacatggggcgttc

SEQ ID NO: 3652802 - DNA, 25 bp, Homo sapien
ctatggttctacattctctaggtct

SEQ ID NO: 3652803 - DNA, 25 bp, Homo sapien
tggctgtcggcatgctccccgtggc

SEQ ID NO: 3652804 - DNA, 25 bp, Homo sapien
ctgtcggcatgctccccgtggcccc

SEQ ID NO: 3652805 - DNA, 25 bp, Homo sapien
ctggctgtcggcatgctccccgtgg

SEQ ID NO: 3652806 - DNA, 25 bp, Homo sapien
cactggctgtcggcatgctccccgt

SEQ ID NO: 3652807 - DNA, 25 bp, Homo sapien
gaagaagcagaaccgattggaagcc

SEQ ID NO: 3652808 - DNA, 25 bp, Homo sapien
tcaggaggttgcatccccatggctg

SEQ ID NO: 3652809 - DNA, 25 bp, Homo sapien
tagcaaccgtcatgatccatgctgg

SEQ ID NO: 3652810 - DNA, 25 bp, Homo sapien
tatctgggatgttgcctaagagaca

SEQ ID NO: 3652811 - DNA, 25 bp, Homo sapien
tggctatctcaacatttccaggagg

SEQ ID NO: 3652812 - DNA, 25 bp, Homo sapien
tccagtccgtgccagtgaagtcaga

SEQ ID NO: 3652813 - DNA, 25 bp, Homo sapien
gaacatactagattagccactggga

SEQ ID NO: 3652814 - DNA, 25 bp, Homo sapien
tgaaagaagtaggaggtcgccatcc

SEQ ID NO: 3652815 - DNA, 25 bp, Homo sapien
tctagcagtgacatggaacagtggt

SEQ ID NO: 3652816 - DNA, 25 bp, Homo sapien
gactatcagtcttgccaacaatgga

SEQ ID NO: 3652817 - DNA, 25 bp, Homo sapien
tcgtcaagccctgtactagttccgt

SEQ ID NO: 3652818 - DNA, 25 bp, Homo sapien
gaccttggcacattgtaagcagcct

SEQ ID NO: 3652819 - DNA, 25 bp, Homo sapien
cttactgcatgaggggtcagcaccc

SEQ ID NO: 3652820 - DNA, 25 bp, Homo sapien
cgcaatataacgtttctgagaagga

SEQ ID NO: 3652821 - DNA, 25 bp, Homo sapien
gggcaactgtatttgctctatgaat

SEQ ID NO: 3652822 - DNA, 25 bp, Homo sapien
tctatgaatgaatcgcaatataacg

SEQ ID NO: 3652823 - DNA, 25 bp, Homo sapien
catgctcagggtgtgctcggcaatt

SEQ ID NO: 3652824 - DNA, 25 bp, Homo sapien
catatgattcgatttgccaccaagg

SEQ ID NO: 3652825 - DNA, 25 bp, Homo sapien
tgaggccctgagaagtcaaaggaca

SEQ ID NO: 3652826 - DNA, 25 bp, Homo sapien
gagagcacagttaggattagaacca

SEQ ID NO: 3652827 - DNA, 25 bp, Homo sapien
ctccgccagactcctatttgccagg

SEQ ID NO: 3652828 - DNA, 25 bp, Homo sapien
tctggcatattagcagaaaactgaa

SEQ ID NO: 3652829 - DNA, 25 bp, Homo sapien
tagatatgtgttgggatcagctctc

SEQ ID NO: 3652830 - DNA, 25 bp, Homo sapien
aaacctgctgtgacccatgggctta

SEQ ID NO: 3652831 - DNA, 25 bp, Homo sapien
tccatgatcatcaggcaggtctcga

SEQ ID NO: 3652832 - DNA, 25 bp, Homo sapien
tccatgggcaagctattcacctctg

SEQ ID NO: 3652833 - DNA, 25 bp, Homo sapien
tatctcatagctcgtaggttggtca

SEQ ID NO: 3652834 - DNA, 25 bp, Homo sapien
tgtctggcaccaatctaaacctgaa

SEQ ID NO: 3652835 - DNA, 25 bp, Homo sapien
ctggagcaggacaattttctaacag

SEQ ID NO: 3652836 - DNA, 25 bp, Homo sapien
acagcagctccatcgagtgaattca

SEQ ID NO: 3652837 - DNA, 25 bp, Homo sapien
tccatcgagtgaattcactcaatca

SEQ ID NO: 3652838 - DNA, 25 bp, Homo sapien
tttctaacagcagctccatcgagtg

SEQ ID NO: 3652839 - DNA, 25 bp, Homo sapien
cagttccgagaacattcttgtttct

SEQ ID NO: 3652840 - DNA, 25 bp, Homo sapien
aatataggaggtgggagctttattc

SEQ ID NO: 3652841 - DNA, 25 bp, Homo sapien
tcatcccagagaatataggaggtgg

SEQ ID NO: 3652842 - DNA, 25 bp, Homo sapien
tcaggcttcgcaggagtctggttga

SEQ ID NO: 3652843 - DNA, 25 bp, Homo sapien
tctctagattggaggtaggctacct

SEQ ID NO: 3652844 - DNA, 25 bp, Homo sapien
tcttgagggttacatgaaataccgc

SEQ ID NO: 3652845 - DNA, 25 bp, Homo sapien
tagaatgggaactcaacacgtggtg

SEQ ID NO: 3652846 - DNA, 25 bp, Homo sapien
tcatggacaacaggcgtaaactctc

SEQ ID NO: 3652847 - DNA, 25 bp, Homo sapien
tgccctcagcaactcctggttctgc

SEQ ID NO: 3652848 - DNA, 25 bp, Homo sapien
ccctcagcaactcctggttctgcag

SEQ ID NO: 3652849 - DNA, 25 bp, Homo sapien
gccctcagcaactcctggttctgca

SEQ ID NO: 3652850 - DNA, 25 bp, Homo sapien
tgctccactaggacgcgctgtcgct

SEQ ID NO: 3652851 - DNA, 25 bp, Homo sapien
actaggacgcgctgtcgctgcacgg

SEQ ID NO: 3652852 - DNA, 25 bp, Homo sapien
acgcgctgtcgctgcacgggatcct

SEQ ID NO: 3652853 - DNA, 25 bp, Homo sapien
ctccagtctcttcattgtttccatc

SEQ ID NO: 3652854 - DNA, 25 bp, Homo sapien
tgctcaataaagagagggcaagacc

SEQ ID NO: 3652855 - DNA, 25 bp, Homo sapien
caggtgctgaagtgtccacatatac

SEQ ID NO: 3652856 - DNA, 25 bp, Homo sapien
ggtgaaacagctcaacatgcaagtg

SEQ ID NO: 3652857 - DNA, 25 bp, Homo sapien
ggaaggacctccttcttagtaatga

SEQ ID NO: 3652858 - DNA, 25 bp, Homo sapien
caggcatcaagcaggtatgtgaggc

SEQ ID NO: 3652859 - DNA, 25 bp, Homo sapien
ccaatctctgtaggcacagcccaga

SEQ ID NO: 3652860 - DNA, 25 bp, Homo sapien
tcttccaatctctgtaggcacagcc

SEQ ID NO: 3652861 - DNA, 25 bp, Homo sapien
gaatcttccaatctctgtaggcaca

SEQ ID NO: 3652862 - DNA, 25 bp, Homo sapien
caccatgatcggctagggtttattt

SEQ ID NO: 3652863 - DNA, 25 bp, Homo sapien
ccagccaaaaggatatatatttcaa

SEQ ID NO: 3652864 - DNA, 25 bp, Homo sapien
caaattcctcccctgcaagaagtgg

SEQ ID NO: 3652865 - DNA, 25 bp, Homo sapien
actttcagaaatgcggaccactagg

SEQ ID NO: 3652866 - DNA, 25 bp, Homo sapien
tgaacagcgattccacctcctggag

SEQ ID NO: 3652867 - DNA, 25 bp, Homo sapien
tcctggagcccggattgtggagcca

SEQ ID NO: 3652868 - DNA, 25 bp, Homo sapien
caaagggacgattgtgcctggctaa

SEQ ID NO: 3652869 - DNA, 25 bp, Homo sapien
ctggctaacagaggaccgagtcttt

SEQ ID NO: 3652870 - DNA, 25 bp, Homo sapien
gcacatagagctgaacacgaggcct

SEQ ID NO: 3652871 - DNA, 25 bp, Homo sapien
catcttttaacagtggctgggaaca

SEQ ID NO: 3652872 - DNA, 25 bp, Homo sapien
gccgtggagtccttcttcaagtctt

SEQ ID NO: 3652873 - DNA, 25 bp, Homo sapien
gcctctcccacttgacgcaggagga

SEQ ID NO: 3652874 - DNA, 25 bp, Homo sapien
cgcaggaggaaagccccgtcttcca

SEQ ID NO: 3652875 - DNA, 25 bp, Homo sapien
tccacgtctttcagagtaaccaatc

SEQ ID NO: 3652876 - DNA, 25 bp, Homo sapien
tttaaacaccgcaggaaagacagct

SEQ ID NO: 3652877 - DNA, 25 bp, Homo sapien
gcctggcacatgtagacgtttaata

SEQ ID NO: 3652878 - DNA, 25 bp, Homo sapien
cactgtaagagcctagcaaatagaa

SEQ ID NO: 3652879 - DNA, 25 bp, Homo sapien
ggtttggcacatgcatcccggtgca

SEQ ID NO: 3652880 - DNA, 25 bp, Homo sapien
ggtgcaatggtggctcaccatagcc

SEQ ID NO: 3652881 - DNA, 25 bp, Homo sapien
agccaccgtgcctggttacaggttt

SEQ ID NO: 3652882 - DNA, 25 bp, Homo sapien
tgagccaccgtgcctggttacaggt

SEQ ID NO: 3652883 - DNA, 25 bp, Homo sapien
ggcctcaggcgattttcctgccttg

SEQ ID NO: 3652884 - DNA, 25 bp, Homo sapien
cgtgagccaccgtgcctggttacag

SEQ ID NO: 3652885 - DNA, 25 bp, Homo sapien
gctgcgcacacgcttcaggagactg

SEQ ID NO: 3652886 - DNA, 25 bp, Homo sapien
caggacgtctgtcatgctgcgcaca

SEQ ID NO: 3652887 - DNA, 25 bp, Homo sapien
acttctatgcgcaggatggctcgca

SEQ ID NO: 3652888 - DNA, 25 bp, Homo sapien
gcttgtgtggctcctccttcagaaa

SEQ ID NO: 3652889 - DNA, 25 bp, Homo sapien
gagagtcacacatcccaaagctcag

SEQ ID NO: 3652890 - DNA, 25 bp, Homo sapien
gattcaacgaagtcttgccacaagg

SEQ ID NO: 3652891 - DNA, 25 bp, Homo sapien
tacacagtgactcgaaatctaacgg

SEQ ID NO: 3652892 - DNA, 25 bp, Homo sapien
tgaatcatgagtctaacagcagcct

SEQ ID NO: 3652893 - DNA, 25 bp, Homo sapien
tagccatgtactgtgcggcttgggc

SEQ ID NO: 3652894 - DNA, 25 bp, Homo sapien
gctggccacgtgaggcaagttctga

SEQ ID NO: 3652895 - DNA, 25 bp, Homo sapien
caatgaacaagctctgcatggcaga

SEQ ID NO: 3652896 - DNA, 25 bp, Homo sapien
ggcgaaccatcatgccggacaaagg

SEQ ID NO: 3652897 - DNA, 25 bp, Homo sapien
agacactgccctgttcttggcactc

SEQ ID NO: 3652898 - DNA, 25 bp, Homo sapien
atagacactgccctgttcttggcac

SEQ ID NO: 3652899 - DNA, 25 bp, Homo sapien
cgatagacactgccctgttcttggc

SEQ ID NO: 3652900 - DNA, 25 bp, Homo sapien
ctcgatagacactgccctgttcttg

SEQ ID NO: 3652901 - DNA, 25 bp, Homo sapien
cctttatggggttatgagaaacaga

SEQ ID NO: 3652902 - DNA, 25 bp, Homo sapien
catctgacctataaatgctttaagg

SEQ ID NO: 3652903 - DNA, 25 bp, Homo sapien
tgctttaagggaaaggtccatgtat

SEQ ID NO: 3652904 - DNA, 25 bp, Homo sapien
ggaaaggtccatgtatcagactcct

SEQ ID NO: 3652905 - DNA, 25 bp, Homo sapien
cttcatgatattggcctgagcttct

SEQ ID NO: 3652906 - DNA, 25 bp, Homo sapien
actctttcccattatagtgatccag

SEQ ID NO: 3652907 - DNA, 25 bp, Homo sapien
tctaggagcttctcaaactctttcc

SEQ ID NO: 3652908 - DNA, 25 bp, Homo sapien
ggctggcggcatctccagatttggt

SEQ ID NO: 3652909 - DNA, 25 bp, Homo sapien
ggtgtagaccacatcgcctgacctc

SEQ ID NO: 3652910 - DNA, 25 bp, Homo sapien
ctgacctcgtggtggtgagtcccga

SEQ ID NO: 3652911 - DNA, 25 bp, Homo sapien
cctggcaggtagcttcgacgaggag

SEQ ID NO: 3652912 - DNA, 25 bp, Homo sapien
gatgttctcctttctgccggtgtag

SEQ ID NO: 3652913 - DNA, 25 bp, Homo sapien
tcaatcttatgatgcccacatggga

SEQ ID NO: 3652914 - DNA, 25 bp, Homo sapien
tgggaaatagcttgtgatttgcatt

SEQ ID NO: 3652915 - DNA, 25 bp, Homo sapien
ttttcaatcttatgatgcccacatg

SEQ ID NO: 3652916 - DNA, 25 bp, Homo sapien
cattttcaatcttatgatgcccaca

SEQ ID NO: 3652917 - DNA, 25 bp, Homo sapien
gttaagtggaatttaaagctcattg

SEQ ID NO: 3652918 - DNA, 25 bp, Homo sapien
gcatgtctctatcagcaccctgaga

SEQ ID NO: 3652919 - DNA, 25 bp, Homo sapien
tatagactcccacaacggtgtcagc

SEQ ID NO: 3652920 - DNA, 25 bp, Homo sapien
gctaacacttggttagttaagtgga

SEQ ID NO: 3652921 - DNA, 25 bp, Homo sapien
tctgctggatattttgtagctctgg

SEQ ID NO: 3652922 - DNA, 25 bp, Homo sapien
gctcctctgctggatattttgtagc

SEQ ID NO: 3652923 - DNA, 25 bp, Homo sapien
ctggatattttgtagctctggtctg

SEQ ID NO: 3652924 - DNA, 25 bp, Homo sapien
tcctctgctggatattttgtagctc

SEQ ID NO: 3652925 - DNA, 25 bp, Homo sapien
gagttctgccattattttgtctcct

SEQ ID NO: 3652926 - DNA, 25 bp, Homo sapien
agttctgccattattttgtctcctt

SEQ ID NO: 3652927 - DNA, 25 bp, Homo sapien
gttctgccattattttgtctccttc

SEQ ID NO: 3652928 - DNA, 25 bp, Homo sapien
ttctgccattattttgtctccttct

SEQ ID NO: 3652929 - DNA, 25 bp, Homo sapien
gaagacacagcttctatggtcccgg

SEQ ID NO: 3652930 - DNA, 25 bp, Homo sapien
gagccttgttcagcgccatcttggg

SEQ ID NO: 3652931 - DNA, 25 bp, Homo sapien
gaacagggacctggttatggaccac

SEQ ID NO: 3652932 - DNA, 25 bp, Homo sapien
tgggatcagttttgggcacagcctt

SEQ ID NO: 3652933 - DNA, 25 bp, Homo sapien
cgggtccaagtgattttcctgtctc

SEQ ID NO: 3652934 - DNA, 25 bp, Homo sapien
gagccaccatgcctggccaccactt

SEQ ID NO: 3652935 - DNA, 25 bp, Homo sapien
ccaccatgcctggccaccactttta

SEQ ID NO: 3652936 - DNA, 25 bp, Homo sapien
ccgggtccaagtgattttcctgtct

SEQ ID NO: 3652937 - DNA, 25 bp, Homo sapien
cacaactgtccttagaaggggccac

SEQ ID NO: 3652938 - DNA, 25 bp, Homo sapien
tgccatctcctttgagctattagac

SEQ ID NO: 3652939 - DNA, 25 bp, Homo sapien
ttagaccctcgatttcagagcctgt

SEQ ID NO: 3652940 - DNA, 25 bp, Homo sapien
tgagctattagaccctcgatttcag

SEQ ID NO: 3652941 - DNA, 25 bp, Homo sapien
gatgtcattccgagtggcctaggag

SEQ ID NO: 3652942 - DNA, 25 bp, Homo sapien
tagtaacaggtactaccgcgctccg

SEQ ID NO: 3652943 - DNA, 25 bp, Homo sapien
ggctcttgtgaacttcagtcaggaa

SEQ ID NO: 3652944 - DNA, 25 bp, Homo sapien
aaaactataagagccaactgttggc

SEQ ID NO: 3652945 - DNA, 25 bp, Homo sapien
acgtgactgtcagcccgggatggct

SEQ ID NO: 3652946 - DNA, 25 bp, Homo sapien
tagtgtctttaacgtgactgtcagc

SEQ ID NO: 3652947 - DNA, 25 bp, Homo sapien
ggatggctcagcatgactgtttgaa

SEQ ID NO: 3652948 - DNA, 25 bp, Homo sapien
actgtggcgcccgacctagtgtctt

SEQ ID NO: 3652949 - DNA, 25 bp, Homo sapien
taagagccgtgttagtgtcagagca

SEQ ID NO: 3652950 - DNA, 25 bp, Homo sapien
tatactattgtatgctgtgggctgg

SEQ ID NO: 3652951 - DNA, 25 bp, Homo sapien
gaaggactcccaaccgtgtggcaaa

SEQ ID NO: 3652952 - DNA, 25 bp, Homo sapien
gacaaaggtcgagtataagagccgt

SEQ ID NO: 3652953 - DNA, 25 bp, Homo sapien
tccttggacgtttgtgcaaatacac

SEQ ID NO: 3652954 - DNA, 25 bp, Homo sapien
aaaattctgtttggcatccttggac

SEQ ID NO: 3652955 - DNA, 25 bp, Homo sapien
aacattcaggctatggtcgtttccc

SEQ ID NO: 3652956 - DNA, 25 bp, Homo sapien
gtcgtttccctagagtgcttactta

SEQ ID NO: 3652957 - DNA, 25 bp, Homo sapien
catctgtagtagctattgggctctc

SEQ ID NO: 3652958 - DNA, 25 bp, Homo sapien
ggttgtgttagaatagcctttcagt

SEQ ID NO: 3652959 - DNA, 25 bp, Homo sapien
ccttgagctgtcgtacatggactga

SEQ ID NO: 3652960 - DNA, 25 bp, Homo sapien
gatactacatctacctccttgagct

SEQ ID NO: 3652961 - DNA, 25 bp, Homo sapien
ccccattaacagtgtcacatgtcaa

SEQ ID NO: 3652962 - DNA, 25 bp, Homo sapien
catgtcaatttatgtggcagagagt

SEQ ID NO: 3652963 - DNA, 25 bp, Homo sapien
ttacacaagggtgccgtggtggtta

SEQ ID NO: 3652964 - DNA, 25 bp, Homo sapien
ccccttggatatagcgagattccct

SEQ ID NO: 3652965 - DNA, 25 bp, Homo sapien
tatttccaacatggtttcatgggtt

SEQ ID NO: 3652966 - DNA, 25 bp, Homo sapien
tttccaacatggtttcatgggttca

SEQ ID NO: 3652967 - DNA, 25 bp, Homo sapien
ccaacatggtttcatgggttcagtt

SEQ ID NO: 3652968 - DNA, 25 bp, Homo sapien
tatatttccaacatggtttcatggg

SEQ ID NO: 3652969 - DNA, 25 bp, Homo sapien
tataacatgctataccaggccttcc

SEQ ID NO: 3652970 - DNA, 25 bp, Homo sapien
cagtgttctagacagaaatggtcac

SEQ ID NO: 3652971 - DNA, 25 bp, Homo sapien
tccagagggatctttgagaaagtcc

SEQ ID NO: 3652972 - DNA, 25 bp, Homo sapien
caggccttccatgagttagttttaa

SEQ ID NO: 3652973 - DNA, 25 bp, Homo sapien
caataaaccaaaacgagagacaggg

SEQ ID NO: 3652974 - DNA, 25 bp, Homo sapien
tgcatacaagtgaagaactaggctg

SEQ ID NO: 3652975 - DNA, 25 bp, Homo sapien
taaagacctgcttattagccagtgg

SEQ ID NO: 3652976 - DNA, 25 bp, Homo sapien
caactggaaaagcactcaataggca

SEQ ID NO: 3652977 - DNA, 25 bp, Homo sapien
caatgaatacgtcaagtaaaaggtt

SEQ ID NO: 3652978 - DNA, 25 bp, Homo sapien
ctccatcacatatacgcaaaaataa

SEQ ID NO: 3652979 - DNA, 25 bp, Homo sapien
aaaaataggctatgtgtagtggctc

SEQ ID NO: 3652980 - DNA, 25 bp, Homo sapien
tggcaaagactccatcacatatacg

SEQ ID NO: 3652981 - DNA, 25 bp, Homo sapien
catgattcggctgctgcagcggagc

SEQ ID NO: 3652982 - DNA, 25 bp, Homo sapien
aggaagcccccaaacaagtgccatg

SEQ ID NO: 3652983 - DNA, 25 bp, Homo sapien
caagtgccatgattcggctgctgca

SEQ ID NO: 3652984 - DNA, 25 bp, Homo sapien
ccccaaacaagtgccatgattcggc

SEQ ID NO: 3652985 - DNA, 25 bp, Homo sapien
aaagactgttcatacacgcctgagg

SEQ ID NO: 3652986 - DNA, 25 bp, Homo sapien
cacacgcaaatactgtgcaaagtac

SEQ ID NO: 3652987 - DNA, 25 bp, Homo sapien
caacgcagtcagaattaatcacacg

SEQ ID NO: 3652988 - DNA, 25 bp, Homo sapien
aagtacaaggtacacgagccaccaa

SEQ ID NO: 3652989 - DNA, 25 bp, Homo sapien
tcaggccctgacataacactaacac

SEQ ID NO: 3652990 - DNA, 25 bp, Homo sapien
ggtgtatcagtagcctcaggccctg

SEQ ID NO: 3652991 - DNA, 25 bp, Homo sapien
cactagtgatgccttgtcggttcca

SEQ ID NO: 3652992 - DNA, 25 bp, Homo sapien
tggcctttcccaaggtgtatcagta

SEQ ID NO: 3652993 - DNA, 25 bp, Homo sapien
catttctaagacatgcgggccacgc

SEQ ID NO: 3652994 - DNA, 25 bp, Homo sapien
tccaactgccaaaaatgccctgtgt

SEQ ID NO: 3652995 - DNA, 25 bp, Homo sapien
gcctacagctgtttaccttggattg

SEQ ID NO: 3652996 - DNA, 25 bp, Homo sapien
gaatagtgtaggacatgttactcca

SEQ ID NO: 3652997 - DNA, 25 bp, Homo sapien
gatttccgtacatcttcatggaaaa

SEQ ID NO: 3652998 - DNA, 25 bp, Homo sapien
cagatttccgtacatcttcatggaa

SEQ ID NO: 3652999 - DNA, 25 bp, Homo sapien
catcagatttccgtacatcttcatg

SEQ ID NO: 3653000 - DNA, 25 bp, Homo sapien
ttcaacatcagatttccgtacatct

SEQ ID NO: 3653001 - DNA, 25 bp, Homo sapien
gatgttcttgatgcatcagaaatac

SEQ ID NO: 3653002 - DNA, 25 bp, Homo sapien
tcctctttcccacttaggagggtca

SEQ ID NO: 3653003 - DNA, 25 bp, Homo sapien
ctaggtcttacagcccctgtggtaa

SEQ ID NO: 3653004 - DNA, 25 bp, Homo sapien
taggagggtcactaggtcttacagc

SEQ ID NO: 3653005 - DNA, 25 bp, Homo sapien
tgtctttccgtaattcagcgtctgg

SEQ ID NO: 3653006 - DNA, 25 bp, Homo sapien
gaaaccgaaactggccttaggcaca

SEQ ID NO: 3653007 - DNA, 25 bp, Homo sapien
taatggactaatgccagagaaaccg

SEQ ID NO: 3653008 - DNA, 25 bp, Homo sapien
tgtcaggtatagagtattgcaggcc

SEQ ID NO: 3653009 - DNA, 25 bp, Homo sapien
cctggacagtggtttcggtaatcat

SEQ ID NO: 3653010 - DNA, 25 bp, Homo sapien
ttctggcatcgatattaaccgtctg

SEQ ID NO: 3653011 - DNA, 25 bp, Homo sapien
gtccatgggctcatcgaaaatgatg

SEQ ID NO: 3653012 - DNA, 25 bp, Homo sapien
cttgggtcttagaacaacttggcca

SEQ ID NO: 3653013 - DNA, 25 bp, Homo sapien
tagttgaaagtctcttataggcaga

SEQ ID NO: 3653014 - DNA, 25 bp, Homo sapien
agatagttgaaagtctcttataggc

SEQ ID NO: 3653015 - DNA, 25 bp, Homo sapien
tcctcaaagatagttgaaagtctct

SEQ ID NO: 3653016 - DNA, 25 bp, Homo sapien
caaagatagttgaaagtctcttata

SEQ ID NO: 3653017 - DNA, 25 bp, Homo sapien
ctacagaatccccattttcctcctc

SEQ ID NO: 3653018 - DNA, 25 bp, Homo sapien
cctcctctatcttttcctccatcat

SEQ ID NO: 3653019 - DNA, 25 bp, Homo sapien
catcattctctctaattcctcatca

SEQ ID NO: 3653020 - DNA, 25 bp, Homo sapien
ctccatcatcattctctctaattcc

SEQ ID NO: 3653021 - DNA, 25 bp, Homo sapien
tgaacttgttcagctccgttctgtt

SEQ ID NO: 3653022 - DNA, 25 bp, Homo sapien
gtcatcggtcgcgtcctcacccttg

SEQ ID NO: 3653023 - DNA, 25 bp, Homo sapien
ggagaatccacgtggctgaacttgt

SEQ ID NO: 3653024 - DNA, 25 bp, Homo sapien
gcattccgaatttggagaatccacg

SEQ ID NO: 3653025 - DNA, 25 bp, Homo sapien
gatgtactctcgatgctgggctgct

SEQ ID NO: 3653026 - DNA, 25 bp, Homo sapien
ggttgagacctagcgatttcgaagc

SEQ ID NO: 3653027 - DNA, 25 bp, Homo sapien
caactagggctttgggactcatttc

SEQ ID NO: 3653028 - DNA, 25 bp, Homo sapien
cttcatccggaactagcaagggtcg

SEQ ID NO: 3653029 - DNA, 25 bp, Homo sapien
catgcaggacagatctaggagacac

SEQ ID NO: 3653030 - DNA, 25 bp, Homo sapien
caccagtcagcaacagaggcaaaaa

SEQ ID NO: 3653031 - DNA, 25 bp, Homo sapien
gagtatcagagcaaccatttcaaca

SEQ ID NO: 3653032 - DNA, 25 bp, Homo sapien
gaagggtttcatggcgaacagacaa

SEQ ID NO: 3653033 - DNA, 25 bp, Homo sapien
gatattggcggggatcctgcagttt

SEQ ID NO: 3653034 - DNA, 25 bp, Homo sapien
caggcatcctgctcgtctgtggggc

SEQ ID NO: 3653035 - DNA, 25 bp, Homo sapien
tgcttgccgggtttgtccagggttc

SEQ ID NO: 3653036 - DNA, 25 bp, Homo sapien
ttggactgcttgccgggtttgtcca

SEQ ID NO: 3653037 - DNA, 25 bp, Homo sapien
caatatttggtataaactaagtcag

SEQ ID NO: 3653038 - DNA, 25 bp, Homo sapien
cagatccaggatgtctatgtaaacc

SEQ ID NO: 3653039 - DNA, 25 bp, Homo sapien
taagtcagtgacttgcttaactgaa

SEQ ID NO: 3653040 - DNA, 25 bp, Homo sapien
tatgtaaaccgttatcttacaaaga

SEQ ID NO: 3653041 - DNA, 25 bp, Homo sapien
caggtgggccatgcgtctggataat

SEQ ID NO: 3653042 - DNA, 25 bp, Homo sapien
gcttcccgaggtgttcagatgaaac

SEQ ID NO: 3653043 - DNA, 25 bp, Homo sapien
cgttaagggcagttcaaccacaggt

SEQ ID NO: 3653044 - DNA, 25 bp, Homo sapien
caaacacagttcaaggcctgagcta

SEQ ID NO: 3653045 - DNA, 25 bp, Homo sapien
gctgagagggttagaagcaatcgat

SEQ ID NO: 3653046 - DNA, 25 bp, Homo sapien
agtaggcttaaagtccccaccagat

SEQ ID NO: 3653047 - DNA, 25 bp, Homo sapien
gaggttagagctgtcaccactagaa

SEQ ID NO: 3653048 - DNA, 25 bp, Homo sapien
cagatttcttagcacttccattagc

SEQ ID NO: 3653049 - DNA, 25 bp, Homo sapien
gagggggtgctcggccattttgact

SEQ ID NO: 3653050 - DNA, 25 bp, Homo sapien
ggggtgctcggccattttgactctg

SEQ ID NO: 3653051 - DNA, 25 bp, Homo sapien
ccattttgactctgcggtgagaatg

SEQ ID NO: 3653052 - DNA, 25 bp, Homo sapien
cattttgactctgcggtgagaatga

SEQ ID NO: 3653053 - DNA, 25 bp, Homo sapien
gatggggtggctttgcttgaacttc

SEQ ID NO: 3653054 - DNA, 25 bp, Homo sapien
atggatggtcctggtgcccttggca

SEQ ID NO: 3653055 - DNA, 25 bp, Homo sapien
gggtggctttgcttgaacttccatt

SEQ ID NO: 3653056 - DNA, 25 bp, Homo sapien
tgaggctgggagtatggatggtcct

SEQ ID NO: 3653057 - DNA, 25 bp, Homo sapien
caaacaaaacgaacgagctttactg

SEQ ID NO: 3653058 - DNA, 25 bp, Homo sapien
gcattaagcctcaaacgatacagca

SEQ ID NO: 3653059 - DNA, 25 bp, Homo sapien
gactgtagacactatagcaactagg

SEQ ID NO: 3653060 - DNA, 25 bp, Homo sapien
gtaactccgacttgtgcctaatagg

SEQ ID NO: 3653061 - DNA, 25 bp, Homo sapien
tctgtagggctcatgtagaagttca

SEQ ID NO: 3653062 - DNA, 25 bp, Homo sapien
tgtgggaaaactactctatgtgctg

SEQ ID NO: 3653063 - DNA, 25 bp, Homo sapien
ccacaatgcaagagcgtgggttacc

SEQ ID NO: 3653064 - DNA, 25 bp, Homo sapien
caaagaaaactagcttgcttgggct

SEQ ID NO: 3653065 - DNA, 25 bp, Homo sapien
gttacatttcgttctttgactagga

SEQ ID NO: 3653066 - DNA, 25 bp, Homo sapien
gaactcatcattagtcaccccagag

SEQ ID NO: 3653067 - DNA, 25 bp, Homo sapien
gtggttacatccctcaaagcggaaa

SEQ ID NO: 3653068 - DNA, 25 bp, Homo sapien
gctttcagaaaagtagtgtcctctg

SEQ ID NO: 3653069 - DNA, 25 bp, Homo sapien
gtatccaggtttgctttctgtcatc

SEQ ID NO: 3653070 - DNA, 25 bp, Homo sapien
agaagaaagcgagccaacaggccac

SEQ ID NO: 3653071 - DNA, 25 bp, Homo sapien
tctacaccttgataagccacagaga

SEQ ID NO: 3653072 - DNA, 25 bp, Homo sapien
tatttccactttacttctactggaa

SEQ ID NO: 3653073 - DNA, 25 bp, Homo sapien
aacatgtcccatccttcacgacatt

SEQ ID NO: 3653074 - DNA, 25 bp, Homo sapien
ttggctgaaactaccatcacctctg

SEQ ID NO: 3653075 - DNA, 25 bp, Homo sapien
acctctgtgaccttgtcagagctct

SEQ ID NO: 3653076 - DNA, 25 bp, Homo sapien
tccttcacgacattggctgaaacta

SEQ ID NO: 3653077 - DNA, 25 bp, Homo sapien
catcaactgtgacttgatctccccg

SEQ ID NO: 3653078 - DNA, 25 bp, Homo sapien
cctctcaagggcagaactggttcca

SEQ ID NO: 3653079 - DNA, 25 bp, Homo sapien
tgtgacttgatctccccggtatgtg

SEQ ID NO: 3653080 - DNA, 25 bp, Homo sapien
ggtatgtgtgccacgctttccccaa

SEQ ID NO: 3653081 - DNA, 25 bp, Homo sapien
agcccgttgctctgcactcctgtag

SEQ ID NO: 3653082 - DNA, 25 bp, Homo sapien
tgctctgcactcctgtagccaactg

SEQ ID NO: 3653083 - DNA, 25 bp, Homo sapien
ttctgtgaagcaccagacaagcccg

SEQ ID NO: 3653084 - DNA, 25 bp, Homo sapien
gtagccaactgccaggactgctcgc

SEQ ID NO: 3653085 - DNA, 25 bp, Homo sapien
ctcagaggtgcttttcgggttattc

SEQ ID NO: 3653086 - DNA, 25 bp, Homo sapien
tggagctagatggacatgcaccttg

SEQ ID NO: 3653087 - DNA, 25 bp, Homo sapien
aacatttgcttctaaggtgggcacc

SEQ ID NO: 3653088 - DNA, 25 bp, Homo sapien
cttcctcgttccatcagggcgaaca

SEQ ID NO: 3653089 - DNA, 25 bp, Homo sapien
ctagagttgtagttgaccacttggg

SEQ ID NO: 3653090 - DNA, 25 bp, Homo sapien
tagagttgtagttgaccacttgggg

SEQ ID NO: 3653091 - DNA, 25 bp, Homo sapien
acgggtaggacctaggctgggcttg

SEQ ID NO: 3653092 - DNA, 25 bp, Homo sapien
ctggtacgggtaggacctaggctgg

SEQ ID NO: 3653093 - DNA, 25 bp, Homo sapien
cctggtacgggtaggacctaggctg

SEQ ID NO: 3653094 - DNA, 25 bp, Homo sapien
cgggtaggacctaggctgggcttgg

SEQ ID NO: 3653095 - DNA, 25 bp, Homo sapien
ttgataatttactgaccaccactca

SEQ ID NO: 3653096 - DNA, 25 bp, Homo sapien
tgataatttactgaccaccactcac

SEQ ID NO: 3653097 - DNA, 25 bp, Homo sapien
cagcttctctacctcgaggttccaa

SEQ ID NO: 3653098 - DNA, 25 bp, Homo sapien
gaggttccaacgtttctcatgccct

SEQ ID NO: 3653099 - DNA, 25 bp, Homo sapien
gatggctcagcaaccttctctgaca

SEQ ID NO: 3653100 - DNA, 25 bp, Homo sapien
ctgcccatcaagcttctgctcagtg

SEQ ID NO: 3653101 - DNA, 25 bp, Homo sapien
tctgcctttcctgccggatattgag

SEQ ID NO: 3653102 - DNA, 25 bp, Homo sapien
actggcagcaccgtgactgtgtgtc

SEQ ID NO: 3653103 - DNA, 25 bp, Homo sapien
tgaaccttcacactggcagcaccgt

SEQ ID NO: 3653104 - DNA, 25 bp, Homo sapien
tgactgtgtgtccatttctgccttt

SEQ ID NO: 3653105 - DNA, 25 bp, Homo sapien
agctaaagaatacgggaaatgtgcc

SEQ ID NO: 3653106 - DNA, 25 bp, Homo sapien
gaagcacctgacattgccgtagcta

SEQ ID NO: 3653107 - DNA, 25 bp, Homo sapien
cagcgactgacgtgatggaatccag

SEQ ID NO: 3653108 - DNA, 25 bp, Homo sapien
gaaatgtgcccgactgcctggacag

SEQ ID NO: 3653109 - DNA, 25 bp, Homo sapien
agtgtggaactctctcagctgggcc

SEQ ID NO: 3653110 - DNA, 25 bp, Homo sapien
tcaggtccatctgagggactgcgct

SEQ ID NO: 3653111 - DNA, 25 bp, Homo sapien
tggaaggtagccagaacctcaggca

SEQ ID NO: 3653112 - DNA, 25 bp, Homo sapien
ggactgcgctcttcccagatcaagc

SEQ ID NO: 3653113 - DNA, 25 bp, Homo sapien
tttgagagatttctacccctttgca

SEQ ID NO: 3653114 - DNA, 25 bp, Homo sapien
aatttgagagatttctacccctttg

SEQ ID NO: 3653115 - DNA, 25 bp, Homo sapien
tgagagatttctacccctttgcaat

SEQ ID NO: 3653116 - DNA, 25 bp, Homo sapien
gagagatttctacccctttgcaata

SEQ ID NO: 3653117 - DNA, 25 bp, Homo sapien
ttccctttccattggcgtgacctct

SEQ ID NO: 3653118 - DNA, 25 bp, Homo sapien
cattattgattagcagacacttccc

SEQ ID NO: 3653119 - DNA, 25 bp, Homo sapien
tcttctgcaaagctacctgtggccc

SEQ ID NO: 3653120 - DNA, 25 bp, Homo sapien
tgttgacagaccctcttggttcccg

SEQ ID NO: 3653121 - DNA, 25 bp, Homo sapien
aatgttgtaacataggtgtgtagat

SEQ ID NO: 3653122 - DNA, 25 bp, Homo sapien
taatgaatccaaacctgtgtcatgc

SEQ ID NO: 3653123 - DNA, 25 bp, Homo sapien
aactggcttctttatcgagaagaat

SEQ ID NO: 3653124 - DNA, 25 bp, Homo sapien
atagtggatcctggatggaactggc

SEQ ID NO: 3653125 - DNA, 25 bp, Homo sapien
ccccaggcagtaaagcagagtttca

SEQ ID NO: 3653126 - DNA, 25 bp, Homo sapien
gctagttctgcagcgaatgcccaac

SEQ ID NO: 3653127 - DNA, 25 bp, Homo sapien
gagaaatcggagatccccagacaga

SEQ ID NO: 3653128 - DNA, 25 bp, Homo sapien
agcacacgagaaatagccacgaccg

SEQ ID NO: 3653129 - DNA, 25 bp, Homo sapien
catagcgagtttttggccaacgtca

SEQ ID NO: 3653130 - DNA, 25 bp, Homo sapien
gaactcatcagtgaagggcggcctg

SEQ ID NO: 3653131 - DNA, 25 bp, Homo sapien
gaaaacagcactaggaaagacccca

SEQ ID NO: 3653132 - DNA, 25 bp, Homo sapien
tacatacttgactagcctggactcc

SEQ ID NO: 3653133 - DNA, 25 bp, Homo sapien
ggttccaattttactgtggctccaa

SEQ ID NO: 3653134 - DNA, 25 bp, Homo sapien
aaagctccttccacgcatgtcacaa

SEQ ID NO: 3653135 - DNA, 25 bp, Homo sapien
tggctccaagcgttgttaattctga

SEQ ID NO: 3653136 - DNA, 25 bp, Homo sapien
tgtgaaagtccgaagtaattctctg

SEQ ID NO: 3653137 - DNA, 25 bp, Homo sapien
tccagatacggcaacgcagtgtgtc

SEQ ID NO: 3653138 - DNA, 25 bp, Homo sapien
tccaagaagtgcatctcaaggagca

SEQ ID NO: 3653139 - DNA, 25 bp, Homo sapien
caaagcacgacagattataaccagg

SEQ ID NO: 3653140 - DNA, 25 bp, Homo sapien
gcactactttgcagggacgacgtcg

SEQ ID NO: 3653141 - DNA, 25 bp, Homo sapien
tatgcatgagtgaaatagccacacc

SEQ ID NO: 3653142 - DNA, 25 bp, Homo sapien
tttagactctggtatcttagacagg

SEQ ID NO: 3653143 - DNA, 25 bp, Homo sapien
tagacaggttcgtgtttattgcaaa

SEQ ID NO: 3653144 - DNA, 25 bp, Homo sapien
taccttagactggatggcctataaa

SEQ ID NO: 3653145 - DNA, 25 bp, Homo sapien
gctaaacttccgacatcagacaaga

SEQ ID NO: 3653146 - DNA, 25 bp, Homo sapien
aacttccgacatcagacaagattgg

SEQ ID NO: 3653147 - DNA, 25 bp, Homo sapien
agccccagtcctgctaaacttccga

SEQ ID NO: 3653148 - DNA, 25 bp, Homo sapien
gtcctgctaaacttccgacatcaga

SEQ ID NO: 3653149 - DNA, 25 bp, Homo sapien
acgcctcaaggtgaacagttgtgca

SEQ ID NO: 3653150 - DNA, 25 bp, Homo sapien
gaagctctgtgcagctggtcagtct

SEQ ID NO: 3653151 - DNA, 25 bp, Homo sapien
aaagcactggactcacctctctgga

SEQ ID NO: 3653152 - DNA, 25 bp, Homo sapien
ctttggaaacaggaaacgcctcaag

SEQ ID NO: 3653153 - DNA, 25 bp, Homo sapien
catgcttgacatggttggccttttt

SEQ ID NO: 3653154 - DNA, 25 bp, Homo sapien
ctccatgcttgacatggttggcctt

SEQ ID NO: 3653155 - DNA, 25 bp, Homo sapien
ccatgcttgacatggttggcctttt

SEQ ID NO: 3653156 - DNA, 25 bp, Homo sapien
tccatgcttgacatggttggccttt

SEQ ID NO: 3653157 - DNA, 25 bp, Homo sapien
gagcagagctcttccgctacatatg

SEQ ID NO: 3653158 - DNA, 25 bp, Homo sapien
gggcctgagcagaacatccgatatt

SEQ ID NO: 3653159 - DNA, 25 bp, Homo sapien
aagttgatgacagtggttggagccc

SEQ ID NO: 3653160 - DNA, 25 bp, Homo sapien
gggtggtctcgggatgccatccaaa

SEQ ID NO: 3653161 - DNA, 25 bp, Homo sapien
cttgagatctgaattgagttactgc

SEQ ID NO: 3653162 - DNA, 25 bp, Homo sapien
tctggttgctttactggcattgtgc

SEQ ID NO: 3653163 - DNA, 25 bp, Homo sapien
tcaaggctgcatatccggtgatctt

SEQ ID NO: 3653164 - DNA, 25 bp, Homo sapien
ttatcccttacaactgaacttgaga

SEQ ID NO: 3653165 - DNA, 25 bp, Homo sapien
caaatgctacttggcatgggttaga

SEQ ID NO: 3653166 - DNA, 25 bp, Homo sapien
gctgatacctggacaacctactgga

SEQ ID NO: 3653167 - DNA, 25 bp, Homo sapien
tcattatgtgtctgacgtagttcgc

SEQ ID NO: 3653168 - DNA, 25 bp, Homo sapien
tcctaaaggctgatgtgctgatacc

SEQ ID NO: 3653169 - DNA, 25 bp, Homo sapien
tggcttaatgagttttgccccatct

SEQ ID NO: 3653170 - DNA, 25 bp, Homo sapien
tttgccccatctgggtcatcacttt

SEQ ID NO: 3653171 - DNA, 25 bp, Homo sapien
tcagcagcgaatacctccagctgtc

SEQ ID NO: 3653172 - DNA, 25 bp, Homo sapien
cctctggatggtttcccttggctta

SEQ ID NO: 3653173 - DNA, 25 bp, Homo sapien
cctgttagaattgagaatgatggca

SEQ ID NO: 3653174 - DNA, 25 bp, Homo sapien
gcaaagtgagtacccagatctaaag

SEQ ID NO: 3653175 - DNA, 25 bp, Homo sapien
cagcagcagggatcattaagtggca

SEQ ID NO: 3653176 - DNA, 25 bp, Homo sapien
caggtcaagtaatctagcacaaagg

SEQ ID NO: 3653177 - DNA, 25 bp, Homo sapien
ggtgtcaggtgggttgcgttgctgg

SEQ ID NO: 3653178 - DNA, 25 bp, Homo sapien
cgttgctggttagggtagcatctag

SEQ ID NO: 3653179 - DNA, 25 bp, Homo sapien
ctgtgagctgctctggggtgtcagg

SEQ ID NO: 3653180 - DNA, 25 bp, Homo sapien
ttgcgttgctggttagggtagcatc

SEQ ID NO: 3653181 - DNA, 25 bp, Homo sapien
tgcaagaacatgtcccgcagtttgg

SEQ ID NO: 3653182 - DNA, 25 bp, Homo sapien
ttaaccagtagcgaggagaagcctg

SEQ ID NO: 3653183 - DNA, 25 bp, Homo sapien
gcgggagcgccccagcttaaccagt

SEQ ID NO: 3653184 - DNA, 25 bp, Homo sapien
aacatgtcccgcagtttggaatgtc

SEQ ID NO: 3653185 - DNA, 25 bp, Homo sapien
agctcaaggcctgcgaggtaagcgc

SEQ ID NO: 3653186 - DNA, 25 bp, Homo sapien
cctcctcggagcctgcttgtggaat

SEQ ID NO: 3653187 - DNA, 25 bp, Homo sapien
cacgcgtcggactggtctgtctgag

SEQ ID NO: 3653188 - DNA, 25 bp, Homo sapien
ggcctgtgtcttgagcgtcctgcaa

SEQ ID NO: 3653189 - DNA, 25 bp, Homo sapien
caagaagacctgtcgcctttgtttt

SEQ ID NO: 3653190 - DNA, 25 bp, Homo sapien
gccaagaagacctgtcgcctttgtt

SEQ ID NO: 3653191 - DNA, 25 bp, Homo sapien
tgccaagaagacctgtcgcctttgt

SEQ ID NO: 3653192 - DNA, 25 bp, Homo sapien
ctgccaagaagacctgtcgcctttg

SEQ ID NO: 3653193 - DNA, 25 bp, Homo sapien
gggaccgctttctgcaattggcctc

SEQ ID NO: 3653194 - DNA, 25 bp, Homo sapien
ccgctttctgcaattggcctcgaca

SEQ ID NO: 3653195 - DNA, 25 bp, Homo sapien
tccaggactcaggagtggcactggg

SEQ ID NO: 3653196 - DNA, 25 bp, Homo sapien
ctttctgcaattggcctcgacactg

SEQ ID NO: 3653197 - DNA, 25 bp, Homo sapien
gggccgctctcctcgggagctcgag

SEQ ID NO: 3653198 - DNA, 25 bp, Homo sapien
tcgaggtccccgacccgcctcagga

SEQ ID NO: 3653199 - DNA, 25 bp, Homo sapien
tgagaaagtccatattggggccgct

SEQ ID NO: 3653200 - DNA, 25 bp, Homo sapien
tctcctcgggagctcgaggtccccg

SEQ ID NO: 3653201 - DNA, 25 bp, Homo sapien
caggtctcctttcccgggagcaagc

SEQ ID NO: 3653202 - DNA, 25 bp, Homo sapien
agacgtctaccaccaggtctccttt

SEQ ID NO: 3653203 - DNA, 25 bp, Homo sapien
ctgcagatgtcgctgttataggctt

SEQ ID NO: 3653204 - DNA, 25 bp, Homo sapien
atgtcgctgttataggcttgtcccc

SEQ ID NO: 3653205 - DNA, 25 bp, Homo sapien
aagaactgaatgagcaacgcttggc

SEQ ID NO: 3653206 - DNA, 25 bp, Homo sapien
tgagcaacgcttggctaacttcccc

SEQ ID NO: 3653207 - DNA, 25 bp, Homo sapien
gaagtcccacgtctcgtcgcagctt

SEQ ID NO: 3653208 - DNA, 25 bp, Homo sapien
gagatttttgctgtgaggcgtgagg

SEQ ID NO: 3653209 - DNA, 25 bp, Homo sapien
ggtctgtgacaaggcccgggaattg

SEQ ID NO: 3653210 - DNA, 25 bp, Homo sapien
acagttccgctagccgcgccaaatt

SEQ ID NO: 3653211 - DNA, 25 bp, Homo sapien
gattggttcgcgttctctcgtcgcg

SEQ ID NO: 3653212 - DNA, 25 bp, Homo sapien
tctcgtcgcgtctcccgattgggta

SEQ ID NO: 3653213 - DNA, 25 bp, Homo sapien
tgtagatttggtttggcaccttcca

SEQ ID NO: 3653214 - DNA, 25 bp, Homo sapien
aacgtcttccctcgaattgaagcgg

SEQ ID NO: 3653215 - DNA, 25 bp, Homo sapien
tgcagggagtgttttttgtccccgc

SEQ ID NO: 3653216 - DNA, 25 bp, Homo sapien
tgtaaaaactaaggcgcaggtactc

SEQ ID NO: 3653217 - DNA, 25 bp, Homo sapien
tgaggcccataccaagtgttctctt

SEQ ID NO: 3653218 - DNA, 25 bp, Homo sapien
cctggccagagaagtttcgataagg

SEQ ID NO: 3653219 - DNA, 25 bp, Homo sapien
gttctctttgtggatacctcttata

SEQ ID NO: 3653220 - DNA, 25 bp, Homo sapien
gataaaatgtggcatttccgaaagt

SEQ ID NO: 3653221 - DNA, 25 bp, Homo sapien
tcttggacattctcaatagaatgca

SEQ ID NO: 3653222 - DNA, 25 bp, Homo sapien
aaaaagatgacaggatgggattaaa

SEQ ID NO: 3653223 - DNA, 25 bp, Homo sapien
taaaaatctcttggacattctcaat

SEQ ID NO: 3653224 - DNA, 25 bp, Homo sapien
tgtctccatgaattagagcagaaaa

SEQ ID NO: 3653225 - DNA, 25 bp, Homo sapien
gggacaggtcacttgtattttccaa

SEQ ID NO: 3653226 - DNA, 25 bp, Homo sapien
agggacaggtcacttgtattttcca

SEQ ID NO: 3653227 - DNA, 25 bp, Homo sapien
cagggacaggtcacttgtattttcc

SEQ ID NO: 3653228 - DNA, 25 bp, Homo sapien
gggacacaaatttgcctttcacatt

SEQ ID NO: 3653229 - DNA, 25 bp, Homo sapien
tccacgggacacaaatttgcctttc

SEQ ID NO: 3653230 - DNA, 25 bp, Homo sapien
cattccacgggacacaaatttgcct

SEQ ID NO: 3653231 - DNA, 25 bp, Homo sapien
ctcattccacgggacacaaatttgc

SEQ ID NO: 3653232 - DNA, 25 bp, Homo sapien
accaccaccctctaatgatgatcag

SEQ ID NO: 3653233 - DNA, 25 bp, Homo sapien
ctaatgatgatcagattcagagtct

SEQ ID NO: 3653234 - DNA, 25 bp, Homo sapien
tttctctttcgaagtcactgacaag

SEQ ID NO: 3653235 - DNA, 25 bp, Homo sapien
gtcactgacaagagccggcagcatc

SEQ ID NO: 3653236 - DNA, 25 bp, Homo sapien
ccaggaggtagctcttattccccat

SEQ ID NO: 3653237 - DNA, 25 bp, Homo sapien
aatcttctattaggctgggaagtcc

SEQ ID NO: 3653238 - DNA, 25 bp, Homo sapien
ccactcccaggaggtagctcttatt

SEQ ID NO: 3653239 - DNA, 25 bp, Homo sapien
agtccagtgtgcgtggtctctttcc

SEQ ID NO: 3653240 - DNA, 25 bp, Homo sapien
gagaatccgctgtccgaacaaagag

SEQ ID NO: 3653241 - DNA, 25 bp, Homo sapien
caggcccttgcgtggtttcaaaata

SEQ ID NO: 3653242 - DNA, 25 bp, Homo sapien
caaagagtccgcagggatgtggtcc

SEQ ID NO: 3653243 - DNA, 25 bp, Homo sapien
taaagagattaacccaacagagcaa

SEQ ID NO: 3653244 - DNA, 25 bp, Homo sapien
aagggttcaatgtcacagatccgcc

SEQ ID NO: 3653245 - DNA, 25 bp, Homo sapien
ggttcaatgtcacagatccgccaga

SEQ ID NO: 3653246 - DNA, 25 bp, Homo sapien
caggcaagggttcaatgtcacagat

SEQ ID NO: 3653247 - DNA, 25 bp, Homo sapien
caatgtcacagatccgccagagcat

SEQ ID NO: 3653248 - DNA, 25 bp, Homo sapien
gaacgagaactagggctgtatctgt

SEQ ID NO: 3653249 - DNA, 25 bp, Homo sapien
gcatccctagaacaacgatgtcttt

SEQ ID NO: 3653250 - DNA, 25 bp, Homo sapien
catcataatggcactggcagtctca

SEQ ID NO: 3653251 - DNA, 25 bp, Homo sapien
caacgatgtctttagtggttgtggg

SEQ ID NO: 3653252 - DNA, 25 bp, Homo sapien
tagggagccatggacaccctgagac

SEQ ID NO: 3653253 - DNA, 25 bp, Homo sapien
gggagccatggacaccctgagactg

SEQ ID NO: 3653254 - DNA, 25 bp, Homo sapien
gagccatggacaccctgagactgca

SEQ ID NO: 3653255 - DNA, 25 bp, Homo sapien
atagggagccatggacaccctgaga

SEQ ID NO: 3653256 - DNA, 25 bp, Homo sapien
ccataggcccttggcatttccagtc

SEQ ID NO: 3653257 - DNA, 25 bp, Homo sapien
ttgacttcgggacctgagctgacac

SEQ ID NO: 3653258 - DNA, 25 bp, Homo sapien
cagccataggcccttggcatttcca

SEQ ID NO: 3653259 - DNA, 25 bp, Homo sapien
gacttcgggacctgagctgacacca

SEQ ID NO: 3653260 - DNA, 25 bp, Homo sapien
aattcaacaacatctggtagcttat

SEQ ID NO: 3653261 - DNA, 25 bp, Homo sapien
tgtttctacaatgggcagccttcca

SEQ ID NO: 3653262 - DNA, 25 bp, Homo sapien
tagcttatataaggagagaggatgt

SEQ ID NO: 3653263 - DNA, 25 bp, Homo sapien
ttacaatcggtgatttttctggaca

SEQ ID NO: 3653264 - DNA, 25 bp, Homo sapien
gagagtatccatagcaccatgggtg

SEQ ID NO: 3653265 - DNA, 25 bp, Homo sapien
tttcaattacagtggcatgcagctc

SEQ ID NO: 3653266 - DNA, 25 bp, Homo sapien
catccttggattctgagagctaccc

SEQ ID NO: 3653267 - DNA, 25 bp, Homo sapien
ttcaaccactaggatagcagtgccc

SEQ ID NO: 3653268 - DNA, 25 bp, Homo sapien
ctatgtcaggagtatggtgagcaca

SEQ ID NO: 3653269 - DNA, 25 bp, Homo sapien
ggtgagcacattgcatccatactcc

SEQ ID NO: 3653270 - DNA, 25 bp, Homo sapien
ttaactcccactactattctgcagg

SEQ ID NO: 3653271 - DNA, 25 bp, Homo sapien
ttgaatgcgtgttagtgatgtctgc

SEQ ID NO: 3653272 - DNA, 25 bp, Homo sapien
tattcatattcacgaggaacctctg

SEQ ID NO: 3653273 - DNA, 25 bp, Homo sapien
gctgtctacacaatgtactctctgg

SEQ ID NO: 3653274 - DNA, 25 bp, Homo sapien
tattcggtgtgtttaagctgtctac

SEQ ID NO: 3653275 - DNA, 25 bp, Homo sapien
aaatgcatggaaacaggctcaaatc

SEQ ID NO: 3653276 - DNA, 25 bp, Homo sapien
gctttcccatgtggatgacagagtc

SEQ ID NO: 3653277 - DNA, 25 bp, Homo sapien
ccactgctttcccatgtggatgaca

SEQ ID NO: 3653278 - DNA, 25 bp, Homo sapien
catgtggatgacagagtcaggctct

SEQ ID NO: 3653279 - DNA, 25 bp, Homo sapien
ttcccatgtggatgacagagtcagg

SEQ ID NO: 3653280 - DNA, 25 bp, Homo sapien
tcccttgcatccacaaatgagcctg

SEQ ID NO: 3653281 - DNA, 25 bp, Homo sapien
ctccgccaatccctgctgcagttcc

SEQ ID NO: 3653282 - DNA, 25 bp, Homo sapien
gttctccctgagaagcctcttctag

SEQ ID NO: 3653283 - DNA, 25 bp, Homo sapien
tcttctaggatccttagtgaagcct

SEQ ID NO: 3653284 - DNA, 25 bp, Homo sapien
tgcaaatgcagagtgagccaacaca

SEQ ID NO: 3653285 - DNA, 25 bp, Homo sapien
cccttgtgggtggatacctgtggca

SEQ ID NO: 3653286 - DNA, 25 bp, Homo sapien
ctgtgcagggatcgtcaccaggaca

SEQ ID NO: 3653287 - DNA, 25 bp, Homo sapien
cttagataaagggtgcaggaattgc

SEQ ID NO: 3653288 - DNA, 25 bp, Homo sapien
ccgcccacctctgactcctaagtag

SEQ ID NO: 3653289 - DNA, 25 bp, Homo sapien
ggcatggtctcgactcactgtagtc

SEQ ID NO: 3653290 - DNA, 25 bp, Homo sapien
caatccgcccacctctgactcctaa

SEQ ID NO: 3653291 - DNA, 25 bp, Homo sapien
atccgcccacctctgactcctaagt

SEQ ID NO: 3653292 - DNA, 25 bp, Homo sapien
taatagtgttagtgaagctacccag

SEQ ID NO: 3653293 - DNA, 25 bp, Homo sapien
tacaaatgccaaaaacgattatgtt

SEQ ID NO: 3653294 - DNA, 25 bp, Homo sapien
agctacccaggatattcagaactca

SEQ ID NO: 3653295 - DNA, 25 bp, Homo sapien
gatgttttctgaggaatttgccttg

SEQ ID NO: 3653296 - DNA, 25 bp, Homo sapien
agtttgctgactataatggcttcaa

SEQ ID NO: 3653297 - DNA, 25 bp, Homo sapien
attctaagtctctgagggattgccg

SEQ ID NO: 3653298 - DNA, 25 bp, Homo sapien
tctctgagggattgccgcactgtct

SEQ ID NO: 3653299 - DNA, 25 bp, Homo sapien
gcttcaagctccacctatgttcctg

SEQ ID NO: 3653300 - DNA, 25 bp, Homo sapien
agcggtagcggcttggcagctgctc

SEQ ID NO: 3653301 - DNA, 25 bp, Homo sapien
ggagcggtagcggcttggcagctgc

SEQ ID NO: 3653302 - DNA, 25 bp, Homo sapien
cagggggagcggtagcggcttggca

SEQ ID NO: 3653303 - DNA, 25 bp, Homo sapien
gtagcggcttggcagctgctccccg

SEQ ID NO: 3653304 - DNA, 25 bp, Homo sapien
tgcaacctggaacaattacaatctg

SEQ ID NO: 3653305 - DNA, 25 bp, Homo sapien
tcccctgaatgcagttgacgaaagg

SEQ ID NO: 3653306 - DNA, 25 bp, Homo sapien
tctgatcactgcagatccgggccac

SEQ ID NO: 3653307 - DNA, 25 bp, Homo sapien
gacgaaaggccgaaaggctggatcc

SEQ ID NO: 3653308 - DNA, 25 bp, Homo sapien
tgtgtgccagaattcgaagatgaac

SEQ ID NO: 3653309 - DNA, 25 bp, Homo sapien
gcatcaggaaaactgtgttaagttc

SEQ ID NO: 3653310 - DNA, 25 bp, Homo sapien
tcagggcttcgacccgaattgggct

SEQ ID NO: 3653311 - DNA, 25 bp, Homo sapien
atgaacaaaagacgcctgcatcagg

SEQ ID NO: 3653312 - DNA, 25 bp, Homo sapien
gctctgcttcttggttcgctgggat

SEQ ID NO: 3653313 - DNA, 25 bp, Homo sapien
tcttggttcgctgggatattccaca

SEQ ID NO: 3653314 - DNA, 25 bp, Homo sapien
tctgcttcttggttcgctgggatat

SEQ ID NO: 3653315 - DNA, 25 bp, Homo sapien
tgcttcttggttcgctgggatattc

SEQ ID NO: 3653316 - DNA, 25 bp, Homo sapien
ccatgaccagctaagatattgattt

SEQ ID NO: 3653317 - DNA, 25 bp, Homo sapien
accatgaccagctaagatattgatt

SEQ ID NO: 3653318 - DNA, 25 bp, Homo sapien
catgaccagctaagatattgatttt

SEQ ID NO: 3653319 - DNA, 25 bp, Homo sapien
tcatgggggagcaacaacactgtcc

SEQ ID NO: 3653320 - DNA, 25 bp, Homo sapien
gaaacacaagctggtcccttcatag

SEQ ID NO: 3653321 - DNA, 25 bp, Homo sapien
acactgtcctcaagtggtttctgga

SEQ ID NO: 3653322 - DNA, 25 bp, Homo sapien
caagctggtcccttcatagctgtat

SEQ ID NO: 3653323 - DNA, 25 bp, Homo sapien
cacttagtaagatgatgtccagcac

SEQ ID NO: 3653324 - DNA, 25 bp, Homo sapien
tgtccagcactaactagcaagaatg

SEQ ID NO: 3653325 - DNA, 25 bp, Homo sapien
tagctttggcacaccctttatggaa

SEQ ID NO: 3653326 - DNA, 25 bp, Homo sapien
ggccacatgtggtttaatctggaca

SEQ ID NO: 3653327 - DNA, 25 bp, Homo sapien
gaattatgggatctcatcaatttaa

SEQ ID NO: 3653328 - DNA, 25 bp, Homo sapien
tatgggaattatgggatctcatcaa

SEQ ID NO: 3653329 - DNA, 25 bp, Homo sapien
tgggaattatgggatctcatcaatt

SEQ ID NO: 3653330 - DNA, 25 bp, Homo sapien
atatgggaattatgggatctcatca

SEQ ID NO: 3653331 - DNA, 25 bp, Homo sapien
gcgcagtggactctgcgcctgtgcc

SEQ ID NO: 3653332 - DNA, 25 bp, Homo sapien
ccgcgcagtggactctgcgcctgtg

SEQ ID NO: 3653333 - DNA, 25 bp, Homo sapien
gcagtggactctgcgcctgtgcctg

SEQ ID NO: 3653334 - DNA, 25 bp, Homo sapien
ctgcagctagctccccggtcccgcc

SEQ ID NO: 3653335 - DNA, 25 bp, Homo sapien
cctccacaggagacggagcaccgta

SEQ ID NO: 3653336 - DNA, 25 bp, Homo sapien
gcctccacaggagacggagcaccgt

SEQ ID NO: 3653337 - DNA, 25 bp, Homo sapien
ctccacaggagacggagcaccgtac

SEQ ID NO: 3653338 - DNA, 25 bp, Homo sapien
tcactgagaagacgggggaaatgaa

SEQ ID NO: 3653339 - DNA, 25 bp, Homo sapien
aaggaaatctcactgagaagacggg

SEQ ID NO: 3653340 - DNA, 25 bp, Homo sapien
caaggaaatctcactgagaagacgg

SEQ ID NO: 3653341 - DNA, 25 bp, Homo sapien
aatctcactgagaagacgggggaaa

SEQ ID NO: 3653342 - DNA, 25 bp, Homo sapien
gaaaggcatgcgatgggagcgggct

SEQ ID NO: 3653343 - DNA, 25 bp, Homo sapien
ggacggtacggggaaaggcatgcga

SEQ ID NO: 3653344 - DNA, 25 bp, Homo sapien
agcgggctggcttctagttttcctt

SEQ ID NO: 3653345 - DNA, 25 bp, Homo sapien
tgagatgaccagcgagtagcggaaa

SEQ ID NO: 3653346 - DNA, 25 bp, Homo sapien
ggctgcgcggcgttccgaggagcct

SEQ ID NO: 3653347 - DNA, 25 bp, Homo sapien
gctgcgcggcgttccgaggagcctc

SEQ ID NO: 3653348 - DNA, 25 bp, Homo sapien
cagggctgcgcggcgttccgaggag

SEQ ID NO: 3653349 - DNA, 25 bp, Homo sapien
agggctgcgcggcgttccgaggagc

SEQ ID NO: 3653350 - DNA, 25 bp, Homo sapien
tatatgttagttcccctctaccctc

SEQ ID NO: 3653351 - DNA, 25 bp, Homo sapien
tgcttgctaccatgcttaacatcaa

SEQ ID NO: 3653352 - DNA, 25 bp, Homo sapien
tgaaccaccatactggcccagtaaa

SEQ ID NO: 3653353 - DNA, 25 bp, Homo sapien
tgttaccttcaccttatgttttgca

SEQ ID NO: 3653354 - DNA, 25 bp, Homo sapien
aaaccgatctttgcaaaacgtggag

SEQ ID NO: 3653355 - DNA, 25 bp, Homo sapien
tgttgactctgaggcaaaaccgatc

SEQ ID NO: 3653356 - DNA, 25 bp, Homo sapien
gacttgtaaacataggacacaccgg

SEQ ID NO: 3653357 - DNA, 25 bp, Homo sapien
gacacaccggaaccaatctgaagag

SEQ ID NO: 3653358 - DNA, 25 bp, Homo sapien
gagttggagtgctatctacttgcaa

SEQ ID NO: 3653359 - DNA, 25 bp, Homo sapien
caaactacaggacaaaggtatgaca

SEQ ID NO: 3653360 - DNA, 25 bp, Homo sapien
tgtgccttttacacgcatattaaga

SEQ ID NO: 3653361 - DNA, 25 bp, Homo sapien
tacttgcaattcacaaaagttgaac

SEQ ID NO: 3653362 - DNA, 25 bp, Homo sapien
tcttttcacttttctgcccaagcca

SEQ ID NO: 3653363 - DNA, 25 bp, Homo sapien
cttttcacttttctgcccaagccaa

SEQ ID NO: 3653364 - DNA, 25 bp, Homo sapien
ttttcacttttctgcccaagccaac

SEQ ID NO: 3653365 - DNA, 25 bp, Homo sapien
tgatgacatcggttaaagtggagca

SEQ ID NO: 3653366 - DNA, 25 bp, Homo sapien
caattccgcaagtgcaaaggttctt

SEQ ID NO: 3653367 - DNA, 25 bp, Homo sapien
tctttttcagatgatgacatcggtt

SEQ ID NO: 3653368 - DNA, 25 bp, Homo sapien
aaatcgctgtgcatgtttatccgtt

SEQ ID NO: 3653369 - DNA, 25 bp, Homo sapien
gcatcatgcattggattggacccag

SEQ ID NO: 3653370 - DNA, 25 bp, Homo sapien
gaatacagacatcgactgggcttcc

SEQ ID NO: 3653371 - DNA, 25 bp, Homo sapien
tgaactggttgcctgaaaggtgcct

SEQ ID NO: 3653372 - DNA, 25 bp, Homo sapien
ggaagcatgataaactacctgcgga

SEQ ID NO: 3653373 - DNA, 25 bp, Homo sapien
caaaacatggttctgattagaggca

SEQ ID NO: 3653374 - DNA, 25 bp, Homo sapien
tatgaacccagcaaatagagctgac

SEQ ID NO: 3653375 - DNA, 25 bp, Homo sapien
tgtggatccaaaatataccctgaag

SEQ ID NO: 3653376 - DNA, 25 bp, Homo sapien
tctaataaagcctcatgcagtggag

SEQ ID NO: 3653377 - DNA, 25 bp, Homo sapien
tcttcaagacattcatatcagctgc

SEQ ID NO: 3653378 - DNA, 25 bp, Homo sapien
ttcaagacattcatatcagctgcac

SEQ ID NO: 3653379 - DNA, 25 bp, Homo sapien
caagacattcatatcagctgcacag

SEQ ID NO: 3653380 - DNA, 25 bp, Homo sapien
agacattcatatcagctgcacagac

SEQ ID NO: 3653381 - DNA, 25 bp, Homo sapien
gattttggacaagttgttccacatg

SEQ ID NO: 3653382 - DNA, 25 bp, Homo sapien
tgaattgattttggacaagttgttc

SEQ ID NO: 3653383 - DNA, 25 bp, Homo sapien
tcatatgaattgattttggacaagt

SEQ ID NO: 3653384 - DNA, 25 bp, Homo sapien
tatgaattgattttggacaagttgt

SEQ ID NO: 3653385 - DNA, 25 bp, Homo sapien
tttattattgcatgcttatagctag

SEQ ID NO: 3653386 - DNA, 25 bp, Homo sapien
tattgcatgcttatagctagaaaaa

SEQ ID NO: 3653387 - DNA, 25 bp, Homo sapien
tattattgcatgcttatagctagaa

SEQ ID NO: 3653388 - DNA, 25 bp, Homo sapien
gatttattattgcatgcttatagct

SEQ ID NO: 3653389 - DNA, 25 bp, Homo sapien
tatgatagctcaaaggtccgtgcac

SEQ ID NO: 3653390 - DNA, 25 bp, Homo sapien
ttttggtccacataacagtgagggt

SEQ ID NO: 3653391 - DNA, 25 bp, Homo sapien
tggaaattgatacacccctcatgag

SEQ ID NO: 3653392 - DNA, 25 bp, Homo sapien
tcatgtcagccctagagatcagact

SEQ ID NO: 3653393 - DNA, 25 bp, Homo sapien
gaaactgaatgttatcaaagacaaa

SEQ ID NO: 3653394 - DNA, 25 bp, Homo sapien
gacaaattatgttaggaatgccatc

SEQ ID NO: 3653395 - DNA, 25 bp, Homo sapien
ggttgacagtagtccattacactaa

SEQ ID NO: 3653396 - DNA, 25 bp, Homo sapien
tagaagctaagccagagatctggtg

SEQ ID NO: 3653397 - DNA, 25 bp, Homo sapien
ccatccatgattatttttgaaagtg

SEQ ID NO: 3653398 - DNA, 25 bp, Homo sapien
acttcatacaaaacaatttattgtc

SEQ ID NO: 3653399 - DNA, 25 bp, Homo sapien
acaatatttgccatccatgattatt

SEQ ID NO: 3653400 - DNA, 25 bp, Homo sapien
tataaacgatttaatggattgaaac

SEQ ID NO: 3653401 - DNA, 25 bp, Homo sapien
tagaggctagcaccagaaacgattc

SEQ ID NO: 3653402 - DNA, 25 bp, Homo sapien
ttggctgattaggacgtcaagaccc

SEQ ID NO: 3653403 - DNA, 25 bp, Homo sapien
gattaagcgcttattctacggagag

SEQ ID NO: 3653404 - DNA, 25 bp, Homo sapien
gaattgacggtacccactgaaatag

SEQ ID NO: 3653405 - DNA, 25 bp, Homo sapien
tgttgaatcctgcttgctgacattc

SEQ ID NO: 3653406 - DNA, 25 bp, Homo sapien
gaatcctgcttgctgacattcagta

SEQ ID NO: 3653407 - DNA, 25 bp, Homo sapien
tgatgttgaatcctgcttgctgaca

SEQ ID NO: 3653408 - DNA, 25 bp, Homo sapien
ctgatgttgaatcctgcttgctgac

SEQ ID NO: 3653409 - DNA, 25 bp, Homo sapien
ctgtggtgtagagattagggtaagg

SEQ ID NO: 3653410 - DNA, 25 bp, Homo sapien
tgtatgtgaggaacgaggaaccaca

SEQ ID NO: 3653411 - DNA, 25 bp, Homo sapien
atgtgaggaacgaggaaccacaaag

SEQ ID NO: 3653412 - DNA, 25 bp, Homo sapien
tagagattagggtaaggaaggaaca

SEQ ID NO: 3653413 - DNA, 25 bp, Homo sapien
gacctgcggttttgtgagagaacca

SEQ ID NO: 3653414 - DNA, 25 bp, Homo sapien
ttccaccccatgacctgcggttttg

SEQ ID NO: 3653415 - DNA, 25 bp, Homo sapien
tgataacagtatgatccacttttct

SEQ ID NO: 3653416 - DNA, 25 bp, Homo sapien
ctggtgaagccctttttgataacag

SEQ ID NO: 3653417 - DNA, 25 bp, Homo sapien
tgcttggtgtgaactccacgactgg

SEQ ID NO: 3653418 - DNA, 25 bp, Homo sapien
atttgggccattgcctgtgtgggac

SEQ ID NO: 3653419 - DNA, 25 bp, Homo sapien
gaccttgatgcgctaacccattacc

SEQ ID NO: 3653420 - DNA, 25 bp, Homo sapien
gtgcttccccatggagaccttgatg

SEQ ID NO: 3653421 - DNA, 25 bp, Homo sapien
ctaattcaagctcaaagatgttaaa

SEQ ID NO: 3653422 - DNA, 25 bp, Homo sapien
ttttcctcttatcagagttcagctc

SEQ ID NO: 3653423 - DNA, 25 bp, Homo sapien
tttttcctcttatcagagttcagct

SEQ ID NO: 3653424 - DNA, 25 bp, Homo sapien
tttcctcttatcagagttcagctcc

SEQ ID NO: 3653425 - DNA, 25 bp, Homo sapien
tttgctttttccatttgttccactc

SEQ ID NO: 3653426 - DNA, 25 bp, Homo sapien
ctttgctttttccatttgttccact

SEQ ID NO: 3653427 - DNA, 25 bp, Homo sapien
ttgctttttccatttgttccactcc

SEQ ID NO: 3653428 - DNA, 25 bp, Homo sapien
tgatgcccactttcaaacaccgctg

SEQ ID NO: 3653429 - DNA, 25 bp, Homo sapien
tagccaatcgaaatgtctagccgcc

SEQ ID NO: 3653430 - DNA, 25 bp, Homo sapien
tgtgccaaacatttgctgcgccagg

SEQ ID NO: 3653431 - DNA, 25 bp, Homo sapien
taaactgtctatcccttgtcagagc

SEQ ID NO: 3653432 - DNA, 25 bp, Homo sapien
gctgattatcacagctgcagaaggg

SEQ ID NO: 3653433 - DNA, 25 bp, Homo sapien
tgctgattatcacagctgcagaagg

SEQ ID NO: 3653434 - DNA, 25 bp, Homo sapien
ccagattcaatttagcttggtgaag

SEQ ID NO: 3653435 - DNA, 25 bp, Homo sapien
ttggccagattcaatttagcttggt

SEQ ID NO: 3653436 - DNA, 25 bp, Homo sapien
cctccagtattcccgttggccagat

SEQ ID NO: 3653437 - DNA, 25 bp, Homo sapien
ttaaatgcttctatgcaggtaatca

SEQ ID NO: 3653438 - DNA, 25 bp, Homo sapien
gcctgggcaacagaacctgactctg

SEQ ID NO: 3653439 - DNA, 25 bp, Homo sapien
agcctgggcaacagaacctgactct

SEQ ID NO: 3653440 - DNA, 25 bp, Homo sapien
tggtgacatagatttttgcctttag

SEQ ID NO: 3653441 - DNA, 25 bp, Homo sapien
tgacatagatttttgcctttagcat

SEQ ID NO: 3653442 - DNA, 25 bp, Homo sapien
ctgggcttggtgacatagatttttg

SEQ ID NO: 3653443 - DNA, 25 bp, Homo sapien
gcttggtgacatagatttttgcctt

SEQ ID NO: 3653444 - DNA, 25 bp, Homo sapien
cagaaaagtggtcctgatccagaca

SEQ ID NO: 3653445 - DNA, 25 bp, Homo sapien
agtggtcctgatccagacaccggga

SEQ ID NO: 3653446 - DNA, 25 bp, Homo sapien
cagacaccgggagagggttcttaga

SEQ ID NO: 3653447 - DNA, 25 bp, Homo sapien
tactgttacagaaaagtggtcctga

SEQ ID NO: 3653448 - DNA, 25 bp, Homo sapien
ggaaatcgccaaggacacacagatg

SEQ ID NO: 3653449 - DNA, 25 bp, Homo sapien
gctggtgagaaacctgcctggtccg

SEQ ID NO: 3653450 - DNA, 25 bp, Homo sapien
gctagaggagttgctgccatgacaa

SEQ ID NO: 3653451 - DNA, 25 bp, Homo sapien
caccaaaccatgaaggagggagatc

SEQ ID NO: 3653452 - DNA, 25 bp, Homo sapien
ttaagagaggtgacaccagcagaac

SEQ ID NO: 3653453 - DNA, 25 bp, Homo sapien
aagagaggtgacaccagcagaacgt

SEQ ID NO: 3653454 - DNA, 25 bp, Homo sapien
aggattaagagaggtgacaccagca

SEQ ID NO: 3653455 - DNA, 25 bp, Homo sapien
gattaagagaggtgacaccagcaga

SEQ ID NO: 3653456 - DNA, 25 bp, Homo sapien
gaagaaagacttgatcacagtgatc

SEQ ID NO: 3653457 - DNA, 25 bp, Homo sapien
taaaactagtcttgggcaggaagaa

SEQ ID NO: 3653458 - DNA, 25 bp, Homo sapien
aggaagaaagacttgatcacagtga

SEQ ID NO: 3653459 - DNA, 25 bp, Homo sapien
cctaaaactagtcttgggcaggaag

SEQ ID NO: 3653460 - DNA, 25 bp, Homo sapien
gacattcccgtgatgattactcttt

SEQ ID NO: 3653461 - DNA, 25 bp, Homo sapien
attgttggacattcccgtgatgatt

SEQ ID NO: 3653462 - DNA, 25 bp, Homo sapien
attcccgtgatgattactcttttga

SEQ ID NO: 3653463 - DNA, 25 bp, Homo sapien
ttggacattcccgtgatgattactc

SEQ ID NO: 3653464 - DNA, 25 bp, Homo sapien
agtgagcctgcggtgagttgcacca

SEQ ID NO: 3653465 - DNA, 25 bp, Homo sapien
ttgtaaaagcagattgaggctgggc

SEQ ID NO: 3653466 - DNA, 25 bp, Homo sapien
cagcccaagtgatatagcagggctt

SEQ ID NO: 3653467 - DNA, 25 bp, Homo sapien
tgggcacactggcagggaatagtcc

SEQ ID NO: 3653468 - DNA, 25 bp, Homo sapien
tgctactgttactctggcagccgtc

SEQ ID NO: 3653469 - DNA, 25 bp, Homo sapien
tatgatgggaccagctgagcctaga

SEQ ID NO: 3653470 - DNA, 25 bp, Homo sapien
tcctcgccaagatttgttatgatgg

SEQ ID NO: 3653471 - DNA, 25 bp, Homo sapien
tgagctcaggatgactctgctactg

SEQ ID NO: 3653472 - DNA, 25 bp, Homo sapien
gagcgtggggctctgtatcaagcct

SEQ ID NO: 3653473 - DNA, 25 bp, Homo sapien
tgtatcaagccttaagagatactcg

SEQ ID NO: 3653474 - DNA, 25 bp, Homo sapien
tatcaagccttaagagatactcgca

SEQ ID NO: 3653475 - DNA, 25 bp, Homo sapien
gggctctgtatcaagccttaagaga

SEQ ID NO: 3653476 - DNA, 25 bp, Homo sapien
taacacagctggctactacagatcc

SEQ ID NO: 3653477 - DNA, 25 bp, Homo sapien
gtggccttgcaaccgggactgtttc

SEQ ID NO: 3653478 - DNA, 25 bp, Homo sapien
ggactgtttcgcaggcagctgaaga

SEQ ID NO: 3653479 - DNA, 25 bp, Homo sapien
tgctctggagtcatcccgtggatgg

SEQ ID NO: 3653480 - DNA, 25 bp, Homo sapien
cttcctaccttcaccccaacaacat

SEQ ID NO: 3653481 - DNA, 25 bp, Homo sapien
taccttcaccccaacaacatcgtca

SEQ ID NO: 3653482 - DNA, 25 bp, Homo sapien
cctcttcttagtgagaaaatcactt

SEQ ID NO: 3653483 - DNA, 25 bp, Homo sapien
ctcttcttagtgagaaaatcacttc

SEQ ID NO: 3653484 - DNA, 25 bp, Homo sapien
cagaaagccagttgtgatcaatggc

SEQ ID NO: 3653485 - DNA, 25 bp, Homo sapien
ggcccacaacgagatcacagaagca

SEQ ID NO: 3653486 - DNA, 25 bp, Homo sapien
aaatcatgaacagaaggcccaggaa

SEQ ID NO: 3653487 - DNA, 25 bp, Homo sapien
cagcatgaggcccacaacgagatca

SEQ ID NO: 3653488 - DNA, 25 bp, Homo sapien
gcactattcctaggcctccaaggtg

SEQ ID NO: 3653489 - DNA, 25 bp, Homo sapien
gcagagcctttatcttgagcagtgt

SEQ ID NO: 3653490 - DNA, 25 bp, Homo sapien
gatggagccaacatcatcctctgtc

SEQ ID NO: 3653491 - DNA, 25 bp, Homo sapien
ggatctttgcattaacggttgtgaa

SEQ ID NO: 3653492 - DNA, 25 bp, Homo sapien
catttgagatcaggacgggtttttc

SEQ ID NO: 3653493 - DNA, 25 bp, Homo sapien
taagccaatggtacaaacgtctcca

SEQ ID NO: 3653494 - DNA, 25 bp, Homo sapien
caacataagggctcatcaacaggag

SEQ ID NO: 3653495 - DNA, 25 bp, Homo sapien
caagtgaaactgacatgcctgacaa

SEQ ID NO: 3653496 - DNA, 25 bp, Homo sapien
catcttagctgagggagtaatggag

SEQ ID NO: 3653497 - DNA, 25 bp, Homo sapien
tcatctttcttgttgtcagttaaag

SEQ ID NO: 3653498 - DNA, 25 bp, Homo sapien
gcatctgctcattttaggcaaatta

SEQ ID NO: 3653499 - DNA, 25 bp, Homo sapien
aaacatacttgtctaggctcatctt

SEQ ID NO: 3653500 - DNA, 25 bp, Homo sapien
ggaggaaagccagtttaaagaggca

SEQ ID NO: 3653501 - DNA, 25 bp, Homo sapien
gaggaaagccagtttaaagaggcag

SEQ ID NO: 3653502 - DNA, 25 bp, Homo sapien
gcttggccgcaaccaaacccttgta

SEQ ID NO: 3653503 - DNA, 25 bp, Homo sapien
taaagaggcagcttggccgcaacca

SEQ ID NO: 3653504 - DNA, 25 bp, Homo sapien
gcagcctttaggtttggccgcaaac

SEQ ID NO: 3653505 - DNA, 25 bp, Homo sapien
tcattgaggcgcgttcagaagctgc

SEQ ID NO: 3653506 - DNA, 25 bp, Homo sapien
tcccgaggagcgaagacgtccttta

SEQ ID NO: 3653507 - DNA, 25 bp, Homo sapien
tcgtctgtccggagtagcgaaggcc

SEQ ID NO: 3653508 - DNA, 25 bp, Homo sapien
cgagcgggttacatggcctcgcgct

SEQ ID NO: 3653509 - DNA, 25 bp, Homo sapien
taagaatgtttcgagattggccccg

SEQ ID NO: 3653510 - DNA, 25 bp, Homo sapien
gctaccgtcgcagaaatcaagtcac

SEQ ID NO: 3653511 - DNA, 25 bp, Homo sapien
cagatggcacccagtccaaaggact

SEQ ID NO: 3653512 - DNA, 25 bp, Homo sapien
ggcagaggagtaaggggtaagccat

SEQ ID NO: 3653513 - DNA, 25 bp, Homo sapien
aggcagaggagtaaggggtaagcca

SEQ ID NO: 3653514 - DNA, 25 bp, Homo sapien
tccccggtgtagaggtaagaggcca

SEQ ID NO: 3653515 - DNA, 25 bp, Homo sapien
gagtttctgcgccaagatggtgcca

SEQ ID NO: 3653516 - DNA, 25 bp, Homo sapien
gttaggctgcaacccgtagatggca

SEQ ID NO: 3653517 - DNA, 25 bp, Homo sapien
gttctcgcactccagataaggcgga

SEQ ID NO: 3653518 - DNA, 25 bp, Homo sapien
cggtagaaggagcaccctgaccaag

SEQ ID NO: 3653519 - DNA, 25 bp, Homo sapien
gagcaccctgaccaagctgcaaagt

SEQ ID NO: 3653520 - DNA, 25 bp, Homo sapien
atcccagagacagctagctgctggg

SEQ ID NO: 3653521 - DNA, 25 bp, Homo sapien
gagaccggtagaaggagcaccctga

SEQ ID NO: 3653522 - DNA, 25 bp, Homo sapien
tgattctactgagacaagccagctt

SEQ ID NO: 3653523 - DNA, 25 bp, Homo sapien
gtgattctactgagacaagccagct

SEQ ID NO: 3653524 - DNA, 25 bp, Homo sapien
taatgaacatagtgtacaacaacaa

SEQ ID NO: 3653525 - DNA, 25 bp, Homo sapien
tagtgtacaacaacaagctcctccc

SEQ ID NO: 3653526 - DNA, 25 bp, Homo sapien
gaagccttggattcatctctaatat

SEQ ID NO: 3653527 - DNA, 25 bp, Homo sapien
cccttctcacagtaggttgtgtatg

SEQ ID NO: 3653528 - DNA, 25 bp, Homo sapien
cgaggtctttgttcttgtggcttcc

SEQ ID NO: 3653529 - DNA, 25 bp, Homo sapien
gaacagagttcattccatctcgagg

SEQ ID NO: 3653530 - DNA, 25 bp, Homo sapien
tattgagcaccttctgcacgccttc

SEQ ID NO: 3653531 - DNA, 25 bp, Homo sapien
cctctctggaatgtgatgacctcag

SEQ ID NO: 3653532 - DNA, 25 bp, Homo sapien
tctatcatttagctcaagcccagaa

SEQ ID NO: 3653533 - DNA, 25 bp, Homo sapien
gcatctctatcatttagctcaagcc

SEQ ID NO: 3653534 - DNA, 25 bp, Homo sapien
tgcatctctatcatttagctcaagc

SEQ ID NO: 3653535 - DNA, 25 bp, Homo sapien
tctctatcatttagctcaagcccag

SEQ ID NO: 3653536 - DNA, 25 bp, Homo sapien
ttggacaataatttttctgctccat

SEQ ID NO: 3653537 - DNA, 25 bp, Homo sapien
tggacaataatttttctgctccatc

SEQ ID NO: 3653538 - DNA, 25 bp, Homo sapien
cttggacaataatttttctgctcca

SEQ ID NO: 3653539 - DNA, 25 bp, Homo sapien
ggacaataatttttctgctccatca

SEQ ID NO: 3653540 - DNA, 25 bp, Homo sapien
gggaagagcatcctgccgctgaaag

SEQ ID NO: 3653541 - DNA, 25 bp, Homo sapien
aaggacccacgtgtcccatcgcaga

SEQ ID NO: 3653542 - DNA, 25 bp, Homo sapien
aaggcgctgtagacttcctgtcggg

SEQ ID NO: 3653543 - DNA, 25 bp, Homo sapien
ccgctgaaagggacgcaaagatcca

SEQ ID NO: 3653544 - DNA, 25 bp, Homo sapien
cagaactttcaatcgaagtaggttc

SEQ ID NO: 3653545 - DNA, 25 bp, Homo sapien
caatcgaagtaggttccaccaaagt

SEQ ID NO: 3653546 - DNA, 25 bp, Homo sapien
ggttccaccaaagttaatccaatca

SEQ ID NO: 3653547 - DNA, 25 bp, Homo sapien
tcactatcagaactttcaatcgaag

SEQ ID NO: 3653548 - DNA, 25 bp, Homo sapien
ggtcaatgtccactttctgaagatt

SEQ ID NO: 3653549 - DNA, 25 bp, Homo sapien
cacttgagcattggtcaatgtccac

SEQ ID NO: 3653550 - DNA, 25 bp, Homo sapien
gcattggtcaatgtccactttctga

SEQ ID NO: 3653551 - DNA, 25 bp, Homo sapien
aaccagccatcacttgagcattggt

SEQ ID NO: 3653552 - DNA, 25 bp, Homo sapien
gcatagcccacgacacaaagattct

SEQ ID NO: 3653553 - DNA, 25 bp, Homo sapien
ctgagcatagcccacgacacaaaga

SEQ ID NO: 3653554 - DNA, 25 bp, Homo sapien
tagcccacgacacaaagattctttc

SEQ ID NO: 3653555 - DNA, 25 bp, Homo sapien
agggcctcctgagcatagcccacga

SEQ ID NO: 3653556 - DNA, 25 bp, Homo sapien
tccctctgccttgtagccaactgaa

SEQ ID NO: 3653557 - DNA, 25 bp, Homo sapien
ccctctgccttgtagccaactgaaa

SEQ ID NO: 3653558 - DNA, 25 bp, Homo sapien
cttggaagtggatcatttgtttttc

SEQ ID NO: 3653559 - DNA, 25 bp, Homo sapien
tgtttttcagctgtcacccatttcc

SEQ ID NO: 3653560 - DNA, 25 bp, Homo sapien
gtttttcagctgtcacccatttcct

SEQ ID NO: 3653561 - DNA, 25 bp, Homo sapien
tttcagctgtcacccatttcctcat

SEQ ID NO: 3653562 - DNA, 25 bp, Homo sapien
tctctctggttccttaattatcccg

SEQ ID NO: 3653563 - DNA, 25 bp, Homo sapien
acttctgtggattctcattgtcagg

SEQ ID NO: 3653564 - DNA, 25 bp, Homo sapien
cattggactcggtctgtgcacctaa

SEQ ID NO: 3653565 - DNA, 25 bp, Homo sapien
ttatcccgctgcagtgtcacttctg

SEQ ID NO: 3653566 - DNA, 25 bp, Homo sapien
gtttttatgctcgaatcctctccct

SEQ ID NO: 3653567 - DNA, 25 bp, Homo sapien
tcacagtttttatgctcgaatcctc

SEQ ID NO: 3653568 - DNA, 25 bp, Homo sapien
caatcacagtttttatgctcgaatc

SEQ ID NO: 3653569 - DNA, 25 bp, Homo sapien
cagtttttatgctcgaatcctctcc

SEQ ID NO: 3653570 - DNA, 25 bp, Homo sapien
tgcaagtatagacgcttacgataaa

SEQ ID NO: 3653571 - DNA, 25 bp, Homo sapien
gacgcttacgataaaaatatttgat

SEQ ID NO: 3653572 - DNA, 25 bp, Homo sapien
tagacgcttacgataaaaatatttg

SEQ ID NO: 3653573 - DNA, 25 bp, Homo sapien
gtatagacgcttacgataaaaatat

SEQ ID NO: 3653574 - DNA, 25 bp, Homo sapien
ttcatggatagaattcccttgttca

SEQ ID NO: 3653575 - DNA, 25 bp, Homo sapien
cttgttcatcttcacctctaatcat

SEQ ID NO: 3653576 - DNA, 25 bp, Homo sapien
agtctctttttctgctacgggttca

SEQ ID NO: 3653577 - DNA, 25 bp, Homo sapien
tcctggagtaatgtttaagtcagtc

SEQ ID NO: 3653578 - DNA, 25 bp, Homo sapien
ttacacactgtaatgtgctatcaca

SEQ ID NO: 3653579 - DNA, 25 bp, Homo sapien
tacacactgtaatgtgctatcacac

SEQ ID NO: 3653580 - DNA, 25 bp, Homo sapien
caagagggtccctttgtctctgttt

SEQ ID NO: 3653581 - DNA, 25 bp, Homo sapien
tgttgccggacaagaccattgaggg

SEQ ID NO: 3653582 - DNA, 25 bp, Homo sapien
tctctgtttgccgaatgttgccgga

SEQ ID NO: 3653583 - DNA, 25 bp, Homo sapien
tagtagagctcccactggtgaacca

SEQ ID NO: 3653584 - DNA, 25 bp, Homo sapien
tccgaaagttgttcactggtaagac

SEQ ID NO: 3653585 - DNA, 25 bp, Homo sapien
gctttgcaaatgcactcataggctc

SEQ ID NO: 3653586 - DNA, 25 bp, Homo sapien
ccaggatgatagaatcctgctttgc

SEQ ID NO: 3653587 - DNA, 25 bp, Homo sapien
taggctccaagaacgaatcctaggc

SEQ ID NO: 3653588 - DNA, 25 bp, Homo sapien
gaccataaacgtgaaaaatgccaga

SEQ ID NO: 3653589 - DNA, 25 bp, Homo sapien
agagtagctccggtgtcgccatggt

SEQ ID NO: 3653590 - DNA, 25 bp, Homo sapien
tatgtctggaccataaacgtgaaaa

SEQ ID NO: 3653591 - DNA, 25 bp, Homo sapien
aaatgccagagtagctccggtgtcg

SEQ ID NO: 3653592 - DNA, 25 bp, Homo sapien
ctgaaagttccaaataaaaccacag

SEQ ID NO: 3653593 - DNA, 25 bp, Homo sapien
gttccaaataaaaccacagtgtcat

SEQ ID NO: 3653594 - DNA, 25 bp, Homo sapien
agttccaaataaaaccacagtgtca

SEQ ID NO: 3653595 - DNA, 25 bp, Homo sapien
gtacttcctgaaatatgctgatccg

SEQ ID NO: 3653596 - DNA, 25 bp, Homo sapien
caaggtaggcagacataggcttctt

SEQ ID NO: 3653597 - DNA, 25 bp, Homo sapien
ctgcaaggtaggcagacataggctt

SEQ ID NO: 3653598 - DNA, 25 bp, Homo sapien
tgaaatatgctgatccggacccctt

SEQ ID NO: 3653599 - DNA, 25 bp, Homo sapien
tagaccaccagcatgctaacgaagt

SEQ ID NO: 3653600 - DNA, 25 bp, Homo sapien
tgctttgcgaaagtggtagaccacc

SEQ ID NO: 3653601 - DNA, 25 bp, Homo sapien
gaagtcgagcagcatacacagggct

SEQ ID NO: 3653602 - DNA, 25 bp, Homo sapien
cctggacgaagcatgggctgtcatc

SEQ ID NO: 3653603 - DNA, 25 bp, Homo sapien
taatacattggatgctggtagaata

SEQ ID NO: 3653604 - DNA, 25 bp, Homo sapien
ttggatgctggtagaataagtttct

SEQ ID NO: 3653605 - DNA, 25 bp, Homo sapien
ttaataatacattggatgctggtag

SEQ ID NO: 3653606 - DNA, 25 bp, Homo sapien
tacattggatgctggtagaataagt

SEQ ID NO: 3653607 - DNA, 25 bp, Homo sapien
cattcttcaaagtataatgcgctaa

SEQ ID NO: 3653608 - DNA, 25 bp, Homo sapien
gtataatgcgctaaaaatagttgag

SEQ ID NO: 3653609 - DNA, 25 bp, Homo sapien
agttgagtcatttaccatatttaaa

SEQ ID NO: 3653610 - DNA, 25 bp, Homo sapien
gagtcatttaccatatttaaacaca

SEQ ID NO: 3653611 - DNA, 25 bp, Homo sapien
ataagcttatattaggcctcctcct

SEQ ID NO: 3653612 - DNA, 25 bp, Homo sapien
tcaacaactccctctgttttgaatc

SEQ ID NO: 3653613 - DNA, 25 bp, Homo sapien
tgataagcttatattaggcctcctc

SEQ ID NO: 3653614 - DNA, 25 bp, Homo sapien
cgtgataagcttatattaggcctcc

SEQ ID NO: 3653615 - DNA, 25 bp, Homo sapien
ctccattcacgttccattgtctctg

SEQ ID NO: 3653616 - DNA, 25 bp, Homo sapien
ctgccctcaaggaacacatcttcac

SEQ ID NO: 3653617 - DNA, 25 bp, Homo sapien
actctccattcacgttccattgtct

SEQ ID NO: 3653618 - DNA, 25 bp, Homo sapien
ttaaactctccattcacgttccatt

SEQ ID NO: 3653619 - DNA, 25 bp, Homo sapien
tagaaggggcttcattgagagcgat

SEQ ID NO: 3653620 - DNA, 25 bp, Homo sapien
tgacagcatagaaggggcttcattg

SEQ ID NO: 3653621 - DNA, 25 bp, Homo sapien
gcatagaaggggcttcattgagagc

SEQ ID NO: 3653622 - DNA, 25 bp, Homo sapien
ccaaaactgcaataggacatagaaa

SEQ ID NO: 3653623 - DNA, 25 bp, Homo sapien
tttccaacaggataaggcccgatgc

SEQ ID NO: 3653624 - DNA, 25 bp, Homo sapien
ggataaggcccgatgcccggatgct

SEQ ID NO: 3653625 - DNA, 25 bp, Homo sapien
atccaaaaaggatcgtttccaacag

SEQ ID NO: 3653626 - DNA, 25 bp, Homo sapien
aaagtataggagcagagatccaaaa

SEQ ID NO: 3653627 - DNA, 25 bp, Homo sapien
ggcccggccgattcttgctgtattt

SEQ ID NO: 3653628 - DNA, 25 bp, Homo sapien
ccaggcccggccgattcttgctgta

SEQ ID NO: 3653629 - DNA, 25 bp, Homo sapien
aaaggttttctaatatgagagaaag

SEQ ID NO: 3653630 - DNA, 25 bp, Homo sapien
ttaaaaggttttctaatatgagaga

SEQ ID NO: 3653631 - DNA, 25 bp, Homo sapien
catctgcacaatgatgataatctct

SEQ ID NO: 3653632 - DNA, 25 bp, Homo sapien
tataacaatgctaaatttagtcaga

SEQ ID NO: 3653633 - DNA, 25 bp, Homo sapien
cattgttatgaaatcgtctgtagtc

SEQ ID NO: 3653634 - DNA, 25 bp, Homo sapien
taatttggactttccaatataagca

SEQ ID NO: 3653635 - DNA, 25 bp, Homo sapien
gtttgaatgcttcagctctctgcta

SEQ ID NO: 3653636 - DNA, 25 bp, Homo sapien
atgtacagacttcaaatcatgcgtc

SEQ ID NO: 3653637 - DNA, 25 bp, Homo sapien
gatcactcgttcacaaatgtacaga

SEQ ID NO: 3653638 - DNA, 25 bp, Homo sapien
aaactgacggtttagtcaaggcaga

SEQ ID NO: 3653639 - DNA, 25 bp, Homo sapien
tgcattggagtcctttacaggaaga

SEQ ID NO: 3653640 - DNA, 25 bp, Homo sapien
cattggagtcctttacaggaagaca

SEQ ID NO: 3653641 - DNA, 25 bp, Homo sapien
atatgcattggagtcctttacagga

SEQ ID NO: 3653642 - DNA, 25 bp, Homo sapien
tggagtcctttacaggaagacatat

SEQ ID NO: 3653643 - DNA, 25 bp, Homo sapien
gaaagactgagttgtatatggtgtc

SEQ ID NO: 3653644 - DNA, 25 bp, Homo sapien
actgagttgtatatggtgtcccttc

SEQ ID NO: 3653645 - DNA, 25 bp, Homo sapien
tgtatatggtgtcccttctagttct

SEQ ID NO: 3653646 - DNA, 25 bp, Homo sapien
gagttgtatatggtgtcccttctag

SEQ ID NO: 3653647 - DNA, 25 bp, Homo sapien
caagtggataaatggaactacacag

SEQ ID NO: 3653648 - DNA, 25 bp, Homo sapien
catcctagaatatgcacactgggca

SEQ ID NO: 3653649 - DNA, 25 bp, Homo sapien
tctctgatgggttgagtacagaaga

SEQ ID NO: 3653650 - DNA, 25 bp, Homo sapien
aagaggagacaagccaagtggataa

SEQ ID NO: 3653651 - DNA, 25 bp, Homo sapien
ttccaaatatctccacaaccaatgg

SEQ ID NO: 3653652 - DNA, 25 bp, Homo sapien
tatgtgaatattgcccagctgggtt

SEQ ID NO: 3653653 - DNA, 25 bp, Homo sapien
aatttgcattccaaagtgtctctgc

SEQ ID NO: 3653654 - DNA, 25 bp, Homo sapien
ccaatggatgtgaaatggaatcgca

SEQ ID NO: 3653655 - DNA, 25 bp, Homo sapien
ggggcatatatggacatgtcacagc

SEQ ID NO: 3653656 - DNA, 25 bp, Homo sapien
ggcatatatggacatgtcacagcca

SEQ ID NO: 3653657 - DNA, 25 bp, Homo sapien
gggcatatatggacatgtcacagcc

SEQ ID NO: 3653658 - DNA, 25 bp, Homo sapien
ctggggcatatatggacatgtcaca

SEQ ID NO: 3653659 - DNA, 25 bp, Homo sapien
caaaggatcccgtagtatagtcgac

SEQ ID NO: 3653660 - DNA, 25 bp, Homo sapien
tagtatagtcgacgtgcagaagtaa

SEQ ID NO: 3653661 - DNA, 25 bp, Homo sapien
gatcccgtagtatagtcgacgtgca

SEQ ID NO: 3653662 - DNA, 25 bp, Homo sapien
cagcattccaaaggatcccgtagta

SEQ ID NO: 3653663 - DNA, 25 bp, Homo sapien
taaagctgtaaggtgagccatggtc

SEQ ID NO: 3653664 - DNA, 25 bp, Homo sapien
taaatgcctggcgtaaagctgtaag

SEQ ID NO: 3653665 - DNA, 25 bp, Homo sapien
ggcgtaaagctgtaaggtgagccat

SEQ ID NO: 3653666 - DNA, 25 bp, Homo sapien
tgcctggcgtaaagctgtaaggtga

SEQ ID NO: 3653667 - DNA, 25 bp, Homo sapien
ctttatcatttttgccattccagtg

SEQ ID NO: 3653668 - DNA, 25 bp, Homo sapien
tttatcatttttgccattccagtgc

SEQ ID NO: 3653669 - DNA, 25 bp, Homo sapien
tagcaacagagcactcctgctgcag

SEQ ID NO: 3653670 - DNA, 25 bp, Homo sapien
acagagcactcctgctgcagcacac

SEQ ID NO: 3653671 - DNA, 25 bp, Homo sapien
agcaacagagcactcctgctgcagc

SEQ ID NO: 3653672 - DNA, 25 bp, Homo sapien
gagcactcctgctgcagcacacctt

SEQ ID NO: 3653673 - DNA, 25 bp, Homo sapien
taatttgacaaggactaagggctgc

SEQ ID NO: 3653674 - DNA, 25 bp, Homo sapien
taagggctgctaatactagtccaca

SEQ ID NO: 3653675 - DNA, 25 bp, Homo sapien
gcccagaagcaagccacgtgtggaa

SEQ ID NO: 3653676 - DNA, 25 bp, Homo sapien
tgtggaattgggatagctaaagctc

SEQ ID NO: 3653677 - DNA, 25 bp, Homo sapien
cagccctgagattgccgtatactgc

SEQ ID NO: 3653678 - DNA, 25 bp, Homo sapien
ctctccttattgtccaaaacgaaca

SEQ ID NO: 3653679 - DNA, 25 bp, Homo sapien
gaacaagtgaggatagtcccactgc

SEQ ID NO: 3653680 - DNA, 25 bp, Homo sapien
ccagagccgattgttcccacctcca

SEQ ID NO: 3653681 - DNA, 25 bp, Homo sapien
gtagcaaaaccgagaagacgagccc

SEQ ID NO: 3653682 - DNA, 25 bp, Homo sapien
agagtgacagttccgtaaacagtag

SEQ ID NO: 3653683 - DNA, 25 bp, Homo sapien
gagaatacagcgaaatgtgcttggc

SEQ ID NO: 3653684 - DNA, 25 bp, Homo sapien
gacgagcccatcttaggagaataca

SEQ ID NO: 3653685 - DNA, 25 bp, Homo sapien
gagtttatcttcaagtctcaacggg

SEQ ID NO: 3653686 - DNA, 25 bp, Homo sapien
ttcaagtctcaacggggtgtctact

SEQ ID NO: 3653687 - DNA, 25 bp, Homo sapien
gtccacatgggctgtcattgatttc

SEQ ID NO: 3653688 - DNA, 25 bp, Homo sapien
tccacatgggctgtcattgatttct

SEQ ID NO: 3653689 - DNA, 25 bp, Homo sapien
gggcctctgcatgccggacaggaca

SEQ ID NO: 3653690 - DNA, 25 bp, Homo sapien
tctgcatgccggacaggacagtagg

SEQ ID NO: 3653691 - DNA, 25 bp, Homo sapien
taaaaagcattaggccatttagctg

SEQ ID NO: 3653692 - DNA, 25 bp, Homo sapien
gccggacaggacagtaggatcagaa

SEQ ID NO: 3653693 - DNA, 25 bp, Homo sapien
ggaattcgttgagccgttcgtgaaa

SEQ ID NO: 3653694 - DNA, 25 bp, Homo sapien
cgttgagccgttcgtgaaagaaaca

SEQ ID NO: 3653695 - DNA, 25 bp, Homo sapien
gacccgtccgccagtcatatatgga

SEQ ID NO: 3653696 - DNA, 25 bp, Homo sapien
gtcatatatggaattcgttgagccg

SEQ ID NO: 3653697 - DNA, 25 bp, Homo sapien
aagagtattactgccagcatcctca

SEQ ID NO: 3653698 - DNA, 25 bp, Homo sapien
gtcccagcggtcaatgaggcacata

SEQ ID NO: 3653699 - DNA, 25 bp, Homo sapien
aggtgatcggatgttttcccctggc

SEQ ID NO: 3653700 - DNA, 25 bp, Homo sapien
cactaccaagagtattactgccagc

SEQ ID NO: 3653701 - DNA, 25 bp, Homo sapien
aagagtctggcaagacttttaaaga

SEQ ID NO: 3653702 - DNA, 25 bp, Homo sapien
taggtgagattagtttaggctttac

SEQ ID NO: 3653703 - DNA, 25 bp, Homo sapien
tttaggctttactaaagagtctggc

SEQ ID NO: 3653704 - DNA, 25 bp, Homo sapien
cacattaggtgagattagtttaggc

SEQ ID NO: 3653705 - DNA, 25 bp, Homo sapien
aacctgtttcctcatactggtctaa

SEQ ID NO: 3653706 - DNA, 25 bp, Homo sapien
ttaacctgtttcctcatactggtct

SEQ ID NO: 3653707 - DNA, 25 bp, Homo sapien
cctgtttcctcatactggtctaagt

SEQ ID NO: 3653708 - DNA, 25 bp, Homo sapien
acctgtttcctcatactggtctaag

SEQ ID NO: 3653709 - DNA, 25 bp, Homo sapien
tgcccctccatctaacattgcaggg

SEQ ID NO: 3653710 - DNA, 25 bp, Homo sapien
gcccctccatctaacattgcagggc

SEQ ID NO: 3653711 - DNA, 25 bp, Homo sapien
ttgcccctccatctaacattgcagg

SEQ ID NO: 3653712 - DNA, 25 bp, Homo sapien
cttgcccctccatctaacattgcag

SEQ ID NO: 3653713 - DNA, 25 bp, Homo sapien
gcagagataaacaccccacaagagg

SEQ ID NO: 3653714 - DNA, 25 bp, Homo sapien
tatagcggggctcatggaatgccga

SEQ ID NO: 3653715 - DNA, 25 bp, Homo sapien
gggactgtccgcactgcatagcaga

SEQ ID NO: 3653716 - DNA, 25 bp, Homo sapien
gatgagctcattgtgaactgcaaca

SEQ ID NO: 3653717 - DNA, 25 bp, Homo sapien
gcaataaacaacacagccgaaggaa

SEQ ID NO: 3653718 - DNA, 25 bp, Homo sapien
ctgggatgatcacacaatagaggac

SEQ ID NO: 3653719 - DNA, 25 bp, Homo sapien
tctcatctgctagagagaaacctgg

SEQ ID NO: 3653720 - DNA, 25 bp, Homo sapien
gaatgtgtgatagcaccaaagccca

SEQ ID NO: 3653721 - DNA, 25 bp, Homo sapien
aaagtgtaggctgtaactgaggccc

SEQ ID NO: 3653722 - DNA, 25 bp, Homo sapien
aagtcagagaggataggcatcctac

SEQ ID NO: 3653723 - DNA, 25 bp, Homo sapien
tctgactgctgactaaagtcagaga

SEQ ID NO: 3653724 - DNA, 25 bp, Homo sapien
gctgtctggcaacgtctctttctaa

SEQ ID NO: 3653725 - DNA, 25 bp, Homo sapien
agggatagggctttctggctaacca

SEQ ID NO: 3653726 - DNA, 25 bp, Homo sapien
gggatagggctttctggctaaccat

SEQ ID NO: 3653727 - DNA, 25 bp, Homo sapien
tctacttagaacactaggattactt

SEQ ID NO: 3653728 - DNA, 25 bp, Homo sapien
attcattgagttaacaatccaagat

SEQ ID NO: 3653729 - DNA, 25 bp, Homo sapien
tgagttaacaatccaagattaagat

SEQ ID NO: 3653730 - DNA, 25 bp, Homo sapien
aagattaagattctacttagaacac

SEQ ID NO: 3653731 - DNA, 25 bp, Homo sapien
gactgaagtcttgaggcaagaacaa

SEQ ID NO: 3653732 - DNA, 25 bp, Homo sapien
gcaacccaatggtgactgtcacagt

SEQ ID NO: 3653733 - DNA, 25 bp, Homo sapien
ggaatcaaaagcaacccaatggtga

SEQ ID NO: 3653734 - DNA, 25 bp, Homo sapien
caatggtgactgtcacagtcaaatg

SEQ ID NO: 3653735 - DNA, 25 bp, Homo sapien
tgttcaggtaggatccagatcggcc

SEQ ID NO: 3653736 - DNA, 25 bp, Homo sapien
tcactccaggctgaattgatactgc

SEQ ID NO: 3653737 - DNA, 25 bp, Homo sapien
gtcctctggatccaagctgtgctca

SEQ ID NO: 3653738 - DNA, 25 bp, Homo sapien
ctgtagcaatatcatctcgtgggtt

SEQ ID NO: 3653739 - DNA, 25 bp, Homo sapien
tacttgagttataggagccacgcac

SEQ ID NO: 3653740 - DNA, 25 bp, Homo sapien
tcatgatggaacgacctaggccctt

SEQ ID NO: 3653741 - DNA, 25 bp, Homo sapien
taacatcgatgttcgtgggtgccca

SEQ ID NO: 3653742 - DNA, 25 bp, Homo sapien
ccttggcgcttgctatgacactgag

SEQ ID NO: 3653743 - DNA, 25 bp, Homo sapien
ttaaaactatcccagatctcttctt

SEQ ID NO: 3653744 - DNA, 25 bp, Homo sapien
tagtcggcagcttaggattcccatg

SEQ ID NO: 3653745 - DNA, 25 bp, Homo sapien
caaatatgtgggtctaggaacttcc

SEQ ID NO: 3653746 - DNA, 25 bp, Homo sapien
catgttacatgtcgagcaagtggct

SEQ ID NO: 3653747 - DNA, 25 bp, Homo sapien
aaggaggtcaccaagcatataggcc

SEQ ID NO: 3653748 - DNA, 25 bp, Homo sapien
gagttggaccaacaagcaaacacaa

SEQ ID NO: 3653749 - DNA, 25 bp, Homo sapien
ggcatggaagaatcaaacctcttgg

SEQ ID NO: 3653750 - DNA, 25 bp, Homo sapien
tctcttgtgtgcacaactgagggca

SEQ ID NO: 3653751 - DNA, 25 bp, Homo sapien
cagacgtgagctgcagttcccagcc

SEQ ID NO: 3653752 - DNA, 25 bp, Homo sapien
ttgctgttactttccagtgcaccat

SEQ ID NO: 3653753 - DNA, 25 bp, Homo sapien
tctttcggcatagccatggctgcca

SEQ ID NO: 3653754 - DNA, 25 bp, Homo sapien
tttcggcatagccatggctgccagc

SEQ ID NO: 3653755 - DNA, 25 bp, Homo sapien
gctctttcggcatagccatggctgc

SEQ ID NO: 3653756 - DNA, 25 bp, Homo sapien
ctctttcggcatagccatggctgcc

SEQ ID NO: 3653757 - DNA, 25 bp, Homo sapien
ttcccactaaggatactatgtctat

SEQ ID NO: 3653758 - DNA, 25 bp, Homo sapien
ctaaggatactatgtctatgtgtct

SEQ ID NO: 3653759 - DNA, 25 bp, Homo sapien
tgtcttcccactaaggatactatgt

SEQ ID NO: 3653760 - DNA, 25 bp, Homo sapien
ggatactatgtctatgtgtcttctc

SEQ ID NO: 3653761 - DNA, 25 bp, Homo sapien
tttgtggatgcacagtacctctcca

SEQ ID NO: 3653762 - DNA, 25 bp, Homo sapien
tctgcacacaccacctgataatggt

SEQ ID NO: 3653763 - DNA, 25 bp, Homo sapien
gaatcttggtatttgtggatgcaca

SEQ ID NO: 3653764 - DNA, 25 bp, Homo sapien
gcactagaaaaatcaccaggtgaat

SEQ ID NO: 3653765 - DNA, 25 bp, Homo sapien
ggaagaacctgataatttgatttta

SEQ ID NO: 3653766 - DNA, 25 bp, Homo sapien
ttattgccaattgagagctgttcat

SEQ ID NO: 3653767 - DNA, 25 bp, Homo sapien
tgataaccagtggaagaacctgata

SEQ ID NO: 3653768 - DNA, 25 bp, Homo sapien
ccagtggaagaacctgataatttga

SEQ ID NO: 3653769 - DNA, 25 bp, Homo sapien
ttcaaaatctccttaaagctcatcc

SEQ ID NO: 3653770 - DNA, 25 bp, Homo sapien
ccttctcccattgcataattttcaa

SEQ ID NO: 3653771 - DNA, 25 bp, Homo sapien
ctctcacttccatgataatacatac

SEQ ID NO: 3653772 - DNA, 25 bp, Homo sapien
acctctcacttccatgataatacat

SEQ ID NO: 3653773 - DNA, 25 bp, Homo sapien
cacagaaacatgtgcacgtgagtcc

SEQ ID NO: 3653774 - DNA, 25 bp, Homo sapien
gaaacatgtgcacgtgagtcccttt

SEQ ID NO: 3653775 - DNA, 25 bp, Homo sapien
catgtgcacgtgagtccctttttaa

SEQ ID NO: 3653776 - DNA, 25 bp, Homo sapien
tgtgcacgtgagtccctttttaaag

SEQ ID NO: 3653777 - DNA, 25 bp, Homo sapien
cacatgtatctacaaagagtagcct

SEQ ID NO: 3653778 - DNA, 25 bp, Homo sapien
taagtttagcacatgtatctacaaa

SEQ ID NO: 3653779 - DNA, 25 bp, Homo sapien
caaagagtagccttttatatcctga

SEQ ID NO: 3653780 - DNA, 25 bp, Homo sapien
gccttttatatcctgaaccacacat

SEQ ID NO: 3653781 - DNA, 25 bp, Homo sapien
aatgtatatatgtgacgcttcctac

SEQ ID NO: 3653782 - DNA, 25 bp, Homo sapien
agtgagaagtaattggagtagtcag

SEQ ID NO: 3653783 - DNA, 25 bp, Homo sapien
tagtcagtattgctgatgatttcct

SEQ ID NO: 3653784 - DNA, 25 bp, Homo sapien
aggacccatcagagcccctcagttg

SEQ ID NO: 3653785 - DNA, 25 bp, Homo sapien
tcgaagaatgcagtagtagaaagct

SEQ ID NO: 3653786 - DNA, 25 bp, Homo sapien
ggccaaaccggcagaatattcttct

SEQ ID NO: 3653787 - DNA, 25 bp, Homo sapien
tgtctatacgtgaagagcttgtggc

SEQ ID NO: 3653788 - DNA, 25 bp, Homo sapien
tgaatgaagagtttactaaggagta

SEQ ID NO: 3653789 - DNA, 25 bp, Homo sapien
agctcgtttcactgtgagctgatga

SEQ ID NO: 3653790 - DNA, 25 bp, Homo sapien
tcatgcaagctcgtttcactgtgag

SEQ ID NO: 3653791 - DNA, 25 bp, Homo sapien
cctgggatgctctcatgcaagctcg

SEQ ID NO: 3653792 - DNA, 25 bp, Homo sapien
gatgctctcatgcaagctcgtttca

SEQ ID NO: 3653793 - DNA, 25 bp, Homo sapien
aattcagctctgcaggttcaggctc

SEQ ID NO: 3653794 - DNA, 25 bp, Homo sapien
tgcaccaattagcaatattcatctg

SEQ ID NO: 3653795 - DNA, 25 bp, Homo sapien
tcatgtggccaatgaattgccggtc

SEQ ID NO: 3653796 - DNA, 25 bp, Homo sapien
tgccggtctgattggaaactctttc

SEQ ID NO: 3653797 - DNA, 25 bp, Homo sapien
tcactgaggcatcattgttgtaggg

SEQ ID NO: 3653798 - DNA, 25 bp, Homo sapien
gaggcatcattgttgtagggtgttc

SEQ ID NO: 3653799 - DNA, 25 bp, Homo sapien
cactgaggcatcattgttgtagggt

SEQ ID NO: 3653800 - DNA, 25 bp, Homo sapien
ctgaggcatcattgttgtagggtgt

SEQ ID NO: 3653801 - DNA, 25 bp, Homo sapien
attctcactaacaaagggtgagctt

SEQ ID NO: 3653802 - DNA, 25 bp, Homo sapien
cttgtagtaggtatggccacgtgac

SEQ ID NO: 3653803 - DNA, 25 bp, Homo sapien
gtatggccacgtgactacattctca

SEQ ID NO: 3653804 - DNA, 25 bp, Homo sapien
gagcttgggacttaatccatgtgga

SEQ ID NO: 3653805 - DNA, 25 bp, Homo sapien
tgtgctagatctgaacacaaagttg

SEQ ID NO: 3653806 - DNA, 25 bp, Homo sapien
gagcatcccctcttacttgtctgat

SEQ ID NO: 3653807 - DNA, 25 bp, Homo sapien
gcaatatcatggctatccaatgaga

SEQ ID NO: 3653808 - DNA, 25 bp, Homo sapien
gaggagaatgctagctgtccaccaa

SEQ ID NO: 3653809 - DNA, 25 bp, Homo sapien
taggtaccacagttgagttctactg

SEQ ID NO: 3653810 - DNA, 25 bp, Homo sapien
gatttcgagtgtaggtaccacagtt

SEQ ID NO: 3653811 - DNA, 25 bp, Homo sapien
aaacaagtggatttcgagtgtaggt

SEQ ID NO: 3653812 - DNA, 25 bp, Homo sapien
gtttgttattggtgaaacaagtgga

SEQ ID NO: 3653813 - DNA, 25 bp, Homo sapien
gttttgccatcctacacacttgtag

SEQ ID NO: 3653814 - DNA, 25 bp, Homo sapien
agctgactttcagggatactagaag

SEQ ID NO: 3653815 - DNA, 25 bp, Homo sapien
gacctgcagagtgaaacgacattgt

SEQ ID NO: 3653816 - DNA, 25 bp, Homo sapien
cacttgtagtttggcaacaggtctc

SEQ ID NO: 3653817 - DNA, 25 bp, Homo sapien
gacactgacaaccatcattcacagc

SEQ ID NO: 3653818 - DNA, 25 bp, Homo sapien
gatgagatcactcccctctgtgtgt

SEQ ID NO: 3653819 - DNA, 25 bp, Homo sapien
cagacactgacaaccatcattcaca

SEQ ID NO: 3653820 - DNA, 25 bp, Homo sapien
ttgggaaaaatcagtggcgatgaga

SEQ ID NO: 3653821 - DNA, 25 bp, Homo sapien
gctgtatcgagttccaccatggaga

SEQ ID NO: 3653822 - DNA, 25 bp, Homo sapien
tctgacaaaggtttgaaattttgct

SEQ ID NO: 3653823 - DNA, 25 bp, Homo sapien
gggatgctgctgtatcgagttccac

SEQ ID NO: 3653824 - DNA, 25 bp, Homo sapien
tggaaccactgagggatgctgctgt

SEQ ID NO: 3653825 - DNA, 25 bp, Homo sapien
catccgttacaaactggtgctcagg

SEQ ID NO: 3653826 - DNA, 25 bp, Homo sapien
caactgtcagtatagagagaccagc

SEQ ID NO: 3653827 - DNA, 25 bp, Homo sapien
gggatcatcagctgtcaactgtcag

SEQ ID NO: 3653828 - DNA, 25 bp, Homo sapien
gctatcgtgctgagcaaggtctcac

SEQ ID NO: 3653829 - DNA, 25 bp, Homo sapien
tgaagtcctggtacccaaaggcaaa

SEQ ID NO: 3653830 - DNA, 25 bp, Homo sapien
tcctggtacccaaaggcaaagcatc

SEQ ID NO: 3653831 - DNA, 25 bp, Homo sapien
agtcctggtacccaaaggcaaagca

SEQ ID NO: 3653832 - DNA, 25 bp, Homo sapien
cctggtacccaaaggcaaagcatct

SEQ ID NO: 3653833 - DNA, 25 bp, Homo sapien
ccttgctactttgatagaggcattg

SEQ ID NO: 3653834 - DNA, 25 bp, Homo sapien
cctctgtacttgcccggttggccat

SEQ ID NO: 3653835 - DNA, 25 bp, Homo sapien
tcctctgtacttgcccggttggcca

SEQ ID NO: 3653836 - DNA, 25 bp, Homo sapien
gtcctctgtacttgcccggttggcc

SEQ ID NO: 3653837 - DNA, 25 bp, Homo sapien
tcaagaattggtattgtgggctgaa

SEQ ID NO: 3653838 - DNA, 25 bp, Homo sapien
cacggaagccacaaatcttgcagct

SEQ ID NO: 3653839 - DNA, 25 bp, Homo sapien
tctctcctttgaagatagatccaca

SEQ ID NO: 3653840 - DNA, 25 bp, Homo sapien
ctgaaaaccacagtggccctttggg

SEQ ID NO: 3653841 - DNA, 25 bp, Homo sapien
cagacaaggatgctctgggaagcca

SEQ ID NO: 3653842 - DNA, 25 bp, Homo sapien
ccctaacccgctccctgttctgtat

SEQ ID NO: 3653843 - DNA, 25 bp, Homo sapien
taacccgctccctgttctgtattcc

SEQ ID NO: 3653844 - DNA, 25 bp, Homo sapien
gaaacatgggaccttcacactcagc

SEQ ID NO: 3653845 - DNA, 25 bp, Homo sapien
acccgctccctgttctgtattccat

SEQ ID NO: 3653846 - DNA, 25 bp, Homo sapien
tcttcagtccattcatagcacaagg

SEQ ID NO: 3653847 - DNA, 25 bp, Homo sapien
cacctcacaagctcgttttctggca

SEQ ID NO: 3653848 - DNA, 25 bp, Homo sapien
tcacaagctcgttttctggcaatct

SEQ ID NO: 3653849 - DNA, 25 bp, Homo sapien
gtccattcatagcacaaggctccat

SEQ ID NO: 3653850 - DNA, 25 bp, Homo sapien
gggatgccccaagcatacagggcag

SEQ ID NO: 3653851 - DNA, 25 bp, Homo sapien
gatgccccaagcatacagggcagca

SEQ ID NO: 3653852 - DNA, 25 bp, Homo sapien
tgggatgccccaagcatacagggca

SEQ ID NO: 3653853 - DNA, 25 bp, Homo sapien
ctgggatgccccaagcatacagggc

SEQ ID NO: 3653854 - DNA, 25 bp, Homo sapien
taaacaagctgtcttcctcgcaggc

SEQ ID NO: 3653855 - DNA, 25 bp, Homo sapien
gagatgaggctgcacgggttaaaca

SEQ ID NO: 3653856 - DNA, 25 bp, Homo sapien
acgcagggctgctcgggcgggagac

SEQ ID NO: 3653857 - DNA, 25 bp, Homo sapien
atggtaaccgccagatcagccggga

SEQ ID NO: 3653858 - DNA, 25 bp, Homo sapien
aaacaggctatgtgtgagcaaaaat

SEQ ID NO: 3653859 - DNA, 25 bp, Homo sapien
acaggctatgtgtgagcaaaaatgc

SEQ ID NO: 3653860 - DNA, 25 bp, Homo sapien
caggctatgtgtgagcaaaaatgct

SEQ ID NO: 3653861 - DNA, 25 bp, Homo sapien
gctatgtgtgagcaaaaatgctgtt

SEQ ID NO: 3653862 - DNA, 25 bp, Homo sapien
taaactaggcacaaaggacccatat

SEQ ID NO: 3653863 - DNA, 25 bp, Homo sapien
tgtgaaagacagctcgacagttcct

SEQ ID NO: 3653864 - DNA, 25 bp, Homo sapien
aatgccacgtcttgattgctgtagc

SEQ ID NO: 3653865 - DNA, 25 bp, Homo sapien
gatccagtaattccgctcctaagta

SEQ ID NO: 3653866 - DNA, 25 bp, Homo sapien
ctaaaggacgtaaagatcttcattt

SEQ ID NO: 3653867 - DNA, 25 bp, Homo sapien
gatcttcattttcaagcatgacctg

SEQ ID NO: 3653868 - DNA, 25 bp, Homo sapien
caagcctttaacagacatcaaacgt

SEQ ID NO: 3653869 - DNA, 25 bp, Homo sapien
tgacctgtgctaccaaagtccagat

SEQ ID NO: 3653870 - DNA, 25 bp, Homo sapien
gcctgtcggctaggagcttgctgat

SEQ ID NO: 3653871 - DNA, 25 bp, Homo sapien
ggcaacaacctcaattttccagaat

SEQ ID NO: 3653872 - DNA, 25 bp, Homo sapien
gggcgtgtccctgttgtgtctctgc

SEQ ID NO: 3653873 - DNA, 25 bp, Homo sapien
aggtggcccaggtgcattggcaaca

SEQ ID NO: 3653874 - DNA, 25 bp, Homo sapien
gaagataccagtgatacagtcgaac

SEQ ID NO: 3653875 - DNA, 25 bp, Homo sapien
tgctcttgacagcagattctgtgaa

SEQ ID NO: 3653876 - DNA, 25 bp, Homo sapien
gatacagtcgaaccaagtgctcttg

SEQ ID NO: 3653877 - DNA, 25 bp, Homo sapien
gaaccaagtgctcttgacagcagat

SEQ ID NO: 3653878 - DNA, 25 bp, Homo sapien
tttgatggtgactgagcccacttgc

SEQ ID NO: 3653879 - DNA, 25 bp, Homo sapien
ccctaaatgcatgactggctctgca

SEQ ID NO: 3653880 - DNA, 25 bp, Homo sapien
tggatgtccctaaatgcatgactgg

SEQ ID NO: 3653881 - DNA, 25 bp, Homo sapien
acttgcacggtgaactggatgtccc

SEQ ID NO: 3653882 - DNA, 25 bp, Homo sapien
gtggggatatgggagtctatgaaaa

SEQ ID NO: 3653883 - DNA, 25 bp, Homo sapien
gagtggggatatgggagtctatgaa

SEQ ID NO: 3653884 - DNA, 25 bp, Homo sapien
agtagtttttaagagtggggatatg

SEQ ID NO: 3653885 - DNA, 25 bp, Homo sapien
agagtggggatatgggagtctatga

SEQ ID NO: 3653886 - DNA, 25 bp, Homo sapien
tagtgacccgagaggcatcatacag

SEQ ID NO: 3653887 - DNA, 25 bp, Homo sapien
cgagaggcatcatacaggccttctt

SEQ ID NO: 3653888 - DNA, 25 bp, Homo sapien
ccaggggtagcacaaagaagccaca

SEQ ID NO: 3653889 - DNA, 25 bp, Homo sapien
agaagccacagcctactgtagtgac

SEQ ID NO: 3653890 - DNA, 25 bp, Homo sapien
caaggtcatctgaggatgaagtaat

SEQ ID NO: 3653891 - DNA, 25 bp, Homo sapien
gcttagtctctcgtaagactctaca

SEQ ID NO: 3653892 - DNA, 25 bp, Homo sapien
gtgttatctcgcttagtctctcgta

SEQ ID NO: 3653893 - DNA, 25 bp, Homo sapien
gactctacaatacaaggtcatctga

SEQ ID NO: 3653894 - DNA, 25 bp, Homo sapien
tggaatagataccaggactgcaggg

SEQ ID NO: 3653895 - DNA, 25 bp, Homo sapien
ttttgttaggcctggaatagatacc

SEQ ID NO: 3653896 - DNA, 25 bp, Homo sapien
ttaggcctggaatagataccaggac

SEQ ID NO: 3653897 - DNA, 25 bp, Homo sapien
accaggactgcagggtcttttatac

SEQ ID NO: 3653898 - DNA, 25 bp, Homo sapien
tctcatttatcagtagaagtttaca

SEQ ID NO: 3653899 - DNA, 25 bp, Homo sapien
agaagtttacaagttctgggatgag

SEQ ID NO: 3653900 - DNA, 25 bp, Homo sapien
tgtagttggtaactgacatagccat

SEQ ID NO: 3653901 - DNA, 25 bp, Homo sapien
ccttgttctttagcaatttgtagtt

SEQ ID NO: 3653902 - DNA, 25 bp, Homo sapien
atagagccatttgcctgaagtctgc

SEQ ID NO: 3653903 - DNA, 25 bp, Homo sapien
gctacatccatctccatagagccat

SEQ ID NO: 3653904 - DNA, 25 bp, Homo sapien
agtctgcagcttgaggggccccaca

SEQ ID NO: 3653905 - DNA, 25 bp, Homo sapien
ccatctccatagagccatttgcctg

SEQ ID NO: 3653906 - DNA, 25 bp, Homo sapien
ttgcaactgtaggctgatactcagg

SEQ ID NO: 3653907 - DNA, 25 bp, Homo sapien
tgactgtggggtccagaactcccgt

SEQ ID NO: 3653908 - DNA, 25 bp, Homo sapien
cgctttgcgggtatccagagctttt

SEQ ID NO: 3653909 - DNA, 25 bp, Homo sapien
cccaaggtgattttaccgctttgcg

SEQ ID NO: 3653910 - DNA, 25 bp, Homo sapien
cctgttttcagtgaacaccgatcgg

SEQ ID NO: 3653911 - DNA, 25 bp, Homo sapien
tcagtgaacaccgatcgggccgtgg

SEQ ID NO: 3653912 - DNA, 25 bp, Homo sapien
ttttcagtgaacaccgatcgggccg

SEQ ID NO: 3653913 - DNA, 25 bp, Homo sapien
tgttttcagtgaacaccgatcgggc

SEQ ID NO: 3653914 - DNA, 25 bp, Homo sapien
taagaacacgaaaatcactgaagtc

SEQ ID NO: 3653915 - DNA, 25 bp, Homo sapien
aagaagggagacaagacccatgcga

SEQ ID NO: 3653916 - DNA, 25 bp, Homo sapien
tatcacaaatgcctgggtagattgt

SEQ ID NO: 3653917 - DNA, 25 bp, Homo sapien
gctcggagtaatggccttgaggatt

SEQ ID NO: 3653918 - DNA, 25 bp, Homo sapien
caaatggccccttttcggacaattg

SEQ ID NO: 3653919 - DNA, 25 bp, Homo sapien
ttttcggacaattgtccgtgttcca

SEQ ID NO: 3653920 - DNA, 25 bp, Homo sapien
tttcggacaattgtccgtgttccat

SEQ ID NO: 3653921 - DNA, 25 bp, Homo sapien
agagaaactctagcaggggggattt

SEQ ID NO: 3653922 - DNA, 25 bp, Homo sapien
atagagaaactctagcaggggggat

SEQ ID NO: 3653923 - DNA, 25 bp, Homo sapien
tctagcaggggggattttggaagca

SEQ ID NO: 3653924 - DNA, 25 bp, Homo sapien
actctagcaggggggattttggaag

SEQ ID NO: 3653925 - DNA, 25 bp, Homo sapien
tagctttccttgggaccttatctct

SEQ ID NO: 3653926 - DNA, 25 bp, Homo sapien
ttccttgggaccttatctcttcacc

SEQ ID NO: 3653927 - DNA, 25 bp, Homo sapien
gctttccttgggaccttatctcttc

SEQ ID NO: 3653928 - DNA, 25 bp, Homo sapien
tttccttgggaccttatctcttcac

SEQ ID NO: 3653929 - DNA, 25 bp, Homo sapien
tcttctgccctgctacatcagtttt

SEQ ID NO: 3653930 - DNA, 25 bp, Homo sapien
ttctgccctgctacatcagttttac

SEQ ID NO: 3653931 - DNA, 25 bp, Homo sapien
tctgccctgctacatcagttttact

SEQ ID NO: 3653932 - DNA, 25 bp, Homo sapien
gccctgctacatcagttttactttc

SEQ ID NO: 3653933 - DNA, 25 bp, Homo sapien
cctgggtaaagagcacaacatcaag

SEQ ID NO: 3653934 - DNA, 25 bp, Homo sapien
tctgatggcttaaacagctgtccac

SEQ ID NO: 3653935 - DNA, 25 bp, Homo sapien
tcaggaaactagcttcaagtagctc

SEQ ID NO: 3653936 - DNA, 25 bp, Homo sapien
tccacactgcactttgttcaggaaa

SEQ ID NO: 3653937 - DNA, 25 bp, Homo sapien
aggaccttccacaatttgattgttc

SEQ ID NO: 3653938 - DNA, 25 bp, Homo sapien
cttccacaatttgattgttcactgg

SEQ ID NO: 3653939 - DNA, 25 bp, Homo sapien
tgttcactgggttctaacaccaaac

SEQ ID NO: 3653940 - DNA, 25 bp, Homo sapien
gggatctcattattagaaccatcta

SEQ ID NO: 3653941 - DNA, 25 bp, Homo sapien
tcattcctagtattgtctggcttat

SEQ ID NO: 3653942 - DNA, 25 bp, Homo sapien
cattcctagtattgtctggcttatc

SEQ ID NO: 3653943 - DNA, 25 bp, Homo sapien
ctctcccagaactgcaccccccttt

SEQ ID NO: 3653944 - DNA, 25 bp, Homo sapien
gacacgggcagcagctccttcctct

SEQ ID NO: 3653945 - DNA, 25 bp, Homo sapien
tccttcctctggttcaccccaaatc

SEQ ID NO: 3653946 - DNA, 25 bp, Homo sapien
agctccttcctctggttcaccccaa

SEQ ID NO: 3653947 - DNA, 25 bp, Homo sapien
cgacacgggcagcagctccttcctc

SEQ ID NO: 3653948 - DNA, 25 bp, Homo sapien
cagtctcgttggcattcctattttc

SEQ ID NO: 3653949 - DNA, 25 bp, Homo sapien
ctatccctctaaaccctgagggctt

SEQ ID NO: 3653950 - DNA, 25 bp, Homo sapien
gtatctcagaatcagtctcgttggc

SEQ ID NO: 3653951 - DNA, 25 bp, Homo sapien
aaaccaaccgtcatcctgagcatac

SEQ ID NO: 3653952 - DNA, 25 bp, Homo sapien
gccaaatctggcttgtgttaccatg

SEQ ID NO: 3653953 - DNA, 25 bp, Homo sapien
cataaaccttcaagtgacctttgtg

SEQ ID NO: 3653954 - DNA, 25 bp, Homo sapien
agccataaccaaatggccaaatctg

SEQ ID NO: 3653955 - DNA, 25 bp, Homo sapien
cctttgtgttccaagccataaccaa

SEQ ID NO: 3653956 - DNA, 25 bp, Homo sapien
agaaatatgctagtagagagcttct

SEQ ID NO: 3653957 - DNA, 25 bp, Homo sapien
gagaaatatgctagtagagagcttc

SEQ ID NO: 3653958 - DNA, 25 bp, Homo sapien
gaaatatgctagtagagagcttctc

SEQ ID NO: 3653959 - DNA, 25 bp, Homo sapien
tgagaaatatgctagtagagagctt

SEQ ID NO: 3653960 - DNA, 25 bp, Homo sapien
tctgtcaaagaatccttgggcagca

SEQ ID NO: 3653961 - DNA, 25 bp, Homo sapien
cagggttatttgtatactgcagaga

SEQ ID NO: 3653962 - DNA, 25 bp, Homo sapien
caaagaatcccggattgggattctg

SEQ ID NO: 3653963 - DNA, 25 bp, Homo sapien
gcattctccaacaccacgtcacatg

SEQ ID NO: 3653964 - DNA, 25 bp, Homo sapien
gcctggaaaggtagtattcatcttc

SEQ ID NO: 3653965 - DNA, 25 bp, Homo sapien
tcatcttcagtgacacagatgtaag

SEQ ID NO: 3653966 - DNA, 25 bp, Homo sapien
catgaacacataggcgctgatagcc

SEQ ID NO: 3653967 - DNA, 25 bp, Homo sapien
gatagaagttctgattggtgaatga

SEQ ID NO: 3653968 - DNA, 25 bp, Homo sapien
catctttcagcatttggtctatgat

SEQ ID NO: 3653969 - DNA, 25 bp, Homo sapien
atctttcagcatttggtctatgatg

SEQ ID NO: 3653970 - DNA, 25 bp, Homo sapien
tttgaaaccatggaggtgcagcgtg

SEQ ID NO: 3653971 - DNA, 25 bp, Homo sapien
tgagagtttaccttctgaccagaac

SEQ ID NO: 3653972 - DNA, 25 bp, Homo sapien
tttgctccagccagtggaagtatgg

SEQ ID NO: 3653973 - DNA, 25 bp, Homo sapien
gaagcacgccgatctccagagattc

SEQ ID NO: 3653974 - DNA, 25 bp, Homo sapien
gaatcctgcttgtaaaggatcagta

SEQ ID NO: 3653975 - DNA, 25 bp, Homo sapien
aatcctgcttgtaaaggatcagtac

SEQ ID NO: 3653976 - DNA, 25 bp, Homo sapien
ataccaatggtgtagaatcctgctt

SEQ ID NO: 3653977 - DNA, 25 bp, Homo sapien
ttataccaatggtgtagaatcctgc

SEQ ID NO: 3653978 - DNA, 25 bp, Homo sapien
ttctcttgaacagtctctagggaca

SEQ ID NO: 3653979 - DNA, 25 bp, Homo sapien
catattgggtattgctataccttca

SEQ ID NO: 3653980 - DNA, 25 bp, Homo sapien
acagtctctagggacatattgggta

SEQ ID NO: 3653981 - DNA, 25 bp, Homo sapien
ggacatattgggtattgctatacct

SEQ ID NO: 3653982 - DNA, 25 bp, Homo sapien
cggagcccggcgagaagggagtggg

SEQ ID NO: 3653983 - DNA, 25 bp, Homo sapien
tgctcccggccccgcgtagtatctt

SEQ ID NO: 3653984 - DNA, 25 bp, Homo sapien
cccgcgtagtatcttcctcccagga

SEQ ID NO: 3653985 - DNA, 25 bp, Homo sapien
ccggagcccggcgagaagggagtgg

SEQ ID NO: 3653986 - DNA, 25 bp, Homo sapien
ccacatcctcgcagggcccttggct

SEQ ID NO: 3653987 - DNA, 25 bp, Homo sapien
ccggctcgcggggaatattcttcct

SEQ ID NO: 3653988 - DNA, 25 bp, Homo sapien
tccactgcccgcaggtggaggccgc

SEQ ID NO: 3653989 - DNA, 25 bp, Homo sapien
tggaggccgcgccatccgcgccatc

SEQ ID NO: 3653990 - DNA, 25 bp, Homo sapien
tatttctttacgggggcgctggcta

SEQ ID NO: 3653991 - DNA, 25 bp, Homo sapien
ccgaaggtcggcgggaggatctgac

SEQ ID NO: 3653992 - DNA, 25 bp, Homo sapien
tggctacgggcgctccctcgagggg

SEQ ID NO: 3653993 - DNA, 25 bp, Homo sapien
gcgctccctcgaggggcgggcaggg

SEQ ID NO: 3653994 - DNA, 25 bp, Homo sapien
ctctctcaccccaggccccgacaaa

SEQ ID NO: 3653995 - DNA, 25 bp, Homo sapien
ttctcccctcgagtcccctctctca

SEQ ID NO: 3653996 - DNA, 25 bp, Homo sapien
ttcccgctctacttctcccctcgag

SEQ ID NO: 3653997 - DNA, 25 bp, Homo sapien
cctcttggtttcccgctctacttct

SEQ ID NO: 3653998 - DNA, 25 bp, Homo sapien
ctcccatccagctcgttcaagcctc

SEQ ID NO: 3653999 - DNA, 25 bp, Homo sapien
tctcccatccagctcgttcaagcct

SEQ ID NO: 3654000 - DNA, 25 bp, Homo sapien
tcccatccagctcgttcaagcctca

SEQ ID NO: 3654001 - DNA, 25 bp, Homo sapien
cccatccagctcgttcaagcctcac

SEQ ID NO: 3654002 - DNA, 25 bp, Homo sapien
gttctgagaaatcacccggaacgca

SEQ ID NO: 3654003 - DNA, 25 bp, Homo sapien
tctgagaaatcacccggaacgcagt

SEQ ID NO: 3654004 - DNA, 25 bp, Homo sapien
gcagttccctcagggacgggccgac

SEQ ID NO: 3654005 - DNA, 25 bp, Homo sapien
ccggaacgcagttccctcagggacg

SEQ ID NO: 3654006 - DNA, 25 bp, Homo sapien
tgctcagacgccaaaactttgaata

SEQ ID NO: 3654007 - DNA, 25 bp, Homo sapien
ttgaaaataacgcataacaatgctc

SEQ ID NO: 3654008 - DNA, 25 bp, Homo sapien
taacaatgctcagacgccaaaactt

SEQ ID NO: 3654009 - DNA, 25 bp, Homo sapien
gccaaaactttgaatactgtgtcca

SEQ ID NO: 3654010 - DNA, 25 bp, Homo sapien
ggttctggcaaacccagaacacttg

SEQ ID NO: 3654011 - DNA, 25 bp, Homo sapien
tctggcaaacccagaacacttgtca

SEQ ID NO: 3654012 - DNA, 25 bp, Homo sapien
ttaggttctggcaaacccagaacac

SEQ ID NO: 3654013 - DNA, 25 bp, Homo sapien
ggcaaacccagaacacttgtcaatt

SEQ ID NO: 3654014 - DNA, 25 bp, Homo sapien
cttagtaataactgcttcataagtg

SEQ ID NO: 3654015 - DNA, 25 bp, Homo sapien
ttcccataagttcctttgccaattg

SEQ ID NO: 3654016 - DNA, 25 bp, Homo sapien
cataagttcctttgccaattgtctc

SEQ ID NO: 3654017 - DNA, 25 bp, Homo sapien
aagttcctttgccaattgtctcagt

SEQ ID NO: 3654018 - DNA, 25 bp, Homo sapien
gttcctttgccaattgtctcagtga

SEQ ID NO: 3654019 - DNA, 25 bp, Homo sapien
tagaatctgaccacattagggtggt

SEQ ID NO: 3654020 - DNA, 25 bp, Homo sapien
tctgcttcaatctcttcgtcaatat

SEQ ID NO: 3654021 - DNA, 25 bp, Homo sapien
ttgtctccatttactttatccttct

SEQ ID NO: 3654022 - DNA, 25 bp, Homo sapien
tccttcttaaagtatatcccataga

SEQ ID NO: 3654023 - DNA, 25 bp, Homo sapien
actaagacaatgccacttcaggaaa

SEQ ID NO: 3654024 - DNA, 25 bp, Homo sapien
tgctgacactgaactggagggattc

SEQ ID NO: 3654025 - DNA, 25 bp, Homo sapien
ggaaattttgttccctgctgacact

SEQ ID NO: 3654026 - DNA, 25 bp, Homo sapien
caaaatgggtaatctgggagaggca

SEQ ID NO: 3654027 - DNA, 25 bp, Homo sapien
aattactacatgatgagccaaacag

SEQ ID NO: 3654028 - DNA, 25 bp, Homo sapien
ctgcataaacaagagtgttgctgcc

SEQ ID NO: 3654029 - DNA, 25 bp, Homo sapien
ccttttagctgcataaacaagagtg

SEQ ID NO: 3654030 - DNA, 25 bp, Homo sapien
gctgcataaacaagagtgttgctgc

SEQ ID NO: 3654031 - DNA, 25 bp, Homo sapien
ttagctgcataaacaagagtgttgc

SEQ ID NO: 3654032 - DNA, 25 bp, Homo sapien
aatataggcaattagaggctcactc

SEQ ID NO: 3654033 - DNA, 25 bp, Homo sapien
gtaaaatataggcaattagaggctc

SEQ ID NO: 3654034 - DNA, 25 bp, Homo sapien
ggcaattagaggctcactcattctt

SEQ ID NO: 3654035 - DNA, 25 bp, Homo sapien
gcttcatgtaaaatataggcaatta

SEQ ID NO: 3654036 - DNA, 25 bp, Homo sapien
ccaccttccgtggtcaatagaatgt

SEQ ID NO: 3654037 - DNA, 25 bp, Homo sapien
accttccgtggtcaatagaatgtta

SEQ ID NO: 3654038 - DNA, 25 bp, Homo sapien
ctagtttcactccaccttccgtggt

SEQ ID NO: 3654039 - DNA, 25 bp, Homo sapien
tcactccaccttccgtggtcaatag

SEQ ID NO: 3654040 - DNA, 25 bp, Homo sapien
aataagatactactgatttttcctc

SEQ ID NO: 3654041 - DNA, 25 bp, Homo sapien
ggaagttcgtccccatacaggatca

SEQ ID NO: 3654042 - DNA, 25 bp, Homo sapien
tttctcatctacaggaagttcgtcc

SEQ ID NO: 3654043 - DNA, 25 bp, Homo sapien
agttcgtccccatacaggatcatcc

SEQ ID NO: 3654044 - DNA, 25 bp, Homo sapien
ttctcatctacaggaagttcgtccc

SEQ ID NO: 3654045 - DNA, 25 bp, Homo sapien
tcaagagaattaggagtacagtttc

SEQ ID NO: 3654046 - DNA, 25 bp, Homo sapien
cttcaagagaattaggagtacagtt

SEQ ID NO: 3654047 - DNA, 25 bp, Homo sapien
agagaattaggagtacagtttcttt

SEQ ID NO: 3654048 - DNA, 25 bp, Homo sapien
caagagaattaggagtacagtttct

SEQ ID NO: 3654049 - DNA, 25 bp, Homo sapien
gccgggtactggtgagctgtgcaga

SEQ ID NO: 3654050 - DNA, 25 bp, Homo sapien
catccaaaacggtgttcctacggat

SEQ ID NO: 3654051 - DNA, 25 bp, Homo sapien
ctacggatgtgttccgacggtgccg

SEQ ID NO: 3654052 - DNA, 25 bp, Homo sapien
gacggtgccgggtactggtgagctg

SEQ ID NO: 3654053 - DNA, 25 bp, Homo sapien
gaggatctccatcacccagctcaat

SEQ ID NO: 3654054 - DNA, 25 bp, Homo sapien
cagggaccaagtgtcacatctggcg

SEQ ID NO: 3654055 - DNA, 25 bp, Homo sapien
gctcaatggccgtgatacccaggga

SEQ ID NO: 3654056 - DNA, 25 bp, Homo sapien
gaaggtcagctagtggaggatctcc

SEQ ID NO: 3654057 - DNA, 25 bp, Homo sapien
cacttgcacaggctatggactctga

SEQ ID NO: 3654058 - DNA, 25 bp, Homo sapien
gttggaatatatctgaacgtctcca

SEQ ID NO: 3654059 - DNA, 25 bp, Homo sapien
aagagcatgatgaacacttggtggc

SEQ ID NO: 3654060 - DNA, 25 bp, Homo sapien
gacacactgattatcaagagaaagc

SEQ ID NO: 3654061 - DNA, 25 bp, Homo sapien
taatgttttggaaccctgtcaccac

SEQ ID NO: 3654062 - DNA, 25 bp, Homo sapien
gcacattgcctgttacctaggtaca

SEQ ID NO: 3654063 - DNA, 25 bp, Homo sapien
gctaaggcagtacagaacttcacct

SEQ ID NO: 3654064 - DNA, 25 bp, Homo sapien
gatcaggactaagctcatttcacaa

SEQ ID NO: 3654065 - DNA, 25 bp, Homo sapien
gaattctgctgaccatagctcaggc

SEQ ID NO: 3654066 - DNA, 25 bp, Homo sapien
attctgctgaccatagctcaggctg

SEQ ID NO: 3654067 - DNA, 25 bp, Homo sapien
cattgaattctgctgaccatagctc

SEQ ID NO: 3654068 - DNA, 25 bp, Homo sapien
ttgaattctgctgaccatagctcag

SEQ ID NO: 3654069 - DNA, 25 bp, Homo sapien
atgaatttatgctgtaaaagttctg

SEQ ID NO: 3654070 - DNA, 25 bp, Homo sapien
gccctcaatttgagtaatgaattta

SEQ ID NO: 3654071 - DNA, 25 bp, Homo sapien
ggatgccaatgaattccgttagttg

SEQ ID NO: 3654072 - DNA, 25 bp, Homo sapien
gttggacgcttttcataatctttag

SEQ ID NO: 3654073 - DNA, 25 bp, Homo sapien
gacataagatctacttcccactggc

SEQ ID NO: 3654074 - DNA, 25 bp, Homo sapien
gattgaaaaaactgccgcttcttcc

SEQ ID NO: 3654075 - DNA, 25 bp, Homo sapien
cttccttttatatggagccaggtgc

SEQ ID NO: 3654076 - DNA, 25 bp, Homo sapien
tccttcaaatcacaatgggccctgg

SEQ ID NO: 3654077 - DNA, 25 bp, Homo sapien
ctgttaagaggagtaacttcattaa

SEQ ID NO: 3654078 - DNA, 25 bp, Homo sapien
tgttaagaggagtaacttcattaag

SEQ ID NO: 3654079 - DNA, 25 bp, Homo sapien
ctttcttcgtgtgaatacgttcacg

SEQ ID NO: 3654080 - DNA, 25 bp, Homo sapien
tcatctacatccttcagattggata

SEQ ID NO: 3654081 - DNA, 25 bp, Homo sapien
tccctttcttcgtgtgaatacgttc

SEQ ID NO: 3654082 - DNA, 25 bp, Homo sapien
gatattagaggtcggttgaagttcc

SEQ ID NO: 3654083 - DNA, 25 bp, Homo sapien
ctttgtggagtaaagacccagactc

SEQ ID NO: 3654084 - DNA, 25 bp, Homo sapien
catagacgtagatctgatctctgga

SEQ ID NO: 3654085 - DNA, 25 bp, Homo sapien
cccagactctgaaaagggttaagag

SEQ ID NO: 3654086 - DNA, 25 bp, Homo sapien
taagagcaatgagtatgtctcccac

SEQ ID NO: 3654087 - DNA, 25 bp, Homo sapien
tctttgatccaatatatagtttgga

SEQ ID NO: 3654088 - DNA, 25 bp, Homo sapien
tatatgttatcatagattgatatcc

SEQ ID NO: 3654089 - DNA, 25 bp, Homo sapien
atagattgatatcctaagtcagcca

SEQ ID NO: 3654090 - DNA, 25 bp, Homo sapien
ggactggcagttctctttgatccaa

SEQ ID NO: 3654091 - DNA, 25 bp, Homo sapien
aaaagatgagcattttcagtctttc

SEQ ID NO: 3654092 - DNA, 25 bp, Homo sapien
aagatgagcattttcagtctttcca

SEQ ID NO: 3654093 - DNA, 25 bp, Homo sapien
aactaaaagatgagcattttcagtc

SEQ ID NO: 3654094 - DNA, 25 bp, Homo sapien
ctaaaagatgagcattttcagtctt

SEQ ID NO: 3654095 - DNA, 25 bp, Homo sapien
tgccaaaggcttctaccaaattgtt

SEQ ID NO: 3654096 - DNA, 25 bp, Homo sapien
ccactaccgctccagaagaggtgaa

SEQ ID NO: 3654097 - DNA, 25 bp, Homo sapien
tagcttggtggataactcgggattt

SEQ ID NO: 3654098 - DNA, 25 bp, Homo sapien
tctcttgcaaggttctgttattagc

SEQ ID NO: 3654099 - DNA, 25 bp, Homo sapien
caacgaagtggccaacaatcagact

SEQ ID NO: 3654100 - DNA, 25 bp, Homo sapien
acgaagtggccaacaatcagactta

SEQ ID NO: 3654101 - DNA, 25 bp, Homo sapien
tcaacgaagtggccaacaatcagac

SEQ ID NO: 3654102 - DNA, 25 bp, Homo sapien
cttcaacgaagtggccaacaatcag

SEQ ID NO: 3654103 - DNA, 25 bp, Homo sapien
ggtgtcaaagtactcacaagggtat

SEQ ID NO: 3654104 - DNA, 25 bp, Homo sapien
tcaaagtactcacaagggtatagct

SEQ ID NO: 3654105 - DNA, 25 bp, Homo sapien
caaacggtgtcaaagtactcacaag

SEQ ID NO: 3654106 - DNA, 25 bp, Homo sapien
gacagcctcaaacggtgtcaaagta

SEQ ID NO: 3654107 - DNA, 25 bp, Homo sapien
ggtataaaactgtcatcccaccaca

SEQ ID NO: 3654108 - DNA, 25 bp, Homo sapien
ttgttgtggatactccccttcctgc

SEQ ID NO: 3654109 - DNA, 25 bp, Homo sapien
caaagctttggatgccaccataggg

SEQ ID NO: 3654110 - DNA, 25 bp, Homo sapien
gcaggagacactaaattgttgtgga

SEQ ID NO: 3654111 - DNA, 25 bp, Homo sapien
tcactgttcactccattatcaccag

SEQ ID NO: 3654112 - DNA, 25 bp, Homo sapien
gatggtcctcaatcttcacttcact

SEQ ID NO: 3654113 - DNA, 25 bp, Homo sapien
cttgatgagcctagtggtcagctgg

SEQ ID NO: 3654114 - DNA, 25 bp, Homo sapien
tcagctgggacaccctggggtttgc

SEQ ID NO: 3654115 - DNA, 25 bp, Homo sapien
tttcaggcagtttgtaatgggctag

SEQ ID NO: 3654116 - DNA, 25 bp, Homo sapien
ctgggaggcttattttcaggcagtt

SEQ ID NO: 3654117 - DNA, 25 bp, Homo sapien
gccaaaccagcataaatgtagtaaa

SEQ ID NO: 3654118 - DNA, 25 bp, Homo sapien
aggcagtttgtaatgggctagtttc

SEQ ID NO: 3654119 - DNA, 25 bp, Homo sapien
tatagaaactattattcatgatgtc

SEQ ID NO: 3654120 - DNA, 25 bp, Homo sapien
tgtcttgtactgttctgaggtggtc

SEQ ID NO: 3654121 - DNA, 25 bp, Homo sapien
aactattattcatgatgtcttgtac

SEQ ID NO: 3654122 - DNA, 25 bp, Homo sapien
tgactttgaaacattgctcaattaa

SEQ ID NO: 3654123 - DNA, 25 bp, Homo sapien
ctggaatatggctgaaactcatgct

SEQ ID NO: 3654124 - DNA, 25 bp, Homo sapien
aactcatgctttctgagtcagggag

SEQ ID NO: 3654125 - DNA, 25 bp, Homo sapien
gagtcagggagttcctcttccagag

SEQ ID NO: 3654126 - DNA, 25 bp, Homo sapien
tgaaactcatgctttctgagtcagg

SEQ ID NO: 3654127 - DNA, 25 bp, Homo sapien
aattggctctgctttaagagccagg

SEQ ID NO: 3654128 - DNA, 25 bp, Homo sapien
cactgactgcttgaatcagcttgtc

SEQ ID NO: 3654129 - DNA, 25 bp, Homo sapien
cataggtacaaactgtgggaagaat

SEQ ID NO: 3654130 - DNA, 25 bp, Homo sapien
gaagaatgaggacccgattagggag

SEQ ID NO: 3654131 - DNA, 25 bp, Homo sapien
agttctccagggctgtatgattaga

SEQ ID NO: 3654132 - DNA, 25 bp, Homo sapien
tgtggctcttgtcaatctggtgttc

SEQ ID NO: 3654133 - DNA, 25 bp, Homo sapien
tctggtgttcagttgccacagaaga

SEQ ID NO: 3654134 - DNA, 25 bp, Homo sapien
ccaacattcaagattgcagcgagta

SEQ ID NO: 3654135 - DNA, 25 bp, Homo sapien
ttagctagttccctacaataccgat

SEQ ID NO: 3654136 - DNA, 25 bp, Homo sapien
tggttagctagttccctacaatacc

SEQ ID NO: 3654137 - DNA, 25 bp, Homo sapien
tatgtgtgtttggaattcattctga

SEQ ID NO: 3654138 - DNA, 25 bp, Homo sapien
caaaatggttagctagttccctaca

SEQ ID NO: 3654139 - DNA, 25 bp, Homo sapien
cttctaagttaacattctgcatttc

SEQ ID NO: 3654140 - DNA, 25 bp, Homo sapien
agttaacattctgcatttctttcct

SEQ ID NO: 3654141 - DNA, 25 bp, Homo sapien
tcatctgcccgaatgcaaagcaaag

SEQ ID NO: 3654142 - DNA, 25 bp, Homo sapien
atataaagttttagccatggcatcc

SEQ ID NO: 3654143 - DNA, 25 bp, Homo sapien
catggcatccctgacatcggtagct

SEQ ID NO: 3654144 - DNA, 25 bp, Homo sapien
tgactatccaactaaagagacgtcc

SEQ ID NO: 3654145 - DNA, 25 bp, Homo sapien
cagctgctcgaaggaattttttttg

SEQ ID NO: 3654146 - DNA, 25 bp, Homo sapien
gttcccatgcaaacacatgttgatt

SEQ ID NO: 3654147 - DNA, 25 bp, Homo sapien
atttgcaatgttaatgcacagctgc

SEQ ID NO: 3654148 - DNA, 25 bp, Homo sapien
tatatcaagaatgccaatgctcagc

SEQ ID NO: 3654149 - DNA, 25 bp, Homo sapien
aaagatatttcttcgcatatctagg

SEQ ID NO: 3654150 - DNA, 25 bp, Homo sapien
taaagatatttcttcgcatatctag

SEQ ID NO: 3654151 - DNA, 25 bp, Homo sapien
gaaacgcaatgcagtgagtgctgaa

SEQ ID NO: 3654152 - DNA, 25 bp, Homo sapien
ggaaggaagaaacgcaatgcagtga

SEQ ID NO: 3654153 - DNA, 25 bp, Homo sapien
caatgcagtgagtgctgaacatgct

SEQ ID NO: 3654154 - DNA, 25 bp, Homo sapien
gctgaacatgctttcaaggagcttg

SEQ ID NO: 3654155 - DNA, 25 bp, Homo sapien
tctcagttacattttcagcattcac

SEQ ID NO: 3654156 - DNA, 25 bp, Homo sapien
agcttttctcagttacattttcagc

SEQ ID NO: 3654157 - DNA, 25 bp, Homo sapien
tttctcagttacattttcagcattc

SEQ ID NO: 3654158 - DNA, 25 bp, Homo sapien
ttagcttttctcagttacattttca

SEQ ID NO: 3654159 - DNA, 25 bp, Homo sapien
gggccagttatcctcatattcaata

SEQ ID NO: 3654160 - DNA, 25 bp, Homo sapien
ttttgcagaaacatatctaagaggg

SEQ ID NO: 3654161 - DNA, 25 bp, Homo sapien
aagtaaacccattggcttttgcaga

SEQ ID NO: 3654162 - DNA, 25 bp, Homo sapien
tctactttcttcatcaagtagggaa

SEQ ID NO: 3654163 - DNA, 25 bp, Homo sapien
tcctgcataatggtgaattccaaaa

SEQ ID NO: 3654164 - DNA, 25 bp, Homo sapien
gtattgtgatttcaggttaccttca

SEQ ID NO: 3654165 - DNA, 25 bp, Homo sapien
cctgcataatggtgaattccaaaac

SEQ ID NO: 3654166 - DNA, 25 bp, Homo sapien
tttgggtctccagaagtattgtgat

SEQ ID NO: 3654167 - DNA, 25 bp, Homo sapien
aattacactgttgtcggatgacctc

SEQ ID NO: 3654168 - DNA, 25 bp, Homo sapien
taagaatccacttgcattatagagg

SEQ ID NO: 3654169 - DNA, 25 bp, Homo sapien
caaaagtagcacaatgtcagtagga

SEQ ID NO: 3654170 - DNA, 25 bp, Homo sapien
tcagagggtggttgactagttgcct

SEQ ID NO: 3654171 - DNA, 25 bp, Homo sapien
ctctctccttcttctaggtgataag

SEQ ID NO: 3654172 - DNA, 25 bp, Homo sapien
tcagaaagatcatttcttgtctctc

SEQ ID NO: 3654173 - DNA, 25 bp, Homo sapien
ccaaccaacccacaatcgaagagtt

SEQ ID NO: 3654174 - DNA, 25 bp, Homo sapien
taagtagaggctgaatgtttttggc

SEQ ID NO: 3654175 - DNA, 25 bp, Homo sapien
aagtcctcatttgatagtttataac

SEQ ID NO: 3654176 - DNA, 25 bp, Homo sapien
tgaagtcctcatttgatagtttata

SEQ ID NO: 3654177 - DNA, 25 bp, Homo sapien
gaagtcctcatttgatagtttataa

SEQ ID NO: 3654178 - DNA, 25 bp, Homo sapien
ttcatgttggttgtctctctggcat

SEQ ID NO: 3654179 - DNA, 25 bp, Homo sapien
aaatatgatgcaaccgtttgtgttt

SEQ ID NO: 3654180 - DNA, 25 bp, Homo sapien
gacgtgtggcttctccagtgtcgcc

SEQ ID NO: 3654181 - DNA, 25 bp, Homo sapien
tgatgcaaccgtttgtgttttcatg

SEQ ID NO: 3654182 - DNA, 25 bp, Homo sapien
tttagacaacaaatccatcagggaa

SEQ ID NO: 3654183 - DNA, 25 bp, Homo sapien
tagacaacaaatccatcagggaata

SEQ ID NO: 3654184 - DNA, 25 bp, Homo sapien
ttagacaacaaatccatcagggaat

SEQ ID NO: 3654185 - DNA, 25 bp, Homo sapien
tccgatgggagaatcctagtcttcg

SEQ ID NO: 3654186 - DNA, 25 bp, Homo sapien
tgcaacggacaaaatgaggttggcc

SEQ ID NO: 3654187 - DNA, 25 bp, Homo sapien
cactatttggtttgatgcaacggac

SEQ ID NO: 3654188 - DNA, 25 bp, Homo sapien
cctgtgtaccgaagctgtagcagaa

SEQ ID NO: 3654189 - DNA, 25 bp, Homo sapien
gacttgatgcggagaaatcctttag

SEQ ID NO: 3654190 - DNA, 25 bp, Homo sapien
tggttccccaacaacttagtgcagg

SEQ ID NO: 3654191 - DNA, 25 bp, Homo sapien
gatggaaacccagtccagtctgtat

SEQ ID NO: 3654192 - DNA, 25 bp, Homo sapien
tcagaacaacttcggagtagaccaa

SEQ ID NO: 3654193 - DNA, 25 bp, Homo sapien
gggctcctcgctcgacttgtagcag

SEQ ID NO: 3654194 - DNA, 25 bp, Homo sapien
gctcctcgctcgacttgtagcagag

SEQ ID NO: 3654195 - DNA, 25 bp, Homo sapien
tttccaagagcccagttatcgagac

SEQ ID NO: 3654196 - DNA, 25 bp, Homo sapien
cagttatcgagaccagctttttcca

SEQ ID NO: 3654197 - DNA, 25 bp, Homo sapien
cattagatttaactgctccacgtga

SEQ ID NO: 3654198 - DNA, 25 bp, Homo sapien
ggtatcttcttgaacacaagaatgc

SEQ ID NO: 3654199 - DNA, 25 bp, Homo sapien
tgtcaatagcttcctttcgcattag

SEQ ID NO: 3654200 - DNA, 25 bp, Homo sapien
aatgctctgacacaagcttgaatca

SEQ ID NO: 3654201 - DNA, 25 bp, Homo sapien
tcagaagtttgaatggttgttactg

SEQ ID NO: 3654202 - DNA, 25 bp, Homo sapien
gatcagaagtttgaatggttgttac

SEQ ID NO: 3654203 - DNA, 25 bp, Homo sapien
cagaagtttgaatggttgttactgc

SEQ ID NO: 3654204 - DNA, 25 bp, Homo sapien
ctgatcagaagtttgaatggttgtt

SEQ ID NO: 3654205 - DNA, 25 bp, Homo sapien
aatctatatgttacaacggtataag

SEQ ID NO: 3654206 - DNA, 25 bp, Homo sapien
atgttacaacggtataagaatgaac

SEQ ID NO: 3654207 - DNA, 25 bp, Homo sapien
tctatatgttacaacggtataagaa

SEQ ID NO: 3654208 - DNA, 25 bp, Homo sapien
tatatgttacaacggtataagaatg

SEQ ID NO: 3654209 - DNA, 25 bp, Homo sapien
tggccagacttgatgttaaaaacaa

SEQ ID NO: 3654210 - DNA, 25 bp, Homo sapien
ggaagctaggaagccacctcttctt

SEQ ID NO: 3654211 - DNA, 25 bp, Homo sapien
cttcaccctttctatggccagactt

SEQ ID NO: 3654212 - DNA, 25 bp, Homo sapien
gggctggaatgatctttatctctct

SEQ ID NO: 3654213 - DNA, 25 bp, Homo sapien
cagctccccgctgtggtattctagg

SEQ ID NO: 3654214 - DNA, 25 bp, Homo sapien
tggtattctaggtcacagttcaggg

SEQ ID NO: 3654215 - DNA, 25 bp, Homo sapien
taagtgaaaacaagcgcttcaggta

SEQ ID NO: 3654216 - DNA, 25 bp, Homo sapien
ctgacatctgctggagagccctgcc

SEQ ID NO: 3654217 - DNA, 25 bp, Homo sapien
tggggaacatgtgcaatgatgggtg

SEQ ID NO: 3654218 - DNA, 25 bp, Homo sapien
gcaatgatgggtgcttctgaggatc

SEQ ID NO: 3654219 - DNA, 25 bp, Homo sapien
catgtgcaatgatgggtgcttctga

SEQ ID NO: 3654220 - DNA, 25 bp, Homo sapien
atgatgggtgcttctgaggatcaac

SEQ ID NO: 3654221 - DNA, 25 bp, Homo sapien
gctgccttctcttgtaaccccggta

SEQ ID NO: 3654222 - DNA, 25 bp, Homo sapien
tatcggtgcacgctgggtaactaca

SEQ ID NO: 3654223 - DNA, 25 bp, Homo sapien
ttttcagctaaccaaggcactgggt

SEQ ID NO: 3654224 - DNA, 25 bp, Homo sapien
gcactgggtagcttggcctttctga

SEQ ID NO: 3654225 - DNA, 25 bp, Homo sapien
agacacccagataaagtgacttcag

SEQ ID NO: 3654226 - DNA, 25 bp, Homo sapien
gctgagaagaaactcgtctattaat

SEQ ID NO: 3654227 - DNA, 25 bp, Homo sapien
taattggcttatggtgcgagacacc

SEQ ID NO: 3654228 - DNA, 25 bp, Homo sapien
gaagaaactcgtctattaattggct

SEQ ID NO: 3654229 - DNA, 25 bp, Homo sapien
tttggtggtgtgcaaggccatataa

SEQ ID NO: 3654230 - DNA, 25 bp, Homo sapien
tgatcttttggtggtgtgcaaggcc

SEQ ID NO: 3654231 - DNA, 25 bp, Homo sapien
aaggccatataacctttgcacagct

SEQ ID NO: 3654232 - DNA, 25 bp, Homo sapien
gtgtgcaaggccatataacctttgc

SEQ ID NO: 3654233 - DNA, 25 bp, Homo sapien
ggtgagctgcctggcttccttgctt

SEQ ID NO: 3654234 - DNA, 25 bp, Homo sapien
cctggggtgagctgcctggcttcct

SEQ ID NO: 3654235 - DNA, 25 bp, Homo sapien
ctctcctttccagcagcggcctggg

SEQ ID NO: 3654236 - DNA, 25 bp, Homo sapien
cccacactcaccagtgctgccactt

SEQ ID NO: 3654237 - DNA, 25 bp, Homo sapien
gagaatgagctgttatgcggaacac

SEQ ID NO: 3654238 - DNA, 25 bp, Homo sapien
tgcggaacactgtgagcacgtcttc

SEQ ID NO: 3654239 - DNA, 25 bp, Homo sapien
caacagaagcacatgcgaatgcaca

SEQ ID NO: 3654240 - DNA, 25 bp, Homo sapien
cacatggtgataccaagggtgccct

SEQ ID NO: 3654241 - DNA, 25 bp, Homo sapien
gttgtctggtggtctaggactttga

SEQ ID NO: 3654242 - DNA, 25 bp, Homo sapien
ttgtctggtggtctaggactttgag

SEQ ID NO: 3654243 - DNA, 25 bp, Homo sapien
gtctggtggtctaggactttgagag

SEQ ID NO: 3654244 - DNA, 25 bp, Homo sapien
tgtctggtggtctaggactttgaga

SEQ ID NO: 3654245 - DNA, 25 bp, Homo sapien
ataatagtatgtggagtcttcaggg

SEQ ID NO: 3654246 - DNA, 25 bp, Homo sapien
caatccctctttagcatgataaagt

SEQ ID NO: 3654247 - DNA, 25 bp, Homo sapien
aagagctctcttgggatttgggagt

SEQ ID NO: 3654248 - DNA, 25 bp, Homo sapien
aagtatgggcttcttcgggaggata

SEQ ID NO: 3654249 - DNA, 25 bp, Homo sapien
gatttgggagtgacaagaaggtttc

SEQ ID NO: 3654250 - DNA, 25 bp, Homo sapien
tcttcgtttttcttcttggattgac

SEQ ID NO: 3654251 - DNA, 25 bp, Homo sapien
gtcttcgtttttcttcttggattga

SEQ ID NO: 3654252 - DNA, 25 bp, Homo sapien
cttcgtttttcttcttggattgact

SEQ ID NO: 3654253 - DNA, 25 bp, Homo sapien
tcttgctgtggtcttcgttctctta

SEQ ID NO: 3654254 - DNA, 25 bp, Homo sapien
tccagaacgactgggcaaaaattcc

SEQ ID NO: 3654255 - DNA, 25 bp, Homo sapien
tgttcctttggtccagaacgactgg

SEQ ID NO: 3654256 - DNA, 25 bp, Homo sapien
tgctgtggtcttcgttctcttaaac

SEQ ID NO: 3654257 - DNA, 25 bp, Homo sapien
gacatcacttaatctacatcaggag

SEQ ID NO: 3654258 - DNA, 25 bp, Homo sapien
tctaagctccaacatgttacagtgc

SEQ ID NO: 3654259 - DNA, 25 bp, Homo sapien
cagagctctgagattagactagaac

SEQ ID NO: 3654260 - DNA, 25 bp, Homo sapien
gaatagaacgctttcatagcagatg

SEQ ID NO: 3654261 - DNA, 25 bp, Homo sapien
gaccaactgctctgttagtgacacc

SEQ ID NO: 3654262 - DNA, 25 bp, Homo sapien
tcactcaaaatctgaccaactgctc

SEQ ID NO: 3654263 - DNA, 25 bp, Homo sapien
aaatagacactcaatattttgcatt

SEQ ID NO: 3654264 - DNA, 25 bp, Homo sapien
accaagagctatgggccttgttggc

SEQ ID NO: 3654265 - DNA, 25 bp, Homo sapien
gataatggccaaacgtatctgcgat

SEQ ID NO: 3654266 - DNA, 25 bp, Homo sapien
ctgccaaccgcggacatttaggaaa

SEQ ID NO: 3654267 - DNA, 25 bp, Homo sapien
taggaaaggcacaatcgaaacgact

SEQ ID NO: 3654268 - DNA, 25 bp, Homo sapien
tatctgcgataattctcaacaggtt

SEQ ID NO: 3654269 - DNA, 25 bp, Homo sapien
tctcggggctctccgccgcccagca

SEQ ID NO: 3654270 - DNA, 25 bp, Homo sapien
tcctccttctcggggctctccgccg

SEQ ID NO: 3654271 - DNA, 25 bp, Homo sapien
cttctcggggctctccgccgcccag

SEQ ID NO: 3654272 - DNA, 25 bp, Homo sapien
tccttctcggggctctccgccgccc

SEQ ID NO: 3654273 - DNA, 25 bp, Homo sapien
gagcctcctgaagtcgtaggggttg

SEQ ID NO: 3654274 - DNA, 25 bp, Homo sapien
gccggcgctgggaggttttgcgcag

SEQ ID NO: 3654275 - DNA, 25 bp, Homo sapien
agcctcctgaagtcgtaggggttgg

SEQ ID NO: 3654276 - DNA, 25 bp, Homo sapien
gcgccggcgctgggaggttttgcgc

SEQ ID NO: 3654277 - DNA, 25 bp, Homo sapien
acggcggtgactgcctcgttgaacg

SEQ ID NO: 3654278 - DNA, 25 bp, Homo sapien
cttccgacggcggtgactgcctcgt

SEQ ID NO: 3654279 - DNA, 25 bp, Homo sapien
cagcgccttccgacggcggtgactg

SEQ ID NO: 3654280 - DNA, 25 bp, Homo sapien
cgacggcggtgactgcctcgttgaa

SEQ ID NO: 3654281 - DNA, 25 bp, Homo sapien
caggtctcttgtttcggagcacgaa

SEQ ID NO: 3654282 - DNA, 25 bp, Homo sapien
acagggttgccacaactggcgggct

SEQ ID NO: 3654283 - DNA, 25 bp, Homo sapien
gagcaagcttgagatgaaatacatc

SEQ ID NO: 3654284 - DNA, 25 bp, Homo sapien
gattcaaccgctagcaagtgttctg

SEQ ID NO: 3654285 - DNA, 25 bp, Homo sapien
cagagtcttttgactccggcttgtg

SEQ ID NO: 3654286 - DNA, 25 bp, Homo sapien
gagtcttttgactccggcttgtggg

SEQ ID NO: 3654287 - DNA, 25 bp, Homo sapien
agtcttttgactccggcttgtgggt

SEQ ID NO: 3654288 - DNA, 25 bp, Homo sapien
ccccagagtcttttgactccggctt

SEQ ID NO: 3654289 - DNA, 25 bp, Homo sapien
cgggtggtcgaaaactcagggctca

SEQ ID NO: 3654290 - DNA, 25 bp, Homo sapien
gagcgtgctaggtgaagtctgttcc

SEQ ID NO: 3654291 - DNA, 25 bp, Homo sapien
gggatccacactatggcaactgggc

SEQ ID NO: 3654292 - DNA, 25 bp, Homo sapien
gcaggaaaccagtcgggcgttgata

SEQ ID NO: 3654293 - DNA, 25 bp, Homo sapien
ttgatagcgtcctgccgaaggctgg

SEQ ID NO: 3654294 - DNA, 25 bp, Homo sapien
ttcttctcgcgtgcctgagtccagg

SEQ ID NO: 3654295 - DNA, 25 bp, Homo sapien
tgtgctcgagcataactgtccctgg

SEQ ID NO: 3654296 - DNA, 25 bp, Homo sapien
tggacgcatacaggcccaagtcctg

SEQ ID NO: 3654297 - DNA, 25 bp, Homo sapien
tcgaccctcgcttagaagggacatc

SEQ ID NO: 3654298 - DNA, 25 bp, Homo sapien
gaatcttcgcggtagcgggtgaccc

SEQ ID NO: 3654299 - DNA, 25 bp, Homo sapien
gagtaggaaagaaggcatcgcctgc

SEQ ID NO: 3654300 - DNA, 25 bp, Homo sapien
acccggaagcgcgagattggttctc

SEQ ID NO: 3654301 - DNA, 25 bp, Homo sapien
gggtttccaactaagcaatctcggc

SEQ ID NO: 3654302 - DNA, 25 bp, Homo sapien
cgctggagtctactgaggacctcgg

SEQ ID NO: 3654303 - DNA, 25 bp, Homo sapien
ggcaattaaaatccacgctggagtc

SEQ ID NO: 3654304 - DNA, 25 bp, Homo sapien
tgaggcaattaaaatccacgctgga

SEQ ID NO: 3654305 - DNA, 25 bp, Homo sapien
tccacgctggagtctactgaggacc

SEQ ID NO: 3654306 - DNA, 25 bp, Homo sapien
tagccaagggctagatcgcgggacc

SEQ ID NO: 3654307 - DNA, 25 bp, Homo sapien
cgttcctgcgtagccaagggctaga

SEQ ID NO: 3654308 - DNA, 25 bp, Homo sapien
ctgcgtagccaagggctagatcgcg

SEQ ID NO: 3654309 - DNA, 25 bp, Homo sapien
ccaagggctagatcgcgggacccac

SEQ ID NO: 3654310 - DNA, 25 bp, Homo sapien
tggtagaacctgacgcctgcctgct

SEQ ID NO: 3654311 - DNA, 25 bp, Homo sapien
ctacccgctgatgggctcatttcag

SEQ ID NO: 3654312 - DNA, 25 bp, Homo sapien
gaagggctcctacccgctgatgggc

SEQ ID NO: 3654313 - DNA, 25 bp, Homo sapien
tcatttcagcgccttggtagaacct

SEQ ID NO: 3654314 - DNA, 25 bp, Homo sapien
catgcacgccagctggagtcagagt

SEQ ID NO: 3654315 - DNA, 25 bp, Homo sapien
gccgttttcctccaagcaggtgctg

SEQ ID NO: 3654316 - DNA, 25 bp, Homo sapien
ggcccagaggagttttctgtgtgca

SEQ ID NO: 3654317 - DNA, 25 bp, Homo sapien
ggtcactgcgacctcgagagctcgc

SEQ ID NO: 3654318 - DNA, 25 bp, Homo sapien
tgagtcgtgaggatgcgaggcagac

SEQ ID NO: 3654319 - DNA, 25 bp, Homo sapien
taagggtcctcggagcccggactca

SEQ ID NO: 3654320 - DNA, 25 bp, Homo sapien
gccccagagcatttgagggaaaggg

SEQ ID NO: 3654321 - DNA, 25 bp, Homo sapien
ccggactcaggaaagcgcggagagc

SEQ ID NO: 3654322 - DNA, 25 bp, Homo sapien
gagacagggtttagggacgtggcaa

SEQ ID NO: 3654323 - DNA, 25 bp, Homo sapien
ggagacagggtttagggacgtggca

SEQ ID NO: 3654324 - DNA, 25 bp, Homo sapien
cgagggcgggtgtcacgcaggaaca

SEQ ID NO: 3654325 - DNA, 25 bp, Homo sapien
gcgcgtgcgtgcccgtgtggcggga

SEQ ID NO: 3654326 - DNA, 25 bp, Homo sapien
ggcgagggcgggtgtcacgcaggaa

SEQ ID NO: 3654327 - DNA, 25 bp, Homo sapien
gggcgggtgtcacgcaggaacagaa

SEQ ID NO: 3654328 - DNA, 25 bp, Homo sapien
cgagtgcgagctgcgggcgagctgc

SEQ ID NO: 3654329 - DNA, 25 bp, Homo sapien
cgggcgagctgcctcgggcttggcc

SEQ ID NO: 3654330 - DNA, 25 bp, Homo sapien
ctgcgagtgcgagctgcgggcgagc

SEQ ID NO: 3654331 - DNA, 25 bp, Homo sapien
cgagctgcgggcgagctgcctcggg

SEQ ID NO: 3654332 - DNA, 25 bp, Homo sapien
ggctttggagactggagcaggtcgc

SEQ ID NO: 3654333 - DNA, 25 bp, Homo sapien
cggctttggagactggagcaggtcg

SEQ ID NO: 3654334 - DNA, 25 bp, Homo sapien
gagccatcttccgacccgaaagacc

SEQ ID NO: 3654335 - DNA, 25 bp, Homo sapien
ctgtgccgggattctcggaatcccc

SEQ ID NO: 3654336 - DNA, 25 bp, Homo sapien
ccagagccatcttccgacccgaaag

SEQ ID NO: 3654337 - DNA, 25 bp, Homo sapien
gccatcttccgacccgaaagaccaa

SEQ ID NO: 3654338 - DNA, 25 bp, Homo sapien
tatctgtttcccgaggagaagccca

SEQ ID NO: 3654339 - DNA, 25 bp, Homo sapien
gagaagcgcccgaagaagtttcctg

SEQ ID NO: 3654340 - DNA, 25 bp, Homo sapien
gtcaaggacttagcccaaaagcagg

SEQ ID NO: 3654341 - DNA, 25 bp, Homo sapien
tcttcccagggtacaagaggctgta

SEQ ID NO: 3654342 - DNA, 25 bp, Homo sapien
cagtttgtttccgatgccgcccgtg

SEQ ID NO: 3654343 - DNA, 25 bp, Homo sapien
gtttgtttccgatgccgcccgtgaa

SEQ ID NO: 3654344 - DNA, 25 bp, Homo sapien
cccgtgaacttctgagccacttggc

SEQ ID NO: 3654345 - DNA, 25 bp, Homo sapien
tgagccacttggcaccaggctcgcg

SEQ ID NO: 3654346 - DNA, 25 bp, Homo sapien
tggccgccccggtccctgggcactc

SEQ ID NO: 3654347 - DNA, 25 bp, Homo sapien
aggacaccgaacgcgggcctcgtca

SEQ ID NO: 3654348 - DNA, 25 bp, Homo sapien
gggcctcgtcaatcctccgccgggc

SEQ ID NO: 3654349 - DNA, 25 bp, Homo sapien
ccgactccgctgactgggatgcgga

SEQ ID NO: 3654350 - DNA, 25 bp, Homo sapien
ccgccggcttctcggcgtctccgta

SEQ ID NO: 3654351 - DNA, 25 bp, Homo sapien
gcttctcggcgtctccgtagagcag

SEQ ID NO: 3654352 - DNA, 25 bp, Homo sapien
cggcttctcggcgtctccgtagagc

SEQ ID NO: 3654353 - DNA, 25 bp, Homo sapien
cgcgggggttggctcccgccgctct

SEQ ID NO: 3654354 - DNA, 25 bp, Homo sapien
ctgttgcatggagaaacgcgtagtt

SEQ ID NO: 3654355 - DNA, 25 bp, Homo sapien
atggagaaacgcgtagttgacatcc

SEQ ID NO: 3654356 - DNA, 25 bp, Homo sapien
ttgcatggagaaacgcgtagttgac

SEQ ID NO: 3654357 - DNA, 25 bp, Homo sapien
aaacgcgtagttgacatccactttg

SEQ ID NO: 3654358 - DNA, 25 bp, Homo sapien
gggcaggtcccgcatttctcgcttt

SEQ ID NO: 3654359 - DNA, 25 bp, Homo sapien
tcttggagctccgaggccaggttcg

SEQ ID NO: 3654360 - DNA, 25 bp, Homo sapien
ctagggaagccagccgtcatcgatt

SEQ ID NO: 3654361 - DNA, 25 bp, Homo sapien
catcgattcagtgagcgcacgagcg

SEQ ID NO: 3654362 - DNA, 25 bp, Homo sapien
tgccttcgggcaaaccaaagtggaa

SEQ ID NO: 3654363 - DNA, 25 bp, Homo sapien
tctctggtctgataggaaggcccgc

SEQ ID NO: 3654364 - DNA, 25 bp, Homo sapien
gaaggcccgctgtttctaaagtcag

SEQ ID NO: 3654365 - DNA, 25 bp, Homo sapien
caattctgaattctcgggcacggta

SEQ ID NO: 3654366 - DNA, 25 bp, Homo sapien
tgtggttggtctgccaattcccaat

SEQ ID NO: 3654367 - DNA, 25 bp, Homo sapien
ttgcagaaacgccaaagtgggcctt

SEQ ID NO: 3654368 - DNA, 25 bp, Homo sapien
ggttgatctatcgaaacttttcacc

SEQ ID NO: 3654369 - DNA, 25 bp, Homo sapien
gagaagctcattaggataatggaaa

SEQ ID NO: 3654370 - DNA, 25 bp, Homo sapien
tttattattttcgatgagacaatac

SEQ ID NO: 3654371 - DNA, 25 bp, Homo sapien
ctgttgatgtcagccagtctgctgc

SEQ ID NO: 3654372 - DNA, 25 bp, Homo sapien
catatccaaaccagtagaaagttga

SEQ ID NO: 3654373 - DNA, 25 bp, Homo sapien
agttgattgaagtatctaggatgcc

SEQ ID NO: 3654374 - DNA, 25 bp, Homo sapien
tgctgctaatccaaccatatccaaa

SEQ ID NO: 3654375 - DNA, 25 bp, Homo sapien
aaaagcacaaatactggagcaattt

SEQ ID NO: 3654376 - DNA, 25 bp, Homo sapien
caaatactggagcaatttcataggt

SEQ ID NO: 3654377 - DNA, 25 bp, Homo sapien
agaaaatatcccatcgccagagccc

SEQ ID NO: 3654378 - DNA, 25 bp, Homo sapien
atactggagcaatttcataggtgaa

SEQ ID NO: 3654379 - DNA, 25 bp, Homo sapien
ggtttacaacaaggcattgcatatt

SEQ ID NO: 3654380 - DNA, 25 bp, Homo sapien
caaggcattgcatattagaagaaaa

SEQ ID NO: 3654381 - DNA, 25 bp, Homo sapien
tcttccctaggtttacaacaaggca

SEQ ID NO: 3654382 - DNA, 25 bp, Homo sapien
cctaggtttacaacaaggcattgca

SEQ ID NO: 3654383 - DNA, 25 bp, Homo sapien
gacttctgggaacatcttaaagcgt

SEQ ID NO: 3654384 - DNA, 25 bp, Homo sapien
gcatacatgttagatatggcgccac

SEQ ID NO: 3654385 - DNA, 25 bp, Homo sapien
tgggaacatcttaaagcgtgcgatc

SEQ ID NO: 3654386 - DNA, 25 bp, Homo sapien
aagcgtgcgatcatcatggcataca

SEQ ID NO: 3654387 - DNA, 25 bp, Homo sapien
tcaagaagatgcaggacggctttaa

SEQ ID NO: 3654388 - DNA, 25 bp, Homo sapien
caagaagatgcaggacggctttaaa

SEQ ID NO: 3654389 - DNA, 25 bp, Homo sapien
atgagctccgaaaaccccctccagc

SEQ ID NO: 3654390 - DNA, 25 bp, Homo sapien
ggacggctttaaatgagctccgaaa

SEQ ID NO: 3654391 - DNA, 25 bp, Homo sapien
aaataacatgggagcgatgagggcc

SEQ ID NO: 3654392 - DNA, 25 bp, Homo sapien
ttctttcctgagaggaggtttggat

SEQ ID NO: 3654393 - DNA, 25 bp, Homo sapien
agaggaggtttggatggactgggta

SEQ ID NO: 3654394 - DNA, 25 bp, Homo sapien
gaggtttggatggactgggtagagg

SEQ ID NO: 3654395 - DNA, 25 bp, Homo sapien
aacaataagtctgttcagccacttt

SEQ ID NO: 3654396 - DNA, 25 bp, Homo sapien
ctgttcagccacttttgacctggca

SEQ ID NO: 3654397 - DNA, 25 bp, Homo sapien
tctgttcagccacttttgacctggc

SEQ ID NO: 3654398 - DNA, 25 bp, Homo sapien
ctggagaacaataagtctgttcagc

SEQ ID NO: 3654399 - DNA, 25 bp, Homo sapien
aaagctcacaggatatatcactaac

SEQ ID NO: 3654400 - DNA, 25 bp, Homo sapien
ggcctgtcaccatttcatcaattcc

SEQ ID NO: 3654401 - DNA, 25 bp, Homo sapien
cctgtcaccatttcatcaattccaa

SEQ ID NO: 3654402 - DNA, 25 bp, Homo sapien
agggcctgtcaccatttcatcaatt

SEQ ID NO: 3654403 - DNA, 25 bp, Homo sapien
ttcgcttgctcctatacagtacacc

SEQ ID NO: 3654404 - DNA, 25 bp, Homo sapien
catccttctgacacctccattcgct

SEQ ID NO: 3654405 - DNA, 25 bp, Homo sapien
ctccattcgcttgctcctatacagt

SEQ ID NO: 3654406 - DNA, 25 bp, Homo sapien
tgacacctccattcgcttgctccta

SEQ ID NO: 3654407 - DNA, 25 bp, Homo sapien
ctgttccaatccctaaggctgcagc

SEQ ID NO: 3654408 - DNA, 25 bp, Homo sapien
atttaatcagaatcacgctgtctgt

SEQ ID NO: 3654409 - DNA, 25 bp, Homo sapien
gaatcacgctgtctgttccaatccc

SEQ ID NO: 3654410 - DNA, 25 bp, Homo sapien
tgttccaatccctaaggctgcagct

SEQ ID NO: 3654411 - DNA, 25 bp, Homo sapien
gaaccgggatcaacgtatggtgctt

SEQ ID NO: 3654412 - DNA, 25 bp, Homo sapien
atcctggcagggaaccgggatcaac

SEQ ID NO: 3654413 - DNA, 25 bp, Homo sapien
ggtgcttttctagagcctagtgaca

SEQ ID NO: 3654414 - DNA, 25 bp, Homo sapien
caacgtatggtgcttttctagagcc

SEQ ID NO: 3654415 - DNA, 25 bp, Homo sapien
cctttcgggccaaactgatgtgtaa

SEQ ID NO: 3654416 - DNA, 25 bp, Homo sapien
tgctggcgagtgaacctcagtttgg

SEQ ID NO: 3654417 - DNA, 25 bp, Homo sapien
cagtttggttcgctaacagaggtaa

SEQ ID NO: 3654418 - DNA, 25 bp, Homo sapien
cctgctgcaaacctgtgtgtggatg

SEQ ID NO: 3654419 - DNA, 25 bp, Homo sapien
tggtggactcatccaagaccacttc

SEQ ID NO: 3654420 - DNA, 25 bp, Homo sapien
gcaggccccttgttcccatgatgag

SEQ ID NO: 3654421 - DNA, 25 bp, Homo sapien
agccgcctagctggcctggtggact

SEQ ID NO: 3654422 - DNA, 25 bp, Homo sapien
aggcctgaacttctcttgtgagcag

SEQ ID NO: 3654423 - DNA, 25 bp, Homo sapien
acccagccactgatagactaatgtg

SEQ ID NO: 3654424 - DNA, 25 bp, Homo sapien
cagactattctctttcactgggaca

SEQ ID NO: 3654425 - DNA, 25 bp, Homo sapien
ccacatgcagcattgggcttattgc

SEQ ID NO: 3654426 - DNA, 25 bp, Homo sapien
tattgctagaaagacacagactatt

SEQ ID NO: 3654427 - DNA, 25 bp, Homo sapien
tgggtgacaaccaacagattgtcct

SEQ ID NO: 3654428 - DNA, 25 bp, Homo sapien
gacaattgggtgacaaccaacagat

SEQ ID NO: 3654429 - DNA, 25 bp, Homo sapien
cctctgactgcccatatgttgcggg

SEQ ID NO: 3654430 - DNA, 25 bp, Homo sapien
gacagagacaattgggtgacaacca

SEQ ID NO: 3654431 - DNA, 25 bp, Homo sapien
tcatatgtgccatggtttggagcct

SEQ ID NO: 3654432 - DNA, 25 bp, Homo sapien
ctcatatgtgccatggtttggagcc

SEQ ID NO: 3654433 - DNA, 25 bp, Homo sapien
tctcatatgtgccatggtttggagc

SEQ ID NO: 3654434 - DNA, 25 bp, Homo sapien
catatgtgccatggtttggagcctt

SEQ ID NO: 3654435 - DNA, 25 bp, Homo sapien
catgaaccagaggtgtcatacaaac

SEQ ID NO: 3654436 - DNA, 25 bp, Homo sapien
tcatgaaccagaggtgtcatacaaa

SEQ ID NO: 3654437 - DNA, 25 bp, Homo sapien
atctgactttcatgaaccagaggtg

SEQ ID NO: 3654438 - DNA, 25 bp, Homo sapien
ctttcatgaaccagaggtgtcatac

SEQ ID NO: 3654439 - DNA, 25 bp, Homo sapien
ctgggcaatggtaatggacaagtta

SEQ ID NO: 3654440 - DNA, 25 bp, Homo sapien
gggcaatggtaatggacaagttacc

SEQ ID NO: 3654441 - DNA, 25 bp, Homo sapien
caagttaccagtgattagtttgtca

SEQ ID NO: 3654442 - DNA, 25 bp, Homo sapien
tggacaagttaccagtgattagttt

SEQ ID NO: 3654443 - DNA, 25 bp, Homo sapien
gataacaatactcggagaaaacaac

SEQ ID NO: 3654444 - DNA, 25 bp, Homo sapien
taacaatactcggagaaaacaactc

SEQ ID NO: 3654445 - DNA, 25 bp, Homo sapien
gttgataacaatactcggagaaaac

SEQ ID NO: 3654446 - DNA, 25 bp, Homo sapien
ctgttgataacaatactcggagaaa

SEQ ID NO: 3654447 - DNA, 25 bp, Homo sapien
gtggccgcaggagggtaaagtccaa

SEQ ID NO: 3654448 - DNA, 25 bp, Homo sapien
tcatcgtctttacaacgtaagtggc

SEQ ID NO: 3654449 - DNA, 25 bp, Homo sapien
ttacaacgtaagtggccgcaggagg

SEQ ID NO: 3654450 - DNA, 25 bp, Homo sapien
tgcttcatcgtctttacaacgtaag

SEQ ID NO: 3654451 - DNA, 25 bp, Homo sapien
ggcttcaagaatccttctttcaaga

SEQ ID NO: 3654452 - DNA, 25 bp, Homo sapien
ttcaagatcagatggaatcattttc

SEQ ID NO: 3654453 - DNA, 25 bp, Homo sapien
ttctgtttggcttcaagaatccttc

SEQ ID NO: 3654454 - DNA, 25 bp, Homo sapien
caagatcagatggaatcattttccc

SEQ ID NO: 3654455 - DNA, 25 bp, Homo sapien
tccagctgtggcactcacgaggaaa

SEQ ID NO: 3654456 - DNA, 25 bp, Homo sapien
catccagatcttatactttttgcaa

SEQ ID NO: 3654457 - DNA, 25 bp, Homo sapien
tactttttgcaaatgtcagcgacag

SEQ ID NO: 3654458 - DNA, 25 bp, Homo sapien
gggtcaaatgctccgtacacggtgg

SEQ ID NO: 3654459 - DNA, 25 bp, Homo sapien
tccacttgtgttttcgggacatcag

SEQ ID NO: 3654460 - DNA, 25 bp, Homo sapien
ttgtgttttcgggacatcagtaatc

SEQ ID NO: 3654461 - DNA, 25 bp, Homo sapien
tctccacgccactcagtttccactt

SEQ ID NO: 3654462 - DNA, 25 bp, Homo sapien
tgttttcgggacatcagtaatcccc

SEQ ID NO: 3654463 - DNA, 25 bp, Homo sapien
ctgggcagcatctggcgacttggca

SEQ ID NO: 3654464 - DNA, 25 bp, Homo sapien
gcagagccagtgtgacgcttttgct

SEQ ID NO: 3654465 - DNA, 25 bp, Homo sapien
tgccaagatatctagtggcagagcc

SEQ ID NO: 3654466 - DNA, 25 bp, Homo sapien
caggctttcttggtcacttggagtg

SEQ ID NO: 3654467 - DNA, 25 bp, Homo sapien
tctgtgtattttgggcctgggtgtc

SEQ ID NO: 3654468 - DNA, 25 bp, Homo sapien
tgggtgtcagatcgcaccctctgca

SEQ ID NO: 3654469 - DNA, 25 bp, Homo sapien
gtgtcagatcgcaccctctgcacag

SEQ ID NO: 3654470 - DNA, 25 bp, Homo sapien
ggcctgggtgtcagatcgcaccctc

SEQ ID NO: 3654471 - DNA, 25 bp, Homo sapien
gtaaccatacccctctctttccaca

SEQ ID NO: 3654472 - DNA, 25 bp, Homo sapien
tccagcccagtaaccatacccctct

SEQ ID NO: 3654473 - DNA, 25 bp, Homo sapien
aatttggtgggatgctcttgactcc

SEQ ID NO: 3654474 - DNA, 25 bp, Homo sapien
ttaatttggtgggatgctcttgact

SEQ ID NO: 3654475 - DNA, 25 bp, Homo sapien
taaaccatggcatcctccaaccaaa

SEQ ID NO: 3654476 - DNA, 25 bp, Homo sapien
acagctgttaaaccatggcatcctc

SEQ ID NO: 3654477 - DNA, 25 bp, Homo sapien
aacacactgtgcactttcacacttg

SEQ ID NO: 3654478 - DNA, 25 bp, Homo sapien
gcatcctccaaccaaacgggtttga

SEQ ID NO: 3654479 - DNA, 25 bp, Homo sapien
tacagtagaataacccgtggcagct

SEQ ID NO: 3654480 - DNA, 25 bp, Homo sapien
gctgccctgtctggccgtacaatgg

SEQ ID NO: 3654481 - DNA, 25 bp, Homo sapien
cagagagccatggattgctgccctg

SEQ ID NO: 3654482 - DNA, 25 bp, Homo sapien
cgtacaatggacgtgggctcatcca

SEQ ID NO: 3654483 - DNA, 25 bp, Homo sapien
cacacatttactgggtaaggtgagc

SEQ ID NO: 3654484 - DNA, 25 bp, Homo sapien
ctacgcttgtctccggagagactga

SEQ ID NO: 3654485 - DNA, 25 bp, Homo sapien
tactgggtaaggtgagcctctacgc

SEQ ID NO: 3654486 - DNA, 25 bp, Homo sapien
taaggtgagcctctacgcttgtctc

SEQ ID NO: 3654487 - DNA, 25 bp, Homo sapien
catcatcttgtgtggattccacgtc

SEQ ID NO: 3654488 - DNA, 25 bp, Homo sapien
gagcactgcaaagggactcccatca

SEQ ID NO: 3654489 - DNA, 25 bp, Homo sapien
aaagggactcccatcatcttgtgtg

SEQ ID NO: 3654490 - DNA, 25 bp, Homo sapien
tgcaaagggactcccatcatcttgt

SEQ ID NO: 3654491 - DNA, 25 bp, Homo sapien
tttggttgcaattctgcatcaatcc

SEQ ID NO: 3654492 - DNA, 25 bp, Homo sapien
gcatgcatttggttgcaattctgca

SEQ ID NO: 3654493 - DNA, 25 bp, Homo sapien
ctgaaagaggtaggaggcatgcatt

SEQ ID NO: 3654494 - DNA, 25 bp, Homo sapien
taggaggcatgcatttggttgcaat

SEQ ID NO: 3654495 - DNA, 25 bp, Homo sapien
ttaaaaacatcaacgtggcgtccgc

SEQ ID NO: 3654496 - DNA, 25 bp, Homo sapien
gtggcgtccgcactgtaaggccttg

SEQ ID NO: 3654497 - DNA, 25 bp, Homo sapien
ccacatcagccatagtttaaaaaca

SEQ ID NO: 3654498 - DNA, 25 bp, Homo sapien
cataggacaggtcataatgtttatc

SEQ ID NO: 3654499 - DNA, 25 bp, Homo sapien
gttctgtttttagttgacatttagc

SEQ ID NO: 3654500 - DNA, 25 bp, Homo sapien
ctgtttttagttgacatttagctgg

SEQ ID NO: 3654501 - DNA, 25 bp, Homo sapien
gacatttagctggtccatacatact

SEQ ID NO: 3654502 - DNA, 25 bp, Homo sapien
atttagctggtccatacatactcac

SEQ ID NO: 3654503 - DNA, 25 bp, Homo sapien
aacatttatcaacatgcgcttcaaa

SEQ ID NO: 3654504 - DNA, 25 bp, Homo sapien
tgtataaatactctgccaactccaa

SEQ ID NO: 3654505 - DNA, 25 bp, Homo sapien
acatgcgcttcaaacccggtagtcc

SEQ ID NO: 3654506 - DNA, 25 bp, Homo sapien
tccttctcggttttttatgatgttg

SEQ ID NO: 3654507 - DNA, 25 bp, Homo sapien
cttcgagaggcgactcattctctct

SEQ ID NO: 3654508 - DNA, 25 bp, Homo sapien
tgtcttccagagtacgcaagcttgg

SEQ ID NO: 3654509 - DNA, 25 bp, Homo sapien
tggaggaatgtaccagaagcagaca

SEQ ID NO: 3654510 - DNA, 25 bp, Homo sapien
cagaagcagacatttgtgtgctgag

SEQ ID NO: 3654511 - DNA, 25 bp, Homo sapien
gtggttccatactccatcattctgg

SEQ ID NO: 3654512 - DNA, 25 bp, Homo sapien
gttgccgctgggtttgagatgacca

SEQ ID NO: 3654513 - DNA, 25 bp, Homo sapien
gatgaccatgcggaagaaattgacc

SEQ ID NO: 3654514 - DNA, 25 bp, Homo sapien
tctcccaagggttggtagctgacca

SEQ ID NO: 3654515 - DNA, 25 bp, Homo sapien
agaagtggaacagcttggtgagcaa

SEQ ID NO: 3654516 - DNA, 25 bp, Homo sapien
agtggaacagcttggtgagcaaggt

SEQ ID NO: 3654517 - DNA, 25 bp, Homo sapien
tggaacagcttggtgagcaaggtta

SEQ ID NO: 3654518 - DNA, 25 bp, Homo sapien
ctagagaagtggaacagcttggtga

SEQ ID NO: 3654519 - DNA, 25 bp, Homo sapien
gattagaacatagccttttgtcacg

SEQ ID NO: 3654520 - DNA, 25 bp, Homo sapien
ccaaagaaccttttatgattcaggg

SEQ ID NO: 3654521 - DNA, 25 bp, Homo sapien
ggcaatttggcactattcagtccta

SEQ ID NO: 3654522 - DNA, 25 bp, Homo sapien
cagtcctactagtctgaagtgaaaa

SEQ ID NO: 3654523 - DNA, 25 bp, Homo sapien
gaatctgacgatgtgtgaccccata

SEQ ID NO: 3654524 - DNA, 25 bp, Homo sapien
cagcagggttggttcaccagggcac

SEQ ID NO: 3654525 - DNA, 25 bp, Homo sapien
tgtcttctccacgaaggacagcagg

SEQ ID NO: 3654526 - DNA, 25 bp, Homo sapien
tctgagtactgaactacctggtcca

SEQ ID NO: 3654527 - DNA, 25 bp, Homo sapien
gacctactaggcttttatttgcttc

SEQ ID NO: 3654528 - DNA, 25 bp, Homo sapien
cagttggtaaggatttccctgcaca

SEQ ID NO: 3654529 - DNA, 25 bp, Homo sapien
aggctctcagccaatttgaaggagt

SEQ ID NO: 3654530 - DNA, 25 bp, Homo sapien
tctttgggctacagttggtaaggat

SEQ ID NO: 3654531 - DNA, 25 bp, Homo sapien
tacagttcagatctaaagtgcacaa

SEQ ID NO: 3654532 - DNA, 25 bp, Homo sapien
aatgggcacacataaagaccatggc

SEQ ID NO: 3654533 - DNA, 25 bp, Homo sapien
aaccccaatctgaggtgacaagaca

SEQ ID NO: 3654534 - DNA, 25 bp, Homo sapien
ctattagagccgatgtggagggcat

SEQ ID NO: 3654535 - DNA, 25 bp, Homo sapien
cgcacaattctcaaaggaagtttct

SEQ ID NO: 3654536 - DNA, 25 bp, Homo sapien
tgtgaagtcgcacaattctcaaagg

SEQ ID NO: 3654537 - DNA, 25 bp, Homo sapien
tgcattttgtgaagtcgcacaattc

SEQ ID NO: 3654538 - DNA, 25 bp, Homo sapien
cagtagggggcttagctgagggcat

SEQ ID NO: 3654539 - DNA, 25 bp, Homo sapien
ctggtgacactccataattggtaac

SEQ ID NO: 3654540 - DNA, 25 bp, Homo sapien
taattggtaacgtctgttctcagag

SEQ ID NO: 3654541 - DNA, 25 bp, Homo sapien
gacactccataattggtaacgtctg

SEQ ID NO: 3654542 - DNA, 25 bp, Homo sapien
ttctcagagacaaagtggtgttcac

SEQ ID NO: 3654543 - DNA, 25 bp, Homo sapien
gagcacgtgcaaaatgatacccagt

SEQ ID NO: 3654544 - DNA, 25 bp, Homo sapien
tatttggtaggaagaacaggttgcc

SEQ ID NO: 3654545 - DNA, 25 bp, Homo sapien
tgggaacggtagtttggcacaccta

SEQ ID NO: 3654546 - DNA, 25 bp, Homo sapien
catttgagaacagaagagcacgtgc

SEQ ID NO: 3654547 - DNA, 25 bp, Homo sapien
caacagctccattagaggaggcgat

SEQ ID NO: 3654548 - DNA, 25 bp, Homo sapien
tagtttctagtaggagctacccagg

SEQ ID NO: 3654549 - DNA, 25 bp, Homo sapien
gctacccagggcagtgaacaatcac

SEQ ID NO: 3654550 - DNA, 25 bp, Homo sapien
gtagatccggttgacttaccagcaa

SEQ ID NO: 3654551 - DNA, 25 bp, Homo sapien
gaattaggcatgtatccagccatgg

SEQ ID NO: 3654552 - DNA, 25 bp, Homo sapien
catggctatgtgagacctggtggcc

SEQ ID NO: 3654553 - DNA, 25 bp, Homo sapien
ggtatcctctaccactgaattaggc

SEQ ID NO: 3654554 - DNA, 25 bp, Homo sapien
gcttccttgcctgaatacacactgg

SEQ ID NO: 3654555 - DNA, 25 bp, Homo sapien
gaaaattccattgtaactcactgag

SEQ ID NO: 3654556 - DNA, 25 bp, Homo sapien
cattgtaactcactgaggtcacggc

SEQ ID NO: 3654557 - DNA, 25 bp, Homo sapien
tctgatagctgccaagcagagtcat

SEQ ID NO: 3654558 - DNA, 25 bp, Homo sapien
ctgaggtcacggcattctgatagct

SEQ ID NO: 3654559 - DNA, 25 bp, Homo sapien
catgtctgctcttgatctccgttct

SEQ ID NO: 3654560 - DNA, 25 bp, Homo sapien
cctcctgaacactgtctggtcacaa

SEQ ID NO: 3654561 - DNA, 25 bp, Homo sapien
tgtctgctcttgatctccgttcttc

SEQ ID NO: 3654562 - DNA, 25 bp, Homo sapien
cctggctggcatgccacattctgtt

SEQ ID NO: 3654563 - DNA, 25 bp, Homo sapien
ttcccacaacatgccagaagaggct

SEQ ID NO: 3654564 - DNA, 25 bp, Homo sapien
acttcccacaacatgccagaagagg

SEQ ID NO: 3654565 - DNA, 25 bp, Homo sapien
cttcccacaacatgccagaagaggc

SEQ ID NO: 3654566 - DNA, 25 bp, Homo sapien
tgaagatgaagggacagctgatggg

SEQ ID NO: 3654567 - DNA, 25 bp, Homo sapien
gatgaagggacagctgatgggttgt

SEQ ID NO: 3654568 - DNA, 25 bp, Homo sapien
acagctgatgggttgtaggaagcat

SEQ ID NO: 3654569 - DNA, 25 bp, Homo sapien
gacagctgatgggttgtaggaagca

SEQ ID NO: 3654570 - DNA, 25 bp, Homo sapien
tctgacccgagctggtctgcagtag

SEQ ID NO: 3654571 - DNA, 25 bp, Homo sapien
tgtctctgacccgagctggtctgca

SEQ ID NO: 3654572 - DNA, 25 bp, Homo sapien
tgccgatgaagttcctgagctgtct

SEQ ID NO: 3654573 - DNA, 25 bp, Homo sapien
taaggcactggtagcctatgccgat

SEQ ID NO: 3654574 - DNA, 25 bp, Homo sapien
gattttctattccatgggtgcctct

SEQ ID NO: 3654575 - DNA, 25 bp, Homo sapien
aaccagattttctattccatgggtg

SEQ ID NO: 3654576 - DNA, 25 bp, Homo sapien
ccagattttctattccatgggtgcc

SEQ ID NO: 3654577 - DNA, 25 bp, Homo sapien
cagattttctattccatgggtgcct

SEQ ID NO: 3654578 - DNA, 25 bp, Homo sapien
ccgggtacagtctgcccggtgagca

SEQ ID NO: 3654579 - DNA, 25 bp, Homo sapien
ccagggcccgaaagtgtcgtgcgct

SEQ ID NO: 3654580 - DNA, 25 bp, Homo sapien
gcgggccctgctgcgagctttccag

SEQ ID NO: 3654581 - DNA, 25 bp, Homo sapien
tagccgcggcgtcttgacgcgcctg

SEQ ID NO: 3654582 - DNA, 25 bp, Homo sapien
cagccttggtctttttatgtaccat

SEQ ID NO: 3654583 - DNA, 25 bp, Homo sapien
caggtaaaactcaatagagaggaac

SEQ ID NO: 3654584 - DNA, 25 bp, Homo sapien
acacaaagttcatagggaccaccat

SEQ ID NO: 3654585 - DNA, 25 bp, Homo sapien
tactgtagttgacttctttttcagg

SEQ ID NO: 3654586 - DNA, 25 bp, Homo sapien
aaagcaggtaaaactcaatagagag

SEQ ID NO: 3654587 - DNA, 25 bp, Homo sapien
ggtgataacaagcatgtatggccac

SEQ ID NO: 3654588 - DNA, 25 bp, Homo sapien
cccctgtggtatagctttgagtgag

SEQ ID NO: 3654589 - DNA, 25 bp, Homo sapien
tgtatggccactacagagtcccctg

SEQ ID NO: 3654590 - DNA, 25 bp, Homo sapien
ggagccacaaagagtggagtttcag

SEQ ID NO: 3654591 - DNA, 25 bp, Homo sapien
cagcacctggactgtaaaatgacac

SEQ ID NO: 3654592 - DNA, 25 bp, Homo sapien
cctggactgtaaaatgacaccaatc

SEQ ID NO: 3654593 - DNA, 25 bp, Homo sapien
cacctggactgtaaaatgacaccaa

SEQ ID NO: 3654594 - DNA, 25 bp, Homo sapien
agcacctggactgtaaaatgacacc

SEQ ID NO: 3654595 - DNA, 25 bp, Homo sapien
gctacaagaagtctagccagctaca

SEQ ID NO: 3654596 - DNA, 25 bp, Homo sapien
gaatcattggcactattaccggttt

SEQ ID NO: 3654597 - DNA, 25 bp, Homo sapien
tctttgagagttgcaaagcctctgg

SEQ ID NO: 3654598 - DNA, 25 bp, Homo sapien
cagtttcacatggtgagcctagtcc

SEQ ID NO: 3654599 - DNA, 25 bp, Homo sapien
cgtctcctggcgaatggaaccattt

SEQ ID NO: 3654600 - DNA, 25 bp, Homo sapien
ggaaccattttgcagcctcgacgca

SEQ ID NO: 3654601 - DNA, 25 bp, Homo sapien
gattggggcctagtgatggttccac

SEQ ID NO: 3654602 - DNA, 25 bp, Homo sapien
cttctctcaggagcgtctcctggcg

SEQ ID NO: 3654603 - DNA, 25 bp, Homo sapien
aagcgacgcgcggtgcagactgccg

SEQ ID NO: 3654604 - DNA, 25 bp, Homo sapien
cagcgcgcagacgtgtggcgctatc

SEQ ID NO: 3654605 - DNA, 25 bp, Homo sapien
cgggaaggcggcgagactccggccg

SEQ ID NO: 3654606 - DNA, 25 bp, Homo sapien
gctatccgagctgctttgctccgag

SEQ ID NO: 3654607 - DNA, 25 bp, Homo sapien
acgcgttcacgaggccagatcctgg

SEQ ID NO: 3654608 - DNA, 25 bp, Homo sapien
gcgtcggacccgacgggcttgacaa

SEQ ID NO: 3654609 - DNA, 25 bp, Homo sapien
cgagccgggtccagagtggagatca

SEQ ID NO: 3654610 - DNA, 25 bp, Homo sapien
ttgacaaacgggttcctgacagccc

SEQ ID NO: 3654611 - DNA, 25 bp, Homo sapien
tgaatagtagctagtaccggcacct

SEQ ID NO: 3654612 - DNA, 25 bp, Homo sapien
gatccttgctaatttcgccagccag

SEQ ID NO: 3654613 - DNA, 25 bp, Homo sapien
tgtgccacccattattccagtgagg

SEQ ID NO: 3654614 - DNA, 25 bp, Homo sapien
cacgttgagcagacaggaaatacca

SEQ ID NO: 3654615 - DNA, 25 bp, Homo sapien
tctaagatagcacaatttccgtggt

SEQ ID NO: 3654616 - DNA, 25 bp, Homo sapien
tgtctttactgaacagcacaagctg

SEQ ID NO: 3654617 - DNA, 25 bp, Homo sapien
catgccagtgttctttgatccccag

SEQ ID NO: 3654618 - DNA, 25 bp, Homo sapien
tgcttgtgaccacccagagtcggtg

SEQ ID NO: 3654619 - DNA, 25 bp, Homo sapien
gaagattgccttcattcctggacaa

SEQ ID NO: 3654620 - DNA, 25 bp, Homo sapien
taattaggaagcaacgctaggctgg

SEQ ID NO: 3654621 - DNA, 25 bp, Homo sapien
gaaggcaactctaatgtgactccca

SEQ ID NO: 3654622 - DNA, 25 bp, Homo sapien
cacagatgtgattctggacgtccaa

SEQ ID NO: 3654623 - DNA, 25 bp, Homo sapien
aatttttccatagtccaacccgcat

SEQ ID NO: 3654624 - DNA, 25 bp, Homo sapien
taattcctaggcacaccaaaggctt

SEQ ID NO: 3654625 - DNA, 25 bp, Homo sapien
ttcacttaatgtactgaacccagag

SEQ ID NO: 3654626 - DNA, 25 bp, Homo sapien
ttttcccgtggatagagcagctcct

SEQ ID NO: 3654627 - DNA, 25 bp, Homo sapien
ttttggtatagggagatctaagcca

SEQ ID NO: 3654628 - DNA, 25 bp, Homo sapien
tataggttttggtatagggagatct

SEQ ID NO: 3654629 - DNA, 25 bp, Homo sapien
tatagggagatctaagccagatgtt

SEQ ID NO: 3654630 - DNA, 25 bp, Homo sapien
tctaagccagatgttatcttgggaa

SEQ ID NO: 3654631 - DNA, 25 bp, Homo sapien
tcaaatccaggtaaccccaggagca

SEQ ID NO: 3654632 - DNA, 25 bp, Homo sapien
tgcataagcctgtggggacacgact

SEQ ID NO: 3654633 - DNA, 25 bp, Homo sapien
catcggagggttcctgtgagacaca

SEQ ID NO: 3654634 - DNA, 25 bp, Homo sapien
ccacagaaggtgcaacaggaatgat

SEQ ID NO: 3654635 - DNA, 25 bp, Homo sapien
tgaataagctcaaacaggccgggca

SEQ ID NO: 3654636 - DNA, 25 bp, Homo sapien
gatacctccctggttatcagtgcag

SEQ ID NO: 3654637 - DNA, 25 bp, Homo sapien
gaaaaattacatgcggtgtggctca

SEQ ID NO: 3654638 - DNA, 25 bp, Homo sapien
tgaaaaccccagaggattagagctg

SEQ ID NO: 3654639 - DNA, 25 bp, Homo sapien
gtcacctgtgtacagtgtgattgaa

SEQ ID NO: 3654640 - DNA, 25 bp, Homo sapien
ggtggaaactgtgaagtcacctgtg

SEQ ID NO: 3654641 - DNA, 25 bp, Homo sapien
gattgcccttaggatgaaatacgca

SEQ ID NO: 3654642 - DNA, 25 bp, Homo sapien
cactacagaattcggatgctcgcaa

SEQ ID NO: 3654643 - DNA, 25 bp, Homo sapien
tcctgtagaaggcttctccttgcct

SEQ ID NO: 3654644 - DNA, 25 bp, Homo sapien
agccacagttgacacctcaccagct

SEQ ID NO: 3654645 - DNA, 25 bp, Homo sapien
cggtcgaggaatctgttggcttttc

SEQ ID NO: 3654646 - DNA, 25 bp, Homo sapien
catttttccatctagtcggtcgagg

SEQ ID NO: 3654647 - DNA, 25 bp, Homo sapien
cggtcagagtagcttgcctaaacac

SEQ ID NO: 3654648 - DNA, 25 bp, Homo sapien
ggcatttccctctaagtagctccga

SEQ ID NO: 3654649 - DNA, 25 bp, Homo sapien
ccaggcatttccctctaagtagctc

SEQ ID NO: 3654650 - DNA, 25 bp, Homo sapien
gatgagggcggcctttattgcatcg

SEQ ID NO: 3654651 - DNA, 25 bp, Homo sapien
tagctatagctaatcagggtatctt

SEQ ID NO: 3654652 - DNA, 25 bp, Homo sapien
gctttgtcacactaactttgctttc

SEQ ID NO: 3654653 - DNA, 25 bp, Homo sapien
tactgggctgaaataggccaagtgg

SEQ ID NO: 3654654 - DNA, 25 bp, Homo sapien
caagtggaggcaaatctatctttcc

SEQ ID NO: 3654655 - DNA, 25 bp, Homo sapien
gctgaacatttggtctatgtcttca

SEQ ID NO: 3654656 - DNA, 25 bp, Homo sapien
catttggtctatgtcttcacttgac

SEQ ID NO: 3654657 - DNA, 25 bp, Homo sapien
aaagtgctgaacatttggtctatgt

SEQ ID NO: 3654658 - DNA, 25 bp, Homo sapien
tctatgtcttcacttgactcaccca

SEQ ID NO: 3654659 - DNA, 25 bp, Homo sapien
ccagggttgctaggattaggaaatt

SEQ ID NO: 3654660 - DNA, 25 bp, Homo sapien
ggtgtctgccttatgcagttgaaga

SEQ ID NO: 3654661 - DNA, 25 bp, Homo sapien
gataacggatgaaacatgccctggc

SEQ ID NO: 3654662 - DNA, 25 bp, Homo sapien
ccttgtgatattttgttgcccttga

SEQ ID NO: 3654663 - DNA, 25 bp, Homo sapien
accccacactgtagttaaattcagc

SEQ ID NO: 3654664 - DNA, 25 bp, Homo sapien
gtggattagggtcaggaggagggag

SEQ ID NO: 3654665 - DNA, 25 bp, Homo sapien
attcagctctgggtggattagggtc

SEQ ID NO: 3654666 - DNA, 25 bp, Homo sapien
aaccccacactgtagttaaattcag

SEQ ID NO: 3654667 - DNA, 25 bp, Homo sapien
tattcttaatctaattccatacaaa

SEQ ID NO: 3654668 - DNA, 25 bp, Homo sapien
atctattcttaatctaattccatac

SEQ ID NO: 3654669 - DNA, 25 bp, Homo sapien
ttgaacttgttttagcagtgtttta

SEQ ID NO: 3654670 - DNA, 25 bp, Homo sapien
caaatctattcttaatctaattcca

SEQ ID NO: 3654671 - DNA, 25 bp, Homo sapien
tgagagcatctaaatcttggtcttc

SEQ ID NO: 3654672 - DNA, 25 bp, Homo sapien
acttatgtctgctaccagatctgcc

SEQ ID NO: 3654673 - DNA, 25 bp, Homo sapien
gatctgccatgagagcatctaaatc

SEQ ID NO: 3654674 - DNA, 25 bp, Homo sapien
tgctcagcctcacttatgtctgcta

SEQ ID NO: 3654675 - DNA, 25 bp, Homo sapien
ttgttccataaccaagagaggctgc

SEQ ID NO: 3654676 - DNA, 25 bp, Homo sapien
aggtggtaagtcatcctcatattgg

SEQ ID NO: 3654677 - DNA, 25 bp, Homo sapien
tctaacacaggatcggctggtggag

SEQ ID NO: 3654678 - DNA, 25 bp, Homo sapien
tattggctgataccagtggcagcaa

SEQ ID NO: 3654679 - DNA, 25 bp, Homo sapien
catcagtgataggtagcagaggttg

SEQ ID NO: 3654680 - DNA, 25 bp, Homo sapien
tcaaggaacatcagtgataggtagc

SEQ ID NO: 3654681 - DNA, 25 bp, Homo sapien
ataggtagcagaggttgatggtcct

SEQ ID NO: 3654682 - DNA, 25 bp, Homo sapien
gcagaggttgatggtcctgccatct

SEQ ID NO: 3654683 - DNA, 25 bp, Homo sapien
cacagtgtgaccattgtagaagcca

SEQ ID NO: 3654684 - DNA, 25 bp, Homo sapien
tcctactgaacagggctgccaagtt

SEQ ID NO: 3654685 - DNA, 25 bp, Homo sapien
tagctttgcaatgagcgtgctctgt

SEQ ID NO: 3654686 - DNA, 25 bp, Homo sapien
catgtggcttgcttacggagggttc

SEQ ID NO: 3654687 - DNA, 25 bp, Homo sapien
ttcagtttttccagcgccagcttaa

SEQ ID NO: 3654688 - DNA, 25 bp, Homo sapien
tccagcgccagcttaattttatcag

SEQ ID NO: 3654689 - DNA, 25 bp, Homo sapien
tcagtttttccagcgccagcttaat

SEQ ID NO: 3654690 - DNA, 25 bp, Homo sapien
tttttccagcgccagcttaatttta

SEQ ID NO: 3654691 - DNA, 25 bp, Homo sapien
ggccctcggcagaaacataatgatt

SEQ ID NO: 3654692 - DNA, 25 bp, Homo sapien
acttaaaggagatgcacagcgaacc

SEQ ID NO: 3654693 - DNA, 25 bp, Homo sapien
cagacatcggagacttttgagcaga

SEQ ID NO: 3654694 - DNA, 25 bp, Homo sapien
gaaaggcctcgctaggaaggtgacc

SEQ ID NO: 3654695 - DNA, 25 bp, Homo sapien
tctcttagtctccagctgaagcgaa

SEQ ID NO: 3654696 - DNA, 25 bp, Homo sapien
tacattcggagtgtctgaaatcaga

SEQ ID NO: 3654697 - DNA, 25 bp, Homo sapien
caacagcccacagaatacttgaggg

SEQ ID NO: 3654698 - DNA, 25 bp, Homo sapien
tctcactgtctgatatatggcagga

SEQ ID NO: 3654699 - DNA, 25 bp, Homo sapien
taaccagacctaaccctgtctagct

SEQ ID NO: 3654700 - DNA, 25 bp, Homo sapien
actaaccagacctaaccctgtctag

SEQ ID NO: 3654701 - DNA, 25 bp, Homo sapien
tagagtacaaccagggttgtatggc

SEQ ID NO: 3654702 - DNA, 25 bp, Homo sapien
cttctgagatcggatgagatagagt

SEQ ID NO: 3654703 - DNA, 25 bp, Homo sapien
gctgttatcattcatgtgcaccttg

SEQ ID NO: 3654704 - DNA, 25 bp, Homo sapien
cgggtagatttcataaagacaccag

SEQ ID NO: 3654705 - DNA, 25 bp, Homo sapien
tctcgaaaaggttgtccagaacatc

SEQ ID NO: 3654706 - DNA, 25 bp, Homo sapien
gtcacaatgagttttctcgaaaagg

SEQ ID NO: 3654707 - DNA, 25 bp, Homo sapien
tgtccagtctgataagacttcaaca

SEQ ID NO: 3654708 - DNA, 25 bp, Homo sapien
tccagtctgataagacttcaacaac

SEQ ID NO: 3654709 - DNA, 25 bp, Homo sapien
cagtctgataagacttcaacaacat

SEQ ID NO: 3654710 - DNA, 25 bp, Homo sapien
gtctgataagacttcaacaacattt

SEQ ID NO: 3654711 - DNA, 25 bp, Homo sapien
ggtttttaaatacagcatatttctc

SEQ ID NO: 3654712 - DNA, 25 bp, Homo sapien
gtttttaaatacagcatatttctcc

SEQ ID NO: 3654713 - DNA, 25 bp, Homo sapien
ctgggggtttttaaatacagcatat

SEQ ID NO: 3654714 - DNA, 25 bp, Homo sapien
ttgcagaaactgggatctcactatg

SEQ ID NO: 3654715 - DNA, 25 bp, Homo sapien
tgcctggcctctaaggttgcctttc

SEQ ID NO: 3654716 - DNA, 25 bp, Homo sapien
gcctctaaggttgcctttcatgcat

SEQ ID NO: 3654717 - DNA, 25 bp, Homo sapien
tggcctctaaggttgcctttcatgc

SEQ ID NO: 3654718 - DNA, 25 bp, Homo sapien
ggattccttgttcttagcattcatt

SEQ ID NO: 3654719 - DNA, 25 bp, Homo sapien
ctcaagtaaggattccttgttctta

SEQ ID NO: 3654720 - DNA, 25 bp, Homo sapien
taaggattccttgttcttagcattc

SEQ ID NO: 3654721 - DNA, 25 bp, Homo sapien
ccttgttcttagcattcattttctc

SEQ ID NO: 3654722 - DNA, 25 bp, Homo sapien
tcaaatgaacttctggaacacgccc

SEQ ID NO: 3654723 - DNA, 25 bp, Homo sapien
tttacgtctgacttccgtggagcac

SEQ ID NO: 3654724 - DNA, 25 bp, Homo sapien
catgaagagtgctaggcagagccgc

SEQ ID NO: 3654725 - DNA, 25 bp, Homo sapien
tgttgagagagcatcttagaggtcc

SEQ ID NO: 3654726 - DNA, 25 bp, Homo sapien
gccaattggctccaggtgggaaccg

SEQ ID NO: 3654727 - DNA, 25 bp, Homo sapien
ccttaatgaacgagagagggcgctc

SEQ ID NO: 3654728 - DNA, 25 bp, Homo sapien
ttttgaccccaattagacagcagga

SEQ ID NO: 3654729 - DNA, 25 bp, Homo sapien
aaaagacatgcgcaaggcctgggcg

SEQ ID NO: 3654730 - DNA, 25 bp, Homo sapien
cagaagcccgtaaaagaaaatagcg

SEQ ID NO: 3654731 - DNA, 25 bp, Homo sapien
agaaaatagcgccttttccaggatt

SEQ ID NO: 3654732 - DNA, 25 bp, Homo sapien
ccttccagttctggtacaatgatag

SEQ ID NO: 3654733 - DNA, 25 bp, Homo sapien
ttctggtacaatgatagatgttcca

SEQ ID NO: 3654734 - DNA, 25 bp, Homo sapien
caaaaaatactgtgcatgtgagctt

SEQ ID NO: 3654735 - DNA, 25 bp, Homo sapien
tggctgcagagaattctacggtaca

SEQ ID NO: 3654736 - DNA, 25 bp, Homo sapien
tagattcgtcaagcatggagttgcc

SEQ ID NO: 3654737 - DNA, 25 bp, Homo sapien
caggtgtaacgatttatttaactat

SEQ ID NO: 3654738 - DNA, 25 bp, Homo sapien
taaaacacgccagatctcgagatgt

SEQ ID NO: 3654739 - DNA, 25 bp, Homo sapien
tttcattttatgctgagtcccatag

SEQ ID NO: 3654740 - DNA, 25 bp, Homo sapien
aaacaaagcaatagtcagtgggcgc

SEQ ID NO: 3654741 - DNA, 25 bp, Homo sapien
tgctgagtcccatagtaaatgttga

SEQ ID NO: 3654742 - DNA, 25 bp, Homo sapien
gccacgttggagataggagccttct

SEQ ID NO: 3654743 - DNA, 25 bp, Homo sapien
gaaaatgtctgtggcccaaggaaaa

SEQ ID NO: 3654744 - DNA, 25 bp, Homo sapien
gaaaagagaagaattgtctgcagag

SEQ ID NO: 3654745 - DNA, 25 bp, Homo sapien
caaagggagtggctgacgatgtggt

SEQ ID NO: 3654746 - DNA, 25 bp, Homo sapien
gaccctctgagcttacgaaatgaga

SEQ ID NO: 3654747 - DNA, 25 bp, Homo sapien
gattgttcccgatcataaagagaga

SEQ ID NO: 3654748 - DNA, 25 bp, Homo sapien
tggactgtcactgcttaaagggcac

SEQ ID NO: 3654749 - DNA, 25 bp, Homo sapien
aaggagcttattgcctaaccgagcc

SEQ ID NO: 3654750 - DNA, 25 bp, Homo sapien
agtctggtgctgaaaccccgggctc

SEQ ID NO: 3654751 - DNA, 25 bp, Homo sapien
agtccagatgtcagaatacttgaag

SEQ ID NO: 3654752 - DNA, 25 bp, Homo sapien
cgcatggcaggtattccagtccaga

SEQ ID NO: 3654753 - DNA, 25 bp, Homo sapien
ttagcacatggccagcgcatggcag

SEQ ID NO: 3654754 - DNA, 25 bp, Homo sapien
ttcttatgtcatagaattaatgcct

SEQ ID NO: 3654755 - DNA, 25 bp, Homo sapien
cttttggaagcttttcacctctatc

SEQ ID NO: 3654756 - DNA, 25 bp, Homo sapien
cagagttttgtgatgacctttcctt

SEQ ID NO: 3654757 - DNA, 25 bp, Homo sapien
gagaattgtgggtttataactccca

SEQ ID NO: 3654758 - DNA, 25 bp, Homo sapien
ttggctatccgtattcccatgaccc

SEQ ID NO: 3654759 - DNA, 25 bp, Homo sapien
gatacttgatatactgggactcctt

SEQ ID NO: 3654760 - DNA, 25 bp, Homo sapien
cacagcagagatacttgatatactg

SEQ ID NO: 3654761 - DNA, 25 bp, Homo sapien
tcttgtgtcatcacagcagagatac

SEQ ID NO: 3654762 - DNA, 25 bp, Homo sapien
gactgtccccaagtttgtccaccga

SEQ ID NO: 3654763 - DNA, 25 bp, Homo sapien
gtagttatcatagagagtcttccca

SEQ ID NO: 3654764 - DNA, 25 bp, Homo sapien
tttgtccaccgagaggcaagtccag

SEQ ID NO: 3654765 - DNA, 25 bp, Homo sapien
ccacagcccgctggtagttatcata

SEQ ID NO: 3654766 - DNA, 25 bp, Homo sapien
ctctgggcctcttggagaacagcac

SEQ ID NO: 3654767 - DNA, 25 bp, Homo sapien
gtctctgggcctcttggagaacagc

SEQ ID NO: 3654768 - DNA, 25 bp, Homo sapien
cttcgatgtttcagcatgtctctgg

SEQ ID NO: 3654769 - DNA, 25 bp, Homo sapien
cgatgtttcagcatgtctctgggcc

SEQ ID NO: 3654770 - DNA, 25 bp, Homo sapien
gtgaatggtttagaacatggcttat

SEQ ID NO: 3654771 - DNA, 25 bp, Homo sapien
aatggtttagaacatggcttatagg

SEQ ID NO: 3654772 - DNA, 25 bp, Homo sapien
tggtttagaacatggcttatagggg

SEQ ID NO: 3654773 - DNA, 25 bp, Homo sapien
gaatggtttagaacatggcttatag

SEQ ID NO: 3654774 - DNA, 25 bp, Homo sapien
tacagtttatcagggttccagttca

SEQ ID NO: 3654775 - DNA, 25 bp, Homo sapien
cagcatgtgctattggtagaaacca

SEQ ID NO: 3654776 - DNA, 25 bp, Homo sapien
ttctcaactgcatgaaacttggctg

SEQ ID NO: 3654777 - DNA, 25 bp, Homo sapien
aatttggcctaagtctaatagacgc

SEQ ID NO: 3654778 - DNA, 25 bp, Homo sapien
accattgtaacctgaccaaggacag

SEQ ID NO: 3654779 - DNA, 25 bp, Homo sapien
tggaattacggccaccccacctggc

SEQ ID NO: 3654780 - DNA, 25 bp, Homo sapien
gatttatatgaccattgtaacctga

SEQ ID NO: 3654781 - DNA, 25 bp, Homo sapien
cctttacccattcctgcacatagga

SEQ ID NO: 3654782 - DNA, 25 bp, Homo sapien
gcactgccgggtcgtggtggttccc

SEQ ID NO: 3654783 - DNA, 25 bp, Homo sapien
cccggggcactgccgggtcgtggtg

SEQ ID NO: 3654784 - DNA, 25 bp, Homo sapien
gggcactgccgggtcgtggtggttc

SEQ ID NO: 3654785 - DNA, 25 bp, Homo sapien
ctgccgggtcgtggtggttcccgag

SEQ ID NO: 3654786 - DNA, 25 bp, Homo sapien
ggcgggagctcagggtcatcgaggg

SEQ ID NO: 3654787 - DNA, 25 bp, Homo sapien
gcgggactgccgctggtgtcggagg

SEQ ID NO: 3654788 - DNA, 25 bp, Homo sapien
cggcggcaggaagtcgtcgggtggg

SEQ ID NO: 3654789 - DNA, 25 bp, Homo sapien
ccgctggtgtcggaggacctccgca

SEQ ID NO: 3654790 - DNA, 25 bp, Homo sapien
ctctgagcccgcgatccctgcgtac

SEQ ID NO: 3654791 - DNA, 25 bp, Homo sapien
ggcagctctgagcccgcgatccctg

SEQ ID NO: 3654792 - DNA, 25 bp, Homo sapien
cgcgatccctgcgtacgacggcggg

SEQ ID NO: 3654793 - DNA, 25 bp, Homo sapien
agcccgcgatccctgcgtacgacgg

SEQ ID NO: 3654794 - DNA, 25 bp, Homo sapien
ttgcaaagctttcatgaggtctgac

SEQ ID NO: 3654795 - DNA, 25 bp, Homo sapien
tgacatgaaatcttgctccccgcct

SEQ ID NO: 3654796 - DNA, 25 bp, Homo sapien
tcttttgcaaagctttcatgaggtc

SEQ ID NO: 3654797 - DNA, 25 bp, Homo sapien
aaagctttcatgaggtctgacatga

SEQ ID NO: 3654798 - DNA, 25 bp, Homo sapien
tctgaaatgaacaagatgtcagggc

SEQ ID NO: 3654799 - DNA, 25 bp, Homo sapien
catgggaacgatatgtacatttggg

SEQ ID NO: 3654800 - DNA, 25 bp, Homo sapien
aatggttatgcctgtacttgagcac

SEQ ID NO: 3654801 - DNA, 25 bp, Homo sapien
tgagcacatcagtgagaagtttccc

SEQ ID NO: 3654802 - DNA, 25 bp, Homo sapien
catgaaagtctatctgaggtcacca

SEQ ID NO: 3654803 - DNA, 25 bp, Homo sapien
ttttaattatagtgttgatctcaag

SEQ ID NO: 3654804 - DNA, 25 bp, Homo sapien
tctcaagatagattgacccaataat

SEQ ID NO: 3654805 - DNA, 25 bp, Homo sapien
gatagacatgaaagtctatctgagg

SEQ ID NO: 3654806 - DNA, 25 bp, Homo sapien
tcaatcaagccacggaatctcagag

SEQ ID NO: 3654807 - DNA, 25 bp, Homo sapien
tcctctctcgattttcctgcaaatt

SEQ ID NO: 3654808 - DNA, 25 bp, Homo sapien
caagccacggaatctcagagaaagg

SEQ ID NO: 3654809 - DNA, 25 bp, Homo sapien
tttcctctctcgattttcctgcaaa

SEQ ID NO: 3654810 - DNA, 25 bp, Homo sapien
gtaaaaggcctatcagaagccaatt

SEQ ID NO: 3654811 - DNA, 25 bp, Homo sapien
gcattgtaataacagagaattcaaa

SEQ ID NO: 3654812 - DNA, 25 bp, Homo sapien
caagaacctaggataaattgggcat

SEQ ID NO: 3654813 - DNA, 25 bp, Homo sapien
cagagcgatgtaaataaaactaaga

SEQ ID NO: 3654814 - DNA, 25 bp, Homo sapien
cttgggctacatataaaatgcactt

SEQ ID NO: 3654815 - DNA, 25 bp, Homo sapien
tgataggtgatgaacaacaacacaa

SEQ ID NO: 3654816 - DNA, 25 bp, Homo sapien
aaaatgcacttacattagcgatgat

SEQ ID NO: 3654817 - DNA, 25 bp, Homo sapien
cattagcgatgataggtgatgaaca

SEQ ID NO: 3654818 - DNA, 25 bp, Homo sapien
gaaagtccaaatcaccatacgtagg

SEQ ID NO: 3654819 - DNA, 25 bp, Homo sapien
aataatgcaaagtctcaaccctggg

SEQ ID NO: 3654820 - DNA, 25 bp, Homo sapien
gacaactgaccaaaaaactctggga

SEQ ID NO: 3654821 - DNA, 25 bp, Homo sapien
taaagtttcatcaaagaccgccaga

SEQ ID NO: 3654822 - DNA, 25 bp, Homo sapien
gcatcttctccagcaagttcttcag

SEQ ID NO: 3654823 - DNA, 25 bp, Homo sapien
tcttctccagcaagttcttcagcat

SEQ ID NO: 3654824 - DNA, 25 bp, Homo sapien
ggtgcatcttctccagcaagttctt

SEQ ID NO: 3654825 - DNA, 25 bp, Homo sapien
caggtgcatcttctccagcaagttc

SEQ ID NO: 3654826 - DNA, 25 bp, Homo sapien
aggcactaactgaaggccagttgcc

SEQ ID NO: 3654827 - DNA, 25 bp, Homo sapien
aaggcactaactgaaggccagttgc

SEQ ID NO: 3654828 - DNA, 25 bp, Homo sapien
gaaggcactaactgaaggccagttg

SEQ ID NO: 3654829 - DNA, 25 bp, Homo sapien
aaggctccgcagaagccctgtgcgg

SEQ ID NO: 3654830 - DNA, 25 bp, Homo sapien
ttctcctctgtgctagggccttcgc

SEQ ID NO: 3654831 - DNA, 25 bp, Homo sapien
tgctagggccttcgcctttgctggc

SEQ ID NO: 3654832 - DNA, 25 bp, Homo sapien
tcatagatgtcagagccgcaggaag

SEQ ID NO: 3654833 - DNA, 25 bp, Homo sapien
cgccaatgtgctgctagtcaaggct

SEQ ID NO: 3654834 - DNA, 25 bp, Homo sapien
gccaatgtgctgctagtcaaggctc

SEQ ID NO: 3654835 - DNA, 25 bp, Homo sapien
tcgccaatgtgctgctagtcaaggc

SEQ ID NO: 3654836 - DNA, 25 bp, Homo sapien
tgggattcatagaaccctcttcccc

SEQ ID NO: 3654837 - DNA, 25 bp, Homo sapien
gtgtctgggattcatagaaccctct

SEQ ID NO: 3654838 - DNA, 25 bp, Homo sapien
aaccaaatctgcctcgcgcagtgtc

SEQ ID NO: 3654839 - DNA, 25 bp, Homo sapien
tctgcctcgcgcagtgtctgggatt

SEQ ID NO: 3654840 - DNA, 25 bp, Homo sapien
aatagcggcctgcacctcgcgtcac

SEQ ID NO: 3654841 - DNA, 25 bp, Homo sapien
gtttacagagctaaacacctttcgc

SEQ ID NO: 3654842 - DNA, 25 bp, Homo sapien
tacagagctaaacacctttcgcctc

SEQ ID NO: 3654843 - DNA, 25 bp, Homo sapien
catggggtggcactccaatagcggc

SEQ ID NO: 3654844 - DNA, 25 bp, Homo sapien
tgctcctgtatatcgtggcctacgt

SEQ ID NO: 3654845 - DNA, 25 bp, Homo sapien
tgacttcacagtcgtagacatcaga

SEQ ID NO: 3654846 - DNA, 25 bp, Homo sapien
tacgtctttgctgacttcacagtcg

SEQ ID NO: 3654847 - DNA, 25 bp, Homo sapien
acatcctgagatagccctgcttgtg

SEQ ID NO: 3654848 - DNA, 25 bp, Homo sapien
agggtaccaactgaagagcaccaag

SEQ ID NO: 3654849 - DNA, 25 bp, Homo sapien
caactgaagagcaccaagtgagggt

SEQ ID NO: 3654850 - DNA, 25 bp, Homo sapien
gggtaccaactgaagagcaccaagt

SEQ ID NO: 3654851 - DNA, 25 bp, Homo sapien
ggtaccaactgaagagcaccaagtg

SEQ ID NO: 3654852 - DNA, 25 bp, Homo sapien
ggtgcacatgcgacagttcagtgtg

SEQ ID NO: 3654853 - DNA, 25 bp, Homo sapien
catgcgacagttcagtgtggtccac

SEQ ID NO: 3654854 - DNA, 25 bp, Homo sapien
cacatgcgacagttcagtgtggtcc

SEQ ID NO: 3654855 - DNA, 25 bp, Homo sapien
tgcgacagttcagtgtggtccacat

SEQ ID NO: 3654856 - DNA, 25 bp, Homo sapien
tagccccgcttgcggctggcactgg

SEQ ID NO: 3654857 - DNA, 25 bp, Homo sapien
gcttcgtagatcccacagctgcagg

SEQ ID NO: 3654858 - DNA, 25 bp, Homo sapien
agctagccccgcttgcggctggcac

SEQ ID NO: 3654859 - DNA, 25 bp, Homo sapien
cttcgtagatcccacagctgcagga

SEQ ID NO: 3654860 - DNA, 25 bp, Homo sapien
cagtggagtccagcgttactgccac

SEQ ID NO: 3654861 - DNA, 25 bp, Homo sapien
ttgggccagcaacggccagaggatc

SEQ ID NO: 3654862 - DNA, 25 bp, Homo sapien
gcaacggccagaggatcttctgaac

SEQ ID NO: 3654863 - DNA, 25 bp, Homo sapien
tattatgaccagatttttacacact

SEQ ID NO: 3654864 - DNA, 25 bp, Homo sapien
tatccgttgcctccctatctttggg

SEQ ID NO: 3654865 - DNA, 25 bp, Homo sapien
gtctgacattcatagaacccccttt

SEQ ID NO: 3654866 - DNA, 25 bp, Homo sapien
cggcactgcgctagcagccctcacc

SEQ ID NO: 3654867 - DNA, 25 bp, Homo sapien
gccatggggcggcactgcgctagca

SEQ ID NO: 3654868 - DNA, 25 bp, Homo sapien
gggccatggggcggcactgcgctag

SEQ ID NO: 3654869 - DNA, 25 bp, Homo sapien
gggcggcactgcgctagcagccctc

SEQ ID NO: 3654870 - DNA, 25 bp, Homo sapien
caagtctgcagagctgaacgcctct

SEQ ID NO: 3654871 - DNA, 25 bp, Homo sapien
aagtctgcagagctgaacgcctctc

SEQ ID NO: 3654872 - DNA, 25 bp, Homo sapien
ctgtatatcgcatcctgcgtcttca

SEQ ID NO: 3654873 - DNA, 25 bp, Homo sapien
cctgcgtcttcactgtctgtacgct

SEQ ID NO: 3654874 - DNA, 25 bp, Homo sapien
actgtctgtacgctggtagacgtca

SEQ ID NO: 3654875 - DNA, 25 bp, Homo sapien
tgtatatcgcatcctgcgtcttcac

SEQ ID NO: 3654876 - DNA, 25 bp, Homo sapien
agagctgcaggacagcttcacccac

SEQ ID NO: 3654877 - DNA, 25 bp, Homo sapien
tcagagctgcaggacagcttcaccc

SEQ ID NO: 3654878 - DNA, 25 bp, Homo sapien
cagagctgcaggacagcttcaccca

SEQ ID NO: 3654879 - DNA, 25 bp, Homo sapien
gcctcaaaagcagtggagtcctgca

SEQ ID NO: 3654880 - DNA, 25 bp, Homo sapien
aaaagcagtggagtcctgcactaca

SEQ ID NO: 3654881 - DNA, 25 bp, Homo sapien
gtggagtcctgcactacagccacct

SEQ ID NO: 3654882 - DNA, 25 bp, Homo sapien
agcagtggagtcctgcactacagcc

SEQ ID NO: 3654883 - DNA, 25 bp, Homo sapien
taagcaccaggcttacaaggcccca

SEQ ID NO: 3654884 - DNA, 25 bp, Homo sapien
cacatccgggttagaggaaacaatc

SEQ ID NO: 3654885 - DNA, 25 bp, Homo sapien
cgtggaattcagagcttaagcacca

SEQ ID NO: 3654886 - DNA, 25 bp, Homo sapien
tgaaaaccatgaactgcagaccacc

SEQ ID NO: 3654887 - DNA, 25 bp, Homo sapien
catgcaagagttcagtgtggtcccc

SEQ ID NO: 3654888 - DNA, 25 bp, Homo sapien
tagacatgagagccacaggctggtc

SEQ ID NO: 3654889 - DNA, 25 bp, Homo sapien
gcagaacccttgtgccggccatgat

SEQ ID NO: 3654890 - DNA, 25 bp, Homo sapien
ctttggtgcacatgcaagagttcag

SEQ ID NO: 3654891 - DNA, 25 bp, Homo sapien
tcctgtatatcgtgtcgtgtgtctt

SEQ ID NO: 3654892 - DNA, 25 bp, Homo sapien
tgctcctgtatatcgtgtcgtgtgt

SEQ ID NO: 3654893 - DNA, 25 bp, Homo sapien
tatcgtgtcgtgtgtctttgctgtc

SEQ ID NO: 3654894 - DNA, 25 bp, Homo sapien
tgtatatcgtgtcgtgtgtctttgc

SEQ ID NO: 3654895 - DNA, 25 bp, Homo sapien
gagaacaaccagagtttaaatagaa

SEQ ID NO: 3654896 - DNA, 25 bp, Homo sapien
aacagaactgggcatagcataggta

SEQ ID NO: 3654897 - DNA, 25 bp, Homo sapien
tagcataggtaggaggaaagtaaga

SEQ ID NO: 3654898 - DNA, 25 bp, Homo sapien
agagaacaaccagagtttaaataga

SEQ ID NO: 3654899 - DNA, 25 bp, Homo sapien
aatctacatgacaactcaaagaatg

SEQ ID NO: 3654900 - DNA, 25 bp, Homo sapien
tcttataatcccagccctaggggag

SEQ ID NO: 3654901 - DNA, 25 bp, Homo sapien
tagtttgagaaacccattaatctac

SEQ ID NO: 3654902 - DNA, 25 bp, Homo sapien
caactagttttctagtagtttgaga

SEQ ID NO: 3654903 - DNA, 25 bp, Homo sapien
tttctcggctccttagaaaggatcc

SEQ ID NO: 3654904 - DNA, 25 bp, Homo sapien
atttctcggctccttagaaaggatc

SEQ ID NO: 3654905 - DNA, 25 bp, Homo sapien
ttctcggctccttagaaaggatccc

SEQ ID NO: 3654906 - DNA, 25 bp, Homo sapien
tggaaggtctgcagttgttagagaa

SEQ ID NO: 3654907 - DNA, 25 bp, Homo sapien
tccttttgacacaaagcttgactca

SEQ ID NO: 3654908 - DNA, 25 bp, Homo sapien
caaagcttgactcatggaaggtctg

SEQ ID NO: 3654909 - DNA, 25 bp, Homo sapien
aaggtctgcagttgttagagaatca

SEQ ID NO: 3654910 - DNA, 25 bp, Homo sapien
ctgagtacaggaacaacttttgaac

SEQ ID NO: 3654911 - DNA, 25 bp, Homo sapien
cgtgctgagtacaggaacaactttt

SEQ ID NO: 3654912 - DNA, 25 bp, Homo sapien
tgctgagtacaggaacaacttttga

SEQ ID NO: 3654913 - DNA, 25 bp, Homo sapien
gagtacaggaacaacttttgaacat

SEQ ID NO: 3654914 - DNA, 25 bp, Homo sapien
gggcttggtgatgccttttataggt

SEQ ID NO: 3654915 - DNA, 25 bp, Homo sapien
ccactgggcttggtgatgcctttta

SEQ ID NO: 3654916 - DNA, 25 bp, Homo sapien
gaacagcactgacagaatgtgcagc

SEQ ID NO: 3654917 - DNA, 25 bp, Homo sapien
gtgtttgggccttttccagaacagc

SEQ ID NO: 3654918 - DNA, 25 bp, Homo sapien
gcagttattggaacaatgcgaatgg

SEQ ID NO: 3654919 - DNA, 25 bp, Homo sapien
aaagagcagttattggaacaatgcg

SEQ ID NO: 3654920 - DNA, 25 bp, Homo sapien
tgcgaatggttgagaacatgggttt

SEQ ID NO: 3654921 - DNA, 25 bp, Homo sapien
ggaacaatgcgaatggttgagaaca

SEQ ID NO: 3654922 - DNA, 25 bp, Homo sapien
tttctcaactgcatgaaagttggct

SEQ ID NO: 3654923 - DNA, 25 bp, Homo sapien
tctctattatgacctgtgtctcagg

SEQ ID NO: 3654924 - DNA, 25 bp, Homo sapien
tgagccccgaagtctctattatgac

SEQ ID NO: 3654925 - DNA, 25 bp, Homo sapien
tggttcaccgggtataaaatgagcc

SEQ ID NO: 3654926 - DNA, 25 bp, Homo sapien
cagcaggaagtcgtcgggcgggcgg

SEQ ID NO: 3654927 - DNA, 25 bp, Homo sapien
gcagcaggaagtcgtcgggcgggcg

SEQ ID NO: 3654928 - DNA, 25 bp, Homo sapien
gccccagccgcctgtgcccttgact

SEQ ID NO: 3654929 - DNA, 25 bp, Homo sapien
gcggggctgcagatggtgtcccagg

SEQ ID NO: 3654930 - DNA, 25 bp, Homo sapien
cataggaggcctcttggcgacagca

SEQ ID NO: 3654931 - DNA, 25 bp, Homo sapien
tcatttgcggcatctgaacattgat

SEQ ID NO: 3654932 - DNA, 25 bp, Homo sapien
gaacattgatgcttcgtgcctcttg

SEQ ID NO: 3654933 - DNA, 25 bp, Homo sapien
tcctggggcgcctccatgaagtcag

SEQ ID NO: 3654934 - DNA, 25 bp, Homo sapien
gcaacatttactgagcttctggtca

SEQ ID NO: 3654935 - DNA, 25 bp, Homo sapien
cagcaacatttactgagcttctggt

SEQ ID NO: 3654936 - DNA, 25 bp, Homo sapien
ctcagcaacatttactgagcttctg

SEQ ID NO: 3654937 - DNA, 25 bp, Homo sapien
caacatttactgagcttctggtcat

SEQ ID NO: 3654938 - DNA, 25 bp, Homo sapien
ttgtcacagctgctctgtctcttac

SEQ ID NO: 3654939 - DNA, 25 bp, Homo sapien
agctttgatatgtgtgatagtacct

SEQ ID NO: 3654940 - DNA, 25 bp, Homo sapien
gatatgtgtgatagtacctatttcc

SEQ ID NO: 3654941 - DNA, 25 bp, Homo sapien
tttcctactaggctgacccagatgt

SEQ ID NO: 3654942 - DNA, 25 bp, Homo sapien
acctatttcctactaggctgaccca

SEQ ID NO: 3654943 - DNA, 25 bp, Homo sapien
cctgggattccccaggtgtatcctc

SEQ ID NO: 3654944 - DNA, 25 bp, Homo sapien
aattctgtagcctccagaaatccaa

SEQ ID NO: 3654945 - DNA, 25 bp, Homo sapien
aactctcttcccaattcctgggatt

SEQ ID NO: 3654946 - DNA, 25 bp, Homo sapien
tgtatcctctgtcttgtgtctcccc

SEQ ID NO: 3654947 - DNA, 25 bp, Homo sapien
gaatttgccaagtagagtgtagcaa

SEQ ID NO: 3654948 - DNA, 25 bp, Homo sapien
taggactaagacgttatcatttgct

SEQ ID NO: 3654949 - DNA, 25 bp, Homo sapien
tgtacttgacaatcctaggactaag

SEQ ID NO: 3654950 - DNA, 25 bp, Homo sapien
tgtagcaataagcactcgggttgta

SEQ ID NO: 3654951 - DNA, 25 bp, Homo sapien
actcgtagacatcagaacctcaggc

SEQ ID NO: 3654952 - DNA, 25 bp, Homo sapien
cttagctggatccacttgtagctgg

SEQ ID NO: 3654953 - DNA, 25 bp, Homo sapien
tccctccgcactcttagctggatcc

SEQ ID NO: 3654954 - DNA, 25 bp, Homo sapien
atatcgcggcctgcaccttcgctgt

SEQ ID NO: 3654955 - DNA, 25 bp, Homo sapien
gggtccggtgctactaccacctcta

SEQ ID NO: 3654956 - DNA, 25 bp, Homo sapien
cgtttatgacgtggaagtccaagca

SEQ ID NO: 3654957 - DNA, 25 bp, Homo sapien
cgcccttccgtttatgacgtggaag

SEQ ID NO: 3654958 - DNA, 25 bp, Homo sapien
cttccgtttatgacgtggaagtcca

SEQ ID NO: 3654959 - DNA, 25 bp, Homo sapien
tatgacgtggaagtccaagcactgg

SEQ ID NO: 3654960 - DNA, 25 bp, Homo sapien
gatgtcagagcctcaggacggctct

SEQ ID NO: 3654961 - DNA, 25 bp, Homo sapien
tctcaggtcgcttggtccttccttg

SEQ ID NO: 3654962 - DNA, 25 bp, Homo sapien
cctctgctcttctcaggtcgcttgg

SEQ ID NO: 3654963 - DNA, 25 bp, Homo sapien
tgctcttctcaggtcgcttggtcct

SEQ ID NO: 3654964 - DNA, 25 bp, Homo sapien
ttggcgtcttctggtcgtcatgact

SEQ ID NO: 3654965 - DNA, 25 bp, Homo sapien
gcagtggactctggcgctactccca

SEQ ID NO: 3654966 - DNA, 25 bp, Homo sapien
ctccaaacaccgcatcctgagctgg

SEQ ID NO: 3654967 - DNA, 25 bp, Homo sapien
actcctgaatcagacggggcaggct

SEQ ID NO: 3654968 - DNA, 25 bp, Homo sapien
ccttttaacaggtgtggtgatcacg

SEQ ID NO: 3654969 - DNA, 25 bp, Homo sapien
taaggaggaccaaattatacccaga

SEQ ID NO: 3654970 - DNA, 25 bp, Homo sapien
cattcaccatcacatcataaagagt

SEQ ID NO: 3654971 - DNA, 25 bp, Homo sapien
ttctctaacgccaaaaatggtgcaa

SEQ ID NO: 3654972 - DNA, 25 bp, Homo sapien
gcctactctctaattcaagttatat

SEQ ID NO: 3654973 - DNA, 25 bp, Homo sapien
tctaatgatcactttgacaaagcag

SEQ ID NO: 3654974 - DNA, 25 bp, Homo sapien
agctaagcctactctctaattcaag

SEQ ID NO: 3654975 - DNA, 25 bp, Homo sapien
taatgatcactttgacaaagcagct

SEQ ID NO: 3654976 - DNA, 25 bp, Homo sapien
tcatagaaccgccatttctccataa

SEQ ID NO: 3654977 - DNA, 25 bp, Homo sapien
agattcatagaaccgccatttctcc

SEQ ID NO: 3654978 - DNA, 25 bp, Homo sapien
tgtctgagattcatagaaccgccat

SEQ ID NO: 3654979 - DNA, 25 bp, Homo sapien
tctgagattcatagaaccgccattt

SEQ ID NO: 3654980 - DNA, 25 bp, Homo sapien
tttcattcatgctggctgctaggac

SEQ ID NO: 3654981 - DNA, 25 bp, Homo sapien
actttggtgcacttgtgacagttca

SEQ ID NO: 3654982 - DNA, 25 bp, Homo sapien
gactttggtgcacttgtgacagttc

SEQ ID NO: 3654983 - DNA, 25 bp, Homo sapien
cacagcctgcgccttctctgtctgc

SEQ ID NO: 3654984 - DNA, 25 bp, Homo sapien
tatcacagcctgcgccttctctgtc

SEQ ID NO: 3654985 - DNA, 25 bp, Homo sapien
acagcctgcgccttctctgtctgca

SEQ ID NO: 3654986 - DNA, 25 bp, Homo sapien
gtatatcacagcctgcgccttctct

SEQ ID NO: 3654987 - DNA, 25 bp, Homo sapien
agtggagtctggtagtactgccacc

SEQ ID NO: 3654988 - DNA, 25 bp, Homo sapien
gtggagtctggtagtactgccacct

SEQ ID NO: 3654989 - DNA, 25 bp, Homo sapien
ttgccaatgtactgctgtcaggtct

SEQ ID NO: 3654990 - DNA, 25 bp, Homo sapien
ggttgccaatgtactgctgtcaggt

SEQ ID NO: 3654991 - DNA, 25 bp, Homo sapien
gttgccaatgtactgctgtcaggtc

SEQ ID NO: 3654992 - DNA, 25 bp, Homo sapien
tgccaatgtactgctgtcaggtctg

SEQ ID NO: 3654993 - DNA, 25 bp, Homo sapien
cattgctgcatgctaggaaccttca

SEQ ID NO: 3654994 - DNA, 25 bp, Homo sapien
tgcatgcatccctacagacttggaa

SEQ ID NO: 3654995 - DNA, 25 bp, Homo sapien
aaatctgcttcacgcaatgtctggg

SEQ ID NO: 3654996 - DNA, 25 bp, Homo sapien
ttcataacaccaagacaccaagagg

SEQ ID NO: 3654997 - DNA, 25 bp, Homo sapien
aaaaatcctgccaacctgtccagtt

SEQ ID NO: 3654998 - DNA, 25 bp, Homo sapien
aaatcctgccaacctgtccagttta

SEQ ID NO: 3654999 - DNA, 25 bp, Homo sapien
aaaaaatcctgccaacctgtccagt

SEQ ID NO: 3655000 - DNA, 25 bp, Homo sapien
atcctgccaacctgtccagtttatt

SEQ ID NO: 3655001 - DNA, 25 bp, Homo sapien
catgcgacagttcaatgtggtcccc

SEQ ID NO: 3655002 - DNA, 25 bp, Homo sapien
ggtgcacatgcgacagttcaatgtg

SEQ ID NO: 3655003 - DNA, 25 bp, Homo sapien
cacatgcgacagttcaatgtggtcc

SEQ ID NO: 3655004 - DNA, 25 bp, Homo sapien
tgcacatgcgacagttcaatgtggt

SEQ ID NO: 3655005 - DNA, 25 bp, Homo sapien
tggctctgcacaacccttgtgccgg

SEQ ID NO: 3655006 - DNA, 25 bp, Homo sapien
caggctggctctgcacaacccttgt

SEQ ID NO: 3655007 - DNA, 25 bp, Homo sapien
tgcacaacccttgtgccggccctga

SEQ ID NO: 3655008 - DNA, 25 bp, Homo sapien
aacccttgtgccggccctgactggg

SEQ ID NO: 3655009 - DNA, 25 bp, Homo sapien
gagttggtgctactgctatctccac

SEQ ID NO: 3655010 - DNA, 25 bp, Homo sapien
tctgctcctgtatattgcgggctgc

SEQ ID NO: 3655011 - DNA, 25 bp, Homo sapien
gctgcgtctgcgctgtctgcacact

SEQ ID NO: 3655012 - DNA, 25 bp, Homo sapien
ccatttgtggttggcattgtgggac

SEQ ID NO: 3655013 - DNA, 25 bp, Homo sapien
gttgcagcgagctgacatcgcgacg

SEQ ID NO: 3655014 - DNA, 25 bp, Homo sapien
tgcagcgagctgacatcgcgacgta

SEQ ID NO: 3655015 - DNA, 25 bp, Homo sapien
gcgagctgacatcgcgacgtagcat

SEQ ID NO: 3655016 - DNA, 25 bp, Homo sapien
gctgacatcgcgacgtagcattcca

SEQ ID NO: 3655017 - DNA, 25 bp, Homo sapien
cagagatgctttagccatgctcagc

SEQ ID NO: 3655018 - DNA, 25 bp, Homo sapien
cttagaaaggatcccgccaaggatg

SEQ ID NO: 3655019 - DNA, 25 bp, Homo sapien
aggatcccgccaaggatggccgcct

SEQ ID NO: 3655020 - DNA, 25 bp, Homo sapien
aaaggatcccgccaaggatggccgc

SEQ ID NO: 3655021 - DNA, 25 bp, Homo sapien
agaaaggatcccgccaaggatggcc

SEQ ID NO: 3655022 - DNA, 25 bp, Homo sapien
tccttttgacacaaagcttgactca

SEQ ID NO: 3655023 - DNA, 25 bp, Homo sapien
tggaaggtctgcagttgttagagaa

SEQ ID NO: 3655024 - DNA, 25 bp, Homo sapien
caaagcttgactcatggaaggtctg

SEQ ID NO: 3655025 - DNA, 25 bp, Homo sapien
aaggtctgcagttgttagagaatca

SEQ ID NO: 3655026 - DNA, 25 bp, Homo sapien
gcctgggcctcttcgagaacagcac

SEQ ID NO: 3655027 - DNA, 25 bp, Homo sapien
ggctgggtggtgccatttataggtc

SEQ ID NO: 3655028 - DNA, 25 bp, Homo sapien
ttccatgtttcagcatgtgcctggg

SEQ ID NO: 3655029 - DNA, 25 bp, Homo sapien
tgtgcctgggcctcttcgagaacag

SEQ ID NO: 3655030 - DNA, 25 bp, Homo sapien
gaatgtatgccagctgcttgctggt

SEQ ID NO: 3655031 - DNA, 25 bp, Homo sapien
aattcaaacacctcagccagccaag

SEQ ID NO: 3655032 - DNA, 25 bp, Homo sapien
agcaattcaaacacctcagccagcc

SEQ ID NO: 3655033 - DNA, 25 bp, Homo sapien
caagcaattcaaacacctcagccag

SEQ ID NO: 3655034 - DNA, 25 bp, Homo sapien
ttcaaacacctcagccagccaagta

SEQ ID NO: 3655035 - DNA, 25 bp, Homo sapien
tggctcctggtggttcccgagggct

SEQ ID NO: 3655036 - DNA, 25 bp, Homo sapien
gtggcggcaggaagtagtcgggcgg

SEQ ID NO: 3655037 - DNA, 25 bp, Homo sapien
ggctgccactggtgtcacaggacct

SEQ ID NO: 3655038 - DNA, 25 bp, Homo sapien
ggaagaccacgctgcctgtgccctt

SEQ ID NO: 3655039 - DNA, 25 bp, Homo sapien
cggggcggggaagaccacgctgcct

SEQ ID NO: 3655040 - DNA, 25 bp, Homo sapien
cagcgggagctctgggtactccagg

SEQ ID NO: 3655041 - DNA, 25 bp, Homo sapien
cttgtgaacattgatgcttcgtgcc

SEQ ID NO: 3655042 - DNA, 25 bp, Homo sapien
tctccatgaagtccggggacggcag

SEQ ID NO: 3655043 - DNA, 25 bp, Homo sapien
ataggaggcctcttggcgacagcga

SEQ ID NO: 3655044 - DNA, 25 bp, Homo sapien
tttcctctcctccaactcctccaat

SEQ ID NO: 3655045 - DNA, 25 bp, Homo sapien
ctttcctctcctccaactcctccaa

SEQ ID NO: 3655046 - DNA, 25 bp, Homo sapien
gccggtggagagttgtctactttca

SEQ ID NO: 3655047 - DNA, 25 bp, Homo sapien
tctggtcatcctggccggtggagag

SEQ ID NO: 3655048 - DNA, 25 bp, Homo sapien
tcatcctggccggtggagagttgtc

SEQ ID NO: 3655049 - DNA, 25 bp, Homo sapien
gagagttgtctactttcacgaggca

SEQ ID NO: 3655050 - DNA, 25 bp, Homo sapien
aaacagcaaaccaaatgtacacaac

SEQ ID NO: 3655051 - DNA, 25 bp, Homo sapien
caaacagcaaaccaaatgtacacaa

SEQ ID NO: 3655052 - DNA, 25 bp, Homo sapien
gaacacaaacagcaaaccaaatgta

SEQ ID NO: 3655053 - DNA, 25 bp, Homo sapien
cacaaacagcaaaccaaatgtacac

SEQ ID NO: 3655054 - DNA, 25 bp, Homo sapien
tgcagccacgaactcttttgttctg

SEQ ID NO: 3655055 - DNA, 25 bp, Homo sapien
cttggcagtgacctgacacgccctg

SEQ ID NO: 3655056 - DNA, 25 bp, Homo sapien
tgacacgccctggtcggctgccttt

SEQ ID NO: 3655057 - DNA, 25 bp, Homo sapien
tccgcagcctaagccggaggcgacg

SEQ ID NO: 3655058 - DNA, 25 bp, Homo sapien
tcttcctcgcttgcggtccggctgc

SEQ ID NO: 3655059 - DNA, 25 bp, Homo sapien
ggcccgggagcgcggttcgctcttc

SEQ ID NO: 3655060 - DNA, 25 bp, Homo sapien
gcgcggacacttcgggtgtctgccc

SEQ ID NO: 3655061 - DNA, 25 bp, Homo sapien
gcacaggaagcgcttcggccaggcc

SEQ ID NO: 3655062 - DNA, 25 bp, Homo sapien
tctgaaagtcgcggcagggcggcgg

SEQ ID NO: 3655063 - DNA, 25 bp, Homo sapien
gtctgaaagtcgcggcagggcggcg

SEQ ID NO: 3655064 - DNA, 25 bp, Homo sapien
gcgctcggccccaacggtcccgcac

SEQ ID NO: 3655065 - DNA, 25 bp, Homo sapien
cgctcggccccaacggtcccgcacg

SEQ ID NO: 3655066 - DNA, 25 bp, Homo sapien
cacgtgctccccgctcccattcatt

SEQ ID NO: 3655067 - DNA, 25 bp, Homo sapien
tccccgctcccattcattccgccca

SEQ ID NO: 3655068 - DNA, 25 bp, Homo sapien
cccgctcccattcattccgcccact

SEQ ID NO: 3655069 - DNA, 25 bp, Homo sapien
gtgctccccgctcccattcattccg

SEQ ID NO: 3655070 - DNA, 25 bp, Homo sapien
cgtgatatacgacatacatttggac

SEQ ID NO: 3655071 - DNA, 25 bp, Homo sapien
gcttcacaagattaatatagggtat

SEQ ID NO: 3655072 - DNA, 25 bp, Homo sapien
gcagatgttaaatgcttcacaagat

SEQ ID NO: 3655073 - DNA, 25 bp, Homo sapien
catacatttggacaggcagatgtta

SEQ ID NO: 3655074 - DNA, 25 bp, Homo sapien
tctccaaccgagtttgaaaggatcg

SEQ ID NO: 3655075 - DNA, 25 bp, Homo sapien
gaaaggatcggtgtatttttcacca

SEQ ID NO: 3655076 - DNA, 25 bp, Homo sapien
tcaagtctctccaaccgagtttgaa

SEQ ID NO: 3655077 - DNA, 25 bp, Homo sapien
tttctaatgtcctcatacagacctt

SEQ ID NO: 3655078 - DNA, 25 bp, Homo sapien
tttcccatcaaagtagtactcagac

SEQ ID NO: 3655079 - DNA, 25 bp, Homo sapien
tcgaaaggctttccctttcccatca

SEQ ID NO: 3655080 - DNA, 25 bp, Homo sapien
gatgaatattgcatgctcgggccat

SEQ ID NO: 3655081 - DNA, 25 bp, Homo sapien
ccattagcgccacaataattggtcg

SEQ ID NO: 3655082 - DNA, 25 bp, Homo sapien
acagacgccgcctagaaccttctca

SEQ ID NO: 3655083 - DNA, 25 bp, Homo sapien
agcttgtgaaaactggacatcggat

SEQ ID NO: 3655084 - DNA, 25 bp, Homo sapien
tgctttttaacagacgccgcctaga

SEQ ID NO: 3655085 - DNA, 25 bp, Homo sapien
cagcaatcagcttgtgaaaactgga

SEQ ID NO: 3655086 - DNA, 25 bp, Homo sapien
agtgtggatcatttctgcaattaag

SEQ ID NO: 3655087 - DNA, 25 bp, Homo sapien
agttgtatttccaattcgtgccaga

SEQ ID NO: 3655088 - DNA, 25 bp, Homo sapien
tttccaattcgtgccagagctatag

SEQ ID NO: 3655089 - DNA, 25 bp, Homo sapien
caattcgtgccagagctatagatgc

SEQ ID NO: 3655090 - DNA, 25 bp, Homo sapien
gtatttccaattcgtgccagagcta

SEQ ID NO: 3655091 - DNA, 25 bp, Homo sapien
tgtcttctcaaggtagtgtgcaaat

SEQ ID NO: 3655092 - DNA, 25 bp, Homo sapien
caaggtagtgtgcaaatctttcatt

SEQ ID NO: 3655093 - DNA, 25 bp, Homo sapien
tctcaaggtagtgtgcaaatctttc

SEQ ID NO: 3655094 - DNA, 25 bp, Homo sapien
tcttgaatgtcttctcaaggtagtg

SEQ ID NO: 3655095 - DNA, 25 bp, Homo sapien
ttaacttgaagaaagacagaacgta

SEQ ID NO: 3655096 - DNA, 25 bp, Homo sapien
taacttgaagaaagacagaacgtac

SEQ ID NO: 3655097 - DNA, 25 bp, Homo sapien
aacatgttcactgttcgttcagctg

SEQ ID NO: 3655098 - DNA, 25 bp, Homo sapien
taagggtccagccacgttaacatgt

SEQ ID NO: 3655099 - DNA, 25 bp, Homo sapien
aattcctgtgcattatctttggctt

SEQ ID NO: 3655100 - DNA, 25 bp, Homo sapien
gaatgaggtgcatatctttataaaa

SEQ ID NO: 3655101 - DNA, 25 bp, Homo sapien
agaaataggagccttggcagtgtcc

SEQ ID NO: 3655102 - DNA, 25 bp, Homo sapien
tctgttgactatgtagtgcttggcc

SEQ ID NO: 3655103 - DNA, 25 bp, Homo sapien
ctggcacctggttagaactcaatgt

SEQ ID NO: 3655104 - DNA, 25 bp, Homo sapien
aggttgcctaacgtcctcagcctga

SEQ ID NO: 3655105 - DNA, 25 bp, Homo sapien
tcctacattttttccgtactgatag

SEQ ID NO: 3655106 - DNA, 25 bp, Homo sapien
attcctacattttttccgtactgat

SEQ ID NO: 3655107 - DNA, 25 bp, Homo sapien
ttcctacattttttccgtactgata

SEQ ID NO: 3655108 - DNA, 25 bp, Homo sapien
cctacattttttccgtactgatagg

SEQ ID NO: 3655109 - DNA, 25 bp, Homo sapien
cccatctggtcagaacacgaggtga

SEQ ID NO: 3655110 - DNA, 25 bp, Homo sapien
tggctaacccgagcttcagatcagc

SEQ ID NO: 3655111 - DNA, 25 bp, Homo sapien
ctggtcagaacacgaggtgaagtcc

SEQ ID NO: 3655112 - DNA, 25 bp, Homo sapien
gaccagtggctaacccgagcttcag

SEQ ID NO: 3655113 - DNA, 25 bp, Homo sapien
taatcacgatgctacctcaaatgcc

SEQ ID NO: 3655114 - DNA, 25 bp, Homo sapien
gaaaccgttcactttgccagtggcc

SEQ ID NO: 3655115 - DNA, 25 bp, Homo sapien
cattttgaggcaatggccgaggttc

SEQ ID NO: 3655116 - DNA, 25 bp, Homo sapien
gagaatttcttatgcttggaggccc

SEQ ID NO: 3655117 - DNA, 25 bp, Homo sapien
aaagcagagatagccattactcctt

SEQ ID NO: 3655118 - DNA, 25 bp, Homo sapien
gaaagcagagatagccattactcct

SEQ ID NO: 3655119 - DNA, 25 bp, Homo sapien
agcagagatagccattactcctttg

SEQ ID NO: 3655120 - DNA, 25 bp, Homo sapien
gagtgaaacacagtccgaagaggcc

SEQ ID NO: 3655121 - DNA, 25 bp, Homo sapien
tagattactgacagatactatgcag

SEQ ID NO: 3655122 - DNA, 25 bp, Homo sapien
tactatgcagaggtccatttcccct

SEQ ID NO: 3655123 - DNA, 25 bp, Homo sapien
tttcagtctcttgtagattactgac

SEQ ID NO: 3655124 - DNA, 25 bp, Homo sapien
cagatactatgcagaggtccatttc

SEQ ID NO: 3655125 - DNA, 25 bp, Homo sapien
ttcaaggattctccttccttggcct

SEQ ID NO: 3655126 - DNA, 25 bp, Homo sapien
ctgacctcataatccaactgcctca

SEQ ID NO: 3655127 - DNA, 25 bp, Homo sapien
acctcataatccaactgcctcagcc

SEQ ID NO: 3655128 - DNA, 25 bp, Homo sapien
gttcaaggattctccttccttggcc

SEQ ID NO: 3655129 - DNA, 25 bp, Homo sapien
taattttggcgaggtttgggcatca

SEQ ID NO: 3655130 - DNA, 25 bp, Homo sapien
tgtattccacaaaagagcctaacct

SEQ ID NO: 3655131 - DNA, 25 bp, Homo sapien
gaaggcctgtgtggtatcatagcta

SEQ ID NO: 3655132 - DNA, 25 bp, Homo sapien
gattctttgagtatcgtcagtgccc

SEQ ID NO: 3655133 - DNA, 25 bp, Homo sapien
aaccatgaccatggtattagtaatc

SEQ ID NO: 3655134 - DNA, 25 bp, Homo sapien
gaaataagttgtcctgtaaccatga

SEQ ID NO: 3655135 - DNA, 25 bp, Homo sapien
ctgaaggatgaaataagttgtcctg

SEQ ID NO: 3655136 - DNA, 25 bp, Homo sapien
gttgtcctgtaaccatgaccatggt

SEQ ID NO: 3655137 - DNA, 25 bp, Homo sapien
ttgagctctaacagtctatggctcc

SEQ ID NO: 3655138 - DNA, 25 bp, Homo sapien
acgtcagtgcttacagcagctgcca

SEQ ID NO: 3655139 - DNA, 25 bp, Homo sapien
tggctccacggaagaggtaagatgt

SEQ ID NO: 3655140 - DNA, 25 bp, Homo sapien
cagtctatggctccacggaagaggt

SEQ ID NO: 3655141 - DNA, 25 bp, Homo sapien
acagccgagtgacttccttagcccc

SEQ ID NO: 3655142 - DNA, 25 bp, Homo sapien
cagccgagtgacttccttagcccct

SEQ ID NO: 3655143 - DNA, 25 bp, Homo sapien
ctgtggcaacaaaagctgagctaag

SEQ ID NO: 3655144 - DNA, 25 bp, Homo sapien
gatgttttatcctagtccaacactg

SEQ ID NO: 3655145 - DNA, 25 bp, Homo sapien
tccaacactgagttaagagaggcag

SEQ ID NO: 3655146 - DNA, 25 bp, Homo sapien
gacatccaccgtctatgcctaggca

SEQ ID NO: 3655147 - DNA, 25 bp, Homo sapien
tccaggcaaactgaaccgtcgcatg

SEQ ID NO: 3655148 - DNA, 25 bp, Homo sapien
caggcaaactgaaccgtcgcatgat

SEQ ID NO: 3655149 - DNA, 25 bp, Homo sapien
aggcaaactgaaccgtcgcatgatc

SEQ ID NO: 3655150 - DNA, 25 bp, Homo sapien
ccaggcaaactgaaccgtcgcatga

SEQ ID NO: 3655151 - DNA, 25 bp, Homo sapien
ggcagtaacccgtagtgaataatgg

SEQ ID NO: 3655152 - DNA, 25 bp, Homo sapien
ttttacacttgggaggatttccaca

SEQ ID NO: 3655153 - DNA, 25 bp, Homo sapien
tgttcagagaacattcccgtggatt

SEQ ID NO: 3655154 - DNA, 25 bp, Homo sapien
gagggaataggcctagaagctctgt

SEQ ID NO: 3655155 - DNA, 25 bp, Homo sapien
tctctcttattgcttcatggcagta

SEQ ID NO: 3655156 - DNA, 25 bp, Homo sapien
ctcttattgcttcatggcagtactg

SEQ ID NO: 3655157 - DNA, 25 bp, Homo sapien
ttattgcttcatggcagtactgctg

SEQ ID NO: 3655158 - DNA, 25 bp, Homo sapien
tcttattgcttcatggcagtactgc

SEQ ID NO: 3655159 - DNA, 25 bp, Homo sapien
gaagcaaacaaagtgtattccacaa

SEQ ID NO: 3655160 - DNA, 25 bp, Homo sapien
taggcacagtctggtaagatagctg

SEQ ID NO: 3655161 - DNA, 25 bp, Homo sapien
tgtgtaatggccttacatgtggata

SEQ ID NO: 3655162 - DNA, 25 bp, Homo sapien
tattaacagtgtaaacaataccaca

SEQ ID NO: 3655163 - DNA, 25 bp, Homo sapien
gaaggtgggtcatgtattaatcagt

SEQ ID NO: 3655164 - DNA, 25 bp, Homo sapien
gaacagagatttacctaaccaacag

SEQ ID NO: 3655165 - DNA, 25 bp, Homo sapien
tgtgtgtctcctcttaattgaaggg

SEQ ID NO: 3655166 - DNA, 25 bp, Homo sapien
cctggcactagcaacattagaattt

SEQ ID NO: 3655167 - DNA, 25 bp, Homo sapien
caatcgagtgactggtctgttccct

SEQ ID NO: 3655168 - DNA, 25 bp, Homo sapien
catggttactaacgctatgtcagac

SEQ ID NO: 3655169 - DNA, 25 bp, Homo sapien
caaggtctccatgtgaaacaagcaa

SEQ ID NO: 3655170 - DNA, 25 bp, Homo sapien
taccattacatgtttcagtgcagca

SEQ ID NO: 3655171 - DNA, 25 bp, Homo sapien
ggcccccaagaattatattgagaaa

SEQ ID NO: 3655172 - DNA, 25 bp, Homo sapien
ccaccaccagtggattatgaagatg

SEQ ID NO: 3655173 - DNA, 25 bp, Homo sapien
ggaggctgcagtagttcagtataat

SEQ ID NO: 3655174 - DNA, 25 bp, Homo sapien
tccatatgcagatggggatcctgct

SEQ ID NO: 3655175 - DNA, 25 bp, Homo sapien
tctttgatcacgtaaatagccccag

SEQ ID NO: 3655176 - DNA, 25 bp, Homo sapien
actagttcattgaacagagctctag

SEQ ID NO: 3655177 - DNA, 25 bp, Homo sapien
tatatgacagatagattatggctga

SEQ ID NO: 3655178 - DNA, 25 bp, Homo sapien
attcagcacattattccaaggaggg

SEQ ID NO: 3655179 - DNA, 25 bp, Homo sapien
cattaacgtgttcagaaatgagttc

SEQ ID NO: 3655180 - DNA, 25 bp, Homo sapien
tattggcatgtttgagacagcgtag

SEQ ID NO: 3655181 - DNA, 25 bp, Homo sapien
taactaaatttatcgagacgtgtct

SEQ ID NO: 3655182 - DNA, 25 bp, Homo sapien
gtgatgcctgcttaattactctgtc

SEQ ID NO: 3655183 - DNA, 25 bp, Homo sapien
gacacaactctactacttcttcgac

SEQ ID NO: 3655184 - DNA, 25 bp, Homo sapien
caatgaccaggcagatatctcgaca

SEQ ID NO: 3655185 - DNA, 25 bp, Homo sapien
tctggtggatacagacgaactccct

SEQ ID NO: 3655186 - DNA, 25 bp, Homo sapien
cctggttcccagtatggcacaatga

SEQ ID NO: 3655187 - DNA, 25 bp, Homo sapien
ttggatgtactatgaaaaagaagcc

SEQ ID NO: 3655188 - DNA, 25 bp, Homo sapien
tagaggctttgaactctattaacat

SEQ ID NO: 3655189 - DNA, 25 bp, Homo sapien
agcagattctttggatgtactatga

SEQ ID NO: 3655190 - DNA, 25 bp, Homo sapien
cagtttcgatattaactgatgaaaa

SEQ ID NO: 3655191 - DNA, 25 bp, Homo sapien
ccagagcattgtagagatgtgtaaa

SEQ ID NO: 3655192 - DNA, 25 bp, Homo sapien
ttgaagagagtagaccctcatatat

SEQ ID NO: 3655193 - DNA, 25 bp, Homo sapien
tagtagttaatgaacacatgccagg

SEQ ID NO: 3655194 - DNA, 25 bp, Homo sapien
ttgaggatagtgagacattgcttac

SEQ ID NO: 3655195 - DNA, 25 bp, Homo sapien
ttagaagctgattatttggcatatt

SEQ ID NO: 3655196 - DNA, 25 bp, Homo sapien
gcgagggatgaaggtgcatggtctg

SEQ ID NO: 3655197 - DNA, 25 bp, Homo sapien
aaatatatttttggcgagggatgaa

SEQ ID NO: 3655198 - DNA, 25 bp, Homo sapien
tttttggcgagggatgaaggtgcat

SEQ ID NO: 3655199 - DNA, 25 bp, Homo sapien
tacataacagggagtgggactacaa

SEQ ID NO: 3655200 - DNA, 25 bp, Homo sapien
gggactacaagttcctgccaagaaa

SEQ ID NO: 3655201 - DNA, 25 bp, Homo sapien
ctttgcctctgtacataacagggag

SEQ ID NO: 3655202 - DNA, 25 bp, Homo sapien
tagaactggcagacgggaagctgca

SEQ ID NO: 3655203 - DNA, 25 bp, Homo sapien
ctctaagatccactttcttttttct

SEQ ID NO: 3655204 - DNA, 25 bp, Homo sapien
tataaaagattgatcttatttcccc

SEQ ID NO: 3655205 - DNA, 25 bp, Homo sapien
aaacccacacccatttctgtcagat

SEQ ID NO: 3655206 - DNA, 25 bp, Homo sapien
tgcaattcttgtgaaatgaccaggc

SEQ ID NO: 3655207 - DNA, 25 bp, Homo sapien
gatgaggtcatgtcaattcttaaac

SEQ ID NO: 3655208 - DNA, 25 bp, Homo sapien
cttgctttaaagtctggaaatggat

SEQ ID NO: 3655209 - DNA, 25 bp, Homo sapien
ctcagacctctgaagtctgagtctt

SEQ ID NO: 3655210 - DNA, 25 bp, Homo sapien
cacagtagcctaatcttgctttaaa

SEQ ID NO: 3655211 - DNA, 25 bp, Homo sapien
ctgagtcttcacagtagcctaatct

SEQ ID NO: 3655212 - DNA, 25 bp, Homo sapien
ttgaacttggagtccagctgttgtt

SEQ ID NO: 3655213 - DNA, 25 bp, Homo sapien
aggccatggcttagaaagctgctgc

SEQ ID NO: 3655214 - DNA, 25 bp, Homo sapien
gcattgaacttggagtccagctgtt

SEQ ID NO: 3655215 - DNA, 25 bp, Homo sapien
cctggtgactgggcattgaacttgg

SEQ ID NO: 3655216 - DNA, 25 bp, Homo sapien
agcacatttaatctcagaaggtggg

SEQ ID NO: 3655217 - DNA, 25 bp, Homo sapien
taatttttgagcaggatccgtttgg

SEQ ID NO: 3655218 - DNA, 25 bp, Homo sapien
cagaaggtgggtaatttttgagcag

SEQ ID NO: 3655219 - DNA, 25 bp, Homo sapien
gcaggatccgtttggagtaggtaaa

SEQ ID NO: 3655220 - DNA, 25 bp, Homo sapien
tcagatgggtgatatgccaacatcc

SEQ ID NO: 3655221 - DNA, 25 bp, Homo sapien
cagatgggtgatatgccaacatcct

SEQ ID NO: 3655222 - DNA, 25 bp, Homo sapien
gcacatcttacacatagtgtgaaaa

SEQ ID NO: 3655223 - DNA, 25 bp, Homo sapien
atgggtgatatgccaacatcctaac

SEQ ID NO: 3655224 - DNA, 25 bp, Homo sapien
gcagctctactcaagcgttccctat

SEQ ID NO: 3655225 - DNA, 25 bp, Homo sapien
actaaataatgacgcagctctactc

SEQ ID NO: 3655226 - DNA, 25 bp, Homo sapien
taatgacgcagctctactcaagcgt

SEQ ID NO: 3655227 - DNA, 25 bp, Homo sapien
caagcgttccctatccaagtgaagt

SEQ ID NO: 3655228 - DNA, 25 bp, Homo sapien
ggtcccaggtgccactgaggagggc

SEQ ID NO: 3655229 - DNA, 25 bp, Homo sapien
ccactgaggagggctgcgttcccat

SEQ ID NO: 3655230 - DNA, 25 bp, Homo sapien
ccactgcagccaggggtcccaggtg

SEQ ID NO: 3655231 - DNA, 25 bp, Homo sapien
aggtgccactgaggagggctgcgtt

SEQ ID NO: 3655232 - DNA, 25 bp, Homo sapien
ggcttcacggtaaagcagaagattc

SEQ ID NO: 3655233 - DNA, 25 bp, Homo sapien
gaagattcatgctagggcatctgca

SEQ ID NO: 3655234 - DNA, 25 bp, Homo sapien
aaagcagaagattcatgctagggca

SEQ ID NO: 3655235 - DNA, 25 bp, Homo sapien
tctcccaggcttcacggtaaagcag

SEQ ID NO: 3655236 - DNA, 25 bp, Homo sapien
gcagggtctggcttaggccctctcc

SEQ ID NO: 3655237 - DNA, 25 bp, Homo sapien
cagagcaccaggaagtgagtaacag

SEQ ID NO: 3655238 - DNA, 25 bp, Homo sapien
tctccattcattccggaacagccag

SEQ ID NO: 3655239 - DNA, 25 bp, Homo sapien
ggcatctccattcattccggaacag

SEQ ID NO: 3655240 - DNA, 25 bp, Homo sapien
attcattccggaacagccagtcagc

SEQ ID NO: 3655241 - DNA, 25 bp, Homo sapien
gacttgaatggaagatcacctgata

SEQ ID NO: 3655242 - DNA, 25 bp, Homo sapien
gataggacttgaatggaagatcacc

SEQ ID NO: 3655243 - DNA, 25 bp, Homo sapien
cagataggacttgaatggaagatca

SEQ ID NO: 3655244 - DNA, 25 bp, Homo sapien
taggacttgaatggaagatcacctg

SEQ ID NO: 3655245 - DNA, 25 bp, Homo sapien
agggaaggtctctgctgaggaccat

SEQ ID NO: 3655246 - DNA, 25 bp, Homo sapien
gaaggtctctgctgaggaccattga

SEQ ID NO: 3655247 - DNA, 25 bp, Homo sapien
ggtctctgctgaggaccattgacag

SEQ ID NO: 3655248 - DNA, 25 bp, Homo sapien
aggtctctgctgaggaccattgaca

SEQ ID NO: 3655249 - DNA, 25 bp, Homo sapien
tggcaatcaggatcagtgctctcct

SEQ ID NO: 3655250 - DNA, 25 bp, Homo sapien
agaagggcctttgtgcagagagaaa

SEQ ID NO: 3655251 - DNA, 25 bp, Homo sapien
ttgaaccccttaagtgcatatgtgg

SEQ ID NO: 3655252 - DNA, 25 bp, Homo sapien
aaaggccaggtctgagccttcagca

SEQ ID NO: 3655253 - DNA, 25 bp, Homo sapien
cagggcaaaagttgtccacatcccc

SEQ ID NO: 3655254 - DNA, 25 bp, Homo sapien
cctcacactagtgtgagcagcaggg

SEQ ID NO: 3655255 - DNA, 25 bp, Homo sapien
ggcctgaggaatacctggatgaaag

SEQ ID NO: 3655256 - DNA, 25 bp, Homo sapien
ctggatgaaaggcagtaggagagcc

SEQ ID NO: 3655257 - DNA, 25 bp, Homo sapien
ggagagccatgagcctgagacctca

SEQ ID NO: 3655258 - DNA, 25 bp, Homo sapien
tgctgggtctgagcttgcagaatgc

SEQ ID NO: 3655259 - DNA, 25 bp, Homo sapien
aatgctgggtctgagcttgcagaat

SEQ ID NO: 3655260 - DNA, 25 bp, Homo sapien
aaatgctgggtctgagcttgcagaa

SEQ ID NO: 3655261 - DNA, 25 bp, Homo sapien
gctgggtctgagcttgcagaatgcg

SEQ ID NO: 3655262 - DNA, 25 bp, Homo sapien
gagtacgtaaggtactcgatgttgt

SEQ ID NO: 3655263 - DNA, 25 bp, Homo sapien
aacaagcccactggctgttgccctc

SEQ ID NO: 3655264 - DNA, 25 bp, Homo sapien
taaggtactcgatgttgtcccacat

SEQ ID NO: 3655265 - DNA, 25 bp, Homo sapien
ccatgttttgagtacgtaaggtact

SEQ ID NO: 3655266 - DNA, 25 bp, Homo sapien
ggagactgacttctcccaaccacga

SEQ ID NO: 3655267 - DNA, 25 bp, Homo sapien
tcctggtgctcgaagtccagtgtgc

SEQ ID NO: 3655268 - DNA, 25 bp, Homo sapien
ctgacttctcccaaccacgaaggga

SEQ ID NO: 3655269 - DNA, 25 bp, Homo sapien
agactgacttctcccaaccacgaag

SEQ ID NO: 3655270 - DNA, 25 bp, Homo sapien
aaggtggcgcatctgtagttgttca

SEQ ID NO: 3655271 - DNA, 25 bp, Homo sapien
tgcagaacttcacagtcagtgttac

SEQ ID NO: 3655272 - DNA, 25 bp, Homo sapien
acagtcagtgttacagctcattaaa

SEQ ID NO: 3655273 - DNA, 25 bp, Homo sapien
tggcgcatctgtagttgttcatttc

SEQ ID NO: 3655274 - DNA, 25 bp, Homo sapien
cgtgaagcagatgatacgggctttg

SEQ ID NO: 3655275 - DNA, 25 bp, Homo sapien
taaatgcgggacgtgaagcagatga

SEQ ID NO: 3655276 - DNA, 25 bp, Homo sapien
ttacagcgttaagtaaatgcgggac

SEQ ID NO: 3655277 - DNA, 25 bp, Homo sapien
gcgttaagtaaatgcgggacgtgaa

SEQ ID NO: 3655278 - DNA, 25 bp, Homo sapien
tcaaggataccacgactgtctctga

SEQ ID NO: 3655279 - DNA, 25 bp, Homo sapien
ttcctaagggcccagttaagcaaca

SEQ ID NO: 3655280 - DNA, 25 bp, Homo sapien
aaaaaccaatgcctgccctcaagga

SEQ ID NO: 3655281 - DNA, 25 bp, Homo sapien
aatattacattttggactgacaggg

SEQ ID NO: 3655282 - DNA, 25 bp, Homo sapien
agaacccagccaaatattccccact

SEQ ID NO: 3655283 - DNA, 25 bp, Homo sapien
gattagaggcgtgggtcacgacgcc

SEQ ID NO: 3655284 - DNA, 25 bp, Homo sapien
gaacccagccaaatattccccactg

SEQ ID NO: 3655285 - DNA, 25 bp, Homo sapien
atgcaggccgcgatatacgggagca

SEQ ID NO: 3655286 - DNA, 25 bp, Homo sapien
ctgagatccacgaggcagaggcagc

SEQ ID NO: 3655287 - DNA, 25 bp, Homo sapien
tgccagccacaagtggggctatctg

SEQ ID NO: 3655288 - DNA, 25 bp, Homo sapien
gcagcagtagcgctggactccactg

SEQ ID NO: 3655289 - DNA, 25 bp, Homo sapien
gcaagctgcgatatacaggaccaga

SEQ ID NO: 3655290 - DNA, 25 bp, Homo sapien
catctacgagtgtgcagacagcgaa

SEQ ID NO: 3655291 - DNA, 25 bp, Homo sapien
ccgcaattgggctagctcagggtgc

SEQ ID NO: 3655292 - DNA, 25 bp, Homo sapien
gggcccacactgaactgtcgcatgt

SEQ ID NO: 3655293 - DNA, 25 bp, Homo sapien
tattagggacttgaactgagaccgc

SEQ ID NO: 3655294 - DNA, 25 bp, Homo sapien
tatgcaaacactatgccctgttata

SEQ ID NO: 3655295 - DNA, 25 bp, Homo sapien
ttatatcagggaccgcggattttgg

SEQ ID NO: 3655296 - DNA, 25 bp, Homo sapien
gaccgctataccctgttatatcagg

SEQ ID NO: 3655297 - DNA, 25 bp, Homo sapien
agtatggagatttatacaggatctg

SEQ ID NO: 3655298 - DNA, 25 bp, Homo sapien
tgagtatggagatttatacaggatc

SEQ ID NO: 3655299 - DNA, 25 bp, Homo sapien
gcttgagtatggagatttatacagg

SEQ ID NO: 3655300 - DNA, 25 bp, Homo sapien
tatggagatttatacaggatctgag

SEQ ID NO: 3655301 - DNA, 25 bp, Homo sapien
tgtagatccacacagccaatagttg

SEQ ID NO: 3655302 - DNA, 25 bp, Homo sapien
gactcagtgctcatccaatacgtgg

SEQ ID NO: 3655303 - DNA, 25 bp, Homo sapien
taaagggtgcacagaaagtcccact

SEQ ID NO: 3655304 - DNA, 25 bp, Homo sapien
tacgtggactgtaatgcctaaaggg

SEQ ID NO: 3655305 - DNA, 25 bp, Homo sapien
tccagtcccagtcatgcgtaaaggc

SEQ ID NO: 3655306 - DNA, 25 bp, Homo sapien
tatggaggtgcattccagcagcaat

SEQ ID NO: 3655307 - DNA, 25 bp, Homo sapien
ggcttcttttcgcaaacgtcctgaa

SEQ ID NO: 3655308 - DNA, 25 bp, Homo sapien
tttgtttgacaggaacgcagggctc

SEQ ID NO: 3655309 - DNA, 25 bp, Homo sapien
cacgtatcagattgggcccctggta

SEQ ID NO: 3655310 - DNA, 25 bp, Homo sapien
tcacaccatctatgcacgtatcaga

SEQ ID NO: 3655311 - DNA, 25 bp, Homo sapien
tgtttgctcgatgactgtggaccag

SEQ ID NO: 3655312 - DNA, 25 bp, Homo sapien
gaatccccagccttgtgaagccact

SEQ ID NO: 3655313 - DNA, 25 bp, Homo sapien
gattacagcctgctaggtggcagag

SEQ ID NO: 3655314 - DNA, 25 bp, Homo sapien
agagcatgcagttccttgagtaccc

SEQ ID NO: 3655315 - DNA, 25 bp, Homo sapien
catcccagtaggttgtttctgcctg

SEQ ID NO: 3655316 - DNA, 25 bp, Homo sapien
ttgagtaccctgagctttggcccca

SEQ ID NO: 3655317 - DNA, 25 bp, Homo sapien
gaactttgtgttaccctgcgtcaga

SEQ ID NO: 3655318 - DNA, 25 bp, Homo sapien
gaacatgctgttataggatctacag

SEQ ID NO: 3655319 - DNA, 25 bp, Homo sapien
tataactgtgcttggtttcaaaagc

SEQ ID NO: 3655320 - DNA, 25 bp, Homo sapien
aaaaatctcagtcccctccgaagtg

SEQ ID NO: 3655321 - DNA, 25 bp, Homo sapien
gaatctcgcagaagctttattgacc

SEQ ID NO: 3655322 - DNA, 25 bp, Homo sapien
tattgcaaattagcatcccatggca

SEQ ID NO: 3655323 - DNA, 25 bp, Homo sapien
attaaaagcagtctcggaaacacag

SEQ ID NO: 3655324 - DNA, 25 bp, Homo sapien
gacctatgagactttggatgccaaa

SEQ ID NO: 3655325 - DNA, 25 bp, Homo sapien
tccagaaattatagctcgaggtact

SEQ ID NO: 3655326 - DNA, 25 bp, Homo sapien
cagagttggagaatcttgtgaacca

SEQ ID NO: 3655327 - DNA, 25 bp, Homo sapien
taaactatggctcagaatagctagc

SEQ ID NO: 3655328 - DNA, 25 bp, Homo sapien
tatacatgtttcctataagggcagc

SEQ ID NO: 3655329 - DNA, 25 bp, Homo sapien
tagcagagacaagtacggtttgctg

SEQ ID NO: 3655330 - DNA, 25 bp, Homo sapien
gaaaaagcatcaaatcaggattcac

SEQ ID NO: 3655331 - DNA, 25 bp, Homo sapien
tattggttattggtgtgacctcagc

SEQ ID NO: 3655332 - DNA, 25 bp, Homo sapien
caagattctgaagtgaaccattagc

SEQ ID NO: 3655333 - DNA, 25 bp, Homo sapien
taaaattaggacattactgggtgtg

SEQ ID NO: 3655334 - DNA, 25 bp, Homo sapien
aaattgtaaacaatcaccccaagtg

SEQ ID NO: 3655335 - DNA, 25 bp, Homo sapien
gcgcactcaacctaactccatttta

SEQ ID NO: 3655336 - DNA, 25 bp, Homo sapien
gccattggagttccaaccagcctgg

SEQ ID NO: 3655337 - DNA, 25 bp, Homo sapien
tcactttaggtggaggaagctaaac

SEQ ID NO: 3655338 - DNA, 25 bp, Homo sapien
cagagaaggtcaggttaattccata

SEQ ID NO: 3655339 - DNA, 25 bp, Homo sapien
ccctttggcgtgaagctatgtttca

SEQ ID NO: 3655340 - DNA, 25 bp, Homo sapien
tgataatctaaccaaacgtgtccat

SEQ ID NO: 3655341 - DNA, 25 bp, Homo sapien
gcaattacactactttagggtggac

SEQ ID NO: 3655342 - DNA, 25 bp, Homo sapien
gaacatatgtacacgcttctcctgg

SEQ ID NO: 3655343 - DNA, 25 bp, Homo sapien
cctggacctaggaatggacaaagct

SEQ ID NO: 3655344 - DNA, 25 bp, Homo sapien
tataagaatactacaacacggtgca

SEQ ID NO: 3655345 - DNA, 25 bp, Homo sapien
ggtgatccacgcagatcaaagtgct

SEQ ID NO: 3655346 - DNA, 25 bp, Homo sapien
gtgatccacgcagatcaaagtgctg

SEQ ID NO: 3655347 - DNA, 25 bp, Homo sapien
cacggtgcccggcctttagtgaggt

SEQ ID NO: 3655348 - DNA, 25 bp, Homo sapien
aggtgatccacgcagatcaaagtgc

SEQ ID NO: 3655349 - DNA, 25 bp, Homo sapien
tcctggggttcaagcaatttcactg

SEQ ID NO: 3655350 - DNA, 25 bp, Homo sapien
ggggttcaagcaatttcactgcctc

SEQ ID NO: 3655351 - DNA, 25 bp, Homo sapien
cctggggttcaagcaatttcactgc

SEQ ID NO: 3655352 - DNA, 25 bp, Homo sapien
agacggcgtttcaccgttagccaag

SEQ ID NO: 3655353 - DNA, 25 bp, Homo sapien
tctgtattaatgagcagcatccacc

SEQ ID NO: 3655354 - DNA, 25 bp, Homo sapien
tacctccgagagattagctgaaaca

SEQ ID NO: 3655355 - DNA, 25 bp, Homo sapien
aatatagcgccatcattcgtgaagg

SEQ ID NO: 3655356 - DNA, 25 bp, Homo sapien
gaaatcaaggacacgacgtctccag

SEQ ID NO: 3655357 - DNA, 25 bp, Homo sapien
ctcagtggagtgtcagtttctcaaa

SEQ ID NO: 3655358 - DNA, 25 bp, Homo sapien
tcatcaatgccttccatacaccaaa

SEQ ID NO: 3655359 - DNA, 25 bp, Homo sapien
ctcaaaaccagcatcgagatgtagt

SEQ ID NO: 3655360 - DNA, 25 bp, Homo sapien
ttctgtttctctcagtggagtgtca

SEQ ID NO: 3655361 - DNA, 25 bp, Homo sapien
gaagtctgacatggcctattgaata

SEQ ID NO: 3655362 - DNA, 25 bp, Homo sapien
caagagtggaagatgttatcagcta

SEQ ID NO: 3655363 - DNA, 25 bp, Homo sapien
gaaggtgctatttaccaagatgaca

SEQ ID NO: 3655364 - DNA, 25 bp, Homo sapien
catcaagaggcctgattttaggaga

SEQ ID NO: 3655365 - DNA, 25 bp, Homo sapien
ctcgcgaggcgtagaaaccagttct

SEQ ID NO: 3655366 - DNA, 25 bp, Homo sapien
tgttttccttgtcgagcacggtgca

SEQ ID NO: 3655367 - DNA, 25 bp, Homo sapien
gatgtactcaatgcgaatcccagga

SEQ ID NO: 3655368 - DNA, 25 bp, Homo sapien
gactgggacttgactctgaatcgca

SEQ ID NO: 3655369 - DNA, 25 bp, Homo sapien
ttttggcactgcgatcctattcacg

SEQ ID NO: 3655370 - DNA, 25 bp, Homo sapien
aaggcgccccggctaatgggcttca

SEQ ID NO: 3655371 - DNA, 25 bp, Homo sapien
cactatgctgaattcctcaatggag

SEQ ID NO: 3655372 - DNA, 25 bp, Homo sapien
tgccccagatacactttcccgaagg

SEQ ID NO: 3655373 - DNA, 25 bp, Homo sapien
tgggatcaattctcaggactgctat

SEQ ID NO: 3655374 - DNA, 25 bp, Homo sapien
gaagaatgtcggaagtttgcctaga

SEQ ID NO: 3655375 - DNA, 25 bp, Homo sapien
caagtttcaaggtaatctgtacaga

SEQ ID NO: 3655376 - DNA, 25 bp, Homo sapien
aactgaatagtcagtaacactggga

SEQ ID NO: 3655377 - DNA, 25 bp, Homo sapien
tcagcttggacctgatgagtcatat

SEQ ID NO: 3655378 - DNA, 25 bp, Homo sapien
tttgcagactgcagtgaataataca

SEQ ID NO: 3655379 - DNA, 25 bp, Homo sapien
cagcttggacctgatgagtcatatt

SEQ ID NO: 3655380 - DNA, 25 bp, Homo sapien
gtagacattgtttgcagactgcagt

SEQ ID NO: 3655381 - DNA, 25 bp, Homo sapien
tctgtgaaggtagtctagagccagt

SEQ ID NO: 3655382 - DNA, 25 bp, Homo sapien
catgtctgtgaaggtagtctagagc

SEQ ID NO: 3655383 - DNA, 25 bp, Homo sapien
aggtagtctagagccagtgctactt

SEQ ID NO: 3655384 - DNA, 25 bp, Homo sapien
gaaggtagtctagagccagtgctac

SEQ ID NO: 3655385 - DNA, 25 bp, Homo sapien
tccgtcagtttaatatgaccctcat

SEQ ID NO: 3655386 - DNA, 25 bp, Homo sapien
gccaaaatccgtcagtttaatatga

SEQ ID NO: 3655387 - DNA, 25 bp, Homo sapien
tgaccctcattagaaataagcatat

SEQ ID NO: 3655388 - DNA, 25 bp, Homo sapien
taagcatattgtccggtttcaagtc

SEQ ID NO: 3655389 - DNA, 25 bp, Homo sapien
gggttcttgaataatcttgtctagg

SEQ ID NO: 3655390 - DNA, 25 bp, Homo sapien
gctgataagcgataacacttgtcct

SEQ ID NO: 3655391 - DNA, 25 bp, Homo sapien
tgccattgatggtgttgtaaggata

SEQ ID NO: 3655392 - DNA, 25 bp, Homo sapien
aaatcccaacgagctgataagcgat

SEQ ID NO: 3655393 - DNA, 25 bp, Homo sapien
tttgctagaataaggcgtagtgtcc

SEQ ID NO: 3655394 - DNA, 25 bp, Homo sapien
tctacagacatagggcatacgagtc

SEQ ID NO: 3655395 - DNA, 25 bp, Homo sapien
tgtgatgtttcagacagacaggctg

SEQ ID NO: 3655396 - DNA, 25 bp, Homo sapien
catacgagtccttgagaaagctgtg

SEQ ID NO: 3655397 - DNA, 25 bp, Homo sapien
gattccacactggatatgaaggtgt

SEQ ID NO: 3655398 - DNA, 25 bp, Homo sapien
acaggcattcctgggttggaggcaa

SEQ ID NO: 3655399 - DNA, 25 bp, Homo sapien
aaggtgtgggattgactactggcac

SEQ ID NO: 3655400 - DNA, 25 bp, Homo sapien
gactgctgtggcattctgattccac

SEQ ID NO: 3655401 - DNA, 25 bp, Homo sapien
tgaggtccacctagatacacagaag

SEQ ID NO: 3655402 - DNA, 25 bp, Homo sapien
gaacagacactttaagggcttagct

SEQ ID NO: 3655403 - DNA, 25 bp, Homo sapien
caagccaatgtctgtatcatgggaa

SEQ ID NO: 3655404 - DNA, 25 bp, Homo sapien
gaacagacactttaagggcacaccc

SEQ ID NO: 3655405 - DNA, 25 bp, Homo sapien
ctgttttgaactgcaaaatgcacag

SEQ ID NO: 3655406 - DNA, 25 bp, Homo sapien
ttttgaactgcaaaatgcacagggc

SEQ ID NO: 3655407 - DNA, 25 bp, Homo sapien
tgaactgcaaaatgcacagggcttg

SEQ ID NO: 3655408 - DNA, 25 bp, Homo sapien
atgcacagggcttgaaatttagtca

SEQ ID NO: 3655409 - DNA, 25 bp, Homo sapien
ttacacaagagcgtccagtggtggg

SEQ ID NO: 3655410 - DNA, 25 bp, Homo sapien
ggatatgaaccactgtaggcacacg

SEQ ID NO: 3655411 - DNA, 25 bp, Homo sapien
tctcttgtacagcagggttctcgac

SEQ ID NO: 3655412 - DNA, 25 bp, Homo sapien
gatgcttctatctgaatctaagggc

SEQ ID NO: 3655413 - DNA, 25 bp, Homo sapien
gagttcccgacttgatctgatttgg

SEQ ID NO: 3655414 - DNA, 25 bp, Homo sapien
ctagtaacagctcaggtgcaaggta

SEQ ID NO: 3655415 - DNA, 25 bp, Homo sapien
tcggagttcggtatggagttcccga

SEQ ID NO: 3655416 - DNA, 25 bp, Homo sapien
ggttcctagaattcgcccatcatca

SEQ ID NO: 3655417 - DNA, 25 bp, Homo sapien
tggaatacttgttgtggtgtttcat

SEQ ID NO: 3655418 - DNA, 25 bp, Homo sapien
tcatcaatggttaaaagtatttcta

SEQ ID NO: 3655419 - DNA, 25 bp, Homo sapien
aagtatttctactgcactttgagca

SEQ ID NO: 3655420 - DNA, 25 bp, Homo sapien
ctctttgtatcatcaatggttaaaa

SEQ ID NO: 3655421 - DNA, 25 bp, Homo sapien
gcactttgagcattatcagataact

SEQ ID NO: 3655422 - DNA, 25 bp, Homo sapien
tttgcctcttctaccatgtgacaca

SEQ ID NO: 3655423 - DNA, 25 bp, Homo sapien
gctaccacacccaccgattaataaa

SEQ ID NO: 3655424 - DNA, 25 bp, Homo sapien
tctttgtaccaatttagcagtcaga

SEQ ID NO: 3655425 - DNA, 25 bp, Homo sapien
gaatacagtattgccatttgaccac

SEQ ID NO: 3655426 - DNA, 25 bp, Homo sapien
gggcttaatatactcctgcattgag

SEQ ID NO: 3655427 - DNA, 25 bp, Homo sapien
gaacatctctctcgcaagattaggg

SEQ ID NO: 3655428 - DNA, 25 bp, Homo sapien
taacaagattgttttaggacaggca

SEQ ID NO: 3655429 - DNA, 25 bp, Homo sapien
caagtttgtcttgagccaacctggg

SEQ ID NO: 3655430 - DNA, 25 bp, Homo sapien
ttccctgtgctccatccttatcctt

SEQ ID NO: 3655431 - DNA, 25 bp, Homo sapien
tcttccctgtgctccatccttatcc

SEQ ID NO: 3655432 - DNA, 25 bp, Homo sapien
cctgtgctccatccttatccttcat

SEQ ID NO: 3655433 - DNA, 25 bp, Homo sapien
ttctccctttcttccctgtgctcca

SEQ ID NO: 3655434 - DNA, 25 bp, Homo sapien
tacttcacaaaggtctacatgggcc

SEQ ID NO: 3655435 - DNA, 25 bp, Homo sapien
tgtctgttaggccacatacttcaca

SEQ ID NO: 3655436 - DNA, 25 bp, Homo sapien
tacatgggccattttgaatatcact

SEQ ID NO: 3655437 - DNA, 25 bp, Homo sapien
cctaagtaagtactgctttacagga

SEQ ID NO: 3655438 - DNA, 25 bp, Homo sapien
ctgaagagaggatgacgttttagct

SEQ ID NO: 3655439 - DNA, 25 bp, Homo sapien
gatgaaaggcatagtctgatgctgc

SEQ ID NO: 3655440 - DNA, 25 bp, Homo sapien
caaaataggaggtatctgtttcatc

SEQ ID NO: 3655441 - DNA, 25 bp, Homo sapien
cagtcaggtgctgagcagtattcct

SEQ ID NO: 3655442 - DNA, 25 bp, Homo sapien
catagtctgatgctgcagattttcc

SEQ ID NO: 3655443 - DNA, 25 bp, Homo sapien
ctgtgaaagctgtaacgtacattaa

SEQ ID NO: 3655444 - DNA, 25 bp, Homo sapien
tagatcaatctagtattaaggagta

SEQ ID NO: 3655445 - DNA, 25 bp, Homo sapien
cattaaaagcacattgaactaggtt

SEQ ID NO: 3655446 - DNA, 25 bp, Homo sapien
tataacacaaggctagactaaaagg

SEQ ID NO: 3655447 - DNA, 25 bp, Homo sapien
gactacgcaccaatagaaattaagg

SEQ ID NO: 3655448 - DNA, 25 bp, Homo sapien
caagtatggccttaaatgattgccc

SEQ ID NO: 3655449 - DNA, 25 bp, Homo sapien
gaaaatcaagctagtggctcactct

SEQ ID NO: 3655450 - DNA, 25 bp, Homo sapien
caaatacatattgtggactacgcac

SEQ ID NO: 3655451 - DNA, 25 bp, Homo sapien
aggtttttccctagcaagtgtctga

SEQ ID NO: 3655452 - DNA, 25 bp, Homo sapien
cattgggaatatgctcagagaacat

SEQ ID NO: 3655453 - DNA, 25 bp, Homo sapien
tgttttttaaagacgtgcatgcaca

SEQ ID NO: 3655454 - DNA, 25 bp, Homo sapien
taaggttaatatcctgggtagcaac

SEQ ID NO: 3655455 - DNA, 25 bp, Homo sapien
taacatttagacctgtggatcaaag

SEQ ID NO: 3655456 - DNA, 25 bp, Homo sapien
tgtgaatcattacaagcagtctggg

SEQ ID NO: 3655457 - DNA, 25 bp, Homo sapien
gcagtctgggataactaactcctag

SEQ ID NO: 3655458 - DNA, 25 bp, Homo sapien
taaaatatgtctgtctaaagggatc

SEQ ID NO: 3655459 - DNA, 25 bp, Homo sapien
aaagagatgggtgtactaaaccctg

SEQ ID NO: 3655460 - DNA, 25 bp, Homo sapien
taaagatggaatctcggccgggcgc

SEQ ID NO: 3655461 - DNA, 25 bp, Homo sapien
ccaggatgaccccagactaattatt

SEQ ID NO: 3655462 - DNA, 25 bp, Homo sapien
gaataatgtgccttatgtctgttga

SEQ ID NO: 3655463 - DNA, 25 bp, Homo sapien
caattttagactgtacgttatgaac

SEQ ID NO: 3655464 - DNA, 25 bp, Homo sapien
ttgatactctaatacaattgaagcc

SEQ ID NO: 3655465 - DNA, 25 bp, Homo sapien
gccttcacaaatgtctgagaaaagt

SEQ ID NO: 3655466 - DNA, 25 bp, Homo sapien
gttgactaacagttgatactctaat

SEQ ID NO: 3655467 - DNA, 25 bp, Homo sapien
gactcaggtactgccatgctaactt

SEQ ID NO: 3655468 - DNA, 25 bp, Homo sapien
ggaatatgactcaggtactgccatg

SEQ ID NO: 3655469 - DNA, 25 bp, Homo sapien
tatgactcaggtactgccatgctaa

SEQ ID NO: 3655470 - DNA, 25 bp, Homo sapien
ggtactgccatgctaactttttatc

SEQ ID NO: 3655471 - DNA, 25 bp, Homo sapien
ttgccgaagaatggtacgtgcgctg

SEQ ID NO: 3655472 - DNA, 25 bp, Homo sapien
gatccgtgcacgagactaggtttga

SEQ ID NO: 3655473 - DNA, 25 bp, Homo sapien
tgattcccgccgacagaccttggga

SEQ ID NO: 3655474 - DNA, 25 bp, Homo sapien
tgttccagtttcatgcaggctcttg

SEQ ID NO: 3655475 - DNA, 25 bp, Homo sapien
actgacagacggactccggcggaat

SEQ ID NO: 3655476 - DNA, 25 bp, Homo sapien
tgtcttctgctagacatgctcttcc

SEQ ID NO: 3655477 - DNA, 25 bp, Homo sapien
agttgttttgctgtcgtcgcgggcc

SEQ ID NO: 3655478 - DNA, 25 bp, Homo sapien
gggagggcacggactgacagacgga

SEQ ID NO: 3655479 - DNA, 25 bp, Homo sapien
gccagtgggtcctccggtgactctg

SEQ ID NO: 3655480 - DNA, 25 bp, Homo sapien
ttctgaacaaaagcgcgcacagtgt

SEQ ID NO: 3655481 - DNA, 25 bp, Homo sapien
tgccagagcggacacatcggtccgg

SEQ ID NO: 3655482 - DNA, 25 bp, Homo sapien
tttttgttgcccagcggtgccgtcg

SEQ ID NO: 3655483 - DNA, 25 bp, Homo sapien
cacagtgaactagcggcaaatccaa

SEQ ID NO: 3655484 - DNA, 25 bp, Homo sapien
agcttgtttcctgacgcagtcacac

SEQ ID NO: 3655485 - DNA, 25 bp, Homo sapien
caaatccaagatagactttgggcca

SEQ ID NO: 3655486 - DNA, 25 bp, Homo sapien
aatcccaccagaaatcaccctaaag

SEQ ID NO: 3655487 - DNA, 25 bp, Homo sapien
taaagctgagggcaatctgtccatc

SEQ ID NO: 3655488 - DNA, 25 bp, Homo sapien
tgggcatgccctgcagagcgcattt

SEQ ID NO: 3655489 - DNA, 25 bp, Homo sapien
gatagccgacatgtttgaagcagcc

SEQ ID NO: 3655490 - DNA, 25 bp, Homo sapien
taagacagatcatcctgaactgccc

SEQ ID NO: 3655491 - DNA, 25 bp, Homo sapien
gaaggagctctatgacaagtgcaaa

SEQ ID NO: 3655492 - DNA, 25 bp, Homo sapien
agatggccagatttagatgacctag

SEQ ID NO: 3655493 - DNA, 25 bp, Homo sapien
taattgccacaggacttagataggt

SEQ ID NO: 3655494 - DNA, 25 bp, Homo sapien
gaagatgtgacacttaacccaccac

SEQ ID NO: 3655495 - DNA, 25 bp, Homo sapien
tcatcacagtttaggtctctagcaa

SEQ ID NO: 3655496 - DNA, 25 bp, Homo sapien
ggccttgaatatacataagtggata

SEQ ID NO: 3655497 - DNA, 25 bp, Homo sapien
aaaagacgactttcacgtatgtgac

SEQ ID NO: 3655498 - DNA, 25 bp, Homo sapien
catatttcggagtaggttgtagcaa

SEQ ID NO: 3655499 - DNA, 25 bp, Homo sapien
tttcccacagaatgtatcctccttg

SEQ ID NO: 3655500 - DNA, 25 bp, Homo sapien
ggatcaggagtcactatacctcctc

SEQ ID NO: 3655501 - DNA, 25 bp, Homo sapien
gcagtatatgatatgcattggatta

SEQ ID NO: 3655502 - DNA, 25 bp, Homo sapien
cctcaaggtcagtaaatatgcttca

SEQ ID NO: 3655503 - DNA, 25 bp, Homo sapien
tagcaacagagcctagtgcagaggt

SEQ ID NO: 3655504 - DNA, 25 bp, Homo sapien
tgaatcttctcagactcggcaggag

SEQ ID NO: 3655505 - DNA, 25 bp, Homo sapien
gatggaacctcctgcaaaccaagag

SEQ ID NO: 3655506 - DNA, 25 bp, Homo sapien
tccatgtcatcctacggagcgtgaa

SEQ ID NO: 3655507 - DNA, 25 bp, Homo sapien
cgaggaggaggagtacggcgacgct

SEQ ID NO: 3655508 - DNA, 25 bp, Homo sapien
gaggagtacggcgacgctgaggaga

SEQ ID NO: 3655509 - DNA, 25 bp, Homo sapien
ggaggaggagtacggcgacgctgag

SEQ ID NO: 3655510 - DNA, 25 bp, Homo sapien
agtacggcgacgctgaggagaccca

SEQ ID NO: 3655511 - DNA, 25 bp, Homo sapien
ttggcatagtacctcctttgcatct

SEQ ID NO: 3655512 - DNA, 25 bp, Homo sapien
tcttttggcatagtacctcctttgc

SEQ ID NO: 3655513 - DNA, 25 bp, Homo sapien
tatgaagaactactatataaagatc

SEQ ID NO: 3655514 - DNA, 25 bp, Homo sapien
aagatctgtgattgaatatgtataa

SEQ ID NO: 3655515 - DNA, 25 bp, Homo sapien
gccacgatcgcagccccgtccgtca

SEQ ID NO: 3655516 - DNA, 25 bp, Homo sapien
cggccacgatcgcagccccgtccgt

SEQ ID NO: 3655517 - DNA, 25 bp, Homo sapien
acgatcgcagccccgtccgtcaccg

SEQ ID NO: 3655518 - DNA, 25 bp, Homo sapien
gatcgcagccccgtccgtcaccgcg

SEQ ID NO: 3655519 - DNA, 25 bp, Homo sapien
caagaatggattcggtaaagggacg

SEQ ID NO: 3655520 - DNA, 25 bp, Homo sapien
tgacggcgaacaccacgttgggagc

SEQ ID NO: 3655521 - DNA, 25 bp, Homo sapien
taagtttccaagaatggattcggta

SEQ ID NO: 3655522 - DNA, 25 bp, Homo sapien
gacgaggtgggaagtgacggcgaac

SEQ ID NO: 3655523 - DNA, 25 bp, Homo sapien
tgtccggcagcagtccactgcgtca

SEQ ID NO: 3655524 - DNA, 25 bp, Homo sapien
ctcagacctgagcttagcacacgca

SEQ ID NO: 3655525 - DNA, 25 bp, Homo sapien
ggtgatttcgaggattccagttcca

SEQ ID NO: 3655526 - DNA, 25 bp, Homo sapien
tgcgtcaatttcctcagagccacac

SEQ ID NO: 3655527 - DNA, 25 bp, Homo sapien
ttcaaatgcggagggcgccaaactt

SEQ ID NO: 3655528 - DNA, 25 bp, Homo sapien
tgtgttccactcaagtggttccaca

SEQ ID NO: 3655529 - DNA, 25 bp, Homo sapien
ctaacataacctgattcaaatgcgg

SEQ ID NO: 3655530 - DNA, 25 bp, Homo sapien
ggcgccaaacttgtgttccactcaa

SEQ ID NO: 3655531 - DNA, 25 bp, Homo sapien
gagactccaagctcaaatcctccag

SEQ ID NO: 3655532 - DNA, 25 bp, Homo sapien
tcctatttggtagaaacacatccag

SEQ ID NO: 3655533 - DNA, 25 bp, Homo sapien
caaacactgagtggctacgggttac

SEQ ID NO: 3655534 - DNA, 25 bp, Homo sapien
tccaaagggcaatgaatgaggtcac

SEQ ID NO: 3655535 - DNA, 25 bp, Homo sapien
ctttgccaagctgatccttttcctt

SEQ ID NO: 3655536 - DNA, 25 bp, Homo sapien
gctttgccaagctgatccttttcct

SEQ ID NO: 3655537 - DNA, 25 bp, Homo sapien
ggctttgccaagctgatccttttcc

SEQ ID NO: 3655538 - DNA, 25 bp, Homo sapien
ataaaagtgaattgtgttcttccct

SEQ ID NO: 3655539 - DNA, 25 bp, Homo sapien
ctatataaaagtgaattgtgttctt

SEQ ID NO: 3655540 - DNA, 25 bp, Homo sapien
caactatataaaagtgaattgtgtt

SEQ ID NO: 3655541 - DNA, 25 bp, Homo sapien
tataaaagtgaattgtgttcttccc

SEQ ID NO: 3655542 - DNA, 25 bp, Homo sapien
gtccctaccatgatttttacatttc

SEQ ID NO: 3655543 - DNA, 25 bp, Homo sapien
atcaggtccctaccatgatttttac

SEQ ID NO: 3655544 - DNA, 25 bp, Homo sapien
aggtccctaccatgatttttacatt

SEQ ID NO: 3655545 - DNA, 25 bp, Homo sapien
ttaatcaggtccctaccatgatttt

SEQ ID NO: 3655546 - DNA, 25 bp, Homo sapien
gtcaacagagttgcccatgcatttt

SEQ ID NO: 3655547 - DNA, 25 bp, Homo sapien
ttgccagtcaacagagttgcccatg

SEQ ID NO: 3655548 - DNA, 25 bp, Homo sapien
gccagtcaacagagttgcccatgca

SEQ ID NO: 3655549 - DNA, 25 bp, Homo sapien
aacagagttgcccatgcatttttca

SEQ ID NO: 3655550 - DNA, 25 bp, Homo sapien
tgctcttccgtgtgaaacagatggt

SEQ ID NO: 3655551 - DNA, 25 bp, Homo sapien
tccgtgtgaaacagatggtcttggt

SEQ ID NO: 3655552 - DNA, 25 bp, Homo sapien
cgaagtaattgtgctcttccgtgtg

SEQ ID NO: 3655553 - DNA, 25 bp, Homo sapien
aattgtgctcttccgtgtgaaacag

SEQ ID NO: 3655554 - DNA, 25 bp, Homo sapien
cacttgcttcctgacgatggtcagg

SEQ ID NO: 3655555 - DNA, 25 bp, Homo sapien
tcactttctgaggagctatcgctaa

SEQ ID NO: 3655556 - DNA, 25 bp, Homo sapien
tgaatttgccaatattctgatggca

SEQ ID NO: 3655557 - DNA, 25 bp, Homo sapien
gagctatcgctaacagtttcctcaa

SEQ ID NO: 3655558 - DNA, 25 bp, Homo sapien
ttgatgttggtaaaatcattaagag

SEQ ID NO: 3655559 - DNA, 25 bp, Homo sapien
ttgcattgatgttggtaaaatcatt

SEQ ID NO: 3655560 - DNA, 25 bp, Homo sapien
gcattgatgttggtaaaatcattaa

SEQ ID NO: 3655561 - DNA, 25 bp, Homo sapien
ttttgcattgatgttggtaaaatca

SEQ ID NO: 3655562 - DNA, 25 bp, Homo sapien
ttagaattagggtacagcatcatca

SEQ ID NO: 3655563 - DNA, 25 bp, Homo sapien
ctacatcccttctcgtatttcacaa

SEQ ID NO: 3655564 - DNA, 25 bp, Homo sapien
tttcacaaaggggctctccacatac

SEQ ID NO: 3655565 - DNA, 25 bp, Homo sapien
tacatcccttctcgtatttcacaaa

SEQ ID NO: 3655566 - DNA, 25 bp, Homo sapien
ctctagtgacagctctaggaaatat

SEQ ID NO: 3655567 - DNA, 25 bp, Homo sapien
cctctagtgacagctctaggaaata

SEQ ID NO: 3655568 - DNA, 25 bp, Homo sapien
ccctttgggaatgacggagatgagc

SEQ ID NO: 3655569 - DNA, 25 bp, Homo sapien
tgacggagatgagcttctccatttc

SEQ ID NO: 3655570 - DNA, 25 bp, Homo sapien
gccaagaggcaaggaaagcttaaag

SEQ ID NO: 3655571 - DNA, 25 bp, Homo sapien
atgccaagaggcaaggaaagcttaa

SEQ ID NO: 3655572 - DNA, 25 bp, Homo sapien
tagcaacagcataacctcctgcagt

SEQ ID NO: 3655573 - DNA, 25 bp, Homo sapien
gaagaatgccgactatctctgatga

SEQ ID NO: 3655574 - DNA, 25 bp, Homo sapien
aatataaacactaatggattaaatc

SEQ ID NO: 3655575 - DNA, 25 bp, Homo sapien
ttaaatataaacactaatggattaa

SEQ ID NO: 3655576 - DNA, 25 bp, Homo sapien
acaacacttcacagatctgtgtgtc

SEQ ID NO: 3655577 - DNA, 25 bp, Homo sapien
tactatatgtactgctgatgccagc

SEQ ID NO: 3655578 - DNA, 25 bp, Homo sapien
ttttactatatgtactgctgatgcc

SEQ ID NO: 3655579 - DNA, 25 bp, Homo sapien
aaatatacaacacttcacagatctg

SEQ ID NO: 3655580 - DNA, 25 bp, Homo sapien
cagaataagtcctagtgtggtaacc

SEQ ID NO: 3655581 - DNA, 25 bp, Homo sapien
aatccaatgttttggcctggtgcag

SEQ ID NO: 3655582 - DNA, 25 bp, Homo sapien
ctagagttagcttggcataatggaa

SEQ ID NO: 3655583 - DNA, 25 bp, Homo sapien
caagttgcttgttaggctcaacgtc

SEQ ID NO: 3655584 - DNA, 25 bp, Homo sapien
tctttcacaggatcaacaggcaaca

SEQ ID NO: 3655585 - DNA, 25 bp, Homo sapien
ctttgaaactgctacaagaggtact

SEQ ID NO: 3655586 - DNA, 25 bp, Homo sapien
gaaactgctacaagaggtactcttg

SEQ ID NO: 3655587 - DNA, 25 bp, Homo sapien
tcttgatttgaaaggagttgggaag

SEQ ID NO: 3655588 - DNA, 25 bp, Homo sapien
ttctgagacagataaatcaaggtcc

SEQ ID NO: 3655589 - DNA, 25 bp, Homo sapien
caagctggataaaatcgtctgtttc

SEQ ID NO: 3655590 - DNA, 25 bp, Homo sapien
tctgtttctgagacagataaatcaa

SEQ ID NO: 3655591 - DNA, 25 bp, Homo sapien
ctgtcttttcgccacttacaagctg

SEQ ID NO: 3655592 - DNA, 25 bp, Homo sapien
gatgggagatggctttttgaaccgt

SEQ ID NO: 3655593 - DNA, 25 bp, Homo sapien
accgtggaatccctgcatttgggca

SEQ ID NO: 3655594 - DNA, 25 bp, Homo sapien
gatggctttttgaaccgtggaatcc

SEQ ID NO: 3655595 - DNA, 25 bp, Homo sapien
gctttttgaaccgtggaatccctgc

SEQ ID NO: 3655596 - DNA, 25 bp, Homo sapien
gacttgttggctgcagaacgaggaa

SEQ ID NO: 3655597 - DNA, 25 bp, Homo sapien
ggacagacaggcactactcaacttc

SEQ ID NO: 3655598 - DNA, 25 bp, Homo sapien
tgtaaggctacggtaatcaaggcag

SEQ ID NO: 3655599 - DNA, 25 bp, Homo sapien
caagtgacttatgcacacaggaaac

SEQ ID NO: 3655600 - DNA, 25 bp, Homo sapien
aacttttcacccatggtagggatga

SEQ ID NO: 3655601 - DNA, 25 bp, Homo sapien
tgtgaaaacttttcacccatggtag

SEQ ID NO: 3655602 - DNA, 25 bp, Homo sapien
aaacttttcacccatggtagggatg

SEQ ID NO: 3655603 - DNA, 25 bp, Homo sapien
catcctgagggtcagacccttcttt

SEQ ID NO: 3655604 - DNA, 25 bp, Homo sapien
tgagggtcagacccttctttctctc

SEQ ID NO: 3655605 - DNA, 25 bp, Homo sapien
tcctgagggtcagacccttctttct

SEQ ID NO: 3655606 - DNA, 25 bp, Homo sapien
cctgagggtcagacccttctttctc

SEQ ID NO: 3655607 - DNA, 25 bp, Homo sapien
ctgtggatggccatatctagcatct

SEQ ID NO: 3655608 - DNA, 25 bp, Homo sapien
cccctgtggatggccatatctagca

SEQ ID NO: 3655609 - DNA, 25 bp, Homo sapien
ccctgtggatggccatatctagcat

SEQ ID NO: 3655610 - DNA, 25 bp, Homo sapien
cctgtggatggccatatctagcatc

SEQ ID NO: 3655611 - DNA, 25 bp, Homo sapien
gacccgaattctctgaaaggcatca

SEQ ID NO: 3655612 - DNA, 25 bp, Homo sapien
agctggacccgaattctctgaaagg

SEQ ID NO: 3655613 - DNA, 25 bp, Homo sapien
gtcacccacaagctggacccgaatt

SEQ ID NO: 3655614 - DNA, 25 bp, Homo sapien
ccacaagctggacccgaattctctg

SEQ ID NO: 3655615 - DNA, 25 bp, Homo sapien
ttctctcctcaccaaactaattgta

SEQ ID NO: 3655616 - DNA, 25 bp, Homo sapien
tgtgacctcatctgacagactgttt

SEQ ID NO: 3655617 - DNA, 25 bp, Homo sapien
gagctccctgttgccaatctgtcta

SEQ ID NO: 3655618 - DNA, 25 bp, Homo sapien
tgttgccaatctgtctactttcctg

SEQ ID NO: 3655619 - DNA, 25 bp, Homo sapien
tcatgaatcttctgctttaccctga

SEQ ID NO: 3655620 - DNA, 25 bp, Homo sapien
catgaatcttctgctttaccctgaa

SEQ ID NO: 3655621 - DNA, 25 bp, Homo sapien
atgaatcttctgctttaccctgaag

SEQ ID NO: 3655622 - DNA, 25 bp, Homo sapien
tgaatcttctgctttaccctgaagc

SEQ ID NO: 3655623 - DNA, 25 bp, Homo sapien
ctttttgaaggcctgaggacagttg

SEQ ID NO: 3655624 - DNA, 25 bp, Homo sapien
ctgaggacagttggccaagccggaa

SEQ ID NO: 3655625 - DNA, 25 bp, Homo sapien
caagccggaatatgtcagcaaagtc

SEQ ID NO: 3655626 - DNA, 25 bp, Homo sapien
aagtcagaccgcagctgagaagtag

SEQ ID NO: 3655627 - DNA, 25 bp, Homo sapien
gctttattgaaatgtccacgtgagg

SEQ ID NO: 3655628 - DNA, 25 bp, Homo sapien
gtacaactagaactaatgactcttg

SEQ ID NO: 3655629 - DNA, 25 bp, Homo sapien
gccttgtaatgttgcagcagtgtca

SEQ ID NO: 3655630 - DNA, 25 bp, Homo sapien
taagcctgtagagatttgccttgta

SEQ ID NO: 3655631 - DNA, 25 bp, Homo sapien
tatagagaagcccatcctgaaaagt

SEQ ID NO: 3655632 - DNA, 25 bp, Homo sapien
gctgaaattgagaggaagaacccga

SEQ ID NO: 3655633 - DNA, 25 bp, Homo sapien
cattcccagattagaggccagaagg

SEQ ID NO: 3655634 - DNA, 25 bp, Homo sapien
cctgaaaagtggacatcattcccag

SEQ ID NO: 3655635 - DNA, 25 bp, Homo sapien
tcccctgagccaagatgttgttacg

SEQ ID NO: 3655636 - DNA, 25 bp, Homo sapien
ggtcccctgagccaagatgttgtta

SEQ ID NO: 3655637 - DNA, 25 bp, Homo sapien
gccaagatgttgttacggtagtaat

SEQ ID NO: 3655638 - DNA, 25 bp, Homo sapien
cctgagccaagatgttgttacggta

SEQ ID NO: 3655639 - DNA, 25 bp, Homo sapien
gatcagtctaaggacccgaggtcgt

SEQ ID NO: 3655640 - DNA, 25 bp, Homo sapien
gagttccttgggctgatcagtctaa

SEQ ID NO: 3655641 - DNA, 25 bp, Homo sapien
gatgagttccttgggctgatcagtc

SEQ ID NO: 3655642 - DNA, 25 bp, Homo sapien
cttgggctgatcagtctaaggaccc

SEQ ID NO: 3655643 - DNA, 25 bp, Homo sapien
cggtgtaagtagtgggggtgactgc

SEQ ID NO: 3655644 - DNA, 25 bp, Homo sapien
cttcatacggctgagaatcctccac

SEQ ID NO: 3655645 - DNA, 25 bp, Homo sapien
tgtcttcatacggctgagaatcctc

SEQ ID NO: 3655646 - DNA, 25 bp, Homo sapien
ggtgtcttcatacggctgagaatcc

SEQ ID NO: 3655647 - DNA, 25 bp, Homo sapien
ggtccctggactatatgcctaagca

SEQ ID NO: 3655648 - DNA, 25 bp, Homo sapien
tgtacattagaaccacccaaagtgc

SEQ ID NO: 3655649 - DNA, 25 bp, Homo sapien
tggctccaggttgagtcccactgct

SEQ ID NO: 3655650 - DNA, 25 bp, Homo sapien
tcaggtatttacagcattggctcca

SEQ ID NO: 3655651 - DNA, 25 bp, Homo sapien
tattctggtatcacccatggtgctg

SEQ ID NO: 3655652 - DNA, 25 bp, Homo sapien
taatgcacactttggattctgatac

SEQ ID NO: 3655653 - DNA, 25 bp, Homo sapien
tcaagatagagacctgtatacccag

SEQ ID NO: 3655654 - DNA, 25 bp, Homo sapien
caatatgcccactgacatcataggc

SEQ ID NO: 3655655 - DNA, 25 bp, Homo sapien
tgggagaggcaaacctactaccctc

SEQ ID NO: 3655656 - DNA, 25 bp, Homo sapien
gcatagctagaataaagtaggcagg

SEQ ID NO: 3655657 - DNA, 25 bp, Homo sapien
gtatctacgatccaagccttctgtg

SEQ ID NO: 3655658 - DNA, 25 bp, Homo sapien
gcaaacctactaccctcaatctggg

SEQ ID NO: 3655659 - DNA, 25 bp, Homo sapien
caacagagctgttgatattgtgctg

SEQ ID NO: 3655660 - DNA, 25 bp, Homo sapien
gggcaacagagctgttgatattgtg

SEQ ID NO: 3655661 - DNA, 25 bp, Homo sapien
acagagctgttgatattgtgctgtt

SEQ ID NO: 3655662 - DNA, 25 bp, Homo sapien
gcaacagagctgttgatattgtgct

SEQ ID NO: 3655663 - DNA, 25 bp, Homo sapien
ttgaggtagctccacggctgcgcga

SEQ ID NO: 3655664 - DNA, 25 bp, Homo sapien
gactccccagttccgccttgaggta

SEQ ID NO: 3655665 - DNA, 25 bp, Homo sapien
tgcgcgacccagaatccccggcgtt

SEQ ID NO: 3655666 - DNA, 25 bp, Homo sapien
tttcacaccgggtgttcaggctgcc

SEQ ID NO: 3655667 - DNA, 25 bp, Homo sapien
atcttcagggtggttagcacgtcct

SEQ ID NO: 3655668 - DNA, 25 bp, Homo sapien
tgaggatcttcagggtggttagcac

SEQ ID NO: 3655669 - DNA, 25 bp, Homo sapien
aggatcttcagggtggttagcacgt

SEQ ID NO: 3655670 - DNA, 25 bp, Homo sapien
cactctcgccgatgatgaggatctt

SEQ ID NO: 3655671 - DNA, 25 bp, Homo sapien
tgcagtttacagttcccgtcgcggc

SEQ ID NO: 3655672 - DNA, 25 bp, Homo sapien
agaggaaagcaaacgtcgcgggaga

SEQ ID NO: 3655673 - DNA, 25 bp, Homo sapien
ctacaggagggagagcgacccagag

SEQ ID NO: 3655674 - DNA, 25 bp, Homo sapien
tgggcctggcaaaggccgggaacca

SEQ ID NO: 3655675 - DNA, 25 bp, Homo sapien
ccctcggaatggtgttttctcggcg

SEQ ID NO: 3655676 - DNA, 25 bp, Homo sapien
cggccctcggaatggtgttttctcg

SEQ ID NO: 3655677 - DNA, 25 bp, Homo sapien
gccctcggaatggtgttttctcggc

SEQ ID NO: 3655678 - DNA, 25 bp, Homo sapien
gcggccctcggaatggtgttttctc

SEQ ID NO: 3655679 - DNA, 25 bp, Homo sapien
taaaagaatcgacattaagctgcgc

SEQ ID NO: 3655680 - DNA, 25 bp, Homo sapien
tcccgaggacattatgtatttagag

SEQ ID NO: 3655681 - DNA, 25 bp, Homo sapien
ccaggaatgggacctaaggcgtcac

SEQ ID NO: 3655682 - DNA, 25 bp, Homo sapien
tgaaccccgagaggttcgaggcaag

SEQ ID NO: 3655683 - DNA, 25 bp, Homo sapien
tccagcagtcacaagatccagttct

SEQ ID NO: 3655684 - DNA, 25 bp, Homo sapien
agcagtcacaagatccagttctttc

SEQ ID NO: 3655685 - DNA, 25 bp, Homo sapien
ttccagcagtcacaagatccagttc

SEQ ID NO: 3655686 - DNA, 25 bp, Homo sapien
ccagcagtcacaagatccagttctt

SEQ ID NO: 3655687 - DNA, 25 bp, Homo sapien
ggtggcccacggctgaagcactcgg

SEQ ID NO: 3655688 - DNA, 25 bp, Homo sapien
tggcccacggctgaagcactcggac

SEQ ID NO: 3655689 - DNA, 25 bp, Homo sapien
gtggcccacggctgaagcactcgga

SEQ ID NO: 3655690 - DNA, 25 bp, Homo sapien
tactctacaaggagaacctcggttg

SEQ ID NO: 3655691 - DNA, 25 bp, Homo sapien
gcttttgaaatgaaggcctacagca

SEQ ID NO: 3655692 - DNA, 25 bp, Homo sapien
gcattcaagtatcacacacaaggtc

SEQ ID NO: 3655693 - DNA, 25 bp, Homo sapien
taaagtgacaaaatcctgcatcgag

SEQ ID NO: 3655694 - DNA, 25 bp, Homo sapien
ctaccaccatggcacttagatgtga

SEQ ID NO: 3655695 - DNA, 25 bp, Homo sapien
tagagatggaaggagtaactaccac

SEQ ID NO: 3655696 - DNA, 25 bp, Homo sapien
cagagtgtgattataactaatctgc

SEQ ID NO: 3655697 - DNA, 25 bp, Homo sapien
taaaggagcaaaatgtttcccatgc

SEQ ID NO: 3655698 - DNA, 25 bp, Homo sapien
ttctaatcatatgataaatgtgttc

SEQ ID NO: 3655699 - DNA, 25 bp, Homo sapien
gaattttctaatcatatgataaatg

SEQ ID NO: 3655700 - DNA, 25 bp, Homo sapien
tgaattttctaatcatatgataaat

SEQ ID NO: 3655701 - DNA, 25 bp, Homo sapien
atcaaacgtatcatctgtgaacctc

SEQ ID NO: 3655702 - DNA, 25 bp, Homo sapien
tggatcaaacgtatcatctgtgaac

SEQ ID NO: 3655703 - DNA, 25 bp, Homo sapien
aaacgtatcatctgtgaacctcaag

SEQ ID NO: 3655704 - DNA, 25 bp, Homo sapien
aagttctggatcaaacgtatcatct

SEQ ID NO: 3655705 - DNA, 25 bp, Homo sapien
ttataacccctcctcttagtagcag

SEQ ID NO: 3655706 - DNA, 25 bp, Homo sapien
tccatagtataggagagaaatgtgt

SEQ ID NO: 3655707 - DNA, 25 bp, Homo sapien
aaggcaagaaaatactggccatttc

SEQ ID NO: 3655708 - DNA, 25 bp, Homo sapien
tgtgtacagataatcacattagcag

SEQ ID NO: 3655709 - DNA, 25 bp, Homo sapien
cacatgataccaaaatacttacctc

SEQ ID NO: 3655710 - DNA, 25 bp, Homo sapien
gatctaaatcttatccttaaaaggc

SEQ ID NO: 3655711 - DNA, 25 bp, Homo sapien
tatattctcataagttagtgtgact

SEQ ID NO: 3655712 - DNA, 25 bp, Homo sapien
taaccactttcaggcgatctaaatc

SEQ ID NO: 3655713 - DNA, 25 bp, Homo sapien
gctaactttatagtaccatctgcaa

SEQ ID NO: 3655714 - DNA, 25 bp, Homo sapien
tgtcttctagtttagtggaatgctg

SEQ ID NO: 3655715 - DNA, 25 bp, Homo sapien
aaagagtattttatgcaagacagaa

SEQ ID NO: 3655716 - DNA, 25 bp, Homo sapien
tgtctcactaagttactaaaaggta

SEQ ID NO: 3655717 - DNA, 25 bp, Homo sapien
gatagacacatattacttcctgcaa

SEQ ID NO: 3655718 - DNA, 25 bp, Homo sapien
catattacttcctgcaaaaatggct

SEQ ID NO: 3655719 - DNA, 25 bp, Homo sapien
ggcttcatttccccgacttcttaga

SEQ ID NO: 3655720 - DNA, 25 bp, Homo sapien
aaatggcttgtttatgtgactcctt

SEQ ID NO: 3655721 - DNA, 25 bp, Homo sapien
cctccagttctggactgacaacttt

SEQ ID NO: 3655722 - DNA, 25 bp, Homo sapien
gatttacctaagagacagtttagca

SEQ ID NO: 3655723 - DNA, 25 bp, Homo sapien
tgacaactttttcgtgattcagaga

SEQ ID NO: 3655724 - DNA, 25 bp, Homo sapien
tatttgtaggaggtttatgcagaag

SEQ ID NO: 3655725 - DNA, 25 bp, Homo sapien
gagagcttctatgtttggtgcctac

SEQ ID NO: 3655726 - DNA, 25 bp, Homo sapien
tatagctgcttagttaatttactgg

SEQ ID NO: 3655727 - DNA, 25 bp, Homo sapien
tactgggccagcattacatactatc

SEQ ID NO: 3655728 - DNA, 25 bp, Homo sapien
tattctgtccagtgcattaacctta

SEQ ID NO: 3655729 - DNA, 25 bp, Homo sapien
gggttcaagtggtttactcatccca

SEQ ID NO: 3655730 - DNA, 25 bp, Homo sapien
ggttcaagtggtttactcatcccag

SEQ ID NO: 3655731 - DNA, 25 bp, Homo sapien
atttccatccactgaaattgttttc

SEQ ID NO: 3655732 - DNA, 25 bp, Homo sapien
ccatattgcaagtttagccttattt

SEQ ID NO: 3655733 - DNA, 25 bp, Homo sapien
tgaaattgttttcaccttaaagtca

SEQ ID NO: 3655734 - DNA, 25 bp, Homo sapien
agtttagccttatttccatccactg

SEQ ID NO: 3655735 - DNA, 25 bp, Homo sapien
tatttcatcctagaagaagcttcca

SEQ ID NO: 3655736 - DNA, 25 bp, Homo sapien
taaactcagggctaggaaagatcta

SEQ ID NO: 3655737 - DNA, 25 bp, Homo sapien
tacgttacacccaaatgccatgatg

SEQ ID NO: 3655738 - DNA, 25 bp, Homo sapien
ttctaatacagaggaaacgccttcc

SEQ ID NO: 3655739 - DNA, 25 bp, Homo sapien
aatgaaacggtatatggatgcccag

SEQ ID NO: 3655740 - DNA, 25 bp, Homo sapien
gccattactgaaaagacaagccttg

SEQ ID NO: 3655741 - DNA, 25 bp, Homo sapien
tatgagaacgtatcctagctatctg

SEQ ID NO: 3655742 - DNA, 25 bp, Homo sapien
gccccaagactttttgataacagga

SEQ ID NO: 3655743 - DNA, 25 bp, Homo sapien
catgtatcaaacctcaacttagcta

SEQ ID NO: 3655744 - DNA, 25 bp, Homo sapien
aacttagctaccagtcccactgctg

SEQ ID NO: 3655745 - DNA, 25 bp, Homo sapien
cagtcatttataaccccagaagaga

SEQ ID NO: 3655746 - DNA, 25 bp, Homo sapien
agcaagacagtagggaggatctgca

SEQ ID NO: 3655747 - DNA, 25 bp, Homo sapien
aaaagtttgcagtctgctgatgcaa

SEQ ID NO: 3655748 - DNA, 25 bp, Homo sapien
gtattgccacatggcccacttcagg

SEQ ID NO: 3655749 - DNA, 25 bp, Homo sapien
acttcaggattggactatttcctat

SEQ ID NO: 3655750 - DNA, 25 bp, Homo sapien
gtttgcagtctgctgatgcaaagta

SEQ ID NO: 3655751 - DNA, 25 bp, Homo sapien
aaatttcataaagcagggactcatc

SEQ ID NO: 3655752 - DNA, 25 bp, Homo sapien
gtttaaccattgtgctgagaccaat

SEQ ID NO: 3655753 - DNA, 25 bp, Homo sapien
tctgactcatgttagggttagtgaa

SEQ ID NO: 3655754 - DNA, 25 bp, Homo sapien
tattgaaacacagcaggcctatttg

SEQ ID NO: 3655755 - DNA, 25 bp, Homo sapien
taatagctgggagttaatgttctaa

SEQ ID NO: 3655756 - DNA, 25 bp, Homo sapien
accctgtgcacctctataatagctg

SEQ ID NO: 3655757 - DNA, 25 bp, Homo sapien
gcacctctataatagctgggagtta

SEQ ID NO: 3655758 - DNA, 25 bp, Homo sapien
gagttaatgttctaaacctctcttg

SEQ ID NO: 3655759 - DNA, 25 bp, Homo sapien
catattaactttcacagactaggac

SEQ ID NO: 3655760 - DNA, 25 bp, Homo sapien
tcccaggaatatcaagaacaagcac

SEQ ID NO: 3655761 - DNA, 25 bp, Homo sapien
tactccaagacagtccaacatatgc

SEQ ID NO: 3655762 - DNA, 25 bp, Homo sapien
tacactgagaatccacatctggttt

SEQ ID NO: 3655763 - DNA, 25 bp, Homo sapien
tgtcatttcttgtacagtatgtttc

SEQ ID NO: 3655764 - DNA, 25 bp, Homo sapien
atttcttgtacagtatgtttccaat

SEQ ID NO: 3655765 - DNA, 25 bp, Homo sapien
gtcatttcttgtacagtatgtttcc

SEQ ID NO: 3655766 - DNA, 25 bp, Homo sapien
tatgtcatttcttgtacagtatgtt

SEQ ID NO: 3655767 - DNA, 25 bp, Homo sapien
tatcgattttatttccaactagcat

SEQ ID NO: 3655768 - DNA, 25 bp, Homo sapien
cttatcgattttatttccaactagc

SEQ ID NO: 3655769 - DNA, 25 bp, Homo sapien
ttatcgattttatttccaactagca

SEQ ID NO: 3655770 - DNA, 25 bp, Homo sapien
ctttcgtgcaaatttcaggccttca

SEQ ID NO: 3655771 - DNA, 25 bp, Homo sapien
acatggaatgctttcgtgcaaattt

SEQ ID NO: 3655772 - DNA, 25 bp, Homo sapien
caggccttcatttctatcgacttca

SEQ ID NO: 3655773 - DNA, 25 bp, Homo sapien
gccttcatttctatcgacttcacga

SEQ ID NO: 3655774 - DNA, 25 bp, Homo sapien
cttcaaaggcacattgtacaccatc

SEQ ID NO: 3655775 - DNA, 25 bp, Homo sapien
aaggcacattgtacaccatcacagg

SEQ ID NO: 3655776 - DNA, 25 bp, Homo sapien
ttcttccctgtgtgacagtttgact

SEQ ID NO: 3655777 - DNA, 25 bp, Homo sapien
ttccctgtgtgacagtttgactcct

SEQ ID NO: 3655778 - DNA, 25 bp, Homo sapien
gtcgatgagtgggatttcttgcaaa

SEQ ID NO: 3655779 - DNA, 25 bp, Homo sapien
cactatctgatcaaatatgcaagag

SEQ ID NO: 3655780 - DNA, 25 bp, Homo sapien
tataaaacaattatgtgcaaactgc

SEQ ID NO: 3655781 - DNA, 25 bp, Homo sapien
gcaaactgcaaggtccctaaaatag

SEQ ID NO: 3655782 - DNA, 25 bp, Homo sapien
tttgtgctacataaaaaaactgtag

SEQ ID NO: 3655783 - DNA, 25 bp, Homo sapien
ctattttgtgctacataaaaaaact

SEQ ID NO: 3655784 - DNA, 25 bp, Homo sapien
agactgcaaactgtgcatgcttacc

SEQ ID NO: 3655785 - DNA, 25 bp, Homo sapien
actgcaaactgtgcatgcttaccat

SEQ ID NO: 3655786 - DNA, 25 bp, Homo sapien
ctattcttccccgtggtgctaggag

SEQ ID NO: 3655787 - DNA, 25 bp, Homo sapien
tagcaaaagcagactttgtatcaac

SEQ ID NO: 3655788 - DNA, 25 bp, Homo sapien
gtatcaacatatcctagatagatgg

SEQ ID NO: 3655789 - DNA, 25 bp, Homo sapien
aaaatttgccacgtttgatgatacc

SEQ ID NO: 3655790 - DNA, 25 bp, Homo sapien
cagttaaggtacctggacaaacact

SEQ ID NO: 3655791 - DNA, 25 bp, Homo sapien
tagttataaattggcctgggctaca

SEQ ID NO: 3655792 - DNA, 25 bp, Homo sapien
catcagaatctggaagcaatatgcc

SEQ ID NO: 3655793 - DNA, 25 bp, Homo sapien
gccattatggaagccgtaagataca

SEQ ID NO: 3655794 - DNA, 25 bp, Homo sapien
ctgtgaaaaagatttattagtctgt

SEQ ID NO: 3655795 - DNA, 25 bp, Homo sapien
actgtgaaaaagatttattagtctg

SEQ ID NO: 3655796 - DNA, 25 bp, Homo sapien
gtgaaaaagatttattagtctgtac

SEQ ID NO: 3655797 - DNA, 25 bp, Homo sapien
gaaaaagatttattagtctgtacaa

SEQ ID NO: 3655798 - DNA, 25 bp, Homo sapien
aaacatattgcaaaggtggtcactc

SEQ ID NO: 3655799 - DNA, 25 bp, Homo sapien
caaactgcccagaaattaatactgg

SEQ ID NO: 3655800 - DNA, 25 bp, Homo sapien
tcaaccacatgtaatgtagactagg

SEQ ID NO: 3655801 - DNA, 25 bp, Homo sapien
tacatttcagaaagaacccaacatg

SEQ ID NO: 3655802 - DNA, 25 bp, Homo sapien
ccaaatcaagacaacaatccaatac

SEQ ID NO: 3655803 - DNA, 25 bp, Homo sapien
tgttatattcaagtaactcatatat

SEQ ID NO: 3655804 - DNA, 25 bp, Homo sapien
caagacaacaatccaatacacagat

SEQ ID NO: 3655805 - DNA, 25 bp, Homo sapien
cagattattatatagctcaaggagc

SEQ ID NO: 3655806 - DNA, 25 bp, Homo sapien
tgcctgaccttagatattacaactg

SEQ ID NO: 3655807 - DNA, 25 bp, Homo sapien
aaccctgttactaggtgcctgacct

SEQ ID NO: 3655808 - DNA, 25 bp, Homo sapien
tgggtcaatctcagtactactagaa

SEQ ID NO: 3655809 - DNA, 25 bp, Homo sapien
agaccctttaagactgcttcaatga

SEQ ID NO: 3655810 - DNA, 25 bp, Homo sapien
ccatgcaagctacgatgaatcaaaa

SEQ ID NO: 3655811 - DNA, 25 bp, Homo sapien
cagtccactctgagcaggtgaaaga

SEQ ID NO: 3655812 - DNA, 25 bp, Homo sapien
gaatcatgtctcttgaccatgcaag

SEQ ID NO: 3655813 - DNA, 25 bp, Homo sapien
gccccacccttagtagagaatcatg

SEQ ID NO: 3655814 - DNA, 25 bp, Homo sapien
tgagaacaggcatgaacacacgact

SEQ ID NO: 3655815 - DNA, 25 bp, Homo sapien
ttatattagaaaaacgagctgcagc

SEQ ID NO: 3655816 - DNA, 25 bp, Homo sapien
cacagtagtcctccagcatgataga

SEQ ID NO: 3655817 - DNA, 25 bp, Homo sapien
catgatagatgttcccaactgagga

SEQ ID NO: 3655818 - DNA, 25 bp, Homo sapien
aaagcagccagatgcggtgactcat

SEQ ID NO: 3655819 - DNA, 25 bp, Homo sapien
gatcctgtctacacaaaaagatgtt

SEQ ID NO: 3655820 - DNA, 25 bp, Homo sapien
tatcgtggtactatctacagcagga

SEQ ID NO: 3655821 - DNA, 25 bp, Homo sapien
taaaatgtggtaacacctcagggct

SEQ ID NO: 3655822 - DNA, 25 bp, Homo sapien
tatgggaatttcatctaaggcagta

SEQ ID NO: 3655823 - DNA, 25 bp, Homo sapien
gaaaacctacgttctattcacactg

SEQ ID NO: 3655824 - DNA, 25 bp, Homo sapien
gaaagataccccatgtaacctcatg

SEQ ID NO: 3655825 - DNA, 25 bp, Homo sapien
cacacctggccttgattgtgatagt

SEQ ID NO: 3655826 - DNA, 25 bp, Homo sapien
ccatctgtcattaccgtaccctgag

SEQ ID NO: 3655827 - DNA, 25 bp, Homo sapien
tctgtcattaccgtaccctgagctt

SEQ ID NO: 3655828 - DNA, 25 bp, Homo sapien
taccgtaccctgagctttcagcttt

SEQ ID NO: 3655829 - DNA, 25 bp, Homo sapien
gtcattaccgtaccctgagctttca

SEQ ID NO: 3655830 - DNA, 25 bp, Homo sapien
tgttcaaacctaagatgcctcatcc

SEQ ID NO: 3655831 - DNA, 25 bp, Homo sapien
gctggaaaagagaacgtacgggctc

SEQ ID NO: 3655832 - DNA, 25 bp, Homo sapien
gacacacacctcagaataatggtct

SEQ ID NO: 3655833 - DNA, 25 bp, Homo sapien
tacattcctgtaaggtggctttgag

SEQ ID NO: 3655834 - DNA, 25 bp, Homo sapien
caggactggctctcaactggaggct

SEQ ID NO: 3655835 - DNA, 25 bp, Homo sapien
agagagaacgtctgtggagccagcc

SEQ ID NO: 3655836 - DNA, 25 bp, Homo sapien
cctcagaaggtcttacaaggctaca

SEQ ID NO: 3655837 - DNA, 25 bp, Homo sapien
tcacacatctggatacggcatagct

SEQ ID NO: 3655838 - DNA, 25 bp, Homo sapien
tgaaatgggattccaaatattgtcc

SEQ ID NO: 3655839 - DNA, 25 bp, Homo sapien
agttgaaatgggattccaaatattg

SEQ ID NO: 3655840 - DNA, 25 bp, Homo sapien
atacttccagggatctttgttttgt

SEQ ID NO: 3655841 - DNA, 25 bp, Homo sapien
ctaatatttgtactaggttcctttg

SEQ ID NO: 3655842 - DNA, 25 bp, Homo sapien
cacaatggaacgctacccaccaata

SEQ ID NO: 3655843 - DNA, 25 bp, Homo sapien
actacagtgggataccattactcac

SEQ ID NO: 3655844 - DNA, 25 bp, Homo sapien
taagctgatggcaaatagccgcatg

SEQ ID NO: 3655845 - DNA, 25 bp, Homo sapien
gaagctgctatgtgcacacaatgga

SEQ ID NO: 3655846 - DNA, 25 bp, Homo sapien
caactagctggagaaaatgctctgc

SEQ ID NO: 3655847 - DNA, 25 bp, Homo sapien
gcagtttaggatttaagtcctcatt

SEQ ID NO: 3655848 - DNA, 25 bp, Homo sapien
atttccttgatgtgtggtccgctcc

SEQ ID NO: 3655849 - DNA, 25 bp, Homo sapien
tgacttcctagtctgcaactagctg

SEQ ID NO: 3655850 - DNA, 25 bp, Homo sapien
gggcagggattcttcccaaggtatc

SEQ ID NO: 3655851 - DNA, 25 bp, Homo sapien
tatcacaaggtggacatcaaggtgt

SEQ ID NO: 3655852 - DNA, 25 bp, Homo sapien
gtagatcaaaagttcagcatggtgg

SEQ ID NO: 3655853 - DNA, 25 bp, Homo sapien
gataaccatgtatgttagttttcta

SEQ ID NO: 3655854 - DNA, 25 bp, Homo sapien
tgtaggtgaagaaatctttcctgtt

SEQ ID NO: 3655855 - DNA, 25 bp, Homo sapien
agaaatctttcctgttgtccttcct

SEQ ID NO: 3655856 - DNA, 25 bp, Homo sapien
ggtgaagaaatctttcctgttgtcc

SEQ ID NO: 3655857 - DNA, 25 bp, Homo sapien
taggtgaagaaatctttcctgttgt

SEQ ID NO: 3655858 - DNA, 25 bp, Homo sapien
agttttggctgctagagccgttgca

SEQ ID NO: 3655859 - DNA, 25 bp, Homo sapien
tccaacatgctatgcagtttgggtc

SEQ ID NO: 3655860 - DNA, 25 bp, Homo sapien
acgggctgctcctcaatccaacatg

SEQ ID NO: 3655861 - DNA, 25 bp, Homo sapien
gcaaaggccaattcttctaccacgg

SEQ ID NO: 3655862 - DNA, 25 bp, Homo sapien
ttccatactcttaaggcacagcgct

SEQ ID NO: 3655863 - DNA, 25 bp, Homo sapien
gcaggagcggagatttataacaaca

SEQ ID NO: 3655864 - DNA, 25 bp, Homo sapien
gattcaatccgtctggctggtctca

SEQ ID NO: 3655865 - DNA, 25 bp, Homo sapien
tctcgtcagcagtcccagaaattgt

SEQ ID NO: 3655866 - DNA, 25 bp, Homo sapien
gggagtgtgaattatagccaagcaa

SEQ ID NO: 3655867 - DNA, 25 bp, Homo sapien
ttatcaaatgaggtgaatctcctcc

SEQ ID NO: 3655868 - DNA, 25 bp, Homo sapien
gatcatcctggccttacagctcact

SEQ ID NO: 3655869 - DNA, 25 bp, Homo sapien
tctgaagacttgaggtaatgaaggg

SEQ ID NO: 3655870 - DNA, 25 bp, Homo sapien
ttctcaacatctctagcagtgattc

SEQ ID NO: 3655871 - DNA, 25 bp, Homo sapien
cttctattctcaacatctctagcag

SEQ ID NO: 3655872 - DNA, 25 bp, Homo sapien
tattctcaacatctctagcagtgat

SEQ ID NO: 3655873 - DNA, 25 bp, Homo sapien
tctattctcaacatctctagcagtg

SEQ ID NO: 3655874 - DNA, 25 bp, Homo sapien
cacagaaactgctactgaccccaga

SEQ ID NO: 3655875 - DNA, 25 bp, Homo sapien
tgctactgaccccagaaacctcttt

SEQ ID NO: 3655876 - DNA, 25 bp, Homo sapien
aaactgctactgaccccagaaacct

SEQ ID NO: 3655877 - DNA, 25 bp, Homo sapien
tcatctcctaatccaaacctctcca

SEQ ID NO: 3655878 - DNA, 25 bp, Homo sapien
tcctcctcctgggcctgtggctgca

SEQ ID NO: 3655879 - DNA, 25 bp, Homo sapien
ctcctcctgggcctgtggctgcatc

SEQ ID NO: 3655880 - DNA, 25 bp, Homo sapien
tgatcctcctcctgggcctgtggct

SEQ ID NO: 3655881 - DNA, 25 bp, Homo sapien
cctcctgggcctgtggctgcatcat

SEQ ID NO: 3655882 - DNA, 25 bp, Homo sapien
tctttatgtagcttcttgatcgttt

SEQ ID NO: 3655883 - DNA, 25 bp, Homo sapien
gcttcttgatcgtttgtctccaagt

SEQ ID NO: 3655884 - DNA, 25 bp, Homo sapien
ttatgtagcttcttgatcgtttgtc

SEQ ID NO: 3655885 - DNA, 25 bp, Homo sapien
tgtagcttcttgatcgtttgtctcc

SEQ ID NO: 3655886 - DNA, 25 bp, Homo sapien
tctctggaaccagcatgccaaacca

SEQ ID NO: 3655887 - DNA, 25 bp, Homo sapien
tctgcagaccttcctgagaaacaaa

SEQ ID NO: 3655888 - DNA, 25 bp, Homo sapien
cagcacttggactacgtggtcggcc

SEQ ID NO: 3655889 - DNA, 25 bp, Homo sapien
ccaccaattgggctggtgaccactt

SEQ ID NO: 3655890 - DNA, 25 bp, Homo sapien
gggatcacagtccagctcattatct

SEQ ID NO: 3655891 - DNA, 25 bp, Homo sapien
ttcagaatgctgaggcccttgactc

SEQ ID NO: 3655892 - DNA, 25 bp, Homo sapien
tacagtgagtaaatgcacatcctgg

SEQ ID NO: 3655893 - DNA, 25 bp, Homo sapien
gctgtgggatcccattcgttcagaa

SEQ ID NO: 3655894 - DNA, 25 bp, Homo sapien
tttcatcaaagatggaactttgccc

SEQ ID NO: 3655895 - DNA, 25 bp, Homo sapien
tagtgcagatactcttcgtatgctg

SEQ ID NO: 3655896 - DNA, 25 bp, Homo sapien
tcgtatgctgtagttgggtctaaac

SEQ ID NO: 3655897 - DNA, 25 bp, Homo sapien
aaagtttcaccgcatagtgcagata

SEQ ID NO: 3655898 - DNA, 25 bp, Homo sapien
ttggagtctcaaccccactcctttg

SEQ ID NO: 3655899 - DNA, 25 bp, Homo sapien
ctggttttggagtctcaaccccact

SEQ ID NO: 3655900 - DNA, 25 bp, Homo sapien
tatctggttttggagtctcaacccc

SEQ ID NO: 3655901 - DNA, 25 bp, Homo sapien
ccactatctggttttggagtctcaa

SEQ ID NO: 3655902 - DNA, 25 bp, Homo sapien
cattgatggcattgatacattgacg

SEQ ID NO: 3655903 - DNA, 25 bp, Homo sapien
tacattgacgggttctgcaacccat

SEQ ID NO: 3655904 - DNA, 25 bp, Homo sapien
gttctgcaacccataacatatttga

SEQ ID NO: 3655905 - DNA, 25 bp, Homo sapien
tccacgtgcaggctccatgcattga

SEQ ID NO: 3655906 - DNA, 25 bp, Homo sapien
ggagctagctccaacttgcattttc

SEQ ID NO: 3655907 - DNA, 25 bp, Homo sapien
tctttcacaacatgcacaatccttc

SEQ ID NO: 3655908 - DNA, 25 bp, Homo sapien
cacttctcgagtggagccggtgaga

SEQ ID NO: 3655909 - DNA, 25 bp, Homo sapien
tctgattgtttctggagctactagg

SEQ ID NO: 3655910 - DNA, 25 bp, Homo sapien
ttgttccaagtatgtgaataactcc

SEQ ID NO: 3655911 - DNA, 25 bp, Homo sapien
atctggtatccccagaggctctctg

SEQ ID NO: 3655912 - DNA, 25 bp, Homo sapien
gttcttatcctcagttgttccaagt

SEQ ID NO: 3655913 - DNA, 25 bp, Homo sapien
tccagaaactgatctggtatcccca

SEQ ID NO: 3655914 - DNA, 25 bp, Homo sapien
tcagccagaaccggttctccttggc

SEQ ID NO: 3655915 - DNA, 25 bp, Homo sapien
cttcagccagaaccggttctccttg

SEQ ID NO: 3655916 - DNA, 25 bp, Homo sapien
gccagaaccggttctccttggcagg

SEQ ID NO: 3655917 - DNA, 25 bp, Homo sapien
tccttcagccagaaccggttctcct

SEQ ID NO: 3655918 - DNA, 25 bp, Homo sapien
cctcttcagccctatggttccagaa

SEQ ID NO: 3655919 - DNA, 25 bp, Homo sapien
tcagatggccaccgttagcagttta

SEQ ID NO: 3655920 - DNA, 25 bp, Homo sapien
cgttagcagtttagtcctcttcagc

SEQ ID NO: 3655921 - DNA, 25 bp, Homo sapien
gaagctgatgctatgacattctgtg

SEQ ID NO: 3655922 - DNA, 25 bp, Homo sapien
tccaactctggcccactttctgttt

SEQ ID NO: 3655923 - DNA, 25 bp, Homo sapien
ttttccaactctggcccactttctg

SEQ ID NO: 3655924 - DNA, 25 bp, Homo sapien
caactctggcccactttctgttttt

SEQ ID NO: 3655925 - DNA, 25 bp, Homo sapien
atctttttccaactctggcccactt

SEQ ID NO: 3655926 - DNA, 25 bp, Homo sapien
tatacgtaggatgctagttcatgca

SEQ ID NO: 3655927 - DNA, 25 bp, Homo sapien
ctatatgattgagtgggtgatatac

SEQ ID NO: 3655928 - DNA, 25 bp, Homo sapien
taggatgctagttcatgcaccagct

SEQ ID NO: 3655929 - DNA, 25 bp, Homo sapien
agtgggtgatatacgtaggatgcta

SEQ ID NO: 3655930 - DNA, 25 bp, Homo sapien
gttgggcacactggcaagaccagga

SEQ ID NO: 3655931 - DNA, 25 bp, Homo sapien
ggcactcagataatgataaccttgg

SEQ ID NO: 3655932 - DNA, 25 bp, Homo sapien
tcttggcactcagataatgataacc

SEQ ID NO: 3655933 - DNA, 25 bp, Homo sapien
tgaggcattccaatcttttccatgt

SEQ ID NO: 3655934 - DNA, 25 bp, Homo sapien
catgcctgtcaggatagagttcact

SEQ ID NO: 3655935 - DNA, 25 bp, Homo sapien
tatttcaatattagtgagtgactcc

SEQ ID NO: 3655936 - DNA, 25 bp, Homo sapien
gcctgtcaggatagagttcactttc

SEQ ID NO: 3655937 - DNA, 25 bp, Homo sapien
tagtgagtgactccccatgcctgtc

SEQ ID NO: 3655938 - DNA, 25 bp, Homo sapien
gcctggctccttcaatctggtcttc

SEQ ID NO: 3655939 - DNA, 25 bp, Homo sapien
gagaggaatctttccaacatccaaa

SEQ ID NO: 3655940 - DNA, 25 bp, Homo sapien
tctctcgaattttgcctttccatcc

SEQ ID NO: 3655941 - DNA, 25 bp, Homo sapien
ttccaccagggcgagaggaatcttt

SEQ ID NO: 3655942 - DNA, 25 bp, Homo sapien
tctgactggctgctcgccagacaga

SEQ ID NO: 3655943 - DNA, 25 bp, Homo sapien
tcaatattctctgactggctgctcg

SEQ ID NO: 3655944 - DNA, 25 bp, Homo sapien
tctgtttcttcgcttaaggaaacta

SEQ ID NO: 3655945 - DNA, 25 bp, Homo sapien
gctgctcgccagacagatcctctgt

SEQ ID NO: 3655946 - DNA, 25 bp, Homo sapien
caagtgaacgttattgacgtattcg

SEQ ID NO: 3655947 - DNA, 25 bp, Homo sapien
tattgacgtattcgttcttcatgaa

SEQ ID NO: 3655948 - DNA, 25 bp, Homo sapien
ttacaactgtggttccatatgccaa

SEQ ID NO: 3655949 - DNA, 25 bp, Homo sapien
tccatatgccaatagcaagtgaacg

SEQ ID NO: 3655950 - DNA, 25 bp, Homo sapien
cagtgctgggttcccgcgtcctcat

SEQ ID NO: 3655951 - DNA, 25 bp, Homo sapien
gcagtgctgggttcccgcgtcctca

SEQ ID NO: 3655952 - DNA, 25 bp, Homo sapien
agcagtgctgggttcccgcgtcctc

SEQ ID NO: 3655953 - DNA, 25 bp, Homo sapien
cagtgtggacgcagggcggcaagcc

SEQ ID NO: 3655954 - DNA, 25 bp, Homo sapien
gttgccgccagtaactgtcagagag

SEQ ID NO: 3655955 - DNA, 25 bp, Homo sapien
ctaagtgttgccgccagtaactgtc

SEQ ID NO: 3655956 - DNA, 25 bp, Homo sapien
acgcagggcggcaagcctggaagag

SEQ ID NO: 3655957 - DNA, 25 bp, Homo sapien
gaagcagaggttggtatggaaactt

SEQ ID NO: 3655958 - DNA, 25 bp, Homo sapien
ctagaagcagaggttggtatggaaa

SEQ ID NO: 3655959 - DNA, 25 bp, Homo sapien
agaagcagaggttggtatggaaact

SEQ ID NO: 3655960 - DNA, 25 bp, Homo sapien
tagaagcagaggttggtatggaaac

SEQ ID NO: 3655961 - DNA, 25 bp, Homo sapien
gccctgcccgtctccttcacctggc

SEQ ID NO: 3655962 - DNA, 25 bp, Homo sapien
gggatcccatgcttatggccctgcc

SEQ ID NO: 3655963 - DNA, 25 bp, Homo sapien
gggcaccacgggatcccatgcttat

SEQ ID NO: 3655964 - DNA, 25 bp, Homo sapien
cacgggatcccatgcttatggccct

SEQ ID NO: 3655965 - DNA, 25 bp, Homo sapien
gagcgctcttttgaccactccagag

SEQ ID NO: 3655966 - DNA, 25 bp, Homo sapien
tgatgattagggacagagcgctctt

SEQ ID NO: 3655967 - DNA, 25 bp, Homo sapien
caatgggaatgtctgggcttcttgg

SEQ ID NO: 3655968 - DNA, 25 bp, Homo sapien
gaatcccattcgaagacagcaatgg

SEQ ID NO: 3655969 - DNA, 25 bp, Homo sapien
cacacgacatccagcagaggtctga

SEQ ID NO: 3655970 - DNA, 25 bp, Homo sapien
tacgaacacagaccgtagccgtcgt

SEQ ID NO: 3655971 - DNA, 25 bp, Homo sapien
gaggtctgacttcacttccctacga

SEQ ID NO: 3655972 - DNA, 25 bp, Homo sapien
tggtcctaaatgtcacgcgtggcct

SEQ ID NO: 3655973 - DNA, 25 bp, Homo sapien
agcccgcgtggagaacatgcggcgg

SEQ ID NO: 3655974 - DNA, 25 bp, Homo sapien
gctggagcccgcgtggagaacatgc

SEQ ID NO: 3655975 - DNA, 25 bp, Homo sapien
tgagcgcgctggagcccgcgtggag

SEQ ID NO: 3655976 - DNA, 25 bp, Homo sapien
gtggcggtggtgagcgcgctggagc

SEQ ID NO: 3655977 - DNA, 25 bp, Homo sapien
ggtgcaaaacggagctctaacttcc

SEQ ID NO: 3655978 - DNA, 25 bp, Homo sapien
taagacacgggatttgcaccgcagc

SEQ ID NO: 3655979 - DNA, 25 bp, Homo sapien
tctctcctaaagtgcgaagggaaaa

SEQ ID NO: 3655980 - DNA, 25 bp, Homo sapien
gaaatttccggcaatcgggccagct

SEQ ID NO: 3655981 - DNA, 25 bp, Homo sapien
accccagaagcccagtgacatcaga

SEQ ID NO: 3655982 - DNA, 25 bp, Homo sapien
tgactgagacaactaggaccccaga

SEQ ID NO: 3655983 - DNA, 25 bp, Homo sapien
tgcctggctttgactgagacaacta

SEQ ID NO: 3655984 - DNA, 25 bp, Homo sapien
cccagaagcccagtgacatcagaaa

SEQ ID NO: 3655985 - DNA, 25 bp, Homo sapien
tcctttgctgcgtgcagatccttgg

SEQ ID NO: 3655986 - DNA, 25 bp, Homo sapien
agatccttggctttgggcgcgcttc

SEQ ID NO: 3655987 - DNA, 25 bp, Homo sapien
gaagcaaagtatcatcaatcagaga

SEQ ID NO: 3655988 - DNA, 25 bp, Homo sapien
gtgtcccagcttgtgattcttctaa

SEQ ID NO: 3655989 - DNA, 25 bp, Homo sapien
agttcgctaggaccacagggccttc

SEQ ID NO: 3655990 - DNA, 25 bp, Homo sapien
gacaaatggcgctatttctttaagc

SEQ ID NO: 3655991 - DNA, 25 bp, Homo sapien
ccttcggcgagagcgcaggcagctt

SEQ ID NO: 3655992 - DNA, 25 bp, Homo sapien
gaagaagatgctaaggtgggccact

SEQ ID NO: 3655993 - DNA, 25 bp, Homo sapien
tattttaagcacttctagcgacccc

SEQ ID NO: 3655994 - DNA, 25 bp, Homo sapien
tgcacaacggtttgctatcgcgtaa

SEQ ID NO: 3655995 - DNA, 25 bp, Homo sapien
tgcgcaaaaatgtaaaccggccttc

SEQ ID NO: 3655996 - DNA, 25 bp, Homo sapien
gagaaccgaggacatcagaacgtgc

SEQ ID NO: 3655997 - DNA, 25 bp, Homo sapien
caatgctatgtagcatgtgaggaaa

SEQ ID NO: 3655998 - DNA, 25 bp, Homo sapien
tgcaaatggcttataaaggaaaatg

SEQ ID NO: 3655999 - DNA, 25 bp, Homo sapien
taaggcatctcataaggatataagc

SEQ ID NO: 3656000 - DNA, 25 bp, Homo sapien
taggcaaacattatgaagactgaac

SEQ ID NO: 3656001 - DNA, 25 bp, Homo sapien
tttggaagtacggtggaggcctcac

SEQ ID NO: 3656002 - DNA, 25 bp, Homo sapien
gactttctggtgtccacatacaaga

SEQ ID NO: 3656003 - DNA, 25 bp, Homo sapien
tacaagagtcccatgggtgtcagag

SEQ ID NO: 3656004 - DNA, 25 bp, Homo sapien
acagcacttcctgaatgaggcacag

SEQ ID NO: 3656005 - DNA, 25 bp, Homo sapien
atcaatcttattggtggacagtcac

SEQ ID NO: 3656006 - DNA, 25 bp, Homo sapien
aagcagtttcctgctaatagcacag

SEQ ID NO: 3656007 - DNA, 25 bp, Homo sapien
aattctgcgggatcttcaagtcctg

SEQ ID NO: 3656008 - DNA, 25 bp, Homo sapien
tgagctttgcatgtcaatcctttga

SEQ ID NO: 3656009 - DNA, 25 bp, Homo sapien
aatagagccagaacggcaggcccag

SEQ ID NO: 3656010 - DNA, 25 bp, Homo sapien
gctgtccagagcctcgggcttccaa

SEQ ID NO: 3656011 - DNA, 25 bp, Homo sapien
tcctgagcactcttttgctgtccag

SEQ ID NO: 3656012 - DNA, 25 bp, Homo sapien
cctcgggcttccaaatagagccaga

SEQ ID NO: 3656013 - DNA, 25 bp, Homo sapien
tcttatgccttttcttatccccgaa

SEQ ID NO: 3656014 - DNA, 25 bp, Homo sapien
taaaatagatatttgggccaacatt

SEQ ID NO: 3656015 - DNA, 25 bp, Homo sapien
tctcaatttcagctaggtgttcctt

SEQ ID NO: 3656016 - DNA, 25 bp, Homo sapien
atctgtaccaccgtttccttggtct

SEQ ID NO: 3656017 - DNA, 25 bp, Homo sapien
tcaaactcgtactgcagtcttgaat

SEQ ID NO: 3656018 - DNA, 25 bp, Homo sapien
gatgcagtaaacatcaaactcgtac

SEQ ID NO: 3656019 - DNA, 25 bp, Homo sapien
gcttttgcaagactctggcctcaca

SEQ ID NO: 3656020 - DNA, 25 bp, Homo sapien
tacagccggacttggaaactgatgc

SEQ ID NO: 3656021 - DNA, 25 bp, Homo sapien
cctcttgcaagtattcccgtttcct

SEQ ID NO: 3656022 - DNA, 25 bp, Homo sapien
tgatcattggccgatcatctagatg

SEQ ID NO: 3656023 - DNA, 25 bp, Homo sapien
aggtctctctagtctcacctcttgc

SEQ ID NO: 3656024 - DNA, 25 bp, Homo sapien
gatgttcaggtctctctagtctcac

SEQ ID NO: 3656025 - DNA, 25 bp, Homo sapien
cccgtcacttcgaataagtcctggg

SEQ ID NO: 3656026 - DNA, 25 bp, Homo sapien
cttgcttgtctgttgcgtggctttt

SEQ ID NO: 3656027 - DNA, 25 bp, Homo sapien
ggttccacatcttgtctgcgttgat

SEQ ID NO: 3656028 - DNA, 25 bp, Homo sapien
ctttcatgaatatgctggactctcc

SEQ ID NO: 3656029 - DNA, 25 bp, Homo sapien
caaggcgtaaaacattaagggatca

SEQ ID NO: 3656030 - DNA, 25 bp, Homo sapien
gagaatctcatggttagcaccaggt

SEQ ID NO: 3656031 - DNA, 25 bp, Homo sapien
tgcttgaagcaataaacagctgctg

SEQ ID NO: 3656032 - DNA, 25 bp, Homo sapien
cctaatcttcaactgcaaggcgtaa

SEQ ID NO: 3656033 - DNA, 25 bp, Homo sapien
agttggcactccatactccaggata

SEQ ID NO: 3656034 - DNA, 25 bp, Homo sapien
gttggcactccatactccaggataa

SEQ ID NO: 3656035 - DNA, 25 bp, Homo sapien
ggagactgcactggtagatcagtgc

SEQ ID NO: 3656036 - DNA, 25 bp, Homo sapien
gggagactgcactggtagatcagtg

SEQ ID NO: 3656037 - DNA, 25 bp, Homo sapien
atgttcttgatcccattctgcgtcc

SEQ ID NO: 3656038 - DNA, 25 bp, Homo sapien
ttcttgatcccattctgcgtcctcc

SEQ ID NO: 3656039 - DNA, 25 bp, Homo sapien
ctgtagttaccttcagtctaatcat

SEQ ID NO: 3656040 - DNA, 25 bp, Homo sapien
cacaaggcagatggacttctgggag

SEQ ID NO: 3656041 - DNA, 25 bp, Homo sapien
gcagaggtaaggatgcatccaagca

SEQ ID NO: 3656042 - DNA, 25 bp, Homo sapien
caggccgaggtagcattatctgcag

SEQ ID NO: 3656043 - DNA, 25 bp, Homo sapien
agtccatcagtgttgcaggccgagg

SEQ ID NO: 3656044 - DNA, 25 bp, Homo sapien
cccgaatatgcttgactgtgagtcc

SEQ ID NO: 3656045 - DNA, 25 bp, Homo sapien
caaagatgaaagtatgtggtccagc

SEQ ID NO: 3656046 - DNA, 25 bp, Homo sapien
tgtgttagcccctgaagatacaaag

SEQ ID NO: 3656047 - DNA, 25 bp, Homo sapien
tgtgggtcaaggcaggcacctagaa

SEQ ID NO: 3656048 - DNA, 25 bp, Homo sapien
actgtgccggccttgagagtggttt

SEQ ID NO: 3656049 - DNA, 25 bp, Homo sapien
tctgtggcaggatttgacgctcctc

SEQ ID NO: 3656050 - DNA, 25 bp, Homo sapien
tatagacagaattggaggtgctggc

SEQ ID NO: 3656051 - DNA, 25 bp, Homo sapien
tctcctcagggccaagaagccatgt

SEQ ID NO: 3656052 - DNA, 25 bp, Homo sapien
gccttcagctgacccaaaatagtgt

SEQ ID NO: 3656053 - DNA, 25 bp, Homo sapien
taatgtgccaaaaatatgctcgcat

SEQ ID NO: 3656054 - DNA, 25 bp, Homo sapien
tgctaaaccacagaaatacaccggc

SEQ ID NO: 3656055 - DNA, 25 bp, Homo sapien
gaatgtcttttccttccgacttggc

SEQ ID NO: 3656056 - DNA, 25 bp, Homo sapien
gccaaattcaatcagtgtgccaaaa

SEQ ID NO: 3656057 - DNA, 25 bp, Homo sapien
tgtgccaaaaagtcgaggaatctgg

SEQ ID NO: 3656058 - DNA, 25 bp, Homo sapien
ttcaatcagtgtgccaaaaagtcga

SEQ ID NO: 3656059 - DNA, 25 bp, Homo sapien
ctttgccaaattcaatcagtgtgcc

SEQ ID NO: 3656060 - DNA, 25 bp, Homo sapien
aaagtatatgctgctccttttaatg

SEQ ID NO: 3656061 - DNA, 25 bp, Homo sapien
aaataaagtatatgctgctcctttt

SEQ ID NO: 3656062 - DNA, 25 bp, Homo sapien
aagtatatgctgctccttttaatgg

SEQ ID NO: 3656063 - DNA, 25 bp, Homo sapien
tatatgctgctccttttaatggaaa

SEQ ID NO: 3656064 - DNA, 25 bp, Homo sapien
gttcaacagtagctatgtcccgcag

SEQ ID NO: 3656065 - DNA, 25 bp, Homo sapien
cctgtaggtccttggatctgttcaa

SEQ ID NO: 3656066 - DNA, 25 bp, Homo sapien
gaaagacgctttcctgacgacctgt

SEQ ID NO: 3656067 - DNA, 25 bp, Homo sapien
gatccgtttcaaataattgcagcca

SEQ ID NO: 3656068 - DNA, 25 bp, Homo sapien
tcactgtcagctatacggtaggcct

SEQ ID NO: 3656069 - DNA, 25 bp, Homo sapien
cagacaagggaagctgattggccca

SEQ ID NO: 3656070 - DNA, 25 bp, Homo sapien
aattactgagcattcacccgtggcc

SEQ ID NO: 3656071 - DNA, 25 bp, Homo sapien
tatatctgtcgctgttggctcccaa

SEQ ID NO: 3656072 - DNA, 25 bp, Homo sapien
acaggaatggacaagcatgcagccc

SEQ ID NO: 3656073 - DNA, 25 bp, Homo sapien
ggacaagcatgcagccccatgcctg

SEQ ID NO: 3656074 - DNA, 25 bp, Homo sapien
gattacaggaatggacaagcatgca

SEQ ID NO: 3656075 - DNA, 25 bp, Homo sapien
tgggattacaggaatggacaagcat

SEQ ID NO: 3656076 - DNA, 25 bp, Homo sapien
tatttaggtaagttaatggctcagc

SEQ ID NO: 3656077 - DNA, 25 bp, Homo sapien
tattttgtacggaagcatttctaca

SEQ ID NO: 3656078 - DNA, 25 bp, Homo sapien
taaattctgagggacagtagggatg

SEQ ID NO: 3656079 - DNA, 25 bp, Homo sapien
cacctggccttctaataaggttata

SEQ ID NO: 3656080 - DNA, 25 bp, Homo sapien
taagctcccaaatctggaggaaggt

SEQ ID NO: 3656081 - DNA, 25 bp, Homo sapien
gctgctatggagtacgaaaagtgat

SEQ ID NO: 3656082 - DNA, 25 bp, Homo sapien
gaaaatactatcttggtgggcttac

SEQ ID NO: 3656083 - DNA, 25 bp, Homo sapien
aacactgtagctattgaagaatgcc

SEQ ID NO: 3656084 - DNA, 25 bp, Homo sapien
gagacagtgccctatgaagctggga

SEQ ID NO: 3656085 - DNA, 25 bp, Homo sapien
gatctctgaagagtgggcactgccc

SEQ ID NO: 3656086 - DNA, 25 bp, Homo sapien
tcaagggtgtgtcccaatgaccaca

SEQ ID NO: 3656087 - DNA, 25 bp, Homo sapien
ttaatgctcatacctcgggaagagg

SEQ ID NO: 3656088 - DNA, 25 bp, Homo sapien
tggatgtgtttctaccaaataggaa

SEQ ID NO: 3656089 - DNA, 25 bp, Homo sapien
tgtgtaaggccaagattatcctgga

SEQ ID NO: 3656090 - DNA, 25 bp, Homo sapien
gacaggactcaggtctgggcatcca

SEQ ID NO: 3656091 - DNA, 25 bp, Homo sapien
tatcctggaggatttgagcttggag

SEQ ID NO: 3656092 - DNA, 25 bp, Homo sapien
ccgtataatattatgacaggtgata

SEQ ID NO: 3656093 - DNA, 25 bp, Homo sapien
ctgctttgagctgaatccgtataat

SEQ ID NO: 3656094 - DNA, 25 bp, Homo sapien
ggtgatatcctaacatcattccaca

SEQ ID NO: 3656095 - DNA, 25 bp, Homo sapien
tatccctacgtgtttgcagaaaggt

SEQ ID NO: 3656096 - DNA, 25 bp, Homo sapien
taccgctctcagagctgtattgcat

SEQ ID NO: 3656097 - DNA, 25 bp, Homo sapien
cagataccgctctcagagctgtatt

SEQ ID NO: 3656098 - DNA, 25 bp, Homo sapien
tcccagataccgctctcagagctgt

SEQ ID NO: 3656099 - DNA, 25 bp, Homo sapien
gataccgctctcagagctgtattgc

SEQ ID NO: 3656100 - DNA, 25 bp, Homo sapien
tgtaaatttccccagggaaagctga

SEQ ID NO: 3656101 - DNA, 25 bp, Homo sapien
ggtaaaggtatagagtagtcaccac

SEQ ID NO: 3656102 - DNA, 25 bp, Homo sapien
gatggtaaaggtatagagtagtcac

SEQ ID NO: 3656103 - DNA, 25 bp, Homo sapien
tgatggtaaaggtatagagtagtca

SEQ ID NO: 3656104 - DNA, 25 bp, Homo sapien
gttttgatggtaaaggtatagagta

SEQ ID NO: 3656105 - DNA, 25 bp, Homo sapien
gtctcacattaaatcctttatcctc

SEQ ID NO: 3656106 - DNA, 25 bp, Homo sapien
tcacattaaatcctttatcctccat

SEQ ID NO: 3656107 - DNA, 25 bp, Homo sapien
tttccaaaatatcaagtctcacatt

SEQ ID NO: 3656108 - DNA, 25 bp, Homo sapien
ccaaaatatcaagtctcacattaaa

SEQ ID NO: 3656109 - DNA, 25 bp, Homo sapien
cagagaaatcaagcccatctggcct

SEQ ID NO: 3656110 - DNA, 25 bp, Homo sapien
cccgccaaagaaatgaaagtgcaca

SEQ ID NO: 3656111 - DNA, 25 bp, Homo sapien
caaaacaggaatgtccaaggcccgc

SEQ ID NO: 3656112 - DNA, 25 bp, Homo sapien
caaggcccgccaaagaaatgaaagt

SEQ ID NO: 3656113 - DNA, 25 bp, Homo sapien
aggtacctttttatggagctggcca

SEQ ID NO: 3656114 - DNA, 25 bp, Homo sapien
tctggcttcactaagaggtaccttt

SEQ ID NO: 3656115 - DNA, 25 bp, Homo sapien
tcaaggttggaaaagcttaattctc

SEQ ID NO: 3656116 - DNA, 25 bp, Homo sapien
gggatccagtaatctgaaggctttc

SEQ ID NO: 3656117 - DNA, 25 bp, Homo sapien
ccacttcctgtattctcaagctttg

SEQ ID NO: 3656118 - DNA, 25 bp, Homo sapien
cttcccaccagaactcttccacttc

SEQ ID NO: 3656119 - DNA, 25 bp, Homo sapien
tctcaagctttgctaagggctccat

SEQ ID NO: 3656120 - DNA, 25 bp, Homo sapien
ctgtattctcaagctttgctaaggg

SEQ ID NO: 3656121 - DNA, 25 bp, Homo sapien
tcctgccatgaggtagaaataccaa

SEQ ID NO: 3656122 - DNA, 25 bp, Homo sapien
tgcaaggccattatccagctggctg

SEQ ID NO: 3656123 - DNA, 25 bp, Homo sapien
atggaaatatgcaaggccattatcc

SEQ ID NO: 3656124 - DNA, 25 bp, Homo sapien
catttcctgccatgaggtagaaata

SEQ ID NO: 3656125 - DNA, 25 bp, Homo sapien
ttagacttatgggtaggtttgagga

SEQ ID NO: 3656126 - DNA, 25 bp, Homo sapien
gtgaccttgatattttagacttatg

SEQ ID NO: 3656127 - DNA, 25 bp, Homo sapien
tatgggtaggtttgaggaagaagga

SEQ ID NO: 3656128 - DNA, 25 bp, Homo sapien
tgaccttgatattttagacttatgg

SEQ ID NO: 3656129 - DNA, 25 bp, Homo sapien
taatgaagtttttttaaatgagata

SEQ ID NO: 3656130 - DNA, 25 bp, Homo sapien
taatcccacaactatcttacatgga

SEQ ID NO: 3656131 - DNA, 25 bp, Homo sapien
tcatgtttctgtaacttgaggtaaa

SEQ ID NO: 3656132 - DNA, 25 bp, Homo sapien
tggaatgtcgtctggcatcctccag

SEQ ID NO: 3656133 - DNA, 25 bp, Homo sapien
gacattggtgatgagcagtggaatc

SEQ ID NO: 3656134 - DNA, 25 bp, Homo sapien
ttgacaacggcagcaaaaaggccct

SEQ ID NO: 3656135 - DNA, 25 bp, Homo sapien
tgcccagccggtagacgtggtctta

SEQ ID NO: 3656136 - DNA, 25 bp, Homo sapien
caactccgagagttcattgacaacg

SEQ ID NO: 3656137 - DNA, 25 bp, Homo sapien
tttaataaggcagggccaactccga

SEQ ID NO: 3656138 - DNA, 25 bp, Homo sapien
ggcaatcacctgagtaatttaggca

SEQ ID NO: 3656139 - DNA, 25 bp, Homo sapien
tagattgtttgggtagcatatttcc

SEQ ID NO: 3656140 - DNA, 25 bp, Homo sapien
catatgtaataattcaggcaatcac

SEQ ID NO: 3656141 - DNA, 25 bp, Homo sapien
ggtccagaccttaagcgcagagcta

SEQ ID NO: 3656142 - DNA, 25 bp, Homo sapien
gagtgactcttagagggccacagaa

SEQ ID NO: 3656143 - DNA, 25 bp, Homo sapien
tgtaaaggagctttagaacaactgt

SEQ ID NO: 3656144 - DNA, 25 bp, Homo sapien
aatatcttctcaaaatcggagtgac

SEQ ID NO: 3656145 - DNA, 25 bp, Homo sapien
cagatgtcatctcttgtcttataag

SEQ ID NO: 3656146 - DNA, 25 bp, Homo sapien
tctgctgccgctcattgtcaaatat

SEQ ID NO: 3656147 - DNA, 25 bp, Homo sapien
ggtgtagtagagtcttgatatttcc

SEQ ID NO: 3656148 - DNA, 25 bp, Homo sapien
cacccacagtctgagtcggtgtagt

SEQ ID NO: 3656149 - DNA, 25 bp, Homo sapien
acattattttgtcctagctggaaaa

SEQ ID NO: 3656150 - DNA, 25 bp, Homo sapien
ggaaccactacttttggaaagcatg

SEQ ID NO: 3656151 - DNA, 25 bp, Homo sapien
tgccaacatctgctcttgatgaggg

SEQ ID NO: 3656152 - DNA, 25 bp, Homo sapien
ttgccttattgttcagtctgggacc

SEQ ID NO: 3656153 - DNA, 25 bp, Homo sapien
ctgggacctctaagtacattgttga

SEQ ID NO: 3656154 - DNA, 25 bp, Homo sapien
ttgctattgatctaacagttgcgct

SEQ ID NO: 3656155 - DNA, 25 bp, Homo sapien
cagttgcgctgtagaaagttcatat

SEQ ID NO: 3656156 - DNA, 25 bp, Homo sapien
aatagttattaacattgcatgaggc

SEQ ID NO: 3656157 - DNA, 25 bp, Homo sapien
tgcaaccactgtggcaaggcttgag

SEQ ID NO: 3656158 - DNA, 25 bp, Homo sapien
gaacatatgtttgagtcattccagt

SEQ ID NO: 3656159 - DNA, 25 bp, Homo sapien
aacatacatccatgcagaaagtctt

SEQ ID NO: 3656160 - DNA, 25 bp, Homo sapien
caaaatccttattagctcactgggt

SEQ ID NO: 3656161 - DNA, 25 bp, Homo sapien
tgtacattctgatgctggatctttg

SEQ ID NO: 3656162 - DNA, 25 bp, Homo sapien
aaaaagacagccagacattgcgaat

SEQ ID NO: 3656163 - DNA, 25 bp, Homo sapien
aagacagccagacattgcgaatgat

SEQ ID NO: 3656164 - DNA, 25 bp, Homo sapien
cagccagacattgcgaatgatccat

SEQ ID NO: 3656165 - DNA, 25 bp, Homo sapien
atatcatttgctttgggtgggagga

SEQ ID NO: 3656166 - DNA, 25 bp, Homo sapien
cattgtcttagtggtgtctctcaca

SEQ ID NO: 3656167 - DNA, 25 bp, Homo sapien
ggtaggttaagcatatcttcacacg

SEQ ID NO: 3656168 - DNA, 25 bp, Homo sapien
tctagttggtgtatagtagtatctc

SEQ ID NO: 3656169 - DNA, 25 bp, Homo sapien
catggtaggttaagcatatcttcac

SEQ ID NO: 3656170 - DNA, 25 bp, Homo sapien
cacttaatggtggtgagctggctct

SEQ ID NO: 3656171 - DNA, 25 bp, Homo sapien
acagccttgttccattcaccgacgg

SEQ ID NO: 3656172 - DNA, 25 bp, Homo sapien
taatgtagcaaccatgtggtcaccc

SEQ ID NO: 3656173 - DNA, 25 bp, Homo sapien
taaaggtaaaccatgctgatgtcag

SEQ ID NO: 3656174 - DNA, 25 bp, Homo sapien
tcatctctacaaccaaataggccac

SEQ ID NO: 3656175 - DNA, 25 bp, Homo sapien
accaaataggccactttctgcttcc

SEQ ID NO: 3656176 - DNA, 25 bp, Homo sapien
tctactacatcatctctacaaccaa

SEQ ID NO: 3656177 - DNA, 25 bp, Homo sapien
tacaaccaaataggccactttctgc

SEQ ID NO: 3656178 - DNA, 25 bp, Homo sapien
ggttggtcacgcttcacagccaaat

SEQ ID NO: 3656179 - DNA, 25 bp, Homo sapien
gagctgagatatgccgctcctctct

SEQ ID NO: 3656180 - DNA, 25 bp, Homo sapien
tgcttctgagctgagatatgccgct

SEQ ID NO: 3656181 - DNA, 25 bp, Homo sapien
ttcctctttgcagatcgtgggccag

SEQ ID NO: 3656182 - DNA, 25 bp, Homo sapien
cctgaggatctgtggtctcagggct

SEQ ID NO: 3656183 - DNA, 25 bp, Homo sapien
catcctgaggatctgtggtctcagg

SEQ ID NO: 3656184 - DNA, 25 bp, Homo sapien
gcgccccatcctgaggatctgtggt

SEQ ID NO: 3656185 - DNA, 25 bp, Homo sapien
cagcgccccatcctgaggatctgtg

SEQ ID NO: 3656186 - DNA, 25 bp, Homo sapien
gtgcttcccacttccatatgtttgc

SEQ ID NO: 3656187 - DNA, 25 bp, Homo sapien
ttcccacttccatatgtttgctcaa

SEQ ID NO: 3656188 - DNA, 25 bp, Homo sapien
tatcccaactgtaataaacagtttc

SEQ ID NO: 3656189 - DNA, 25 bp, Homo sapien
cagtttccttcacatgctctgtgct

SEQ ID NO: 3656190 - DNA, 25 bp, Homo sapien
ttccgtaaggactgtgtcaaacacc

SEQ ID NO: 3656191 - DNA, 25 bp, Homo sapien
catcttagtctcgtggcatttacca

SEQ ID NO: 3656192 - DNA, 25 bp, Homo sapien
agcttgtcactcttttaacgcgcca

SEQ ID NO: 3656193 - DNA, 25 bp, Homo sapien
caagtcattgcatgtgaagccgtaa

SEQ ID NO: 3656194 - DNA, 25 bp, Homo sapien
tctgtctgagtggcttctaaactgc

SEQ ID NO: 3656195 - DNA, 25 bp, Homo sapien
ttctgtctgagtggcttctaaactg

SEQ ID NO: 3656196 - DNA, 25 bp, Homo sapien
cgccccaattgtgcgtttgcccatt

SEQ ID NO: 3656197 - DNA, 25 bp, Homo sapien
tgcgtttgcccattgtcttggtttc

SEQ ID NO: 3656198 - DNA, 25 bp, Homo sapien
aattgtgcgtttgcccattgtcttg

SEQ ID NO: 3656199 - DNA, 25 bp, Homo sapien
ccccaccgccccaattgtgcgtttg

SEQ ID NO: 3656200 - DNA, 25 bp, Homo sapien
ttactgaatacacaagacttggtgc

SEQ ID NO: 3656201 - DNA, 25 bp, Homo sapien
tgagtgattactgaatacacaagac

SEQ ID NO: 3656202 - DNA, 25 bp, Homo sapien
ctgtgacttgaaacaggtcctcctg

SEQ ID NO: 3656203 - DNA, 25 bp, Homo sapien
gaattccttctcatgatttgagtga

SEQ ID NO: 3656204 - DNA, 25 bp, Homo sapien
ctttttgtacatagtataatcagga

SEQ ID NO: 3656205 - DNA, 25 bp, Homo sapien
tctgtgctctaacgctcatcagagt

SEQ ID NO: 3656206 - DNA, 25 bp, Homo sapien
taccctttttgtacatagtataatc

SEQ ID NO: 3656207 - DNA, 25 bp, Homo sapien
tctaacgctcatcagagtacccttt

SEQ ID NO: 3656208 - DNA, 25 bp, Homo sapien
gatgaccttaatcaggtcattaagc

SEQ ID NO: 3656209 - DNA, 25 bp, Homo sapien
ttgatgaccttaatcaggtcattaa

SEQ ID NO: 3656210 - DNA, 25 bp, Homo sapien
tgatgaccttaatcaggtcattaag

SEQ ID NO: 3656211 - DNA, 25 bp, Homo sapien
tgaccttaatcaggtcattaagcat

SEQ ID NO: 3656212 - DNA, 25 bp, Homo sapien
gggatttggtggagatttgggagag

SEQ ID NO: 3656213 - DNA, 25 bp, Homo sapien
cactgccagttcttaggggatttgg

SEQ ID NO: 3656214 - DNA, 25 bp, Homo sapien
ggggatttggtggagatttgggaga

SEQ ID NO: 3656215 - DNA, 25 bp, Homo sapien
cagaacactgccagttcttagggga

SEQ ID NO: 3656216 - DNA, 25 bp, Homo sapien
tcctgccggcctctaggcgcctcag

SEQ ID NO: 3656217 - DNA, 25 bp, Homo sapien
agcccagggctaggctcgggcggtg

SEQ ID NO: 3656218 - DNA, 25 bp, Homo sapien
cgagcggtgccgcggtcctccggag

SEQ ID NO: 3656219 - DNA, 25 bp, Homo sapien
agctgctccctgcgccggcgaccgg

SEQ ID NO: 3656220 - DNA, 25 bp, Homo sapien
cagagcaggtaatggggcgcctctg

SEQ ID NO: 3656221 - DNA, 25 bp, Homo sapien
agagcaggtaatggggcgcctctgg

SEQ ID NO: 3656222 - DNA, 25 bp, Homo sapien
cagcccagagcaggtaatggggcgc

SEQ ID NO: 3656223 - DNA, 25 bp, Homo sapien
gctcccgattgtcctctgcggcggt

SEQ ID NO: 3656224 - DNA, 25 bp, Homo sapien
cccgattgtcctctgcggcggtggc

SEQ ID NO: 3656225 - DNA, 25 bp, Homo sapien
gctggctcccgattgtcctctgcgg

SEQ ID NO: 3656226 - DNA, 25 bp, Homo sapien
tgggctcgtgcgttctgcgcccgcc

SEQ ID NO: 3656227 - DNA, 25 bp, Homo sapien
tcctcagggaggttgctcgtccatg

SEQ ID NO: 3656228 - DNA, 25 bp, Homo sapien
gcttaagaaaactcgcatctggcga

SEQ ID NO: 3656229 - DNA, 25 bp, Homo sapien
tggcgaatgaacctgcgtatccggg

SEQ ID NO: 3656230 - DNA, 25 bp, Homo sapien
gaatcgcagcggcttaagaaaactc

SEQ ID NO: 3656231 - DNA, 25 bp, Homo sapien
gcataacaatatccctctcaatctt

SEQ ID NO: 3656232 - DNA, 25 bp, Homo sapien
ttttaaacctaggagacttgtctga

SEQ ID NO: 3656233 - DNA, 25 bp, Homo sapien
aacaccttatgtcttttttcgtgca

SEQ ID NO: 3656234 - DNA, 25 bp, Homo sapien
caatcttatgcagcatttttaaacc

SEQ ID NO: 3656235 - DNA, 25 bp, Homo sapien
tgcacttttaccaaccatgggcgta

SEQ ID NO: 3656236 - DNA, 25 bp, Homo sapien
gacaaatctcaagtggagaggctga

SEQ ID NO: 3656237 - DNA, 25 bp, Homo sapien
gagagaacactgaagaccagtctgc

SEQ ID NO: 3656238 - DNA, 25 bp, Homo sapien
gatttgtgtcccctggtatttggag

SEQ ID NO: 3656239 - DNA, 25 bp, Homo sapien
ccccaggctgaagtaatgagctttt

SEQ ID NO: 3656240 - DNA, 25 bp, Homo sapien
ccaggctgaagtaatgagcttttct

SEQ ID NO: 3656241 - DNA, 25 bp, Homo sapien
aatatggaacagagagactcaaagc

SEQ ID NO: 3656242 - DNA, 25 bp, Homo sapien
tctctttgacaaatttgaaatatgg

SEQ ID NO: 3656243 - DNA, 25 bp, Homo sapien
atacatgcgtgggtacagcagcagg

SEQ ID NO: 3656244 - DNA, 25 bp, Homo sapien
tacatgcgtgggtacagcagcagga

SEQ ID NO: 3656245 - DNA, 25 bp, Homo sapien
ctttacatagagacattcagtgcgt

SEQ ID NO: 3656246 - DNA, 25 bp, Homo sapien
tttacatagagacattcagtgcgtg

SEQ ID NO: 3656247 - DNA, 25 bp, Homo sapien
ttacatagagacattcagtgcgtga

SEQ ID NO: 3656248 - DNA, 25 bp, Homo sapien
tgcatcccaaaaggaatgctctcct

SEQ ID NO: 3656249 - DNA, 25 bp, Homo sapien
cagggtaccttctcggcccatttct

SEQ ID NO: 3656250 - DNA, 25 bp, Homo sapien
aattcctgttgatctctcacacgta

SEQ ID NO: 3656251 - DNA, 25 bp, Homo sapien
tctcacacgtatcttctccagagtc

SEQ ID NO: 3656252 - DNA, 25 bp, Homo sapien
gagtgaggaactgcctatctccccg

SEQ ID NO: 3656253 - DNA, 25 bp, Homo sapien
caccgcgcattgtcagagtgggcat

SEQ ID NO: 3656254 - DNA, 25 bp, Homo sapien
actgttacagttaagaagatgaacc

SEQ ID NO: 3656255 - DNA, 25 bp, Homo sapien
gagcatgtcctgtgccatgcatagc

SEQ ID NO: 3656256 - DNA, 25 bp, Homo sapien
cttatgtcccatcagcgggagggcc

SEQ ID NO: 3656257 - DNA, 25 bp, Homo sapien
tatttgtgtgacatggcacagtcct

SEQ ID NO: 3656258 - DNA, 25 bp, Homo sapien
gatgtaagtcgctctcaattgaagg

SEQ ID NO: 3656259 - DNA, 25 bp, Homo sapien
tatcctgctgaaaggaggaatggca

SEQ ID NO: 3656260 - DNA, 25 bp, Homo sapien
aaggtgaagaacgagtggacccagt

SEQ ID NO: 3656261 - DNA, 25 bp, Homo sapien
cacaatgatgtgaaacaacaggtca

SEQ ID NO: 3656262 - DNA, 25 bp, Homo sapien
ggttcgaggcattgtccaggtagat

SEQ ID NO: 3656263 - DNA, 25 bp, Homo sapien
gtcagagttcccgagcccagggaga

SEQ ID NO: 3656264 - DNA, 25 bp, Homo sapien
gggttggcaagcctgtaggagagac

SEQ ID NO: 3656265 - DNA, 25 bp, Homo sapien
cattccagggggttggcaagcctgt

SEQ ID NO: 3656266 - DNA, 25 bp, Homo sapien
tggcaagcctgtaggagagacccac

SEQ ID NO: 3656267 - DNA, 25 bp, Homo sapien
gttggcaagcctgtaggagagaccc

SEQ ID NO: 3656268 - DNA, 25 bp, Homo sapien
cacttcatgtctaattgacaaaatc

SEQ ID NO: 3656269 - DNA, 25 bp, Homo sapien
atgtctaattgacaaaatcttgcca

SEQ ID NO: 3656270 - DNA, 25 bp, Homo sapien
ttcacttcatgtctaattgacaaaa

SEQ ID NO: 3656271 - DNA, 25 bp, Homo sapien
ctaattgacaaaatcttgccactga

SEQ ID NO: 3656272 - DNA, 25 bp, Homo sapien
tacctaagtggatttctgctgcata

SEQ ID NO: 3656273 - DNA, 25 bp, Homo sapien
agtggatttctgctgcataacttaa

SEQ ID NO: 3656274 - DNA, 25 bp, Homo sapien
gatttctgctgcataacttaaggac

SEQ ID NO: 3656275 - DNA, 25 bp, Homo sapien
ctaagtggatttctgctgcataact

SEQ ID NO: 3656276 - DNA, 25 bp, Homo sapien
ctttcagatttaggatgtagatgcc

SEQ ID NO: 3656277 - DNA, 25 bp, Homo sapien
agatttaggatgtagatgccatcac

SEQ ID NO: 3656278 - DNA, 25 bp, Homo sapien
tcagatttaggatgtagatgccatc

SEQ ID NO: 3656279 - DNA, 25 bp, Homo sapien
tttcagatttaggatgtagatgcca

SEQ ID NO: 3656280 - DNA, 25 bp, Homo sapien
ctgcagcagaagcttctcccaggtc

SEQ ID NO: 3656281 - DNA, 25 bp, Homo sapien
ttttcagtggcaacaatggcgtgag

SEQ ID NO: 3656282 - DNA, 25 bp, Homo sapien
gttttcagtggcaacaatggcgtga

SEQ ID NO: 3656283 - DNA, 25 bp, Homo sapien
gcaattgctctgactccagtggcag

SEQ ID NO: 3656284 - DNA, 25 bp, Homo sapien
agcaattgctctgactccagtggca

SEQ ID NO: 3656285 - DNA, 25 bp, Homo sapien
cagcaattgctctgactccagtggc

SEQ ID NO: 3656286 - DNA, 25 bp, Homo sapien
atgttcacacagcgcagaggagaag

SEQ ID NO: 3656287 - DNA, 25 bp, Homo sapien
ttcacacagcgcagaggagaagctg

SEQ ID NO: 3656288 - DNA, 25 bp, Homo sapien
tgcagaacttcccggggcagcaact

SEQ ID NO: 3656289 - DNA, 25 bp, Homo sapien
acttcccggggcagcaactgcatca

SEQ ID NO: 3656290 - DNA, 25 bp, Homo sapien
cccgcacgccgtcagaccagtctgc

SEQ ID NO: 3656291 - DNA, 25 bp, Homo sapien
cagagggcacccgcacgccgtcaga

SEQ ID NO: 3656292 - DNA, 25 bp, Homo sapien
ggcacagagggcacccgcacgccgt

SEQ ID NO: 3656293 - DNA, 25 bp, Homo sapien
gggcacccgcacgccgtcagaccag

SEQ ID NO: 3656294 - DNA, 25 bp, Homo sapien
taagaccattcagtggttgccccta

SEQ ID NO: 3656295 - DNA, 25 bp, Homo sapien
aagaccattcagtggttgcccctac

SEQ ID NO: 3656296 - DNA, 25 bp, Homo sapien
ttaagaccattcagtggttgcccct

SEQ ID NO: 3656297 - DNA, 25 bp, Homo sapien
tcaagttataatgagagagaagacc

SEQ ID NO: 3656298 - DNA, 25 bp, Homo sapien
ttcttcaagttataatgagagagaa

SEQ ID NO: 3656299 - DNA, 25 bp, Homo sapien
ttcaagttataatgagagagaagac

SEQ ID NO: 3656300 - DNA, 25 bp, Homo sapien
gggttcttcaagttataatgagaga

SEQ ID NO: 3656301 - DNA, 25 bp, Homo sapien
gatcactggactgcaaaggtctctt

SEQ ID NO: 3656302 - DNA, 25 bp, Homo sapien
gatccctcaaggtctggcactgtgt

SEQ ID NO: 3656303 - DNA, 25 bp, Homo sapien
tacttttgtgcccagtgcttgggaa

SEQ ID NO: 3656304 - DNA, 25 bp, Homo sapien
gcctggcacatggtttagtagaaca

SEQ ID NO: 3656305 - DNA, 25 bp, Homo sapien
caattaactcgaaggcagatgaaaa

SEQ ID NO: 3656306 - DNA, 25 bp, Homo sapien
tgtgctggtcttaacacctgagatt

SEQ ID NO: 3656307 - DNA, 25 bp, Homo sapien
gaaatcacaattaactcgaaggcag

SEQ ID NO: 3656308 - DNA, 25 bp, Homo sapien
aaccactgtgctggtcttaacacct

SEQ ID NO: 3656309 - DNA, 25 bp, Homo sapien
cttcagaacctcccatacagcaggg

SEQ ID NO: 3656310 - DNA, 25 bp, Homo sapien
ctggtcccctgaaggagaggtactt

SEQ ID NO: 3656311 - DNA, 25 bp, Homo sapien
ccccagataggtgaggagattggag

SEQ ID NO: 3656312 - DNA, 25 bp, Homo sapien
ttgtagttccacactccaaactggc

SEQ ID NO: 3656313 - DNA, 25 bp, Homo sapien
caggttgaggaattaactcccatca

SEQ ID NO: 3656314 - DNA, 25 bp, Homo sapien
tgcaggttgaggaattaactcccat

SEQ ID NO: 3656315 - DNA, 25 bp, Homo sapien
gcaggttgaggaattaactcccatc

SEQ ID NO: 3656316 - DNA, 25 bp, Homo sapien
aggttgaggaattaactcccatcac

SEQ ID NO: 3656317 - DNA, 25 bp, Homo sapien
taagagtttccggaagagcagcttc

SEQ ID NO: 3656318 - DNA, 25 bp, Homo sapien
catttgacagtagaccggtagaccg

SEQ ID NO: 3656319 - DNA, 25 bp, Homo sapien
ggtagaccgtcacacacatgctaaa

SEQ ID NO: 3656320 - DNA, 25 bp, Homo sapien
gcaaactgcaagagcctaggctaag

SEQ ID NO: 3656321 - DNA, 25 bp, Homo sapien
aaactgggagctttgacacaccctg

SEQ ID NO: 3656322 - DNA, 25 bp, Homo sapien
ccccaagcagatctatgatttctag

SEQ ID NO: 3656323 - DNA, 25 bp, Homo sapien
gagggacgggacctcttctcttaga

SEQ ID NO: 3656324 - DNA, 25 bp, Homo sapien
caccctggactttacataagcacag

SEQ ID NO: 3656325 - DNA, 25 bp, Homo sapien
aaatgcttggctgtacttccttgac

SEQ ID NO: 3656326 - DNA, 25 bp, Homo sapien
gtgctttatagccacaccgctgacc

SEQ ID NO: 3656327 - DNA, 25 bp, Homo sapien
cccactgtgcggctgtgctttatag

SEQ ID NO: 3656328 - DNA, 25 bp, Homo sapien
tggtgtgcagggaattgtatccgac

SEQ ID NO: 3656329 - DNA, 25 bp, Homo sapien
tccttgttggactgtgcgtgtctca

SEQ ID NO: 3656330 - DNA, 25 bp, Homo sapien
gtgaattcctgtgccacttagtgtg

SEQ ID NO: 3656331 - DNA, 25 bp, Homo sapien
ccaaccatttcatttgcacctgaaa

SEQ ID NO: 3656332 - DNA, 25 bp, Homo sapien
tgctgttagctactctcagaggcca

SEQ ID NO: 3656333 - DNA, 25 bp, Homo sapien
ttctcttctccatcttgtttgccca

SEQ ID NO: 3656334 - DNA, 25 bp, Homo sapien
tctcttctccatcttgtttgcccat

SEQ ID NO: 3656335 - DNA, 25 bp, Homo sapien
ttgtctctcaaaacttctttctctt

SEQ ID NO: 3656336 - DNA, 25 bp, Homo sapien
tctctcaaaacttctttctcttctc

SEQ ID NO: 3656337 - DNA, 25 bp, Homo sapien
gatctgaatcgtaatataatatgtc

SEQ ID NO: 3656338 - DNA, 25 bp, Homo sapien
gggagcaggaagttcttatttaatg

SEQ ID NO: 3656339 - DNA, 25 bp, Homo sapien
tccatgtaacttaaaatacgatctg

SEQ ID NO: 3656340 - DNA, 25 bp, Homo sapien
aaaccattaggaactattatccatg

SEQ ID NO: 3656341 - DNA, 25 bp, Homo sapien
cttaaaaagactgagcaagacaaaa

SEQ ID NO: 3656342 - DNA, 25 bp, Homo sapien
caggaataaagtggggacattactg

SEQ ID NO: 3656343 - DNA, 25 bp, Homo sapien
gattgtaaggaaatactattaacaa

SEQ ID NO: 3656344 - DNA, 25 bp, Homo sapien
ggacattactgccaatcttacagaa

SEQ ID NO: 3656345 - DNA, 25 bp, Homo sapien
cacacagcaacgaatacagacttta

SEQ ID NO: 3656346 - DNA, 25 bp, Homo sapien
gcacagacttcggatgtacaaaaca

SEQ ID NO: 3656347 - DNA, 25 bp, Homo sapien
tggatcactagctgcaaattaagct

SEQ ID NO: 3656348 - DNA, 25 bp, Homo sapien
taatagaaactacccctgaagaagc

SEQ ID NO: 3656349 - DNA, 25 bp, Homo sapien
aagtttattagcctctgccatcggg

SEQ ID NO: 3656350 - DNA, 25 bp, Homo sapien
catcaggcttgctcaaataggaagt

SEQ ID NO: 3656351 - DNA, 25 bp, Homo sapien
gaaggtgtgccccaacacttacaca

SEQ ID NO: 3656352 - DNA, 25 bp, Homo sapien
cacatgtacatgcagggtgagcaaa

SEQ ID NO: 3656353 - DNA, 25 bp, Homo sapien
gagatgtgcagaccaataaaaagcc

SEQ ID NO: 3656354 - DNA, 25 bp, Homo sapien
gctagacctaatagaatggagagat

SEQ ID NO: 3656355 - DNA, 25 bp, Homo sapien
caagaagttacgttattgctagacc

SEQ ID NO: 3656356 - DNA, 25 bp, Homo sapien
tccatctgccagatgtagagcttat

SEQ ID NO: 3656357 - DNA, 25 bp, Homo sapien
tctgtttcttcctcgctgaagtcca

SEQ ID NO: 3656358 - DNA, 25 bp, Homo sapien
ctctgtttcttcctcgctgaagtcc

SEQ ID NO: 3656359 - DNA, 25 bp, Homo sapien
ctgtttcttcctcgctgaagtccat

SEQ ID NO: 3656360 - DNA, 25 bp, Homo sapien
cgcggactaaataagggaggctgca

SEQ ID NO: 3656361 - DNA, 25 bp, Homo sapien
cgtgcgcccagaggcgcagcgggag

SEQ ID NO: 3656362 - DNA, 25 bp, Homo sapien
acgggcggacgcttcccgaagagct

SEQ ID NO: 3656363 - DNA, 25 bp, Homo sapien
ccgctgctggaagccggaaccgagc

SEQ ID NO: 3656364 - DNA, 25 bp, Homo sapien
cgctcgggcgcctgctcgaggctga

SEQ ID NO: 3656365 - DNA, 25 bp, Homo sapien
tcgggcgcctgctcgaggctgatct

SEQ ID NO: 3656366 - DNA, 25 bp, Homo sapien
gggcgcctgctcgaggctgatctca

SEQ ID NO: 3656367 - DNA, 25 bp, Homo sapien
gcgcctgctcgaggctgatctcagg

SEQ ID NO: 3656368 - DNA, 25 bp, Homo sapien
tcactcgcgagtcggccaccgccgt

SEQ ID NO: 3656369 - DNA, 25 bp, Homo sapien
cttttcctcactcgcgagtcggcca

SEQ ID NO: 3656370 - DNA, 25 bp, Homo sapien
ctggatcttctcttcgcgaccagtc

SEQ ID NO: 3656371 - DNA, 25 bp, Homo sapien
ggatcttctcttcgcgaccagtctg

SEQ ID NO: 3656372 - DNA, 25 bp, Homo sapien
tgccgccttcgggaaacctcggcag

SEQ ID NO: 3656373 - DNA, 25 bp, Homo sapien
caccaactacatccgggcaactcgg

SEQ ID NO: 3656374 - DNA, 25 bp, Homo sapien
aactcggacgctgccgccttcggga

SEQ ID NO: 3656375 - DNA, 25 bp, Homo sapien
gcaccgcgcgggtccggaacaccgc

SEQ ID NO: 3656376 - DNA, 25 bp, Homo sapien
ggcagcggcgccaactacacggcgg

SEQ ID NO: 3656377 - DNA, 25 bp, Homo sapien
gacaccacgctcactctcagccggg

SEQ ID NO: 3656378 - DNA, 25 bp, Homo sapien
gagcggccgcgaaaggcgggcgggc

SEQ ID NO: 3656379 - DNA, 25 bp, Homo sapien
ctcggcgactctcatcagctcccag

SEQ ID NO: 3656380 - DNA, 25 bp, Homo sapien
tctgctgtttcctcgcatacattac

SEQ ID NO: 3656381 - DNA, 25 bp, Homo sapien
ctctgctgtttcctcgcatacatta

SEQ ID NO: 3656382 - DNA, 25 bp, Homo sapien
cgcacacggcacaaacccggagcct

SEQ ID NO: 3656383 - DNA, 25 bp, Homo sapien
cggagcctccggaagggccggagag

SEQ ID NO: 3656384 - DNA, 25 bp, Homo sapien
agagggcgaaatgccgcgaagccgg

SEQ ID NO: 3656385 - DNA, 25 bp, Homo sapien
aagggccggagagggcgaaatgccg

SEQ ID NO: 3656386 - DNA, 25 bp, Homo sapien
gagaaggcagcgacataagacacgg

SEQ ID NO: 3656387 - DNA, 25 bp, Homo sapien
aggcagcgacataagacacggcgcg

SEQ ID NO: 3656388 - DNA, 25 bp, Homo sapien
ggaagagaaggcagcgacataagac

SEQ ID NO: 3656389 - DNA, 25 bp, Homo sapien
cagcgacataagacacggcgcgggt

SEQ ID NO: 3656390 - DNA, 25 bp, Homo sapien
tggtaaggctgcgagtcccccctcc

SEQ ID NO: 3656391 - DNA, 25 bp, Homo sapien
ctggtaaggctgcgagtcccccctc

SEQ ID NO: 3656392 - DNA, 25 bp, Homo sapien
ggcctgcgctcgagtagcagtccct

SEQ ID NO: 3656393 - DNA, 25 bp, Homo sapien
agatgtgttgcaccgaagggcctgt

SEQ ID NO: 3656394 - DNA, 25 bp, Homo sapien
tatcgacttctgaggcctgcgctcg

SEQ ID NO: 3656395 - DNA, 25 bp, Homo sapien
cgaagggcctgtatcgacttctgag

SEQ ID NO: 3656396 - DNA, 25 bp, Homo sapien
attttaaggggatccgcggtgctag

SEQ ID NO: 3656397 - DNA, 25 bp, Homo sapien
taatcaaataatcgagtcaggtctt

SEQ ID NO: 3656398 - DNA, 25 bp, Homo sapien
tcgagtcaggtctttctggctgcaa

SEQ ID NO: 3656399 - DNA, 25 bp, Homo sapien
taaatcagcgaactccctccagtca

SEQ ID NO: 3656400 - DNA, 25 bp, Homo sapien
catcgattccttcactcgcaaataa

SEQ ID NO: 3656401 - DNA, 25 bp, Homo sapien
tagctatttacccaagttcttcact

SEQ ID NO: 3656402 - DNA, 25 bp, Homo sapien
caaattcagctgtataacacaacca

SEQ ID NO: 3656403 - DNA, 25 bp, Homo sapien
tctagtcctttaagatgtagaaagt

SEQ ID NO: 3656404 - DNA, 25 bp, Homo sapien
cctacatcagaatgattatccaagt

SEQ ID NO: 3656405 - DNA, 25 bp, Homo sapien
taagactcctgataacaaatcacac

SEQ ID NO: 3656406 - DNA, 25 bp, Homo sapien
tgcttaagcgttacaataagactcc

SEQ ID NO: 3656407 - DNA, 25 bp, Homo sapien
agacaaaaaacctaatgcttaagcg

SEQ ID NO: 3656408 - DNA, 25 bp, Homo sapien
cattatcttataaaccaccttgcac

SEQ ID NO: 3656409 - DNA, 25 bp, Homo sapien
catgtctgtgatcaccgctactggg

SEQ ID NO: 3656410 - DNA, 25 bp, Homo sapien
cttttcatgtctgtgatcaccgcta

SEQ ID NO: 3656411 - DNA, 25 bp, Homo sapien
gactcttcgatgaatacttaagtgc

SEQ ID NO: 3656412 - DNA, 25 bp, Homo sapien
gctactggggtgactcttcgatgaa

SEQ ID NO: 3656413 - DNA, 25 bp, Homo sapien
acatttttggccttactgtgacctg

SEQ ID NO: 3656414 - DNA, 25 bp, Homo sapien
tatttggtggtgaaggatctccggc

SEQ ID NO: 3656415 - DNA, 25 bp, Homo sapien
cagatctccgcaacattttatttgg

SEQ ID NO: 3656416 - DNA, 25 bp, Homo sapien
cactgtatttgttttcaggactatc

SEQ ID NO: 3656417 - DNA, 25 bp, Homo sapien
tttttcccatccttaagaaagcatg

SEQ ID NO: 3656418 - DNA, 25 bp, Homo sapien
gcaacaataaggatctcaaactgaa

SEQ ID NO: 3656419 - DNA, 25 bp, Homo sapien
tcaagctagaaatactactgccgcc

SEQ ID NO: 3656420 - DNA, 25 bp, Homo sapien
tactgccgccttttatatagagcta

SEQ ID NO: 3656421 - DNA, 25 bp, Homo sapien
tgtaagaagatgaggtgccatatcc

SEQ ID NO: 3656422 - DNA, 25 bp, Homo sapien
gagagtaccatctcaggctttacat

SEQ ID NO: 3656423 - DNA, 25 bp, Homo sapien
tattcaatcccagtgcaatcttctg

SEQ ID NO: 3656424 - DNA, 25 bp, Homo sapien
taatactatggaaaacttacccaca

SEQ ID NO: 3656425 - DNA, 25 bp, Homo sapien
gactccagaagacgacaatcagcta

SEQ ID NO: 3656426 - DNA, 25 bp, Homo sapien
tcacagtattagctggaagactcca

SEQ ID NO: 3656427 - DNA, 25 bp, Homo sapien
gatgtactctcaattccagaatgga

SEQ ID NO: 3656428 - DNA, 25 bp, Homo sapien
gaatagcttcaaggccaggatcaca

SEQ ID NO: 3656429 - DNA, 25 bp, Homo sapien
catacattacttctgaacgagcatt

SEQ ID NO: 3656430 - DNA, 25 bp, Homo sapien
tatacacgctatgttacagcaagtc

SEQ ID NO: 3656431 - DNA, 25 bp, Homo sapien
gcttagataatccaactcacttgca

SEQ ID NO: 3656432 - DNA, 25 bp, Homo sapien
caagttacaaatcatagcatatagg

SEQ ID NO: 3656433 - DNA, 25 bp, Homo sapien
tttttccaaagatatagctaaatga

SEQ ID NO: 3656434 - DNA, 25 bp, Homo sapien
tatttgaaagttagggagatgaaaa

SEQ ID NO: 3656435 - DNA, 25 bp, Homo sapien
ccaaagatatagctaaatgacaaaa

SEQ ID NO: 3656436 - DNA, 25 bp, Homo sapien
ccgggcatgatggcgtatgtttgta

SEQ ID NO: 3656437 - DNA, 25 bp, Homo sapien
tggacggtgctgctatagaaccttg

SEQ ID NO: 3656438 - DNA, 25 bp, Homo sapien
ggacccaccccagaattactgacta

SEQ ID NO: 3656439 - DNA, 25 bp, Homo sapien
tgactatagtatctccaggtgctta

SEQ ID NO: 3656440 - DNA, 25 bp, Homo sapien
gaagtgtaggtatcacccgagatct

SEQ ID NO: 3656441 - DNA, 25 bp, Homo sapien
tctacaatgagcgtgtactaacaaa

SEQ ID NO: 3656442 - DNA, 25 bp, Homo sapien
caagaagcactatatagctcaagga

SEQ ID NO: 3656443 - DNA, 25 bp, Homo sapien
gctcaaggacccattaactccaatc

SEQ ID NO: 3656444 - DNA, 25 bp, Homo sapien
gcatttcagaagtcaagcatacaaa

SEQ ID NO: 3656445 - DNA, 25 bp, Homo sapien
tggtctctcccgaacttaggtgatc

SEQ ID NO: 3656446 - DNA, 25 bp, Homo sapien
taggctccatcaactattgctttga

SEQ ID NO: 3656447 - DNA, 25 bp, Homo sapien
gggagtcaaggaagctgtaacttta

SEQ ID NO: 3656448 - DNA, 25 bp, Homo sapien
tctcaggggagcctaataagcagcc

SEQ ID NO: 3656449 - DNA, 25 bp, Homo sapien
gctataaaataatcccatctgccag

SEQ ID NO: 3656450 - DNA, 25 bp, Homo sapien
ggcaaaagagaagtagaatagaacc

SEQ ID NO: 3656451 - DNA, 25 bp, Homo sapien
aagccagaaacctagtctgagatgc

SEQ ID NO: 3656452 - DNA, 25 bp, Homo sapien
tatatttatacaagccagaaaccta

SEQ ID NO: 3656453 - DNA, 25 bp, Homo sapien
ttaaacttcaagttatatttataca

SEQ ID NO: 3656454 - DNA, 25 bp, Homo sapien
ccagaaacctagtctgagatgctaa

SEQ ID NO: 3656455 - DNA, 25 bp, Homo sapien
gattatactaatgcaacggacacta

SEQ ID NO: 3656456 - DNA, 25 bp, Homo sapien
tacaggatatctggaaaacagacca

SEQ ID NO: 3656457 - DNA, 25 bp, Homo sapien
tagccattctcaaggatgcaggaaa

SEQ ID NO: 3656458 - DNA, 25 bp, Homo sapien
acactagtctaaccagccgggctac

SEQ ID NO: 3656459 - DNA, 25 bp, Homo sapien
aatcatgttgtaaaataccagatca

SEQ ID NO: 3656460 - DNA, 25 bp, Homo sapien
atcatgttgtaaaataccagatcaa

SEQ ID NO: 3656461 - DNA, 25 bp, Homo sapien
cactagaacattaagcagagctggg

SEQ ID NO: 3656462 - DNA, 25 bp, Homo sapien
aattgtgggacattcaaaccagcgg

SEQ ID NO: 3656463 - DNA, 25 bp, Homo sapien
tgctaacagccttaacctggaaacg

SEQ ID NO: 3656464 - DNA, 25 bp, Homo sapien
tccttcaatggcgtatggttaaaca

SEQ ID NO: 3656465 - DNA, 25 bp, Homo sapien
tcgtctaaggcagagtaagtagcct

SEQ ID NO: 3656466 - DNA, 25 bp, Homo sapien
taaacatctcgaaaatacagagtgg

SEQ ID NO: 3656467 - DNA, 25 bp, Homo sapien
cagagtggcagcaaaattacctgta

SEQ ID NO: 3656468 - DNA, 25 bp, Homo sapien
gattcaagtctcctacgtcgtctaa

SEQ ID NO: 3656469 - DNA, 25 bp, Homo sapien
ggatccccaggtgtaatctctaaga

SEQ ID NO: 3656470 - DNA, 25 bp, Homo sapien
tagagaattgtcagaagggagccct

SEQ ID NO: 3656471 - DNA, 25 bp, Homo sapien
cagcttgggctataaagtgggacct

SEQ ID NO: 3656472 - DNA, 25 bp, Homo sapien
tccaaaagagtaagacgcagaatca

SEQ ID NO: 3656473 - DNA, 25 bp, Homo sapien
tagtatagttagcacccaggccaca

SEQ ID NO: 3656474 - DNA, 25 bp, Homo sapien
cagatatacgctaccatgtcccact

SEQ ID NO: 3656475 - DNA, 25 bp, Homo sapien
ttaataggcattcccaggatggttc

SEQ ID NO: 3656476 - DNA, 25 bp, Homo sapien
gaagtcaaatggtagaggacactca

SEQ ID NO: 3656477 - DNA, 25 bp, Homo sapien
gcaatttaaatgctccagtggtcca

SEQ ID NO: 3656478 - DNA, 25 bp, Homo sapien
catggaggctacactattatgaaca

SEQ ID NO: 3656479 - DNA, 25 bp, Homo sapien
cagggaaggtgctcacttataagat

SEQ ID NO: 3656480 - DNA, 25 bp, Homo sapien
tccaggaattatcagttagaaccag

SEQ ID NO: 3656481 - DNA, 25 bp, Homo sapien
tatacatagttgtcatcctgatatg

SEQ ID NO: 3656482 - DNA, 25 bp, Homo sapien
ggaatatatacacagtcatactttt

SEQ ID NO: 3656483 - DNA, 25 bp, Homo sapien
tctgtgaacctactaaagatgtggc

SEQ ID NO: 3656484 - DNA, 25 bp, Homo sapien
tctaaacgaacatcttacataagca

SEQ ID NO: 3656485 - DNA, 25 bp, Homo sapien
tgcttgggttattgcttggattaga

SEQ ID NO: 3656486 - DNA, 25 bp, Homo sapien
aatttgaactatgaagagcactgtg

SEQ ID NO: 3656487 - DNA, 25 bp, Homo sapien
agttttgcttgggttattgcttgga

SEQ ID NO: 3656488 - DNA, 25 bp, Homo sapien
tctgaagttttgcttgggttattgc

SEQ ID NO: 3656489 - DNA, 25 bp, Homo sapien
gaaaccatattggacatgtttataa

SEQ ID NO: 3656490 - DNA, 25 bp, Homo sapien
aagaaaccatattggacatgtttat

SEQ ID NO: 3656491 - DNA, 25 bp, Homo sapien
ccatattggacatgtttataatact

SEQ ID NO: 3656492 - DNA, 25 bp, Homo sapien
tattggacatgtttataatacttac

SEQ ID NO: 3656493 - DNA, 25 bp, Homo sapien
tctgaaggtctttcaacgtcaatta

SEQ ID NO: 3656494 - DNA, 25 bp, Homo sapien
caaaatcagttggactcaacctaca

SEQ ID NO: 3656495 - DNA, 25 bp, Homo sapien
tgatgatcactcaaatactcaaagc

SEQ ID NO: 3656496 - DNA, 25 bp, Homo sapien
tatggaaatgtactatccacactgc

SEQ ID NO: 3656497 - DNA, 25 bp, Homo sapien
acaaatagtttgacgatagcacgcg

SEQ ID NO: 3656498 - DNA, 25 bp, Homo sapien
gctgctgtcctaggagtagacaaat

SEQ ID NO: 3656499 - DNA, 25 bp, Homo sapien
ccctttgatagtccgctctgtgatg

SEQ ID NO: 3656500 - DNA, 25 bp, Homo sapien
gatgctagagctgggacagtgcaaa

SEQ ID NO: 3656501 - DNA, 25 bp, Homo sapien
gaaggaggcattcaccaagcttttc

SEQ ID NO: 3656502 - DNA, 25 bp, Homo sapien
tgtttatcagaggacttagcaggga

SEQ ID NO: 3656503 - DNA, 25 bp, Homo sapien
tctagagaaaccagaacgcggattc

SEQ ID NO: 3656504 - DNA, 25 bp, Homo sapien
agaccactacttatgcacctacagg

SEQ ID NO: 3656505 - DNA, 25 bp, Homo sapien
agcagctctccaagtgttatccagg

SEQ ID NO: 3656506 - DNA, 25 bp, Homo sapien
agaaagttcacaaacccgagcaccg

SEQ ID NO: 3656507 - DNA, 25 bp, Homo sapien
cacttaacagaattccagggtagag

SEQ ID NO: 3656508 - DNA, 25 bp, Homo sapien
tacaatgccgatgtgcaatagcagg

SEQ ID NO: 3656509 - DNA, 25 bp, Homo sapien
ccagaggtcagtatggtctaggcca

SEQ ID NO: 3656510 - DNA, 25 bp, Homo sapien
tgcaactgatcccttctacggatgt

SEQ ID NO: 3656511 - DNA, 25 bp, Homo sapien
tagaatgagatttgagactagtgga

SEQ ID NO: 3656512 - DNA, 25 bp, Homo sapien
gatggtttgccaacttatcctggag

SEQ ID NO: 3656513 - DNA, 25 bp, Homo sapien
taaaggtactctgaactagaatgca

SEQ ID NO: 3656514 - DNA, 25 bp, Homo sapien
gatctgaaaggtctagtttccacga

SEQ ID NO: 3656515 - DNA, 25 bp, Homo sapien
tctggtagaatctcaactatcctgg

SEQ ID NO: 3656516 - DNA, 25 bp, Homo sapien
gaatgcactctcgactagatgatgg

SEQ ID NO: 3656517 - DNA, 25 bp, Homo sapien
tttcccagaagagctaatatgctca

SEQ ID NO: 3656518 - DNA, 25 bp, Homo sapien
tctgttcgacaattgtagtagtact

SEQ ID NO: 3656519 - DNA, 25 bp, Homo sapien
gagctaatatgctcagaccagtcat

SEQ ID NO: 3656520 - DNA, 25 bp, Homo sapien
tgtgaaacttctgttcgacaattgt

SEQ ID NO: 3656521 - DNA, 25 bp, Homo sapien
actacaagtgcatgctaccactcac

SEQ ID NO: 3656522 - DNA, 25 bp, Homo sapien
gttaaccagtagaaccaagctagag

SEQ ID NO: 3656523 - DNA, 25 bp, Homo sapien
tatggaaaacacgaaggggcaacca

SEQ ID NO: 3656524 - DNA, 25 bp, Homo sapien
tgtaagatgttaaccagtagaacca

SEQ ID NO: 3656525 - DNA, 25 bp, Homo sapien
cttgtttgcttctttttgtctctgt

SEQ ID NO: 3656526 - DNA, 25 bp, Homo sapien
ttgtttgcttctttttgtctctgtt

SEQ ID NO: 3656527 - DNA, 25 bp, Homo sapien
ctcttctgtaatccctatcttttgg

SEQ ID NO: 3656528 - DNA, 25 bp, Homo sapien
cttttgggaagctgttgactgccat

SEQ ID NO: 3656529 - DNA, 25 bp, Homo sapien
tggcaaacccactagtggctgttgc

SEQ ID NO: 3656530 - DNA, 25 bp, Homo sapien
tgcttgcatcacctctcttctgtaa

SEQ ID NO: 3656531 - DNA, 25 bp, Homo sapien
ccacggcactgggagtaaattttat

SEQ ID NO: 3656532 - DNA, 25 bp, Homo sapien
gggaaacacatacctgtactactcg

SEQ ID NO: 3656533 - DNA, 25 bp, Homo sapien
tgtcccacgagcacaaaatttggcc

SEQ ID NO: 3656534 - DNA, 25 bp, Homo sapien
taaaagccggtgagatttgtgtcca

SEQ ID NO: 3656535 - DNA, 25 bp, Homo sapien
gcaggattgaaacattgaagtctaa

SEQ ID NO: 3656536 - DNA, 25 bp, Homo sapien
aacccacaagctgggtgcaacttgt

SEQ ID NO: 3656537 - DNA, 25 bp, Homo sapien
tgtctagaggaaaacctcggtctca

SEQ ID NO: 3656538 - DNA, 25 bp, Homo sapien
gaagtctaagaattcccagaaaaca

SEQ ID NO: 3656539 - DNA, 25 bp, Homo sapien
ctctgccatcccctaaagttctttt

SEQ ID NO: 3656540 - DNA, 25 bp, Homo sapien
aatattttagtgctttacaaacact

SEQ ID NO: 3656541 - DNA, 25 bp, Homo sapien
aacaccaatacaccgaaacacaagg

SEQ ID NO: 3656542 - DNA, 25 bp, Homo sapien
aagccatactctacacaaacaccaa

SEQ ID NO: 3656543 - DNA, 25 bp, Homo sapien
gcaatgaggtacaactaagacagaa

SEQ ID NO: 3656544 - DNA, 25 bp, Homo sapien
aatgaggtacaactaagacagaaac

SEQ ID NO: 3656545 - DNA, 25 bp, Homo sapien
ctgcaatgaggtacaactaagacag

SEQ ID NO: 3656546 - DNA, 25 bp, Homo sapien
tgcaatgaggtacaactaagacaga

SEQ ID NO: 3656547 - DNA, 25 bp, Homo sapien
agttcacagttcgaaaaaacagatg

SEQ ID NO: 3656548 - DNA, 25 bp, Homo sapien
ttagttcacagttcgaaaaaacaga

SEQ ID NO: 3656549 - DNA, 25 bp, Homo sapien
gttcacagttcgaaaaaacagatgt

SEQ ID NO: 3656550 - DNA, 25 bp, Homo sapien
tcacagttcgaaaaaacagatgttg

SEQ ID NO: 3656551 - DNA, 25 bp, Homo sapien
gcatcactggaatgcttgtcttcca

SEQ ID NO: 3656552 - DNA, 25 bp, Homo sapien
tggcatcactggaatgcttgtcttc

SEQ ID NO: 3656553 - DNA, 25 bp, Homo sapien
ctgtgggagcaaactactggcatca

SEQ ID NO: 3656554 - DNA, 25 bp, Homo sapien
ggagcaaactactggcatcactgga

SEQ ID NO: 3656555 - DNA, 25 bp, Homo sapien
tagcgtaaatggactagaaggaaca

SEQ ID NO: 3656556 - DNA, 25 bp, Homo sapien
gggtgctgtactggcgtagaactac

SEQ ID NO: 3656557 - DNA, 25 bp, Homo sapien
tgataaagtagatgctccattagca

SEQ ID NO: 3656558 - DNA, 25 bp, Homo sapien
ttggctggtgatcagactgtagcgt

SEQ ID NO: 3656559 - DNA, 25 bp, Homo sapien
aacatggatgtctccgttgagaaaa

SEQ ID NO: 3656560 - DNA, 25 bp, Homo sapien
catggtaggtaatcgagtttcttcc

SEQ ID NO: 3656561 - DNA, 25 bp, Homo sapien
tgtgattagcaaacacacttcgtga

SEQ ID NO: 3656562 - DNA, 25 bp, Homo sapien
taaactcgaatctactctgtcagaa

SEQ ID NO: 3656563 - DNA, 25 bp, Homo sapien
gactaagactaaattcctacactaa

SEQ ID NO: 3656564 - DNA, 25 bp, Homo sapien
tgtatatggtgcaacagctcttctc

SEQ ID NO: 3656565 - DNA, 25 bp, Homo sapien
aatgtatcctgttacatgtcgcaag

SEQ ID NO: 3656566 - DNA, 25 bp, Homo sapien
tcttgatgaagactttccttaccct

SEQ ID NO: 3656567 - DNA, 25 bp, Homo sapien
ggtgacaacacctaaatctgtgact

SEQ ID NO: 3656568 - DNA, 25 bp, Homo sapien
tttaccctggtaaagtatacgcagc

SEQ ID NO: 3656569 - DNA, 25 bp, Homo sapien
gaatttgaccattctgggtacccta

SEQ ID NO: 3656570 - DNA, 25 bp, Homo sapien
tcttaattttcagcatgcactggca

SEQ ID NO: 3656571 - DNA, 25 bp, Homo sapien
aagtgcacttctaatcattactttc

SEQ ID NO: 3656572 - DNA, 25 bp, Homo sapien
tttcctgttgtgttttgacagttgc

SEQ ID NO: 3656573 - DNA, 25 bp, Homo sapien
tatacagaagatctaaaatgatact

SEQ ID NO: 3656574 - DNA, 25 bp, Homo sapien
aaaatgatactggtaataagtgcac

SEQ ID NO: 3656575 - DNA, 25 bp, Homo sapien
caaagaatgaatttacgtgagagaa

SEQ ID NO: 3656576 - DNA, 25 bp, Homo sapien
tatgaggctaatatgcttaataaca

SEQ ID NO: 3656577 - DNA, 25 bp, Homo sapien
tacgtgagagaatgtagtgtttttc

SEQ ID NO: 3656578 - DNA, 25 bp, Homo sapien
tgtctaatttgttaggatatgaggc

SEQ ID NO: 3656579 - DNA, 25 bp, Homo sapien
cacatttactgaacggaagcctggg

SEQ ID NO: 3656580 - DNA, 25 bp, Homo sapien
tacgatcagggacagaagcgaaatc

SEQ ID NO: 3656581 - DNA, 25 bp, Homo sapien
tcaacagactgctcatcggaatcac

SEQ ID NO: 3656582 - DNA, 25 bp, Homo sapien
tcttttatccatgcaggtcttcagc

SEQ ID NO: 3656583 - DNA, 25 bp, Homo sapien
tagaattattaagctgcagcgtggc

SEQ ID NO: 3656584 - DNA, 25 bp, Homo sapien
tattggcgactgtggaacaggagaa

SEQ ID NO: 3656585 - DNA, 25 bp, Homo sapien
tgtgatacgggtttgtctcctgatg

SEQ ID NO: 3656586 - DNA, 25 bp, Homo sapien
aaacagggaccgctgaagcagatgt

SEQ ID NO: 3656587 - DNA, 25 bp, Homo sapien
gaaaaatatacacaagatccaagca

SEQ ID NO: 3656588 - DNA, 25 bp, Homo sapien
tatagaatggcttacctccagtaac

SEQ ID NO: 3656589 - DNA, 25 bp, Homo sapien
taccaatggtcttaaactacagtgg

SEQ ID NO: 3656590 - DNA, 25 bp, Homo sapien
gatccaagcaccactaactcaatta

SEQ ID NO: 3656591 - DNA, 25 bp, Homo sapien
ggttggagtgtacaggcaccatctc

SEQ ID NO: 3656592 - DNA, 25 bp, Homo sapien
taaaagccccactttgcctaaatga

SEQ ID NO: 3656593 - DNA, 25 bp, Homo sapien
taatgaccaactagcctgagatagc

SEQ ID NO: 3656594 - DNA, 25 bp, Homo sapien
ttacctaccacacaagagaactgcg

SEQ ID NO: 3656595 - DNA, 25 bp, Homo sapien
cctattcatatgtgagtgttcagta

SEQ ID NO: 3656596 - DNA, 25 bp, Homo sapien
gattgcccttttagacaagctggcc

SEQ ID NO: 3656597 - DNA, 25 bp, Homo sapien
caaaatttaacgagtgttcacagga

SEQ ID NO: 3656598 - DNA, 25 bp, Homo sapien
taagatgatcacctgaacaaagtct

SEQ ID NO: 3656599 - DNA, 25 bp, Homo sapien
tgttgaaagcagatggtccagcagt

SEQ ID NO: 3656600 - DNA, 25 bp, Homo sapien
ctgagcagcttgagaaatcagagac

SEQ ID NO: 3656601 - DNA, 25 bp, Homo sapien
gaaacttatgaattatagactgcag

SEQ ID NO: 3656602 - DNA, 25 bp, Homo sapien
cagagacgttatgttgaaagcagat

SEQ ID NO: 3656603 - DNA, 25 bp, Homo sapien
catctaacgtcaatctgaaccaaac

SEQ ID NO: 3656604 - DNA, 25 bp, Homo sapien
tggcacatcatagtttactttcagc

SEQ ID NO: 3656605 - DNA, 25 bp, Homo sapien
tatccagtcaaaaaacatctaacgt

SEQ ID NO: 3656606 - DNA, 25 bp, Homo sapien
cagatttgatggcaataccttaaga

SEQ ID NO: 3656607 - DNA, 25 bp, Homo sapien
caaggcattcctgctgtttatcagc

SEQ ID NO: 3656608 - DNA, 25 bp, Homo sapien
gagtctttgcaccattatacttcca

SEQ ID NO: 3656609 - DNA, 25 bp, Homo sapien
ccatttggataccttcatgaagagg

SEQ ID NO: 3656610 - DNA, 25 bp, Homo sapien
ctagccagagggttgcaagagtctt

SEQ ID NO: 3656611 - DNA, 25 bp, Homo sapien
ggtatcccacgcagtctcctgctca

SEQ ID NO: 3656612 - DNA, 25 bp, Homo sapien
ttcttattctacatttaggcccagg

SEQ ID NO: 3656613 - DNA, 25 bp, Homo sapien
tttaggcccaggtatcccacgcagt

SEQ ID NO: 3656614 - DNA, 25 bp, Homo sapien
tacatttaggcccaggtatcccacg

SEQ ID NO: 3656615 - DNA, 25 bp, Homo sapien
gaacctaatctcacatggaaggcct

SEQ ID NO: 3656616 - DNA, 25 bp, Homo sapien
gccacactgactaagtgagctgtgt

SEQ ID NO: 3656617 - DNA, 25 bp, Homo sapien
gaacaggaagctaggcctgaaccta

SEQ ID NO: 3656618 - DNA, 25 bp, Homo sapien
tattacccagagaacacttattgga

SEQ ID NO: 3656619 - DNA, 25 bp, Homo sapien
gatcttggggatgacgcatcagatg

SEQ ID NO: 3656620 - DNA, 25 bp, Homo sapien
ttcttggagaaacatatgatcttgg

SEQ ID NO: 3656621 - DNA, 25 bp, Homo sapien
aaacaggaggagtactgatcaaagg

SEQ ID NO: 3656622 - DNA, 25 bp, Homo sapien
gatcaaaggtttgatagggactgtg

SEQ ID NO: 3656623 - DNA, 25 bp, Homo sapien
ggtccttgcttaactactggagtac

SEQ ID NO: 3656624 - DNA, 25 bp, Homo sapien
gcgctgaagacttcgaggagagaca

SEQ ID NO: 3656625 - DNA, 25 bp, Homo sapien
gacactggtccttgcttaactactg

SEQ ID NO: 3656626 - DNA, 25 bp, Homo sapien
tgctgcttgtcagcagttacaggct

SEQ ID NO: 3656627 - DNA, 25 bp, Homo sapien
gaagggaacaactctcatttggagg

SEQ ID NO: 3656628 - DNA, 25 bp, Homo sapien
gaaagcctgacatataccagttggg

SEQ ID NO: 3656629 - DNA, 25 bp, Homo sapien
gagtaagtagacagcttcccaaggt

SEQ ID NO: 3656630 - DNA, 25 bp, Homo sapien
aaaagccatccgtatagggtcacag

SEQ ID NO: 3656631 - DNA, 25 bp, Homo sapien
taatgaacacgtggatcgggcagaa

SEQ ID NO: 3656632 - DNA, 25 bp, Homo sapien
gaattctgtggtacaactgttgcat

SEQ ID NO: 3656633 - DNA, 25 bp, Homo sapien
tattagaagtatgattgggaccagg

SEQ ID NO: 3656634 - DNA, 25 bp, Homo sapien
tgcatgatctgcaggccatccttga

SEQ ID NO: 3656635 - DNA, 25 bp, Homo sapien
ttaacagtgctaatggaatctgaaa

SEQ ID NO: 3656636 - DNA, 25 bp, Homo sapien
cactggctttgagccacatcactgt

SEQ ID NO: 3656637 - DNA, 25 bp, Homo sapien
tacactggctttgagccacatcact

SEQ ID NO: 3656638 - DNA, 25 bp, Homo sapien
taacagtgctaatggaatctgaaac

SEQ ID NO: 3656639 - DNA, 25 bp, Homo sapien
cacatactcggactaaagatcttaa

SEQ ID NO: 3656640 - DNA, 25 bp, Homo sapien
tatgcgcttcttcgcgtaatcttga

SEQ ID NO: 3656641 - DNA, 25 bp, Homo sapien
tcagtacaaatttcggacatgtgaa

SEQ ID NO: 3656642 - DNA, 25 bp, Homo sapien
gtgaatagttcccatgttatgcgct

SEQ ID NO: 3656643 - DNA, 25 bp, Homo sapien
gacaggctttatccttcacgagaaa

SEQ ID NO: 3656644 - DNA, 25 bp, Homo sapien
tgtgatcaatgtatcgaagagaact

SEQ ID NO: 3656645 - DNA, 25 bp, Homo sapien
tgcagcttatggagttatgagaaaa

SEQ ID NO: 3656646 - DNA, 25 bp, Homo sapien
tgggttaagagaaaatcgacaggct

SEQ ID NO: 3656647 - DNA, 25 bp, Homo sapien
ttctggcccactatacagtaaagag

SEQ ID NO: 3656648 - DNA, 25 bp, Homo sapien
cagtaaagagtagaattaaccaggt

SEQ ID NO: 3656649 - DNA, 25 bp, Homo sapien
taaccaggtgtaagagattaatcat

SEQ ID NO: 3656650 - DNA, 25 bp, Homo sapien
ccgtatcatcacaataaagaaagca

SEQ ID NO: 3656651 - DNA, 25 bp, Homo sapien
ttcaagttccttaatttgttgtctc

SEQ ID NO: 3656652 - DNA, 25 bp, Homo sapien
catgaaggaattctgattttttagc

SEQ ID NO: 3656653 - DNA, 25 bp, Homo sapien
tgaaggaattctgattttttagctt

SEQ ID NO: 3656654 - DNA, 25 bp, Homo sapien
aatttgttgtctcaaaaatagtatc

SEQ ID NO: 3656655 - DNA, 25 bp, Homo sapien
caacgtgaaggatacatctacaaga

SEQ ID NO: 3656656 - DNA, 25 bp, Homo sapien
caaagtctacttaaatgcagctcaa

SEQ ID NO: 3656657 - DNA, 25 bp, Homo sapien
tgaattgactctcacagaccccgtc

SEQ ID NO: 3656658 - DNA, 25 bp, Homo sapien
tgcccagcttaacggtccaaagtct

SEQ ID NO: 3656659 - DNA, 25 bp, Homo sapien
gtatccttagacacaaatcgcctgg

SEQ ID NO: 3656660 - DNA, 25 bp, Homo sapien
aagtccattcttaacagggtgcaaa

SEQ ID NO: 3656661 - DNA, 25 bp, Homo sapien
aatcgcctggcgcttgcactgaatt

SEQ ID NO: 3656662 - DNA, 25 bp, Homo sapien
gaaaagtgccatagcaacagtgcct

SEQ ID NO: 3656663 - DNA, 25 bp, Homo sapien
ttcacatctgactagctctgtttcc

SEQ ID NO: 3656664 - DNA, 25 bp, Homo sapien
caattcacatctgactagctctgtt

SEQ ID NO: 3656665 - DNA, 25 bp, Homo sapien
atacaattcacatctgactagctct

SEQ ID NO: 3656666 - DNA, 25 bp, Homo sapien
tacaattcacatctgactagctctg

SEQ ID NO: 3656667 - DNA, 25 bp, Homo sapien
gatggctaagaacagcagtcagcac

SEQ ID NO: 3656668 - DNA, 25 bp, Homo sapien
gctaatgtgcactgaccgaaggaaa

SEQ ID NO: 3656669 - DNA, 25 bp, Homo sapien
gttctgataaagaatccccaggtag

SEQ ID NO: 3656670 - DNA, 25 bp, Homo sapien
tcagcaccagacttgaacagttagc

SEQ ID NO: 3656671 - DNA, 25 bp, Homo sapien
cggaaacccttgtgatttgatacat

SEQ ID NO: 3656672 - DNA, 25 bp, Homo sapien
gaagctaaggctatgtgactaatat

SEQ ID NO: 3656673 - DNA, 25 bp, Homo sapien
actggcagtgtgaagctaaggctat

SEQ ID NO: 3656674 - DNA, 25 bp, Homo sapien
catgcggaaacccttgtgatttgat

SEQ ID NO: 3656675 - DNA, 25 bp, Homo sapien
tttctaaatcagatggcaagatttt

SEQ ID NO: 3656676 - DNA, 25 bp, Homo sapien
taaatcagatggcaagattttgatg

SEQ ID NO: 3656677 - DNA, 25 bp, Homo sapien
ttctaaatcagatggcaagattttg

SEQ ID NO: 3656678 - DNA, 25 bp, Homo sapien
tctaaatcagatggcaagattttga

SEQ ID NO: 3656679 - DNA, 25 bp, Homo sapien
tggaagcacttatctgccccaacag

SEQ ID NO: 3656680 - DNA, 25 bp, Homo sapien
ggtacacagaccagtagactataag

SEQ ID NO: 3656681 - DNA, 25 bp, Homo sapien
caaattgccatctgatcaggaaaca

SEQ ID NO: 3656682 - DNA, 25 bp, Homo sapien
gtaaggtttctagctgaacacacag

SEQ ID NO: 3656683 - DNA, 25 bp, Homo sapien
gagtgaattatttcccgcgttgccc

SEQ ID NO: 3656684 - DNA, 25 bp, Homo sapien
aaacagtccctcaaagatatggtgg

SEQ ID NO: 3656685 - DNA, 25 bp, Homo sapien
taatgtcttgaaacagggctgaagc

SEQ ID NO: 3656686 - DNA, 25 bp, Homo sapien
caatagttccggtgcgcagagtgaa

SEQ ID NO: 3656687 - DNA, 25 bp, Homo sapien
ttactcaaatgcaaattatgcattc

SEQ ID NO: 3656688 - DNA, 25 bp, Homo sapien
tactcaaatgcaaattatgcattct

SEQ ID NO: 3656689 - DNA, 25 bp, Homo sapien
ccttactcaaatgcaaattatgcat

SEQ ID NO: 3656690 - DNA, 25 bp, Homo sapien
ttccttactcaaatgcaaattatgc

SEQ ID NO: 3656691 - DNA, 25 bp, Homo sapien
gcatggaggtacagaagccaagtcg

SEQ ID NO: 3656692 - DNA, 25 bp, Homo sapien
tcctctaagccggtccatggcatgg

SEQ ID NO: 3656693 - DNA, 25 bp, Homo sapien
ccaagtcggcttacacgatgagagt

SEQ ID NO: 3656694 - DNA, 25 bp, Homo sapien
gaatgggaagtagatccctccagcc

SEQ ID NO: 3656695 - DNA, 25 bp, Homo sapien
cggaacagcccagtagcatgcctgg

SEQ ID NO: 3656696 - DNA, 25 bp, Homo sapien
acttgcaacacaagccgccctgagt

SEQ ID NO: 3656697 - DNA, 25 bp, Homo sapien
gcccagtagcatgcctggatagaga

SEQ ID NO: 3656698 - DNA, 25 bp, Homo sapien
gatagagaaaccctgctccatgcac

SEQ ID NO: 3656699 - DNA, 25 bp, Homo sapien
ttaaaagctgagtgtggctctcccc

SEQ ID NO: 3656700 - DNA, 25 bp, Homo sapien
agctgagtgtggctctccccttcct

SEQ ID NO: 3656701 - DNA, 25 bp, Homo sapien
tccccttccttgatggcaagggctt

SEQ ID NO: 3656702 - DNA, 25 bp, Homo sapien
aaagctgagtgtggctctccccttc

SEQ ID NO: 3656703 - DNA, 25 bp, Homo sapien
agctggaggtaagaagcccaagaag

SEQ ID NO: 3656704 - DNA, 25 bp, Homo sapien
cagctggaggtaagaagcccaagaa

SEQ ID NO: 3656705 - DNA, 25 bp, Homo sapien
acagctggaggtaagaagcccaaga

SEQ ID NO: 3656706 - DNA, 25 bp, Homo sapien
ctggaggtaagaagcccaagaaggg

SEQ ID NO: 3656707 - DNA, 25 bp, Homo sapien
tgctcattggatagtaacgcagccc

SEQ ID NO: 3656708 - DNA, 25 bp, Homo sapien
tgtgttgtgtagacgcttgcagttc

SEQ ID NO: 3656709 - DNA, 25 bp, Homo sapien
taacgcagccccaagtaaaggatgg

SEQ ID NO: 3656710 - DNA, 25 bp, Homo sapien
gcttgcagttccaccctcgctgtgt

SEQ ID NO: 3656711 - DNA, 25 bp, Homo sapien
actgaaatgttttggactccctgct

SEQ ID NO: 3656712 - DNA, 25 bp, Homo sapien
tgaaatgttttggactccctgctca

SEQ ID NO: 3656713 - DNA, 25 bp, Homo sapien
aaactgaaatgttttggactccctg

SEQ ID NO: 3656714 - DNA, 25 bp, Homo sapien
gaaatgttttggactccctgctcat

SEQ ID NO: 3656715 - DNA, 25 bp, Homo sapien
tactggtattccatggaacgggtat

SEQ ID NO: 3656716 - DNA, 25 bp, Homo sapien
ttactggtattccatggaacgggta

SEQ ID NO: 3656717 - DNA, 25 bp, Homo sapien
actggtattccatggaacgggtatc

SEQ ID NO: 3656718 - DNA, 25 bp, Homo sapien
ggctgcaaatatctcaaatggattg

SEQ ID NO: 3656719 - DNA, 25 bp, Homo sapien
ggattgacaatcactgcaggatgta

SEQ ID NO: 3656720 - DNA, 25 bp, Homo sapien
gcaaatatctcaaatggattgacaa

SEQ ID NO: 3656721 - DNA, 25 bp, Homo sapien
gcaggatgtatcagtgagccatcaa

SEQ ID NO: 3656722 - DNA, 25 bp, Homo sapien
ctgttgatacaagaagcaaggtcgt

SEQ ID NO: 3656723 - DNA, 25 bp, Homo sapien
tgttgatacaagaagcaaggtcgtt

SEQ ID NO: 3656724 - DNA, 25 bp, Homo sapien
taaaatgccctcttaacggagccca

SEQ ID NO: 3656725 - DNA, 25 bp, Homo sapien
aacactggaactttggcatctctta

SEQ ID NO: 3656726 - DNA, 25 bp, Homo sapien
gtctttctcgccctcttgtggtgag

SEQ ID NO: 3656727 - DNA, 25 bp, Homo sapien
cctcttaacggagcccagagctttc

SEQ ID NO: 3656728 - DNA, 25 bp, Homo sapien
cctgagctgttcaagaccaaagatg

SEQ ID NO: 3656729 - DNA, 25 bp, Homo sapien
tgagtgtcagctcggactttcctga

SEQ ID NO: 3656730 - DNA, 25 bp, Homo sapien
tttcctgagctgttcaagaccaaag

SEQ ID NO: 3656731 - DNA, 25 bp, Homo sapien
cctgagtgtcagctcggactttcct

SEQ ID NO: 3656732 - DNA, 25 bp, Homo sapien
ctgtgtatccttccaattttagcat

SEQ ID NO: 3656733 - DNA, 25 bp, Homo sapien
aggggccatgctaatcttctgtgta

SEQ ID NO: 3656734 - DNA, 25 bp, Homo sapien
catgaatttgcgtgtcgttcttgcg

SEQ ID NO: 3656735 - DNA, 25 bp, Homo sapien
ttctgtgtatccttccaattttagc

SEQ ID NO: 3656736 - DNA, 25 bp, Homo sapien
ctgaagatccgcagtttttctggag

SEQ ID NO: 3656737 - DNA, 25 bp, Homo sapien
tgaagatccgcagtttttctggaga

SEQ ID NO: 3656738 - DNA, 25 bp, Homo sapien
gaagatccgcagtttttctggagac

SEQ ID NO: 3656739 - DNA, 25 bp, Homo sapien
agatccgcagtttttctggagacag

SEQ ID NO: 3656740 - DNA, 25 bp, Homo sapien
ttacttctctagatcaaaattgcat

SEQ ID NO: 3656741 - DNA, 25 bp, Homo sapien
ctcgactctagggacgcacgctagc

SEQ ID NO: 3656742 - DNA, 25 bp, Homo sapien
gagtagggtctccacagcacgcaag

SEQ ID NO: 3656743 - DNA, 25 bp, Homo sapien
gcacgcaagggtatccgccgcagct

SEQ ID NO: 3656744 - DNA, 25 bp, Homo sapien
ctagcggccgttctcagcgaagaga

SEQ ID NO: 3656745 - DNA, 25 bp, Homo sapien
tgcagccagatgaagatgtagctgg

SEQ ID NO: 3656746 - DNA, 25 bp, Homo sapien
gaagatgtagctggagtggcgatcc

SEQ ID NO: 3656747 - DNA, 25 bp, Homo sapien
agatgtagctggagtggcgatccat

SEQ ID NO: 3656748 - DNA, 25 bp, Homo sapien
ccagctgcagccagatgaagatgta

SEQ ID NO: 3656749 - DNA, 25 bp, Homo sapien
gaacacagcaacttgtcgcgacctg

SEQ ID NO: 3656750 - DNA, 25 bp, Homo sapien
aggaggaccctctgatcagcgcctg

SEQ ID NO: 3656751 - DNA, 25 bp, Homo sapien
ttagatcggagtccgcatccacgcg

SEQ ID NO: 3656752 - DNA, 25 bp, Homo sapien
acgctgagggcacgcggcagctaca

SEQ ID NO: 3656753 - DNA, 25 bp, Homo sapien
aaagagacacagagatacgctgagt

SEQ ID NO: 3656754 - DNA, 25 bp, Homo sapien
tacagaggttcagacacactttcag

SEQ ID NO: 3656755 - DNA, 25 bp, Homo sapien
gcatttagggatactgagactcaga

SEQ ID NO: 3656756 - DNA, 25 bp, Homo sapien
ttcagaaacacaacgacactcagag

SEQ ID NO: 3656757 - DNA, 25 bp, Homo sapien
taaatactgtagcacatcatcctcg

SEQ ID NO: 3656758 - DNA, 25 bp, Homo sapien
gaaactgtggaacaatgcccttctg

SEQ ID NO: 3656759 - DNA, 25 bp, Homo sapien
ttgaagtccgcagccgtcagaaatc

SEQ ID NO: 3656760 - DNA, 25 bp, Homo sapien
tctgctttagtcaagatggctacag

SEQ ID NO: 3656761 - DNA, 25 bp, Homo sapien
tctgaacgccccagtaaggtgtctc

SEQ ID NO: 3656762 - DNA, 25 bp, Homo sapien
ctctgaacgccccagtaaggtgtct

SEQ ID NO: 3656763 - DNA, 25 bp, Homo sapien
tgaacgccccagtaaggtgtctcat

SEQ ID NO: 3656764 - DNA, 25 bp, Homo sapien
ctgaacgccccagtaaggtgtctca

SEQ ID NO: 3656765 - DNA, 25 bp, Homo sapien
ataaaactgcaaggctaacttctcc

SEQ ID NO: 3656766 - DNA, 25 bp, Homo sapien
tttcagcccaaatggaaagtcataa

SEQ ID NO: 3656767 - DNA, 25 bp, Homo sapien
ccaaatggaaagtcataaaaggtgg

SEQ ID NO: 3656768 - DNA, 25 bp, Homo sapien
ttttacatgtaattcgacatgtgat

SEQ ID NO: 3656769 - DNA, 25 bp, Homo sapien
taaagcaactatttaggcaactgct

SEQ ID NO: 3656770 - DNA, 25 bp, Homo sapien
gctccagagaccagataaagcaact

SEQ ID NO: 3656771 - DNA, 25 bp, Homo sapien
taggcaactgctaaatcccaaattc

SEQ ID NO: 3656772 - DNA, 25 bp, Homo sapien
ccagagaccagataaagcaactatt

SEQ ID NO: 3656773 - DNA, 25 bp, Homo sapien
gcaggcgctgagctcagatttacac

SEQ ID NO: 3656774 - DNA, 25 bp, Homo sapien
tgggcagcatcacagtagcatcgaa

SEQ ID NO: 3656775 - DNA, 25 bp, Homo sapien
ctgaggatcaagaagtctagagaag

SEQ ID NO: 3656776 - DNA, 25 bp, Homo sapien
catataaccagtggctacacagtgg

SEQ ID NO: 3656777 - DNA, 25 bp, Homo sapien
ggagagagaacatcgtgcagccctc

SEQ ID NO: 3656778 - DNA, 25 bp, Homo sapien
gacagcattccaatgtgggtatggt

SEQ ID NO: 3656779 - DNA, 25 bp, Homo sapien
tgcagccctctgtaattgcacatgt

SEQ ID NO: 3656780 - DNA, 25 bp, Homo sapien
tcgtgcttgcaagagagtccaggca

SEQ ID NO: 3656781 - DNA, 25 bp, Homo sapien
gacagacatctaatgctcagacata

SEQ ID NO: 3656782 - DNA, 25 bp, Homo sapien
tcacaagtctatagatcaggcaggc

SEQ ID NO: 3656783 - DNA, 25 bp, Homo sapien
caatagcagacatacaaagtcgtgg

SEQ ID NO: 3656784 - DNA, 25 bp, Homo sapien
tgcatctttgcatccagccaggctt

SEQ ID NO: 3656785 - DNA, 25 bp, Homo sapien
tgtccgtgaaagctgtagtgcaaac

SEQ ID NO: 3656786 - DNA, 25 bp, Homo sapien
caaacgggagagcatctgttgccgc

SEQ ID NO: 3656787 - DNA, 25 bp, Homo sapien
tcctcagggccaacataataagcaa

SEQ ID NO: 3656788 - DNA, 25 bp, Homo sapien
tttcacttcgaagcatcctcagggc

SEQ ID NO: 3656789 - DNA, 25 bp, Homo sapien
catgccccagtgaacaagcgagagg

SEQ ID NO: 3656790 - DNA, 25 bp, Homo sapien
tgcccactgtacatgccccagtgaa

SEQ ID NO: 3656791 - DNA, 25 bp, Homo sapien
tcatacgaattccagcttcccgtgc

SEQ ID NO: 3656792 - DNA, 25 bp, Homo sapien
ggatcttatcgttgctgaggtctgc

SEQ ID NO: 3656793 - DNA, 25 bp, Homo sapien
ttcagataaagtgctcctgtccagc

SEQ ID NO: 3656794 - DNA, 25 bp, Homo sapien
tgtccagcagaactcaaaaggcctt

SEQ ID NO: 3656795 - DNA, 25 bp, Homo sapien
gctcccttggatgcaaataaccctg

SEQ ID NO: 3656796 - DNA, 25 bp, Homo sapien
taagtgtagttcagataagactccg

SEQ ID NO: 3656797 - DNA, 25 bp, Homo sapien
gaaaattacacaggcacatggaaga

SEQ ID NO: 3656798 - DNA, 25 bp, Homo sapien
aaaccagagttatcctatagccaga

SEQ ID NO: 3656799 - DNA, 25 bp, Homo sapien
caagccacatcctagagttgagaac

SEQ ID NO: 3656800 - DNA, 25 bp, Homo sapien
ggtattccggaacacctggatcaaa

SEQ ID NO: 3656801 - DNA, 25 bp, Homo sapien
caagggttgttcctggttagcctgg

SEQ ID NO: 3656802 - DNA, 25 bp, Homo sapien
ttttcataagaaggcggatctgact

SEQ ID NO: 3656803 - DNA, 25 bp, Homo sapien
tgggcaaatttccactcagaaagga

SEQ ID NO: 3656804 - DNA, 25 bp, Homo sapien
tcactgaatcaggtagaccctggac

SEQ ID NO: 3656805 - DNA, 25 bp, Homo sapien
gtttagcagagagaacacgatttct

SEQ ID NO: 3656806 - DNA, 25 bp, Homo sapien
ttctgacttccagccaaggcgtttg

SEQ ID NO: 3656807 - DNA, 25 bp, Homo sapien
ccagatgcctccacttcaagcgtgt

SEQ ID NO: 3656808 - DNA, 25 bp, Homo sapien
tccaggctgtgaaattggtgaccag

SEQ ID NO: 3656809 - DNA, 25 bp, Homo sapien
ttccatttgtagagtcagcgtggtg

SEQ ID NO: 3656810 - DNA, 25 bp, Homo sapien
catttgtagagtcagcgtggtgacc

SEQ ID NO: 3656811 - DNA, 25 bp, Homo sapien
gagtcagcgtggtgacctctatcat

SEQ ID NO: 3656812 - DNA, 25 bp, Homo sapien
tgtagagtcagcgtggtgacctcta

SEQ ID NO: 3656813 - DNA, 25 bp, Homo sapien
taataggatgtgcaaaaacaggtat

SEQ ID NO: 3656814 - DNA, 25 bp, Homo sapien
ttggtgccccgtcagcagagcaaac

SEQ ID NO: 3656815 - DNA, 25 bp, Homo sapien
cagctgtcgcctagaactgtggctt

SEQ ID NO: 3656816 - DNA, 25 bp, Homo sapien
gagcaaacaagcacactcaataggt

SEQ ID NO: 3656817 - DNA, 25 bp, Homo sapien
ccagcaagaaatcccaggtctgagt

SEQ ID NO: 3656818 - DNA, 25 bp, Homo sapien
tgtgtcccagtgatttaatcccagc

SEQ ID NO: 3656819 - DNA, 25 bp, Homo sapien
gggtgaatgtgtcccagtgatttaa

SEQ ID NO: 3656820 - DNA, 25 bp, Homo sapien
cacagcatggccttgagtgagtcac

SEQ ID NO: 3656821 - DNA, 25 bp, Homo sapien
tgtgttccattctatcagtccttgc

SEQ ID NO: 3656822 - DNA, 25 bp, Homo sapien
gttccattctatcagtccttgctct

SEQ ID NO: 3656823 - DNA, 25 bp, Homo sapien
gtgttccattctatcagtccttgct

SEQ ID NO: 3656824 - DNA, 25 bp, Homo sapien
tgttccattctatcagtccttgctc

SEQ ID NO: 3656825 - DNA, 25 bp, Homo sapien
tgcaggcccacggtcgtctagcagc

SEQ ID NO: 3656826 - DNA, 25 bp, Homo sapien
agaccgccgctgttatctgccactt

SEQ ID NO: 3656827 - DNA, 25 bp, Homo sapien
ggtcgtctagcagcctggttggcca

SEQ ID NO: 3656828 - DNA, 25 bp, Homo sapien
ccgccaccaggagtcagtcctgatg

SEQ ID NO: 3656829 - DNA, 25 bp, Homo sapien
tttctctttggttgggagccgtcaa

SEQ ID NO: 3656830 - DNA, 25 bp, Homo sapien
cgtcaacattctggcctggaatcat

SEQ ID NO: 3656831 - DNA, 25 bp, Homo sapien
gagccgtcaacattctggcctggaa

SEQ ID NO: 3656832 - DNA, 25 bp, Homo sapien
ggttgggagccgtcaacattctggc

SEQ ID NO: 3656833 - DNA, 25 bp, Homo sapien
ccttctagaagcattccatctagat

SEQ ID NO: 3656834 - DNA, 25 bp, Homo sapien
gaagcattccatctagatctgcttt

SEQ ID NO: 3656835 - DNA, 25 bp, Homo sapien
tctagaagcattccatctagatctg

SEQ ID NO: 3656836 - DNA, 25 bp, Homo sapien
cattccatctagatctgctttttca

SEQ ID NO: 3656837 - DNA, 25 bp, Homo sapien
gccagggcctggacaccacctctgt

SEQ ID NO: 3656838 - DNA, 25 bp, Homo sapien
gcctggacaccacctctgtccactg

SEQ ID NO: 3656839 - DNA, 25 bp, Homo sapien
tggacaccacctctgtccactgcac

SEQ ID NO: 3656840 - DNA, 25 bp, Homo sapien
agtgccagggcctggacaccacctc

SEQ ID NO: 3656841 - DNA, 25 bp, Homo sapien
ccaagttcattcactttgtccatcc

SEQ ID NO: 3656842 - DNA, 25 bp, Homo sapien
cacccaccatccagtgaactcctgg

SEQ ID NO: 3656843 - DNA, 25 bp, Homo sapien
ctagacaccatgaccaagttcattc

SEQ ID NO: 3656844 - DNA, 25 bp, Homo sapien
tccacccaccatccagtgaactcct

SEQ ID NO: 3656845 - DNA, 25 bp, Homo sapien
cattcttcctctttagcattttcag

SEQ ID NO: 3656846 - DNA, 25 bp, Homo sapien
agcattttcaggctcttcttcatct

SEQ ID NO: 3656847 - DNA, 25 bp, Homo sapien
ttaaacagccatcttccttcaatgc

SEQ ID NO: 3656848 - DNA, 25 bp, Homo sapien
atcttcatcattaaacagccatctt

SEQ ID NO: 3656849 - DNA, 25 bp, Homo sapien
aagagatcagtggacccagagcgag

SEQ ID NO: 3656850 - DNA, 25 bp, Homo sapien
tgctgctgatgggacgcgtgcatca

SEQ ID NO: 3656851 - DNA, 25 bp, Homo sapien
gcatcaagagatcagtggacccaga

SEQ ID NO: 3656852 - DNA, 25 bp, Homo sapien
gacgcgtgcatcaagagatcagtgg

SEQ ID NO: 3656853 - DNA, 25 bp, Homo sapien
acagggatttcactcccgcccgagc

SEQ ID NO: 3656854 - DNA, 25 bp, Homo sapien
tcacagggatttcactcccgcccga

SEQ ID NO: 3656855 - DNA, 25 bp, Homo sapien
agggatttcactcccgcccgagcac

SEQ ID NO: 3656856 - DNA, 25 bp, Homo sapien
cacagggatttcactcccgcccgag

SEQ ID NO: 3656857 - DNA, 25 bp, Homo sapien
gctcctagagccacgtgttgctggg

SEQ ID NO: 3656858 - DNA, 25 bp, Homo sapien
gcatttacacctggcaccgggatgg

SEQ ID NO: 3656859 - DNA, 25 bp, Homo sapien
gatgccatccctgcggctcctagag

SEQ ID NO: 3656860 - DNA, 25 bp, Homo sapien
gcgttgaggcgcttggaggatccca

SEQ ID NO: 3656861 - DNA, 25 bp, Homo sapien
tctgtagtaaagactttccaagtat

SEQ ID NO: 3656862 - DNA, 25 bp, Homo sapien
ttccaagtatcttcatattcatggg

SEQ ID NO: 3656863 - DNA, 25 bp, Homo sapien
aaatcatgctctgtagtaaagactt

SEQ ID NO: 3656864 - DNA, 25 bp, Homo sapien
tcatgctctgtagtaaagactttcc

SEQ ID NO: 3656865 - DNA, 25 bp, Homo sapien
caatgacaaattacctctggggagg

SEQ ID NO: 3656866 - DNA, 25 bp, Homo sapien
gaatcaggtataagccaggccacca

SEQ ID NO: 3656867 - DNA, 25 bp, Homo sapien
ctccaagtactggtctgaccagaga

SEQ ID NO: 3656868 - DNA, 25 bp, Homo sapien
tactggtctgaccagagaacattct

SEQ ID NO: 3656869 - DNA, 25 bp, Homo sapien
caattcctgtgactgatccttcttg

SEQ ID NO: 3656870 - DNA, 25 bp, Homo sapien
tcctcctagcagtcaattcctgtga

SEQ ID NO: 3656871 - DNA, 25 bp, Homo sapien
acatctgtacatatcctcctagcag

SEQ ID NO: 3656872 - DNA, 25 bp, Homo sapien
tgtacatatcctcctagcagtcaat

SEQ ID NO: 3656873 - DNA, 25 bp, Homo sapien
ctaaggcatgggagaaaggggccgg

SEQ ID NO: 3656874 - DNA, 25 bp, Homo sapien
ggcatgggagaaaggggccggtctc

SEQ ID NO: 3656875 - DNA, 25 bp, Homo sapien
aggcatgggagaaaggggccggtct

SEQ ID NO: 3656876 - DNA, 25 bp, Homo sapien
gcatgggagaaaggggccggtctca

SEQ ID NO: 3656877 - DNA, 25 bp, Homo sapien
ttcctcccttcccggtccctgctgc

SEQ ID NO: 3656878 - DNA, 25 bp, Homo sapien
acatctcccctgaagcagtccctgg

SEQ ID NO: 3656879 - DNA, 25 bp, Homo sapien
cctctgacatctcccctgaagcagt

SEQ ID NO: 3656880 - DNA, 25 bp, Homo sapien
cttcctcccttcccggtccctgctg

SEQ ID NO: 3656881 - DNA, 25 bp, Homo sapien
tggaagtctctggttcccggtggat

SEQ ID NO: 3656882 - DNA, 25 bp, Homo sapien
ccagtgtttgagagccgggagaact

SEQ ID NO: 3656883 - DNA, 25 bp, Homo sapien
aagtccagatccaagcgtacaaaca

SEQ ID NO: 3656884 - DNA, 25 bp, Homo sapien
ggtcctgaccagttctaaaagtcca

SEQ ID NO: 3656885 - DNA, 25 bp, Homo sapien
gacttctctgatttagtcatccttc

SEQ ID NO: 3656886 - DNA, 25 bp, Homo sapien
agactaacttttcagggcttctcct

SEQ ID NO: 3656887 - DNA, 25 bp, Homo sapien
aagagacttctctgatttagtcatc

SEQ ID NO: 3656888 - DNA, 25 bp, Homo sapien
gactaacttttcagggcttctcctg

SEQ ID NO: 3656889 - DNA, 25 bp, Homo sapien
ttcatggttttcagccaggaaagca

SEQ ID NO: 3656890 - DNA, 25 bp, Homo sapien
cattcatggttttcagccaggaaag

SEQ ID NO: 3656891 - DNA, 25 bp, Homo sapien
tcatggttttcagccaggaaagcat

SEQ ID NO: 3656892 - DNA, 25 bp, Homo sapien
tcattcatggttttcagccaggaaa

SEQ ID NO: 3656893 - DNA, 25 bp, Homo sapien
acttagcctattagaacaattccaa

SEQ ID NO: 3656894 - DNA, 25 bp, Homo sapien
aaagagcctaggagtctgcgatatg

SEQ ID NO: 3656895 - DNA, 25 bp, Homo sapien
taggagtctgcgatatggacttgca

SEQ ID NO: 3656896 - DNA, 25 bp, Homo sapien
ggacttgcatttggaatcacttagc

SEQ ID NO: 3656897 - DNA, 25 bp, Homo sapien
gtaattggtaatgagtcgtgcagcc

SEQ ID NO: 3656898 - DNA, 25 bp, Homo sapien
gcagcctttcaggtctcggttacca

SEQ ID NO: 3656899 - DNA, 25 bp, Homo sapien
ttttctgccagggaaccggatggcc

SEQ ID NO: 3656900 - DNA, 25 bp, Homo sapien
tttgcaacgcaaattcatcggaagc

SEQ ID NO: 3656901 - DNA, 25 bp, Homo sapien
gatcacatggagctctttagagagg

SEQ ID NO: 3656902 - DNA, 25 bp, Homo sapien
agagtcaaaaagtgaacgtgaaaca

SEQ ID NO: 3656903 - DNA, 25 bp, Homo sapien
acagctatagccatgtgttctttgt

SEQ ID NO: 3656904 - DNA, 25 bp, Homo sapien
agctatagccatgtgttctttgttc

SEQ ID NO: 3656905 - DNA, 25 bp, Homo sapien
tagagtcaaaaagtgaacgtgaaac

SEQ ID NO: 3656906 - DNA, 25 bp, Homo sapien
cctctagttcttgctctagatgaca

SEQ ID NO: 3656907 - DNA, 25 bp, Homo sapien
tagaaccagtgaacctctctttccc

SEQ ID NO: 3656908 - DNA, 25 bp, Homo sapien
tgacaaatatcttcttgagggtaga

SEQ ID NO: 3656909 - DNA, 25 bp, Homo sapien
tcttgagggtagaaccagtgaacct

SEQ ID NO: 3656910 - DNA, 25 bp, Homo sapien
tatgccacgtatatccacaagaaca

SEQ ID NO: 3656911 - DNA, 25 bp, Homo sapien
agttagctgcttgatttatgccacg

SEQ ID NO: 3656912 - DNA, 25 bp, Homo sapien
tggaagttgctgtacagccttacga

SEQ ID NO: 3656913 - DNA, 25 bp, Homo sapien
gccttacgatctacgcgttctctca

SEQ ID NO: 3656914 - DNA, 25 bp, Homo sapien
gcaagagacgctagtccggtttcta

SEQ ID NO: 3656915 - DNA, 25 bp, Homo sapien
taattctcccgtgaggtggtgtttg

SEQ ID NO: 3656916 - DNA, 25 bp, Homo sapien
tgttcaatgcgttttacagcaagag

SEQ ID NO: 3656917 - DNA, 25 bp, Homo sapien
tgtttgatgccctgttcaatgcgtt

SEQ ID NO: 3656918 - DNA, 25 bp, Homo sapien
gataagttagcagaatctcctacag

SEQ ID NO: 3656919 - DNA, 25 bp, Homo sapien
ttttgagagcctaagctagggagca

SEQ ID NO: 3656920 - DNA, 25 bp, Homo sapien
ggagcagggataagttagcagaatc

SEQ ID NO: 3656921 - DNA, 25 bp, Homo sapien
ctttgatttccggtgagtctttgcc

SEQ ID NO: 3656922 - DNA, 25 bp, Homo sapien
agcatgccagcctccggtgatgagc

SEQ ID NO: 3656923 - DNA, 25 bp, Homo sapien
cagagagtatgcacaggtgcgggct

SEQ ID NO: 3656924 - DNA, 25 bp, Homo sapien
cagccgctgtctggtgacggtgagc

SEQ ID NO: 3656925 - DNA, 25 bp, Homo sapien
gctggatggtcctgttagaaaggca

SEQ ID NO: 3656926 - DNA, 25 bp, Homo sapien
cagcagcagttgaggaggcatttcg

SEQ ID NO: 3656927 - DNA, 25 bp, Homo sapien
aggaggcatttcgtggtgagcagca

SEQ ID NO: 3656928 - DNA, 25 bp, Homo sapien
tggtatgtgggtcacaactgaccac

SEQ ID NO: 3656929 - DNA, 25 bp, Homo sapien
ctcttttctctactggtatgtgggt

SEQ ID NO: 3656930 - DNA, 25 bp, Homo sapien
cgtggtgtgcactggaagatctcca

SEQ ID NO: 3656931 - DNA, 25 bp, Homo sapien
ccatgctgtgaagcgtgcaggatgt

SEQ ID NO: 3656932 - DNA, 25 bp, Homo sapien
tgctgtcattcacatcgtccgtggt

SEQ ID NO: 3656933 - DNA, 25 bp, Homo sapien
tctgtgggttgctgatggtccatgc

SEQ ID NO: 3656934 - DNA, 25 bp, Homo sapien
cgcctactccagttcgaatattggg

SEQ ID NO: 3656935 - DNA, 25 bp, Homo sapien
gggaagccactcgcctactccagtt

SEQ ID NO: 3656936 - DNA, 25 bp, Homo sapien
tcgaatattggggacttgaggccat

SEQ ID NO: 3656937 - DNA, 25 bp, Homo sapien
tattggggacttgaggccatcttgt

SEQ ID NO: 3656938 - DNA, 25 bp, Homo sapien
tgctttcagagggacttgcggccac

SEQ ID NO: 3656939 - DNA, 25 bp, Homo sapien
catccatgctttcagagggacttgc

SEQ ID NO: 3656940 - DNA, 25 bp, Homo sapien
ttgtcatccatgctttcagagggac

SEQ ID NO: 3656941 - DNA, 25 bp, Homo sapien
catgctttcagagggacttgcggcc

SEQ ID NO: 3656942 - DNA, 25 bp, Homo sapien
ccatggtcccccggcacttccaggc

SEQ ID NO: 3656943 - DNA, 25 bp, Homo sapien
agcatcagctgatgttctgccaagt

SEQ ID NO: 3656944 - DNA, 25 bp, Homo sapien
gcatcagctgatgttctgccaagtc

SEQ ID NO: 3656945 - DNA, 25 bp, Homo sapien
cagcaatcctgtggttcctatcatg

SEQ ID NO: 3656946 - DNA, 25 bp, Homo sapien
tcacagagtcttagcactggacata

SEQ ID NO: 3656947 - DNA, 25 bp, Homo sapien
tgagagccgatcatgtgaccggaac

SEQ ID NO: 3656948 - DNA, 25 bp, Homo sapien
gcactgagagccgatcatgtgaccg

SEQ ID NO: 3656949 - DNA, 25 bp, Homo sapien
aacaccagctattccagctagattc

SEQ ID NO: 3656950 - DNA, 25 bp, Homo sapien
caccagctattccagctagattcat

SEQ ID NO: 3656951 - DNA, 25 bp, Homo sapien
ccaacaccagctattccagctagat

SEQ ID NO: 3656952 - DNA, 25 bp, Homo sapien
gccaacaccagctattccagctaga

SEQ ID NO: 3656953 - DNA, 25 bp, Homo sapien
tgggttacagcccttaagatcacaa

SEQ ID NO: 3656954 - DNA, 25 bp, Homo sapien
ttacagcccttaagatcacaatagg

SEQ ID NO: 3656955 - DNA, 25 bp, Homo sapien
gttacagcccttaagatcacaatag

SEQ ID NO: 3656956 - DNA, 25 bp, Homo sapien
ctctgggttacagcccttaagatca

SEQ ID NO: 3656957 - DNA, 25 bp, Homo sapien
tcaggtttctcgttggggcccttga

SEQ ID NO: 3656958 - DNA, 25 bp, Homo sapien
caggtttctcgttggggcccttgag

SEQ ID NO: 3656959 - DNA, 25 bp, Homo sapien
taaatgcgtctgaaatgctcccagc

SEQ ID NO: 3656960 - DNA, 25 bp, Homo sapien
cagcctgccggatcatcttggtgga

SEQ ID NO: 3656961 - DNA, 25 bp, Homo sapien
tcagtctgaacacgcggttttggca

SEQ ID NO: 3656962 - DNA, 25 bp, Homo sapien
ttgttgaacagacgctctccctgcg

SEQ ID NO: 3656963 - DNA, 25 bp, Homo sapien
gtggctccatgaacaatggagttca

SEQ ID NO: 3656964 - DNA, 25 bp, Homo sapien
ctgggcatttgggcttttccgggtg

SEQ ID NO: 3656965 - DNA, 25 bp, Homo sapien
tggctccatgaacaatggagttcat

SEQ ID NO: 3656966 - DNA, 25 bp, Homo sapien
gcatttgggcttttccgggtggctc

SEQ ID NO: 3656967 - DNA, 25 bp, Homo sapien
cctggttgcaagtagatgccatccg

SEQ ID NO: 3656968 - DNA, 25 bp, Homo sapien
ctggttgcaagtagatgccatccga

SEQ ID NO: 3656969 - DNA, 25 bp, Homo sapien
catcctggttgcaagtagatgccat

SEQ ID NO: 3656970 - DNA, 25 bp, Homo sapien
tcctggttgcaagtagatgccatcc

SEQ ID NO: 3656971 - DNA, 25 bp, Homo sapien
tagtgatacatttgcacgctgggca

SEQ ID NO: 3656972 - DNA, 25 bp, Homo sapien
tgctggtagtgatacatttgcacgc

SEQ ID NO: 3656973 - DNA, 25 bp, Homo sapien
ctctggtgctggtagtgatacattt

SEQ ID NO: 3656974 - DNA, 25 bp, Homo sapien
tacatttgcacgctgggcaccagct

SEQ ID NO: 3656975 - DNA, 25 bp, Homo sapien
tgcagctccagctgtagtatctgtt

SEQ ID NO: 3656976 - DNA, 25 bp, Homo sapien
ctgtacaccataaagtcactgcttt

SEQ ID NO: 3656977 - DNA, 25 bp, Homo sapien
cacaaagttgcaggggggttgtctc

SEQ ID NO: 3656978 - DNA, 25 bp, Homo sapien
gattacctagcacaaagttgcaggg

SEQ ID NO: 3656979 - DNA, 25 bp, Homo sapien
gaagattacctagcacaaagttgca

SEQ ID NO: 3656980 - DNA, 25 bp, Homo sapien
gggacagaagattacctagcacaaa

SEQ ID NO: 3656981 - DNA, 25 bp, Homo sapien
ccagaattccccatcgatgcctggg

SEQ ID NO: 3656982 - DNA, 25 bp, Homo sapien
gcctgggctttagggttctcctcac

SEQ ID NO: 3656983 - DNA, 25 bp, Homo sapien
ttccccatcgatgcctgggctttag

SEQ ID NO: 3656984 - DNA, 25 bp, Homo sapien
cgatgcctgggctttagggttctcc

SEQ ID NO: 3656985 - DNA, 25 bp, Homo sapien
taccatccaaaaacatgatatgtgt

SEQ ID NO: 3656986 - DNA, 25 bp, Homo sapien
tccaaaaacatgatatgtgtgctca

SEQ ID NO: 3656987 - DNA, 25 bp, Homo sapien
ttacattaggtttatgtctagaatt

SEQ ID NO: 3656988 - DNA, 25 bp, Homo sapien
tatgtgtgctcattccacttttctt

SEQ ID NO: 3656989 - DNA, 25 bp, Homo sapien
taacctgctgaatattacttgttct

SEQ ID NO: 3656990 - DNA, 25 bp, Homo sapien
tgaatattacttgttctccatgtca

SEQ ID NO: 3656991 - DNA, 25 bp, Homo sapien
cttctacataggcaaacatattagt

SEQ ID NO: 3656992 - DNA, 25 bp, Homo sapien
tgttcagccaaccacataggatagc

SEQ ID NO: 3656993 - DNA, 25 bp, Homo sapien
tgcggcattgcctaattcattcatt

SEQ ID NO: 3656994 - DNA, 25 bp, Homo sapien
tgaagcctgaccaaccagaatcttg

SEQ ID NO: 3656995 - DNA, 25 bp, Homo sapien
cagaatcttgttcgtagaggaagga

SEQ ID NO: 3656996 - DNA, 25 bp, Homo sapien
tcaggcttctctgaagcctgaccaa

SEQ ID NO: 3656997 - DNA, 25 bp, Homo sapien
gtgctgtacattcgcattcatgctc

SEQ ID NO: 3656998 - DNA, 25 bp, Homo sapien
atgtggcagacgcgagctcagtgct

SEQ ID NO: 3656999 - DNA, 25 bp, Homo sapien
catgtggcagacgcgagctcagtgc

SEQ ID NO: 3657000 - DNA, 25 bp, Homo sapien
tcagtgctgtacattcgcattcatg

SEQ ID NO: 3657001 - DNA, 25 bp, Homo sapien
gcctgggcgacagaaagaggcccat

SEQ ID NO: 3657002 - DNA, 25 bp, Homo sapien
aggcaggaggactatttgagctcag

SEQ ID NO: 3657003 - DNA, 25 bp, Homo sapien
tgatcacaccattgcactccagcct

SEQ ID NO: 3657004 - DNA, 25 bp, Homo sapien
gaggttgaggctgcagtgagctatg

SEQ ID NO: 3657005 - DNA, 25 bp, Homo sapien
atgcagtggttcatggctgtagtcg

SEQ ID NO: 3657006 - DNA, 25 bp, Homo sapien
gcagtggttcatggctgtagtcgca

SEQ ID NO: 3657007 - DNA, 25 bp, Homo sapien
agtggttcatggctgtagtcgcaac

SEQ ID NO: 3657008 - DNA, 25 bp, Homo sapien
ctgaactggatgcagtggttcatgg

SEQ ID NO: 3657009 - DNA, 25 bp, Homo sapien
tgggtagtttcagatcataacaggg

SEQ ID NO: 3657010 - DNA, 25 bp, Homo sapien
ctctagtgattggtctggcaaccag

SEQ ID NO: 3657011 - DNA, 25 bp, Homo sapien
ggtgttggcccatatgggtagtttc

SEQ ID NO: 3657012 - DNA, 25 bp, Homo sapien
gtctggcaaccaggcaagaagttga

SEQ ID NO: 3657013 - DNA, 25 bp, Homo sapien
ttaattgcagttggcaaaacattta

SEQ ID NO: 3657014 - DNA, 25 bp, Homo sapien
ccctgaactgtctcatgataaggag

SEQ ID NO: 3657015 - DNA, 25 bp, Homo sapien
gaactatgaggaatatactgtgatc

SEQ ID NO: 3657016 - DNA, 25 bp, Homo sapien
cctgaaatgcagatgttagaactat

SEQ ID NO: 3657017 - DNA, 25 bp, Homo sapien
ggcagttcccactttcagattctat

SEQ ID NO: 3657018 - DNA, 25 bp, Homo sapien
tatctgtagctaacattacacacca

SEQ ID NO: 3657019 - DNA, 25 bp, Homo sapien
gtagctaacattacacaccaattct

SEQ ID NO: 3657020 - DNA, 25 bp, Homo sapien
tcttcctgtcggcttccatggcagt

SEQ ID NO: 3657021 - DNA, 25 bp, Homo sapien
tccaatcgtacaattctaggcttac

SEQ ID NO: 3657022 - DNA, 25 bp, Homo sapien
gagttccaatcgtacaattctaggc

SEQ ID NO: 3657023 - DNA, 25 bp, Homo sapien
cgtcattgagttccaatcgtacaat

SEQ ID NO: 3657024 - DNA, 25 bp, Homo sapien
ttgagttccaatcgtacaattctag

SEQ ID NO: 3657025 - DNA, 25 bp, Homo sapien
tcatgcctcgatgacagtcacaaag

SEQ ID NO: 3657026 - DNA, 25 bp, Homo sapien
tgtgtggaggttcagcaggcaatct

SEQ ID NO: 3657027 - DNA, 25 bp, Homo sapien
gacacaggtatgtagtcatgcctcg

SEQ ID NO: 3657028 - DNA, 25 bp, Homo sapien
tggagatcggaaggagacattgctc

SEQ ID NO: 3657029 - DNA, 25 bp, Homo sapien
cagggtagctgggaatttcttggaa

SEQ ID NO: 3657030 - DNA, 25 bp, Homo sapien
tcactctggcaacttgtgaatgcct

SEQ ID NO: 3657031 - DNA, 25 bp, Homo sapien
acagccactgctgatactaaagagg

SEQ ID NO: 3657032 - DNA, 25 bp, Homo sapien
ctgaataggttgctaagggcttggc

SEQ ID NO: 3657033 - DNA, 25 bp, Homo sapien
gcttcctagcgattctctcgaggcc

SEQ ID NO: 3657034 - DNA, 25 bp, Homo sapien
tgtcaccacggagcacgtttccagg

SEQ ID NO: 3657035 - DNA, 25 bp, Homo sapien
aagcgggatgtggatgcggcttcca

SEQ ID NO: 3657036 - DNA, 25 bp, Homo sapien
agaaggccaaccctgcgccgtggtg

SEQ ID NO: 3657037 - DNA, 25 bp, Homo sapien
cattgtggcctacaagacacgggtt

SEQ ID NO: 3657038 - DNA, 25 bp, Homo sapien
taagttgctgccacacgaaggaaaa

SEQ ID NO: 3657039 - DNA, 25 bp, Homo sapien
tatttgaaccagaggtggccagtct

SEQ ID NO: 3657040 - DNA, 25 bp, Homo sapien
taaagcagttgcctatggaacccgg

SEQ ID NO: 3657041 - DNA, 25 bp, Homo sapien
gcctagttgtggtgcttctcggaac

SEQ ID NO: 3657042 - DNA, 25 bp, Homo sapien
taaacttagcactaagtgtcagcag

SEQ ID NO: 3657043 - DNA, 25 bp, Homo sapien
tcagcagagcatggcctagttgtgg

SEQ ID NO: 3657044 - DNA, 25 bp, Homo sapien
ggtgcttctcggaacacacgcagaa

SEQ ID NO: 3657045 - DNA, 25 bp, Homo sapien
aaacgatacggaacgctgaggcctg

SEQ ID NO: 3657046 - DNA, 25 bp, Homo sapien
gatatgatgagaggtcgctgtccca

SEQ ID NO: 3657047 - DNA, 25 bp, Homo sapien
tccggttgtatctatgtttctggct

SEQ ID NO: 3657048 - DNA, 25 bp, Homo sapien
gttgtcatgacttggagccgctcta

SEQ ID NO: 3657049 - DNA, 25 bp, Homo sapien
attttaaaagctctcctgtcacagt

SEQ ID NO: 3657050 - DNA, 25 bp, Homo sapien
ttctgccttttggccggcaccgcca

SEQ ID NO: 3657051 - DNA, 25 bp, Homo sapien
ctattttaaaagctctcctgtcaca

SEQ ID NO: 3657052 - DNA, 25 bp, Homo sapien
ggcctgcacgcggtattcctggttt

SEQ ID NO: 3657053 - DNA, 25 bp, Homo sapien
ctgcacgcggtattcctggtttgaa

SEQ ID NO: 3657054 - DNA, 25 bp, Homo sapien
ctgccagatactcgaggatacccat

SEQ ID NO: 3657055 - DNA, 25 bp, Homo sapien
ctcccctgccagatactcgaggata

SEQ ID NO: 3657056 - DNA, 25 bp, Homo sapien
ggtatgtgccccgatgacctggatc

SEQ ID NO: 3657057 - DNA, 25 bp, Homo sapien
gccccgatgacctggatccctggtg

SEQ ID NO: 3657058 - DNA, 25 bp, Homo sapien
agctaagggtatgtgccccgatgac

SEQ ID NO: 3657059 - DNA, 25 bp, Homo sapien
gctaagggtatgtgccccgatgacc

SEQ ID NO: 3657060 - DNA, 25 bp, Homo sapien
ggcggccctgatttacgcatctaag

SEQ ID NO: 3657061 - DNA, 25 bp, Homo sapien
caatcagatctggagcctgagcact

SEQ ID NO: 3657062 - DNA, 25 bp, Homo sapien
gcatctaagtatcaggacagccttg

SEQ ID NO: 3657063 - DNA, 25 bp, Homo sapien
aagctcaggatgatctgtcccagac

SEQ ID NO: 3657064 - DNA, 25 bp, Homo sapien
acttgagattagcgatgggcggcca

SEQ ID NO: 3657065 - DNA, 25 bp, Homo sapien
ggtacttgagattagcgatgggcgg

SEQ ID NO: 3657066 - DNA, 25 bp, Homo sapien
tacttgagattagcgatgggcggcc

SEQ ID NO: 3657067 - DNA, 25 bp, Homo sapien
cttgagattagcgatgggcggccag

SEQ ID NO: 3657068 - DNA, 25 bp, Homo sapien
aaatcttaccctcaacatgaaacgc

SEQ ID NO: 3657069 - DNA, 25 bp, Homo sapien
gatccaatcacttgctgaggaagaa

SEQ ID NO: 3657070 - DNA, 25 bp, Homo sapien
cccggggagatgaatgccattacaa

SEQ ID NO: 3657071 - DNA, 25 bp, Homo sapien
gaaacgccagtgattgtttattaaa

SEQ ID NO: 3657072 - DNA, 25 bp, Homo sapien
tggcctgagataggatttcactgtc

SEQ ID NO: 3657073 - DNA, 25 bp, Homo sapien
tgacctaatgagagcggcgtcctcc

SEQ ID NO: 3657074 - DNA, 25 bp, Homo sapien
agagcggcgtcctccaactgcctgg

SEQ ID NO: 3657075 - DNA, 25 bp, Homo sapien
catgacctaatgagagcggcgtcct

SEQ ID NO: 3657076 - DNA, 25 bp, Homo sapien
aatgagagcggcgtcctccaactgc

SEQ ID NO: 3657077 - DNA, 25 bp, Homo sapien
cattggtggtcggttacaacacgct

SEQ ID NO: 3657078 - DNA, 25 bp, Homo sapien
cataatccgtgaacagagccggctc

SEQ ID NO: 3657079 - DNA, 25 bp, Homo sapien
aagacaaccataatccgtgaacaga

SEQ ID NO: 3657080 - DNA, 25 bp, Homo sapien
acaacacgctttgtcccgtcgggtg

SEQ ID NO: 3657081 - DNA, 25 bp, Homo sapien
tcaataggtgaatggtagaacaaac

SEQ ID NO: 3657082 - DNA, 25 bp, Homo sapien
catgcacagatttttcactgaggag

SEQ ID NO: 3657083 - DNA, 25 bp, Homo sapien
ttactgatgagactgcaaatggcac

SEQ ID NO: 3657084 - DNA, 25 bp, Homo sapien
ctattgactgatgcaacaagttgga

SEQ ID NO: 3657085 - DNA, 25 bp, Homo sapien
tttatcacactgagagttgaggcgg

SEQ ID NO: 3657086 - DNA, 25 bp, Homo sapien
gggcactacaaagactccaggaccg

SEQ ID NO: 3657087 - DNA, 25 bp, Homo sapien
tctcctgagacaacagaagatgctg

SEQ ID NO: 3657088 - DNA, 25 bp, Homo sapien
cactgttcctgcttcgggtggggaa

SEQ ID NO: 3657089 - DNA, 25 bp, Homo sapien
caggcaatgagaaccccattctttc

SEQ ID NO: 3657090 - DNA, 25 bp, Homo sapien
tctgaggttagcaaacatgcctttc

SEQ ID NO: 3657091 - DNA, 25 bp, Homo sapien
gtctgttgcatgcagttgccccctg

SEQ ID NO: 3657092 - DNA, 25 bp, Homo sapien
tctgcaatttccaccacaaagatgg

SEQ ID NO: 3657093 - DNA, 25 bp, Homo sapien
agcacaagcagccacgtccatttcg

SEQ ID NO: 3657094 - DNA, 25 bp, Homo sapien
ctaaaggcgtagtgaagcacaagca

SEQ ID NO: 3657095 - DNA, 25 bp, Homo sapien
gaaagtccgattgagaacatcccaa

SEQ ID NO: 3657096 - DNA, 25 bp, Homo sapien
ctcaaacaggaagcatgtgccatgt

SEQ ID NO: 3657097 - DNA, 25 bp, Homo sapien
tcctgcaaagggcataatcttgtca

SEQ ID NO: 3657098 - DNA, 25 bp, Homo sapien
caccctctgaaaaaaccccagtgtg

SEQ ID NO: 3657099 - DNA, 25 bp, Homo sapien
ttgcttgcatttgtaagtgagaaca

SEQ ID NO: 3657100 - DNA, 25 bp, Homo sapien
tcctacacttcaccctctgaaaaaa

SEQ ID NO: 3657101 - DNA, 25 bp, Homo sapien
tgtgtccatcattctttggaatgag

SEQ ID NO: 3657102 - DNA, 25 bp, Homo sapien
tgcagagaaaccatgaacacatcca

SEQ ID NO: 3657103 - DNA, 25 bp, Homo sapien
ccatcattctttggaatgagctcct

SEQ ID NO: 3657104 - DNA, 25 bp, Homo sapien
caagaacagccacgggaacatggcc

SEQ ID NO: 3657105 - DNA, 25 bp, Homo sapien
ctgccaagaacagccacgggaacat

SEQ ID NO: 3657106 - DNA, 25 bp, Homo sapien
agccacgggaacatggccagcagtg

SEQ ID NO: 3657107 - DNA, 25 bp, Homo sapien
gaacagccacgggaacatggccagc

SEQ ID NO: 3657108 - DNA, 25 bp, Homo sapien
ctaatggagtcacacaagctggcta

SEQ ID NO: 3657109 - DNA, 25 bp, Homo sapien
gtcacacaagctggctagttgctca

SEQ ID NO: 3657110 - DNA, 25 bp, Homo sapien
gagtcacacaagctggctagttgct

SEQ ID NO: 3657111 - DNA, 25 bp, Homo sapien
aatggagtcacacaagctggctagt

SEQ ID NO: 3657112 - DNA, 25 bp, Homo sapien
agaaacatgggcgttgtcctccaga

SEQ ID NO: 3657113 - DNA, 25 bp, Homo sapien
acatgggcgttgtcctccagaatca

SEQ ID NO: 3657114 - DNA, 25 bp, Homo sapien
tgcagagagtgcctgagaaacatgg

SEQ ID NO: 3657115 - DNA, 25 bp, Homo sapien
cagagagtgcctgagaaacatgggc

SEQ ID NO: 3657116 - DNA, 25 bp, Homo sapien
ctacagatccagagccacaacttca

SEQ ID NO: 3657117 - DNA, 25 bp, Homo sapien
agatccagagccacaacttcatcct

SEQ ID NO: 3657118 - DNA, 25 bp, Homo sapien
gccacaacttcatccttagtaaagg

SEQ ID NO: 3657119 - DNA, 25 bp, Homo sapien
tccagagccacaacttcatccttag

SEQ ID NO: 3657120 - DNA, 25 bp, Homo sapien
caacaggatagcactaattccccta

SEQ ID NO: 3657121 - DNA, 25 bp, Homo sapien
ctaattcccctagttacaaatgtct

SEQ ID NO: 3657122 - DNA, 25 bp, Homo sapien
gcccaacaggatagcactaattccc

SEQ ID NO: 3657123 - DNA, 25 bp, Homo sapien
gatagcactaattcccctagttaca

SEQ ID NO: 3657124 - DNA, 25 bp, Homo sapien
ctttggaatacactccctggccaca

SEQ ID NO: 3657125 - DNA, 25 bp, Homo sapien
gaaaggaattgcagcttcacagcag

SEQ ID NO: 3657126 - DNA, 25 bp, Homo sapien
tgggcacaccctgtcacacacatga

SEQ ID NO: 3657127 - DNA, 25 bp, Homo sapien
ctccatgaaaggaattgcagcttca

SEQ ID NO: 3657128 - DNA, 25 bp, Homo sapien
tttttgccgaatgtcccacatttat

SEQ ID NO: 3657129 - DNA, 25 bp, Homo sapien
ttttttgccgaatgtcccacattta

SEQ ID NO: 3657130 - DNA, 25 bp, Homo sapien
tgcctttgaccaaggaggcaagttc

SEQ ID NO: 3657131 - DNA, 25 bp, Homo sapien
gaccaaggaggcaagttctcagtca

SEQ ID NO: 3657132 - DNA, 25 bp, Homo sapien
cctttgaccaaggaggcaagttctc

SEQ ID NO: 3657133 - DNA, 25 bp, Homo sapien
tttgaccaaggaggcaagttctcag

SEQ ID NO: 3657134 - DNA, 25 bp, Homo sapien
cagttatctttagacaactccccaa

SEQ ID NO: 3657135 - DNA, 25 bp, Homo sapien
ccagttatctttagacaactcccca

SEQ ID NO: 3657136 - DNA, 25 bp, Homo sapien
ttatctttagacaactccccaaaca

SEQ ID NO: 3657137 - DNA, 25 bp, Homo sapien
gctctagactggtcttgtcgctaat

SEQ ID NO: 3657138 - DNA, 25 bp, Homo sapien
tggtcttgtcgctaattgatacatc

SEQ ID NO: 3657139 - DNA, 25 bp, Homo sapien
caggattctgcgagggcgctacagc

SEQ ID NO: 3657140 - DNA, 25 bp, Homo sapien
aggattctgcgagggcgctacagct

SEQ ID NO: 3657141 - DNA, 25 bp, Homo sapien
ctttgtgtattacaactgctactgg

SEQ ID NO: 3657142 - DNA, 25 bp, Homo sapien
ctctttgtgtattacaactgctact

SEQ ID NO: 3657143 - DNA, 25 bp, Homo sapien
tctttgtgtattacaactgctactg

SEQ ID NO: 3657144 - DNA, 25 bp, Homo sapien
aagcacggctaccagagcacagagg

SEQ ID NO: 3657145 - DNA, 25 bp, Homo sapien
aggcctcggtcacattatcttgcac

SEQ ID NO: 3657146 - DNA, 25 bp, Homo sapien
aaaggcatacggtgggtccagcatg

SEQ ID NO: 3657147 - DNA, 25 bp, Homo sapien
gggaaagcacggctaccagagcaca

SEQ ID NO: 3657148 - DNA, 25 bp, Homo sapien
accatacccgtacccctgccaatct

SEQ ID NO: 3657149 - DNA, 25 bp, Homo sapien
catacccgtacccctgccaatcttc

SEQ ID NO: 3657150 - DNA, 25 bp, Homo sapien
atacccgtacccctgccaatcttct

SEQ ID NO: 3657151 - DNA, 25 bp, Homo sapien
ctaccatacccgtacccctgccaat

SEQ ID NO: 3657152 - DNA, 25 bp, Homo sapien
tggtctgacccagaactaagtttga

SEQ ID NO: 3657153 - DNA, 25 bp, Homo sapien
ttggcaggatgtttgccttggtctg

SEQ ID NO: 3657154 - DNA, 25 bp, Homo sapien
cgctgttgagtatctcccattggca

SEQ ID NO: 3657155 - DNA, 25 bp, Homo sapien
tgtggtcattccgctgttgagtatc

SEQ ID NO: 3657156 - DNA, 25 bp, Homo sapien
ttatcataaaagtgttagatgtcat

SEQ ID NO: 3657157 - DNA, 25 bp, Homo sapien
tgattaattatcataaaagtgttag

SEQ ID NO: 3657158 - DNA, 25 bp, Homo sapien
aattatcataaaagtgttagatgtc

SEQ ID NO: 3657159 - DNA, 25 bp, Homo sapien
ttaattatcataaaagtgttagatg

SEQ ID NO: 3657160 - DNA, 25 bp, Homo sapien
gagatagcacctgcttattggcatt

SEQ ID NO: 3657161 - DNA, 25 bp, Homo sapien
tagcacctgcttattggcattttca

SEQ ID NO: 3657162 - DNA, 25 bp, Homo sapien
gatagcacctgcttattggcatttt

SEQ ID NO: 3657163 - DNA, 25 bp, Homo sapien
cttgagaaatggagatagcacctgc

SEQ ID NO: 3657164 - DNA, 25 bp, Homo sapien
tggtgccggcttttgatgatctgca

SEQ ID NO: 3657165 - DNA, 25 bp, Homo sapien
gatgatctgcagtatgtacttgtgg

SEQ ID NO: 3657166 - DNA, 25 bp, Homo sapien
cagtatgtacttgtggcttggtctt

SEQ ID NO: 3657167 - DNA, 25 bp, Homo sapien
cattagccaaattggtgccggcttt

SEQ ID NO: 3657168 - DNA, 25 bp, Homo sapien
gaatggcttgtttaactttcggaga

SEQ ID NO: 3657169 - DNA, 25 bp, Homo sapien
cctgaatggcttgtttaactttcgg

SEQ ID NO: 3657170 - DNA, 25 bp, Homo sapien
ttaactttcggagagtatcagatgt

SEQ ID NO: 3657171 - DNA, 25 bp, Homo sapien
gcttgtttaactttcggagagtatc

SEQ ID NO: 3657172 - DNA, 25 bp, Homo sapien
aaatgagcccacgacctttcagggc

SEQ ID NO: 3657173 - DNA, 25 bp, Homo sapien
tccaggtcgcttgcagcttcacgtc

SEQ ID NO: 3657174 - DNA, 25 bp, Homo sapien
tggcaaggaagaatctcgggttgac

SEQ ID NO: 3657175 - DNA, 25 bp, Homo sapien
gaagaatctcgggttgacatccagc

SEQ ID NO: 3657176 - DNA, 25 bp, Homo sapien
gcttcacgtctggttatgagtggca

SEQ ID NO: 3657177 - DNA, 25 bp, Homo sapien
cacctttggtctgtctgcagaaacc

SEQ ID NO: 3657178 - DNA, 25 bp, Homo sapien
tctgcagaaaccctggacaattcat

SEQ ID NO: 3657179 - DNA, 25 bp, Homo sapien
gtctgcagaaaccctggacaattca

SEQ ID NO: 3657180 - DNA, 25 bp, Homo sapien
ctttggtctgtctgcagaaaccctg

SEQ ID NO: 3657181 - DNA, 25 bp, Homo sapien
ctttcttggatctatgcattcctgc

SEQ ID NO: 3657182 - DNA, 25 bp, Homo sapien
tggatctatgcattcctgcttctga

SEQ ID NO: 3657183 - DNA, 25 bp, Homo sapien
gactcttgttgctgatgtgggatca

SEQ ID NO: 3657184 - DNA, 25 bp, Homo sapien
tcctcctgactcttgttgctgatgt

SEQ ID NO: 3657185 - DNA, 25 bp, Homo sapien
tcagagtgatgccttgaaaagtgga

SEQ ID NO: 3657186 - DNA, 25 bp, Homo sapien
atacagagcatagactggtgcttca

SEQ ID NO: 3657187 - DNA, 25 bp, Homo sapien
gagcatagactggtgcttcacatat

SEQ ID NO: 3657188 - DNA, 25 bp, Homo sapien
agtgatgccttgaaaagtggaaggc

SEQ ID NO: 3657189 - DNA, 25 bp, Homo sapien
ttctccattgagagagccatcattt

SEQ ID NO: 3657190 - DNA, 25 bp, Homo sapien
cattgagagagccatcattttgaag

SEQ ID NO: 3657191 - DNA, 25 bp, Homo sapien
ttgagagagccatcattttgaagca

SEQ ID NO: 3657192 - DNA, 25 bp, Homo sapien
tccattgagagagccatcattttga

SEQ ID NO: 3657193 - DNA, 25 bp, Homo sapien
ttatttatgcgagatgctgatggaa

SEQ ID NO: 3657194 - DNA, 25 bp, Homo sapien
catctgctgcatcagtgttatgtta

SEQ ID NO: 3657195 - DNA, 25 bp, Homo sapien
gtgttatgttatttatgcgagatgc

SEQ ID NO: 3657196 - DNA, 25 bp, Homo sapien
gtggatgtcactgattccatgttca

SEQ ID NO: 3657197 - DNA, 25 bp, Homo sapien
gacgtcgaagatctgtccaagagaa

SEQ ID NO: 3657198 - DNA, 25 bp, Homo sapien
taattgtgcactttgtcctccatac

SEQ ID NO: 3657199 - DNA, 25 bp, Homo sapien
tgctccccagggaaaagcaggacgt

SEQ ID NO: 3657200 - DNA, 25 bp, Homo sapien
aaaataattgtgcactttgtcctcc

SEQ ID NO: 3657201 - DNA, 25 bp, Homo sapien
ataccccacacctctccgatgagca

SEQ ID NO: 3657202 - DNA, 25 bp, Homo sapien
acctctccgatgagcaaagccagct

SEQ ID NO: 3657203 - DNA, 25 bp, Homo sapien
agagatcagttattgttctattgtc

SEQ ID NO: 3657204 - DNA, 25 bp, Homo sapien
cttctcttgtcccttccatacccca

SEQ ID NO: 3657205 - DNA, 25 bp, Homo sapien
gccttgtctcaatggcaggacttga

SEQ ID NO: 3657206 - DNA, 25 bp, Homo sapien
gaggaaatgtgttccgtttgccttg

SEQ ID NO: 3657207 - DNA, 25 bp, Homo sapien
gacttgaggacctggtccccaacag

SEQ ID NO: 3657208 - DNA, 25 bp, Homo sapien
aagaagaggaaatgtgttccgtttg

SEQ ID NO: 3657209 - DNA, 25 bp, Homo sapien
gacttgaacgtgcaccaagatgacc

SEQ ID NO: 3657210 - DNA, 25 bp, Homo sapien
agatgaccccgacactcagtccagg

SEQ ID NO: 3657211 - DNA, 25 bp, Homo sapien
ttgaacgtgcaccaagatgaccccg

SEQ ID NO: 3657212 - DNA, 25 bp, Homo sapien
atgaaggacttgaacgtgcaccaag

SEQ ID NO: 3657213 - DNA, 25 bp, Homo sapien
tggctgtgttggacctgggccccac

SEQ ID NO: 3657214 - DNA, 25 bp, Homo sapien
tgttcacccttattgtccggacaac

SEQ ID NO: 3657215 - DNA, 25 bp, Homo sapien
catgcttcagcaagtgtcccggatg

SEQ ID NO: 3657216 - DNA, 25 bp, Homo sapien
ataagaaagtggctcgaacccgaca

SEQ ID NO: 3657217 - DNA, 25 bp, Homo sapien
atcaatatggatattttgggctgcc

SEQ ID NO: 3657218 - DNA, 25 bp, Homo sapien
acacaaaggctttgaggatctaatt

SEQ ID NO: 3657219 - DNA, 25 bp, Homo sapien
accaggattgagtctgaaggtgttt

SEQ ID NO: 3657220 - DNA, 25 bp, Homo sapien
gaaggtctgtgatcatgccagacac

SEQ ID NO: 3657221 - DNA, 25 bp, Homo sapien
ggtgtttcggagatgtgggaaggtc

SEQ ID NO: 3657222 - DNA, 25 bp, Homo sapien
ctcagtctgggaggtgcaaccagga

SEQ ID NO: 3657223 - DNA, 25 bp, Homo sapien
tcaccactcaggaacttccagattc

SEQ ID NO: 3657224 - DNA, 25 bp, Homo sapien
tgcttgttgtgtttgcggttttgcc

SEQ ID NO: 3657225 - DNA, 25 bp, Homo sapien
ttgtgtttgcggttttgcctgagga

SEQ ID NO: 3657226 - DNA, 25 bp, Homo sapien
cctgaggacacacaattgccctgtc

SEQ ID NO: 3657227 - DNA, 25 bp, Homo sapien
tgattggtggtcatcagggtgaatc

SEQ ID NO: 3657228 - DNA, 25 bp, Homo sapien
tagctggaggttgccagcatccaac

SEQ ID NO: 3657229 - DNA, 25 bp, Homo sapien
gggtcactagcattgagtagctgga

SEQ ID NO: 3657230 - DNA, 25 bp, Homo sapien
ttagggaaactgtgtgtgggtcact

SEQ ID NO: 3657231 - DNA, 25 bp, Homo sapien
tggcttcgggcccaagccaattgtg

SEQ ID NO: 3657232 - DNA, 25 bp, Homo sapien
gccaattgtgaccactttgtcttct

SEQ ID NO: 3657233 - DNA, 25 bp, Homo sapien
tcgggcccaagccaattgtgaccac

SEQ ID NO: 3657234 - DNA, 25 bp, Homo sapien
ccaagccaattgtgaccactttgtc

SEQ ID NO: 3657235 - DNA, 25 bp, Homo sapien
ctaattcatgttcgtcttcaaaatg

SEQ ID NO: 3657236 - DNA, 25 bp, Homo sapien
ttattccatcgtggcccggtctgtt

SEQ ID NO: 3657237 - DNA, 25 bp, Homo sapien
aattcatgttcgtcttcaaaatgtc

SEQ ID NO: 3657238 - DNA, 25 bp, Homo sapien
gcttcatttattccatcgtggcccg

SEQ ID NO: 3657239 - DNA, 25 bp, Homo sapien
ttcacagcttcatccgtactgccag

SEQ ID NO: 3657240 - DNA, 25 bp, Homo sapien
gcttcatccgtactgccagtcagtg

SEQ ID NO: 3657241 - DNA, 25 bp, Homo sapien
cagcttcatccgtactgccagtcag

SEQ ID NO: 3657242 - DNA, 25 bp, Homo sapien
catccgtactgccagtcagtgtgag

SEQ ID NO: 3657243 - DNA, 25 bp, Homo sapien
tttaaaaccccgtgatgaatctgca

SEQ ID NO: 3657244 - DNA, 25 bp, Homo sapien
gagtgtcagttctcatgcctataga

SEQ ID NO: 3657245 - DNA, 25 bp, Homo sapien
gaaagtgcttcctatggccaggcat

SEQ ID NO: 3657246 - DNA, 25 bp, Homo sapien
cacttgaaacatgaggcaacagggt

SEQ ID NO: 3657247 - DNA, 25 bp, Homo sapien
ctccaggtcgtagcagaaccaattt

SEQ ID NO: 3657248 - DNA, 25 bp, Homo sapien
gatctcagcagtactccaggtcgta

SEQ ID NO: 3657249 - DNA, 25 bp, Homo sapien
aaggcactatatggaaggatcaaga

SEQ ID NO: 3657250 - DNA, 25 bp, Homo sapien
attctgaaggcactatatggaagga

SEQ ID NO: 3657251 - DNA, 25 bp, Homo sapien
ctgctgggcgtcctgggctctcctc

SEQ ID NO: 3657252 - DNA, 25 bp, Homo sapien
cacacgtgggctgcgagaatgtgta

SEQ ID NO: 3657253 - DNA, 25 bp, Homo sapien
tgttgagtagaagtaaggctcagca

SEQ ID NO: 3657254 - DNA, 25 bp, Homo sapien
gaatgtgtaaggctttgttgagtag

SEQ ID NO: 3657255 - DNA, 25 bp, Homo sapien
tcagacccacttgatgcaatctgca

SEQ ID NO: 3657256 - DNA, 25 bp, Homo sapien
ggaaaggggtctcagacccacttga

SEQ ID NO: 3657257 - DNA, 25 bp, Homo sapien
gaagacagaaatgccgacaggggat

SEQ ID NO: 3657258 - DNA, 25 bp, Homo sapien
gacccacttgatgcaatctgcagag

SEQ ID NO: 3657259 - DNA, 25 bp, Homo sapien
cccctttaatctacatagctgcatg

SEQ ID NO: 3657260 - DNA, 25 bp, Homo sapien
gaagtgactgccacccttaaaccta

SEQ ID NO: 3657261 - DNA, 25 bp, Homo sapien
tgccacccttaaacctacaagcaag

SEQ ID NO: 3657262 - DNA, 25 bp, Homo sapien
gaggttatatgaaagtaagggcaag

SEQ ID NO: 3657263 - DNA, 25 bp, Homo sapien
ctgccattgtgggatgtgatgggtg

SEQ ID NO: 3657264 - DNA, 25 bp, Homo sapien
gccattgtgggatgtgatgggtggc

SEQ ID NO: 3657265 - DNA, 25 bp, Homo sapien
ttactgccattgtgggatgtgatgg

SEQ ID NO: 3657266 - DNA, 25 bp, Homo sapien
ttttactgccattgtgggatgtgat

SEQ ID NO: 3657267 - DNA, 25 bp, Homo sapien
gagacatgagctgagaattgccttc

SEQ ID NO: 3657268 - DNA, 25 bp, Homo sapien
agaataaggcgcaacagtggttatg

SEQ ID NO: 3657269 - DNA, 25 bp, Homo sapien
gatctggtggccttcgtttggagac

SEQ ID NO: 3657270 - DNA, 25 bp, Homo sapien
gaattgccttcaaagtaagaggatc

SEQ ID NO: 3657271 - DNA, 25 bp, Homo sapien
ttcacactcagagccctgtagcctg

SEQ ID NO: 3657272 - DNA, 25 bp, Homo sapien
cacactcagagccctgtagcctggt

SEQ ID NO: 3657273 - DNA, 25 bp, Homo sapien
tgttcacactcagagccctgtagcc

SEQ ID NO: 3657274 - DNA, 25 bp, Homo sapien
gtgttcacactcagagccctgtagc

SEQ ID NO: 3657275 - DNA, 25 bp, Homo sapien
gagtaggagcagctttgagtagacg

SEQ ID NO: 3657276 - DNA, 25 bp, Homo sapien
gagcagctttgagtagacggtgcat

SEQ ID NO: 3657277 - DNA, 25 bp, Homo sapien
aaggaaggacatgcaggctctgagt

SEQ ID NO: 3657278 - DNA, 25 bp, Homo sapien
gacatgcaggctctgagtaggagca

SEQ ID NO: 3657279 - DNA, 25 bp, Homo sapien
ctggcagtgtagatagagcggttat

SEQ ID NO: 3657280 - DNA, 25 bp, Homo sapien
tgtacaccgatgtctatgtggctcc

SEQ ID NO: 3657281 - DNA, 25 bp, Homo sapien
agagcggttattatttattgcagac

SEQ ID NO: 3657282 - DNA, 25 bp, Homo sapien
tattgcagacttaagaactgtacac

SEQ ID NO: 3657283 - DNA, 25 bp, Homo sapien
ccaccaaggactgggactggtgcat

SEQ ID NO: 3657284 - DNA, 25 bp, Homo sapien
caatctggcagctactgtgaagtct

SEQ ID NO: 3657285 - DNA, 25 bp, Homo sapien
gcttctcagacatctggttccagtt

SEQ ID NO: 3657286 - DNA, 25 bp, Homo sapien
ggagattgcttctcagacatctggt

SEQ ID NO: 3657287 - DNA, 25 bp, Homo sapien
cagatgtccgtcagggaccacatca

SEQ ID NO: 3657288 - DNA, 25 bp, Homo sapien
gatgtgaacgtgcaagtgtgtcgtt

SEQ ID NO: 3657289 - DNA, 25 bp, Homo sapien
tctgactgcaacaagcagatgtccg

SEQ ID NO: 3657290 - DNA, 25 bp, Homo sapien
gttccttaaagcctggagtcaccag

SEQ ID NO: 3657291 - DNA, 25 bp, Homo sapien
ggaccgaggcattaattagaaacac

SEQ ID NO: 3657292 - DNA, 25 bp, Homo sapien
cctgcatggaacactggaccgaggc

SEQ ID NO: 3657293 - DNA, 25 bp, Homo sapien
tagaaacactggtgcccttgacaga

SEQ ID NO: 3657294 - DNA, 25 bp, Homo sapien
tggtattcctggcaaaagctggaca

SEQ ID NO: 3657295 - DNA, 25 bp, Homo sapien
ataggcgcaagagccctggtgggtc

SEQ ID NO: 3657296 - DNA, 25 bp, Homo sapien
tggtgggtcagccagaagtcgaaac

SEQ ID NO: 3657297 - DNA, 25 bp, Homo sapien
ccctggtgggtcagccagaagtcga

SEQ ID NO: 3657298 - DNA, 25 bp, Homo sapien
tcataggcgcaagagccctggtggg

SEQ ID NO: 3657299 - DNA, 25 bp, Homo sapien
gatggagtaaggctcggtagctgag

SEQ ID NO: 3657300 - DNA, 25 bp, Homo sapien
ctcggtagctgagccggactctctc

SEQ ID NO: 3657301 - DNA, 25 bp, Homo sapien
taaggctcggtagctgagccggact

SEQ ID NO: 3657302 - DNA, 25 bp, Homo sapien
tctgggcttcgtgatggagtaaggc

SEQ ID NO: 3657303 - DNA, 25 bp, Homo sapien
tacttgggcaggttgtagcttaagc

SEQ ID NO: 3657304 - DNA, 25 bp, Homo sapien
cactgatcgtgattttacttgggca

SEQ ID NO: 3657305 - DNA, 25 bp, Homo sapien
ggttgtagcttaagcttcagctcct

SEQ ID NO: 3657306 - DNA, 25 bp, Homo sapien
cagtgttccttgtcactgatcgtga

SEQ ID NO: 3657307 - DNA, 25 bp, Homo sapien
tgtgatacagatggcaatgagaagc

SEQ ID NO: 3657308 - DNA, 25 bp, Homo sapien
aaagcgagccttggcaatgtgatac

SEQ ID NO: 3657309 - DNA, 25 bp, Homo sapien
gcttcaaagcgagccttggcaatgt

SEQ ID NO: 3657310 - DNA, 25 bp, Homo sapien
agagccccggttctagcccaggcgg

SEQ ID NO: 3657311 - DNA, 25 bp, Homo sapien
ctgggtcgcgttgttttccctctgg

SEQ ID NO: 3657312 - DNA, 25 bp, Homo sapien
ccacattctgcatgtctgggtcgcg

SEQ ID NO: 3657313 - DNA, 25 bp, Homo sapien
gcatgtctgggtcgcgttgttttcc

SEQ ID NO: 3657314 - DNA, 25 bp, Homo sapien
ttctgcatgtctgggtcgcgttgtt

SEQ ID NO: 3657315 - DNA, 25 bp, Homo sapien
tattgcccagatgtctccagtgttc

SEQ ID NO: 3657316 - DNA, 25 bp, Homo sapien
tccacatgagaagtgccttgaatat

SEQ ID NO: 3657317 - DNA, 25 bp, Homo sapien
ctgcagccctgtgagttcttattgc

SEQ ID NO: 3657318 - DNA, 25 bp, Homo sapien
tgccatccacatgagaagtgccttg

SEQ ID NO: 3657319 - DNA, 25 bp, Homo sapien
atatccagttggatgtcattcccct

SEQ ID NO: 3657320 - DNA, 25 bp, Homo sapien
ctgtgcatccagatacagcaagaag

SEQ ID NO: 3657321 - DNA, 25 bp, Homo sapien
taacgtgtcaatcaccaggtttggg

SEQ ID NO: 3657322 - DNA, 25 bp, Homo sapien
attcccctcttctcatcgttctcaa

SEQ ID NO: 3657323 - DNA, 25 bp, Homo sapien
tgtcctctgcgtatagaaaaacact

SEQ ID NO: 3657324 - DNA, 25 bp, Homo sapien
accctctagaatccaaagctctgga

SEQ ID NO: 3657325 - DNA, 25 bp, Homo sapien
tttggtacatggagagaaattccct

SEQ ID NO: 3657326 - DNA, 25 bp, Homo sapien
gaaaaacactgaccctctagaatcc

SEQ ID NO: 3657327 - DNA, 25 bp, Homo sapien
tttcttccttccaaaggtgctggac

SEQ ID NO: 3657328 - DNA, 25 bp, Homo sapien
gactttggaaacaaaggcttgttca

SEQ ID NO: 3657329 - DNA, 25 bp, Homo sapien
ggtgctggactttggaaacaaaggc

SEQ ID NO: 3657330 - DNA, 25 bp, Homo sapien
ttcttccttccaaaggtgctggact

SEQ ID NO: 3657331 - DNA, 25 bp, Homo sapien
tcctgggtgctgcacatcagcacga

SEQ ID NO: 3657332 - DNA, 25 bp, Homo sapien
tcctagggactccaattccttcagg

SEQ ID NO: 3657333 - DNA, 25 bp, Homo sapien
tgctgcacatcagcacgatcctgag

SEQ ID NO: 3657334 - DNA, 25 bp, Homo sapien
agcacgatcctgagcttcagctctt

SEQ ID NO: 3657335 - DNA, 25 bp, Homo sapien
aaggagtggtccactgaatgtggca

SEQ ID NO: 3657336 - DNA, 25 bp, Homo sapien
cagagaggacctcagtgaggtgcct

SEQ ID NO: 3657337 - DNA, 25 bp, Homo sapien
ctggagagcagtgagcagaaggagt

SEQ ID NO: 3657338 - DNA, 25 bp, Homo sapien
cctcagtgaggtgcctggagccatc

SEQ ID NO: 3657339 - DNA, 25 bp, Homo sapien
ctgggagcatgggtgtttcaggagg

SEQ ID NO: 3657340 - DNA, 25 bp, Homo sapien
aatctgggagcatgggtgtttcagg

SEQ ID NO: 3657341 - DNA, 25 bp, Homo sapien
tctgggagcatgggtgtttcaggag

SEQ ID NO: 3657342 - DNA, 25 bp, Homo sapien
atctgggagcatgggtgtttcagga

SEQ ID NO: 3657343 - DNA, 25 bp, Homo sapien
taccactgggcatgttgtgcactgc

SEQ ID NO: 3657344 - DNA, 25 bp, Homo sapien
cactgggcatgttgtgcactgcaca

SEQ ID NO: 3657345 - DNA, 25 bp, Homo sapien
ctgcgggtccagggtaccactgggc

SEQ ID NO: 3657346 - DNA, 25 bp, Homo sapien
accactgggcatgttgtgcactgca

SEQ ID NO: 3657347 - DNA, 25 bp, Homo sapien
tgccctgctgcaagcgggagtcttc

SEQ ID NO: 3657348 - DNA, 25 bp, Homo sapien
ccctgtggcttatctgatcggtaca

SEQ ID NO: 3657349 - DNA, 25 bp, Homo sapien
gatcggtacattcaggacaggacac

SEQ ID NO: 3657350 - DNA, 25 bp, Homo sapien
tgagaacaccctgatctgctctggc

SEQ ID NO: 3657351 - DNA, 25 bp, Homo sapien
cagcaggtgaacatttgggaatctc

SEQ ID NO: 3657352 - DNA, 25 bp, Homo sapien
ggagtcagtccaaccctgcccttgt

SEQ ID NO: 3657353 - DNA, 25 bp, Homo sapien
cagttctttgagaccatttgtctga

SEQ ID NO: 3657354 - DNA, 25 bp, Homo sapien
gcaaggcttccagctaaagttatgg

SEQ ID NO: 3657355 - DNA, 25 bp, Homo sapien
cttactggaagaacagtgaatggtg

SEQ ID NO: 3657356 - DNA, 25 bp, Homo sapien
gttggtgatgtcaaaggcccttgcc

SEQ ID NO: 3657357 - DNA, 25 bp, Homo sapien
gacagtggcccgattgttgaacgaa

SEQ ID NO: 3657358 - DNA, 25 bp, Homo sapien
tgaatggtgttttcaataagggcat

SEQ ID NO: 3657359 - DNA, 25 bp, Homo sapien
ataaacctctgttgccgtattaacg

SEQ ID NO: 3657360 - DNA, 25 bp, Homo sapien
taacgggtctgtttgataacaataa

SEQ ID NO: 3657361 - DNA, 25 bp, Homo sapien
aggtgggcccgtgggagtcgcagtg

SEQ ID NO: 3657362 - DNA, 25 bp, Homo sapien
cagtggcttggcttaacgggtctgt

SEQ ID NO: 3657363 - DNA, 25 bp, Homo sapien
caagacagcgtctggtatggattct

SEQ ID NO: 3657364 - DNA, 25 bp, Homo sapien
aataggctcaggcttgcagcacgct

SEQ ID NO: 3657365 - DNA, 25 bp, Homo sapien
gctgagctttcaatttgcccctgcc

SEQ ID NO: 3657366 - DNA, 25 bp, Homo sapien
gattctctgcgtggtataaagtcca

SEQ ID NO: 3657367 - DNA, 25 bp, Homo sapien
atggagaaaggtcagtaagaggcaa

SEQ ID NO: 3657368 - DNA, 25 bp, Homo sapien
aacggtggaaactcttactgcctgt

SEQ ID NO: 3657369 - DNA, 25 bp, Homo sapien
gataactgggaaatgtcgagtgcag

SEQ ID NO: 3657370 - DNA, 25 bp, Homo sapien
tcccagcaatgtctgaacttgctct

SEQ ID NO: 3657371 - DNA, 25 bp, Homo sapien
ctccaaggtgcaagatttccaaaat

SEQ ID NO: 3657372 - DNA, 25 bp, Homo sapien
cccagcatccctgtattgctcctct

SEQ ID NO: 3657373 - DNA, 25 bp, Homo sapien
agcatccctgtattgctcctcttct

SEQ ID NO: 3657374 - DNA, 25 bp, Homo sapien
ttccagatgccactcatcccctctc

SEQ ID NO: 3657375 - DNA, 25 bp, Homo sapien
aacctatgaggtcactaatcttggg

SEQ ID NO: 3657376 - DNA, 25 bp, Homo sapien
tcataacctatgaggtcactaatct

SEQ ID NO: 3657377 - DNA, 25 bp, Homo sapien
cataacctatgaggtcactaatctt

SEQ ID NO: 3657378 - DNA, 25 bp, Homo sapien
taacctatgaggtcactaatcttgg

SEQ ID NO: 3657379 - DNA, 25 bp, Homo sapien
tcaaactcctaagctgacttacaca

SEQ ID NO: 3657380 - DNA, 25 bp, Homo sapien
acacaagagccaaacaacacagggg

SEQ ID NO: 3657381 - DNA, 25 bp, Homo sapien
caaactcctaagctgacttacacat

SEQ ID NO: 3657382 - DNA, 25 bp, Homo sapien
cacaggggtaaagattcaaactcct

SEQ ID NO: 3657383 - DNA, 25 bp, Homo sapien
tgaagccatgtctgattctaacgag

SEQ ID NO: 3657384 - DNA, 25 bp, Homo sapien
gccatgtctgattctaacgaggcgc

SEQ ID NO: 3657385 - DNA, 25 bp, Homo sapien
tgtctgattctaacgaggcgcgagt

SEQ ID NO: 3657386 - DNA, 25 bp, Homo sapien
ctgaagccatgtctgattctaacga

SEQ ID NO: 3657387 - DNA, 25 bp, Homo sapien
acttctcagttgagtctgcggaaga

SEQ ID NO: 3657388 - DNA, 25 bp, Homo sapien
gagtctgcggaagaaacactgctcc

SEQ ID NO: 3657389 - DNA, 25 bp, Homo sapien
tccacttagtcggtgacaggcagct

SEQ ID NO: 3657390 - DNA, 25 bp, Homo sapien
gaaaaggcagattcctggtgcctgc

SEQ ID NO: 3657391 - DNA, 25 bp, Homo sapien
aaacttctccagtcattagtttctc

SEQ ID NO: 3657392 - DNA, 25 bp, Homo sapien
ttttctgcacttgcctagaaacttc

SEQ ID NO: 3657393 - DNA, 25 bp, Homo sapien
atgttcatcccgtgtcattttctgc

SEQ ID NO: 3657394 - DNA, 25 bp, Homo sapien
tgttcatcccgtgtcattttctgca

SEQ ID NO: 3657395 - DNA, 25 bp, Homo sapien
cctcaaagcctgccggagacagaac

SEQ ID NO: 3657396 - DNA, 25 bp, Homo sapien
atgagggtcagaatgcccgcagcct

SEQ ID NO: 3657397 - DNA, 25 bp, Homo sapien
tgagggtcagaatgcccgcagcctt

SEQ ID NO: 3657398 - DNA, 25 bp, Homo sapien
gagggtcagaatgcccgcagccttc

SEQ ID NO: 3657399 - DNA, 25 bp, Homo sapien
gaagccccagtaattgtccaggcca

SEQ ID NO: 3657400 - DNA, 25 bp, Homo sapien
cgagtgtagattttggactcggcgc

SEQ ID NO: 3657401 - DNA, 25 bp, Homo sapien
ggccagccctcgagaatatttttgc

SEQ ID NO: 3657402 - DNA, 25 bp, Homo sapien
ttttgccagtttgcaacgagtgtag

SEQ ID NO: 3657403 - DNA, 25 bp, Homo sapien
gcttggtctgagggcgagtttcctt

SEQ ID NO: 3657404 - DNA, 25 bp, Homo sapien
ctgagggcgagtttccttatccttg

SEQ ID NO: 3657405 - DNA, 25 bp, Homo sapien
aacgccagcaaaggaagtgcatctt

SEQ ID NO: 3657406 - DNA, 25 bp, Homo sapien
acgccagcaaaggaagtgcatcttt

SEQ ID NO: 3657407 - DNA, 25 bp, Homo sapien
tgtggtgttgtagccgctctcataa

SEQ ID NO: 3657408 - DNA, 25 bp, Homo sapien
caccacgcgaagctgttgatctgga

SEQ ID NO: 3657409 - DNA, 25 bp, Homo sapien
tcatccaggaccgtctgggctgtgg

SEQ ID NO: 3657410 - DNA, 25 bp, Homo sapien
tccttcagctttccgcgtctgcacc

SEQ ID NO: 3657411 - DNA, 25 bp, Homo sapien
tacaaggaataagtcatctttggag

SEQ ID NO: 3657412 - DNA, 25 bp, Homo sapien
tgagtgtcaccttggaaactgttgc

SEQ ID NO: 3657413 - DNA, 25 bp, Homo sapien
taaaactgtctacaaggaataagtc

SEQ ID NO: 3657414 - DNA, 25 bp, Homo sapien
tagggttgtttgtccatccacctgc

SEQ ID NO: 3657415 - DNA, 25 bp, Homo sapien
cacagataattgcatctgtgaggtc

SEQ ID NO: 3657416 - DNA, 25 bp, Homo sapien
taacaattttcctggcacagataat

SEQ ID NO: 3657417 - DNA, 25 bp, Homo sapien
tctttaacaattttcctggcacaga

SEQ ID NO: 3657418 - DNA, 25 bp, Homo sapien
tgtctctttaacaattttcctggca

SEQ ID NO: 3657419 - DNA, 25 bp, Homo sapien
gacacagacctgctcactttcctct

SEQ ID NO: 3657420 - DNA, 25 bp, Homo sapien
agacctgctcactttcctcttgctg

SEQ ID NO: 3657421 - DNA, 25 bp, Homo sapien
tcttgctgctgctcattctctttcc

SEQ ID NO: 3657422 - DNA, 25 bp, Homo sapien
cacagacctgctcactttcctcttg

SEQ ID NO: 3657423 - DNA, 25 bp, Homo sapien
gggccggctggcaacgttcaccaga

SEQ ID NO: 3657424 - DNA, 25 bp, Homo sapien
ggcaacgttcaccagaacacagcag

SEQ ID NO: 3657425 - DNA, 25 bp, Homo sapien
gtgaaaattcgggttctctgagtgg

SEQ ID NO: 3657426 - DNA, 25 bp, Homo sapien
tgaaaattcgggttctctgagtggg

SEQ ID NO: 3657427 - DNA, 25 bp, Homo sapien
ttttccactcggacaggtctctgcc

SEQ ID NO: 3657428 - DNA, 25 bp, Homo sapien
ggtctctgccctcacaatgtttctt

SEQ ID NO: 3657429 - DNA, 25 bp, Homo sapien
cttttttccactcggacaggtctct

SEQ ID NO: 3657430 - DNA, 25 bp, Homo sapien
tctgccctcacaatgtttcttccag

SEQ ID NO: 3657431 - DNA, 25 bp, Homo sapien
caaagcatcctgggtccagttccag

SEQ ID NO: 3657432 - DNA, 25 bp, Homo sapien
aaagcatcctgggtccagttccagt

SEQ ID NO: 3657433 - DNA, 25 bp, Homo sapien
gcaaagcatcctgggtccagttcca

SEQ ID NO: 3657434 - DNA, 25 bp, Homo sapien
gacacaggcatttggacattcactg

SEQ ID NO: 3657435 - DNA, 25 bp, Homo sapien
caggcatttggacattcactgcaaa

SEQ ID NO: 3657436 - DNA, 25 bp, Homo sapien
agatgacacaggcatttggacattc

SEQ ID NO: 3657437 - DNA, 25 bp, Homo sapien
atattgggaggaaacgggacaagat

SEQ ID NO: 3657438 - DNA, 25 bp, Homo sapien
ttttttccaaggctagagcattgtg

SEQ ID NO: 3657439 - DNA, 25 bp, Homo sapien
ttgttttttccaaggctagagcatt

SEQ ID NO: 3657440 - DNA, 25 bp, Homo sapien
ttttccaaggctagagcattgtgga

SEQ ID NO: 3657441 - DNA, 25 bp, Homo sapien
tgttttttccaaggctagagcattg

SEQ ID NO: 3657442 - DNA, 25 bp, Homo sapien
ggattctctgccattgcgctgtggc

SEQ ID NO: 3657443 - DNA, 25 bp, Homo sapien
gtgtggaacacaggtgaagggctca

SEQ ID NO: 3657444 - DNA, 25 bp, Homo sapien
attctctgccattgcgctgtggccc

SEQ ID NO: 3657445 - DNA, 25 bp, Homo sapien
gctgtgtggaacacaggtgaagggc

SEQ ID NO: 3657446 - DNA, 25 bp, Homo sapien
tctaaagtagccaagcagtccaggg

SEQ ID NO: 3657447 - DNA, 25 bp, Homo sapien
gatgacctccatgaagaacatgtgc

SEQ ID NO: 3657448 - DNA, 25 bp, Homo sapien
gaatgatggatcctaattgttggga

SEQ ID NO: 3657449 - DNA, 25 bp, Homo sapien
gattggctttcatacttctagtctt

SEQ ID NO: 3657450 - DNA, 25 bp, Homo sapien
tagtttggaattcttagcagcaggg

SEQ ID NO: 3657451 - DNA, 25 bp, Homo sapien
tctcaaggcaagtatagatttcgtt

SEQ ID NO: 3657452 - DNA, 25 bp, Homo sapien
caggcagggaaatctagctgagttt

SEQ ID NO: 3657453 - DNA, 25 bp, Homo sapien
catcctcaccaagaattatgttgcc

SEQ ID NO: 3657454 - DNA, 25 bp, Homo sapien
agcaatctccccaccgcccgcgcag

SEQ ID NO: 3657455 - DNA, 25 bp, Homo sapien
tttttccctgcgctgccggccccat

SEQ ID NO: 3657456 - DNA, 25 bp, Homo sapien
agctgtgttcaaagggcctcccaag

SEQ ID NO: 3657457 - DNA, 25 bp, Homo sapien
gtgtttttccctgcgctgccggccc

SEQ ID NO: 3657458 - DNA, 25 bp, Homo sapien
gtgagctgtgttcaaagggcctccc

SEQ ID NO: 3657459 - DNA, 25 bp, Homo sapien
cagctatcggagaggaacgacttcc

SEQ ID NO: 3657460 - DNA, 25 bp, Homo sapien
tgatgatgaggctccactcttgagg

SEQ ID NO: 3657461 - DNA, 25 bp, Homo sapien
tgaggctccactcttgaggtccctg

SEQ ID NO: 3657462 - DNA, 25 bp, Homo sapien
ccctgtattgactctcagctatcgg

SEQ ID NO: 3657463 - DNA, 25 bp, Homo sapien
gtgcagcaggtccttgtcccggagc

SEQ ID NO: 3657464 - DNA, 25 bp, Homo sapien
ctgtgcagcaggtccttgtcccgga

SEQ ID NO: 3657465 - DNA, 25 bp, Homo sapien
agcaggtccttgtcccggagcagcc

SEQ ID NO: 3657466 - DNA, 25 bp, Homo sapien
gcagcaggtccttgtcccggagcag

SEQ ID NO: 3657467 - DNA, 25 bp, Homo sapien
aagttctagctttaattccttcaca

SEQ ID NO: 3657468 - DNA, 25 bp, Homo sapien
taagttctagctttaattccttcac

SEQ ID NO: 3657469 - DNA, 25 bp, Homo sapien
gtaagttctagctttaattccttca

SEQ ID NO: 3657470 - DNA, 25 bp, Homo sapien
atgatgtgtaaatcagagtgaggcc

SEQ ID NO: 3657471 - DNA, 25 bp, Homo sapien
gaaataatgatgtgtaaatcagagt

SEQ ID NO: 3657472 - DNA, 25 bp, Homo sapien
gaatatgaagaagctttcctttaga

SEQ ID NO: 3657473 - DNA, 25 bp, Homo sapien
gcttgtccgtggacagccttgactg

SEQ ID NO: 3657474 - DNA, 25 bp, Homo sapien
ctcaagtttcatccacgtcgttgcg

SEQ ID NO: 3657475 - DNA, 25 bp, Homo sapien
ccacgtcgttgcgtgtgtcagaagg

SEQ ID NO: 3657476 - DNA, 25 bp, Homo sapien
ctttcctacagcctaatcatgagga

SEQ ID NO: 3657477 - DNA, 25 bp, Homo sapien
agcctaatcatgaggacacaccagg

SEQ ID NO: 3657478 - DNA, 25 bp, Homo sapien
aattctactgctaagacctgtgtca

SEQ ID NO: 3657479 - DNA, 25 bp, Homo sapien
ccttgctctggagatacacgggaca

SEQ ID NO: 3657480 - DNA, 25 bp, Homo sapien
tctccatggtcctgccaattttcag

SEQ ID NO: 3657481 - DNA, 25 bp, Homo sapien
tgtgtttggaaaccttctccatggt

SEQ ID NO: 3657482 - DNA, 25 bp, Homo sapien
tcccaaactatgcttgttgggcata

SEQ ID NO: 3657483 - DNA, 25 bp, Homo sapien
gcattattaattcacaggaactttt

SEQ ID NO: 3657484 - DNA, 25 bp, Homo sapien
aagtctcgttataatcacattaagc

SEQ ID NO: 3657485 - DNA, 25 bp, Homo sapien
aggaacatggaaacgctggaggtcc

SEQ ID NO: 3657486 - DNA, 25 bp, Homo sapien
acatcaatgtgccagacttctctac

SEQ ID NO: 3657487 - DNA, 25 bp, Homo sapien
gccatatctggtgataacatcaatg

SEQ ID NO: 3657488 - DNA, 25 bp, Homo sapien
gccagacttctctacttatatcact

SEQ ID NO: 3657489 - DNA, 25 bp, Homo sapien
ccctcctatgaagccatatctggtg

SEQ ID NO: 3657490 - DNA, 25 bp, Homo sapien
ctgggagagtgagagagtccagact

SEQ ID NO: 3657491 - DNA, 25 bp, Homo sapien
agacttggcaggctatgaaacagag

SEQ ID NO: 3657492 - DNA, 25 bp, Homo sapien
agagtgagagagtccagacttggca

SEQ ID NO: 3657493 - DNA, 25 bp, Homo sapien
aggctatgaaacagagagatgccca

SEQ ID NO: 3657494 - DNA, 25 bp, Homo sapien
caatttccgaaaaataaatggatgc

SEQ ID NO: 3657495 - DNA, 25 bp, Homo sapien
tctggtagctccctcttcgtaactg

SEQ ID NO: 3657496 - DNA, 25 bp, Homo sapien
gtagttgcatatctacttgccgcaa

SEQ ID NO: 3657497 - DNA, 25 bp, Homo sapien
ttgccgcaatcgaaaacaatttccg

SEQ ID NO: 3657498 - DNA, 25 bp, Homo sapien
ttaggtttggcatcaaagctgcaaa

SEQ ID NO: 3657499 - DNA, 25 bp, Homo sapien
tcggatgacgtggaaagcaaatgtt

SEQ ID NO: 3657500 - DNA, 25 bp, Homo sapien
taacgcgttaggtttggcatcaaag

SEQ ID NO: 3657501 - DNA, 25 bp, Homo sapien
gcaaacattcggatgacgtggaaag

SEQ ID NO: 3657502 - DNA, 25 bp, Homo sapien
tgtcaatctatttcattttttatca

SEQ ID NO: 3657503 - DNA, 25 bp, Homo sapien
caatctatttcattttttatcacac

SEQ ID NO: 3657504 - DNA, 25 bp, Homo sapien
tcaatctatttcattttttatcaca

SEQ ID NO: 3657505 - DNA, 25 bp, Homo sapien
atctatttcattttttatcacactt

SEQ ID NO: 3657506 - DNA, 25 bp, Homo sapien
gccaatgaatcactggggaaggaag

SEQ ID NO: 3657507 - DNA, 25 bp, Homo sapien
ctggccaatgaatcactggggaagg

SEQ ID NO: 3657508 - DNA, 25 bp, Homo sapien
tggccaatgaatcactggggaagga

SEQ ID NO: 3657509 - DNA, 25 bp, Homo sapien
ttctctggacttgtagtttaaattg

SEQ ID NO: 3657510 - DNA, 25 bp, Homo sapien
gaattgtgagcgtcacctcaaatac

SEQ ID NO: 3657511 - DNA, 25 bp, Homo sapien
tataaatcttataccctgagatatc

SEQ ID NO: 3657512 - DNA, 25 bp, Homo sapien
gatatctccttgaattgtgagcgtc

SEQ ID NO: 3657513 - DNA, 25 bp, Homo sapien
gggctccagtgagaggcataaatta

SEQ ID NO: 3657514 - DNA, 25 bp, Homo sapien
catcagcaagaatgtcccagtacac

SEQ ID NO: 3657515 - DNA, 25 bp, Homo sapien
tgcaaaagaacaacttacaagagga

SEQ ID NO: 3657516 - DNA, 25 bp, Homo sapien
gatctactgcaaaatatgttatctt

SEQ ID NO: 3657517 - DNA, 25 bp, Homo sapien
cgctggcatgcccacgttctgcagg

SEQ ID NO: 3657518 - DNA, 25 bp, Homo sapien
tgtcctccgcgagcctgtctcctcg

SEQ ID NO: 3657519 - DNA, 25 bp, Homo sapien
ctgcttctgcctgcggctctcggaa

SEQ ID NO: 3657520 - DNA, 25 bp, Homo sapien
gctctcggaaccctccttctgtcct

SEQ ID NO: 3657521 - DNA, 25 bp, Homo sapien
gcagagctgcttcagaaggtgaggg

SEQ ID NO: 3657522 - DNA, 25 bp, Homo sapien
ttcagaaggtgagggtctcggtcat

SEQ ID NO: 3657523 - DNA, 25 bp, Homo sapien
gtgagggtctcggtcatcagggatg

SEQ ID NO: 3657524 - DNA, 25 bp, Homo sapien
atgaggtggtctggagtctgcatcc

SEQ ID NO: 3657525 - DNA, 25 bp, Homo sapien
aggctcttcagggtgcaacacgtcc

SEQ ID NO: 3657526 - DNA, 25 bp, Homo sapien
tctttgctgacacggtgggctctga

SEQ ID NO: 3657527 - DNA, 25 bp, Homo sapien
cggagggcgagttccttatgtgtct

SEQ ID NO: 3657528 - DNA, 25 bp, Homo sapien
tcttcagggtgcaacacgtcctcgt

SEQ ID NO: 3657529 - DNA, 25 bp, Homo sapien
ctggacttgcccaccccactctcac

SEQ ID NO: 3657530 - DNA, 25 bp, Homo sapien
aaagacacaacactaatcttttgtc

SEQ ID NO: 3657531 - DNA, 25 bp, Homo sapien
cgtggaccacttacactaaagagaa

SEQ ID NO: 3657532 - DNA, 25 bp, Homo sapien
tttcaaaggtggtccgactgcttca

SEQ ID NO: 3657533 - DNA, 25 bp, Homo sapien
actgcttcagccgtggaccacttac

SEQ ID NO: 3657534 - DNA, 25 bp, Homo sapien
tctggatcaaaggtatcatctgtga

SEQ ID NO: 3657535 - DNA, 25 bp, Homo sapien
ggatcaaaggtatcatctgtgaacc

SEQ ID NO: 3657536 - DNA, 25 bp, Homo sapien
aagttctggatcaaaggtatcatct

SEQ ID NO: 3657537 - DNA, 25 bp, Homo sapien
gttctggatcaaaggtatcatctgt

SEQ ID NO: 3657538 - DNA, 25 bp, Homo sapien
aagtcccatgatacaacagataagg

SEQ ID NO: 3657539 - DNA, 25 bp, Homo sapien
gcttcaagagatttaacgataccaa

SEQ ID NO: 3657540 - DNA, 25 bp, Homo sapien
cccacctcttagtaacagtgcctgg

SEQ ID NO: 3657541 - DNA, 25 bp, Homo sapien
tgtactttactgttaggtccatgat

SEQ ID NO: 3657542 - DNA, 25 bp, Homo sapien
taaaacttgtttggagctcactggg

SEQ ID NO: 3657543 - DNA, 25 bp, Homo sapien
gttagatacatatgaagcgcctggc

SEQ ID NO: 3657544 - DNA, 25 bp, Homo sapien
gctagaaatcgtgaatcctgggtaa

SEQ ID NO: 3657545 - DNA, 25 bp, Homo sapien
tgggtaacattgcagtcgataacgc

SEQ ID NO: 3657546 - DNA, 25 bp, Homo sapien
agctgctgtactgcctgaagaccga

SEQ ID NO: 3657547 - DNA, 25 bp, Homo sapien
ctgtactgcctgaagaccgagcact

SEQ ID NO: 3657548 - DNA, 25 bp, Homo sapien
ccatgcagctgctgtactgcctgaa

SEQ ID NO: 3657549 - DNA, 25 bp, Homo sapien
caggccaaagccatgcagctgctgt

SEQ ID NO: 3657550 - DNA, 25 bp, Homo sapien
agtggacaccccctctacctgacca

SEQ ID NO: 3657551 - DNA, 25 bp, Homo sapien
cctctacctgaccagcttcttcaga

SEQ ID NO: 3657552 - DNA, 25 bp, Homo sapien
gtggacaccccctctacctgaccag

SEQ ID NO: 3657553 - DNA, 25 bp, Homo sapien
tgaccagcttcttcagaggacacat

SEQ ID NO: 3657554 - DNA, 25 bp, Homo sapien
gatgagcactgaggccgatatcacc

SEQ ID NO: 3657555 - DNA, 25 bp, Homo sapien
tgcgcgaggtacaagatgctctgcg

SEQ ID NO: 3657556 - DNA, 25 bp, Homo sapien
tggacagtacagtgcaggatctgcg

SEQ ID NO: 3657557 - DNA, 25 bp, Homo sapien
tgaatgtctcccactttggtgtagg

SEQ ID NO: 3657558 - DNA, 25 bp, Homo sapien
ccaagggggagcaacgttttgtgca

SEQ ID NO: 3657559 - DNA, 25 bp, Homo sapien
ttctttcaccggccaagggggagca

SEQ ID NO: 3657560 - DNA, 25 bp, Homo sapien
tctttcaccggccaagggggagcaa

SEQ ID NO: 3657561 - DNA, 25 bp, Homo sapien
gagcaacgttttgtgcagggccact

SEQ ID NO: 3657562 - DNA, 25 bp, Homo sapien
taatatcaggttagagtactcccac

SEQ ID NO: 3657563 - DNA, 25 bp, Homo sapien
tatcacttaggcgactgagcacagt

SEQ ID NO: 3657564 - DNA, 25 bp, Homo sapien
gaaggatgctttgtatcaaccatgc

SEQ ID NO: 3657565 - DNA, 25 bp, Homo sapien
caaattgtctgccatatagccacag

SEQ ID NO: 3657566 - DNA, 25 bp, Homo sapien
gccagttttcaatatacccaaagga

SEQ ID NO: 3657567 - DNA, 25 bp, Homo sapien
agatgacacgttagtgggtgcagcg

SEQ ID NO: 3657568 - DNA, 25 bp, Homo sapien
tgtgccagttttcaatatacccaaa

SEQ ID NO: 3657569 - DNA, 25 bp, Homo sapien
ctataaatcatgctgctataaagac

SEQ ID NO: 3657570 - DNA, 25 bp, Homo sapien
caagaaatggagtttagatgccagt

SEQ ID NO: 3657571 - DNA, 25 bp, Homo sapien
aataatgctagtagaacccacgagg

SEQ ID NO: 3657572 - DNA, 25 bp, Homo sapien
gagtaaccgttgagcactgagcctt

SEQ ID NO: 3657573 - DNA, 25 bp, Homo sapien
cccacgaggttgttagccatgctac

SEQ ID NO: 3657574 - DNA, 25 bp, Homo sapien
gagacccttaatccaatagcctgag

SEQ ID NO: 3657575 - DNA, 25 bp, Homo sapien
gcagctaactctatgggagacgacc

SEQ ID NO: 3657576 - DNA, 25 bp, Homo sapien
tcatagggctaagacagaaccagga

SEQ ID NO: 3657577 - DNA, 25 bp, Homo sapien
taacttaggcagttcagggcggatc

SEQ ID NO: 3657578 - DNA, 25 bp, Homo sapien
caggcgatttcgttgtgtgcaaaca

SEQ ID NO: 3657579 - DNA, 25 bp, Homo sapien
acacaaaccaaggtgggagagcctg

SEQ ID NO: 3657580 - DNA, 25 bp, Homo sapien
caaagacacggtctggccagggtgt

SEQ ID NO: 3657581 - DNA, 25 bp, Homo sapien
cttcctgagaaggtggtacacgtgc

SEQ ID NO: 3657582 - DNA, 25 bp, Homo sapien
gatctcaagagacattcctcaaaag

SEQ ID NO: 3657583 - DNA, 25 bp, Homo sapien
cagaagaggcaacccaaaaaatggg

SEQ ID NO: 3657584 - DNA, 25 bp, Homo sapien
gcttctgcatggcaatggaaacaga

SEQ ID NO: 3657585 - DNA, 25 bp, Homo sapien
tgaggagctcaatcaacttaatcag

SEQ ID NO: 3657586 - DNA, 25 bp, Homo sapien
taaagctatctaatggcccacagtg

SEQ ID NO: 3657587 - DNA, 25 bp, Homo sapien
gaagctatttttagggaaccacaga

SEQ ID NO: 3657588 - DNA, 25 bp, Homo sapien
cattgatgtattctccggccaggaa

SEQ ID NO: 3657589 - DNA, 25 bp, Homo sapien
tatgacacgctctcggcacattgat

SEQ ID NO: 3657590 - DNA, 25 bp, Homo sapien
gggccacagccactcatattagtat

SEQ ID NO: 3657591 - DNA, 25 bp, Homo sapien
tcaacaggttttagactcaagacag

SEQ ID NO: 3657592 - DNA, 25 bp, Homo sapien
gaagctctcaagactgttccctggg

SEQ ID NO: 3657593 - DNA, 25 bp, Homo sapien
ggaataacagatcccaatcaacagg

SEQ ID NO: 3657594 - DNA, 25 bp, Homo sapien
cccatgctaagccaatcagtgtcct

SEQ ID NO: 3657595 - DNA, 25 bp, Homo sapien
tacttccaggatacaactgactgac

SEQ ID NO: 3657596 - DNA, 25 bp, Homo sapien
agtacttaattggtctataggcagg

SEQ ID NO: 3657597 - DNA, 25 bp, Homo sapien
tcaccggagccaagatattgttact

SEQ ID NO: 3657598 - DNA, 25 bp, Homo sapien
gccctgcgctagcacttctatcttg

SEQ ID NO: 3657599 - DNA, 25 bp, Homo sapien
cagcaagcaatatggtacgtggaaa

SEQ ID NO: 3657600 - DNA, 25 bp, Homo sapien
gaaaatggcggacttgcgtttccca

SEQ ID NO: 3657601 - DNA, 25 bp, Homo sapien
gaaaccattagaggtgctgactctg

SEQ ID NO: 3657602 - DNA, 25 bp, Homo sapien
cacagcatctgctgaagtctatttc

SEQ ID NO: 3657603 - DNA, 25 bp, Homo sapien
tccagagccctcattatttgcagtg

SEQ ID NO: 3657604 - DNA, 25 bp, Homo sapien
gcagtggtccgcattcattcatgaa

SEQ ID NO: 3657605 - DNA, 25 bp, Homo sapien
tatcatgttgcacattccagagccc

SEQ ID NO: 3657606 - DNA, 25 bp, Homo sapien
gtgaataagacaccccagcttggag

SEQ ID NO: 3657607 - DNA, 25 bp, Homo sapien
tgagatcgatatcagaggtgccgcg

SEQ ID NO: 3657608 - DNA, 25 bp, Homo sapien
gaagggacctagctgaaacacttga

SEQ ID NO: 3657609 - DNA, 25 bp, Homo sapien
aatgcaggacctccatgcgatggcg

SEQ ID NO: 3657610 - DNA, 25 bp, Homo sapien
gccaagtgctagatacctgccagta

SEQ ID NO: 3657611 - DNA, 25 bp, Homo sapien
gaagctctttgaaaatcgccaagtg

SEQ ID NO: 3657612 - DNA, 25 bp, Homo sapien
gttccatagataacacgcaagaggt

SEQ ID NO: 3657613 - DNA, 25 bp, Homo sapien
gaccgcaccagggtagaaacctata

SEQ ID NO: 3657614 - DNA, 25 bp, Homo sapien
tacttaatggcatggactctggaga

SEQ ID NO: 3657615 - DNA, 25 bp, Homo sapien
tctccccaaaaatgtatagtgcctt

SEQ ID NO: 3657616 - DNA, 25 bp, Homo sapien
tctggagaatctatgcgaatcaacc

SEQ ID NO: 3657617 - DNA, 25 bp, Homo sapien
taataccggttgtaaacagtacaca

SEQ ID NO: 3657618 - DNA, 25 bp, Homo sapien
taaagatactgcttgtcccggagtt

SEQ ID NO: 3657619 - DNA, 25 bp, Homo sapien
tcttgttccagctaggcaatgcctt

SEQ ID NO: 3657620 - DNA, 25 bp, Homo sapien
gacttgttctgagtactgcttccgg

SEQ ID NO: 3657621 - DNA, 25 bp, Homo sapien
tgttatgtgcacttaagccgcagct

SEQ ID NO: 3657622 - DNA, 25 bp, Homo sapien
cctctgaagcttgagatctatctca

SEQ ID NO: 3657623 - DNA, 25 bp, Homo sapien
catgacgagggatgaatacaacgcc

SEQ ID NO: 3657624 - DNA, 25 bp, Homo sapien
ccaatgtttccagtttgcactagac

SEQ ID NO: 3657625 - DNA, 25 bp, Homo sapien
tatctcaccgacgaagacttcgagg

SEQ ID NO: 3657626 - DNA, 25 bp, Homo sapien
tatggaactatgcatcctcaggcag

SEQ ID NO: 3657627 - DNA, 25 bp, Homo sapien
gatcaccctcgtggaagacgtctta

SEQ ID NO: 3657628 - DNA, 25 bp, Homo sapien
ttcaaatgtaggacacgagctctcc

SEQ ID NO: 3657629 - DNA, 25 bp, Homo sapien
attaaaagtccagacaactgcaggg

SEQ ID NO: 3657630 - DNA, 25 bp, Homo sapien
tcagtactcagacgcaggcaagatc

SEQ ID NO: 3657631 - DNA, 25 bp, Homo sapien
ccattttactggtgtgggagcagag

SEQ ID NO: 3657632 - DNA, 25 bp, Homo sapien
taaattattaggtgcgcgtggtggc

SEQ ID NO: 3657633 - DNA, 25 bp, Homo sapien
cctgtgggattccagccggagaaga

SEQ ID NO: 3657634 - DNA, 25 bp, Homo sapien
ggttaggcatcatggtgggtaaggg

SEQ ID NO: 3657635 - DNA, 25 bp, Homo sapien
gggaacaggacataagtctcaaatc

SEQ ID NO: 3657636 - DNA, 25 bp, Homo sapien
tttgggtgctacagccaaggggaac

SEQ ID NO: 3657637 - DNA, 25 bp, Homo sapien
ttagggatttttatagcagggaaga

SEQ ID NO: 3657638 - DNA, 25 bp, Homo sapien
tataagatgctgtcgttcgccgtca

SEQ ID NO: 3657639 - DNA, 25 bp, Homo sapien
ggagatatgcggtgctaacagcccc

SEQ ID NO: 3657640 - DNA, 25 bp, Homo sapien
tggtggcccatcgagaacaagatca

SEQ ID NO: 3657641 - DNA, 25 bp, Homo sapien
gaagtgtccgtgaaggagctcctga

SEQ ID NO: 3657642 - DNA, 25 bp, Homo sapien
tgcaggaagatctgtacagcgcgcc

SEQ ID NO: 3657643 - DNA, 25 bp, Homo sapien
tatgctgagcagtagaaggcacatc

SEQ ID NO: 3657644 - DNA, 25 bp, Homo sapien
taagaacaggttgagcaccacagcg

SEQ ID NO: 3657645 - DNA, 25 bp, Homo sapien
acagagtttgtgtaccctgcccgag

SEQ ID NO: 3657646 - DNA, 25 bp, Homo sapien
tacacgagtgtgatgaaggctccga

SEQ ID NO: 3657647 - DNA, 25 bp, Homo sapien
tagcagcaaagtcacaatacacgag

SEQ ID NO: 3657648 - DNA, 25 bp, Homo sapien
gactgctaacgggtacagggcttct

SEQ ID NO: 3657649 - DNA, 25 bp, Homo sapien
cagggcttcttcttccgggagatga

SEQ ID NO: 3657650 - DNA, 25 bp, Homo sapien
actcagtcacaaaggaacatatatt

SEQ ID NO: 3657651 - DNA, 25 bp, Homo sapien
catattagtcatagtggccaaaaga

SEQ ID NO: 3657652 - DNA, 25 bp, Homo sapien
caactctactagatatctacccaag

SEQ ID NO: 3657653 - DNA, 25 bp, Homo sapien
cccttacacattacttggaaaacag

SEQ ID NO: 3657654 - DNA, 25 bp, Homo sapien
taattttcatgacacattagatgtg

SEQ ID NO: 3657655 - DNA, 25 bp, Homo sapien
gatgtgattaaacatccctccctag

SEQ ID NO: 3657656 - DNA, 25 bp, Homo sapien
cacacacttagagactgcagagcat

SEQ ID NO: 3657657 - DNA, 25 bp, Homo sapien
tagaagagacggtgaactgatctcc

SEQ ID NO: 3657658 - DNA, 25 bp, Homo sapien
tttattgagtacctgattggcgcca

SEQ ID NO: 3657659 - DNA, 25 bp, Homo sapien
caatctggaattacaggacttatcc

SEQ ID NO: 3657660 - DNA, 25 bp, Homo sapien
ccaaaggactggagttaggaactgg

SEQ ID NO: 3657661 - DNA, 25 bp, Homo sapien
catcatgaactttgggcaacctgct

SEQ ID NO: 3657662 - DNA, 25 bp, Homo sapien
tcggaaggtccaggttctccaggga

SEQ ID NO: 3657663 - DNA, 25 bp, Homo sapien
caaagtaagtcacttttactgctgg

SEQ ID NO: 3657664 - DNA, 25 bp, Homo sapien
aaggagcccccctgtttcctgcagt

SEQ ID NO: 3657665 - DNA, 25 bp, Homo sapien
gatggtggtgcactcggggaggcgg

SEQ ID NO: 3657666 - DNA, 25 bp, Homo sapien
tgtcctagagggaggtgactcaaac

SEQ ID NO: 3657667 - DNA, 25 bp, Homo sapien
cattattcgtggtgcagataacacc

SEQ ID NO: 3657668 - DNA, 25 bp, Homo sapien
gcatgagccatggtccagctctgga

SEQ ID NO: 3657669 - DNA, 25 bp, Homo sapien
caattggttatgcaaaatgggcaca

SEQ ID NO: 3657670 - DNA, 25 bp, Homo sapien
catggactattgacttggaggccct

SEQ ID NO: 3657671 - DNA, 25 bp, Homo sapien
taaagcagggagcattcagattcca

SEQ ID NO: 3657672 - DNA, 25 bp, Homo sapien
tgcagtcactccgtaaccaacgcgg

SEQ ID NO: 3657673 - DNA, 25 bp, Homo sapien
gacaagataatgtggatctccccaa

SEQ ID NO: 3657674 - DNA, 25 bp, Homo sapien
tacggaagacactttgtagggacca

SEQ ID NO: 3657675 - DNA, 25 bp, Homo sapien
tgctgatcagaaaactgcaggctca

SEQ ID NO: 3657676 - DNA, 25 bp, Homo sapien
catttaggagagcatgcaggtcaca

SEQ ID NO: 3657677 - DNA, 25 bp, Homo sapien
tactgggctccctgagacatttctg

SEQ ID NO: 3657678 - DNA, 25 bp, Homo sapien
gaatgcaatccgcttatccccaggt

SEQ ID NO: 3657679 - DNA, 25 bp, Homo sapien
aagaccgccgtgcattttccatagg

SEQ ID NO: 3657680 - DNA, 25 bp, Homo sapien
tacatgcggatctgaaaggcttccc

SEQ ID NO: 3657681 - DNA, 25 bp, Homo sapien
ggatgactgagctcctaacccactg

SEQ ID NO: 3657682 - DNA, 25 bp, Homo sapien
caggctgcccaatagattagagagt

SEQ ID NO: 3657683 - DNA, 25 bp, Homo sapien
agttcccaataaaggttagccagtg

SEQ ID NO: 3657684 - DNA, 25 bp, Homo sapien
ccagtgtcggtatccattgtagaac

SEQ ID NO: 3657685 - DNA, 25 bp, Homo sapien
cttaaatgctaatatggaatccaga

SEQ ID NO: 3657686 - DNA, 25 bp, Homo sapien
gcaccggaggagtgttcttcctgac

SEQ ID NO: 3657687 - DNA, 25 bp, Homo sapien
cgcaccggaggagtgttcttcctga

SEQ ID NO: 3657688 - DNA, 25 bp, Homo sapien
ggaaagcagccgctagtgccatcat

SEQ ID NO: 3657689 - DNA, 25 bp, Homo sapien
gaggcccctagggttcatagtggaa

SEQ ID NO: 3657690 - DNA, 25 bp, Homo sapien
gagccttcattaacccacgcacatg

SEQ ID NO: 3657691 - DNA, 25 bp, Homo sapien
tgcctgggccacagatgtaattggg

SEQ ID NO: 3657692 - DNA, 25 bp, Homo sapien
gaccctgagcttctcggagttggga

SEQ ID NO: 3657693 - DNA, 25 bp, Homo sapien
caaacgccagtgcttttcagatcgt

SEQ ID NO: 3657694 - DNA, 25 bp, Homo sapien
ttcagatcgttcttggtaggaccct

SEQ ID NO: 3657695 - DNA, 25 bp, Homo sapien
gctctgtagatcctgaacacacaat

SEQ ID NO: 3657696 - DNA, 25 bp, Homo sapien
tgccaaattttaccgcagcgtggat

SEQ ID NO: 3657697 - DNA, 25 bp, Homo sapien
ccagatgatgatgaaacctttgcca

SEQ ID NO: 3657698 - DNA, 25 bp, Homo sapien
cctcaacagaagcaagggcaggttc

SEQ ID NO: 3657699 - DNA, 25 bp, Homo sapien
cgtgtgtgcagtatggtcagcctcc

SEQ ID NO: 3657700 - DNA, 25 bp, Homo sapien
tcttgaatctaagcccttgggatgc

SEQ ID NO: 3657701 - DNA, 25 bp, Homo sapien
aagaggccttagtgatgctgtctca

SEQ ID NO: 3657702 - DNA, 25 bp, Homo sapien
gcctagatatcgaagccagaccaga

SEQ ID NO: 3657703 - DNA, 25 bp, Homo sapien
caaaggtacctactggaagccagaa

SEQ ID NO: 3657704 - DNA, 25 bp, Homo sapien
cacttggttagtaaagttactggag

SEQ ID NO: 3657705 - DNA, 25 bp, Homo sapien
cagttcctaggcagtgggatgtccc

SEQ ID NO: 3657706 - DNA, 25 bp, Homo sapien
ggagagctttgaggcttcataagag

SEQ ID NO: 3657707 - DNA, 25 bp, Homo sapien
gatgtctaaaatatgtcctcagttc

SEQ ID NO: 3657708 - DNA, 25 bp, Homo sapien
aacgtgccactgcaaaacttatgga

SEQ ID NO: 3657709 - DNA, 25 bp, Homo sapien
tcagctgcttacaagagaattgcct

SEQ ID NO: 3657710 - DNA, 25 bp, Homo sapien
gcctggtatttgtgggcagagtgtg

SEQ ID NO: 3657711 - DNA, 25 bp, Homo sapien
agagtcgtgctgttatcgcccgggc

SEQ ID NO: 3657712 - DNA, 25 bp, Homo sapien
ggaaacacaatcagatagttacagc

SEQ ID NO: 3657713 - DNA, 25 bp, Homo sapien
tagctaattgaagcggccactttag

SEQ ID NO: 3657714 - DNA, 25 bp, Homo sapien
tcatctaaactgtagctaattgaag

SEQ ID NO: 3657715 - DNA, 25 bp, Homo sapien
ccattgacaaattccgtgacagggt

SEQ ID NO: 3657716 - DNA, 25 bp, Homo sapien
caacctcagcacagcgtttgttctg

SEQ ID NO: 3657717 - DNA, 25 bp, Homo sapien
gggtaattaccttacccatcatcca

SEQ ID NO: 3657718 - DNA, 25 bp, Homo sapien
tatccttgtagtcagtatcatgtga

SEQ ID NO: 3657719 - DNA, 25 bp, Homo sapien
tatcatgtgagaatctcccaacctc

SEQ ID NO: 3657720 - DNA, 25 bp, Homo sapien
tattccaacacgagtcttcatgagg

SEQ ID NO: 3657721 - DNA, 25 bp, Homo sapien
atttcctcttttattccaacacgag

SEQ ID NO: 3657722 - DNA, 25 bp, Homo sapien
cacgagtcttcatgaggctttccaa

SEQ ID NO: 3657723 - DNA, 25 bp, Homo sapien
tcttttattccaacacgagtcttca

SEQ ID NO: 3657724 - DNA, 25 bp, Homo sapien
gaaggtcagcttcacagtgagtctt

SEQ ID NO: 3657725 - DNA, 25 bp, Homo sapien
aggtcagcttcacagtgagtctttt

SEQ ID NO: 3657726 - DNA, 25 bp, Homo sapien
gggaaggtcagcttcacagtgagtc

SEQ ID NO: 3657727 - DNA, 25 bp, Homo sapien
ggaaggtcagcttcacagtgagtct

SEQ ID NO: 3657728 - DNA, 25 bp, Homo sapien
aattcagcggagtatttaactcagg

SEQ ID NO: 3657729 - DNA, 25 bp, Homo sapien
taaattcagcggagtatttaactca

SEQ ID NO: 3657730 - DNA, 25 bp, Homo sapien
tctgtaaattcagcggagtatttaa

SEQ ID NO: 3657731 - DNA, 25 bp, Homo sapien
cagcggagtatttaactcagggaca

SEQ ID NO: 3657732 - DNA, 25 bp, Homo sapien
ggtgctcactgatgaaccgtcctga

SEQ ID NO: 3657733 - DNA, 25 bp, Homo sapien
gcttgtgtttcatcagcgtcagatg

SEQ ID NO: 3657734 - DNA, 25 bp, Homo sapien
gagtctggaccctcacaggtgcttg

SEQ ID NO: 3657735 - DNA, 25 bp, Homo sapien
cgtcagatgagccaaaaaaggtgct

SEQ ID NO: 3657736 - DNA, 25 bp, Homo sapien
ccaaggcctgcagaggttgaccctg

SEQ ID NO: 3657737 - DNA, 25 bp, Homo sapien
ttttggttgagctctagtgagacac

SEQ ID NO: 3657738 - DNA, 25 bp, Homo sapien
gctctagtgagacaccaaggcctgc

SEQ ID NO: 3657739 - DNA, 25 bp, Homo sapien
cctgcagaggttgaccctgcagaca

SEQ ID NO: 3657740 - DNA, 25 bp, Homo sapien
cttagaagaaatctggtcaaccaga

SEQ ID NO: 3657741 - DNA, 25 bp, Homo sapien
aaatgggctggaggtacaagagcct

SEQ ID NO: 3657742 - DNA, 25 bp, Homo sapien
ggctggaggtacaagagcctgcttc

SEQ ID NO: 3657743 - DNA, 25 bp, Homo sapien
tccttagaagaaatctggtcaacca

SEQ ID NO: 3657744 - DNA, 25 bp, Homo sapien
tccaccagggcctgattcatttgtt

SEQ ID NO: 3657745 - DNA, 25 bp, Homo sapien
gtccaccagggcctgattcatttgt

SEQ ID NO: 3657746 - DNA, 25 bp, Homo sapien
ccctggtttcgagcaaggtctgtgg

SEQ ID NO: 3657747 - DNA, 25 bp, Homo sapien
ggtagccctggtttcgagcaaggtc

SEQ ID NO: 3657748 - DNA, 25 bp, Homo sapien
caaggtctgtgggatcaaaactaga

SEQ ID NO: 3657749 - DNA, 25 bp, Homo sapien
tagccctggtttcgagcaaggtctg

SEQ ID NO: 3657750 - DNA, 25 bp, Homo sapien
tccctgtaagtctgagctgccgctg

SEQ ID NO: 3657751 - DNA, 25 bp, Homo sapien
gaacaagtgacagcgtctgactccc

SEQ ID NO: 3657752 - DNA, 25 bp, Homo sapien
aaggagagttgcctcaaaggacagc

SEQ ID NO: 3657753 - DNA, 25 bp, Homo sapien
cagtccctgaaggtttaataccgtg

SEQ ID NO: 3657754 - DNA, 25 bp, Homo sapien
gccccactcatgagaatcacagtca

SEQ ID NO: 3657755 - DNA, 25 bp, Homo sapien
tagagccccactcatgagaatcaca

SEQ ID NO: 3657756 - DNA, 25 bp, Homo sapien
ctagagccccactcatgagaatcac

SEQ ID NO: 3657757 - DNA, 25 bp, Homo sapien
gagccccactcatgagaatcacagt

SEQ ID NO: 3657758 - DNA, 25 bp, Homo sapien
cctggcacctgggtcctacggagag

SEQ ID NO: 3657759 - DNA, 25 bp, Homo sapien
acctgggtcctacggagagggcaat

SEQ ID NO: 3657760 - DNA, 25 bp, Homo sapien
tgcttggacgatatgggcctggctc

SEQ ID NO: 3657761 - DNA, 25 bp, Homo sapien
caggcaccgaagaccgcgttgcctg

SEQ ID NO: 3657762 - DNA, 25 bp, Homo sapien
tctcgcttagggagcggtttgcatg

SEQ ID NO: 3657763 - DNA, 25 bp, Homo sapien
cacaaggcagctctcgcttagggag

SEQ ID NO: 3657764 - DNA, 25 bp, Homo sapien
gaggtgctttgaattccgggacaga

SEQ ID NO: 3657765 - DNA, 25 bp, Homo sapien
gggattgcagtctctgttgacaacg

SEQ ID NO: 3657766 - DNA, 25 bp, Homo sapien
tctgcaaccatcatggagtgcattt

SEQ ID NO: 3657767 - DNA, 25 bp, Homo sapien
gggtgatttcgtcattctgcaacca

SEQ ID NO: 3657768 - DNA, 25 bp, Homo sapien
tacctgctgagaaatatgtccttgg

SEQ ID NO: 3657769 - DNA, 25 bp, Homo sapien
tgcttaacaacaggagtacctgctg

SEQ ID NO: 3657770 - DNA, 25 bp, Homo sapien
agtgttttccctgctctcggtgcag

SEQ ID NO: 3657771 - DNA, 25 bp, Homo sapien
aagtgttttccctgctctcggtgca

SEQ ID NO: 3657772 - DNA, 25 bp, Homo sapien
gttttccctgctctcggtgcaggag

SEQ ID NO: 3657773 - DNA, 25 bp, Homo sapien
tgttttccctgctctcggtgcagga

SEQ ID NO: 3657774 - DNA, 25 bp, Homo sapien
cctggttactttgatgtccccgcag

SEQ ID NO: 3657775 - DNA, 25 bp, Homo sapien
ggttactttgatgtccccgcagcct

SEQ ID NO: 3657776 - DNA, 25 bp, Homo sapien
cactgatcaggagctcttctgtctt

SEQ ID NO: 3657777 - DNA, 25 bp, Homo sapien
cctcagcactgatcaggagctcttc

SEQ ID NO: 3657778 - DNA, 25 bp, Homo sapien
gggtttctgtacacgtgcttttgcc

SEQ ID NO: 3657779 - DNA, 25 bp, Homo sapien
tatgacaatgcaagcagaaacgttc

SEQ ID NO: 3657780 - DNA, 25 bp, Homo sapien
tgccaaccgggaaattaaggtgtgc

SEQ ID NO: 3657781 - DNA, 25 bp, Homo sapien
cgtgttgcggtaacaagtccgatgg

SEQ ID NO: 3657782 - DNA, 25 bp, Homo sapien
tatcaaggctctcgagttcaggcca

SEQ ID NO: 3657783 - DNA, 25 bp, Homo sapien
aaaggcccgtcccatgtgaagttgc

SEQ ID NO: 3657784 - DNA, 25 bp, Homo sapien
gaagttcagcctcgaggacactagg

SEQ ID NO: 3657785 - DNA, 25 bp, Homo sapien
tacaacaagctgaaagacagtgtgg

SEQ ID NO: 3657786 - DNA, 25 bp, Homo sapien
agccacccttcgggagaattcaggg

SEQ ID NO: 3657787 - DNA, 25 bp, Homo sapien
gcaaacgtacaagtaacgtttgtga

SEQ ID NO: 3657788 - DNA, 25 bp, Homo sapien
ttgtgaacctgtgcagacaaaggct

SEQ ID NO: 3657789 - DNA, 25 bp, Homo sapien
tgtcagatctgatgagtgtgcatga

SEQ ID NO: 3657790 - DNA, 25 bp, Homo sapien
ctcatcatgatgagggtcgggcaag

SEQ ID NO: 3657791 - DNA, 25 bp, Homo sapien
aggtgccactgacaacatttcccat

SEQ ID NO: 3657792 - DNA, 25 bp, Homo sapien
aattggacggtacaaagcaggtgcc

SEQ ID NO: 3657793 - DNA, 25 bp, Homo sapien
ttgttttcagagaattggacggtac

SEQ ID NO: 3657794 - DNA, 25 bp, Homo sapien
gcttaattggctgatggatcttcag

SEQ ID NO: 3657795 - DNA, 25 bp, Homo sapien
tggatcttcaggtcatataggaagc

SEQ ID NO: 3657796 - DNA, 25 bp, Homo sapien
caggtcatataggaagcatggttgc

SEQ ID NO: 3657797 - DNA, 25 bp, Homo sapien
tataggaagcatggttgcagaggcc

SEQ ID NO: 3657798 - DNA, 25 bp, Homo sapien
tcctcgatggtcatgtgtcccagtg

SEQ ID NO: 3657799 - DNA, 25 bp, Homo sapien
gctttcggggagtgtgaattagata

SEQ ID NO: 3657800 - DNA, 25 bp, Homo sapien
cccagtgtgccctttatgaacttca

SEQ ID NO: 3657801 - DNA, 25 bp, Homo sapien
tgagctgagccgtggctattaggga

SEQ ID NO: 3657802 - DNA, 25 bp, Homo sapien
gcacactatgagtttgagagcccat

SEQ ID NO: 3657803 - DNA, 25 bp, Homo sapien
ggcgattgctgtgcacactatgagt

SEQ ID NO: 3657804 - DNA, 25 bp, Homo sapien
cccaaggcgattgctgtgcacacta

SEQ ID NO: 3657805 - DNA, 25 bp, Homo sapien
gtagagccccaaggcgattgctgtg

SEQ ID NO: 3657806 - DNA, 25 bp, Homo sapien
gccccagaactagaggcacttgcta

SEQ ID NO: 3657807 - DNA, 25 bp, Homo sapien
gcctaaggctctgtgaaaatgtctg

SEQ ID NO: 3657808 - DNA, 25 bp, Homo sapien
aaagttgggtctcatggcagcatca

SEQ ID NO: 3657809 - DNA, 25 bp, Homo sapien
tgctaaaggcatctagggaaaaagg

SEQ ID NO: 3657810 - DNA, 25 bp, Homo sapien
gtgcccttggcgtcagttgctattt

SEQ ID NO: 3657811 - DNA, 25 bp, Homo sapien
ttgccagcagcactcaccgggagaa

SEQ ID NO: 3657812 - DNA, 25 bp, Homo sapien
accgggagaaccagcggctgctctg

SEQ ID NO: 3657813 - DNA, 25 bp, Homo sapien
ttgccgatgtgctgattgccagcag

SEQ ID NO: 3657814 - DNA, 25 bp, Homo sapien
taatcgcaaaggtcctcggaagtga

SEQ ID NO: 3657815 - DNA, 25 bp, Homo sapien
tccaggtgggacttttgtaatcgca

SEQ ID NO: 3657816 - DNA, 25 bp, Homo sapien
tctagaaatggtggtatgccaggct

SEQ ID NO: 3657817 - DNA, 25 bp, Homo sapien
tacagttgggttttaacaagagcca

SEQ ID NO: 3657818 - DNA, 25 bp, Homo sapien
ctttatcatcatgctcaaagactgc

SEQ ID NO: 3657819 - DNA, 25 bp, Homo sapien
gctcaaagactgctttgtaagctct

SEQ ID NO: 3657820 - DNA, 25 bp, Homo sapien
tctgcaaacctctgtgtgcagttcc

SEQ ID NO: 3657821 - DNA, 25 bp, Homo sapien
tgcagttccagaaacatgttttact

SEQ ID NO: 3657822 - DNA, 25 bp, Homo sapien
tgtggcatctgagttcccagcaaag

SEQ ID NO: 3657823 - DNA, 25 bp, Homo sapien
ggaaagtgaatgcatctttgtggca

SEQ ID NO: 3657824 - DNA, 25 bp, Homo sapien
gggtggaaagtgaatgcatctttgt

SEQ ID NO: 3657825 - DNA, 25 bp, Homo sapien
tctgagttcccagcaaagggtgtct

SEQ ID NO: 3657826 - DNA, 25 bp, Homo sapien
tgcacacagcggcttggctctggag

SEQ ID NO: 3657827 - DNA, 25 bp, Homo sapien
tagcccatcataggatctagaagat

SEQ ID NO: 3657828 - DNA, 25 bp, Homo sapien
gggtgctcaggcatctattctctcc

SEQ ID NO: 3657829 - DNA, 25 bp, Homo sapien
tcgttcattacaattctgggtaggg

SEQ ID NO: 3657830 - DNA, 25 bp, Homo sapien
aactccttgtcatcgtatttgtccg

SEQ ID NO: 3657831 - DNA, 25 bp, Homo sapien
ctccttgtcatcgtatttgtccgaa

SEQ ID NO: 3657832 - DNA, 25 bp, Homo sapien
cttgtcatcgtatttgtccgaatag

SEQ ID NO: 3657833 - DNA, 25 bp, Homo sapien
tgtcatcgtatttgtccgaatagta

SEQ ID NO: 3657834 - DNA, 25 bp, Homo sapien
aacaagaaggcaacataataatgtt

SEQ ID NO: 3657835 - DNA, 25 bp, Homo sapien
gatacagagcacatcgtggcttctg

SEQ ID NO: 3657836 - DNA, 25 bp, Homo sapien
aagtcaccatacatacaacacccgg

SEQ ID NO: 3657837 - DNA, 25 bp, Homo sapien
acactcagcttaggctgtgggtcca

SEQ ID NO: 3657838 - DNA, 25 bp, Homo sapien
tgcagctttgctcagtatccaggga

SEQ ID NO: 3657839 - DNA, 25 bp, Homo sapien
ttaatctcacgcagaacccagcggg

SEQ ID NO: 3657840 - DNA, 25 bp, Homo sapien
tacatctgataaacctcgtgaacgt

SEQ ID NO: 3657841 - DNA, 25 bp, Homo sapien
tcgtgaacgtgtgatctgagctaac

SEQ ID NO: 3657842 - DNA, 25 bp, Homo sapien
gccatgctgatcttccaattttagt

SEQ ID NO: 3657843 - DNA, 25 bp, Homo sapien
caattttagtatatcattccaattt

SEQ ID NO: 3657844 - DNA, 25 bp, Homo sapien
tattgaacacgtcatgaatttgcat

SEQ ID NO: 3657845 - DNA, 25 bp, Homo sapien
aggggccatgctgatcttccaattt

SEQ ID NO: 3657846 - DNA, 25 bp, Homo sapien
tttacttagatcttaggtttctcaa

SEQ ID NO: 3657847 - DNA, 25 bp, Homo sapien
gtttacttagatcttaggtttctca

SEQ ID NO: 3657848 - DNA, 25 bp, Homo sapien
tgtttacttagatcttaggtttctc

SEQ ID NO: 3657849 - DNA, 25 bp, Homo sapien
ctggcttgatcttagttggatggga

SEQ ID NO: 3657850 - DNA, 25 bp, Homo sapien
actcaagagcaatctggcttgatct

SEQ ID NO: 3657851 - DNA, 25 bp, Homo sapien
ggttactaaccaatgactcaagagc

SEQ ID NO: 3657852 - DNA, 25 bp, Homo sapien
tgtcggcagaggtagcattctcatt

SEQ ID NO: 3657853 - DNA, 25 bp, Homo sapien
taaagagttaggagcaagatccctg

SEQ ID NO: 3657854 - DNA, 25 bp, Homo sapien
cattgtacggaagatgaacaggcgg

SEQ ID NO: 3657855 - DNA, 25 bp, Homo sapien
gagctgcgtgcataaccaattggag

SEQ ID NO: 3657856 - DNA, 25 bp, Homo sapien
acaggcggcgttattttggatcaca

SEQ ID NO: 3657857 - DNA, 25 bp, Homo sapien
aggtgggaggatcgcttgagcccaa

SEQ ID NO: 3657858 - DNA, 25 bp, Homo sapien
gagcccaagagttcgagcctgcagt

SEQ ID NO: 3657859 - DNA, 25 bp, Homo sapien
gcccaagagttcgagcctgcagtga

SEQ ID NO: 3657860 - DNA, 25 bp, Homo sapien
tgtggtcttagctacttgggatgct

SEQ ID NO: 3657861 - DNA, 25 bp, Homo sapien
tagcccctcgcagtcaatcgatgga

SEQ ID NO: 3657862 - DNA, 25 bp, Homo sapien
cacaggcacgcgttttgtcatagaa

SEQ ID NO: 3657863 - DNA, 25 bp, Homo sapien
cagccccatcccgaggttgtgataa

SEQ ID NO: 3657864 - DNA, 25 bp, Homo sapien
gacgttctgcttgctgtgaacccta

SEQ ID NO: 3657865 - DNA, 25 bp, Homo sapien
ttattggttcctcgccttggaacgc

SEQ ID NO: 3657866 - DNA, 25 bp, Homo sapien
tcctctttgtgactctcggcctttg

SEQ ID NO: 3657867 - DNA, 25 bp, Homo sapien
gccatctgccattgtcccaacagct

SEQ ID NO: 3657868 - DNA, 25 bp, Homo sapien
ctcaggcccgaatgcatcattccag

SEQ ID NO: 3657869 - DNA, 25 bp, Homo sapien
catcagattcaagagaggcagtgca

SEQ ID NO: 3657870 - DNA, 25 bp, Homo sapien
gcttgaccgccccaaacaggtttga

SEQ ID NO: 3657871 - DNA, 25 bp, Homo sapien
caaatacagggaagatccagagcct

SEQ ID NO: 3657872 - DNA, 25 bp, Homo sapien
gatggcaaagggacccggatacaaa

SEQ ID NO: 3657873 - DNA, 25 bp, Homo sapien
ttcctgagtagccttgtcacccttg

SEQ ID NO: 3657874 - DNA, 25 bp, Homo sapien
gagtccctgaagtcatggattcatt

SEQ ID NO: 3657875 - DNA, 25 bp, Homo sapien
cacccttgttgtttctctccacagg

SEQ ID NO: 3657876 - DNA, 25 bp, Homo sapien
cacactattactgaacagatgagag

SEQ ID NO: 3657877 - DNA, 25 bp, Homo sapien
tagcacatggatcttacttcacctc

SEQ ID NO: 3657878 - DNA, 25 bp, Homo sapien
agccctcaccaggcttctgggaagt

SEQ ID NO: 3657879 - DNA, 25 bp, Homo sapien
ccagcatgtagacagggacggacca

SEQ ID NO: 3657880 - DNA, 25 bp, Homo sapien
gcttgctagcacatggatcttactt

SEQ ID NO: 3657881 - DNA, 25 bp, Homo sapien
tgttgcacaattaggcctctgggaa

SEQ ID NO: 3657882 - DNA, 25 bp, Homo sapien
ccagatctgtgtgctcggagccttc

SEQ ID NO: 3657883 - DNA, 25 bp, Homo sapien
tattgttcacaagggttatccacca

SEQ ID NO: 3657884 - DNA, 25 bp, Homo sapien
tatttgcataagtggacctgagtgg

SEQ ID NO: 3657885 - DNA, 25 bp, Homo sapien
gggcaagagagccaatttcccacag

SEQ ID NO: 3657886 - DNA, 25 bp, Homo sapien
gagccaatttcccacagtgctgcat

SEQ ID NO: 3657887 - DNA, 25 bp, Homo sapien
gagagccaatttcccacagtgctgc

SEQ ID NO: 3657888 - DNA, 25 bp, Homo sapien
caagagagccaatttcccacagtgc

SEQ ID NO: 3657889 - DNA, 25 bp, Homo sapien
ccctccttagcctcttgctctcttt

SEQ ID NO: 3657890 - DNA, 25 bp, Homo sapien
tttctcatagctttgttgcttttct

SEQ ID NO: 3657891 - DNA, 25 bp, Homo sapien
ctgattttctcatagctttgttgct

SEQ ID NO: 3657892 - DNA, 25 bp, Homo sapien
ttgcttttctaactgggtaagtgac

SEQ ID NO: 3657893 - DNA, 25 bp, Homo sapien
agaggaggaacctggagggctcagc

SEQ ID NO: 3657894 - DNA, 25 bp, Homo sapien
ctaaagggcaatgggaagaggagga

SEQ ID NO: 3657895 - DNA, 25 bp, Homo sapien
gaagaggaggaacctggagggctca

SEQ ID NO: 3657896 - DNA, 25 bp, Homo sapien
tgggaagaggaggaacctggagggc

SEQ ID NO: 3657897 - DNA, 25 bp, Homo sapien
ttcattagtcaacacagtagtcaca

SEQ ID NO: 3657898 - DNA, 25 bp, Homo sapien
attcattagtcaacacagtagtcac

SEQ ID NO: 3657899 - DNA, 25 bp, Homo sapien
tgaattccagggttgactgccccac

SEQ ID NO: 3657900 - DNA, 25 bp, Homo sapien
tgtcagaaagacagcttgcatgtaa

SEQ ID NO: 3657901 - DNA, 25 bp, Homo sapien
gtagattgtcagaaagacagcttgc

SEQ ID NO: 3657902 - DNA, 25 bp, Homo sapien
agcttgcatgtaaaacctgaattcc

SEQ ID NO: 3657903 - DNA, 25 bp, Homo sapien
tctgtggaaccccatgtactttgca

SEQ ID NO: 3657904 - DNA, 25 bp, Homo sapien
catcagcagtccctaagaagagcat

SEQ ID NO: 3657905 - DNA, 25 bp, Homo sapien
tgctccattggctttagtaacccgg

SEQ ID NO: 3657906 - DNA, 25 bp, Homo sapien
ccttgcctggtgttgtctgtggaac

SEQ ID NO: 3657907 - DNA, 25 bp, Homo sapien
gaaatccatgaagtctagaagccag

SEQ ID NO: 3657908 - DNA, 25 bp, Homo sapien
gctgatggacataaagagactcgta

SEQ ID NO: 3657909 - DNA, 25 bp, Homo sapien
catagcatggttgactgtggccaga

SEQ ID NO: 3657910 - DNA, 25 bp, Homo sapien
aacagctgaggtgacagtagtccca

SEQ ID NO: 3657911 - DNA, 25 bp, Homo sapien
aggcaaggctgcgaggaaaacgtcc

SEQ ID NO: 3657912 - DNA, 25 bp, Homo sapien
caaggcaaggctgcgaggaaaacgt

SEQ ID NO: 3657913 - DNA, 25 bp, Homo sapien
gcaaggctgcgaggaaaacgtccct

SEQ ID NO: 3657914 - DNA, 25 bp, Homo sapien
cccaaggcaaggctgcgaggaaaac

SEQ ID NO: 3657915 - DNA, 25 bp, Homo sapien
tacacgcaagagtgagggactcagc

SEQ ID NO: 3657916 - DNA, 25 bp, Homo sapien
atttcagcaaaacagccagggacga

SEQ ID NO: 3657917 - DNA, 25 bp, Homo sapien
ctggtctacacgcaagagtgaggga

SEQ ID NO: 3657918 - DNA, 25 bp, Homo sapien
ttcagcaaaacagccagggacgatg

SEQ ID NO: 3657919 - DNA, 25 bp, Homo sapien
tcaggactggtggaaaaggtcgtag

SEQ ID NO: 3657920 - DNA, 25 bp, Homo sapien
gagttgggctgtcaggactggtgga

SEQ ID NO: 3657921 - DNA, 25 bp, Homo sapien
gaaagaatactggtgtcctcatgtg

SEQ ID NO: 3657922 - DNA, 25 bp, Homo sapien
caagatggccgagaaggtacagaaa

SEQ ID NO: 3657923 - DNA, 25 bp, Homo sapien
tcttgggcaacacaatttaatcagc

SEQ ID NO: 3657924 - DNA, 25 bp, Homo sapien
ctgttcttgggcaacacaatttaat

SEQ ID NO: 3657925 - DNA, 25 bp, Homo sapien
cgacaagtgaacctgtttggatctt

SEQ ID NO: 3657926 - DNA, 25 bp, Homo sapien
caatttaatcagctccgacaagtga

SEQ ID NO: 3657927 - DNA, 25 bp, Homo sapien
gaacttgcggtttatgtaagacggc

SEQ ID NO: 3657928 - DNA, 25 bp, Homo sapien
gaagtcgatcacctgaataatgtac

SEQ ID NO: 3657929 - DNA, 25 bp, Homo sapien
taattaaagacttctgaacttgcgg

SEQ ID NO: 3657930 - DNA, 25 bp, Homo sapien
taaatttatggagtgcaagtacgat

SEQ ID NO: 3657931 - DNA, 25 bp, Homo sapien
tcctggtccccaagtgttctgattt

SEQ ID NO: 3657932 - DNA, 25 bp, Homo sapien
catttgtgtctctgtagatatctct

SEQ ID NO: 3657933 - DNA, 25 bp, Homo sapien
cttatccccgctgtagatatctctc

SEQ ID NO: 3657934 - DNA, 25 bp, Homo sapien
gaaggctgatgtctctcctggtccc

SEQ ID NO: 3657935 - DNA, 25 bp, Homo sapien
ggcagtttggcagaatgggaatctc

SEQ ID NO: 3657936 - DNA, 25 bp, Homo sapien
cagtttggcagaatgggaatctcca

SEQ ID NO: 3657937 - DNA, 25 bp, Homo sapien
tgggaatctccaaccacgttcattg

SEQ ID NO: 3657938 - DNA, 25 bp, Homo sapien
tctccaaccacgttcattgtctgca

SEQ ID NO: 3657939 - DNA, 25 bp, Homo sapien
tatcccaagacttgcagctgcaggt

SEQ ID NO: 3657940 - DNA, 25 bp, Homo sapien
gaactgaaaggacattcccagggaa

SEQ ID NO: 3657941 - DNA, 25 bp, Homo sapien
tgtggaacatagtcgaagccacggg

SEQ ID NO: 3657942 - DNA, 25 bp, Homo sapien
ggaaactttcccatgcaaatcccag

SEQ ID NO: 3657943 - DNA, 25 bp, Homo sapien
tgttctgagagagctgcaacagctg

SEQ ID NO: 3657944 - DNA, 25 bp, Homo sapien
ggcgagttcctggacttgtccgcac

SEQ ID NO: 3657945 - DNA, 25 bp, Homo sapien
gcaacagctggcgagttcctggact

SEQ ID NO: 3657946 - DNA, 25 bp, Homo sapien
aacagctggcgagttcctggacttg

SEQ ID NO: 3657947 - DNA, 25 bp, Homo sapien
ccctttggtcattgagtacggccac

SEQ ID NO: 3657948 - DNA, 25 bp, Homo sapien
cctttggtcattgagtacggccact

SEQ ID NO: 3657949 - DNA, 25 bp, Homo sapien
tttggtcattgagtacggccactcc

SEQ ID NO: 3657950 - DNA, 25 bp, Homo sapien
ggtcattgagtacggccactcctcc

SEQ ID NO: 3657951 - DNA, 25 bp, Homo sapien
tttgataaggccctgtcccgttgga

SEQ ID NO: 3657952 - DNA, 25 bp, Homo sapien
tggaatttgaccagatgacgtggaa

SEQ ID NO: 3657953 - DNA, 25 bp, Homo sapien
gtgtataaaccacagtagatgtttg

SEQ ID NO: 3657954 - DNA, 25 bp, Homo sapien
tgcctgggttagtgtataaaccaca

SEQ ID NO: 3657955 - DNA, 25 bp, Homo sapien
tcttctcccagatagctgagcgctc

SEQ ID NO: 3657956 - DNA, 25 bp, Homo sapien
gcctcttctcccagatagctgagcg

SEQ ID NO: 3657957 - DNA, 25 bp, Homo sapien
ttctcccagatagctgagcgctcag

SEQ ID NO: 3657958 - DNA, 25 bp, Homo sapien
tgctgcagccgagacgggacggggc

SEQ ID NO: 3657959 - DNA, 25 bp, Homo sapien
gaggccggatgtcttttttctcata

SEQ ID NO: 3657960 - DNA, 25 bp, Homo sapien
tcatacatctggctttgctggaagt

SEQ ID NO: 3657961 - DNA, 25 bp, Homo sapien
gtctctcagattcacgggtccagcc

SEQ ID NO: 3657962 - DNA, 25 bp, Homo sapien
gggtccagccaagcgatcggcatat

SEQ ID NO: 3657963 - DNA, 25 bp, Homo sapien
ttcaatatggtcagtattactgggt

SEQ ID NO: 3657964 - DNA, 25 bp, Homo sapien
cagtattactgggtccgtaagtaca

SEQ ID NO: 3657965 - DNA, 25 bp, Homo sapien
tgggtccgtaagtacattctactcc

SEQ ID NO: 3657966 - DNA, 25 bp, Homo sapien
tggtcagtattactgggtccgtaag

SEQ ID NO: 3657967 - DNA, 25 bp, Homo sapien
ctaggacttgcacaaggagggtcct

SEQ ID NO: 3657968 - DNA, 25 bp, Homo sapien
acctggcccgtgtgcataggactgg

SEQ ID NO: 3657969 - DNA, 25 bp, Homo sapien
gctggggcttgacagcccagagtca

SEQ ID NO: 3657970 - DNA, 25 bp, Homo sapien
tgcttggcttcattggcggctcccc

SEQ ID NO: 3657971 - DNA, 25 bp, Homo sapien
ttccagacctggcccgtgtgcatag

SEQ ID NO: 3657972 - DNA, 25 bp, Homo sapien
tgggttggtagttggcactcatgac

SEQ ID NO: 3657973 - DNA, 25 bp, Homo sapien
gtagccagtgggttggtagttggca

SEQ ID NO: 3657974 - DNA, 25 bp, Homo sapien
acttgttggcagctgtagccagtgg

SEQ ID NO: 3657975 - DNA, 25 bp, Homo sapien
aggacttgttggcagctgtagccag

SEQ ID NO: 3657976 - DNA, 25 bp, Homo sapien
tgaacatccatctctgagccaccaa

SEQ ID NO: 3657977 - DNA, 25 bp, Homo sapien
ttgttttcactgtccaccccacctg

SEQ ID NO: 3657978 - DNA, 25 bp, Homo sapien
catcacagagacttggcacggggct

SEQ ID NO: 3657979 - DNA, 25 bp, Homo sapien
tgtgagctctgttgccatcacagag

SEQ ID NO: 3657980 - DNA, 25 bp, Homo sapien
agctgtcagcccatgccaatcagca

SEQ ID NO: 3657981 - DNA, 25 bp, Homo sapien
caaccaaaaggactgcaggcaagga

SEQ ID NO: 3657982 - DNA, 25 bp, Homo sapien
gcagctcctgccaaccaaaaggact

SEQ ID NO: 3657983 - DNA, 25 bp, Homo sapien
cgggaaagctgtcagcccatgccaa

SEQ ID NO: 3657984 - DNA, 25 bp, Homo sapien
caggtcacggggtctcgattgcttc

SEQ ID NO: 3657985 - DNA, 25 bp, Homo sapien
gattgcttccgagtgcccgcaaact

SEQ ID NO: 3657986 - DNA, 25 bp, Homo sapien
gggtctcgattgcttccgagtgccc

SEQ ID NO: 3657987 - DNA, 25 bp, Homo sapien
gagtgcccgcaaactcccttgtaac

SEQ ID NO: 3657988 - DNA, 25 bp, Homo sapien
catgccaacggaggacaggttcact

SEQ ID NO: 3657989 - DNA, 25 bp, Homo sapien
gctggcatttcaacgctagagggca

SEQ ID NO: 3657990 - DNA, 25 bp, Homo sapien
tctccagagtgggaaatgccggact

SEQ ID NO: 3657991 - DNA, 25 bp, Homo sapien
ccctttgtgtaggagaggccactca

SEQ ID NO: 3657992 - DNA, 25 bp, Homo sapien
taaaatgccggcaaagcacagatga

SEQ ID NO: 3657993 - DNA, 25 bp, Homo sapien
ggcggctggcctgctcagtaacata

SEQ ID NO: 3657994 - DNA, 25 bp, Homo sapien
tgggcaccattaatacctaagacag

SEQ ID NO: 3657995 - DNA, 25 bp, Homo sapien
taagacaggtagaaagggtcccaga

SEQ ID NO: 3657996 - DNA, 25 bp, Homo sapien
taagaatctgcatggcgggaggtcc

SEQ ID NO: 3657997 - DNA, 25 bp, Homo sapien
ggagcattgttctaccagacccatt

SEQ ID NO: 3657998 - DNA, 25 bp, Homo sapien
tctgggacccaccacactaagaagg

SEQ ID NO: 3657999 - DNA, 25 bp, Homo sapien
tttcttaagccgaagctgttgcagg

SEQ ID NO: 3658000 - DNA, 25 bp, Homo sapien
tgctgccgtatcaactagaattacc

SEQ ID NO: 3658001 - DNA, 25 bp, Homo sapien
gggatctaccctgagaccatgcttt

SEQ ID NO: 3658002 - DNA, 25 bp, Homo sapien
tgtacaagtgtagctatcaggttat

SEQ ID NO: 3658003 - DNA, 25 bp, Homo sapien
tgaaaataaccctctgaaaaccagc

SEQ ID NO: 3658004 - DNA, 25 bp, Homo sapien
aaaatcttaccacaggaggcgcacg

SEQ ID NO: 3658005 - DNA, 25 bp, Homo sapien
taagaagcctttgagctgctatggc

SEQ ID NO: 3658006 - DNA, 25 bp, Homo sapien
tctgggcacagattgggatttttcc

SEQ ID NO: 3658007 - DNA, 25 bp, Homo sapien
gagccttaggtttgtctggattcca

SEQ ID NO: 3658008 - DNA, 25 bp, Homo sapien
cacaaaccagtttctccgaggagcc

SEQ ID NO: 3658009 - DNA, 25 bp, Homo sapien
gggcaccggtacagagatcagcaaa

SEQ ID NO: 3658010 - DNA, 25 bp, Homo sapien
aggagccccaaagttcgcagctgct

SEQ ID NO: 3658011 - DNA, 25 bp, Homo sapien
ggccgagtcgtgcagcattgagtcc

SEQ ID NO: 3658012 - DNA, 25 bp, Homo sapien
gcacacgggccagcaggcgtttcct

SEQ ID NO: 3658013 - DNA, 25 bp, Homo sapien
tgcacacgggccagcaggcgtttcc

SEQ ID NO: 3658014 - DNA, 25 bp, Homo sapien
ggtggcctctgcatgggtgctaata

SEQ ID NO: 3658015 - DNA, 25 bp, Homo sapien
ttagccctgttctgtgtcgtggcca

SEQ ID NO: 3658016 - DNA, 25 bp, Homo sapien
gctaataaggccaaggtcagaggtt

SEQ ID NO: 3658017 - DNA, 25 bp, Homo sapien
tcgtggccacaagctgtactctttt

SEQ ID NO: 3658018 - DNA, 25 bp, Homo sapien
ctgccccggccgtctggactgcccg

SEQ ID NO: 3658019 - DNA, 25 bp, Homo sapien
gtcccagttcccacgctgccccggc

SEQ ID NO: 3658020 - DNA, 25 bp, Homo sapien
cgtctggactgcccgggacggtggg

SEQ ID NO: 3658021 - DNA, 25 bp, Homo sapien
gccgtctggactgcccgggacggtg

SEQ ID NO: 3658022 - DNA, 25 bp, Homo sapien
ttatgattaatcacctgctcatact

SEQ ID NO: 3658023 - DNA, 25 bp, Homo sapien
tttatgattaatcacctgctcatac

SEQ ID NO: 3658024 - DNA, 25 bp, Homo sapien
atttatgattaatcacctgctcata

SEQ ID NO: 3658025 - DNA, 25 bp, Homo sapien
caagaggcctccttatgaatttggc

SEQ ID NO: 3658026 - DNA, 25 bp, Homo sapien
aagaattttataaactgcaggcagg

SEQ ID NO: 3658027 - DNA, 25 bp, Homo sapien
cagcagctctttgctacggtgagtg

SEQ ID NO: 3658028 - DNA, 25 bp, Homo sapien
taatatgtggctttacgtgagaaca

SEQ ID NO: 3658029 - DNA, 25 bp, Homo sapien
gccacacccctgtctgcttgaagcc

SEQ ID NO: 3658030 - DNA, 25 bp, Homo sapien
cggtaccagcgggatccctgacagc

SEQ ID NO: 3658031 - DNA, 25 bp, Homo sapien
gtaccagcgggatccctgacagcca

SEQ ID NO: 3658032 - DNA, 25 bp, Homo sapien
tgcttgaagccacattggcatcccc

SEQ ID NO: 3658033 - DNA, 25 bp, Homo sapien
tattcttgattagctggtatggaat

SEQ ID NO: 3658034 - DNA, 25 bp, Homo sapien
gatttattcttgattagctggtatg

SEQ ID NO: 3658035 - DNA, 25 bp, Homo sapien
ttgatttattcttgattagctggta

SEQ ID NO: 3658036 - DNA, 25 bp, Homo sapien
tttattcttgattagctggtatgga

SEQ ID NO: 3658037 - DNA, 25 bp, Homo sapien
taagcaccagtgctgatcaggaggc

SEQ ID NO: 3658038 - DNA, 25 bp, Homo sapien
ttccacaatgtgagccgaagcgacc

SEQ ID NO: 3658039 - DNA, 25 bp, Homo sapien
taaacaagaggcacctcaggccatg

SEQ ID NO: 3658040 - DNA, 25 bp, Homo sapien
tatggtgaagattccccactctgga

SEQ ID NO: 3658041 - DNA, 25 bp, Homo sapien
gaattctcctttcatctatagccct

SEQ ID NO: 3658042 - DNA, 25 bp, Homo sapien
tcctcccatgaggggatcgctggca

SEQ ID NO: 3658043 - DNA, 25 bp, Homo sapien
tttcatctatagccctaccacactg

SEQ ID NO: 3658044 - DNA, 25 bp, Homo sapien
tgaggagtgtaaccacgtcttccag

SEQ ID NO: 3658045 - DNA, 25 bp, Homo sapien
ccattaggatggctgtgtaaaaaac

SEQ ID NO: 3658046 - DNA, 25 bp, Homo sapien
gtgagccccacaatggccgcttttg

SEQ ID NO: 3658047 - DNA, 25 bp, Homo sapien
gacaaggtgaaatccctgctgagca

SEQ ID NO: 3658048 - DNA, 25 bp, Homo sapien
caactaccttcacaggcttgatggg

SEQ ID NO: 3658049 - DNA, 25 bp, Homo sapien
gtcatcagagagatgcctgctgcag

SEQ ID NO: 3658050 - DNA, 25 bp, Homo sapien
ctgtcatcagagagatgcctgctgc

SEQ ID NO: 3658051 - DNA, 25 bp, Homo sapien
atcagagagatgcctgctgcagctc

SEQ ID NO: 3658052 - DNA, 25 bp, Homo sapien
cagagagatgcctgctgcagctcag

SEQ ID NO: 3658053 - DNA, 25 bp, Homo sapien
gcgtgtacttgagaacgccagccac

SEQ ID NO: 3658054 - DNA, 25 bp, Homo sapien
gaatgttgccagcatcagtcccaga

SEQ ID NO: 3658055 - DNA, 25 bp, Homo sapien
tgaccttcttttactggcgtgtact

SEQ ID NO: 3658056 - DNA, 25 bp, Homo sapien
tgcccacaaatgaagctcccagctt

SEQ ID NO: 3658057 - DNA, 25 bp, Homo sapien
tttcagtaggagtggccacgttgtg

SEQ ID NO: 3658058 - DNA, 25 bp, Homo sapien
caggaagaggtttacaaagattctc

SEQ ID NO: 3658059 - DNA, 25 bp, Homo sapien
cagacccatgaattatagttgtgat

SEQ ID NO: 3658060 - DNA, 25 bp, Homo sapien
agggcagccaatccatgaccaggaa

SEQ ID NO: 3658061 - DNA, 25 bp, Homo sapien
tgcaaaacctttgcctgtattacaa

SEQ ID NO: 3658062 - DNA, 25 bp, Homo sapien
aagggcatctcatccttgtcaaaga

SEQ ID NO: 3658063 - DNA, 25 bp, Homo sapien
tcccatcacgtaagggcatctcatc

SEQ ID NO: 3658064 - DNA, 25 bp, Homo sapien
tcttctcaaagccactgcaaaacct

SEQ ID NO: 3658065 - DNA, 25 bp, Homo sapien
tctcagccttgtttttgacaagagc

SEQ ID NO: 3658066 - DNA, 25 bp, Homo sapien
ccagtttgcatgtgttgttataacc

SEQ ID NO: 3658067 - DNA, 25 bp, Homo sapien
tataacctatctttatcctctcagc

SEQ ID NO: 3658068 - DNA, 25 bp, Homo sapien
aaaatctgacgccagtttgcatgtg

SEQ ID NO: 3658069 - DNA, 25 bp, Homo sapien
gggattcccgtgactctcttgcaaa

SEQ ID NO: 3658070 - DNA, 25 bp, Homo sapien
gagctagactctatccccgggattc

SEQ ID NO: 3658071 - DNA, 25 bp, Homo sapien
tcccgtggctttagtggtgccaacc

SEQ ID NO: 3658072 - DNA, 25 bp, Homo sapien
tgccaaccagagttaagtcctgagg

SEQ ID NO: 3658073 - DNA, 25 bp, Homo sapien
gcaataccgtccatattttaccacc

SEQ ID NO: 3658074 - DNA, 25 bp, Homo sapien
ggcagcaataccgtccatattttac

SEQ ID NO: 3658075 - DNA, 25 bp, Homo sapien
ccatttggcagcaataccgtccata

SEQ ID NO: 3658076 - DNA, 25 bp, Homo sapien
tttggcagcaataccgtccatattt

SEQ ID NO: 3658077 - DNA, 25 bp, Homo sapien
gaggaaggatcacggcaccttcagg

SEQ ID NO: 3658078 - DNA, 25 bp, Homo sapien
aggatcacggcaccttcaggaagca

SEQ ID NO: 3658079 - DNA, 25 bp, Homo sapien
gaaacaggggtagcatggaagaaac

SEQ ID NO: 3658080 - DNA, 25 bp, Homo sapien
ggagaaacaggggtagcatggaaga

SEQ ID NO: 3658081 - DNA, 25 bp, Homo sapien
gctctgcatcaaatagttaccaggg

SEQ ID NO: 3658082 - DNA, 25 bp, Homo sapien
acatctgtgcctatgaaagctttca

SEQ ID NO: 3658083 - DNA, 25 bp, Homo sapien
tcaagcttcagattacgggtgaggt

SEQ ID NO: 3658084 - DNA, 25 bp, Homo sapien
ggttgaagtggccatagagctacca

SEQ ID NO: 3658085 - DNA, 25 bp, Homo sapien
ctgtctaaccgtggctccaaactga

SEQ ID NO: 3658086 - DNA, 25 bp, Homo sapien
gcccactcattcctccttgaggagt

SEQ ID NO: 3658087 - DNA, 25 bp, Homo sapien
cctggccgcttgtcctgctgtctaa

SEQ ID NO: 3658088 - DNA, 25 bp, Homo sapien
agagagaaggacaggcccactcatt

SEQ ID NO: 3658089 - DNA, 25 bp, Homo sapien
cgacgcagcattcaaatccttcctg

SEQ ID NO: 3658090 - DNA, 25 bp, Homo sapien
tgttctccagtctagggacatccga

SEQ ID NO: 3658091 - DNA, 25 bp, Homo sapien
tttctcacgtcttggtctctccttg

SEQ ID NO: 3658092 - DNA, 25 bp, Homo sapien
tgctttcttgccaagtaggccgtgc

SEQ ID NO: 3658093 - DNA, 25 bp, Homo sapien
tgggctctgagcctgaagaggttcc

SEQ ID NO: 3658094 - DNA, 25 bp, Homo sapien
gcctgaagaggttccttgcagttca

SEQ ID NO: 3658095 - DNA, 25 bp, Homo sapien
cttgcagttcattaagagatggttg

SEQ ID NO: 3658096 - DNA, 25 bp, Homo sapien
taagagatggttgacagtagggcat

SEQ ID NO: 3658097 - DNA, 25 bp, Homo sapien
gtgtctggcggccacgttccttatg

SEQ ID NO: 3658098 - DNA, 25 bp, Homo sapien
cttatgacatgtgcggaagttcagg

SEQ ID NO: 3658099 - DNA, 25 bp, Homo sapien
ggcggccacgttccttatgacatgt

SEQ ID NO: 3658100 - DNA, 25 bp, Homo sapien
ccacgttccttatgacatgtgcgga

SEQ ID NO: 3658101 - DNA, 25 bp, Homo sapien
aatagacctctgaggcgtccaccca

SEQ ID NO: 3658102 - DNA, 25 bp, Homo sapien
cacatgaggtgaatagacctctgag

SEQ ID NO: 3658103 - DNA, 25 bp, Homo sapien
tctgaggcgtccacccatgactgtc

SEQ ID NO: 3658104 - DNA, 25 bp, Homo sapien
ggtgaatagacctctgaggcgtcca

SEQ ID NO: 3658105 - DNA, 25 bp, Homo sapien
gccaatggggctattctctcaatat

SEQ ID NO: 3658106 - DNA, 25 bp, Homo sapien
tggggctattctctcaatatctgcc

SEQ ID NO: 3658107 - DNA, 25 bp, Homo sapien
caatggggctattctctcaatatct

SEQ ID NO: 3658108 - DNA, 25 bp, Homo sapien
cagccaatggggctattctctcaat

SEQ ID NO: 3658109 - DNA, 25 bp, Homo sapien
ccccttccttgtttgacatcactgg

SEQ ID NO: 3658110 - DNA, 25 bp, Homo sapien
tgtttttgggtgttcggatagtctc

SEQ ID NO: 3658111 - DNA, 25 bp, Homo sapien
gggtgttcggatagtctcgccttga

SEQ ID NO: 3658112 - DNA, 25 bp, Homo sapien
gttcggatagtctcgccttgattaa

SEQ ID NO: 3658113 - DNA, 25 bp, Homo sapien
atagtctcgccttgattaatatcag

SEQ ID NO: 3658114 - DNA, 25 bp, Homo sapien
aattgaggagccagatttacacaca

SEQ ID NO: 3658115 - DNA, 25 bp, Homo sapien
gaggcctaccggcagctacaagatg

SEQ ID NO: 3658116 - DNA, 25 bp, Homo sapien
caaatacaccaggtagaggcctacc

SEQ ID NO: 3658117 - DNA, 25 bp, Homo sapien
tcctttctaagggaagtgtccaaca

SEQ ID NO: 3658118 - DNA, 25 bp, Homo sapien
tcacgctcaagatggtttccttcag

SEQ ID NO: 3658119 - DNA, 25 bp, Homo sapien
caagacggctgctggcagatcctgc

SEQ ID NO: 3658120 - DNA, 25 bp, Homo sapien
tcccaagacggctgctggcagatcc

SEQ ID NO: 3658121 - DNA, 25 bp, Homo sapien
ctctacccacctctgtgaccggctt

SEQ ID NO: 3658122 - DNA, 25 bp, Homo sapien
aataagagtaagttgagggctgagc

SEQ ID NO: 3658123 - DNA, 25 bp, Homo sapien
gcctgtatcccattacagatggcag

SEQ ID NO: 3658124 - DNA, 25 bp, Homo sapien
tctttttggccttagcctgtatccc

SEQ ID NO: 3658125 - DNA, 25 bp, Homo sapien
cccattacagatggcagtcagaaat

SEQ ID NO: 3658126 - DNA, 25 bp, Homo sapien
aagctggtggagatgggccagcacc

SEQ ID NO: 3658127 - DNA, 25 bp, Homo sapien
tcccggaggcaacgccttggcttgc

SEQ ID NO: 3658128 - DNA, 25 bp, Homo sapien
cgccttggcttgcactccctgagga

SEQ ID NO: 3658129 - DNA, 25 bp, Homo sapien
agcaccaacaagaggtcccggaggc

SEQ ID NO: 3658130 - DNA, 25 bp, Homo sapien
tcttctgagtgaggaaaatacaccc

SEQ ID NO: 3658131 - DNA, 25 bp, Homo sapien
gagagtcaaccttccatcagcagct

SEQ ID NO: 3658132 - DNA, 25 bp, Homo sapien
tacacccagggtcagatttgcttct

SEQ ID NO: 3658133 - DNA, 25 bp, Homo sapien
gagcaacctggtcgtcttggacaga

SEQ ID NO: 3658134 - DNA, 25 bp, Homo sapien
taaacaggaacctggcatgagcagc

SEQ ID NO: 3658135 - DNA, 25 bp, Homo sapien
taccatgaggaggacactaagccat

SEQ ID NO: 3658136 - DNA, 25 bp, Homo sapien
gaaaaaggtcatatgccagccgggc

SEQ ID NO: 3658137 - DNA, 25 bp, Homo sapien
taggtgagcctaggattacccagaa

SEQ ID NO: 3658138 - DNA, 25 bp, Homo sapien
tcttcacgtagcacagagagcacag

SEQ ID NO: 3658139 - DNA, 25 bp, Homo sapien
tcaaaggcacagctcaggacatact

SEQ ID NO: 3658140 - DNA, 25 bp, Homo sapien
tctgggcagtcacagtatcagctca

SEQ ID NO: 3658141 - DNA, 25 bp, Homo sapien
tacagagactcgatgtggtgccacc

SEQ ID NO: 3658142 - DNA, 25 bp, Homo sapien
caacttggagatagaaaccgtcctc

SEQ ID NO: 3658143 - DNA, 25 bp, Homo sapien
gattataccctctacaccaacttgg

SEQ ID NO: 3658144 - DNA, 25 bp, Homo sapien
ttttagtcatgaggagaatggcgca

SEQ ID NO: 3658145 - DNA, 25 bp, Homo sapien
cagagatggaacttgaccctaggtc

SEQ ID NO: 3658146 - DNA, 25 bp, Homo sapien
caggtctccatttccctgtttttgc

SEQ ID NO: 3658147 - DNA, 25 bp, Homo sapien
tggccgtttctgtgccctctctttt

SEQ ID NO: 3658148 - DNA, 25 bp, Homo sapien
ctggccgtttctgtgccctctcttt

SEQ ID NO: 3658149 - DNA, 25 bp, Homo sapien
tctccatttccctgtttttgctcat

SEQ ID NO: 3658150 - DNA, 25 bp, Homo sapien
tccatatttgaacacaaggcaggtg

SEQ ID NO: 3658151 - DNA, 25 bp, Homo sapien
tgaacacaaggcaggtgctggatcc

SEQ ID NO: 3658152 - DNA, 25 bp, Homo sapien
cacaaggcaggtgctggatccttca

SEQ ID NO: 3658153 - DNA, 25 bp, Homo sapien
tctaaatagtccatatttgaacaca

SEQ ID NO: 3658154 - DNA, 25 bp, Homo sapien
tctcagctgatccaagtagtaggtc

SEQ ID NO: 3658155 - DNA, 25 bp, Homo sapien
cccaagagtaggtcaaagaagaaca

SEQ ID NO: 3658156 - DNA, 25 bp, Homo sapien
agctcccaagagtaggtcaaagaag

SEQ ID NO: 3658157 - DNA, 25 bp, Homo sapien
aatgaggattctcagctgatccaag

SEQ ID NO: 3658158 - DNA, 25 bp, Homo sapien
gttcctgggataagttcaactgaat

SEQ ID NO: 3658159 - DNA, 25 bp, Homo sapien
tggatgtgtaagagcatcccttctg

SEQ ID NO: 3658160 - DNA, 25 bp, Homo sapien
ccctggatgtgtaagagcatccctt

SEQ ID NO: 3658161 - DNA, 25 bp, Homo sapien
tcctgggataagttcaactgaatct

SEQ ID NO: 3658162 - DNA, 25 bp, Homo sapien
gaatatgtgcagcaaagccagaagg

SEQ ID NO: 3658163 - DNA, 25 bp, Homo sapien
gatacgcagaagttaaggttgagca

SEQ ID NO: 3658164 - DNA, 25 bp, Homo sapien
cactttgcagagtttgacattcagt

SEQ ID NO: 3658165 - DNA, 25 bp, Homo sapien
gagtagctgtcatatgtttggagaa

SEQ ID NO: 3658166 - DNA, 25 bp, Homo sapien
actaaacaaatgctaaaactcagtt

SEQ ID NO: 3658167 - DNA, 25 bp, Homo sapien
aaagattattgtaatgtgctttaac

SEQ ID NO: 3658168 - DNA, 25 bp, Homo sapien
gttttcagtttgatcagtctgatac

SEQ ID NO: 3658169 - DNA, 25 bp, Homo sapien
cagctgtggagtgtggcggtgcaca

SEQ ID NO: 3658170 - DNA, 25 bp, Homo sapien
agaccttgctagtctttccaaagaa

SEQ ID NO: 3658171 - DNA, 25 bp, Homo sapien
ttgccagaccttgctagtctttcca

SEQ ID NO: 3658172 - DNA, 25 bp, Homo sapien
gacttgccagaccttgctagtcttt

SEQ ID NO: 3658173 - DNA, 25 bp, Homo sapien
agacttgccagaccttgctagtctt

SEQ ID NO: 3658174 - DNA, 25 bp, Homo sapien
caggcacagcggactgttttaatac

SEQ ID NO: 3658175 - DNA, 25 bp, Homo sapien
aatgaaagacgagaacaggcacagc

SEQ ID NO: 3658176 - DNA, 25 bp, Homo sapien
caaaaggagattctctgagatgcaa

SEQ ID NO: 3658177 - DNA, 25 bp, Homo sapien
tgcaaaatgaaagacgagaacaggc

SEQ ID NO: 3658178 - DNA, 25 bp, Homo sapien
tccaggttggtcttagttttgacat

SEQ ID NO: 3658179 - DNA, 25 bp, Homo sapien
cataggtttcatgttagtagtggaa

SEQ ID NO: 3658180 - DNA, 25 bp, Homo sapien
cagtgtgaggattcattaccagttt

SEQ ID NO: 3658181 - DNA, 25 bp, Homo sapien
ggaaagagctgtagtagaaagacaa

SEQ ID NO: 3658182 - DNA, 25 bp, Homo sapien
tttgaacctgtgtgcccggagaaga

SEQ ID NO: 3658183 - DNA, 25 bp, Homo sapien
gaccttaggagagacgagcagcctt

SEQ ID NO: 3658184 - DNA, 25 bp, Homo sapien
cggagaagaactcgagtccagcggc

SEQ ID NO: 3658185 - DNA, 25 bp, Homo sapien
tcaggcttttgagttgcccaggaac

SEQ ID NO: 3658186 - DNA, 25 bp, Homo sapien
agctgtcggaggcattctcctcagc

SEQ ID NO: 3658187 - DNA, 25 bp, Homo sapien
tgtcggaggcattctcctcagcctt

SEQ ID NO: 3658188 - DNA, 25 bp, Homo sapien
gaagctgtcggaggcattctcctca

SEQ ID NO: 3658189 - DNA, 25 bp, Homo sapien
gtcggaggcattctcctcagccttg

SEQ ID NO: 3658190 - DNA, 25 bp, Homo sapien
tgccgctccagctgtgagtccatga

SEQ ID NO: 3658191 - DNA, 25 bp, Homo sapien
gattccaccaggttctgggtggtct

SEQ ID NO: 3658192 - DNA, 25 bp, Homo sapien
aatggccatgtaggattccaccagg

SEQ ID NO: 3658193 - DNA, 25 bp, Homo sapien
cgctccagctgtgagtccatgaagt

SEQ ID NO: 3658194 - DNA, 25 bp, Homo sapien
cacgaggtccagcaaggtcttgttg

SEQ ID NO: 3658195 - DNA, 25 bp, Homo sapien
cgaggtccagcaaggtcttgttgac

SEQ ID NO: 3658196 - DNA, 25 bp, Homo sapien
acgaggtccagcaaggtcttgttga

SEQ ID NO: 3658197 - DNA, 25 bp, Homo sapien
atgatggtctcgggtaggagaccaa

SEQ ID NO: 3658198 - DNA, 25 bp, Homo sapien
tgatggtctcgggtaggagaccaac

SEQ ID NO: 3658199 - DNA, 25 bp, Homo sapien
acagcatctcatcacaccgccatgc

SEQ ID NO: 3658200 - DNA, 25 bp, Homo sapien
agcatctcatcacaccgccatgcct

SEQ ID NO: 3658201 - DNA, 25 bp, Homo sapien
cacagcatctcatcacaccgccatg

SEQ ID NO: 3658202 - DNA, 25 bp, Homo sapien
gcacagcatctcatcacaccgccat

SEQ ID NO: 3658203 - DNA, 25 bp, Homo sapien
gaggccgctggctggtggtagtgct

SEQ ID NO: 3658204 - DNA, 25 bp, Homo sapien
gctgaacagcataggcaacccctaa

SEQ ID NO: 3658205 - DNA, 25 bp, Homo sapien
gaacagcataggcaacccctaagag

SEQ ID NO: 3658206 - DNA, 25 bp, Homo sapien
cagcataggcaacccctaagagcaa

SEQ ID NO: 3658207 - DNA, 25 bp, Homo sapien
ggctgcaggttgcataggtgaggct

SEQ ID NO: 3658208 - DNA, 25 bp, Homo sapien
caggttgcataggtgaggctgggcg

SEQ ID NO: 3658209 - DNA, 25 bp, Homo sapien
gcataggtgaggctgggcgcttcct

SEQ ID NO: 3658210 - DNA, 25 bp, Homo sapien
ttgcataggtgaggctgggcgcttc

SEQ ID NO: 3658211 - DNA, 25 bp, Homo sapien
tttcaccactcccaatagcacccta

SEQ ID NO: 3658212 - DNA, 25 bp, Homo sapien
cactcccaatagcaccctagaaatg

SEQ ID NO: 3658213 - DNA, 25 bp, Homo sapien
gcatcttccgttctccgtccccttg

SEQ ID NO: 3658214 - DNA, 25 bp, Homo sapien
accccaggcatcttccgttctccgt

SEQ ID NO: 3658215 - DNA, 25 bp, Homo sapien
tgttgggacattccaggcctgttac

SEQ ID NO: 3658216 - DNA, 25 bp, Homo sapien
gagtttgtgccactgaacgaggagc

SEQ ID NO: 3658217 - DNA, 25 bp, Homo sapien
catgacgcctatggggtgagtccag

SEQ ID NO: 3658218 - DNA, 25 bp, Homo sapien
ctggaggatttcacagggactgcca

SEQ ID NO: 3658219 - DNA, 25 bp, Homo sapien
ggtagactcatcaggccctgcaggg

SEQ ID NO: 3658220 - DNA, 25 bp, Homo sapien
cccaggaggagcaggtatggcttat

SEQ ID NO: 3658221 - DNA, 25 bp, Homo sapien
gagccagaggtagtggaaccagccc

SEQ ID NO: 3658222 - DNA, 25 bp, Homo sapien
ccctgcagggatccatggagaagtt

SEQ ID NO: 3658223 - DNA, 25 bp, Homo sapien
attctgaaggtgctggtgtccaacc

SEQ ID NO: 3658224 - DNA, 25 bp, Homo sapien
ttgcttcgctctaagccacttctgt

SEQ ID NO: 3658225 - DNA, 25 bp, Homo sapien
cattccaatggggtagcgctctccc

SEQ ID NO: 3658226 - DNA, 25 bp, Homo sapien
gtgtccaaccttaaccattccaatg

SEQ ID NO: 3658227 - DNA, 25 bp, Homo sapien
aagtgttcgaatcaagaccttctgg

SEQ ID NO: 3658228 - DNA, 25 bp, Homo sapien
agtgttcgaatcaagaccttctggg

SEQ ID NO: 3658229 - DNA, 25 bp, Homo sapien
ccttctgcaactcggcatcttcctg

SEQ ID NO: 3658230 - DNA, 25 bp, Homo sapien
ttctgcaactcggcatcttcctgcg

SEQ ID NO: 3658231 - DNA, 25 bp, Homo sapien
tctgcaactcggcatcttcctgcgg

SEQ ID NO: 3658232 - DNA, 25 bp, Homo sapien
ctgcaactcggcatcttcctgcggg

SEQ ID NO: 3658233 - DNA, 25 bp, Homo sapien
gtctgaaccttgtaacagtgtcaca

SEQ ID NO: 3658234 - DNA, 25 bp, Homo sapien
accaaataggtagctgttcattgtt

SEQ ID NO: 3658235 - DNA, 25 bp, Homo sapien
agtctttcaccaaataggtagctgt

SEQ ID NO: 3658236 - DNA, 25 bp, Homo sapien
ttctttctggacagtctgaaccttg

SEQ ID NO: 3658237 - DNA, 25 bp, Homo sapien
tccgatgattcgtttttgaaatgct

SEQ ID NO: 3658238 - DNA, 25 bp, Homo sapien
gctatccacagtcttttcaagagtg

SEQ ID NO: 3658239 - DNA, 25 bp, Homo sapien
tggccttttgtagacatccgatgat

SEQ ID NO: 3658240 - DNA, 25 bp, Homo sapien
ttcaagagtgtcaggagtgcctaaa

SEQ ID NO: 3658241 - DNA, 25 bp, Homo sapien
gccaaagcctcagagactggagaag

SEQ ID NO: 3658242 - DNA, 25 bp, Homo sapien
tgtaaggaaagttccagtaacattg

SEQ ID NO: 3658243 - DNA, 25 bp, Homo sapien
tctgtaaggaaagttccagtaacat

SEQ ID NO: 3658244 - DNA, 25 bp, Homo sapien
agtgttcgacagattttttttgcag

SEQ ID NO: 3658245 - DNA, 25 bp, Homo sapien
aaagatcagtcacccgcacatggat

SEQ ID NO: 3658246 - DNA, 25 bp, Homo sapien
taaagatcagtcacccgcacatgga

SEQ ID NO: 3658247 - DNA, 25 bp, Homo sapien
agatcagtcacccgcacatggatct

SEQ ID NO: 3658248 - DNA, 25 bp, Homo sapien
tcagtcacccgcacatggatctcat

SEQ ID NO: 3658249 - DNA, 25 bp, Homo sapien
gggtgatgataatttatgacaattt

SEQ ID NO: 3658250 - DNA, 25 bp, Homo sapien
agctagaagagtgcattttgaatgc

SEQ ID NO: 3658251 - DNA, 25 bp, Homo sapien
gttctttagcattatagggtgatga

SEQ ID NO: 3658252 - DNA, 25 bp, Homo sapien
ggaggagtagttctagtgttcttta

SEQ ID NO: 3658253 - DNA, 25 bp, Homo sapien
tgagaaaatgtgcatctacaccgac

SEQ ID NO: 3658254 - DNA, 25 bp, Homo sapien
tcttggttgcggtctccatgcggct

SEQ ID NO: 3658255 - DNA, 25 bp, Homo sapien
tccaagctgcgtaagactgggccca

SEQ ID NO: 3658256 - DNA, 25 bp, Homo sapien
tctccctgccagttgcgggactggg

SEQ ID NO: 3658257 - DNA, 25 bp, Homo sapien
tgctccccttggagtagcgctgcgt

SEQ ID NO: 3658258 - DNA, 25 bp, Homo sapien
ctatgctgcgaaggctcgaggaccc

SEQ ID NO: 3658259 - DNA, 25 bp, Homo sapien
cctacttccagtgcgtgcaaaggga

SEQ ID NO: 3658260 - DNA, 25 bp, Homo sapien
ggatcagcgcgtcctgcagagcttg

SEQ ID NO: 3658261 - DNA, 25 bp, Homo sapien
tcatggtacagcaataggcaagact

SEQ ID NO: 3658262 - DNA, 25 bp, Homo sapien
caacccaggtgagattggaaagaca

SEQ ID NO: 3658263 - DNA, 25 bp, Homo sapien
tcccctttgggaggtagctcaccag

SEQ ID NO: 3658264 - DNA, 25 bp, Homo sapien
tgcctgccttaagcaatagagatga

SEQ ID NO: 3658265 - DNA, 25 bp, Homo sapien
tctccgtaaacagaaagagactgcc

SEQ ID NO: 3658266 - DNA, 25 bp, Homo sapien
gcgctgggaaattccgcgtctcccc

SEQ ID NO: 3658267 - DNA, 25 bp, Homo sapien
ccctcatttgccctctgggcgcccg

SEQ ID NO: 3658268 - DNA, 25 bp, Homo sapien
cccggttgcagggtaagccagagcc

SEQ ID NO: 3658269 - DNA, 25 bp, Homo sapien
agcacgccgggccactgggatccgg

SEQ ID NO: 3658270 - DNA, 25 bp, Homo sapien
ggaccccagagcgtggcgcgcagtc

SEQ ID NO: 3658271 - DNA, 25 bp, Homo sapien
cgcacgctcagaccgccctgctctg

SEQ ID NO: 3658272 - DNA, 25 bp, Homo sapien
cagtccagagcggagcggacgagtg

SEQ ID NO: 3658273 - DNA, 25 bp, Homo sapien
aaggttcggtgcgatgctggctgca

SEQ ID NO: 3658274 - DNA, 25 bp, Homo sapien
gcggccttggcgctcccacgccggc

SEQ ID NO: 3658275 - DNA, 25 bp, Homo sapien
ccacgccggccgagcgctccagccg

SEQ ID NO: 3658276 - DNA, 25 bp, Homo sapien
gccccccgaaggttcggtgcgatgc

SEQ ID NO: 3658277 - DNA, 25 bp, Homo sapien
ttgcgcaaggtgctttccagctgtg

SEQ ID NO: 3658278 - DNA, 25 bp, Homo sapien
gggaggagtcgcgagtctgcacccc

SEQ ID NO: 3658279 - DNA, 25 bp, Homo sapien
caggcgggacgcgacccgaaagaca

SEQ ID NO: 3658280 - DNA, 25 bp, Homo sapien
tctgcatgggaatccccggggcacc

SEQ ID NO: 3658281 - DNA, 25 bp, Homo sapien
tgcggccgtccaggcggcgtcggca

SEQ ID NO: 3658282 - DNA, 25 bp, Homo sapien
cgggtctcgggcagggagagtgcgg

SEQ ID NO: 3658283 - DNA, 25 bp, Homo sapien
cgtcggcagcgggaggcgcagtgac

SEQ ID NO: 3658284 - DNA, 25 bp, Homo sapien
gcgcagtgacagcgggtccccgctt

SEQ ID NO: 3658285 - DNA, 25 bp, Homo sapien
gctatgacctctttagtcatgggat

SEQ ID NO: 3658286 - DNA, 25 bp, Homo sapien
tctaagtcaagggagcctaaaaggc

SEQ ID NO: 3658287 - DNA, 25 bp, Homo sapien
tttagttccagccattcacaagtct

SEQ ID NO: 3658288 - DNA, 25 bp, Homo sapien
gatagagtccgggttacaaacttga

SEQ ID NO: 3658289 - DNA, 25 bp, Homo sapien
taattccttagcaacacagggcccc

SEQ ID NO: 3658290 - DNA, 25 bp, Homo sapien
cgtatggaaggaaggaccgacactc

SEQ ID NO: 3658291 - DNA, 25 bp, Homo sapien
aaagccccggattatgcgtttcagg

SEQ ID NO: 3658292 - DNA, 25 bp, Homo sapien
taactgcgcctgcaaaaagcctcag

SEQ ID NO: 3658293 - DNA, 25 bp, Homo sapien
ctggcttcttcgcggtaagaagatt

SEQ ID NO: 3658294 - DNA, 25 bp, Homo sapien
cttcttcgcggtaagaagattgcat

SEQ ID NO: 3658295 - DNA, 25 bp, Homo sapien
ggcttcttcgcggtaagaagattgc

SEQ ID NO: 3658296 - DNA, 25 bp, Homo sapien
gcttcttcgcggtaagaagattgca

SEQ ID NO: 3658297 - DNA, 25 bp, Homo sapien
tcaagctcataaagtgctcagtgca

SEQ ID NO: 3658298 - DNA, 25 bp, Homo sapien
catgaggtggtcgtgaggattaaca

SEQ ID NO: 3658299 - DNA, 25 bp, Homo sapien
gcagatactgcgttagcttcctttc

SEQ ID NO: 3658300 - DNA, 25 bp, Homo sapien
gggcatggtaaataagctgtgtcat

SEQ ID NO: 3658301 - DNA, 25 bp, Homo sapien
aactgacatacaaggattggcaaca

SEQ ID NO: 3658302 - DNA, 25 bp, Homo sapien
agagagcttactcttactcacagag

SEQ ID NO: 3658303 - DNA, 25 bp, Homo sapien
taagataacctttagtccagctcac

SEQ ID NO: 3658304 - DNA, 25 bp, Homo sapien
tatttgcattcaagacccatgggaa

SEQ ID NO: 3658305 - DNA, 25 bp, Homo sapien
cattagactgggttcataaactgct

SEQ ID NO: 3658306 - DNA, 25 bp, Homo sapien
cagattcctgtggtcgttgtccata

SEQ ID NO: 3658307 - DNA, 25 bp, Homo sapien
gatgacaaccatggtacctcttggc

SEQ ID NO: 3658308 - DNA, 25 bp, Homo sapien
gcagcagagacttagaacgctcatc

SEQ ID NO: 3658309 - DNA, 25 bp, Homo sapien
aaacaccactctgcattaaatgaag

SEQ ID NO: 3658310 - DNA, 25 bp, Homo sapien
gtaggaaagctgagcacatagcacc

SEQ ID NO: 3658311 - DNA, 25 bp, Homo sapien
gcacccaactgatcggaaagaaacg

SEQ ID NO: 3658312 - DNA, 25 bp, Homo sapien
tgccagcccatctaagccaaattca

SEQ ID NO: 3658313 - DNA, 25 bp, Homo sapien
gtgtttattcccctctcagacgaag

SEQ ID NO: 3658314 - DNA, 25 bp, Homo sapien
cctctcagacgaaggagtctcatta

SEQ ID NO: 3658315 - DNA, 25 bp, Homo sapien
ggagtctcattaagcctttcttttc

SEQ ID NO: 3658316 - DNA, 25 bp, Homo sapien
attacctatttgtagaaatactact

SEQ ID NO: 3658317 - DNA, 25 bp, Homo sapien
aatctgtggatagctatttactgcc

SEQ ID NO: 3658318 - DNA, 25 bp, Homo sapien
cctctgacatactaaaagcctgaca

SEQ ID NO: 3658319 - DNA, 25 bp, Homo sapien
taagcatgttttgcaagctaccacc

SEQ ID NO: 3658320 - DNA, 25 bp, Homo sapien
tattaggttacctttagccagcacc

SEQ ID NO: 3658321 - DNA, 25 bp, Homo sapien
tctgaaggtaaagtacttagtcgac

SEQ ID NO: 3658322 - DNA, 25 bp, Homo sapien
tacatacctgacctaaattactctg

SEQ ID NO: 3658323 - DNA, 25 bp, Homo sapien
aaatattatcttgctccattgtgag

SEQ ID NO: 3658324 - DNA, 25 bp, Homo sapien
tagagcttgatagagccagaccaaa

SEQ ID NO: 3658325 - DNA, 25 bp, Homo sapien
tgagtggcaggaaagtcaaccgcag

SEQ ID NO: 3658326 - DNA, 25 bp, Homo sapien
gaccactgggtcgatttgcctagcg

SEQ ID NO: 3658327 - DNA, 25 bp, Homo sapien
gatgggttacctagcaggcacagca

SEQ ID NO: 3658328 - DNA, 25 bp, Homo sapien
gatgacagtcccaattcctaggcta

SEQ ID NO: 3658329 - DNA, 25 bp, Homo sapien
tgagacggtgagaacttcagtcaag

SEQ ID NO: 3658330 - DNA, 25 bp, Homo sapien
aataaaaatgtgagacggtgagaac

SEQ ID NO: 3658331 - DNA, 25 bp, Homo sapien
ttcagtcaagctggctttttctaag

SEQ ID NO: 3658332 - DNA, 25 bp, Homo sapien
cccacctattaggaagctggttatt

SEQ ID NO: 3658333 - DNA, 25 bp, Homo sapien
tttacacgccattcttttcttcgtc

SEQ ID NO: 3658334 - DNA, 25 bp, Homo sapien
ttcttcgtctttatatcttgtgcca

SEQ ID NO: 3658335 - DNA, 25 bp, Homo sapien
catcggaatctatttggtaacgtcc

SEQ ID NO: 3658336 - DNA, 25 bp, Homo sapien
ggcgccccgaggaataaaatcagaa

SEQ ID NO: 3658337 - DNA, 25 bp, Homo sapien
ggttatctaggtagaaaacacatac

SEQ ID NO: 3658338 - DNA, 25 bp, Homo sapien
gccaaacacacagtgtgggttatct

SEQ ID NO: 3658339 - DNA, 25 bp, Homo sapien
aatgctttgaggcagtgcaccctca

SEQ ID NO: 3658340 - DNA, 25 bp, Homo sapien
tcagataagacccaatcaaacgata

SEQ ID NO: 3658341 - DNA, 25 bp, Homo sapien
tgcaggatggctcttctctacttct

SEQ ID NO: 3658342 - DNA, 25 bp, Homo sapien
ccaagagtgatgatgttatttatcc

SEQ ID NO: 3658343 - DNA, 25 bp, Homo sapien
cacagagaattgctcctactttgca

SEQ ID NO: 3658344 - DNA, 25 bp, Homo sapien
ctgaaaaggctacctccttcccagt

SEQ ID NO: 3658345 - DNA, 25 bp, Homo sapien
tgacatccagtagcacagattttgt

SEQ ID NO: 3658346 - DNA, 25 bp, Homo sapien
cacagatgtctactagcattcaaga

SEQ ID NO: 3658347 - DNA, 25 bp, Homo sapien
catttcgtgtctggctatttgggct

SEQ ID NO: 3658348 - DNA, 25 bp, Homo sapien
tagtgcagatatgaacatgctacca

SEQ ID NO: 3658349 - DNA, 25 bp, Homo sapien
agaacacaaaaatacaagcgagatt

SEQ ID NO: 3658350 - DNA, 25 bp, Homo sapien
ctagaacacaaaaatacaagcgaga

SEQ ID NO: 3658351 - DNA, 25 bp, Homo sapien
tagaacacaaaaatacaagcgagat

SEQ ID NO: 3658352 - DNA, 25 bp, Homo sapien
cgatgttctcgtgccggaagcaagc

SEQ ID NO: 3658353 - DNA, 25 bp, Homo sapien
cctcgcctgcttccataaagagatg

SEQ ID NO: 3658354 - DNA, 25 bp, Homo sapien
taaagagatggacagtttcacccca

SEQ ID NO: 3658355 - DNA, 25 bp, Homo sapien
acaggactgcgccatacagctctgc

SEQ ID NO: 3658356 - DNA, 25 bp, Homo sapien
aaggtatatgtccaaagatacttac

SEQ ID NO: 3658357 - DNA, 25 bp, Homo sapien
ctttgagccaaaaaggtatatgtcc

SEQ ID NO: 3658358 - DNA, 25 bp, Homo sapien
gccaaaaaggtatatgtccaaagat

SEQ ID NO: 3658359 - DNA, 25 bp, Homo sapien
gagccaaaaaggtatatgtccaaag

SEQ ID NO: 3658360 - DNA, 25 bp, Homo sapien
acccaggctgggagagcaatggcgc

SEQ ID NO: 3658361 - DNA, 25 bp, Homo sapien
ccaggctgggagagcaatggcgcca

SEQ ID NO: 3658362 - DNA, 25 bp, Homo sapien
aggctgggagagcaatggcgccatc

SEQ ID NO: 3658363 - DNA, 25 bp, Homo sapien
ggctgggagagcaatggcgccatct

SEQ ID NO: 3658364 - DNA, 25 bp, Homo sapien
aggaaaatagacatcttcggtcatt

SEQ ID NO: 3658365 - DNA, 25 bp, Homo sapien
tctgttcctcggaggtccttaggaa

SEQ ID NO: 3658366 - DNA, 25 bp, Homo sapien
taggccaaaatccaccaaaacagct

SEQ ID NO: 3658367 - DNA, 25 bp, Homo sapien
catttgaacacttaggccaaaatcc

SEQ ID NO: 3658368 - DNA, 25 bp, Homo sapien
tgatgcctaagcttgtctcaaagtc

SEQ ID NO: 3658369 - DNA, 25 bp, Homo sapien
tatgtagcagttagaccttagggtt

SEQ ID NO: 3658370 - DNA, 25 bp, Homo sapien
gatacatttatgctcactacttgag

SEQ ID NO: 3658371 - DNA, 25 bp, Homo sapien
taagactgtcattgagccaaaactc

SEQ ID NO: 3658372 - DNA, 25 bp, Homo sapien
gagaggcctttagagtcctcataaa

SEQ ID NO: 3658373 - DNA, 25 bp, Homo sapien
tctatttcctatgggcacttccagc

SEQ ID NO: 3658374 - DNA, 25 bp, Homo sapien
tgcttgcatccaaccttgtgcccat

SEQ ID NO: 3658375 - DNA, 25 bp, Homo sapien
gcagtgcagcttcccccggtagtgg

SEQ ID NO: 3658376 - DNA, 25 bp, Homo sapien
tgcagccaaagaccctctctctatt

SEQ ID NO: 3658377 - DNA, 25 bp, Homo sapien
tgcagtacactgatcaggtgtagct

SEQ ID NO: 3658378 - DNA, 25 bp, Homo sapien
agcctagaaccaggaatctatcagg

SEQ ID NO: 3658379 - DNA, 25 bp, Homo sapien
tcatcaaagttctgcagtacactga

SEQ ID NO: 3658380 - DNA, 25 bp, Homo sapien
ttttctggttgatctggtggcaaag

SEQ ID NO: 3658381 - DNA, 25 bp, Homo sapien
tctgcatgtggatgagcgtggcccc

SEQ ID NO: 3658382 - DNA, 25 bp, Homo sapien
tgcacaggatgacctctgggctcat

SEQ ID NO: 3658383 - DNA, 25 bp, Homo sapien
gctttggttgaatggcccctgcaca

SEQ ID NO: 3658384 - DNA, 25 bp, Homo sapien
tgagcgagggtagcgcttcacccag

SEQ ID NO: 3658385 - DNA, 25 bp, Homo sapien
ggtgatacaccctcaacagcaaaag

SEQ ID NO: 3658386 - DNA, 25 bp, Homo sapien
tctcttagcatcaaaggtatggtga

SEQ ID NO: 3658387 - DNA, 25 bp, Homo sapien
gcagttcagcccttaagcaagcaag

SEQ ID NO: 3658388 - DNA, 25 bp, Homo sapien
caaaagcatgctagtaccaggacct

SEQ ID NO: 3658389 - DNA, 25 bp, Homo sapien
tcagcagcctcttgcgctccaagag

SEQ ID NO: 3658390 - DNA, 25 bp, Homo sapien
ccagtggaggtgcttgcttgtggat

SEQ ID NO: 3658391 - DNA, 25 bp, Homo sapien
tttagtaggtctgcggctcttgggc

SEQ ID NO: 3658392 - DNA, 25 bp, Homo sapien
tctgggcgggttcagggcctcatgt

SEQ ID NO: 3658393 - DNA, 25 bp, Homo sapien
agggaagtaagtgtgcggcacacag

SEQ ID NO: 3658394 - DNA, 25 bp, Homo sapien
acatcagaggtttgatgtggacaga

SEQ ID NO: 3658395 - DNA, 25 bp, Homo sapien
gggaagtaagtgtgcggcacacagc

SEQ ID NO: 3658396 - DNA, 25 bp, Homo sapien
tacatcagaggtttgatgtggacag

SEQ ID NO: 3658397 - DNA, 25 bp, Homo sapien
tctcagattcctcggtgcttcctgt

SEQ ID NO: 3658398 - DNA, 25 bp, Homo sapien
agccatattcaagcgttggtggtcc

SEQ ID NO: 3658399 - DNA, 25 bp, Homo sapien
tggtggtccccgaacaagattgaag

SEQ ID NO: 3658400 - DNA, 25 bp, Homo sapien
tagagagagcgttgcctcttgagca

SEQ ID NO: 3658401 - DNA, 25 bp, Homo sapien
cgcttggaggcacattcacgggtca

SEQ ID NO: 3658402 - DNA, 25 bp, Homo sapien
gaaactgtcactagtggcctgctgt

SEQ ID NO: 3658403 - DNA, 25 bp, Homo sapien
tacagggcccctgtgtagaggcagc

SEQ ID NO: 3658404 - DNA, 25 bp, Homo sapien
tcacgggtcacaggaggtcacactg

SEQ ID NO: 3658405 - DNA, 25 bp, Homo sapien
aaggcaaaatactgaatttattcag

SEQ ID NO: 3658406 - DNA, 25 bp, Homo sapien
tattcagttgatttgaccaaccaca

SEQ ID NO: 3658407 - DNA, 25 bp, Homo sapien
taaggcaaaatactgaatttattca

SEQ ID NO: 3658408 - DNA, 25 bp, Homo sapien
atttattcagttgatttgaccaacc

SEQ ID NO: 3658409 - DNA, 25 bp, Homo sapien
gacaatagcttcatacaagagcaat

SEQ ID NO: 3658410 - DNA, 25 bp, Homo sapien
tataactcaactcctatagcccatc

SEQ ID NO: 3658411 - DNA, 25 bp, Homo sapien
ggctcaaccagttttcccgcttcag

SEQ ID NO: 3658412 - DNA, 25 bp, Homo sapien
ttacaggcacaaccacaattgtttt

SEQ ID NO: 3658413 - DNA, 25 bp, Homo sapien
agtttccttcacctttgacaccatt

SEQ ID NO: 3658414 - DNA, 25 bp, Homo sapien
tagtcatatgcgtgtcaactttcag

SEQ ID NO: 3658415 - DNA, 25 bp, Homo sapien
tgtcccttgctttctgggttagtca

SEQ ID NO: 3658416 - DNA, 25 bp, Homo sapien
tcagttgagtttcgccacatgagga

SEQ ID NO: 3658417 - DNA, 25 bp, Homo sapien
gctgtcagtaaacactccagctctc

SEQ ID NO: 3658418 - DNA, 25 bp, Homo sapien
tctcctgcctggcatgcggcagctg

SEQ ID NO: 3658419 - DNA, 25 bp, Homo sapien
tgttgttattttaagatagtcctta

SEQ ID NO: 3658420 - DNA, 25 bp, Homo sapien
cagctgtcagtaaacactccagctc

SEQ ID NO: 3658421 - DNA, 25 bp, Homo sapien
aatataaacctctgctgtggtcaag

SEQ ID NO: 3658422 - DNA, 25 bp, Homo sapien
ccaaatataaacctctgctgtggtc

SEQ ID NO: 3658423 - DNA, 25 bp, Homo sapien
caaatataaacctctgctgtggtca

SEQ ID NO: 3658424 - DNA, 25 bp, Homo sapien
aaatataaacctctgctgtggtcaa

SEQ ID NO: 3658425 - DNA, 25 bp, Homo sapien
tctcattttcgaagcacaaagctga

SEQ ID NO: 3658426 - DNA, 25 bp, Homo sapien
caacttggacgaatgttcaccaggg

SEQ ID NO: 3658427 - DNA, 25 bp, Homo sapien
cagctttccttaagtaacagtcacc

SEQ ID NO: 3658428 - DNA, 25 bp, Homo sapien
tagtatctggcacgtaaacatctgt

SEQ ID NO: 3658429 - DNA, 25 bp, Homo sapien
gaatggtgcaacagcgtgcctgcat

SEQ ID NO: 3658430 - DNA, 25 bp, Homo sapien
atgaatggtgcaacagcgtgcctgc

SEQ ID NO: 3658431 - DNA, 25 bp, Homo sapien
tgaatggtgcaacagcgtgcctgca

SEQ ID NO: 3658432 - DNA, 25 bp, Homo sapien
agcgttccacacgacttctccaggg

SEQ ID NO: 3658433 - DNA, 25 bp, Homo sapien
gccatgatacagaggagcgttccac

SEQ ID NO: 3658434 - DNA, 25 bp, Homo sapien
tgggctaacgtggtcaggccatgat

SEQ ID NO: 3658435 - DNA, 25 bp, Homo sapien
gaacttcagcacacgttctgcgtgg

SEQ ID NO: 3658436 - DNA, 25 bp, Homo sapien
cacatttcagctatacctagccggc

SEQ ID NO: 3658437 - DNA, 25 bp, Homo sapien
ggagtgcatgaaagatatcacagcc

SEQ ID NO: 3658438 - DNA, 25 bp, Homo sapien
tatcacagcctcacaaatgcagaga

SEQ ID NO: 3658439 - DNA, 25 bp, Homo sapien
gagttgcctacgttaaaagacacag

SEQ ID NO: 3658440 - DNA, 25 bp, Homo sapien
ggagagcagatccaactggcacgct

SEQ ID NO: 3658441 - DNA, 25 bp, Homo sapien
tcttggtacacgagtctcctccaga

SEQ ID NO: 3658442 - DNA, 25 bp, Homo sapien
cagatcctgccgagaatcaggctgg

SEQ ID NO: 3658443 - DNA, 25 bp, Homo sapien
agttctctaggccttcctccacagt

SEQ ID NO: 3658444 - DNA, 25 bp, Homo sapien
tgaatgaactcaacttcgggttcga

SEQ ID NO: 3658445 - DNA, 25 bp, Homo sapien
agctcatagggatgcccacccaagt

SEQ ID NO: 3658446 - DNA, 25 bp, Homo sapien
tatgagttcccttttaactgatggc

SEQ ID NO: 3658447 - DNA, 25 bp, Homo sapien
ggttcgagttgctccaacaacccac

SEQ ID NO: 3658448 - DNA, 25 bp, Homo sapien
atcaatcccttgctttttgaagtta

SEQ ID NO: 3658449 - DNA, 25 bp, Homo sapien
ttttcatattgatcacaaatcaatc

SEQ ID NO: 3658450 - DNA, 25 bp, Homo sapien
ttcatattgatcacaaatcaatccc

SEQ ID NO: 3658451 - DNA, 25 bp, Homo sapien
acaaatcaatcccttgctttttgaa

SEQ ID NO: 3658452 - DNA, 25 bp, Homo sapien
gaagcagttggtggaaaaatcatcc

SEQ ID NO: 3658453 - DNA, 25 bp, Homo sapien
ggagacaaacaccattcaaacgccg

SEQ ID NO: 3658454 - DNA, 25 bp, Homo sapien
tctcaggagcccagggatgttcctc

SEQ ID NO: 3658455 - DNA, 25 bp, Homo sapien
tggtacaatgtgcacgaagcagttg

SEQ ID NO: 3658456 - DNA, 25 bp, Homo sapien
cctcaaacttcggctgaagaggcaa

SEQ ID NO: 3658457 - DNA, 25 bp, Homo sapien
tcaaacttcggctgaagaggcaaga

SEQ ID NO: 3658458 - DNA, 25 bp, Homo sapien
ctgcctcaaacttcggctgaagagg

SEQ ID NO: 3658459 - DNA, 25 bp, Homo sapien
cctggggggcctgttgctctcttca

SEQ ID NO: 3658460 - DNA, 25 bp, Homo sapien
aggggaagatcgccaggggatccaa

SEQ ID NO: 3658461 - DNA, 25 bp, Homo sapien
gggaagatcgccaggggatccaagg

SEQ ID NO: 3658462 - DNA, 25 bp, Homo sapien
agaggggaagatcgccaggggatcc

SEQ ID NO: 3658463 - DNA, 25 bp, Homo sapien
tgagaggggaagatcgccaggggat

SEQ ID NO: 3658464 - DNA, 25 bp, Homo sapien
cctaagagaagccaatgatcttcct

SEQ ID NO: 3658465 - DNA, 25 bp, Homo sapien
aggccctaagagaagccaatgatct

SEQ ID NO: 3658466 - DNA, 25 bp, Homo sapien
taagagaagccaatgatcttcctcc

SEQ ID NO: 3658467 - DNA, 25 bp, Homo sapien
gccctaagagaagccaatgatcttc

SEQ ID NO: 3658468 - DNA, 25 bp, Homo sapien
gcaacttgtgcaccgaaaacatcag

SEQ ID NO: 3658469 - DNA, 25 bp, Homo sapien
gacgttcagagggatgaattcctgc

SEQ ID NO: 3658470 - DNA, 25 bp, Homo sapien
aaaacccaaatgacagacgttcaga

SEQ ID NO: 3658471 - DNA, 25 bp, Homo sapien
tgacaaacgcagaagccaaaaccca

SEQ ID NO: 3658472 - DNA, 25 bp, Homo sapien
agtcaccactgacacaacccagcac

SEQ ID NO: 3658473 - DNA, 25 bp, Homo sapien
aggtcagtcaccactgacacaaccc

SEQ ID NO: 3658474 - DNA, 25 bp, Homo sapien
tgacacaacccagcacctgacggca

SEQ ID NO: 3658475 - DNA, 25 bp, Homo sapien
accactgacacaacccagcacctga

SEQ ID NO: 3658476 - DNA, 25 bp, Homo sapien
gcagcccagtaacacagcgcttggg

SEQ ID NO: 3658477 - DNA, 25 bp, Homo sapien
cttcttcccaagtaccggcccgcag

SEQ ID NO: 3658478 - DNA, 25 bp, Homo sapien
ggatgctgaactgcggaggacttct

SEQ ID NO: 3658479 - DNA, 25 bp, Homo sapien
aatctgctagatgcatcctgggatg

SEQ ID NO: 3658480 - DNA, 25 bp, Homo sapien
tcctctggggggtgttggtgctgca

SEQ ID NO: 3658481 - DNA, 25 bp, Homo sapien
gagtgacaggtgtgtagcaggtgtg

SEQ ID NO: 3658482 - DNA, 25 bp, Homo sapien
gggtgttggtgctgcaggagtgaca

SEQ ID NO: 3658483 - DNA, 25 bp, Homo sapien
tgtgggtgagctgtgctgacagcag

SEQ ID NO: 3658484 - DNA, 25 bp, Homo sapien
gaaataagctcagggatattctctg

SEQ ID NO: 3658485 - DNA, 25 bp, Homo sapien
ataagctcagggatattctctggat

SEQ ID NO: 3658486 - DNA, 25 bp, Homo sapien
aataagctcagggatattctctgga

SEQ ID NO: 3658487 - DNA, 25 bp, Homo sapien
aaataagctcagggatattctctgg

SEQ ID NO: 3658488 - DNA, 25 bp, Homo sapien
cctgatgaccgcaacttctgaagca

SEQ ID NO: 3658489 - DNA, 25 bp, Homo sapien
aaaatgctggatctggcttttcctt

SEQ ID NO: 3658490 - DNA, 25 bp, Homo sapien
aggctccagaccaccctgatccctg

SEQ ID NO: 3658491 - DNA, 25 bp, Homo sapien
ctgatccctgatgaccgcaacttct

SEQ ID NO: 3658492 - DNA, 25 bp, Homo sapien
taggctctgcgataagcctttcagg

SEQ ID NO: 3658493 - DNA, 25 bp, Homo sapien
tcatctaggctctgcgataagcctt

SEQ ID NO: 3658494 - DNA, 25 bp, Homo sapien
cagtcatctaggctctgcgataagc

SEQ ID NO: 3658495 - DNA, 25 bp, Homo sapien
aaccagtcatctaggctctgcgata

SEQ ID NO: 3658496 - DNA, 25 bp, Homo sapien
gaccatgtaaatggcacgtctcctt

SEQ ID NO: 3658497 - DNA, 25 bp, Homo sapien
tcactggctggtgtgcggttgacca

SEQ ID NO: 3658498 - DNA, 25 bp, Homo sapien
tccacatgtcacaccccagttgagt

SEQ ID NO: 3658499 - DNA, 25 bp, Homo sapien
gagtcttcagatccagcctgtctgt

SEQ ID NO: 3658500 - DNA, 25 bp, Homo sapien
agctctcacttggacgggaggccct

SEQ ID NO: 3658501 - DNA, 25 bp, Homo sapien
cacaagcgtgcaggatgatatagct

SEQ ID NO: 3658502 - DNA, 25 bp, Homo sapien
tgttgccttagagaagagctctcac

SEQ ID NO: 3658503 - DNA, 25 bp, Homo sapien
cagaagagagttagcacctgcttca

SEQ ID NO: 3658504 - DNA, 25 bp, Homo sapien
tgtaggcatgttactgacagcaaca

SEQ ID NO: 3658505 - DNA, 25 bp, Homo sapien
agctgcctgctgtaggcatgttact

SEQ ID NO: 3658506 - DNA, 25 bp, Homo sapien
actgacagcaacatgtgacggcttc

SEQ ID NO: 3658507 - DNA, 25 bp, Homo sapien
tgttactgacagcaacatgtgacgg

SEQ ID NO: 3658508 - DNA, 25 bp, Homo sapien
tcctccaacttaggcaaaggaggag

SEQ ID NO: 3658509 - DNA, 25 bp, Homo sapien
agctggccaacagtgtgacgggaat

SEQ ID NO: 3658510 - DNA, 25 bp, Homo sapien
acagctggccaacagtgtgacggga

SEQ ID NO: 3658511 - DNA, 25 bp, Homo sapien
tgtctcctccaacttaggcaaagga

SEQ ID NO: 3658512 - DNA, 25 bp, Homo sapien
gacacccggcagtgaacatacagca

SEQ ID NO: 3658513 - DNA, 25 bp, Homo sapien
tggcagagacgcatctgacacttcg

SEQ ID NO: 3658514 - DNA, 25 bp, Homo sapien
cctttgtgccggtgtccagtgtgga

SEQ ID NO: 3658515 - DNA, 25 bp, Homo sapien
accgctgaaacgtgtgctggtggca

SEQ ID NO: 3658516 - DNA, 25 bp, Homo sapien
gatatttcacacgttcatgattgac

SEQ ID NO: 3658517 - DNA, 25 bp, Homo sapien
gctctcagaacaggtccccagcccc

SEQ ID NO: 3658518 - DNA, 25 bp, Homo sapien
ggagggcgtgttcgtgatatttcac

SEQ ID NO: 3658519 - DNA, 25 bp, Homo sapien
gttcgtgatatttcacacgttcatg

SEQ ID NO: 3658520 - DNA, 25 bp, Homo sapien
gggcaatgctttatggaagtacaat

SEQ ID NO: 3658521 - DNA, 25 bp, Homo sapien
acagctaccagctcagcatgaacgc

SEQ ID NO: 3658522 - DNA, 25 bp, Homo sapien
gaagcactaatcttactcaggggca

SEQ ID NO: 3658523 - DNA, 25 bp, Homo sapien
catgaacgcacaaacttccctgctg

SEQ ID NO: 3658524 - DNA, 25 bp, Homo sapien
taccacctttgtctggtctaagcaa

SEQ ID NO: 3658525 - DNA, 25 bp, Homo sapien
gggcttctgaacatggctgcacaca

SEQ ID NO: 3658526 - DNA, 25 bp, Homo sapien
agacggctcggtcacacagcctgct

SEQ ID NO: 3658527 - DNA, 25 bp, Homo sapien
tgctctacagctaattctcagccag

SEQ ID NO: 3658528 - DNA, 25 bp, Homo sapien
ggaagtgcctttggctgttcaatag

SEQ ID NO: 3658529 - DNA, 25 bp, Homo sapien
gcctttggctgttcaatagttacag

SEQ ID NO: 3658530 - DNA, 25 bp, Homo sapien
taaggaagtgcctttggctgttcaa

SEQ ID NO: 3658531 - DNA, 25 bp, Homo sapien
ttggctgttcaatagttacaggcag

SEQ ID NO: 3658532 - DNA, 25 bp, Homo sapien
tctagggagaaaacatattgccaaa

SEQ ID NO: 3658533 - DNA, 25 bp, Homo sapien
ttttaaaagctacgacaaatcttca

SEQ ID NO: 3658534 - DNA, 25 bp, Homo sapien
gagacaaggctactttatcttgaaa

SEQ ID NO: 3658535 - DNA, 25 bp, Homo sapien
aatttaacagtccttgagacaaggc

SEQ ID NO: 3658536 - DNA, 25 bp, Homo sapien
gacgcgctcataaaattcaggacgg

SEQ ID NO: 3658537 - DNA, 25 bp, Homo sapien
tgaaattacaggtaagacgcgctca

SEQ ID NO: 3658538 - DNA, 25 bp, Homo sapien
ggtaagacgcgctcataaaattcag

SEQ ID NO: 3658539 - DNA, 25 bp, Homo sapien
ttacaggtaagacgcgctcataaaa

SEQ ID NO: 3658540 - DNA, 25 bp, Homo sapien
gaccttcccgctgtacgggtgcatt

SEQ ID NO: 3658541 - DNA, 25 bp, Homo sapien
gtgaagctgaccttcccgctgtacg

SEQ ID NO: 3658542 - DNA, 25 bp, Homo sapien
cccgctgtacgggtgcatttccata

SEQ ID NO: 3658543 - DNA, 25 bp, Homo sapien
gctgtacgggtgcatttccatagag

SEQ ID NO: 3658544 - DNA, 25 bp, Homo sapien
aacagggaactgcagttcctcaagg

SEQ ID NO: 3658545 - DNA, 25 bp, Homo sapien
aaacagggaactgcagttcctcaag

SEQ ID NO: 3658546 - DNA, 25 bp, Homo sapien
acagggaactgcagttcctcaaggt

SEQ ID NO: 3658547 - DNA, 25 bp, Homo sapien
gaaacagggaactgcagttcctcaa

SEQ ID NO: 3658548 - DNA, 25 bp, Homo sapien
gctgctgcctcgaaggaagaaaaga

SEQ ID NO: 3658549 - DNA, 25 bp, Homo sapien
gggtgctgctgcctcgaaggaagaa

SEQ ID NO: 3658550 - DNA, 25 bp, Homo sapien
atggtctttgatgtggccagagcaa

SEQ ID NO: 3658551 - DNA, 25 bp, Homo sapien
ctccatggtctttgatgtggccaga

SEQ ID NO: 3658552 - DNA, 25 bp, Homo sapien
taaaagctgagcatcgattcctctt

SEQ ID NO: 3658553 - DNA, 25 bp, Homo sapien
ctttaggaagtgcaactaaaagctg

SEQ ID NO: 3658554 - DNA, 25 bp, Homo sapien
ttcctctttcgtggttagcgagctg

SEQ ID NO: 3658555 - DNA, 25 bp, Homo sapien
tctttatcttcgagtgagaactcct

SEQ ID NO: 3658556 - DNA, 25 bp, Homo sapien
aacaaggacttcaggctcagagcag

SEQ ID NO: 3658557 - DNA, 25 bp, Homo sapien
ggaaacggtgcctcctcttccatag

SEQ ID NO: 3658558 - DNA, 25 bp, Homo sapien
cctgggccaccgtgacaggtgcctg

SEQ ID NO: 3658559 - DNA, 25 bp, Homo sapien
gcctgagagccctgcttggtgagaa

SEQ ID NO: 3658560 - DNA, 25 bp, Homo sapien
ctgggcctacgcaggacataaattc

SEQ ID NO: 3658561 - DNA, 25 bp, Homo sapien
tctgagagggtcgaggagccgacgt

SEQ ID NO: 3658562 - DNA, 25 bp, Homo sapien
cgacgtctgggcctacgcaggacat

SEQ ID NO: 3658563 - DNA, 25 bp, Homo sapien
gagccgacgtctgggcctacgcagg

SEQ ID NO: 3658564 - DNA, 25 bp, Homo sapien
tccaaagaattcctccattccaaaa

SEQ ID NO: 3658565 - DNA, 25 bp, Homo sapien
tctacatgtgctggcagggttacca

SEQ ID NO: 3658566 - DNA, 25 bp, Homo sapien
acatgtgctggcagggttaccattg

SEQ ID NO: 3658567 - DNA, 25 bp, Homo sapien
catgggatggcctccaaagaattcc

SEQ ID NO: 3658568 - DNA, 25 bp, Homo sapien
cccgcttttcttcaacaatgccaat

SEQ ID NO: 3658569 - DNA, 25 bp, Homo sapien
ctccccgcttttcttcaacaatgcc

SEQ ID NO: 3658570 - DNA, 25 bp, Homo sapien
tcctccccgcttttcttcaacaatg

SEQ ID NO: 3658571 - DNA, 25 bp, Homo sapien
caatcttcctccccgcttttcttca

SEQ ID NO: 3658572 - DNA, 25 bp, Homo sapien
cttcctgacgagggactgccctgca

SEQ ID NO: 3658573 - DNA, 25 bp, Homo sapien
ttcctgacgagggactgccctgcag

SEQ ID NO: 3658574 - DNA, 25 bp, Homo sapien
ctgagcacagccggcgggtgactga

SEQ ID NO: 3658575 - DNA, 25 bp, Homo sapien
tgagcacagccggcgggtgactgaa

SEQ ID NO: 3658576 - DNA, 25 bp, Homo sapien
cacagccggcgggtgactgaaaaca

SEQ ID NO: 3658577 - DNA, 25 bp, Homo sapien
agcacagccggcgggtgactgaaaa

SEQ ID NO: 3658578 - DNA, 25 bp, Homo sapien
gcctggtcagggcatcgcaatcacc

SEQ ID NO: 3658579 - DNA, 25 bp, Homo sapien
tcagggcatcgcaatcaccttcaag

SEQ ID NO: 3658580 - DNA, 25 bp, Homo sapien
ggcatcgcaatcaccttcaagtatt

SEQ ID NO: 3658581 - DNA, 25 bp, Homo sapien
agaagagcctggtcagggcatcgca

SEQ ID NO: 3658582 - DNA, 25 bp, Homo sapien
aacaaacagggaacatggcagagta

SEQ ID NO: 3658583 - DNA, 25 bp, Homo sapien
aaaacaaacagggaacatggcagag

SEQ ID NO: 3658584 - DNA, 25 bp, Homo sapien
tgcaggttaaaacaaacagggaaca

SEQ ID NO: 3658585 - DNA, 25 bp, Homo sapien
ttaaaacaaacagggaacatggcag

SEQ ID NO: 3658586 - DNA, 25 bp, Homo sapien
aagcagattagaaatggcactatca

SEQ ID NO: 3658587 - DNA, 25 bp, Homo sapien
aatggcactatcatccgcaactcct

SEQ ID NO: 3658588 - DNA, 25 bp, Homo sapien
gattagaaatggcactatcatccgc

SEQ ID NO: 3658589 - DNA, 25 bp, Homo sapien
tagaaatggcactatcatccgcaac

SEQ ID NO: 3658590 - DNA, 25 bp, Homo sapien
tagcacgatagtaagtagaagcata

SEQ ID NO: 3658591 - DNA, 25 bp, Homo sapien
cagcaggaatagcacgatagtaagt

SEQ ID NO: 3658592 - DNA, 25 bp, Homo sapien
caggaatagcacgatagtaagtaga

SEQ ID NO: 3658593 - DNA, 25 bp, Homo sapien
gaatagcacgatagtaagtagaagc

SEQ ID NO: 3658594 - DNA, 25 bp, Homo sapien
ccttccctgtcagcttcgcatgtga

SEQ ID NO: 3658595 - DNA, 25 bp, Homo sapien
tggagcaggcccatcgcggcactgt

SEQ ID NO: 3658596 - DNA, 25 bp, Homo sapien
cctgagccactcattcaataactgc

SEQ ID NO: 3658597 - DNA, 25 bp, Homo sapien
tgtgaaaccctgagccactcattca

SEQ ID NO: 3658598 - DNA, 25 bp, Homo sapien
ggccaatgtcaacaatgagtggttc

SEQ ID NO: 3658599 - DNA, 25 bp, Homo sapien
aaaggtagaggagcacaatgtttcc

SEQ ID NO: 3658600 - DNA, 25 bp, Homo sapien
tgtttccaaactactggcacatggt

SEQ ID NO: 3658601 - DNA, 25 bp, Homo sapien
caccatattgtggttatgcgaggaa

SEQ ID NO: 3658602 - DNA, 25 bp, Homo sapien
gaaaactttatccatgtgagcacac

SEQ ID NO: 3658603 - DNA, 25 bp, Homo sapien
gccactgatgttctgcgggcaggta

SEQ ID NO: 3658604 - DNA, 25 bp, Homo sapien
cctacatgcacggtaacatttctac

SEQ ID NO: 3658605 - DNA, 25 bp, Homo sapien
gagcccacagaagtggctttaaact

SEQ ID NO: 3658606 - DNA, 25 bp, Homo sapien
ggtcgagtcgttggccgctcctctg

SEQ ID NO: 3658607 - DNA, 25 bp, Homo sapien
aactgggtcgagtcgttggccgctc

SEQ ID NO: 3658608 - DNA, 25 bp, Homo sapien
ctgggtcgagtcgttggccgctcct

SEQ ID NO: 3658609 - DNA, 25 bp, Homo sapien
gaactgggtcgagtcgttggccgct

SEQ ID NO: 3658610 - DNA, 25 bp, Homo sapien
tctgtaccgactacaagttttggaa

SEQ ID NO: 3658611 - DNA, 25 bp, Homo sapien
cgactacaagttttggaaggtccag

SEQ ID NO: 3658612 - DNA, 25 bp, Homo sapien
ggcaggtctgtaccgactacaagtt

SEQ ID NO: 3658613 - DNA, 25 bp, Homo sapien
caggtctgtaccgactacaagtttt

SEQ ID NO: 3658614 - DNA, 25 bp, Homo sapien
atgtccatgacacgtagacttgagc

SEQ ID NO: 3658615 - DNA, 25 bp, Homo sapien
gtagacttgagcaaatgcagctgtg

SEQ ID NO: 3658616 - DNA, 25 bp, Homo sapien
gacacgtagacttgagcaaatgcag

SEQ ID NO: 3658617 - DNA, 25 bp, Homo sapien
gagctgataatccaaaatgaacggt

SEQ ID NO: 3658618 - DNA, 25 bp, Homo sapien
accaactgcagatgtagacaggatt

SEQ ID NO: 3658619 - DNA, 25 bp, Homo sapien
caactgcagatgtagacaggatttt

SEQ ID NO: 3658620 - DNA, 25 bp, Homo sapien
gcagatgtagacaggattttattat

SEQ ID NO: 3658621 - DNA, 25 bp, Homo sapien
actgcagatgtagacaggattttat

SEQ ID NO: 3658622 - DNA, 25 bp, Homo sapien
gacgagctactgagcatctcagggt

SEQ ID NO: 3658623 - DNA, 25 bp, Homo sapien
gtggaacacacagacgagctactga

SEQ ID NO: 3658624 - DNA, 25 bp, Homo sapien
cacttctggaaatctccgggaccct

SEQ ID NO: 3658625 - DNA, 25 bp, Homo sapien
ttctggaaatctccgggaccctgac

SEQ ID NO: 3658626 - DNA, 25 bp, Homo sapien
ggtgcctcttgttttaccgcaaatg

SEQ ID NO: 3658627 - DNA, 25 bp, Homo sapien
gtgcctcttgttttaccgcaaatgg

SEQ ID NO: 3658628 - DNA, 25 bp, Homo sapien
caacaaaggcggtgattacagtatg

SEQ ID NO: 3658629 - DNA, 25 bp, Homo sapien
gccttctggcttccggtaggtatgt

SEQ ID NO: 3658630 - DNA, 25 bp, Homo sapien
gcttcaggtcccattctaactgcgt

SEQ ID NO: 3658631 - DNA, 25 bp, Homo sapien
caattccaattggatggcatcccaa

SEQ ID NO: 3658632 - DNA, 25 bp, Homo sapien
agcatattacaatccacgttgcggt

SEQ ID NO: 3658633 - DNA, 25 bp, Homo sapien
acaggacttctcagcatattacaat

SEQ ID NO: 3658634 - DNA, 25 bp, Homo sapien
tcgtcatcatccggcttcatcagct

SEQ ID NO: 3658635 - DNA, 25 bp, Homo sapien
tctcagcatattacaatccacgttg

SEQ ID NO: 3658636 - DNA, 25 bp, Homo sapien
caccaccacccctggatgacctggg

SEQ ID NO: 3658637 - DNA, 25 bp, Homo sapien
cagagccgcggtcccggtctgtgac

SEQ ID NO: 3658638 - DNA, 25 bp, Homo sapien
ggtcttggactccacaaagtatttc

SEQ ID NO: 3658639 - DNA, 25 bp, Homo sapien
cggatggaagcagagccgcggtccc

SEQ ID NO: 3658640 - DNA, 25 bp, Homo sapien
ccatgaaggcaacgtttaatctctg

SEQ ID NO: 3658641 - DNA, 25 bp, Homo sapien
ttgtgctcggccacggaagacgtca

SEQ ID NO: 3658642 - DNA, 25 bp, Homo sapien
aggagatcttctcttgccgccagca

SEQ ID NO: 3658643 - DNA, 25 bp, Homo sapien
gctcagtgtattcctgaaggagatc

SEQ ID NO: 3658644 - DNA, 25 bp, Homo sapien
tgagcaccattattggccttcacaa

SEQ ID NO: 3658645 - DNA, 25 bp, Homo sapien
ggcagaaaaccaagcaatgagtaaa

SEQ ID NO: 3658646 - DNA, 25 bp, Homo sapien
caatgagtaaagcatcggaagaagc

SEQ ID NO: 3658647 - DNA, 25 bp, Homo sapien
catgagggccttctgagcaccatta

SEQ ID NO: 3658648 - DNA, 25 bp, Homo sapien
tagagttctgttccgtcaggttgac

SEQ ID NO: 3658649 - DNA, 25 bp, Homo sapien
ggcacggcgctgttgttagagttct

SEQ ID NO: 3658650 - DNA, 25 bp, Homo sapien
aacccgccagggtgacttctgagaa

SEQ ID NO: 3658651 - DNA, 25 bp, Homo sapien
tccgcaggctgacgttgctgaagtt

SEQ ID NO: 3658652 - DNA, 25 bp, Homo sapien
acagaaaccacgggccctgagtcac

SEQ ID NO: 3658653 - DNA, 25 bp, Homo sapien
gacagaaaccacgggccctgagtca

SEQ ID NO: 3658654 - DNA, 25 bp, Homo sapien
tctcccttgctacggacaggaaggg

SEQ ID NO: 3658655 - DNA, 25 bp, Homo sapien
tcccttgctacggacaggaagggca

SEQ ID NO: 3658656 - DNA, 25 bp, Homo sapien
ccttgctacggacaggaagggcact

SEQ ID NO: 3658657 - DNA, 25 bp, Homo sapien
cttcctccccagttctgtactgact

SEQ ID NO: 3658658 - DNA, 25 bp, Homo sapien
catctcaaggattcatctatacagt

SEQ ID NO: 3658659 - DNA, 25 bp, Homo sapien
atctcaaggattcatctatacagtg

SEQ ID NO: 3658660 - DNA, 25 bp, Homo sapien
tcatctcaaggattcatctatacag

SEQ ID NO: 3658661 - DNA, 25 bp, Homo sapien
gggataggacgcaccccatatcgga

SEQ ID NO: 3658662 - DNA, 25 bp, Homo sapien
aggacgcaccccatatcggaagcat

SEQ ID NO: 3658663 - DNA, 25 bp, Homo sapien
cctgctgcggacgctttcacttcta

SEQ ID NO: 3658664 - DNA, 25 bp, Homo sapien
agacagaacggggataggacgcacc

SEQ ID NO: 3658665 - DNA, 25 bp, Homo sapien
gagcgccgaagctcgaggttccacc

SEQ ID NO: 3658666 - DNA, 25 bp, Homo sapien
gcgccgaagctcgaggttccaccag

SEQ ID NO: 3658667 - DNA, 25 bp, Homo sapien
ttgagcgccgaagctcgaggttcca

SEQ ID NO: 3658668 - DNA, 25 bp, Homo sapien
cgaagctcgaggttccaccagcctg

SEQ ID NO: 3658669 - DNA, 25 bp, Homo sapien
cttcgccttttctatggcgtttgcg

SEQ ID NO: 3658670 - DNA, 25 bp, Homo sapien
cttttctatggcgtttgcgaactct

SEQ ID NO: 3658671 - DNA, 25 bp, Homo sapien
tctatggcgtttgcgaactctccta

SEQ ID NO: 3658672 - DNA, 25 bp, Homo sapien
cgccttttctatggcgtttgcgaac

SEQ ID NO: 3658673 - DNA, 25 bp, Homo sapien
caggaagaacactccaccggtgtgt

SEQ ID NO: 3658674 - DNA, 25 bp, Homo sapien
ctttgtgactgacgccaggaagaac

SEQ ID NO: 3658675 - DNA, 25 bp, Homo sapien
gcttttgagaagctttgtgactgac

SEQ ID NO: 3658676 - DNA, 25 bp, Homo sapien
taaaggagatgttagctaaagcgtt

SEQ ID NO: 3658677 - DNA, 25 bp, Homo sapien
aaagtagctggtttagaagaatgag

SEQ ID NO: 3658678 - DNA, 25 bp, Homo sapien
caaagtagctggtttagaagaatga

SEQ ID NO: 3658679 - DNA, 25 bp, Homo sapien
gcaaagtagctggtttagaagaatg

SEQ ID NO: 3658680 - DNA, 25 bp, Homo sapien
cccagtagtcgtcatcaggaacaag

SEQ ID NO: 3658681 - DNA, 25 bp, Homo sapien
ggaacaagtttgtcatccatgagac

SEQ ID NO: 3658682 - DNA, 25 bp, Homo sapien
gaattttcccccagtagtcgtcatc

SEQ ID NO: 3658683 - DNA, 25 bp, Homo sapien
tagtttctattatggctgcttcata

SEQ ID NO: 3658684 - DNA, 25 bp, Homo sapien
tctttcccatgccatacgtaaactt

SEQ ID NO: 3658685 - DNA, 25 bp, Homo sapien
ggttccattccataagtgctttgcc

SEQ ID NO: 3658686 - DNA, 25 bp, Homo sapien
taagcggattgcattctccaggatc

SEQ ID NO: 3658687 - DNA, 25 bp, Homo sapien
tacgtaaacttcactaccaaaatca

SEQ ID NO: 3658688 - DNA, 25 bp, Homo sapien
tctcattgtgttcagtaagtctccc

SEQ ID NO: 3658689 - DNA, 25 bp, Homo sapien
gttcagtaagtctcccaaatatcgc

SEQ ID NO: 3658690 - DNA, 25 bp, Homo sapien
ctttgaacaaaatcgtctcattgtg

SEQ ID NO: 3658691 - DNA, 25 bp, Homo sapien
gtctcccaaatatcgcccagtcggg

SEQ ID NO: 3658692 - DNA, 25 bp, Homo sapien
cgttgttccgcttgacatcggccct

SEQ ID NO: 3658693 - DNA, 25 bp, Homo sapien
cagccacagccaatgttcaccctgt

SEQ ID NO: 3658694 - DNA, 25 bp, Homo sapien
gatgtaccagacatccacggagaca

SEQ ID NO: 3658695 - DNA, 25 bp, Homo sapien
catccgtgtcacgttgttccgcttg

SEQ ID NO: 3658696 - DNA, 25 bp, Homo sapien
gagaaagccataagcgctcactaac

SEQ ID NO: 3658697 - DNA, 25 bp, Homo sapien
cagctggagaaagccataagcgctc

SEQ ID NO: 3658698 - DNA, 25 bp, Homo sapien
gctgggctgacctctttcagctgga

SEQ ID NO: 3658699 - DNA, 25 bp, Homo sapien
tgctgggctgacctctttcagctgg

SEQ ID NO: 3658700 - DNA, 25 bp, Homo sapien
ctgcatgctctcctaaatgggaagg

SEQ ID NO: 3658701 - DNA, 25 bp, Homo sapien
ttggcaaggaaagggatgatttctc

SEQ ID NO: 3658702 - DNA, 25 bp, Homo sapien
cagcgccaagcatccgggtgagtgt

SEQ ID NO: 3658703 - DNA, 25 bp, Homo sapien
tgatttctccggagttcaccggact

SEQ ID NO: 3658704 - DNA, 25 bp, Homo sapien
tgcatgcagggtgggttagcagcac

SEQ ID NO: 3658705 - DNA, 25 bp, Homo sapien
gttccttgatcttaaggtcctgttc

SEQ ID NO: 3658706 - DNA, 25 bp, Homo sapien
tgggtttgaaaagaggcaggcctgg

SEQ ID NO: 3658707 - DNA, 25 bp, Homo sapien
tccactccctgctagcttgtggctt

SEQ ID NO: 3658708 - DNA, 25 bp, Homo sapien
gcccctccttgtagccaaactcacg

SEQ ID NO: 3658709 - DNA, 25 bp, Homo sapien
tccttgtagccaaactcacggctct

SEQ ID NO: 3658710 - DNA, 25 bp, Homo sapien
tgctccacagtctggtgactgggat

SEQ ID NO: 3658711 - DNA, 25 bp, Homo sapien
cagtctggtgactgggatcttcggc

SEQ ID NO: 3658712 - DNA, 25 bp, Homo sapien
agtcgccttgctgctggttcaaccc

SEQ ID NO: 3658713 - DNA, 25 bp, Homo sapien
gccttgctgctggttcaaccctgac

SEQ ID NO: 3658714 - DNA, 25 bp, Homo sapien
tcgccttgctgctggttcaaccctg

SEQ ID NO: 3658715 - DNA, 25 bp, Homo sapien
ctcaagtcgccttgctgctggttca

SEQ ID NO: 3658716 - DNA, 25 bp, Homo sapien
ctgaagatatcatgtgcatcaaagt

SEQ ID NO: 3658717 - DNA, 25 bp, Homo sapien
aattaatccgagcttcgaggtggag

SEQ ID NO: 3658718 - DNA, 25 bp, Homo sapien
gaagatatcatgtgcatcaaagtaa

SEQ ID NO: 3658719 - DNA, 25 bp, Homo sapien
caggtagaattaatccgagcttcga

SEQ ID NO: 3658720 - DNA, 25 bp, Homo sapien
ctgaggacgaacaggcggggcgcga

SEQ ID NO: 3658721 - DNA, 25 bp, Homo sapien
tgaggacgaacaggcggggcgcgaa

SEQ ID NO: 3658722 - DNA, 25 bp, Homo sapien
gacgaacaggcggggcgcgaagtta

SEQ ID NO: 3658723 - DNA, 25 bp, Homo sapien
aggacgaacaggcggggcgcgaagt

SEQ ID NO: 3658724 - DNA, 25 bp, Homo sapien
gaactccgtggctgcgaaatcccca

SEQ ID NO: 3658725 - DNA, 25 bp, Homo sapien
agggtacacgaactccgtggctgcg

SEQ ID NO: 3658726 - DNA, 25 bp, Homo sapien
cacgaactccgtggctgcgaaatcc

SEQ ID NO: 3658727 - DNA, 25 bp, Homo sapien
tacacgaactccgtggctgcgaaat

SEQ ID NO: 3658728 - DNA, 25 bp, Homo sapien
taaaagcccagtggaggttgataac

SEQ ID NO: 3658729 - DNA, 25 bp, Homo sapien
aagcccagtggaggttgataacccg

SEQ ID NO: 3658730 - DNA, 25 bp, Homo sapien
gcccagtggaggttgataacccgcc

SEQ ID NO: 3658731 - DNA, 25 bp, Homo sapien
ctttaaaagcccagtggaggttgat

SEQ ID NO: 3658732 - DNA, 25 bp, Homo sapien
catgcatttcaggattctgtgaaaa

SEQ ID NO: 3658733 - DNA, 25 bp, Homo sapien
gtggcaaaacgcctctcactcttgc

SEQ ID NO: 3658734 - DNA, 25 bp, Homo sapien
caaaacgcctctcactcttgctagt

SEQ ID NO: 3658735 - DNA, 25 bp, Homo sapien
aaacgcctctcactcttgctagttg

SEQ ID NO: 3658736 - DNA, 25 bp, Homo sapien
tccaggtggcaaaacgcctctcact

SEQ ID NO: 3658737 - DNA, 25 bp, Homo sapien
tttggtcagaggcacggcagatgcg

SEQ ID NO: 3658738 - DNA, 25 bp, Homo sapien
tggtctccatcgtgctcttttggtc

SEQ ID NO: 3658739 - DNA, 25 bp, Homo sapien
ccatcgtgctcttttggtcagaggc

SEQ ID NO: 3658740 - DNA, 25 bp, Homo sapien
ggcagatgcgggcagaaccagtgat

SEQ ID NO: 3658741 - DNA, 25 bp, Homo sapien
ctccggggagctgctggcgaggcct

SEQ ID NO: 3658742 - DNA, 25 bp, Homo sapien
atgcagaaagggaaaaagggtctag

SEQ ID NO: 3658743 - DNA, 25 bp, Homo sapien
tggcgaggcctcatctttgcaatac

SEQ ID NO: 3658744 - DNA, 25 bp, Homo sapien
ggagctgctggcgaggcctcatctt

SEQ ID NO: 3658745 - DNA, 25 bp, Homo sapien
tctcagcagtgtcgtctctgtgctc

SEQ ID NO: 3658746 - DNA, 25 bp, Homo sapien
tcagcagtgtcgtctctgtgctccc

SEQ ID NO: 3658747 - DNA, 25 bp, Homo sapien
tgatctcagcagtgtcgtctctgtg

SEQ ID NO: 3658748 - DNA, 25 bp, Homo sapien
tgtgatctcagcagtgtcgtctctg

SEQ ID NO: 3658749 - DNA, 25 bp, Homo sapien
gaatcaagtttgcttttcaaccact

SEQ ID NO: 3658750 - DNA, 25 bp, Homo sapien
gcatccagaatattttggagcagaa

SEQ ID NO: 3658751 - DNA, 25 bp, Homo sapien
gaaagtgcatccagaatattttgga

SEQ ID NO: 3658752 - DNA, 25 bp, Homo sapien
ttttggagcagaatcaagtttgctt

SEQ ID NO: 3658753 - DNA, 25 bp, Homo sapien
ggctaagacgtcttccacgagggtg

SEQ ID NO: 3658754 - DNA, 25 bp, Homo sapien
cgtcttccacgagggtgatctgatt

SEQ ID NO: 3658755 - DNA, 25 bp, Homo sapien
tggttttacagagcttggctaagac

SEQ ID NO: 3658756 - DNA, 25 bp, Homo sapien
tcaagcttcagaggatcgaccccct

SEQ ID NO: 3658757 - DNA, 25 bp, Homo sapien
tgttgttttactcccatctccaatg

SEQ ID NO: 3658758 - DNA, 25 bp, Homo sapien
aaacattgggagaagcgccccgcga

SEQ ID NO: 3658759 - DNA, 25 bp, Homo sapien
caatgccagcggaagaaccgcttac

SEQ ID NO: 3658760 - DNA, 25 bp, Homo sapien
agcgccccgcgactcagtgaaagga

SEQ ID NO: 3658761 - DNA, 25 bp, Homo sapien
gggcattgtattcgtccctcatcat

SEQ ID NO: 3658762 - DNA, 25 bp, Homo sapien
ggcattgtattcgtccctcatcatg

SEQ ID NO: 3658763 - DNA, 25 bp, Homo sapien
gcagggcattgtattcgtccctcat

SEQ ID NO: 3658764 - DNA, 25 bp, Homo sapien
cattgtattcgtccctcatcatgtc

SEQ ID NO: 3658765 - DNA, 25 bp, Homo sapien
caggccttttgctttcttcaggttc

SEQ ID NO: 3658766 - DNA, 25 bp, Homo sapien
tcagaacaggccttttgctttcttc

SEQ ID NO: 3658767 - DNA, 25 bp, Homo sapien
aacaggccttttgctttcttcaggt

SEQ ID NO: 3658768 - DNA, 25 bp, Homo sapien
ggccttttgctttcttcaggttcac

SEQ ID NO: 3658769 - DNA, 25 bp, Homo sapien
aaagcattgtctagctggaagaaga

SEQ ID NO: 3658770 - DNA, 25 bp, Homo sapien
tggttatttgagagtaaaactgtag

SEQ ID NO: 3658771 - DNA, 25 bp, Homo sapien
agtgcacataacatactcttatcaa

SEQ ID NO: 3658772 - DNA, 25 bp, Homo sapien
ctggtgcggtggtgttggacatgac

SEQ ID NO: 3658773 - DNA, 25 bp, Homo sapien
ggcaggtccatctttctgatctaat

SEQ ID NO: 3658774 - DNA, 25 bp, Homo sapien
agcgcatccatggtactgatggtag

SEQ ID NO: 3658775 - DNA, 25 bp, Homo sapien
tttcccctggcaggtccatctttct

SEQ ID NO: 3658776 - DNA, 25 bp, Homo sapien
ccatggtactgatggtaggaacaga

SEQ ID NO: 3658777 - DNA, 25 bp, Homo sapien
gcttgcattcgcttctgctcctgag

SEQ ID NO: 3658778 - DNA, 25 bp, Homo sapien
tagaggcaaaagctcagtagaggcc

SEQ ID NO: 3658779 - DNA, 25 bp, Homo sapien
gaaccccatggcgtcagatgtgaag

SEQ ID NO: 3658780 - DNA, 25 bp, Homo sapien
tccaatctcagctgcgcgacaaaag

SEQ ID NO: 3658781 - DNA, 25 bp, Homo sapien
agtcgcaggtgctgttgccgggtca

SEQ ID NO: 3658782 - DNA, 25 bp, Homo sapien
cagtcgcaggtgctgttgccgggtc

SEQ ID NO: 3658783 - DNA, 25 bp, Homo sapien
gtcgcaggtgctgttgccgggtcat

SEQ ID NO: 3658784 - DNA, 25 bp, Homo sapien
tcagtcgcaggtgctgttgccgggt

SEQ ID NO: 3658785 - DNA, 25 bp, Homo sapien
catgagaaagggacgcactaggcct

SEQ ID NO: 3658786 - DNA, 25 bp, Homo sapien
tccaagatggaagtgctagcgcagg

SEQ ID NO: 3658787 - DNA, 25 bp, Homo sapien
tggtttcaacatcaaggtccaagat

SEQ ID NO: 3658788 - DNA, 25 bp, Homo sapien
cagggcgcaggatactatgaaacca

SEQ ID NO: 3658789 - DNA, 25 bp, Homo sapien
catagcgggtgcctctcggggctgc

SEQ ID NO: 3658790 - DNA, 25 bp, Homo sapien
ctcagtaaagggcatagcgggtgcc

SEQ ID NO: 3658791 - DNA, 25 bp, Homo sapien
gtaaagggcatagcgggtgcctctc

SEQ ID NO: 3658792 - DNA, 25 bp, Homo sapien
cagtaaagggcatagcgggtgcctc

SEQ ID NO: 3658793 - DNA, 25 bp, Homo sapien
agctgacagcttatatcaaacctga

SEQ ID NO: 3658794 - DNA, 25 bp, Homo sapien
gcagctgacagcttatatcaaacct

SEQ ID NO: 3658795 - DNA, 25 bp, Homo sapien
gagggaggcagctgacagcttatat

SEQ ID NO: 3658796 - DNA, 25 bp, Homo sapien
aggcagctgacagcttatatcaaac

SEQ ID NO: 3658797 - DNA, 25 bp, Homo sapien
ggctgcccctcgccagatgcaaagg

SEQ ID NO: 3658798 - DNA, 25 bp, Homo sapien
tgtcgcttccgtatttccttccctg

SEQ ID NO: 3658799 - DNA, 25 bp, Homo sapien
ctcctttgtcgcttccgtatttcct

SEQ ID NO: 3658800 - DNA, 25 bp, Homo sapien
gctgcccctcgccagatgcaaaggt

SEQ ID NO: 3658801 - DNA, 25 bp, Homo sapien
atcctaggactgtgaagccggaggc

SEQ ID NO: 3658802 - DNA, 25 bp, Homo sapien
tcctctgcagatcctaggactgtga

SEQ ID NO: 3658803 - DNA, 25 bp, Homo sapien
gagttggagccttggcttctgcgtt

SEQ ID NO: 3658804 - DNA, 25 bp, Homo sapien
gcttctgcgttgagcaacagcgcca

SEQ ID NO: 3658805 - DNA, 25 bp, Homo sapien
actttgtcttgcataagattcaggc

SEQ ID NO: 3658806 - DNA, 25 bp, Homo sapien
ggctcctctgacggctccccaagtt

SEQ ID NO: 3658807 - DNA, 25 bp, Homo sapien
aagattcaggctcctctgacggctc

SEQ ID NO: 3658808 - DNA, 25 bp, Homo sapien
ttgtcttgcataagattcaggctcc

SEQ ID NO: 3658809 - DNA, 25 bp, Homo sapien
tcctaagctgagctaccaaaatttg

SEQ ID NO: 3658810 - DNA, 25 bp, Homo sapien
cttttaggtcgattttctctgcttg

SEQ ID NO: 3658811 - DNA, 25 bp, Homo sapien
cacttctgtgcaccggtggtttgga

SEQ ID NO: 3658812 - DNA, 25 bp, Homo sapien
tcccaagatctgtgaatgtgctttg

SEQ ID NO: 3658813 - DNA, 25 bp, Homo sapien
ggggccagataatgccggcactgtg

SEQ ID NO: 3658814 - DNA, 25 bp, Homo sapien
ctggggccagataatgccggcactg

SEQ ID NO: 3658815 - DNA, 25 bp, Homo sapien
tggggccagataatgccggcactgt

SEQ ID NO: 3658816 - DNA, 25 bp, Homo sapien
tctggcgctgccactagacccaagg

SEQ ID NO: 3658817 - DNA, 25 bp, Homo sapien
cttcctaaatgggcgtctgtcagag

SEQ ID NO: 3658818 - DNA, 25 bp, Homo sapien
ggcgtctgtcagagcatattccagt

SEQ ID NO: 3658819 - DNA, 25 bp, Homo sapien
cctaaatgggcgtctgtcagagcat

SEQ ID NO: 3658820 - DNA, 25 bp, Homo sapien
tgtggtctgtaattggcattgagcc

SEQ ID NO: 3658821 - DNA, 25 bp, Homo sapien
tgtaattggcattgagcctgcccat

SEQ ID NO: 3658822 - DNA, 25 bp, Homo sapien
aacaggtagaggggtgatgaccact

SEQ ID NO: 3658823 - DNA, 25 bp, Homo sapien
actctgtgtggtctgtaattggcat

SEQ ID NO: 3658824 - DNA, 25 bp, Homo sapien
tttctcctgggccacggatcatttt

SEQ ID NO: 3658825 - DNA, 25 bp, Homo sapien
ttatgactggtgaaaaaatgattat

SEQ ID NO: 3658826 - DNA, 25 bp, Homo sapien
tttttatgactggtgaaaaaatgat

SEQ ID NO: 3658827 - DNA, 25 bp, Homo sapien
tctcctgggccacggatcattttta

SEQ ID NO: 3658828 - DNA, 25 bp, Homo sapien
gctgcaggtaaagcccgtgaacttg

SEQ ID NO: 3658829 - DNA, 25 bp, Homo sapien
catcggcactgttaggagagctgct

SEQ ID NO: 3658830 - DNA, 25 bp, Homo sapien
caggcttagcacacggctgcaggta

SEQ ID NO: 3658831 - DNA, 25 bp, Homo sapien
tcatcaccaggcttagcacacggct

SEQ ID NO: 3658832 - DNA, 25 bp, Homo sapien
tgaaccccatcttctggctgcaagc

SEQ ID NO: 3658833 - DNA, 25 bp, Homo sapien
tggtgaaccccatcttctggctgca

SEQ ID NO: 3658834 - DNA, 25 bp, Homo sapien
gggagtgtggtgaaccccatcttct

SEQ ID NO: 3658835 - DNA, 25 bp, Homo sapien
gtgtggtgaaccccatcttctggct

SEQ ID NO: 3658836 - DNA, 25 bp, Homo sapien
tagggttgccgtacccacatgtgtg

SEQ ID NO: 3658837 - DNA, 25 bp, Homo sapien
gaggagtggttctctcgcaatggat

SEQ ID NO: 3658838 - DNA, 25 bp, Homo sapien
gactgcccgtgagacactggtgact

SEQ ID NO: 3658839 - DNA, 25 bp, Homo sapien
gaggcacccaggatttgagagttta

SEQ ID NO: 3658840 - DNA, 25 bp, Homo sapien
acacaggcacttgtattttgcctcc

SEQ ID NO: 3658841 - DNA, 25 bp, Homo sapien
gctcgaagctccgtgggcagagccc

SEQ ID NO: 3658842 - DNA, 25 bp, Homo sapien
tcagtaagttgcgaatgtggctcga

SEQ ID NO: 3658843 - DNA, 25 bp, Homo sapien
cacacaggcacttgtattttgcctc

SEQ ID NO: 3658844 - DNA, 25 bp, Homo sapien
cttgtccttaggagccccacagtcc

SEQ ID NO: 3658845 - DNA, 25 bp, Homo sapien
acaaggggcctctctgtagatccca

SEQ ID NO: 3658846 - DNA, 25 bp, Homo sapien
tgggctgtcctatcccctgacagtg

SEQ ID NO: 3658847 - DNA, 25 bp, Homo sapien
ctgacagtgctaccggcagggtcct

SEQ ID NO: 3658848 - DNA, 25 bp, Homo sapien
tttcaggaagaaacgtggcctctcc

SEQ ID NO: 3658849 - DNA, 25 bp, Homo sapien
gaggcaacacggttcatcattctcc

SEQ ID NO: 3658850 - DNA, 25 bp, Homo sapien
aggaggcaacacggttcatcattct

SEQ ID NO: 3658851 - DNA, 25 bp, Homo sapien
ggaggcaacacggttcatcattctc

SEQ ID NO: 3658852 - DNA, 25 bp, Homo sapien
cctcctgacatgattaaaggtgcag

SEQ ID NO: 3658853 - DNA, 25 bp, Homo sapien
gcattttggaccctcctgacatgat

SEQ ID NO: 3658854 - DNA, 25 bp, Homo sapien
taaaaccgaacttcagaagcagatg

SEQ ID NO: 3658855 - DNA, 25 bp, Homo sapien
agcagatgtcagcattttggaccct

SEQ ID NO: 3658856 - DNA, 25 bp, Homo sapien
aagctcctgggaattcccgtgctgc

SEQ ID NO: 3658857 - DNA, 25 bp, Homo sapien
ccttcctggagtttggatgcagctc

SEQ ID NO: 3658858 - DNA, 25 bp, Homo sapien
agcccttcctggagtttggatgcag

SEQ ID NO: 3658859 - DNA, 25 bp, Homo sapien
tgagcagtgctgtaggcaaagcccc

SEQ ID NO: 3658860 - DNA, 25 bp, Homo sapien
ttgtgtgcctggaacaagggagctt

SEQ ID NO: 3658861 - DNA, 25 bp, Homo sapien
ctttgtgtgcctggaacaagggagc

SEQ ID NO: 3658862 - DNA, 25 bp, Homo sapien
atggcgccgaggcactccggatcct

SEQ ID NO: 3658863 - DNA, 25 bp, Homo sapien
atcctgcaggcgagcttcccagtgg

SEQ ID NO: 3658864 - DNA, 25 bp, Homo sapien
cttctgttgcttattacctaattga

SEQ ID NO: 3658865 - DNA, 25 bp, Homo sapien
ctgttgcttattacctaattgatga

SEQ ID NO: 3658866 - DNA, 25 bp, Homo sapien
tattacctaattgatgaactatttg

SEQ ID NO: 3658867 - DNA, 25 bp, Homo sapien
gcttattacctaattgatgaactat

SEQ ID NO: 3658868 - DNA, 25 bp, Homo sapien
gcagttgagacccatttgacagagt

SEQ ID NO: 3658869 - DNA, 25 bp, Homo sapien
tctgtgtgaacataagccccgtgtt

SEQ ID NO: 3658870 - DNA, 25 bp, Homo sapien
gtttttatgggctgtctactggctg

SEQ ID NO: 3658871 - DNA, 25 bp, Homo sapien
taccacatcttttgaccatgcaggt

SEQ ID NO: 3658872 - DNA, 25 bp, Homo sapien
aatgtgttgatttggtagttgcatc

SEQ ID NO: 3658873 - DNA, 25 bp, Homo sapien
taatgtgttgatttggtagttgcat

SEQ ID NO: 3658874 - DNA, 25 bp, Homo sapien
ccgactcggtctaatgtgttgattt

SEQ ID NO: 3658875 - DNA, 25 bp, Homo sapien
ttcccgactcggtctaatgtgttga

SEQ ID NO: 3658876 - DNA, 25 bp, Homo sapien
tctgcaggtttgacatccgtggatg

SEQ ID NO: 3658877 - DNA, 25 bp, Homo sapien
gacatccgtggatgagtaaacaaac

SEQ ID NO: 3658878 - DNA, 25 bp, Homo sapien
tgagtctgatattctgcaggtttga

SEQ ID NO: 3658879 - DNA, 25 bp, Homo sapien
tccacatggctgagtctgatattct

SEQ ID NO: 3658880 - DNA, 25 bp, Homo sapien
tatagacgactggtactcctttcta

SEQ ID NO: 3658881 - DNA, 25 bp, Homo sapien
tcaatatagacgactggtactcctt

SEQ ID NO: 3658882 - DNA, 25 bp, Homo sapien
agacgactggtactcctttctaggg

SEQ ID NO: 3658883 - DNA, 25 bp, Homo sapien
ggcaatcaatatagacgactggtac

SEQ ID NO: 3658884 - DNA, 25 bp, Homo sapien
ggctggaatggtagattctggtggg

SEQ ID NO: 3658885 - DNA, 25 bp, Homo sapien
cattgacaccagaagacagctcttg

SEQ ID NO: 3658886 - DNA, 25 bp, Homo sapien
tagggctggaatggtagattctggt

SEQ ID NO: 3658887 - DNA, 25 bp, Homo sapien
gaggtagggctggaatggtagattc

SEQ ID NO: 3658888 - DNA, 25 bp, Homo sapien
gaccaaatttatggtctgtcattgg

SEQ ID NO: 3658889 - DNA, 25 bp, Homo sapien
taggagaccaaatttatggtctgtc

SEQ ID NO: 3658890 - DNA, 25 bp, Homo sapien
ctgtggataggagaccaaatttatg

SEQ ID NO: 3658891 - DNA, 25 bp, Homo sapien
atttatggtctgtcattgggtgtac

SEQ ID NO: 3658892 - DNA, 25 bp, Homo sapien
tactgggtgtcaacagggacttggt

SEQ ID NO: 3658893 - DNA, 25 bp, Homo sapien
caggcatactgggtgtcaacaggga

SEQ ID NO: 3658894 - DNA, 25 bp, Homo sapien
gtgtcaacagggacttggtcttgtc

SEQ ID NO: 3658895 - DNA, 25 bp, Homo sapien
ggcatactgggtgtcaacagggact

SEQ ID NO: 3658896 - DNA, 25 bp, Homo sapien
tgtcgctctgatcttcagagatttg

SEQ ID NO: 3658897 - DNA, 25 bp, Homo sapien
cagactgtttgatcagctgtggcca

SEQ ID NO: 3658898 - DNA, 25 bp, Homo sapien
tccagcgcttgcactgcattctctg

SEQ ID NO: 3658899 - DNA, 25 bp, Homo sapien
gctgtggccagtaaattgtcgctct

SEQ ID NO: 3658900 - DNA, 25 bp, Homo sapien
tgcacatatgtgggtctgaattgtc

SEQ ID NO: 3658901 - DNA, 25 bp, Homo sapien
ggtctgaattgtcccatctccctcg

SEQ ID NO: 3658902 - DNA, 25 bp, Homo sapien
gcctggctgggagcaaataaggggc

SEQ ID NO: 3658903 - DNA, 25 bp, Homo sapien
gcacatatgtgggtctgaattgtcc

SEQ ID NO: 3658904 - DNA, 25 bp, Homo sapien
ctgctccatgccaaccaccccagca

SEQ ID NO: 3658905 - DNA, 25 bp, Homo sapien
cttgatccactagggccacactctg

SEQ ID NO: 3658906 - DNA, 25 bp, Homo sapien
ttgatccactagggccacactctgc

SEQ ID NO: 3658907 - DNA, 25 bp, Homo sapien
ctctgctccatgccaaccaccccag

SEQ ID NO: 3658908 - DNA, 25 bp, Homo sapien
tggtttcttggcaccataaactgct

SEQ ID NO: 3658909 - DNA, 25 bp, Homo sapien
tttcttccatggtgctctgagcctc

SEQ ID NO: 3658910 - DNA, 25 bp, Homo sapien
cttggcaccataaactgcttgatct

SEQ ID NO: 3658911 - DNA, 25 bp, Homo sapien
ttgatctccgtccagtgatttgctc

SEQ ID NO: 3658912 - DNA, 25 bp, Homo sapien
agggatcccgtgtgccagctccaaa

SEQ ID NO: 3658913 - DNA, 25 bp, Homo sapien
tgaccccagggatcccgtgtgccag

SEQ ID NO: 3658914 - DNA, 25 bp, Homo sapien
atcccgtgtgccagctccaaaggca

SEQ ID NO: 3658915 - DNA, 25 bp, Homo sapien
gggatcccgtgtgccagctccaaag

SEQ ID NO: 3658916 - DNA, 25 bp, Homo sapien
agccaccttcctaggtgggtcctgg

SEQ ID NO: 3658917 - DNA, 25 bp, Homo sapien
gtgactggcaagttaccaactgccc

SEQ ID NO: 3658918 - DNA, 25 bp, Homo sapien
tggcaagttaccaactgcccctctt

SEQ ID NO: 3658919 - DNA, 25 bp, Homo sapien
cagccaccttcctaggtgggtcctg

SEQ ID NO: 3658920 - DNA, 25 bp, Homo sapien
tcactatggctgtgcattgcatcca

SEQ ID NO: 3658921 - DNA, 25 bp, Homo sapien
gccgagtaagagacccctccgagaa

SEQ ID NO: 3658922 - DNA, 25 bp, Homo sapien
gacccctccgagaacctcactatgg

SEQ ID NO: 3658923 - DNA, 25 bp, Homo sapien
agggctggccgagtaagagacccct

SEQ ID NO: 3658924 - DNA, 25 bp, Homo sapien
aaggccaggccattggcgtgtgctc

SEQ ID NO: 3658925 - DNA, 25 bp, Homo sapien
caaggccaggccattggcgtgtgct

SEQ ID NO: 3658926 - DNA, 25 bp, Homo sapien
attgggcccaggtttcatggccttt

SEQ ID NO: 3658927 - DNA, 25 bp, Homo sapien
ggattgggcccaggtttcatggcct

SEQ ID NO: 3658928 - DNA, 25 bp, Homo sapien
gattgggcccaggtttcatggcctt

SEQ ID NO: 3658929 - DNA, 25 bp, Homo sapien
gcacccacacaagcgatgttgtcca

SEQ ID NO: 3658930 - DNA, 25 bp, Homo sapien
ctcattcaggggatcagacaaccaa

SEQ ID NO: 3658931 - DNA, 25 bp, Homo sapien
catttcagcacccacacaagcgatg

SEQ ID NO: 3658932 - DNA, 25 bp, Homo sapien
caattagttgagtactcctccatgg

SEQ ID NO: 3658933 - DNA, 25 bp, Homo sapien
acgggccagcgggaatgtgatggga

SEQ ID NO: 3658934 - DNA, 25 bp, Homo sapien
gcgggaatgtgatgggaggcaccag

SEQ ID NO: 3658935 - DNA, 25 bp, Homo sapien
gccagcgggaatgtgatgggaggca

SEQ ID NO: 3658936 - DNA, 25 bp, Homo sapien
tccacgggccagcgggaatgtgatg

SEQ ID NO: 3658937 - DNA, 25 bp, Homo sapien
ccaattctacaatgggcagataatg

SEQ ID NO: 3658938 - DNA, 25 bp, Homo sapien
agataatgagagttccttgccctcc

SEQ ID NO: 3658939 - DNA, 25 bp, Homo sapien
tccagttctccaagccgtttcgaag

SEQ ID NO: 3658940 - DNA, 25 bp, Homo sapien
aactgtgatgctccccccaattcta

SEQ ID NO: 3658941 - DNA, 25 bp, Homo sapien
catttgcacatcgatgggagaacag

SEQ ID NO: 3658942 - DNA, 25 bp, Homo sapien
tccatttgcacatcgatgggagaac

SEQ ID NO: 3658943 - DNA, 25 bp, Homo sapien
tttccatttgcacatcgatgggaga

SEQ ID NO: 3658944 - DNA, 25 bp, Homo sapien
ttgcacatcgatgggagaacagaat

SEQ ID NO: 3658945 - DNA, 25 bp, Homo sapien
tgccccggtcatgtggaaaaccagg

SEQ ID NO: 3658946 - DNA, 25 bp, Homo sapien
caggtcccgggtgccccggtcatgt

SEQ ID NO: 3658947 - DNA, 25 bp, Homo sapien
gccaaaagactgatggaacgactcc

SEQ ID NO: 3658948 - DNA, 25 bp, Homo sapien
aagtccatcccaagtcgccaaaaga

SEQ ID NO: 3658949 - DNA, 25 bp, Homo sapien
tcatgccaaagggataactaatgct

SEQ ID NO: 3658950 - DNA, 25 bp, Homo sapien
cagacatcccatggccgaccataag

SEQ ID NO: 3658951 - DNA, 25 bp, Homo sapien
tctgggggatacttcaattagtgcc

SEQ ID NO: 3658952 - DNA, 25 bp, Homo sapien
ccataaggtctctgggggatacttc

SEQ ID NO: 3658953 - DNA, 25 bp, Homo sapien
gagctttctgatgatggaaggccca

SEQ ID NO: 3658954 - DNA, 25 bp, Homo sapien
caggaggacgggaataatgtgtcaa

SEQ ID NO: 3658955 - DNA, 25 bp, Homo sapien
aatgtgtcaagatgtggcatgagga

SEQ ID NO: 3658956 - DNA, 25 bp, Homo sapien
ctttctgatgatggaaggcccaatg

SEQ ID NO: 3658957 - DNA, 25 bp, Homo sapien
ctcctaccattaggatgatattaaa

SEQ ID NO: 3658958 - DNA, 25 bp, Homo sapien
atagatgtgtttaagagcaaatcca

SEQ ID NO: 3658959 - DNA, 25 bp, Homo sapien
tagatgtgtttaagagcaaatccaa

SEQ ID NO: 3658960 - DNA, 25 bp, Homo sapien
tttttttctactgtatctttgcctc

SEQ ID NO: 3658961 - DNA, 25 bp, Homo sapien
tgaagtgttcgcattttttttctac

SEQ ID NO: 3658962 - DNA, 25 bp, Homo sapien
tttttctactgtatctttgcctcct

SEQ ID NO: 3658963 - DNA, 25 bp, Homo sapien
tcaggttttgaagtgttcgcatttt

SEQ ID NO: 3658964 - DNA, 25 bp, Homo sapien
tacaatgctgttttgtggagagatt

SEQ ID NO: 3658965 - DNA, 25 bp, Homo sapien
agagattgtagctctggatatggag

SEQ ID NO: 3658966 - DNA, 25 bp, Homo sapien
tagctctggatatggagatatatct

SEQ ID NO: 3658967 - DNA, 25 bp, Homo sapien
ttttgtggagagattgtagctctgg

SEQ ID NO: 3658968 - DNA, 25 bp, Homo sapien
gcaccactttcactatgggcagcca

SEQ ID NO: 3658969 - DNA, 25 bp, Homo sapien
caccactttcactatgggcagccat

SEQ ID NO: 3658970 - DNA, 25 bp, Homo sapien
cagcaccactttcactatgggcagc

SEQ ID NO: 3658971 - DNA, 25 bp, Homo sapien
agcaccactttcactatgggcagcc

SEQ ID NO: 3658972 - DNA, 25 bp, Homo sapien
tcgtttgcctagcattcaaagcctc

SEQ ID NO: 3658973 - DNA, 25 bp, Homo sapien
ctcttggatggaatccatgttcgtt

SEQ ID NO: 3658974 - DNA, 25 bp, Homo sapien
ggaatccatgttcgtttgcctagca

SEQ ID NO: 3658975 - DNA, 25 bp, Homo sapien
gcattcaaagcctcccacgaagatc

SEQ ID NO: 3658976 - DNA, 25 bp, Homo sapien
tacatcgcctcgatacagagttttt

SEQ ID NO: 3658977 - DNA, 25 bp, Homo sapien
atcgcctcgatacagagtttttcat

SEQ ID NO: 3658978 - DNA, 25 bp, Homo sapien
acatcgcctcgatacagagtttttc

SEQ ID NO: 3658979 - DNA, 25 bp, Homo sapien
catcgcctcgatacagagtttttca

SEQ ID NO: 3658980 - DNA, 25 bp, Homo sapien
tacaatagtttatttagtaagacga

SEQ ID NO: 3658981 - DNA, 25 bp, Homo sapien
taatgggacattgtggcttctggaa

SEQ ID NO: 3658982 - DNA, 25 bp, Homo sapien
aatcactaggttcaggtttctgctt

SEQ ID NO: 3658983 - DNA, 25 bp, Homo sapien
tagttggagtatattgtgtttgaaa

SEQ ID NO: 3658984 - DNA, 25 bp, Homo sapien
gatgaacccagaggtcattatatta

SEQ ID NO: 3658985 - DNA, 25 bp, Homo sapien
aattctatcatttgcagtgaacatg

SEQ ID NO: 3658986 - DNA, 25 bp, Homo sapien
aagtgtttattagtgtatgaatgga

SEQ ID NO: 3658987 - DNA, 25 bp, Homo sapien
cctaagtgtttattagtgtatgaat

SEQ ID NO: 3658988 - DNA, 25 bp, Homo sapien
gaacatgctaagagcacacattggg

SEQ ID NO: 3658989 - DNA, 25 bp, Homo sapien
gaatagaacacctgagtacagcaat

SEQ ID NO: 3658990 - DNA, 25 bp, Homo sapien
tcatacagcctaccaagaccaaatc

SEQ ID NO: 3658991 - DNA, 25 bp, Homo sapien
ttacagccagctgattgatgaacat

SEQ ID NO: 3658992 - DNA, 25 bp, Homo sapien
tttcacaagggcagtaacacgatgc

SEQ ID NO: 3658993 - DNA, 25 bp, Homo sapien
gaaacggctgctagcactaaagttg

SEQ ID NO: 3658994 - DNA, 25 bp, Homo sapien
aactcctgagtggtgaaacggctgc

SEQ ID NO: 3658995 - DNA, 25 bp, Homo sapien
cctagctggctatctgttgtaagtt

SEQ ID NO: 3658996 - DNA, 25 bp, Homo sapien
taaattgtaacatagataggacagg

SEQ ID NO: 3658997 - DNA, 25 bp, Homo sapien
gtgagcatccccagattttaaattg

SEQ ID NO: 3658998 - DNA, 25 bp, Homo sapien
tgacaattttgtgagcatccccaga

SEQ ID NO: 3658999 - DNA, 25 bp, Homo sapien
tttacattatgcacagttctggcca

SEQ ID NO: 3659000 - DNA, 25 bp, Homo sapien
ccactccacaatagacgttcttttc

SEQ ID NO: 3659001 - DNA, 25 bp, Homo sapien
actccacaatagacgttcttttctg

SEQ ID NO: 3659002 - DNA, 25 bp, Homo sapien
tggcttataccgcaccctttcctgt

SEQ ID NO: 3659003 - DNA, 25 bp, Homo sapien
cctgacccttggcttataccgcacc

SEQ ID NO: 3659004 - DNA, 25 bp, Homo sapien
gggaggtagacgattaacatatatt

SEQ ID NO: 3659005 - DNA, 25 bp, Homo sapien
cagtcattccttcaataaatgtgtg

SEQ ID NO: 3659006 - DNA, 25 bp, Homo sapien
gagcatttatcttctagacactgtt

SEQ ID NO: 3659007 - DNA, 25 bp, Homo sapien
ccttgtagagcttaattccaatggg

SEQ ID NO: 3659008 - DNA, 25 bp, Homo sapien
tggtaaaccatacttgctgggtagg

SEQ ID NO: 3659009 - DNA, 25 bp, Homo sapien
ggtaggggagaaccgtgcttgcaga

SEQ ID NO: 3659010 - DNA, 25 bp, Homo sapien
catacttgctgggtaggggagaacc

SEQ ID NO: 3659011 - DNA, 25 bp, Homo sapien
tttggtaaaccatacttgctgggta

SEQ ID NO: 3659012 - DNA, 25 bp, Homo sapien
caatagcctattgatgctcaggtgt

SEQ ID NO: 3659013 - DNA, 25 bp, Homo sapien
gtaaaattgcatagtcaatagccta

SEQ ID NO: 3659014 - DNA, 25 bp, Homo sapien
cacatttgcagttagtttcccagga

SEQ ID NO: 3659015 - DNA, 25 bp, Homo sapien
cagaagccctctactaacgtaaatg

SEQ ID NO: 3659016 - DNA, 25 bp, Homo sapien
gcattagctttatttggcaatgata

SEQ ID NO: 3659017 - DNA, 25 bp, Homo sapien
cagcttgcataatagagggtgatgg

SEQ ID NO: 3659018 - DNA, 25 bp, Homo sapien
agagaaataagggagttggcttgaa

SEQ ID NO: 3659019 - DNA, 25 bp, Homo sapien
ttctattacctcagtgttgacaggg

SEQ ID NO: 3659020 - DNA, 25 bp, Homo sapien
gctctgggggcgtcagttccttggg

SEQ ID NO: 3659021 - DNA, 25 bp, Homo sapien
agctggcagtcccggcggtggtggt

SEQ ID NO: 3659022 - DNA, 25 bp, Homo sapien
gcttgcggggcccgctggcagctgg

SEQ ID NO: 3659023 - DNA, 25 bp, Homo sapien
ggagtcgccgattgtggcgaaggga

SEQ ID NO: 3659024 - DNA, 25 bp, Homo sapien
ttctttccgttttacagtcagaagc

SEQ ID NO: 3659025 - DNA, 25 bp, Homo sapien
ctttccgttttacagtcagaagcat

SEQ ID NO: 3659026 - DNA, 25 bp, Homo sapien
cccaatacacgcacaaggacagttt

SEQ ID NO: 3659027 - DNA, 25 bp, Homo sapien
tccaatcccaatacacgcacaagga

SEQ ID NO: 3659028 - DNA, 25 bp, Homo sapien
taagaaacggtctctgaaactctgt

SEQ ID NO: 3659029 - DNA, 25 bp, Homo sapien
tctgtgatttgcatgccggaattca

SEQ ID NO: 3659030 - DNA, 25 bp, Homo sapien
ctaagaaacggtctctgaaactctg

SEQ ID NO: 3659031 - DNA, 25 bp, Homo sapien
atttgcatgccggaattcatatggg

SEQ ID NO: 3659032 - DNA, 25 bp, Homo sapien
tatggaggagagtttcccaacacca

SEQ ID NO: 3659033 - DNA, 25 bp, Homo sapien
aaacgtttgctcttgtaagccactg

SEQ ID NO: 3659034 - DNA, 25 bp, Homo sapien
gcttagcacacccagcaagatgtgt

SEQ ID NO: 3659035 - DNA, 25 bp, Homo sapien
gattaggcccttgcatgcttagcac

SEQ ID NO: 3659036 - DNA, 25 bp, Homo sapien
tggcactcgaccaggaagcgacatt

SEQ ID NO: 3659037 - DNA, 25 bp, Homo sapien
cactggagaactggcgggtgatggc

SEQ ID NO: 3659038 - DNA, 25 bp, Homo sapien
ctggcacaaaagcatgataggactt

SEQ ID NO: 3659039 - DNA, 25 bp, Homo sapien
gtagagaagcagactgttctcccag

SEQ ID NO: 3659040 - DNA, 25 bp, Homo sapien
gagcgggtgtttttcagctgtgtcc

SEQ ID NO: 3659041 - DNA, 25 bp, Homo sapien
ccagatcctgtgctagtgaggagcg

SEQ ID NO: 3659042 - DNA, 25 bp, Homo sapien
gcaggaaacagcacacctaaccacc

SEQ ID NO: 3659043 - DNA, 25 bp, Homo sapien
tgtgtccttacaacacccttccagc

SEQ ID NO: 3659044 - DNA, 25 bp, Homo sapien
gcatcctccactgaggtatggaggc

SEQ ID NO: 3659045 - DNA, 25 bp, Homo sapien
ccagaagcatcctccactgaggtat

SEQ ID NO: 3659046 - DNA, 25 bp, Homo sapien
gataactcattttgaaggcgtttta

SEQ ID NO: 3659047 - DNA, 25 bp, Homo sapien
tatgaggataactcattttgaaggc

SEQ ID NO: 3659048 - DNA, 25 bp, Homo sapien
ctcggaggggccgccacaggggctc

SEQ ID NO: 3659049 - DNA, 25 bp, Homo sapien
ggaggggccgccacaggggctccat

SEQ ID NO: 3659050 - DNA, 25 bp, Homo sapien
tgtctcggaggggccgccacagggg

SEQ ID NO: 3659051 - DNA, 25 bp, Homo sapien
cggaggggccgccacaggggctcca

SEQ ID NO: 3659052 - DNA, 25 bp, Homo sapien
tgttcaccgtctaccgggcagagag

SEQ ID NO: 3659053 - DNA, 25 bp, Homo sapien
tgttcacatggacagcgcctaagag

SEQ ID NO: 3659054 - DNA, 25 bp, Homo sapien
gattgtaaaggatcgtagggccacc

SEQ ID NO: 3659055 - DNA, 25 bp, Homo sapien
cgtggtgcagacattttccggagct

SEQ ID NO: 3659056 - DNA, 25 bp, Homo sapien
tgtttcagtgtcttggtcaaccgct

SEQ ID NO: 3659057 - DNA, 25 bp, Homo sapien
tggtcaaccgcttttaacagcgaaa

SEQ ID NO: 3659058 - DNA, 25 bp, Homo sapien
cagtgtcttggtcaaccgcttttaa

SEQ ID NO: 3659059 - DNA, 25 bp, Homo sapien
ttttaacagcgaaacattaaagcca

SEQ ID NO: 3659060 - DNA, 25 bp, Homo sapien
caggctgtgaggcaactaacattgt

SEQ ID NO: 3659061 - DNA, 25 bp, Homo sapien
cagcttccattttacttgttcaggc

SEQ ID NO: 3659062 - DNA, 25 bp, Homo sapien
gcagcccagtggcatgaagtagatt

SEQ ID NO: 3659063 - DNA, 25 bp, Homo sapien
gtagattcacgttgtgcaatcatca

SEQ ID NO: 3659064 - DNA, 25 bp, Homo sapien
aagataaaatcttggcacagaattc

SEQ ID NO: 3659065 - DNA, 25 bp, Homo sapien
atgtcagaatgtgccaagatcagca

SEQ ID NO: 3659066 - DNA, 25 bp, Homo sapien
aaaatcttggcacagaattcctcca

SEQ ID NO: 3659067 - DNA, 25 bp, Homo sapien
cacagttggggatcgtctggggccc

SEQ ID NO: 3659068 - DNA, 25 bp, Homo sapien
cagtgcatgcacaccacatctaatg

SEQ ID NO: 3659069 - DNA, 25 bp, Homo sapien
tgcacaccacatctaatggaccagg

SEQ ID NO: 3659070 - DNA, 25 bp, Homo sapien
cacatctaatggaccaggtatctga

SEQ ID NO: 3659071 - DNA, 25 bp, Homo sapien
gttgccacagtgcatgcacaccaca

SEQ ID NO: 3659072 - DNA, 25 bp, Homo sapien
tgagtcacctttatgcaaacccatg

SEQ ID NO: 3659073 - DNA, 25 bp, Homo sapien
tctcaaggtaatctaagctacagtc

SEQ ID NO: 3659074 - DNA, 25 bp, Homo sapien
tgttgccccggcagcacaatttttg

SEQ ID NO: 3659075 - DNA, 25 bp, Homo sapien
gagaacattgccctgtaccatgaaa

SEQ ID NO: 3659076 - DNA, 25 bp, Homo sapien
gcaagcttgcctgggcctcggtatg

SEQ ID NO: 3659077 - DNA, 25 bp, Homo sapien
tgaaactgcaagcttgcctgggcct

SEQ ID NO: 3659078 - DNA, 25 bp, Homo sapien
ttcatgctcagggtgaaactgcaag

SEQ ID NO: 3659079 - DNA, 25 bp, Homo sapien
tcagggtgaaactgcaagcttgcct

SEQ ID NO: 3659080 - DNA, 25 bp, Homo sapien
cagcccagacgcctagatttttcac

SEQ ID NO: 3659081 - DNA, 25 bp, Homo sapien
ccagcccagacgcctagatttttca

SEQ ID NO: 3659082 - DNA, 25 bp, Homo sapien
gcccagacgcctagatttttcacta

SEQ ID NO: 3659083 - DNA, 25 bp, Homo sapien
agcccagacgcctagatttttcact

SEQ ID NO: 3659084 - DNA, 25 bp, Homo sapien
tatttttccttcattatcagtccaa

SEQ ID NO: 3659085 - DNA, 25 bp, Homo sapien
ttatttttccttcattatcagtcca

SEQ ID NO: 3659086 - DNA, 25 bp, Homo sapien
atttttccttcattatcagtccaac

SEQ ID NO: 3659087 - DNA, 25 bp, Homo sapien
gcgtagtgctgaggatctagagaac

SEQ ID NO: 3659088 - DNA, 25 bp, Homo sapien
agagcacatcactcatccagtgaga

SEQ ID NO: 3659089 - DNA, 25 bp, Homo sapien
tggcagtgaagatttccctataact

SEQ ID NO: 3659090 - DNA, 25 bp, Homo sapien
tgctgaggatctagagaacattggc

SEQ ID NO: 3659091 - DNA, 25 bp, Homo sapien
gagggagcacccacgttccgcggca

SEQ ID NO: 3659092 - DNA, 25 bp, Homo sapien
agggagcacccacgttccgcggcag

SEQ ID NO: 3659093 - DNA, 25 bp, Homo sapien
gccgcagatcctctcccagtgagaa

SEQ ID NO: 3659094 - DNA, 25 bp, Homo sapien
gggctgcaggtgacggccgcagatc

SEQ ID NO: 3659095 - DNA, 25 bp, Homo sapien
cacccttgagttgtggtcccagtga

SEQ ID NO: 3659096 - DNA, 25 bp, Homo sapien
cctccacccttgagttgtggtccca

SEQ ID NO: 3659097 - DNA, 25 bp, Homo sapien
gagttgtggtcccagtgaccaggca

SEQ ID NO: 3659098 - DNA, 25 bp, Homo sapien
gtggtcccagtgaccaggcaaacat

SEQ ID NO: 3659099 - DNA, 25 bp, Homo sapien
aggcaccgcacaagagaagggctgc

SEQ ID NO: 3659100 - DNA, 25 bp, Homo sapien
agaagggctgctgcgaccctggcct

SEQ ID NO: 3659101 - DNA, 25 bp, Homo sapien
ctgtgaaggcaccgcacaagagaag

SEQ ID NO: 3659102 - DNA, 25 bp, Homo sapien
tgaaggcaccgcacaagagaagggc

SEQ ID NO: 3659103 - DNA, 25 bp, Homo sapien
gcttcccatgaatggtgagggccat

SEQ ID NO: 3659104 - DNA, 25 bp, Homo sapien
agaattgggtacaaaggactcgtca

SEQ ID NO: 3659105 - DNA, 25 bp, Homo sapien
ccccaggatcgtggcccagtaggga

SEQ ID NO: 3659106 - DNA, 25 bp, Homo sapien
tgaggaagagccataagcaagcagc

SEQ ID NO: 3659107 - DNA, 25 bp, Homo sapien
ggccttgttattgccccatcgtgga

SEQ ID NO: 3659108 - DNA, 25 bp, Homo sapien
tcttgggccttgttattgccccatc

SEQ ID NO: 3659109 - DNA, 25 bp, Homo sapien
tgttattgccccatcgtggaagctt

SEQ ID NO: 3659110 - DNA, 25 bp, Homo sapien
ccatcgtggaagcttgcctgctcct

SEQ ID NO: 3659111 - DNA, 25 bp, Homo sapien
cagttgtcacatctagtaaagtgga

SEQ ID NO: 3659112 - DNA, 25 bp, Homo sapien
gatcgccgccattgtagttgagtca

SEQ ID NO: 3659113 - DNA, 25 bp, Homo sapien
ttaccaatcgttcctgcgaatgact

SEQ ID NO: 3659114 - DNA, 25 bp, Homo sapien
taaagtggactcatggaagccgctg

SEQ ID NO: 3659115 - DNA, 25 bp, Homo sapien
ctgccccgtgcaggacccaagagac

SEQ ID NO: 3659116 - DNA, 25 bp, Homo sapien
gctgctgagctatggggcatcagct

SEQ ID NO: 3659117 - DNA, 25 bp, Homo sapien
ccaagagacagccatgggaccgaca

SEQ ID NO: 3659118 - DNA, 25 bp, Homo sapien
ggcatcagctccctcttatctctag

SEQ ID NO: 3659119 - DNA, 25 bp, Homo sapien
tgttcgacctgtcacacgtgtgagg

SEQ ID NO: 3659120 - DNA, 25 bp, Homo sapien
tgtctgaggatgagtgaagcaggtg

SEQ ID NO: 3659121 - DNA, 25 bp, Homo sapien
ttggccctgtcacagtcactccctt

SEQ ID NO: 3659122 - DNA, 25 bp, Homo sapien
cttgcctgttctgtgatccagtggg

SEQ ID NO: 3659123 - DNA, 25 bp, Homo sapien
agaagtggaagagcagtcagggccc

SEQ ID NO: 3659124 - DNA, 25 bp, Homo sapien
ggaagaagtggaagagcagtcaggg

SEQ ID NO: 3659125 - DNA, 25 bp, Homo sapien
gaagaagtggaagagcagtcagggc

SEQ ID NO: 3659126 - DNA, 25 bp, Homo sapien
aagaagtggaagagcagtcagggcc

SEQ ID NO: 3659127 - DNA, 25 bp, Homo sapien
ctggaagctgcacaacaggagggga

SEQ ID NO: 3659128 - DNA, 25 bp, Homo sapien
gaagctgcacaacaggaggggagca

SEQ ID NO: 3659129 - DNA, 25 bp, Homo sapien
gcctggaagctgcacaacaggaggg

SEQ ID NO: 3659130 - DNA, 25 bp, Homo sapien
agagcctggaagctgcacaacagga

SEQ ID NO: 3659131 - DNA, 25 bp, Homo sapien
tagggtgtccggtatcagcacttcc

SEQ ID NO: 3659132 - DNA, 25 bp, Homo sapien
tggctagggtgtccggtatcagcac

SEQ ID NO: 3659133 - DNA, 25 bp, Homo sapien
ctatggctagggtgtccggtatcag

SEQ ID NO: 3659134 - DNA, 25 bp, Homo sapien
ggtgtccggtatcagcacttcccag

SEQ ID NO: 3659135 - DNA, 25 bp, Homo sapien
gttgctgagtcatggaaggaagaac

SEQ ID NO: 3659136 - DNA, 25 bp, Homo sapien
tagttgctgagtcatggaaggaaga

SEQ ID NO: 3659137 - DNA, 25 bp, Homo sapien
tgagtagttgctgagtcatggaagg

SEQ ID NO: 3659138 - DNA, 25 bp, Homo sapien
agacaggtggaaagaactgagtagt

SEQ ID NO: 3659139 - DNA, 25 bp, Homo sapien
catcagctgggagaagacagcatca

SEQ ID NO: 3659140 - DNA, 25 bp, Homo sapien
gggacacagagggtcagcccttggg

SEQ ID NO: 3659141 - DNA, 25 bp, Homo sapien
agcccttgggatctgagaagcaagt

SEQ ID NO: 3659142 - DNA, 25 bp, Homo sapien
tatgaaccaagctgacatcagctgg

SEQ ID NO: 3659143 - DNA, 25 bp, Homo sapien
atctgggaccacttagtccactggc

SEQ ID NO: 3659144 - DNA, 25 bp, Homo sapien
tccccatctgggaccacttagtcca

SEQ ID NO: 3659145 - DNA, 25 bp, Homo sapien
gaccacttagtccactggcagactc

SEQ ID NO: 3659146 - DNA, 25 bp, Homo sapien
tgggaccacttagtccactggcaga

SEQ ID NO: 3659147 - DNA, 25 bp, Homo sapien
ttgcaagagagtagttggagtaatg

SEQ ID NO: 3659148 - DNA, 25 bp, Homo sapien
cacggaatccgagagtagttggggt

SEQ ID NO: 3659149 - DNA, 25 bp, Homo sapien
tatttgcaagagagtagttggagta

SEQ ID NO: 3659150 - DNA, 25 bp, Homo sapien
agtatttgcaagagagtagttggag

SEQ ID NO: 3659151 - DNA, 25 bp, Homo sapien
ccagatcagatgagactcgctgtgt

SEQ ID NO: 3659152 - DNA, 25 bp, Homo sapien
ttccttccaggtactactgaggcct

SEQ ID NO: 3659153 - DNA, 25 bp, Homo sapien
tcagatgagactcgctgtgttcagg

SEQ ID NO: 3659154 - DNA, 25 bp, Homo sapien
ttttccttccaggtactactgaggc

SEQ ID NO: 3659155 - DNA, 25 bp, Homo sapien
cgagtgcccatgtttcagcgaagac

SEQ ID NO: 3659156 - DNA, 25 bp, Homo sapien
gggaacagaaagcacttcccacgag

SEQ ID NO: 3659157 - DNA, 25 bp, Homo sapien
gaacagaaagcacttcccacgagtg

SEQ ID NO: 3659158 - DNA, 25 bp, Homo sapien
cccacgagtgcccatgtttcagcga

SEQ ID NO: 3659159 - DNA, 25 bp, Homo sapien
aaaaaattgttgtgtcaggtgccgg

SEQ ID NO: 3659160 - DNA, 25 bp, Homo sapien
tcttcggtgggcttgagacttaacc

SEQ ID NO: 3659161 - DNA, 25 bp, Homo sapien
ttagggagacacatcagaaaggcac

SEQ ID NO: 3659162 - DNA, 25 bp, Homo sapien
tgctcaaagcaactccactgggata

SEQ ID NO: 3659163 - DNA, 25 bp, Homo sapien
tgtgggccataatgtcagagtctct

SEQ ID NO: 3659164 - DNA, 25 bp, Homo sapien
taagatgtccagaggtggcttacac

SEQ ID NO: 3659165 - DNA, 25 bp, Homo sapien
gcaaataacaggcttaccaggactt

SEQ ID NO: 3659166 - DNA, 25 bp, Homo sapien
taactgactagaagctgagtgggca

SEQ ID NO: 3659167 - DNA, 25 bp, Homo sapien
caagagatgggaatgtaatagcagc

SEQ ID NO: 3659168 - DNA, 25 bp, Homo sapien
gatgggaatgtaatagcagcagctg

SEQ ID NO: 3659169 - DNA, 25 bp, Homo sapien
cttccaagagatgggaatgtaatag

SEQ ID NO: 3659170 - DNA, 25 bp, Homo sapien
gagatgggaatgtaatagcagcagc

SEQ ID NO: 3659171 - DNA, 25 bp, Homo sapien
cttcaccagaagttcagcattcttg

SEQ ID NO: 3659172 - DNA, 25 bp, Homo sapien
cagaagttcagcattcttggcaggc

SEQ ID NO: 3659173 - DNA, 25 bp, Homo sapien
ccagaagttcagcattcttggcagg

SEQ ID NO: 3659174 - DNA, 25 bp, Homo sapien
caccagaagttcagcattcttggca

SEQ ID NO: 3659175 - DNA, 25 bp, Homo sapien
cacacagagatatgggcgaggtgtc

SEQ ID NO: 3659176 - DNA, 25 bp, Homo sapien
gaatgttcgggcttccaaacgctag

SEQ ID NO: 3659177 - DNA, 25 bp, Homo sapien
gggcagcaacatccacagcgccttt

SEQ ID NO: 3659178 - DNA, 25 bp, Homo sapien
gaggattgggaccacatcatgcaca

SEQ ID NO: 3659179 - DNA, 25 bp, Homo sapien
tctacacatcatcttttcatgggcc

SEQ ID NO: 3659180 - DNA, 25 bp, Homo sapien
gtaatctctacacatcatcttttca

SEQ ID NO: 3659181 - DNA, 25 bp, Homo sapien
tggtggctgtaatctctacacatca

SEQ ID NO: 3659182 - DNA, 25 bp, Homo sapien
ggctgtaatctctacacatcatctt

SEQ ID NO: 3659183 - DNA, 25 bp, Homo sapien
aaaaagaccattgcctttctcatca

SEQ ID NO: 3659184 - DNA, 25 bp, Homo sapien
tgagtagaaaaagaccattgccttt

SEQ ID NO: 3659185 - DNA, 25 bp, Homo sapien
gagtagaaaaagaccattgcctttc

SEQ ID NO: 3659186 - DNA, 25 bp, Homo sapien
tagaaaaagaccattgcctttctca

SEQ ID NO: 3659187 - DNA, 25 bp, Homo sapien
ctagacaacattgaactaggaataa

SEQ ID NO: 3659188 - DNA, 25 bp, Homo sapien
aactaggaataatgacagaaattgg

SEQ ID NO: 3659189 - DNA, 25 bp, Homo sapien
agacaacattgaactaggaataatg

SEQ ID NO: 3659190 - DNA, 25 bp, Homo sapien
cattgaactaggaataatgacagaa

SEQ ID NO: 3659191 - DNA, 25 bp, Homo sapien
gctgggtacaacaggtttcacctct

SEQ ID NO: 3659192 - DNA, 25 bp, Homo sapien
ttgacaaatgtggacacccttttcg

SEQ ID NO: 3659193 - DNA, 25 bp, Homo sapien
cacccttttcgacaggtctattgca

SEQ ID NO: 3659194 - DNA, 25 bp, Homo sapien
tcagacctcgcctagatggagccaa

SEQ ID NO: 3659195 - DNA, 25 bp, Homo sapien
gaaatatccccacaccgtgccaata

SEQ ID NO: 3659196 - DNA, 25 bp, Homo sapien
gccaatagctatgggagctgagcac

SEQ ID NO: 3659197 - DNA, 25 bp, Homo sapien
agttcagtcctttgcggcactcttg

SEQ ID NO: 3659198 - DNA, 25 bp, Homo sapien
cctttgcggcactcttgaaatatcc

SEQ ID NO: 3659199 - DNA, 25 bp, Homo sapien
agagtagggctcctttattcctaga

SEQ ID NO: 3659200 - DNA, 25 bp, Homo sapien
aaataatactctagagtagggctcc

SEQ ID NO: 3659201 - DNA, 25 bp, Homo sapien
caatggtaaaacaagctgggtgagg

SEQ ID NO: 3659202 - DNA, 25 bp, Homo sapien
actttaggaaagactcatgccttgc

SEQ ID NO: 3659203 - DNA, 25 bp, Homo sapien
gatattttgtgtatctcattagctt

SEQ ID NO: 3659204 - DNA, 25 bp, Homo sapien
tggaacagatattttgtgtatctca

SEQ ID NO: 3659205 - DNA, 25 bp, Homo sapien
ttgtgtatctcattagctttttctg

SEQ ID NO: 3659206 - DNA, 25 bp, Homo sapien
cagatattttgtgtatctcattagc

SEQ ID NO: 3659207 - DNA, 25 bp, Homo sapien
atcttcacaatcttgggctctcttc

SEQ ID NO: 3659208 - DNA, 25 bp, Homo sapien
cttcacaatcttgggctctcttctt

SEQ ID NO: 3659209 - DNA, 25 bp, Homo sapien
tcttcacaatcttgggctctcttct

SEQ ID NO: 3659210 - DNA, 25 bp, Homo sapien
gagtaggtccaacagaggtctgttt

SEQ ID NO: 3659211 - DNA, 25 bp, Homo sapien
cctggagtaggtccaacagaggtct

SEQ ID NO: 3659212 - DNA, 25 bp, Homo sapien
gggaaagcctggagtaggtccaaca

SEQ ID NO: 3659213 - DNA, 25 bp, Homo sapien
aagcctggagtaggtccaacagagg

SEQ ID NO: 3659214 - DNA, 25 bp, Homo sapien
atattactggtagcccaaatcttct

SEQ ID NO: 3659215 - DNA, 25 bp, Homo sapien
tttccctaaacaatgaactctgttc

SEQ ID NO: 3659216 - DNA, 25 bp, Homo sapien
aaatatgcacagtgaatattactgg

SEQ ID NO: 3659217 - DNA, 25 bp, Homo sapien
aatattgatacctggactggaaaga

SEQ ID NO: 3659218 - DNA, 25 bp, Homo sapien
caatgtttttcagtcgcctaccgaa

SEQ ID NO: 3659219 - DNA, 25 bp, Homo sapien
aactgaaacgtgaccggagtattgg

SEQ ID NO: 3659220 - DNA, 25 bp, Homo sapien
gataccatgttaaccgaaacttgtg

SEQ ID NO: 3659221 - DNA, 25 bp, Homo sapien
taccgaatcaggtcatagactatgg

SEQ ID NO: 3659222 - DNA, 25 bp, Homo sapien
ccgcgcagcccggactcccttccct

SEQ ID NO: 3659223 - DNA, 25 bp, Homo sapien
gacccgcgcagcccggactcccttc

SEQ ID NO: 3659224 - DNA, 25 bp, Homo sapien
gcgcagcccggactcccttcccttc

SEQ ID NO: 3659225 - DNA, 25 bp, Homo sapien
ctgacccgcgcagcccggactccct

SEQ ID NO: 3659226 - DNA, 25 bp, Homo sapien
ggtttgcggcaaccgtgggcactgc

SEQ ID NO: 3659227 - DNA, 25 bp, Homo sapien
tacgacactcccggctttacgacat

SEQ ID NO: 3659228 - DNA, 25 bp, Homo sapien
ttccttacacctagaggctctcgct

SEQ ID NO: 3659229 - DNA, 25 bp, Homo sapien
tctacggccggaaccttgttgctag

SEQ ID NO: 3659230 - DNA, 25 bp, Homo sapien
gatcctctcgcttgtgtctaaatgc

SEQ ID NO: 3659231 - DNA, 25 bp, Homo sapien
atcctctcgcttgtgtctaaatgct

SEQ ID NO: 3659232 - DNA, 25 bp, Homo sapien
gcgccgcgggttcgcctgctttctg

SEQ ID NO: 3659233 - DNA, 25 bp, Homo sapien
cctgctttctgcgcttacacctggg

SEQ ID NO: 3659234 - DNA, 25 bp, Homo sapien
cgttattgcgccgcgggttcgcctg

SEQ ID NO: 3659235 - DNA, 25 bp, Homo sapien
tttctgcgcttacacctggggccat

SEQ ID NO: 3659236 - DNA, 25 bp, Homo sapien
tcagcgccgggcacaagtttgttcc

SEQ ID NO: 3659237 - DNA, 25 bp, Homo sapien
cgcggaagccactttgcacggtcag

SEQ ID NO: 3659238 - DNA, 25 bp, Homo sapien
gaccagaaaagtggccagtgcgtcc

SEQ ID NO: 3659239 - DNA, 25 bp, Homo sapien
tgcggaaagaagcaacagccgctcc

SEQ ID NO: 3659240 - DNA, 25 bp, Homo sapien
gcatacagcaacgtacgaactacag

SEQ ID NO: 3659241 - DNA, 25 bp, Homo sapien
aaagacataactaaatacagtctca

SEQ ID NO: 3659242 - DNA, 25 bp, Homo sapien
tacagtctcatgcaattatttatat

SEQ ID NO: 3659243 - DNA, 25 bp, Homo sapien
ttctaatgttctacctaatgagagg

SEQ ID NO: 3659244 - DNA, 25 bp, Homo sapien
gctgtactcttgcacactaatgcat

SEQ ID NO: 3659245 - DNA, 25 bp, Homo sapien
gagtagctaacaatataattccaca

SEQ ID NO: 3659246 - DNA, 25 bp, Homo sapien
tcaatacaggtagttaagagtagct

SEQ ID NO: 3659247 - DNA, 25 bp, Homo sapien
agttttctaacctctcgctgtactc

SEQ ID NO: 3659248 - DNA, 25 bp, Homo sapien
gctgatatcgcgcctttacactcca

SEQ ID NO: 3659249 - DNA, 25 bp, Homo sapien
gtaaatgatagagcaaagtagcact

SEQ ID NO: 3659250 - DNA, 25 bp, Homo sapien
agctgatatcgcgcctttacactcc

SEQ ID NO: 3659251 - DNA, 25 bp, Homo sapien
tcaaaatttaaagctttggcacttc

SEQ ID NO: 3659252 - DNA, 25 bp, Homo sapien
caaaatttaaagctttggcacttca

SEQ ID NO: 3659253 - DNA, 25 bp, Homo sapien
taactagggccactctccttaggca

SEQ ID NO: 3659254 - DNA, 25 bp, Homo sapien
tgaaaaccccaactaggcacaatgt

SEQ ID NO: 3659255 - DNA, 25 bp, Homo sapien
tgagctttgggtattagttgggccc

SEQ ID NO: 3659256 - DNA, 25 bp, Homo sapien
caaattctggtgagttaagaccaaa

SEQ ID NO: 3659257 - DNA, 25 bp, Homo sapien
gttccatacgtgtccattacagcag

SEQ ID NO: 3659258 - DNA, 25 bp, Homo sapien
gcctacccgtagctaatcaataatt

SEQ ID NO: 3659259 - DNA, 25 bp, Homo sapien
catgcgttaaaacttaccaagccta

SEQ ID NO: 3659260 - DNA, 25 bp, Homo sapien
gagtgaccctcactctctcggacag

SEQ ID NO: 3659261 - DNA, 25 bp, Homo sapien
gccacacatgtgcaaagagacagga

SEQ ID NO: 3659262 - DNA, 25 bp, Homo sapien
ccatgtgtcactgaaagttaagcta

SEQ ID NO: 3659263 - DNA, 25 bp, Homo sapien
cggcgcctggccttatataggttct

SEQ ID NO: 3659264 - DNA, 25 bp, Homo sapien
taaatgtctacttcactgcaagagc

SEQ ID NO: 3659265 - DNA, 25 bp, Homo sapien
cagctactaattccaactgggcagg

SEQ ID NO: 3659266 - DNA, 25 bp, Homo sapien
ccccttgggatctagggaagctgat

SEQ ID NO: 3659267 - DNA, 25 bp, Homo sapien
tatcctgcttagtcaaggtgggcct

SEQ ID NO: 3659268 - DNA, 25 bp, Homo sapien
gatctcccataaaaggtgttagcag

SEQ ID NO: 3659269 - DNA, 25 bp, Homo sapien
tatatgaaatagtgctcagcatgac

SEQ ID NO: 3659270 - DNA, 25 bp, Homo sapien
aagggtgcagacatttcataaggga

SEQ ID NO: 3659271 - DNA, 25 bp, Homo sapien
gggatgacatacaaattgccaacag

SEQ ID NO: 3659272 - DNA, 25 bp, Homo sapien
aagctctctgacactggtatgggca

SEQ ID NO: 3659273 - DNA, 25 bp, Homo sapien
gggtggcttgtcatgcagctactaa

SEQ ID NO: 3659274 - DNA, 25 bp, Homo sapien
ccagtgttggcactagaagggccaa

SEQ ID NO: 3659275 - DNA, 25 bp, Homo sapien
gaccacacaaagcagaagactcact

SEQ ID NO: 3659276 - DNA, 25 bp, Homo sapien
aagcccaactaacttcacagagagg

SEQ ID NO: 3659277 - DNA, 25 bp, Homo sapien
tagggactcgacttcatacttacag

SEQ ID NO: 3659278 - DNA, 25 bp, Homo sapien
gctaatgagggtgcttgaaacacag

SEQ ID NO: 3659279 - DNA, 25 bp, Homo sapien
tccttaatgcaactgtggtggacca

SEQ ID NO: 3659280 - DNA, 25 bp, Homo sapien
cacaggagtcagagagtagattcac

SEQ ID NO: 3659281 - DNA, 25 bp, Homo sapien
gttatgatacaaaactcctttggag

SEQ ID NO: 3659282 - DNA, 25 bp, Homo sapien
atgatacaaaactcctttggagaga

SEQ ID NO: 3659283 - DNA, 25 bp, Homo sapien
tatgatacaaaactcctttggagag

SEQ ID NO: 3659284 - DNA, 25 bp, Homo sapien
ttatgatacaaaactcctttggaga

SEQ ID NO: 3659285 - DNA, 25 bp, Homo sapien
ttgtaaagcgcctgtaccatctcca

SEQ ID NO: 3659286 - DNA, 25 bp, Homo sapien
caccagaacccactgctccgtggcg

SEQ ID NO: 3659287 - DNA, 25 bp, Homo sapien
agaacccactgctccgtggcggtcg

SEQ ID NO: 3659288 - DNA, 25 bp, Homo sapien
cttgtaaagcgcctgtaccatctcc

SEQ ID NO: 3659289 - DNA, 25 bp, Homo sapien
atttgtaagtcttagagaaaagaag

SEQ ID NO: 3659290 - DNA, 25 bp, Homo sapien
tgtaagtcttagagaaaagaagtct

SEQ ID NO: 3659291 - DNA, 25 bp, Homo sapien
gatggtcttttgggacaggaggaac

SEQ ID NO: 3659292 - DNA, 25 bp, Homo sapien
gaaactgacttttatccatatggaa

SEQ ID NO: 3659293 - DNA, 25 bp, Homo sapien
cataatctttacatacttggatcct

SEQ ID NO: 3659294 - DNA, 25 bp, Homo sapien
ccatatggaataatccactggcaaa

SEQ ID NO: 3659295 - DNA, 25 bp, Homo sapien
cattgatctactatgaacttgtaaa

SEQ ID NO: 3659296 - DNA, 25 bp, Homo sapien
ttttcaccaagaattgtgacaggct

SEQ ID NO: 3659297 - DNA, 25 bp, Homo sapien
tttcaccaagaattgtgacaggctt

SEQ ID NO: 3659298 - DNA, 25 bp, Homo sapien
ttcaccaagaattgtgacaggcttc

SEQ ID NO: 3659299 - DNA, 25 bp, Homo sapien
tttttcaccaagaattgtgacaggc

SEQ ID NO: 3659300 - DNA, 25 bp, Homo sapien
caaagcctagagcttaataaaactg

SEQ ID NO: 3659301 - DNA, 25 bp, Homo sapien
gagttaataacactgaccctcagtt

SEQ ID NO: 3659302 - DNA, 25 bp, Homo sapien
ctgataccaaggcattatataagag

SEQ ID NO: 3659303 - DNA, 25 bp, Homo sapien
catgcatgcatatctatccagccta

SEQ ID NO: 3659304 - DNA, 25 bp, Homo sapien
tagtacataccacaagaagttagag

SEQ ID NO: 3659305 - DNA, 25 bp, Homo sapien
gattcttacggctactcttcatagg

SEQ ID NO: 3659306 - DNA, 25 bp, Homo sapien
tagcgtaatcctgcctgatcatgat

SEQ ID NO: 3659307 - DNA, 25 bp, Homo sapien
tctggaaacactctgacagtatcat

SEQ ID NO: 3659308 - DNA, 25 bp, Homo sapien
cacccaccaactgataagagcaata

SEQ ID NO: 3659309 - DNA, 25 bp, Homo sapien
cccaccaactgataagagcaataac

SEQ ID NO: 3659310 - DNA, 25 bp, Homo sapien
acccaccaactgataagagcaataa

SEQ ID NO: 3659311 - DNA, 25 bp, Homo sapien
gatgggagttttcggccaattgcca

SEQ ID NO: 3659312 - DNA, 25 bp, Homo sapien
gatagtgctttcctatgtcaagcag

SEQ ID NO: 3659313 - DNA, 25 bp, Homo sapien
ggatgatcatgtcttcagatgggag

SEQ ID NO: 3659314 - DNA, 25 bp, Homo sapien
tgtcaagcagacagtagccaaatca

SEQ ID NO: 3659315 - DNA, 25 bp, Homo sapien
atataatacattggtaggctttaca

SEQ ID NO: 3659316 - DNA, 25 bp, Homo sapien
tatcaacattaagtatgtaaaatct

SEQ ID NO: 3659317 - DNA, 25 bp, Homo sapien
cattaagtatgtaaaatctcttatc

SEQ ID NO: 3659318 - DNA, 25 bp, Homo sapien
taatacattggtaggctttacacac

SEQ ID NO: 3659319 - DNA, 25 bp, Homo sapien
attctcacgtaagaatgctgctttg

SEQ ID NO: 3659320 - DNA, 25 bp, Homo sapien
aattctcacgtaagaatgctgcttt

SEQ ID NO: 3659321 - DNA, 25 bp, Homo sapien
aaattctcacgtaagaatgctgctt

SEQ ID NO: 3659322 - DNA, 25 bp, Homo sapien
caacagacagagaagtctcttctgg

SEQ ID NO: 3659323 - DNA, 25 bp, Homo sapien
gacagagaagtctcttctggtatct

SEQ ID NO: 3659324 - DNA, 25 bp, Homo sapien
cacctattcttacatcatcatcact

SEQ ID NO: 3659325 - DNA, 25 bp, Homo sapien
atctgggtaacacacctattcttac

SEQ ID NO: 3659326 - DNA, 25 bp, Homo sapien
atattcctcttgtggtggaagttta

SEQ ID NO: 3659327 - DNA, 25 bp, Homo sapien
ggtgcaggagggacctctttatatt

SEQ ID NO: 3659328 - DNA, 25 bp, Homo sapien
gcaggagggacctctttatattcct

SEQ ID NO: 3659329 - DNA, 25 bp, Homo sapien
tttatattcctcttgtggtggaagt

SEQ ID NO: 3659330 - DNA, 25 bp, Homo sapien
agagaacaaggtggctgacacaaac

SEQ ID NO: 3659331 - DNA, 25 bp, Homo sapien
tagagaacaaggtggctgacacaaa

SEQ ID NO: 3659332 - DNA, 25 bp, Homo sapien
ctttagagaacaaggtggctgacac

SEQ ID NO: 3659333 - DNA, 25 bp, Homo sapien
gaacaaggtggctgacacaaactga

SEQ ID NO: 3659334 - DNA, 25 bp, Homo sapien
tagtctgttcatagtcaacacgtac

SEQ ID NO: 3659335 - DNA, 25 bp, Homo sapien
gcatcttttaaaggaggcagtgtaa

SEQ ID NO: 3659336 - DNA, 25 bp, Homo sapien
tgtgaatttccagcagcaatctacc

SEQ ID NO: 3659337 - DNA, 25 bp, Homo sapien
aatatgacttctgcagacctaacag

SEQ ID NO: 3659338 - DNA, 25 bp, Homo sapien
cataggcaagtgctacgtacaggca

SEQ ID NO: 3659339 - DNA, 25 bp, Homo sapien
aaggcaagatccaacccacagttta

SEQ ID NO: 3659340 - DNA, 25 bp, Homo sapien
gagaggtgcagtttgaacaagacaa

SEQ ID NO: 3659341 - DNA, 25 bp, Homo sapien
gcaggtaagcagaggcctacattaa

SEQ ID NO: 3659342 - DNA, 25 bp, Homo sapien
atcttagccaccacatggcttacat

SEQ ID NO: 3659343 - DNA, 25 bp, Homo sapien
tcttagccaccacatggcttacatt

SEQ ID NO: 3659344 - DNA, 25 bp, Homo sapien
tctctgccttctctatcttagccac

SEQ ID NO: 3659345 - DNA, 25 bp, Homo sapien
ctgccttctctatcttagccaccac

SEQ ID NO: 3659346 - DNA, 25 bp, Homo sapien
cccagtccagtctcctgtcaaacac

SEQ ID NO: 3659347 - DNA, 25 bp, Homo sapien
tgactttggttcacaccatcaccca

SEQ ID NO: 3659348 - DNA, 25 bp, Homo sapien
gtccagtctcctgtcaaacacttac

SEQ ID NO: 3659349 - DNA, 25 bp, Homo sapien
tgaccttgactttggttcacaccat

SEQ ID NO: 3659350 - DNA, 25 bp, Homo sapien
caggcgtgagctgctttaactgtgt

SEQ ID NO: 3659351 - DNA, 25 bp, Homo sapien
ttataaagcactttgatatctttag

SEQ ID NO: 3659352 - DNA, 25 bp, Homo sapien
tctctctggtgctctaaaacaggac

SEQ ID NO: 3659353 - DNA, 25 bp, Homo sapien
aaagcactttgatatctttagtcaa

SEQ ID NO: 3659354 - DNA, 25 bp, Homo sapien
ctctctggtgctctaaaacaggact

SEQ ID NO: 3659355 - DNA, 25 bp, Homo sapien
tattaagcataaaatgttgattaag

SEQ ID NO: 3659356 - DNA, 25 bp, Homo sapien
tctgtctatactgactgttttgttt

SEQ ID NO: 3659357 - DNA, 25 bp, Homo sapien
atactgactgttttgtttatagcct

SEQ ID NO: 3659358 - DNA, 25 bp, Homo sapien
ctgtctatactgactgttttgttta

SEQ ID NO: 3659359 - DNA, 25 bp, Homo sapien
tctatactgactgttttgtttatag

SEQ ID NO: 3659360 - DNA, 25 bp, Homo sapien
cctttgttgtctatgaggcctgatt

SEQ ID NO: 3659361 - DNA, 25 bp, Homo sapien
tttgttgtctatgaggcctgatttt

SEQ ID NO: 3659362 - DNA, 25 bp, Homo sapien
ctttgttgtctatgaggcctgattt

SEQ ID NO: 3659363 - DNA, 25 bp, Homo sapien
gagtagaggctcacctatgagaggt

SEQ ID NO: 3659364 - DNA, 25 bp, Homo sapien
gaagtaagagagactacaatgatgc

SEQ ID NO: 3659365 - DNA, 25 bp, Homo sapien
ctatggaaacaagaactagggatct

SEQ ID NO: 3659366 - DNA, 25 bp, Homo sapien
gatcaatgggagtaccatccaaagc

SEQ ID NO: 3659367 - DNA, 25 bp, Homo sapien
ttagttcctacttaacatgtgagaa

SEQ ID NO: 3659368 - DNA, 25 bp, Homo sapien
catgcagtatgcctgtgttagtttg

SEQ ID NO: 3659369 - DNA, 25 bp, Homo sapien
catcatttagttcctacttaacatg

SEQ ID NO: 3659370 - DNA, 25 bp, Homo sapien
aacatgcagtatgcctgtgttagtt

SEQ ID NO: 3659371 - DNA, 25 bp, Homo sapien
tctctatttcagtaaacggcaattc

SEQ ID NO: 3659372 - DNA, 25 bp, Homo sapien
caaatacaattcctggtctctcagt

SEQ ID NO: 3659373 - DNA, 25 bp, Homo sapien
tggtgatatcaccacttggatttct

SEQ ID NO: 3659374 - DNA, 25 bp, Homo sapien
taaacggcaattccattcctccagt

SEQ ID NO: 3659375 - DNA, 25 bp, Homo sapien
caccatttattaaacaggaaattct

SEQ ID NO: 3659376 - DNA, 25 bp, Homo sapien
atggtttcaggtctaacatttcaat

SEQ ID NO: 3659377 - DNA, 25 bp, Homo sapien
ttcaggtctaacatttcaatcttta

SEQ ID NO: 3659378 - DNA, 25 bp, Homo sapien
ggtttcaggtctaacatttcaatct

SEQ ID NO: 3659379 - DNA, 25 bp, Homo sapien
ttgattaaagccacaggcgaaggcc

SEQ ID NO: 3659380 - DNA, 25 bp, Homo sapien
gagggcttcaattcttgtccgacga

SEQ ID NO: 3659381 - DNA, 25 bp, Homo sapien
gagttgtgttctacagagccaacag

SEQ ID NO: 3659382 - DNA, 25 bp, Homo sapien
tgtccgacgataactgtggcatgta

SEQ ID NO: 3659383 - DNA, 25 bp, Homo sapien
tgtctggtctgttggcaggtcatcc

SEQ ID NO: 3659384 - DNA, 25 bp, Homo sapien
cttcttccacaatatgcagtttgtc

SEQ ID NO: 3659385 - DNA, 25 bp, Homo sapien
gtcatcctctggtacaccttcacag

SEQ ID NO: 3659386 - DNA, 25 bp, Homo sapien
tctgaatttgtttctaccacagtat

SEQ ID NO: 3659387 - DNA, 25 bp, Homo sapien
tgcagcaagtagagggtctccttac

SEQ ID NO: 3659388 - DNA, 25 bp, Homo sapien
gaaagcttgatcctggttaataaat

SEQ ID NO: 3659389 - DNA, 25 bp, Homo sapien
agcactaaaaatacctccatgattt

SEQ ID NO: 3659390 - DNA, 25 bp, Homo sapien
tttctaagtagagtattcattcggg

SEQ ID NO: 3659391 - DNA, 25 bp, Homo sapien
tttgtctaattaacctccatcggtc

SEQ ID NO: 3659392 - DNA, 25 bp, Homo sapien
taattcggatgctcctccttgatgc

SEQ ID NO: 3659393 - DNA, 25 bp, Homo sapien
tccttaagaactaaagaccactctg

SEQ ID NO: 3659394 - DNA, 25 bp, Homo sapien
tgtttcactcagaactcttctacga

SEQ ID NO: 3659395 - DNA, 25 bp, Homo sapien
tgtctagtgttgttcaaatccactg

SEQ ID NO: 3659396 - DNA, 25 bp, Homo sapien
tactgtactgctatctatttctccc

SEQ ID NO: 3659397 - DNA, 25 bp, Homo sapien
tgaaagcactgaagacccctatgat

SEQ ID NO: 3659398 - DNA, 25 bp, Homo sapien
tctgtatatcaggtccattttgtct

SEQ ID NO: 3659399 - DNA, 25 bp, Homo sapien
cctgttacggatttatggtttcatg

SEQ ID NO: 3659400 - DNA, 25 bp, Homo sapien
gttacggatttatggtttcatgcca

SEQ ID NO: 3659401 - DNA, 25 bp, Homo sapien
tgttacggatttatggtttcatgcc

SEQ ID NO: 3659402 - DNA, 25 bp, Homo sapien
ctcctgttacggatttatggtttca

SEQ ID NO: 3659403 - DNA, 25 bp, Homo sapien
tggtctatctattttcttgaccctt

SEQ ID NO: 3659404 - DNA, 25 bp, Homo sapien
tcaaaaaaccagctctgggattaat

SEQ ID NO: 3659405 - DNA, 25 bp, Homo sapien
tacatttattgatttgggtatattg

SEQ ID NO: 3659406 - DNA, 25 bp, Homo sapien
gattacatttattgatttgggtata

SEQ ID NO: 3659407 - DNA, 25 bp, Homo sapien
tcttctgctagtccctttactttga

SEQ ID NO: 3659408 - DNA, 25 bp, Homo sapien
gcagatggttaagtcctgcttcttt

SEQ ID NO: 3659409 - DNA, 25 bp, Homo sapien
tagttgtcttttgccattaggtggg

SEQ ID NO: 3659410 - DNA, 25 bp, Homo sapien
ccattaggtgggtctctggtaggca

SEQ ID NO: 3659411 - DNA, 25 bp, Homo sapien
acagtgaacaagctgtacccaattg

SEQ ID NO: 3659412 - DNA, 25 bp, Homo sapien
caagctgtacccaattgtaaaattg

SEQ ID NO: 3659413 - DNA, 25 bp, Homo sapien
tctaatgtacccataatccaaacag

SEQ ID NO: 3659414 - DNA, 25 bp, Homo sapien
tgtacccataatccaaacagtgaac

SEQ ID NO: 3659415 - DNA, 25 bp, Homo sapien
catgatatttgcctaatggtgagtc

SEQ ID NO: 3659416 - DNA, 25 bp, Homo sapien
cagaactaaagcaataggtgccctt

SEQ ID NO: 3659417 - DNA, 25 bp, Homo sapien
cacttttgaagcgtactgggcactg

SEQ ID NO: 3659418 - DNA, 25 bp, Homo sapien
tgtcatatgcccctcaacttggatt

SEQ ID NO: 3659419 - DNA, 25 bp, Homo sapien
cctagccttcaaggtagtagcagag

SEQ ID NO: 3659420 - DNA, 25 bp, Homo sapien
ccagagttttggctagaggactgaa

SEQ ID NO: 3659421 - DNA, 25 bp, Homo sapien
ggagctgtggccctaagagtacaat

SEQ ID NO: 3659422 - DNA, 25 bp, Homo sapien
ggcctggattcaagggagcttaaaa

SEQ ID NO: 3659423 - DNA, 25 bp, Homo sapien
caggccccaggatttcttgcccttc

SEQ ID NO: 3659424 - DNA, 25 bp, Homo sapien
ctgtacatcctgcttcatctgcctg

SEQ ID NO: 3659425 - DNA, 25 bp, Homo sapien
atctgcctgagcttcaggccccagg

SEQ ID NO: 3659426 - DNA, 25 bp, Homo sapien
cttcatctgcctgagcttcaggccc

SEQ ID NO: 3659427 - DNA, 25 bp, Homo sapien
ttctgcatctgactcgcattcatca

SEQ ID NO: 3659428 - DNA, 25 bp, Homo sapien
aacattaggatcatggttttgctca

SEQ ID NO: 3659429 - DNA, 25 bp, Homo sapien
tcttcaacattaggatcatggtttt

SEQ ID NO: 3659430 - DNA, 25 bp, Homo sapien
gcatctgactcgcattcatcatctt

SEQ ID NO: 3659431 - DNA, 25 bp, Homo sapien
tagatcgtactgtatggacctgaca

SEQ ID NO: 3659432 - DNA, 25 bp, Homo sapien
ttctggtgaaacaataacatagtct

SEQ ID NO: 3659433 - DNA, 25 bp, Homo sapien
tgactattcatatcagagtggacta

SEQ ID NO: 3659434 - DNA, 25 bp, Homo sapien
tggactaaggcagattcaggaaaac

SEQ ID NO: 3659435 - DNA, 25 bp, Homo sapien
tcaagttgggttctgtatgcaaagg

SEQ ID NO: 3659436 - DNA, 25 bp, Homo sapien
tagcctctatcacaatatggacagg

SEQ ID NO: 3659437 - DNA, 25 bp, Homo sapien
caaaggtgtaactgcacagggagca

SEQ ID NO: 3659438 - DNA, 25 bp, Homo sapien
tcagagaggtaaagcgtttatagcc

SEQ ID NO: 3659439 - DNA, 25 bp, Homo sapien
ctgctttcgccaccagttcaatctg

SEQ ID NO: 3659440 - DNA, 25 bp, Homo sapien
gctttcgccaccagttcaatctgtc

SEQ ID NO: 3659441 - DNA, 25 bp, Homo sapien
tttcgccaccagttcaatctgtcct

SEQ ID NO: 3659442 - DNA, 25 bp, Homo sapien
cgccaccagttcaatctgtcctctc

SEQ ID NO: 3659443 - DNA, 25 bp, Homo sapien
gaactggtattttatttgaaaagca

SEQ ID NO: 3659444 - DNA, 25 bp, Homo sapien
cactgtgaattcttaagtgctcttt

SEQ ID NO: 3659445 - DNA, 25 bp, Homo sapien
acactcagtgcatttgaatttacga

SEQ ID NO: 3659446 - DNA, 25 bp, Homo sapien
tttacgattacacccagactgcgtc

SEQ ID NO: 3659447 - DNA, 25 bp, Homo sapien
tcttaagtgctcttttaggtgatgt

SEQ ID NO: 3659448 - DNA, 25 bp, Homo sapien
cagcatatgtatggcatttcacagc

SEQ ID NO: 3659449 - DNA, 25 bp, Homo sapien
gacaccctgggtcttggttactgat

SEQ ID NO: 3659450 - DNA, 25 bp, Homo sapien
agtacagtgggagctttgtgttcca

SEQ ID NO: 3659451 - DNA, 25 bp, Homo sapien
tcagctcatattaagctctgggcca

SEQ ID NO: 3659452 - DNA, 25 bp, Homo sapien
cattattagataccctaggcagagc

SEQ ID NO: 3659453 - DNA, 25 bp, Homo sapien
cacacacggttctgcatagggtcat

SEQ ID NO: 3659454 - DNA, 25 bp, Homo sapien
acacagggtttgcagactggtacca

SEQ ID NO: 3659455 - DNA, 25 bp, Homo sapien
tggaccacagccatatgcaggtgtt

SEQ ID NO: 3659456 - DNA, 25 bp, Homo sapien
cctacatagatgtgatgaacgctag

SEQ ID NO: 3659457 - DNA, 25 bp, Homo sapien
gaagactgccatgcatgcttgtgac

SEQ ID NO: 3659458 - DNA, 25 bp, Homo sapien
cgctagtaactaagtctgaggtaca

SEQ ID NO: 3659459 - DNA, 25 bp, Homo sapien
catttccctaaaacaagcggtatca

SEQ ID NO: 3659460 - DNA, 25 bp, Homo sapien
tattggcagctagcgctcttaagca

SEQ ID NO: 3659461 - DNA, 25 bp, Homo sapien
ccacgattgtgggtaactgggcagt

SEQ ID NO: 3659462 - DNA, 25 bp, Homo sapien
tggtcgcccattcacaggtatcaag

SEQ ID NO: 3659463 - DNA, 25 bp, Homo sapien
taaaggtggctgactaggagacaaa

SEQ ID NO: 3659464 - DNA, 25 bp, Homo sapien
tactcttttggaatatcttgtcaca

SEQ ID NO: 3659465 - DNA, 25 bp, Homo sapien
tttgggcggtgtagaatcagagtca

SEQ ID NO: 3659466 - DNA, 25 bp, Homo sapien
gagtcattctgatcctctacatttg

SEQ ID NO: 3659467 - DNA, 25 bp, Homo sapien
catttgatactccttctgagctagt

SEQ ID NO: 3659468 - DNA, 25 bp, Homo sapien
tattgcccctcctgagaacgcatgg

SEQ ID NO: 3659469 - DNA, 25 bp, Homo sapien
aacgcatgggctacaggagtgttgc

SEQ ID NO: 3659470 - DNA, 25 bp, Homo sapien
gagatgtctggtagtgaacgagcac

SEQ ID NO: 3659471 - DNA, 25 bp, Homo sapien
tacaagcatcatgacagcgaggtgg

SEQ ID NO: 3659472 - DNA, 25 bp, Homo sapien
cttacagtaggagtagcgatgattc

SEQ ID NO: 3659473 - DNA, 25 bp, Homo sapien
ataagacccagagtgtgagaagcgc

SEQ ID NO: 3659474 - DNA, 25 bp, Homo sapien
ccagaatgtaatcgcatgtgttcaa

SEQ ID NO: 3659475 - DNA, 25 bp, Homo sapien
gctcattcgagaggatttcaggccc

SEQ ID NO: 3659476 - DNA, 25 bp, Homo sapien
ttcccttgtcaaactctctctctcg

SEQ ID NO: 3659477 - DNA, 25 bp, Homo sapien
tgtcaaactctctctctcgtccgag

SEQ ID NO: 3659478 - DNA, 25 bp, Homo sapien
tctctcgtccgagtcgccctgtgag

SEQ ID NO: 3659479 - DNA, 25 bp, Homo sapien
agtcgccctgtgagggagacgccct

SEQ ID NO: 3659480 - DNA, 25 bp, Homo sapien
ttttcttcctgcaattcttccatct

SEQ ID NO: 3659481 - DNA, 25 bp, Homo sapien
tcttcctgcaattcttccatctctt

SEQ ID NO: 3659482 - DNA, 25 bp, Homo sapien
tctttttcttcctgcaattcttcca

SEQ ID NO: 3659483 - DNA, 25 bp, Homo sapien
ctttttcttcctgcaattcttccat

SEQ ID NO: 3659484 - DNA, 25 bp, Homo sapien
tactttttgtcctaagctgcttgct

SEQ ID NO: 3659485 - DNA, 25 bp, Homo sapien
tcctcatccccttgtggtttttcac

SEQ ID NO: 3659486 - DNA, 25 bp, Homo sapien
ttcagacacttgctcactactctcg

SEQ ID NO: 3659487 - DNA, 25 bp, Homo sapien
tgcttgcttgactttcagccctgtc

SEQ ID NO: 3659488 - DNA, 25 bp, Homo sapien
gaggttcaggcacacccggatttat

SEQ ID NO: 3659489 - DNA, 25 bp, Homo sapien
gaagcggatttagcatatgtttacc

SEQ ID NO: 3659490 - DNA, 25 bp, Homo sapien
aaaattactaggtctgaggttcagg

SEQ ID NO: 3659491 - DNA, 25 bp, Homo sapien
agcacgggttggaactacattatac

SEQ ID NO: 3659492 - DNA, 25 bp, Homo sapien
tgtcatatccttcatatgttaccac

SEQ ID NO: 3659493 - DNA, 25 bp, Homo sapien
ccttatcagattaacattgttagtc

SEQ ID NO: 3659494 - DNA, 25 bp, Homo sapien
tgatgattttgctgtccttatcaga

SEQ ID NO: 3659495 - DNA, 25 bp, Homo sapien
ggccaaaggagatacaaagcttcat

SEQ ID NO: 3659496 - DNA, 25 bp, Homo sapien
gcgggttagagccttgaaaatactg

SEQ ID NO: 3659497 - DNA, 25 bp, Homo sapien
gaaaatactgagaaatggcacttac

SEQ ID NO: 3659498 - DNA, 25 bp, Homo sapien
gagcatcatgctattagtcacacag

SEQ ID NO: 3659499 - DNA, 25 bp, Homo sapien
tctcaatgcaggagaaccaattgca

SEQ ID NO: 3659500 - DNA, 25 bp, Homo sapien
tctgttctacagtccaaggcaagta

SEQ ID NO: 3659501 - DNA, 25 bp, Homo sapien
taagaagggtattaatactgccagg

SEQ ID NO: 3659502 - DNA, 25 bp, Homo sapien
ggcaacatggtaacgagcacctacg

SEQ ID NO: 3659503 - DNA, 25 bp, Homo sapien
catgaggttaagcaccaggaagaca

SEQ ID NO: 3659504 - DNA, 25 bp, Homo sapien
ggaggtagtcatgtccacaagccag

SEQ ID NO: 3659505 - DNA, 25 bp, Homo sapien
caggcaccctgttaggcagtgagga

SEQ ID NO: 3659506 - DNA, 25 bp, Homo sapien
agatacgattgtcctctgggatggc

SEQ ID NO: 3659507 - DNA, 25 bp, Homo sapien
ctgaatcaaagccaagatacgattg

SEQ ID NO: 3659508 - DNA, 25 bp, Homo sapien
tctgggatggctagatgtccttatc

SEQ ID NO: 3659509 - DNA, 25 bp, Homo sapien
gcttctgtttgtgtagctgaatcaa

SEQ ID NO: 3659510 - DNA, 25 bp, Homo sapien
gaaacccggtagataaacagtctgc

SEQ ID NO: 3659511 - DNA, 25 bp, Homo sapien
caatatcatagtctgaatacagctc

SEQ ID NO: 3659512 - DNA, 25 bp, Homo sapien
tgaatgtgtcttgtgacttcctgcc

SEQ ID NO: 3659513 - DNA, 25 bp, Homo sapien
cctggtgcagaagccttcatagcat

SEQ ID NO: 3659514 - DNA, 25 bp, Homo sapien
tggcagggagccaacaggaggctta

SEQ ID NO: 3659515 - DNA, 25 bp, Homo sapien
cagggagccaacaggaggcttagtc

SEQ ID NO: 3659516 - DNA, 25 bp, Homo sapien
gggagccaacaggaggcttagtcat

SEQ ID NO: 3659517 - DNA, 25 bp, Homo sapien
gaggctggcagggagccaacaggag

SEQ ID NO: 3659518 - DNA, 25 bp, Homo sapien
gcagggctggcccaaacacagatgt

SEQ ID NO: 3659519 - DNA, 25 bp, Homo sapien
cacagatgttctaaagtcctccttc

SEQ ID NO: 3659520 - DNA, 25 bp, Homo sapien
cagatgttctaaagtcctccttcat

SEQ ID NO: 3659521 - DNA, 25 bp, Homo sapien
gggctggcccaaacacagatgttct

SEQ ID NO: 3659522 - DNA, 25 bp, Homo sapien
gggtgttatcagcagacgctagttc

SEQ ID NO: 3659523 - DNA, 25 bp, Homo sapien
agcagacgctagttctcctgagccc

SEQ ID NO: 3659524 - DNA, 25 bp, Homo sapien
gggacactgtaagtcttgaagctcc

SEQ ID NO: 3659525 - DNA, 25 bp, Homo sapien
ttgaagctccagtggcttggacagg

SEQ ID NO: 3659526 - DNA, 25 bp, Homo sapien
ctctctctcggtttcgctgccctcc

SEQ ID NO: 3659527 - DNA, 25 bp, Homo sapien
tggaaggttccctttgtgattgtct

SEQ ID NO: 3659528 - DNA, 25 bp, Homo sapien
ggattctggaaggttccctttgtga

SEQ ID NO: 3659529 - DNA, 25 bp, Homo sapien
ctctcggtttcgctgccctccagct

SEQ ID NO: 3659530 - DNA, 25 bp, Homo sapien
tggagtgatcgatggccgtgccact

SEQ ID NO: 3659531 - DNA, 25 bp, Homo sapien
tgatcgatggccgtgccactcttcc

SEQ ID NO: 3659532 - DNA, 25 bp, Homo sapien
agtgatcgatggccgtgccactctt

SEQ ID NO: 3659533 - DNA, 25 bp, Homo sapien
ggagtgatcgatggccgtgccactc

SEQ ID NO: 3659534 - DNA, 25 bp, Homo sapien
tggatgttttgcccggcaactcaga

SEQ ID NO: 3659535 - DNA, 25 bp, Homo sapien
agctgttggatgttttgcccggcaa

SEQ ID NO: 3659536 - DNA, 25 bp, Homo sapien
tgttggatgttttgcccggcaactc

SEQ ID NO: 3659537 - DNA, 25 bp, Homo sapien
gctgttggatgttttgcccggcaac

SEQ ID NO: 3659538 - DNA, 25 bp, Homo sapien
tgttactcaggagcttatatttagc

SEQ ID NO: 3659539 - DNA, 25 bp, Homo sapien
tactcaggagcttatatttagctgc

SEQ ID NO: 3659540 - DNA, 25 bp, Homo sapien
cttgttactcaggagcttatattta

SEQ ID NO: 3659541 - DNA, 25 bp, Homo sapien
ctcaggagcttatatttagctgctg

SEQ ID NO: 3659542 - DNA, 25 bp, Homo sapien
ctcttcctgcgaggggacacctcat

SEQ ID NO: 3659543 - DNA, 25 bp, Homo sapien
agtggctcttcctgcgaggggacac

SEQ ID NO: 3659544 - DNA, 25 bp, Homo sapien
gtggctcttcctgcgaggggacacc

SEQ ID NO: 3659545 - DNA, 25 bp, Homo sapien
ggctcttcctgcgaggggacacctc

SEQ ID NO: 3659546 - DNA, 25 bp, Homo sapien
tccaccaaagtcaccagagggaaaa

SEQ ID NO: 3659547 - DNA, 25 bp, Homo sapien
accaaagacggtcgtttagtggcta

SEQ ID NO: 3659548 - DNA, 25 bp, Homo sapien
ctagcacactgcaaggtctcgaagg

SEQ ID NO: 3659549 - DNA, 25 bp, Homo sapien
gggtcctgaaccgcatcaaggctga

SEQ ID NO: 3659550 - DNA, 25 bp, Homo sapien
caaggctgaactccgagcagctgtg

SEQ ID NO: 3659551 - DNA, 25 bp, Homo sapien
tttttagcactagaggagcaagaaa

SEQ ID NO: 3659552 - DNA, 25 bp, Homo sapien
aggtcgagagaatttagcccgagat

SEQ ID NO: 3659553 - DNA, 25 bp, Homo sapien
aggtataattgaagcagaaggtact

SEQ ID NO: 3659554 - DNA, 25 bp, Homo sapien
attagaagtgatcaggcgctgtcaa

SEQ ID NO: 3659555 - DNA, 25 bp, Homo sapien
caagaaaaagtagagaacaaaactc

SEQ ID NO: 3659556 - DNA, 25 bp, Homo sapien
ggggaaggtgcacttgatctatctg

SEQ ID NO: 3659557 - DNA, 25 bp, Homo sapien
ttttgcagcccgggtgtggaggtga

SEQ ID NO: 3659558 - DNA, 25 bp, Homo sapien
tttgcagcccgggtgtggaggtgag

SEQ ID NO: 3659559 - DNA, 25 bp, Homo sapien
ctttttgcagcccgggtgtggaggt

SEQ ID NO: 3659560 - DNA, 25 bp, Homo sapien
ggtgtggaggtgagcgcaacccacc

SEQ ID NO: 3659561 - DNA, 25 bp, Homo sapien
tgccttcctcacttggatctgttgg

SEQ ID NO: 3659562 - DNA, 25 bp, Homo sapien
gggcatctcgtgtctttcagtgaaa

SEQ ID NO: 3659563 - DNA, 25 bp, Homo sapien
ggatctgttggctctgtcactatgg

SEQ ID NO: 3659564 - DNA, 25 bp, Homo sapien
tgaaataactgctgtcgttgtccac

SEQ ID NO: 3659565 - DNA, 25 bp, Homo sapien
ttcctcctcggtcttctcagcttgt

SEQ ID NO: 3659566 - DNA, 25 bp, Homo sapien
ttgggcatgcccagcagacgggcag

SEQ ID NO: 3659567 - DNA, 25 bp, Homo sapien
tcctcggtcttctcagcttgttggg

SEQ ID NO: 3659568 - DNA, 25 bp, Homo sapien
ggcatgcccagcagacgggcagctt

SEQ ID NO: 3659569 - DNA, 25 bp, Homo sapien
gcatcagcgggctttttagcttggg

SEQ ID NO: 3659570 - DNA, 25 bp, Homo sapien
cattcccaatgccatcgctggcggt

SEQ ID NO: 3659571 - DNA, 25 bp, Homo sapien
ggcagagtctggagcctcggacccc

SEQ ID NO: 3659572 - DNA, 25 bp, Homo sapien
cggtcttgcaactggccggcatcag

SEQ ID NO: 3659573 - DNA, 25 bp, Homo sapien
ggaagcctggatcacttacgccgaa

SEQ ID NO: 3659574 - DNA, 25 bp, Homo sapien
atggagcaggcgaggttaaagcttc

SEQ ID NO: 3659575 - DNA, 25 bp, Homo sapien
tgccaggggttgtacatggccgccc

SEQ ID NO: 3659576 - DNA, 25 bp, Homo sapien
gcgggtctctgcgcgcagtctcctg

SEQ ID NO: 3659577 - DNA, 25 bp, Homo sapien
cgcacggagacgctggaggaataaa

SEQ ID NO: 3659578 - DNA, 25 bp, Homo sapien
tattggatggactgactctgccgct

SEQ ID NO: 3659579 - DNA, 25 bp, Homo sapien
cacacctggttgtacacgtggccca

SEQ ID NO: 3659580 - DNA, 25 bp, Homo sapien
tggccacgggaatttgcagcatgac

SEQ ID NO: 3659581 - DNA, 25 bp, Homo sapien
tgtgaaatacgatgaaatacgatgc

SEQ ID NO: 3659582 - DNA, 25 bp, Homo sapien
aatacgatgcctggggctatcaaag

SEQ ID NO: 3659583 - DNA, 25 bp, Homo sapien
tatcaaagcacgatttcctcctggg

SEQ ID NO: 3659584 - DNA, 25 bp, Homo sapien
gcctggggctatcaaagcacgattt

SEQ ID NO: 3659585 - DNA, 25 bp, Homo sapien
tgaacctggcttgtagacctaactg

SEQ ID NO: 3659586 - DNA, 25 bp, Homo sapien
cttattgggtgaaacagctaatccc

SEQ ID NO: 3659587 - DNA, 25 bp, Homo sapien
gattagaatggtcctgtctcgggac

SEQ ID NO: 3659588 - DNA, 25 bp, Homo sapien
tctcgggacaggtgcctcagttggt

SEQ ID NO: 3659589 - DNA, 25 bp, Homo sapien
cacatacacttgaggcagaagggaa

SEQ ID NO: 3659590 - DNA, 25 bp, Homo sapien
gaaaatggcctttcgggatgtcaac

SEQ ID NO: 3659591 - DNA, 25 bp, Homo sapien
tctgaagcgatcgaggaaaatggcc

SEQ ID NO: 3659592 - DNA, 25 bp, Homo sapien
tacgatgcccaagggagatgacccc

SEQ ID NO: 3659593 - DNA, 25 bp, Homo sapien
tctggctaattctggctgtggacag

SEQ ID NO: 3659594 - DNA, 25 bp, Homo sapien
ccatgggtcagtgaattctggctaa

SEQ ID NO: 3659595 - DNA, 25 bp, Homo sapien
catgtcagcatccaagggtgcctca

SEQ ID NO: 3659596 - DNA, 25 bp, Homo sapien
tattttaggagtccaaccatgggtc

SEQ ID NO: 3659597 - DNA, 25 bp, Homo sapien
tcctcttgatgctgccagatacata

SEQ ID NO: 3659598 - DNA, 25 bp, Homo sapien
ccagatacatagacaacactcgcat

SEQ ID NO: 3659599 - DNA, 25 bp, Homo sapien
tgctgccagatacatagacaacact

SEQ ID NO: 3659600 - DNA, 25 bp, Homo sapien
tgatgctgccagatacatagacaac

SEQ ID NO: 3659601 - DNA, 25 bp, Homo sapien
catcaagatatgcaaggtccaactg

SEQ ID NO: 3659602 - DNA, 25 bp, Homo sapien
aacaggatcacaagcataggcaaca

SEQ ID NO: 3659603 - DNA, 25 bp, Homo sapien
aaagaggcataatttctaccaccag

SEQ ID NO: 3659604 - DNA, 25 bp, Homo sapien
gacccagagaacttgaggtagtcat

SEQ ID NO: 3659605 - DNA, 25 bp, Homo sapien
gcctgggtacttcccaggactgaac

SEQ ID NO: 3659606 - DNA, 25 bp, Homo sapien
tgtccggcagggtatcagtgatacc

SEQ ID NO: 3659607 - DNA, 25 bp, Homo sapien
aaatcaccagcgtggagtccaaaga

SEQ ID NO: 3659608 - DNA, 25 bp, Homo sapien
ggtagcagccataaaagcccctctg

SEQ ID NO: 3659609 - DNA, 25 bp, Homo sapien
tactgctgtgggtctgaaatcacca

SEQ ID NO: 3659610 - DNA, 25 bp, Homo sapien
acctggaggaggtgtccagggctgc

SEQ ID NO: 3659611 - DNA, 25 bp, Homo sapien
tggaggaggtgtccagggctgcttt

SEQ ID NO: 3659612 - DNA, 25 bp, Homo sapien
tgcaaggtacctggaggaggtgtcc

SEQ ID NO: 3659613 - DNA, 25 bp, Homo sapien
ctgcaaggtacctggaggaggtgtc

SEQ ID NO: 3659614 - DNA, 25 bp, Homo sapien
ctgtgtcccgtgatatatcctggca

SEQ ID NO: 3659615 - DNA, 25 bp, Homo sapien
ctctgtgtcccgtgatatatcctgg

SEQ ID NO: 3659616 - DNA, 25 bp, Homo sapien
tctgtgtcccgtgatatatcctggc

SEQ ID NO: 3659617 - DNA, 25 bp, Homo sapien
ccttttccattatgcactctgctac

SEQ ID NO: 3659618 - DNA, 25 bp, Homo sapien
tgcttcccaatcactgtccacctgt

SEQ ID NO: 3659619 - DNA, 25 bp, Homo sapien
ctcgtattggcttactgatgtgtct

SEQ ID NO: 3659620 - DNA, 25 bp, Homo sapien
gctgatgtcgtttaccccagtgcct

SEQ ID NO: 3659621 - DNA, 25 bp, Homo sapien
gaaattccgtggcttttttgctcca

SEQ ID NO: 3659622 - DNA, 25 bp, Homo sapien
gcaagtagtaaaacccatgtgttca

SEQ ID NO: 3659623 - DNA, 25 bp, Homo sapien
cgagaaccatagaaatgtatcccaa

SEQ ID NO: 3659624 - DNA, 25 bp, Homo sapien
atgtatcccaaatccctgaagcagg

SEQ ID NO: 3659625 - DNA, 25 bp, Homo sapien
ggcccctccactgcctcatggatgg

SEQ ID NO: 3659626 - DNA, 25 bp, Homo sapien
gatggaatgcaggagaggtccttca

SEQ ID NO: 3659627 - DNA, 25 bp, Homo sapien
ccctccactgcctcatggatggaat

SEQ ID NO: 3659628 - DNA, 25 bp, Homo sapien
ggaatgcaggagaggtccttcagca

SEQ ID NO: 3659629 - DNA, 25 bp, Homo sapien
tgtcaacgagggttgctggaggcat

SEQ ID NO: 3659630 - DNA, 25 bp, Homo sapien
ctgtcaacgagggttgctggaggca

SEQ ID NO: 3659631 - DNA, 25 bp, Homo sapien
ctgaaggccagtttcattccctcca

SEQ ID NO: 3659632 - DNA, 25 bp, Homo sapien
gcttcgtgtacccaaaccacaggaa

SEQ ID NO: 3659633 - DNA, 25 bp, Homo sapien
aggacagtggtgcaagtgggcccct

SEQ ID NO: 3659634 - DNA, 25 bp, Homo sapien
gagtatatttggaagcttcgtgtac

SEQ ID NO: 3659635 - DNA, 25 bp, Homo sapien
gaggaaggctgtgacccaaggactt

SEQ ID NO: 3659636 - DNA, 25 bp, Homo sapien
ccctcaggagccttgatagatcctg

SEQ ID NO: 3659637 - DNA, 25 bp, Homo sapien
aaggacttctatccagcctctctgg

SEQ ID NO: 3659638 - DNA, 25 bp, Homo sapien
tctggccccacactttccccaatct

SEQ ID NO: 3659639 - DNA, 25 bp, Homo sapien
aggatctgcaacctgtctccgaaca

SEQ ID NO: 3659640 - DNA, 25 bp, Homo sapien
tatgatggcacctccctggcaccgg

SEQ ID NO: 3659641 - DNA, 25 bp, Homo sapien
acctgtctccgaacagtcacataca

SEQ ID NO: 3659642 - DNA, 25 bp, Homo sapien
tggcaccggccacaggatctgcaac

SEQ ID NO: 3659643 - DNA, 25 bp, Homo sapien
tgttctggaaaaagtccccataggc

SEQ ID NO: 3659644 - DNA, 25 bp, Homo sapien
ttgaagaaatcgtcctccgttgagg

SEQ ID NO: 3659645 - DNA, 25 bp, Homo sapien
gtgactttgctatgccgggctctgg

SEQ ID NO: 3659646 - DNA, 25 bp, Homo sapien
tgccagggtatgtctcagagctcag

SEQ ID NO: 3659647 - DNA, 25 bp, Homo sapien
gcagagctgtctggtttgtatgccc

SEQ ID NO: 3659648 - DNA, 25 bp, Homo sapien
cagcagagctgtctggtttgtatgc

SEQ ID NO: 3659649 - DNA, 25 bp, Homo sapien
gagctgtctggtttgtatgccccac

SEQ ID NO: 3659650 - DNA, 25 bp, Homo sapien
cagagctgtctggtttgtatgcccc

SEQ ID NO: 3659651 - DNA, 25 bp, Homo sapien
tccctctggtcatacacaatatgca

SEQ ID NO: 3659652 - DNA, 25 bp, Homo sapien
tgcatcaatgttccaagggcttcaa

SEQ ID NO: 3659653 - DNA, 25 bp, Homo sapien
ccctctggtcatacacaatatgcat

SEQ ID NO: 3659654 - DNA, 25 bp, Homo sapien
cctctggtcatacacaatatgcatc

SEQ ID NO: 3659655 - DNA, 25 bp, Homo sapien
cacaatgccgccaagaagcgtgaat

SEQ ID NO: 3659656 - DNA, 25 bp, Homo sapien
ctcacaagcaaacgccctgagcagg

SEQ ID NO: 3659657 - DNA, 25 bp, Homo sapien
taatcacacaactcacaagcaaacg

SEQ ID NO: 3659658 - DNA, 25 bp, Homo sapien
agatggaaaagacccactggcagca

SEQ ID NO: 3659659 - DNA, 25 bp, Homo sapien
tgcccttcccttcactattacctga

SEQ ID NO: 3659660 - DNA, 25 bp, Homo sapien
cttcactattacctgaatgtgcttc

SEQ ID NO: 3659661 - DNA, 25 bp, Homo sapien
catggttggaaagcatgcagatgcc

SEQ ID NO: 3659662 - DNA, 25 bp, Homo sapien
tggttggaaagcatgcagatgccat

SEQ ID NO: 3659663 - DNA, 25 bp, Homo sapien
ggaaagcatgcagatgccatggcct

SEQ ID NO: 3659664 - DNA, 25 bp, Homo sapien
gttggaaagcatgcagatgccatgg

SEQ ID NO: 3659665 - DNA, 25 bp, Homo sapien
catagtgacaggtgacatagtgaca

SEQ ID NO: 3659666 - DNA, 25 bp, Homo sapien
tgaggacatggtcccgctgatcctc

SEQ ID NO: 3659667 - DNA, 25 bp, Homo sapien
catgaggacatggtcccgctgatcc

SEQ ID NO: 3659668 - DNA, 25 bp, Homo sapien
ttccagggcatcatagtgacaggtg

SEQ ID NO: 3659669 - DNA, 25 bp, Homo sapien
cagtgtgtttgcgtatggtctctag

SEQ ID NO: 3659670 - DNA, 25 bp, Homo sapien
ctagggctgtcagaaaagccattcc

SEQ ID NO: 3659671 - DNA, 25 bp, Homo sapien
gagctgtccacccatgttctgagtt

SEQ ID NO: 3659672 - DNA, 25 bp, Homo sapien
tctgagttaggcatgcacgagcttc

SEQ ID NO: 3659673 - DNA, 25 bp, Homo sapien
caaggtcctctagctgcttgtgggc

SEQ ID NO: 3659674 - DNA, 25 bp, Homo sapien
atgctccctgggcacgtggaacaca

SEQ ID NO: 3659675 - DNA, 25 bp, Homo sapien
cggctgcacatggtgcgtgccgcct

SEQ ID NO: 3659676 - DNA, 25 bp, Homo sapien
gagcattaagtgaggctcccccagc

SEQ ID NO: 3659677 - DNA, 25 bp, Homo sapien
gtgtgaagacagaggtagagctggg

SEQ ID NO: 3659678 - DNA, 25 bp, Homo sapien
tgtgaagacagaggtagagctgggc

SEQ ID NO: 3659679 - DNA, 25 bp, Homo sapien
gtgaagacagaggtagagctgggcc

SEQ ID NO: 3659680 - DNA, 25 bp, Homo sapien
tgtgtgaagacagaggtagagctgg

SEQ ID NO: 3659681 - DNA, 25 bp, Homo sapien
ccatggtgactgttgacagccggca

SEQ ID NO: 3659682 - DNA, 25 bp, Homo sapien
tgaggtcaccatggtgactgttgac

SEQ ID NO: 3659683 - DNA, 25 bp, Homo sapien
gtcaccatggtgactgttgacagcc

SEQ ID NO: 3659684 - DNA, 25 bp, Homo sapien
tgactgttgacagccggcatcctca

SEQ ID NO: 3659685 - DNA, 25 bp, Homo sapien
tgctggagtctccattgagactccc

SEQ ID NO: 3659686 - DNA, 25 bp, Homo sapien
ttcagatctcgtggccagggcagca

SEQ ID NO: 3659687 - DNA, 25 bp, Homo sapien
tgtctcttcttgcatccgcccttca

SEQ ID NO: 3659688 - DNA, 25 bp, Homo sapien
tggagtctccattgagactcccctc

SEQ ID NO: 3659689 - DNA, 25 bp, Homo sapien
tacagagcttcaacctttccatcct

SEQ ID NO: 3659690 - DNA, 25 bp, Homo sapien
cactgggcctacagagcttcaacct

SEQ ID NO: 3659691 - DNA, 25 bp, Homo sapien
tccatcctcccagcattggatgggg

SEQ ID NO: 3659692 - DNA, 25 bp, Homo sapien
tgggcctacagagcttcaacctttc

SEQ ID NO: 3659693 - DNA, 25 bp, Homo sapien
ggcgagtccccttgctcatcagtac

SEQ ID NO: 3659694 - DNA, 25 bp, Homo sapien
gtgagaaggcgagtccccttgctca

SEQ ID NO: 3659695 - DNA, 25 bp, Homo sapien
aggcgagtccccttgctcatcagta

SEQ ID NO: 3659696 - DNA, 25 bp, Homo sapien
ttagtgagaaggcgagtccccttgc

SEQ ID NO: 3659697 - DNA, 25 bp, Homo sapien
tagacaagacaccaaaatcatttgg

SEQ ID NO: 3659698 - DNA, 25 bp, Homo sapien
ccctgtcagtttatgactggccacg

SEQ ID NO: 3659699 - DNA, 25 bp, Homo sapien
gggatttgtcccaagctcaataata

SEQ ID NO: 3659700 - DNA, 25 bp, Homo sapien
tagttcaggtcggcatctgcagcag

SEQ ID NO: 3659701 - DNA, 25 bp, Homo sapien
taaagtccagaagagggatgcctac

SEQ ID NO: 3659702 - DNA, 25 bp, Homo sapien
aaagtcatccctcggctcatctgaa

SEQ ID NO: 3659703 - DNA, 25 bp, Homo sapien
gactgatttagaaacccaaagacca

SEQ ID NO: 3659704 - DNA, 25 bp, Homo sapien
ggtgggataaccaataccagtgtcc

SEQ ID NO: 3659705 - DNA, 25 bp, Homo sapien
tctgacctactgcttgtaggacctc

SEQ ID NO: 3659706 - DNA, 25 bp, Homo sapien
gacctcataggcaggaatttggtca

SEQ ID NO: 3659707 - DNA, 25 bp, Homo sapien
tctggggggactcattcagtttgtt

SEQ ID NO: 3659708 - DNA, 25 bp, Homo sapien
cagaatctgattcataagtttgtag

SEQ ID NO: 3659709 - DNA, 25 bp, Homo sapien
cacgttgatacagaaaacgcttctc

SEQ ID NO: 3659710 - DNA, 25 bp, Homo sapien
ttaagcacgttgatacagaaaacgc

SEQ ID NO: 3659711 - DNA, 25 bp, Homo sapien
gttgatacagaaaacgcttctctct

SEQ ID NO: 3659712 - DNA, 25 bp, Homo sapien
ttctcattaagcacgttgatacaga

SEQ ID NO: 3659713 - DNA, 25 bp, Homo sapien
gatggtgtattagaatctgttggga

SEQ ID NO: 3659714 - DNA, 25 bp, Homo sapien
ttagaatctgttgggaattcacagg

SEQ ID NO: 3659715 - DNA, 25 bp, Homo sapien
ttacaatgatggtgtattagaatct

SEQ ID NO: 3659716 - DNA, 25 bp, Homo sapien
tgtattagaatctgttgggaattca

SEQ ID NO: 3659717 - DNA, 25 bp, Homo sapien
aatttacagattgccttccttggga

SEQ ID NO: 3659718 - DNA, 25 bp, Homo sapien
tttgaaagcgagtgatttgtgacca

SEQ ID NO: 3659719 - DNA, 25 bp, Homo sapien
gatctgtctaaaaacctctcacctg

SEQ ID NO: 3659720 - DNA, 25 bp, Homo sapien
ccaaactacttgatagctaaagcag

SEQ ID NO: 3659721 - DNA, 25 bp, Homo sapien
gttgcatatgtaaagtctgatcctg

SEQ ID NO: 3659722 - DNA, 25 bp, Homo sapien
tgtgttcctgttgcatgccctttgc

SEQ ID NO: 3659723 - DNA, 25 bp, Homo sapien
tccatcaagtccttctgccaacaag

SEQ ID NO: 3659724 - DNA, 25 bp, Homo sapien
cgtcgtcggcctgctgttgcatatg

SEQ ID NO: 3659725 - DNA, 25 bp, Homo sapien
tatgcctgtaatgcacctagtacct

SEQ ID NO: 3659726 - DNA, 25 bp, Homo sapien
tacatatgctgtgtgaggcgtacct

SEQ ID NO: 3659727 - DNA, 25 bp, Homo sapien
aatgtcgtgtggtctatcagtgtac

SEQ ID NO: 3659728 - DNA, 25 bp, Homo sapien
ggcagatcaccaagaaatgtaacac

SEQ ID NO: 3659729 - DNA, 25 bp, Homo sapien
tattgaatgccaactacatgcttga

SEQ ID NO: 3659730 - DNA, 25 bp, Homo sapien
caacttacggcctaatggagtggat

SEQ ID NO: 3659731 - DNA, 25 bp, Homo sapien
gcttgatacagtactaggcactggt

SEQ ID NO: 3659732 - DNA, 25 bp, Homo sapien
caattgtactttgcattaagggtgt

SEQ ID NO: 3659733 - DNA, 25 bp, Homo sapien
gacaatcttaaaagccgtcacaggg

SEQ ID NO: 3659734 - DNA, 25 bp, Homo sapien
tgtgtacctttgtggtggcctccca

SEQ ID NO: 3659735 - DNA, 25 bp, Homo sapien
tgttatgaagcccagtcagccatcc

SEQ ID NO: 3659736 - DNA, 25 bp, Homo sapien
actggtgcagatgagcccctctaga

SEQ ID NO: 3659737 - DNA, 25 bp, Homo sapien
ctgccttggtatctaaccacctttt

SEQ ID NO: 3659738 - DNA, 25 bp, Homo sapien
tgccttggtatctaaccaccttttc

SEQ ID NO: 3659739 - DNA, 25 bp, Homo sapien
ccaccttttctatagagataccttt

SEQ ID NO: 3659740 - DNA, 25 bp, Homo sapien
accttttctatagagataccttttg

SEQ ID NO: 3659741 - DNA, 25 bp, Homo sapien
tcttcttcctcattctcttcatttt

SEQ ID NO: 3659742 - DNA, 25 bp, Homo sapien
tgtcatcatcttcatgtttatcttt

SEQ ID NO: 3659743 - DNA, 25 bp, Homo sapien
catcttcatgtttatctttattttc

SEQ ID NO: 3659744 - DNA, 25 bp, Homo sapien
ttcttcctcattctcttcattttcc

SEQ ID NO: 3659745 - DNA, 25 bp, Homo sapien
ctaccataccattttccctagtggc

SEQ ID NO: 3659746 - DNA, 25 bp, Homo sapien
tcaacttccaggcttgagcgattct

SEQ ID NO: 3659747 - DNA, 25 bp, Homo sapien
atcatataatgtttgccctttgtga

SEQ ID NO: 3659748 - DNA, 25 bp, Homo sapien
tggcgatttccctaagcataaatag

SEQ ID NO: 3659749 - DNA, 25 bp, Homo sapien
tttttccagtagatgacaaaatgtg

SEQ ID NO: 3659750 - DNA, 25 bp, Homo sapien
cagtagatgacaaaatgtgctgagg

SEQ ID NO: 3659751 - DNA, 25 bp, Homo sapien
tagatgacaaaatgtgctgagggat

SEQ ID NO: 3659752 - DNA, 25 bp, Homo sapien
gacaaaatgtgctgagggattggta

SEQ ID NO: 3659753 - DNA, 25 bp, Homo sapien
tatctgggcggaatctcctcaaagt

SEQ ID NO: 3659754 - DNA, 25 bp, Homo sapien
ctcgaggactgttgaccttaaaccg

SEQ ID NO: 3659755 - DNA, 25 bp, Homo sapien
cccctgctggatggacgtgcattcg

SEQ ID NO: 3659756 - DNA, 25 bp, Homo sapien
tcttctttgcggtctttcccggtgc

SEQ ID NO: 3659757 - DNA, 25 bp, Homo sapien
gtagccgtgtgaacgctcttcgggc

SEQ ID NO: 3659758 - DNA, 25 bp, Homo sapien
gcggccgtagccgtgtgaacgctct

SEQ ID NO: 3659759 - DNA, 25 bp, Homo sapien
cgtgtgaacgctcttcgggctcgcg

SEQ ID NO: 3659760 - DNA, 25 bp, Homo sapien
acgctcttcgggctcgcgtcgtcga

SEQ ID NO: 3659761 - DNA, 25 bp, Homo sapien
gcacaggcgccagacatatgctaca

SEQ ID NO: 3659762 - DNA, 25 bp, Homo sapien
gcccagccaaagtagtgatgccaga

SEQ ID NO: 3659763 - DNA, 25 bp, Homo sapien
ttttaggcacttgggatatacacac

SEQ ID NO: 3659764 - DNA, 25 bp, Homo sapien
tgggcattgtggtatcatccgagat

SEQ ID NO: 3659765 - DNA, 25 bp, Homo sapien
tctctgaataaaaggcgcatagctt

SEQ ID NO: 3659766 - DNA, 25 bp, Homo sapien
ataactggaattgtgcatggtcccc

SEQ ID NO: 3659767 - DNA, 25 bp, Homo sapien
cagatgtaggcgaattagaatgaac

SEQ ID NO: 3659768 - DNA, 25 bp, Homo sapien
gacatcgccagtatgagtgacagaa

SEQ ID NO: 3659769 - DNA, 25 bp, Homo sapien
ccttttatcgggaagctgttcctca

SEQ ID NO: 3659770 - DNA, 25 bp, Homo sapien
ctcaaccacaataagggagtaaact

SEQ ID NO: 3659771 - DNA, 25 bp, Homo sapien
aaaatgtcacttcttatgtaccttt

SEQ ID NO: 3659772 - DNA, 25 bp, Homo sapien
tgccattgtgaatttcactacaaag

SEQ ID NO: 3659773 - DNA, 25 bp, Homo sapien
gtgaaaggtagaatcaaaacccaca

SEQ ID NO: 3659774 - DNA, 25 bp, Homo sapien
ccaaaatggagcaaagtgggactgt

SEQ ID NO: 3659775 - DNA, 25 bp, Homo sapien
ggaactgccactaatatcctcaggt

SEQ ID NO: 3659776 - DNA, 25 bp, Homo sapien
aggaatgcctctagggtgaaaggta

SEQ ID NO: 3659777 - DNA, 25 bp, Homo sapien
tgcttccagtcagcttattgtcccc

SEQ ID NO: 3659778 - DNA, 25 bp, Homo sapien
caaatcctactcctatgagccggtt

SEQ ID NO: 3659779 - DNA, 25 bp, Homo sapien
ttggcagctgatattgggggtctcc

SEQ ID NO: 3659780 - DNA, 25 bp, Homo sapien
tcccctacttggctgtctgaatgct

SEQ ID NO: 3659781 - DNA, 25 bp, Homo sapien
taataagcatgccataaagagaaca

SEQ ID NO: 3659782 - DNA, 25 bp, Homo sapien
tatataaaaacagacccgcactagg

SEQ ID NO: 3659783 - DNA, 25 bp, Homo sapien
ccaatgaaactgaaagccatggctt

SEQ ID NO: 3659784 - DNA, 25 bp, Homo sapien
tgactcactgcagaaagtaggaaag

SEQ ID NO: 3659785 - DNA, 25 bp, Homo sapien
catatattaatgaagagtccgactc

SEQ ID NO: 3659786 - DNA, 25 bp, Homo sapien
ccatcaggtggcacataatgtgtac

SEQ ID NO: 3659787 - DNA, 25 bp, Homo sapien
cagtttgagtcaagatccaatggaa

SEQ ID NO: 3659788 - DNA, 25 bp, Homo sapien
gatccacagacgtaatcagattcag

SEQ ID NO: 3659789 - DNA, 25 bp, Homo sapien
tatggtaggtcattaaacacagcac

SEQ ID NO: 3659790 - DNA, 25 bp, Homo sapien
gagagtctgagtctacctgtggaat

SEQ ID NO: 3659791 - DNA, 25 bp, Homo sapien
gaaaactactgtgcgtaactctcag

SEQ ID NO: 3659792 - DNA, 25 bp, Homo sapien
ggagaaacatttggctgcatccaca

SEQ ID NO: 3659793 - DNA, 25 bp, Homo sapien
caagctaactgtaccttataggact

SEQ ID NO: 3659794 - DNA, 25 bp, Homo sapien
cagtttacaactgtggccctattta

SEQ ID NO: 3659795 - DNA, 25 bp, Homo sapien
ctacatgcccataaaatatatccag

SEQ ID NO: 3659796 - DNA, 25 bp, Homo sapien
tagtctttactgtgccaagctaact

SEQ ID NO: 3659797 - DNA, 25 bp, Homo sapien
tatctgttctttgccagcactgtac

SEQ ID NO: 3659798 - DNA, 25 bp, Homo sapien
tgtcaccaaacccaatatcacctag

SEQ ID NO: 3659799 - DNA, 25 bp, Homo sapien
tctggatgtccagttgaagagactg

SEQ ID NO: 3659800 - DNA, 25 bp, Homo sapien
cagtaagttgcatagtgtcaagtcc

SEQ ID NO: 3659801 - DNA, 25 bp, Homo sapien
tggtaccactgcactccttcctagg

SEQ ID NO: 3659802 - DNA, 25 bp, Homo sapien
aagatggtaccactgcactccttcc

SEQ ID NO: 3659803 - DNA, 25 bp, Homo sapien
ggtaccactgcactccttcctaggt

SEQ ID NO: 3659804 - DNA, 25 bp, Homo sapien
gatggtaccactgcactccttccta

SEQ ID NO: 3659805 - DNA, 25 bp, Homo sapien
tgtttagtggcagagggatgaaatc

SEQ ID NO: 3659806 - DNA, 25 bp, Homo sapien
taagctctgttagagcgttactttt

SEQ ID NO: 3659807 - DNA, 25 bp, Homo sapien
gatgaaatccaggttccatgactac

SEQ ID NO: 3659808 - DNA, 25 bp, Homo sapien
gaaaataagtcgtctttgcaaatag

SEQ ID NO: 3659809 - DNA, 25 bp, Homo sapien
aaactgaagacgcaaatgttggatc

SEQ ID NO: 3659810 - DNA, 25 bp, Homo sapien
attaaccagcaaagtcaactggtag

SEQ ID NO: 3659811 - DNA, 25 bp, Homo sapien
agacgcaaatgttggatcaggagga

SEQ ID NO: 3659812 - DNA, 25 bp, Homo sapien
agaaattaaccagcaaagtcaactg

SEQ ID NO: 3659813 - DNA, 25 bp, Homo sapien
caacttggaagctttcacagtggat

SEQ ID NO: 3659814 - DNA, 25 bp, Homo sapien
gataaaccagcaaccgcaattggag

SEQ ID NO: 3659815 - DNA, 25 bp, Homo sapien
taggaaattttactgatgctgaaag

SEQ ID NO: 3659816 - DNA, 25 bp, Homo sapien
gggagacggtgcctattgatgaaca

SEQ ID NO: 3659817 - DNA, 25 bp, Homo sapien
aatgagctcaacagatggcgtaatg

SEQ ID NO: 3659818 - DNA, 25 bp, Homo sapien
aagaaacaaatctctggctgtgacc

SEQ ID NO: 3659819 - DNA, 25 bp, Homo sapien
aacaccaccgcaacgggaccagcct

SEQ ID NO: 3659820 - DNA, 25 bp, Homo sapien
gaagaaacaaatctctggctgtgac

SEQ ID NO: 3659821 - DNA, 25 bp, Homo sapien
aagctagtcaagtgacacagtgcga

SEQ ID NO: 3659822 - DNA, 25 bp, Homo sapien
gggcttcctttaatcgagagactat

SEQ ID NO: 3659823 - DNA, 25 bp, Homo sapien
ggggcttcctttaatcgagagacta

SEQ ID NO: 3659824 - DNA, 25 bp, Homo sapien
gcttcctttaatcgagagactatta

SEQ ID NO: 3659825 - DNA, 25 bp, Homo sapien
ttcctttaatcgagagactattaaa

SEQ ID NO: 3659826 - DNA, 25 bp, Homo sapien
ctgtcagcttttaattctctgatat

SEQ ID NO: 3659827 - DNA, 25 bp, Homo sapien
gcttttaattctctgatattctcca

SEQ ID NO: 3659828 - DNA, 25 bp, Homo sapien
cagcttttaattctctgatattctc

SEQ ID NO: 3659829 - DNA, 25 bp, Homo sapien
gtcagcttttaattctctgatattc

SEQ ID NO: 3659830 - DNA, 25 bp, Homo sapien
aggaaagggtatccacctcaccatt

SEQ ID NO: 3659831 - DNA, 25 bp, Homo sapien
tggcaacagctttgccgctcgactt

SEQ ID NO: 3659832 - DNA, 25 bp, Homo sapien
gtggttcgtgtgaaagatgccaatg

SEQ ID NO: 3659833 - DNA, 25 bp, Homo sapien
cgaggaaagggtatccacctcacca

SEQ ID NO: 3659834 - DNA, 25 bp, Homo sapien
caacagagagaggcaccctggatca

SEQ ID NO: 3659835 - DNA, 25 bp, Homo sapien
gagagaggcaccctggatcattcga

SEQ ID NO: 3659836 - DNA, 25 bp, Homo sapien
cagagagaggcaccctggatcattc

SEQ ID NO: 3659837 - DNA, 25 bp, Homo sapien
agagaggcaccctggatcattcgac

SEQ ID NO: 3659838 - DNA, 25 bp, Homo sapien
agttgctttgatgtacatcttatta

SEQ ID NO: 3659839 - DNA, 25 bp, Homo sapien
aagagttgctttgatgtacatctta

SEQ ID NO: 3659840 - DNA, 25 bp, Homo sapien
ccaagagttgctttgatgtacatct

SEQ ID NO: 3659841 - DNA, 25 bp, Homo sapien
gagttgctttgatgtacatcttatt

SEQ ID NO: 3659842 - DNA, 25 bp, Homo sapien
taagtatgacctgacaggtgaggaa

SEQ ID NO: 3659843 - DNA, 25 bp, Homo sapien
ttaagtatgacctgacaggtgagga

SEQ ID NO: 3659844 - DNA, 25 bp, Homo sapien
tctgtccacaaatgtaacatgaaca

SEQ ID NO: 3659845 - DNA, 25 bp, Homo sapien
gcttttgtgaacctgatgcacttga

SEQ ID NO: 3659846 - DNA, 25 bp, Homo sapien
gtagcagtttcaggtaaggcttttg

SEQ ID NO: 3659847 - DNA, 25 bp, Homo sapien
gaacctgatgcacttgacttattgt

SEQ ID NO: 3659848 - DNA, 25 bp, Homo sapien
cgaggcgcaattggcctcggtgctc

SEQ ID NO: 3659849 - DNA, 25 bp, Homo sapien
gaagaccgccaaaagcgaggcgcaa

SEQ ID NO: 3659850 - DNA, 25 bp, Homo sapien
ctcatcctggaagccgagaagacgt

SEQ ID NO: 3659851 - DNA, 25 bp, Homo sapien
cagtgagtcgctgtggaagaccgcc

SEQ ID NO: 3659852 - DNA, 25 bp, Homo sapien
ggcacgcagagcaccctgtacctcg

SEQ ID NO: 3659853 - DNA, 25 bp, Homo sapien
cgcagagcaccctgtacctcgcgca

SEQ ID NO: 3659854 - DNA, 25 bp, Homo sapien
ttggggggcacgcagagcaccctgt

SEQ ID NO: 3659855 - DNA, 25 bp, Homo sapien
tgccaggcgtacaggagcgggttgg

SEQ ID NO: 3659856 - DNA, 25 bp, Homo sapien
cgtcgtcctcaggatgctcggtctt

SEQ ID NO: 3659857 - DNA, 25 bp, Homo sapien
ctgcacgtcgtcctcaggatgctcg

SEQ ID NO: 3659858 - DNA, 25 bp, Homo sapien
tcttaacgttggcaaattggtcgag

SEQ ID NO: 3659859 - DNA, 25 bp, Homo sapien
cgttggcaaattggtcgaggaaatg

SEQ ID NO: 3659860 - DNA, 25 bp, Homo sapien
cctccctgtaaacccgaacagccag

SEQ ID NO: 3659861 - DNA, 25 bp, Homo sapien
gttctgggcacaagtcttccccgtc

SEQ ID NO: 3659862 - DNA, 25 bp, Homo sapien
tcaggcagcgcttctgttagggttc

SEQ ID NO: 3659863 - DNA, 25 bp, Homo sapien
ttctgttagggttctgggcacaagt

SEQ ID NO: 3659864 - DNA, 25 bp, Homo sapien
tgggcacaagtcttccccgtccctc

SEQ ID NO: 3659865 - DNA, 25 bp, Homo sapien
caatgtctgtactgaaccggcccat

SEQ ID NO: 3659866 - DNA, 25 bp, Homo sapien
aaatatgaagatcaatgtctgtact

SEQ ID NO: 3659867 - DNA, 25 bp, Homo sapien
tcaatgtctgtactgaaccggccca

SEQ ID NO: 3659868 - DNA, 25 bp, Homo sapien
gggcgggcaagtccagcctgctctt

SEQ ID NO: 3659869 - DNA, 25 bp, Homo sapien
cgggcaagtccagcctgctcttgag

SEQ ID NO: 3659870 - DNA, 25 bp, Homo sapien
agtggggcgggcaagtccagcctgc

SEQ ID NO: 3659871 - DNA, 25 bp, Homo sapien
gaggatggatgaggatgcgctgacc

SEQ ID NO: 3659872 - DNA, 25 bp, Homo sapien
tcaaacagtagtaggacagccttta

SEQ ID NO: 3659873 - DNA, 25 bp, Homo sapien
aacagtagtaggacagcctttagca

SEQ ID NO: 3659874 - DNA, 25 bp, Homo sapien
agtagtaggacagcctttagcaaag

SEQ ID NO: 3659875 - DNA, 25 bp, Homo sapien
cagtagtaggacagcctttagcaaa

SEQ ID NO: 3659876 - DNA, 25 bp, Homo sapien
tagactcatgcccagaaggtccagg

SEQ ID NO: 3659877 - DNA, 25 bp, Homo sapien
agcacagtccgcagaacttccggtg

SEQ ID NO: 3659878 - DNA, 25 bp, Homo sapien
gactgtatggcaagtggctacctta

SEQ ID NO: 3659879 - DNA, 25 bp, Homo sapien
tgctgctggttcacaaatactggtc

SEQ ID NO: 3659880 - DNA, 25 bp, Homo sapien
tttaagaagccataggaaagacgca

SEQ ID NO: 3659881 - DNA, 25 bp, Homo sapien
aatgtgtctgcgtgcctaaatttcc

SEQ ID NO: 3659882 - DNA, 25 bp, Homo sapien
cctctgtggatgaaaagagtgaaac

SEQ ID NO: 3659883 - DNA, 25 bp, Homo sapien
taactgtacctatagcccaatctgg

SEQ ID NO: 3659884 - DNA, 25 bp, Homo sapien
gtcctcccgctggacttaatgcatg

SEQ ID NO: 3659885 - DNA, 25 bp, Homo sapien
atgtctctttagtcatcggagaggc

SEQ ID NO: 3659886 - DNA, 25 bp, Homo sapien
tctctttagtcatcggagaggccag

SEQ ID NO: 3659887 - DNA, 25 bp, Homo sapien
ggacttaatgcatgtgggcagtttg

SEQ ID NO: 3659888 - DNA, 25 bp, Homo sapien
aacacagccatccctaaggacccca

SEQ ID NO: 3659889 - DNA, 25 bp, Homo sapien
ctgtgcatctgcccctgaaaaaatt

SEQ ID NO: 3659890 - DNA, 25 bp, Homo sapien
acacagccatccctaaggaccccag

SEQ ID NO: 3659891 - DNA, 25 bp, Homo sapien
cagaccactcgcagcactggggcat

SEQ ID NO: 3659892 - DNA, 25 bp, Homo sapien
tgtgtccagaccactcgcagcactg

SEQ ID NO: 3659893 - DNA, 25 bp, Homo sapien
gctgttgcccagtgtgtccagacca

SEQ ID NO: 3659894 - DNA, 25 bp, Homo sapien
gcagctgttgcccagtgtgtccaga

SEQ ID NO: 3659895 - DNA, 25 bp, Homo sapien
gaaacattcggagggagcccatgca

SEQ ID NO: 3659896 - DNA, 25 bp, Homo sapien
cctcacagagtctccgaaacattcg

SEQ ID NO: 3659897 - DNA, 25 bp, Homo sapien
gagcagcaaagaggagcaatagcca

SEQ ID NO: 3659898 - DNA, 25 bp, Homo sapien
aatagccagaaggaatgcgtgcagc

SEQ ID NO: 3659899 - DNA, 25 bp, Homo sapien
catccagtgcttgagagcacagtca

SEQ ID NO: 3659900 - DNA, 25 bp, Homo sapien
acagcttggagttagcaacactttg

SEQ ID NO: 3659901 - DNA, 25 bp, Homo sapien
cccatccagtgcttgagagcacagt

SEQ ID NO: 3659902 - DNA, 25 bp, Homo sapien
ttagcaacactttggagccaggccc

SEQ ID NO: 3659903 - DNA, 25 bp, Homo sapien
ttgcaccctagggtagaagctcttt

SEQ ID NO: 3659904 - DNA, 25 bp, Homo sapien
gttttgcaccctagggtagaagctc

SEQ ID NO: 3659905 - DNA, 25 bp, Homo sapien
gtagaagctctttctgggattgggg

SEQ ID NO: 3659906 - DNA, 25 bp, Homo sapien
ttctgggattggggcacactgtcct

SEQ ID NO: 3659907 - DNA, 25 bp, Homo sapien
aaggacatgagtcgttccaggctgc

SEQ ID NO: 3659908 - DNA, 25 bp, Homo sapien
atttcagggagaagcctcgccacga

SEQ ID NO: 3659909 - DNA, 25 bp, Homo sapien
gccatgagtcgttccagtcgttcca

SEQ ID NO: 3659910 - DNA, 25 bp, Homo sapien
gatttctagggaccatagtgcttcc

SEQ ID NO: 3659911 - DNA, 25 bp, Homo sapien
ctcttcattggggataccatggagc

SEQ ID NO: 3659912 - DNA, 25 bp, Homo sapien
ttggggataccatggagcctgactt

SEQ ID NO: 3659913 - DNA, 25 bp, Homo sapien
cctcctgagttacctccacccaaat

SEQ ID NO: 3659914 - DNA, 25 bp, Homo sapien
ttgaacctcctgagttacctccacc

SEQ ID NO: 3659915 - DNA, 25 bp, Homo sapien
tgtgcttgtggtgttcctaaaaacc

SEQ ID NO: 3659916 - DNA, 25 bp, Homo sapien
gaaccgtacacctctgtgcttgtgg

SEQ ID NO: 3659917 - DNA, 25 bp, Homo sapien
cctgcaggaaccgtacacctctgtg

SEQ ID NO: 3659918 - DNA, 25 bp, Homo sapien
ttcagccatgcatctgtgttttcct

SEQ ID NO: 3659919 - DNA, 25 bp, Homo sapien
aaccagatggccgttcagcccagta

SEQ ID NO: 3659920 - DNA, 25 bp, Homo sapien
tgtgtctgcggagatgaagtttccc

SEQ ID NO: 3659921 - DNA, 25 bp, Homo sapien
cagcccagtattgcattagtaagta

SEQ ID NO: 3659922 - DNA, 25 bp, Homo sapien
gctcagttctgagttgggtcccaca

SEQ ID NO: 3659923 - DNA, 25 bp, Homo sapien
tggatgtagggcattccgagcattg

SEQ ID NO: 3659924 - DNA, 25 bp, Homo sapien
gggcattccgagcattgggctttca

SEQ ID NO: 3659925 - DNA, 25 bp, Homo sapien
atgtagggcattccgagcattgggc

SEQ ID NO: 3659926 - DNA, 25 bp, Homo sapien
cattccgagcattgggctttcagaa

SEQ ID NO: 3659927 - DNA, 25 bp, Homo sapien
aggaggctggggaaatttccacgct

SEQ ID NO: 3659928 - DNA, 25 bp, Homo sapien
tgcctctacctccataacccaccag

SEQ ID NO: 3659929 - DNA, 25 bp, Homo sapien
gaaatttccacgctgtcagggcacc

SEQ ID NO: 3659930 - DNA, 25 bp, Homo sapien
ctacctccataacccaccaggtggg

SEQ ID NO: 3659931 - DNA, 25 bp, Homo sapien
gagataggattgtgcagaggaagtc

SEQ ID NO: 3659932 - DNA, 25 bp, Homo sapien
ctggacccaaggagataggattgtg

SEQ ID NO: 3659933 - DNA, 25 bp, Homo sapien
ggacccaaggagataggattgtgca

SEQ ID NO: 3659934 - DNA, 25 bp, Homo sapien
agataggattgtgcagaggaagtct

SEQ ID NO: 3659935 - DNA, 25 bp, Homo sapien
ggcagtggtcactataggctccatt

SEQ ID NO: 3659936 - DNA, 25 bp, Homo sapien
gctctcaaagagcaaggctgggctt

SEQ ID NO: 3659937 - DNA, 25 bp, Homo sapien
ttgtgcctccacatgagggcgctgg

SEQ ID NO: 3659938 - DNA, 25 bp, Homo sapien
cagctcatatggcatttccctggag

SEQ ID NO: 3659939 - DNA, 25 bp, Homo sapien
cagttgccgcactcctcagaggtgt

SEQ ID NO: 3659940 - DNA, 25 bp, Homo sapien
cagttgcagctgtatcccagcacaa

SEQ ID NO: 3659941 - DNA, 25 bp, Homo sapien
cacatcggtggtttccagttgcagc

SEQ ID NO: 3659942 - DNA, 25 bp, Homo sapien
tagagcagcttcttgccttgactga

SEQ ID NO: 3659943 - DNA, 25 bp, Homo sapien
gggaaaagcttcctggcattggact

SEQ ID NO: 3659944 - DNA, 25 bp, Homo sapien
tcctggcattggactgggaaatgat

SEQ ID NO: 3659945 - DNA, 25 bp, Homo sapien
gcattggactgggaaatgatttttt

SEQ ID NO: 3659946 - DNA, 25 bp, Homo sapien
caccaaaagcagataacaaaaatag

SEQ ID NO: 3659947 - DNA, 25 bp, Homo sapien
cagacactgctgcctcagtgggcat

SEQ ID NO: 3659948 - DNA, 25 bp, Homo sapien
gcagaaacagacactgctgcctcag

SEQ ID NO: 3659949 - DNA, 25 bp, Homo sapien
aacagacactgctgcctcagtgggc

SEQ ID NO: 3659950 - DNA, 25 bp, Homo sapien
gctgcagaaacagacactgctgcct

SEQ ID NO: 3659951 - DNA, 25 bp, Homo sapien
ttcagaccccagcccacagccactc

SEQ ID NO: 3659952 - DNA, 25 bp, Homo sapien
ctgtgcttcagaccccagcccacag

SEQ ID NO: 3659953 - DNA, 25 bp, Homo sapien
cagaccccagcccacagccactcac

SEQ ID NO: 3659954 - DNA, 25 bp, Homo sapien
gcttcagaccccagcccacagccac

SEQ ID NO: 3659955 - DNA, 25 bp, Homo sapien
ttcagaggatcccaacaacctttga

SEQ ID NO: 3659956 - DNA, 25 bp, Homo sapien
gcagtctccggtggcctgctcttca

SEQ ID NO: 3659957 - DNA, 25 bp, Homo sapien
tacatggaaggtgccacagcagtct

SEQ ID NO: 3659958 - DNA, 25 bp, Homo sapien
caacagccattgcagctatcatgga

SEQ ID NO: 3659959 - DNA, 25 bp, Homo sapien
tcatgccacactgcagtcctggagg

SEQ ID NO: 3659960 - DNA, 25 bp, Homo sapien
agccacagtctggtcccacatcatg

SEQ ID NO: 3659961 - DNA, 25 bp, Homo sapien
tgccaaggccttgcaggaactcagc

SEQ ID NO: 3659962 - DNA, 25 bp, Homo sapien
tgcaagcctgggactcagttcctcc

SEQ ID NO: 3659963 - DNA, 25 bp, Homo sapien
gtgacaagcacttccatgtagcatt

SEQ ID NO: 3659964 - DNA, 25 bp, Homo sapien
cataagtgacaagcacttccatgta

SEQ ID NO: 3659965 - DNA, 25 bp, Homo sapien
ccacaggcacgttcataaatggctt

SEQ ID NO: 3659966 - DNA, 25 bp, Homo sapien
cttgcggaacaatgaaatgagactt

SEQ ID NO: 3659967 - DNA, 25 bp, Homo sapien
cagtaattgctgtacgtgtatcatc

SEQ ID NO: 3659968 - DNA, 25 bp, Homo sapien
ggtacttaacagactactactagtg

SEQ ID NO: 3659969 - DNA, 25 bp, Homo sapien
gaaccacaaatatcgggtgccttcc

SEQ ID NO: 3659970 - DNA, 25 bp, Homo sapien
cagtaccgaagtctgaatgcccagt

SEQ ID NO: 3659971 - DNA, 25 bp, Homo sapien
tgcgaacagcccagtagtcccattt

SEQ ID NO: 3659972 - DNA, 25 bp, Homo sapien
gctgtgggtggtttctggtacttaa

SEQ ID NO: 3659973 - DNA, 25 bp, Homo sapien
aatgtgttaggtagctgtggactcc

SEQ ID NO: 3659974 - DNA, 25 bp, Homo sapien
cctggtctactatcattaggacaag

SEQ ID NO: 3659975 - DNA, 25 bp, Homo sapien
aaatcaacatctgtaaattaagaat

SEQ ID NO: 3659976 - DNA, 25 bp, Homo sapien
atcaacatctgtaaattaagaatac

SEQ ID NO: 3659977 - DNA, 25 bp, Homo sapien
gaaaaaaatcaacatctgtaaatta

SEQ ID NO: 3659978 - DNA, 25 bp, Homo sapien
aaaaatcaacatctgtaaattaaga

SEQ ID NO: 3659979 - DNA, 25 bp, Homo sapien
tgattaggtgctatgcatcagtagc

SEQ ID NO: 3659980 - DNA, 25 bp, Homo sapien
gcttcctccgagtggaactgcagcc

SEQ ID NO: 3659981 - DNA, 25 bp, Homo sapien
cagacaacacagtagcgatggaggt

SEQ ID NO: 3659982 - DNA, 25 bp, Homo sapien
tgacagcaatgctcatctctcatgc

SEQ ID NO: 3659983 - DNA, 25 bp, Homo sapien
gccccatcactggtatgctaagcta

SEQ ID NO: 3659984 - DNA, 25 bp, Homo sapien
cgagaacagccgatccaacatggtg

SEQ ID NO: 3659985 - DNA, 25 bp, Homo sapien
cagcttctcatgtaaacaggtagaa

SEQ ID NO: 3659986 - DNA, 25 bp, Homo sapien
ttccgtctttggatggaaggagttc

SEQ ID NO: 3659987 - DNA, 25 bp, Homo sapien
tggccgctgcagcaaactgtcaagt

SEQ ID NO: 3659988 - DNA, 25 bp, Homo sapien
tacatacaagtccatcaacggcagg

SEQ ID NO: 3659989 - DNA, 25 bp, Homo sapien
tgcactgagtcatcaagtaactgct

SEQ ID NO: 3659990 - DNA, 25 bp, Homo sapien
taaatgcacgacatatacctaggac

SEQ ID NO: 3659991 - DNA, 25 bp, Homo sapien
ggaagctgaggcagggagaatggct

SEQ ID NO: 3659992 - DNA, 25 bp, Homo sapien
tgagccgagattgtgccattgcatt

SEQ ID NO: 3659993 - DNA, 25 bp, Homo sapien
tgaacctgggagtcagaggttgcag

SEQ ID NO: 3659994 - DNA, 25 bp, Homo sapien
tgccattgcattccagcctgggcga

SEQ ID NO: 3659995 - DNA, 25 bp, Homo sapien
gaacattaaaagatgagcattacca

SEQ ID NO: 3659996 - DNA, 25 bp, Homo sapien
gctatactgctttaggcatattaat

SEQ ID NO: 3659997 - DNA, 25 bp, Homo sapien
gaagttgaagtgtataactatccta

SEQ ID NO: 3659998 - DNA, 25 bp, Homo sapien
tcctccatatatgcgatacaactat

SEQ ID NO: 3659999 - DNA, 25 bp, Homo sapien
gttcattcagttgttggatatatga

SEQ ID NO: 3660000 - DNA, 25 bp, Homo sapien
gtatgtatccttttgaggttggctt

SEQ ID NO: 3660001 - DNA, 25 bp, Homo sapien
tgttcacgggtgttacataaatgga

SEQ ID NO: 3660002 - DNA, 25 bp, Homo sapien
ccatctgtataattatgttcacggg

SEQ ID NO: 3660003 - DNA, 25 bp, Homo sapien
tctttatgatcaagaggtttttctt

SEQ ID NO: 3660004 - DNA, 25 bp, Homo sapien
cttgttaatctttatgatcaagagg

SEQ ID NO: 3660005 - DNA, 25 bp, Homo sapien
tgttaatctttatgatcaagaggtt

SEQ ID NO: 3660006 - DNA, 25 bp, Homo sapien
gctttcattgtcttgttaatcttta

SEQ ID NO: 3660007 - DNA, 25 bp, Homo sapien
catcacatcatggaggcattttctc

SEQ ID NO: 3660008 - DNA, 25 bp, Homo sapien
cacatcacaataagggtgaatgcgg

SEQ ID NO: 3660009 - DNA, 25 bp, Homo sapien
gcaggttcagtcacctacagtccaa

SEQ ID NO: 3660010 - DNA, 25 bp, Homo sapien
tagtctaacactacatcacagtgcc

SEQ ID NO: 3660011 - DNA, 25 bp, Homo sapien
gaactacagtttacattaccatgct

SEQ ID NO: 3660012 - DNA, 25 bp, Homo sapien
cagcttggaatatcattgtaattta

SEQ ID NO: 3660013 - DNA, 25 bp, Homo sapien
tagtacttcagtgaaacagcttgga

SEQ ID NO: 3660014 - DNA, 25 bp, Homo sapien
cattgtcattggttcggaatggctg

SEQ ID NO: 3660015 - DNA, 25 bp, Homo sapien
ctggtcttggctttcttgtgacttc

SEQ ID NO: 3660016 - DNA, 25 bp, Homo sapien
tgtgacttcatcttcctcagctctg

SEQ ID NO: 3660017 - DNA, 25 bp, Homo sapien
gtgacttcatcttcctcagctctgt

SEQ ID NO: 3660018 - DNA, 25 bp, Homo sapien
tggctttcttgtgacttcatcttcc

SEQ ID NO: 3660019 - DNA, 25 bp, Homo sapien
ggttctgtcctacaactccttgcag

SEQ ID NO: 3660020 - DNA, 25 bp, Homo sapien
taagaggtataaattcatcaagcca

SEQ ID NO: 3660021 - DNA, 25 bp, Homo sapien
aagtgttgtaacaccagtcctctgc

SEQ ID NO: 3660022 - DNA, 25 bp, Homo sapien
catactgtagttgatattgtcagac

SEQ ID NO: 3660023 - DNA, 25 bp, Homo sapien
tttgtactgcttgttaaggattgcc

SEQ ID NO: 3660024 - DNA, 25 bp, Homo sapien
aattttattgtggtgtcgatttgca

SEQ ID NO: 3660025 - DNA, 25 bp, Homo sapien
gattgccatccttctagcctctgag

SEQ ID NO: 3660026 - DNA, 25 bp, Homo sapien
gacgttctcacttgagtgaggtgaa

SEQ ID NO: 3660027 - DNA, 25 bp, Homo sapien
caactgagagcattaattgggtgtc

SEQ ID NO: 3660028 - DNA, 25 bp, Homo sapien
gacgtttcagtcaacagatcacaga

SEQ ID NO: 3660029 - DNA, 25 bp, Homo sapien
agactcttctctttaacccgttcag

SEQ ID NO: 3660030 - DNA, 25 bp, Homo sapien
tattcctgcttacaaactctggtca

SEQ ID NO: 3660031 - DNA, 25 bp, Homo sapien
agttagattcaggtacagttgggac

SEQ ID NO: 3660032 - DNA, 25 bp, Homo sapien
acagttgggacttcttggatgttcc

SEQ ID NO: 3660033 - DNA, 25 bp, Homo sapien
aaagcgatatgttacctggtcctca

SEQ ID NO: 3660034 - DNA, 25 bp, Homo sapien
gatagtaggcacaagggaatccctg

SEQ ID NO: 3660035 - DNA, 25 bp, Homo sapien
gaacactgaagtgtgacttgcattg

SEQ ID NO: 3660036 - DNA, 25 bp, Homo sapien
caatgagaagacaagggattcaaat

SEQ ID NO: 3660037 - DNA, 25 bp, Homo sapien
aaccaaattctgagaaatcaatgag

SEQ ID NO: 3660038 - DNA, 25 bp, Homo sapien
gaagtgtgacttgcattgataacaa

SEQ ID NO: 3660039 - DNA, 25 bp, Homo sapien
tttaagggagcaataataccatgga

SEQ ID NO: 3660040 - DNA, 25 bp, Homo sapien
aaagaattgagcgtgtctaagggca

SEQ ID NO: 3660041 - DNA, 25 bp, Homo sapien
gcacttagtaatggcaagagtcctt

SEQ ID NO: 3660042 - DNA, 25 bp, Homo sapien
atgtgtgggcaggattaaatatacc

SEQ ID NO: 3660043 - DNA, 25 bp, Homo sapien
cagttcaaggaagtccaggagtcgc

SEQ ID NO: 3660044 - DNA, 25 bp, Homo sapien
tctaaattgggtgggtttcagcacg

SEQ ID NO: 3660045 - DNA, 25 bp, Homo sapien
tcaggtacagccatttaaacagggt

SEQ ID NO: 3660046 - DNA, 25 bp, Homo sapien
tgggttcggacaccaggataataga

SEQ ID NO: 3660047 - DNA, 25 bp, Homo sapien
agccgtggaggacccgcctacaggc

SEQ ID NO: 3660048 - DNA, 25 bp, Homo sapien
acagtcggggaatttgattgcccca

SEQ ID NO: 3660049 - DNA, 25 bp, Homo sapien
ggagcgcaggttctgtgcacagtcg

SEQ ID NO: 3660050 - DNA, 25 bp, Homo sapien
tagttcttgggttgggccttgtgca

SEQ ID NO: 3660051 - DNA, 25 bp, Homo sapien
gaatacgcctcgataaacagggccg

SEQ ID NO: 3660052 - DNA, 25 bp, Homo sapien
ggttttccgctgtgaggatctgccc

SEQ ID NO: 3660053 - DNA, 25 bp, Homo sapien
cgcagatgcccaccggaatggagaa

SEQ ID NO: 3660054 - DNA, 25 bp, Homo sapien
ttccccagagcggagaggtatctgc

SEQ ID NO: 3660055 - DNA, 25 bp, Homo sapien
cctcccggctggtgttagtgcccgg

SEQ ID NO: 3660056 - DNA, 25 bp, Homo sapien
ttagtgcccggacggcgggctctgc

SEQ ID NO: 3660057 - DNA, 25 bp, Homo sapien
tcccggctggtgttagtgcccggac

SEQ ID NO: 3660058 - DNA, 25 bp, Homo sapien
tgttagtgcccggacggcgggctct

SEQ ID NO: 3660059 - DNA, 25 bp, Homo sapien
ccatggcgtattgaagagagcgagc

SEQ ID NO: 3660060 - DNA, 25 bp, Homo sapien
catggcgtattgaagagagcgagcg

SEQ ID NO: 3660061 - DNA, 25 bp, Homo sapien
ggcgtattgaagagagcgagcgaga

SEQ ID NO: 3660062 - DNA, 25 bp, Homo sapien
ggagcggagcggcacagcctcccac

SEQ ID NO: 3660063 - DNA, 25 bp, Homo sapien
cgccgggagggagcgagcgtgagaa

SEQ ID NO: 3660064 - DNA, 25 bp, Homo sapien
ggagagcacgacccaagagccggcg

SEQ ID NO: 3660065 - DNA, 25 bp, Homo sapien
cttgttcgcccgtcagaaagcggcg

SEQ ID NO: 3660066 - DNA, 25 bp, Homo sapien
gagcgagcgtgagaaagtgagcgtg

SEQ ID NO: 3660067 - DNA, 25 bp, Homo sapien
gtcttcacaccaagaatcccactcc

SEQ ID NO: 3660068 - DNA, 25 bp, Homo sapien
tcactccctgagtgagtcttcacac

SEQ ID NO: 3660069 - DNA, 25 bp, Homo sapien
catgggcttccagtcattcactttc

SEQ ID NO: 3660070 - DNA, 25 bp, Homo sapien
ctgagtgagtcttcacaccaagaat

SEQ ID NO: 3660071 - DNA, 25 bp, Homo sapien
taactctggaagatacgtcatgtac

SEQ ID NO: 3660072 - DNA, 25 bp, Homo sapien
aattcatgtagagaagtcatgtagg

SEQ ID NO: 3660073 - DNA, 25 bp, Homo sapien
catgtaggtctttggtttccaagct

SEQ ID NO: 3660074 - DNA, 25 bp, Homo sapien
actctggaagatacgtcatgtactc

SEQ ID NO: 3660075 - DNA, 25 bp, Homo sapien
tgctcaattctagtacctgccagaa

SEQ ID NO: 3660076 - DNA, 25 bp, Homo sapien
atactatcaaagtgtagcaatctgc

SEQ ID NO: 3660077 - DNA, 25 bp, Homo sapien
gcagacttgagtaattagatggata

SEQ ID NO: 3660078 - DNA, 25 bp, Homo sapien
ttcctaaagtgtgcgcttatagagc

SEQ ID NO: 3660079 - DNA, 25 bp, Homo sapien
cacattgtctcgtagaacaatcaac

SEQ ID NO: 3660080 - DNA, 25 bp, Homo sapien
tggcagaatgtcatattctttcaca

SEQ ID NO: 3660081 - DNA, 25 bp, Homo sapien
gtagaacaatcaactcttccagata

SEQ ID NO: 3660082 - DNA, 25 bp, Homo sapien
ctttgaatttggcagaatgtcatat

SEQ ID NO: 3660083 - DNA, 25 bp, Homo sapien
tgtagctgtcttttatatctaaatc

SEQ ID NO: 3660084 - DNA, 25 bp, Homo sapien
ttagaatatgtagctgtcttttata

SEQ ID NO: 3660085 - DNA, 25 bp, Homo sapien
cttttagaatatgtagctgtctttt

SEQ ID NO: 3660086 - DNA, 25 bp, Homo sapien
gaatatgtagctgtcttttatatct

SEQ ID NO: 3660087 - DNA, 25 bp, Homo sapien
agccattataagcttcaagccatcc

SEQ ID NO: 3660088 - DNA, 25 bp, Homo sapien
aggtcttctcaagaagctggtatga

SEQ ID NO: 3660089 - DNA, 25 bp, Homo sapien
cattggaggtcttctcaagaagctg

SEQ ID NO: 3660090 - DNA, 25 bp, Homo sapien
tcagaagccattataagcttcaagc

SEQ ID NO: 3660091 - DNA, 25 bp, Homo sapien
catagagaggtttataccccagaca

SEQ ID NO: 3660092 - DNA, 25 bp, Homo sapien
gccagatatgtcacttgtgggctaa

SEQ ID NO: 3660093 - DNA, 25 bp, Homo sapien
ggaaatagggcaatcattataccca

SEQ ID NO: 3660094 - DNA, 25 bp, Homo sapien
tgtttagaagggtgaacatctgctg

SEQ ID NO: 3660095 - DNA, 25 bp, Homo sapien
gcacattttgttcacggtgtcatca

SEQ ID NO: 3660096 - DNA, 25 bp, Homo sapien
ggtgtcatcaaataaacatcatggt

SEQ ID NO: 3660097 - DNA, 25 bp, Homo sapien
ctctggtagcaggagttttgggcat

SEQ ID NO: 3660098 - DNA, 25 bp, Homo sapien
ccctctgagatccatttgatgaaaa

SEQ ID NO: 3660099 - DNA, 25 bp, Homo sapien
ctattctaagtttctcctgaggttt

SEQ ID NO: 3660100 - DNA, 25 bp, Homo sapien
tttatggagatagtaagtgtgccct

SEQ ID NO: 3660101 - DNA, 25 bp, Homo sapien
aaaatgtgttacgatctgacatagg

SEQ ID NO: 3660102 - DNA, 25 bp, Homo sapien
gacataggttttactggtctctgta

SEQ ID NO: 3660103 - DNA, 25 bp, Homo sapien
cttcatgagatcaaatcgaaaaaat

SEQ ID NO: 3660104 - DNA, 25 bp, Homo sapien
gatggacatcgtttttacatggcca

SEQ ID NO: 3660105 - DNA, 25 bp, Homo sapien
catggccaggtttgcatgcagagga

SEQ ID NO: 3660106 - DNA, 25 bp, Homo sapien
tgcagaggatctatcgagtggttga

SEQ ID NO: 3660107 - DNA, 25 bp, Homo sapien
gtttcccccgaattcagactcaatg

SEQ ID NO: 3660108 - DNA, 25 bp, Homo sapien
ttcagactcaatggtgtactttcag

SEQ ID NO: 3660109 - DNA, 25 bp, Homo sapien
ccccgaattcagactcaatggtgta

SEQ ID NO: 3660110 - DNA, 25 bp, Homo sapien
gtgtactttcagtactgtatttatt

SEQ ID NO: 3660111 - DNA, 25 bp, Homo sapien
tactagtgctagcagatggcagcat

SEQ ID NO: 3660112 - DNA, 25 bp, Homo sapien
cctcaatttctctcgctatgaatgg

SEQ ID NO: 3660113 - DNA, 25 bp, Homo sapien
tatgaatggtgtttgccgaagctgg

SEQ ID NO: 3660114 - DNA, 25 bp, Homo sapien
gcatagaaggaatctctgctgagaa

SEQ ID NO: 3660115 - DNA, 25 bp, Homo sapien
tacattattttcacttttctttcta

SEQ ID NO: 3660116 - DNA, 25 bp, Homo sapien
ttcacttttctttctaactatactg

SEQ ID NO: 3660117 - DNA, 25 bp, Homo sapien
cacttttctttctaactatactgaa

SEQ ID NO: 3660118 - DNA, 25 bp, Homo sapien
ctttctacattattttcacttttct

SEQ ID NO: 3660119 - DNA, 25 bp, Homo sapien
tctgcctgatttcaaggggccagct

SEQ ID NO: 3660120 - DNA, 25 bp, Homo sapien
cttctgcctgatttcaaggggccag

SEQ ID NO: 3660121 - DNA, 25 bp, Homo sapien
caccaagactgccttctgcctgatt

SEQ ID NO: 3660122 - DNA, 25 bp, Homo sapien
tgcctgatttcaaggggccagctct

SEQ ID NO: 3660123 - DNA, 25 bp, Homo sapien
caaaatgttgacatagagtttgcca

SEQ ID NO: 3660124 - DNA, 25 bp, Homo sapien
ttaggttacaaccaaaatgttgaca

SEQ ID NO: 3660125 - DNA, 25 bp, Homo sapien
tttgccaccaaggaactcttgctgg

SEQ ID NO: 3660126 - DNA, 25 bp, Homo sapien
agtttgccaccaaggaactcttgct

SEQ ID NO: 3660127 - DNA, 25 bp, Homo sapien
tattccttcaagagaccacttgtcc

SEQ ID NO: 3660128 - DNA, 25 bp, Homo sapien
ctagctactgttgcctctgaatgtc

SEQ ID NO: 3660129 - DNA, 25 bp, Homo sapien
agtattcttgtatgacactattcct

SEQ ID NO: 3660130 - DNA, 25 bp, Homo sapien
tgtccatttgatggcaggttgatta

SEQ ID NO: 3660131 - DNA, 25 bp, Homo sapien
tcaagggataatgtgaagggttctg

SEQ ID NO: 3660132 - DNA, 25 bp, Homo sapien
ccttcaagggataatgtgaagggtt

SEQ ID NO: 3660133 - DNA, 25 bp, Homo sapien
catattatccttcaagggataatgt

SEQ ID NO: 3660134 - DNA, 25 bp, Homo sapien
aactgggtttatgtgaagggttctg

SEQ ID NO: 3660135 - DNA, 25 bp, Homo sapien
tcttattctctcccaagtgtaattc

SEQ ID NO: 3660136 - DNA, 25 bp, Homo sapien
cttattctctcccaagtgtaattcc

SEQ ID NO: 3660137 - DNA, 25 bp, Homo sapien
ttattctctcccaagtgtaattcca

SEQ ID NO: 3660138 - DNA, 25 bp, Homo sapien
aaggttaataatgtccatgggcaca

SEQ ID NO: 3660139 - DNA, 25 bp, Homo sapien
gaagaggagacgcagtttggcggct

SEQ ID NO: 3660140 - DNA, 25 bp, Homo sapien
tgcgcgccgagagcggaagaggaga

SEQ ID NO: 3660141 - DNA, 25 bp, Homo sapien
ggccgttgaagccacgtcccaggcg

SEQ ID NO: 3660142 - DNA, 25 bp, Homo sapien
acaaactgacgtttgtgctgaaaga

SEQ ID NO: 3660143 - DNA, 25 bp, Homo sapien
tgctgaaagaaaaggcccggcctct

SEQ ID NO: 3660144 - DNA, 25 bp, Homo sapien
aagatgacaattccgagcctgccag

SEQ ID NO: 3660145 - DNA, 25 bp, Homo sapien
ttcgagacggaagcctgaaaactcc

SEQ ID NO: 3660146 - DNA, 25 bp, Homo sapien
agactgtgggaagtcgggtgactgg

SEQ ID NO: 3660147 - DNA, 25 bp, Homo sapien
gccttgctggctctaaggtgaaaaa

SEQ ID NO: 3660148 - DNA, 25 bp, Homo sapien
ctgtgggaagtcgggtgactgggcg

SEQ ID NO: 3660149 - DNA, 25 bp, Homo sapien
actgtgggaagtcgggtgactgggc

SEQ ID NO: 3660150 - DNA, 25 bp, Homo sapien
taaaaagcagcacaaccgccacgga

SEQ ID NO: 3660151 - DNA, 25 bp, Homo sapien
ctcaggtcctgctaagggagccgct

SEQ ID NO: 3660152 - DNA, 25 bp, Homo sapien
gatttgccttcgatcctacatcctg

SEQ ID NO: 3660153 - DNA, 25 bp, Homo sapien
ccaggcagcgggaaaactaagtgca

SEQ ID NO: 3660154 - DNA, 25 bp, Homo sapien
cttggcttccaaattacagatgaaa

SEQ ID NO: 3660155 - DNA, 25 bp, Homo sapien
gacttggcttccaaattacagatga

SEQ ID NO: 3660156 - DNA, 25 bp, Homo sapien
acttggcttccaaattacagatgaa

SEQ ID NO: 3660157 - DNA, 25 bp, Homo sapien
ggtcaacagatgctttactggtttc

SEQ ID NO: 3660158 - DNA, 25 bp, Homo sapien
ggtggtcaacagatgctttactggt

SEQ ID NO: 3660159 - DNA, 25 bp, Homo sapien
tcaacagatgctttactggtttcat

SEQ ID NO: 3660160 - DNA, 25 bp, Homo sapien
ctggtggtcaacagatgctttactg

SEQ ID NO: 3660161 - DNA, 25 bp, Homo sapien
taatgctggaacatttgccgatttg

SEQ ID NO: 3660162 - DNA, 25 bp, Homo sapien
gttaatgctggaacatttgccgatt

SEQ ID NO: 3660163 - DNA, 25 bp, Homo sapien
tgctggaacatttgccgatttgtta

SEQ ID NO: 3660164 - DNA, 25 bp, Homo sapien
gctcaggtgataatggtaaattatg

SEQ ID NO: 3660165 - DNA, 25 bp, Homo sapien
aagttctttgtcttactcgatggaa

SEQ ID NO: 3660166 - DNA, 25 bp, Homo sapien
tttccgatcatttcatcttctggta

SEQ ID NO: 3660167 - DNA, 25 bp, Homo sapien
tggaatgggcaaagcataccgtaaa

SEQ ID NO: 3660168 - DNA, 25 bp, Homo sapien
cctgttggtggagatcttaggacca

SEQ ID NO: 3660169 - DNA, 25 bp, Homo sapien
tctccattctgatcgcaatgtccat

SEQ ID NO: 3660170 - DNA, 25 bp, Homo sapien
ccattctgatcgcaatgtccatagg

SEQ ID NO: 3660171 - DNA, 25 bp, Homo sapien
ctgatcgcaatgtccataggtttct

SEQ ID NO: 3660172 - DNA, 25 bp, Homo sapien
ttctgatcgcaatgtccataggttt

SEQ ID NO: 3660173 - DNA, 25 bp, Homo sapien
tcttctagctgagctgcaaattgcg

SEQ ID NO: 3660174 - DNA, 25 bp, Homo sapien
gcaaattgcgaacaatatgtcaaga

SEQ ID NO: 3660175 - DNA, 25 bp, Homo sapien
gctgagctgcaaattgcgaacaata

SEQ ID NO: 3660176 - DNA, 25 bp, Homo sapien
gctgcaaattgcgaacaatatgtca

SEQ ID NO: 3660177 - DNA, 25 bp, Homo sapien
tccatctgattgacctgccactgaa

SEQ ID NO: 3660178 - DNA, 25 bp, Homo sapien
tctgattgacctgccactgaaacca

SEQ ID NO: 3660179 - DNA, 25 bp, Homo sapien
ttcttccatctgattgacctgccac

SEQ ID NO: 3660180 - DNA, 25 bp, Homo sapien
catctgattgacctgccactgaaac

SEQ ID NO: 3660181 - DNA, 25 bp, Homo sapien
cacggaggatttagacctctgttta

SEQ ID NO: 3660182 - DNA, 25 bp, Homo sapien
tttagacaacatgactttcacggag

SEQ ID NO: 3660183 - DNA, 25 bp, Homo sapien
caaatctttgtacaagccttactat

SEQ ID NO: 3660184 - DNA, 25 bp, Homo sapien
tttaaggcgattcttcagttcttca

SEQ ID NO: 3660185 - DNA, 25 bp, Homo sapien
cactgcttctggtcgattttcttta

SEQ ID NO: 3660186 - DNA, 25 bp, Homo sapien
acttttcactgcttctggtcgattt

SEQ ID NO: 3660187 - DNA, 25 bp, Homo sapien
caacttttcactgcttctggtcgat

SEQ ID NO: 3660188 - DNA, 25 bp, Homo sapien
tttcactgcttctggtcgattttct

SEQ ID NO: 3660189 - DNA, 25 bp, Homo sapien
taaattcatcagttgagtgggcttc

SEQ ID NO: 3660190 - DNA, 25 bp, Homo sapien
aattcatcagttgagtgggcttcta

SEQ ID NO: 3660191 - DNA, 25 bp, Homo sapien
ttaaattcatcagttgagtgggctt

SEQ ID NO: 3660192 - DNA, 25 bp, Homo sapien
attcatcagttgagtgggcttctaa

SEQ ID NO: 3660193 - DNA, 25 bp, Homo sapien
tcatctgcagtcaaagcatttgtgg

SEQ ID NO: 3660194 - DNA, 25 bp, Homo sapien
tctccagccctaagacacaagtaag

SEQ ID NO: 3660195 - DNA, 25 bp, Homo sapien
tgaactgacaactactcatctgcag

SEQ ID NO: 3660196 - DNA, 25 bp, Homo sapien
taaatttatcactgccacacctcaa

SEQ ID NO: 3660197 - DNA, 25 bp, Homo sapien
caaccagaaatctctatagaacttg

SEQ ID NO: 3660198 - DNA, 25 bp, Homo sapien
cttggtttaaacatggcaacgtttg

SEQ ID NO: 3660199 - DNA, 25 bp, Homo sapien
agctgtccttggtttaaacatggca

SEQ ID NO: 3660200 - DNA, 25 bp, Homo sapien
gagtgctgtaagatgtgcagctgtc

SEQ ID NO: 3660201 - DNA, 25 bp, Homo sapien
ttctaccccacctagtcagtcagag

SEQ ID NO: 3660202 - DNA, 25 bp, Homo sapien
tctactcctaagttctatatacctt

SEQ ID NO: 3660203 - DNA, 25 bp, Homo sapien
aaggattcccctcgatgtatacaga

SEQ ID NO: 3660204 - DNA, 25 bp, Homo sapien
gtccatagatgtacaaaggattccc

SEQ ID NO: 3660205 - DNA, 25 bp, Homo sapien
ttgaaacacagaggaactttaactg

SEQ ID NO: 3660206 - DNA, 25 bp, Homo sapien
caagatgccctttcataggtaaatg

SEQ ID NO: 3660207 - DNA, 25 bp, Homo sapien
caaggcaaaaagcaaaccagatgta

SEQ ID NO: 3660208 - DNA, 25 bp, Homo sapien
tctgtgacactgtaatggtggatcc

SEQ ID NO: 3660209 - DNA, 25 bp, Homo sapien
cagaaaagttggtctacaaaaatga

SEQ ID NO: 3660210 - DNA, 25 bp, Homo sapien
ccagaaaagttggtctacaaaaatg

SEQ ID NO: 3660211 - DNA, 25 bp, Homo sapien
ggagtgatactttctctgacaaaag

SEQ ID NO: 3660212 - DNA, 25 bp, Homo sapien
ttcaaatactttcaacatggcatta

SEQ ID NO: 3660213 - DNA, 25 bp, Homo sapien
tcaacatggcattaaatcgattagt

SEQ ID NO: 3660214 - DNA, 25 bp, Homo sapien
ggcattaaatcgattagtcattgaa

SEQ ID NO: 3660215 - DNA, 25 bp, Homo sapien
aaatcgattagtcattgaatgagca

SEQ ID NO: 3660216 - DNA, 25 bp, Homo sapien
tgcctttacatgagctcctaaagga

SEQ ID NO: 3660217 - DNA, 25 bp, Homo sapien
ggcctgcctttacatgagctcctaa

SEQ ID NO: 3660218 - DNA, 25 bp, Homo sapien
tttacatgagctcctaaaggaaaca

SEQ ID NO: 3660219 - DNA, 25 bp, Homo sapien
gcctgcctttacatgagctcctaaa

SEQ ID NO: 3660220 - DNA, 25 bp, Homo sapien
tctcctagaattgcaaacattgtcc

SEQ ID NO: 3660221 - DNA, 25 bp, Homo sapien
ggtaaaataacagcatgtatcatgg

SEQ ID NO: 3660222 - DNA, 25 bp, Homo sapien
ccaattccctatgtataaatggaga

SEQ ID NO: 3660223 - DNA, 25 bp, Homo sapien
aagaataatcagatgtctcctagaa

SEQ ID NO: 3660224 - DNA, 25 bp, Homo sapien
gcatgaccctagcatcaaaacagat

SEQ ID NO: 3660225 - DNA, 25 bp, Homo sapien
gaaggtggatgattcctacatttcc

SEQ ID NO: 3660226 - DNA, 25 bp, Homo sapien
ctgaggtacccagtacatctcaata

SEQ ID NO: 3660227 - DNA, 25 bp, Homo sapien
acatctcaataggactggttggaca

SEQ ID NO: 3660228 - DNA, 25 bp, Homo sapien
gaaatcagaaagtaagggccaggtg

SEQ ID NO: 3660229 - DNA, 25 bp, Homo sapien
taaaacataatttgaaatcagaaag

SEQ ID NO: 3660230 - DNA, 25 bp, Homo sapien
ctgtagctttaaaacataatttgaa

SEQ ID NO: 3660231 - DNA, 25 bp, Homo sapien
gtggatcatctgaggctactcagga

SEQ ID NO: 3660232 - DNA, 25 bp, Homo sapien
agaagttggatccacttgaacaagc

SEQ ID NO: 3660233 - DNA, 25 bp, Homo sapien
caaaagtggatttggtttctgcata

SEQ ID NO: 3660234 - DNA, 25 bp, Homo sapien
tggatccacttgaacaagcaaaagt

SEQ ID NO: 3660235 - DNA, 25 bp, Homo sapien
agtggatttggtttctgcatacaca

SEQ ID NO: 3660236 - DNA, 25 bp, Homo sapien
cacgagtatttgtcagcgtttgaga

SEQ ID NO: 3660237 - DNA, 25 bp, Homo sapien
cattggtgagatcatcggaaagcgc

SEQ ID NO: 3660238 - DNA, 25 bp, Homo sapien
gagtcgaaggccgtgagtcagccat

SEQ ID NO: 3660239 - DNA, 25 bp, Homo sapien
cgtcattgtcgtcatcgttgcccga

SEQ ID NO: 3660240 - DNA, 25 bp, Homo sapien
gacaatgcactgacaagatcctgaa

SEQ ID NO: 3660241 - DNA, 25 bp, Homo sapien
gcctatgccctagctaatcactgaa

SEQ ID NO: 3660242 - DNA, 25 bp, Homo sapien
cacaggtgaacagctagacaatgca

SEQ ID NO: 3660243 - DNA, 25 bp, Homo sapien
gatgcatgcacttgggctaaagacg

SEQ ID NO: 3660244 - DNA, 25 bp, Homo sapien
tagttctgctaccatcgcactgatg

SEQ ID NO: 3660245 - DNA, 25 bp, Homo sapien
cattagtcacgttggattaagggcc

SEQ ID NO: 3660246 - DNA, 25 bp, Homo sapien
gcacattgtactcctttcccgaggg

SEQ ID NO: 3660247 - DNA, 25 bp, Homo sapien
tattctagccactgttagtccctgg

SEQ ID NO: 3660248 - DNA, 25 bp, Homo sapien
tctaacaaaacttgatcatttacag

SEQ ID NO: 3660249 - DNA, 25 bp, Homo sapien
catctaacaaaacttgatcatttac

SEQ ID NO: 3660250 - DNA, 25 bp, Homo sapien
taacaaaacttgatcatttacagct

SEQ ID NO: 3660251 - DNA, 25 bp, Homo sapien
agcatctaacaaaacttgatcattt

SEQ ID NO: 3660252 - DNA, 25 bp, Homo sapien
ttctcttctgataacaactgaaaat

SEQ ID NO: 3660253 - DNA, 25 bp, Homo sapien
ccaacttctcttctgataacaactg

SEQ ID NO: 3660254 - DNA, 25 bp, Homo sapien
acttctcttctgataacaactgaaa

SEQ ID NO: 3660255 - DNA, 25 bp, Homo sapien
tttgtagttcattttccagcaccaa

SEQ ID NO: 3660256 - DNA, 25 bp, Homo sapien
cacacaatgaagcacacgtacaaga

SEQ ID NO: 3660257 - DNA, 25 bp, Homo sapien
gagttattggccttgaacaggagaa

SEQ ID NO: 3660258 - DNA, 25 bp, Homo sapien
gtacgtaacaatcagactcccaaag

SEQ ID NO: 3660259 - DNA, 25 bp, Homo sapien
tccagtacaaggttatagaccagca

SEQ ID NO: 3660260 - DNA, 25 bp, Homo sapien
tattccatggaataatgtgtgtgta

SEQ ID NO: 3660261 - DNA, 25 bp, Homo sapien
aagaataatgcaatgggtgttgagg

SEQ ID NO: 3660262 - DNA, 25 bp, Homo sapien
tatataaaagtattccatggaataa

SEQ ID NO: 3660263 - DNA, 25 bp, Homo sapien
taatgcaatgggtgttgaggactcg

SEQ ID NO: 3660264 - DNA, 25 bp, Homo sapien
cagcaggaccacatcgtagaaggaa

SEQ ID NO: 3660265 - DNA, 25 bp, Homo sapien
catttactagagctgaggtcaacca

SEQ ID NO: 3660266 - DNA, 25 bp, Homo sapien
tcaaccaggatttaaggagccacca

SEQ ID NO: 3660267 - DNA, 25 bp, Homo sapien
gaagcattatgactgcctaaaggga

SEQ ID NO: 3660268 - DNA, 25 bp, Homo sapien
acagctttctttgttcgattatttg

SEQ ID NO: 3660269 - DNA, 25 bp, Homo sapien
tctttgttcgattatttgtaggctt

SEQ ID NO: 3660270 - DNA, 25 bp, Homo sapien
gctttctttgttcgattatttgtag

SEQ ID NO: 3660271 - DNA, 25 bp, Homo sapien
tttctttgttcgattatttgtaggc

SEQ ID NO: 3660272 - DNA, 25 bp, Homo sapien
ctgtacttgatccaaatcttctttt

SEQ ID NO: 3660273 - DNA, 25 bp, Homo sapien
tgtacttgatccaaatcttctttta

SEQ ID NO: 3660274 - DNA, 25 bp, Homo sapien
gtacttgatccaaatcttcttttat

SEQ ID NO: 3660275 - DNA, 25 bp, Homo sapien
tacttgatccaaatcttcttttatt

SEQ ID NO: 3660276 - DNA, 25 bp, Homo sapien
tatatatgactatcagagcaagtat

SEQ ID NO: 3660277 - DNA, 25 bp, Homo sapien
tcacatacgtaataatgtttctcta

SEQ ID NO: 3660278 - DNA, 25 bp, Homo sapien
caaatattgatgcatagagagagtg

SEQ ID NO: 3660279 - DNA, 25 bp, Homo sapien
ctatcagagcaagtattaatcaaat

SEQ ID NO: 3660280 - DNA, 25 bp, Homo sapien
tgtattcctctaattagatcacaca

SEQ ID NO: 3660281 - DNA, 25 bp, Homo sapien
tattcctctaattagatcacacaaa

SEQ ID NO: 3660282 - DNA, 25 bp, Homo sapien
agtcagacacagagtttacaatttc

SEQ ID NO: 3660283 - DNA, 25 bp, Homo sapien
tcctctaattagatcacacaaacca

SEQ ID NO: 3660284 - DNA, 25 bp, Homo sapien
caagtgaaggaaacagtagcgtgaa

SEQ ID NO: 3660285 - DNA, 25 bp, Homo sapien
cgaaatttgacaggtattgtgtacc

SEQ ID NO: 3660286 - DNA, 25 bp, Homo sapien
tcctgcccagacatacgaaatttga

SEQ ID NO: 3660287 - DNA, 25 bp, Homo sapien
tgtgtaccctttggatctttaggaa

SEQ ID NO: 3660288 - DNA, 25 bp, Homo sapien
gttctcaatttccagacgtgctact

SEQ ID NO: 3660289 - DNA, 25 bp, Homo sapien
tctcaatttccagacgtgctacttt

SEQ ID NO: 3660290 - DNA, 25 bp, Homo sapien
tgttctcaatttccagacgtgctac

SEQ ID NO: 3660291 - DNA, 25 bp, Homo sapien
ctttgttctcaatttccagacgtgc

SEQ ID NO: 3660292 - DNA, 25 bp, Homo sapien
ggaaatagttaagttgatgcttagc

SEQ ID NO: 3660293 - DNA, 25 bp, Homo sapien
gaaatagttaagttgatgcttagct

SEQ ID NO: 3660294 - DNA, 25 bp, Homo sapien
tgaaaccagtgattttcttgtttct

SEQ ID NO: 3660295 - DNA, 25 bp, Homo sapien
ttttgtttgactattacccacttgc

SEQ ID NO: 3660296 - DNA, 25 bp, Homo sapien
gattttatcacttgtcctttgtcca

SEQ ID NO: 3660297 - DNA, 25 bp, Homo sapien
tacccacttgcattgttgtctcagt

SEQ ID NO: 3660298 - DNA, 25 bp, Homo sapien
tcagtcttccgctttgggcagtgat

SEQ ID NO: 3660299 - DNA, 25 bp, Homo sapien
ttttcaatcagtcttccgctttggg

SEQ ID NO: 3660300 - DNA, 25 bp, Homo sapien
tcaatcagtcttccgctttgggcag

SEQ ID NO: 3660301 - DNA, 25 bp, Homo sapien
ctcttttcaatcagtcttccgcttt

SEQ ID NO: 3660302 - DNA, 25 bp, Homo sapien
tctctgaaggtttgggagacttttc

SEQ ID NO: 3660303 - DNA, 25 bp, Homo sapien
tctgaaggtttgggagacttttcca

SEQ ID NO: 3660304 - DNA, 25 bp, Homo sapien
tattgtaagcaataccatgtatctg

SEQ ID NO: 3660305 - DNA, 25 bp, Homo sapien
aatgtactttattgtaagcaatacc

SEQ ID NO: 3660306 - DNA, 25 bp, Homo sapien
aataccatgtatctgctcaggtggg

SEQ ID NO: 3660307 - DNA, 25 bp, Homo sapien
taagcaataccatgtatctgctcag

SEQ ID NO: 3660308 - DNA, 25 bp, Homo sapien
aacagatctgtttgtcagatgtgaa

SEQ ID NO: 3660309 - DNA, 25 bp, Homo sapien
caggtgacctatgatggcaaaatgg

SEQ ID NO: 3660310 - DNA, 25 bp, Homo sapien
tctgtttgtcagatgtgaacatatc

SEQ ID NO: 3660311 - DNA, 25 bp, Homo sapien
cactgaactatcattccagacaaag

SEQ ID NO: 3660312 - DNA, 25 bp, Homo sapien
caagcaagggcccctcttaccatgg

SEQ ID NO: 3660313 - DNA, 25 bp, Homo sapien
ctcttaccatggttaaactccaaag

SEQ ID NO: 3660314 - DNA, 25 bp, Homo sapien
ttaccatggttaaactccaaagcac

SEQ ID NO: 3660315 - DNA, 25 bp, Homo sapien
gcaagggcccctcttaccatggtta

SEQ ID NO: 3660316 - DNA, 25 bp, Homo sapien
acttctttgctggatgatactgttg

SEQ ID NO: 3660317 - DNA, 25 bp, Homo sapien
catgggtctctgatggagatttata

SEQ ID NO: 3660318 - DNA, 25 bp, Homo sapien
tccaacagacagtgaatcttgaact

SEQ ID NO: 3660319 - DNA, 25 bp, Homo sapien
tagcagggctagatcgtttcttctc

SEQ ID NO: 3660320 - DNA, 25 bp, Homo sapien
tgtaattgttcttctgaaacatcag

SEQ ID NO: 3660321 - DNA, 25 bp, Homo sapien
gtaattgttcttctgaaacatcagc

SEQ ID NO: 3660322 - DNA, 25 bp, Homo sapien
cttttgtaattgttcttctgaaaca

SEQ ID NO: 3660323 - DNA, 25 bp, Homo sapien
tttgtaattgttcttctgaaacatc

SEQ ID NO: 3660324 - DNA, 25 bp, Homo sapien
ttctgctgcttggtaagtttgttct

SEQ ID NO: 3660325 - DNA, 25 bp, Homo sapien
tttctgctgcttggtaagtttgttc

SEQ ID NO: 3660326 - DNA, 25 bp, Homo sapien
tctgacttaggttgctggaagcagc

SEQ ID NO: 3660327 - DNA, 25 bp, Homo sapien
cagataccctaagtctaaacttcca

SEQ ID NO: 3660328 - DNA, 25 bp, Homo sapien
gcagccaggctatgtcttaaatgct

SEQ ID NO: 3660329 - DNA, 25 bp, Homo sapien
cctagggtgtgacaaaatacagcca

SEQ ID NO: 3660330 - DNA, 25 bp, Homo sapien
tacagtatcctccttaagttgcact

SEQ ID NO: 3660331 - DNA, 25 bp, Homo sapien
ggaatacagtatcctccttaagttg

SEQ ID NO: 3660332 - DNA, 25 bp, Homo sapien
gaaggaatacagtatcctccttaag

SEQ ID NO: 3660333 - DNA, 25 bp, Homo sapien
cgtgaaggaatacagtatcctcctt

SEQ ID NO: 3660334 - DNA, 25 bp, Homo sapien
tacgtgcaaattgaggagaccagct

SEQ ID NO: 3660335 - DNA, 25 bp, Homo sapien
taagccagctaaactcacaagaggt

SEQ ID NO: 3660336 - DNA, 25 bp, Homo sapien
tctacagatacccatagaaggctcc

SEQ ID NO: 3660337 - DNA, 25 bp, Homo sapien
ttccagagattgtgtgccaagagcc

SEQ ID NO: 3660338 - DNA, 25 bp, Homo sapien
tccatactagaagttctttgtttca

SEQ ID NO: 3660339 - DNA, 25 bp, Homo sapien
atgtctttccatactagaagttctt

SEQ ID NO: 3660340 - DNA, 25 bp, Homo sapien
caaccataagattttcatctggaac

SEQ ID NO: 3660341 - DNA, 25 bp, Homo sapien
ttcaaccataagattttcatctgga

SEQ ID NO: 3660342 - DNA, 25 bp, Homo sapien
taaaatagtgtgaagggccaagtgc

SEQ ID NO: 3660343 - DNA, 25 bp, Homo sapien
ttcgttaaaatagaccgtggatgcg

SEQ ID NO: 3660344 - DNA, 25 bp, Homo sapien
gaataggactaggaagttacagcag

SEQ ID NO: 3660345 - DNA, 25 bp, Homo sapien
cgtggatgcgaagcagaaaattctc

SEQ ID NO: 3660346 - DNA, 25 bp, Homo sapien
tgaaaactctcatttctggtagctt

SEQ ID NO: 3660347 - DNA, 25 bp, Homo sapien
actctcatttctggtagctttaaga

SEQ ID NO: 3660348 - DNA, 25 bp, Homo sapien
tgtcctcaggcaattgtggggttgt

SEQ ID NO: 3660349 - DNA, 25 bp, Homo sapien
cctcaggcaattgtggggttgtaag

SEQ ID NO: 3660350 - DNA, 25 bp, Homo sapien
gaggaatgttaagttaccaggatga

SEQ ID NO: 3660351 - DNA, 25 bp, Homo sapien
tatgagcttcatgcaagagatacag

SEQ ID NO: 3660352 - DNA, 25 bp, Homo sapien
gagacaccagtatagatctagaagt

SEQ ID NO: 3660353 - DNA, 25 bp, Homo sapien
aattcagtaattatagagacaccag

SEQ ID NO: 3660354 - DNA, 25 bp, Homo sapien
gactttgtgtcttgttcaagcataa

SEQ ID NO: 3660355 - DNA, 25 bp, Homo sapien
gttcaagcataagattttcttctgg

SEQ ID NO: 3660356 - DNA, 25 bp, Homo sapien
tgtgtcttgttcaagcataagattt

SEQ ID NO: 3660357 - DNA, 25 bp, Homo sapien
cttccgtttttgactttgtgtcttg

SEQ ID NO: 3660358 - DNA, 25 bp, Homo sapien
gagtggttgctctgtagaagtttct

SEQ ID NO: 3660359 - DNA, 25 bp, Homo sapien
tgagtggttgctctgtagaagtttc

SEQ ID NO: 3660360 - DNA, 25 bp, Homo sapien
caactacaagcctttcatttggtac

SEQ ID NO: 3660361 - DNA, 25 bp, Homo sapien
ttgacaatgattcttgatgctcaac

SEQ ID NO: 3660362 - DNA, 25 bp, Homo sapien
gatgcctaagtataagattttcatt

SEQ ID NO: 3660363 - DNA, 25 bp, Homo sapien
tttgacattgagtcttgatgcctaa

SEQ ID NO: 3660364 - DNA, 25 bp, Homo sapien
cattgagtcttgatgcctaagtata

SEQ ID NO: 3660365 - DNA, 25 bp, Homo sapien
gagtcttgatgcctaagtataagat

SEQ ID NO: 3660366 - DNA, 25 bp, Homo sapien
ggaggctactggatcaattgcaaga

SEQ ID NO: 3660367 - DNA, 25 bp, Homo sapien
ttgctcctggccctaagtcaatggg

SEQ ID NO: 3660368 - DNA, 25 bp, Homo sapien
taatgactattcttagccctaggca

SEQ ID NO: 3660369 - DNA, 25 bp, Homo sapien
ttagaaagtgccagcagacaccatg

SEQ ID NO: 3660370 - DNA, 25 bp, Homo sapien
actgaatcttgatgttcaagcacaa

SEQ ID NO: 3660371 - DNA, 25 bp, Homo sapien
gttcaagcacaagatttttgcctgg

SEQ ID NO: 3660372 - DNA, 25 bp, Homo sapien
gaatcttgatgttcaagcacaagat

SEQ ID NO: 3660373 - DNA, 25 bp, Homo sapien
tgttcaagcacaagatttttgcctg

SEQ ID NO: 3660374 - DNA, 25 bp, Homo sapien
actgaatcttgatgtttaagcatag

SEQ ID NO: 3660375 - DNA, 25 bp, Homo sapien
tgaatctctaattgcacttggattt

SEQ ID NO: 3660376 - DNA, 25 bp, Homo sapien
gagtctgagggtcatcaactatgcc

SEQ ID NO: 3660377 - DNA, 25 bp, Homo sapien
ggcacttttaggtagtgcacacaga

SEQ ID NO: 3660378 - DNA, 25 bp, Homo sapien
tccatttcagcacccgcaagtagct

SEQ ID NO: 3660379 - DNA, 25 bp, Homo sapien
tgcacacagataatctgcaagagtc

SEQ ID NO: 3660380 - DNA, 25 bp, Homo sapien
gaacaaacatagaatttttatctgg

SEQ ID NO: 3660381 - DNA, 25 bp, Homo sapien
tcttgatgaacaaacatagaatttt

SEQ ID NO: 3660382 - DNA, 25 bp, Homo sapien
tttggagttttgacactgaatcttg

SEQ ID NO: 3660383 - DNA, 25 bp, Homo sapien
gacactgaatcttgatgaacaaaca

SEQ ID NO: 3660384 - DNA, 25 bp, Homo sapien
tccactccagaatttatttgtttct

SEQ ID NO: 3660385 - DNA, 25 bp, Homo sapien
ttgaatcttgatgaacagaaatcac

SEQ ID NO: 3660386 - DNA, 25 bp, Homo sapien
catttggagttttgactttgaatct

SEQ ID NO: 3660387 - DNA, 25 bp, Homo sapien
ttttcatttggtactacaatacgag

SEQ ID NO: 3660388 - DNA, 25 bp, Homo sapien
tgaagtttcttcgtttgagattcgc

SEQ ID NO: 3660389 - DNA, 25 bp, Homo sapien
tctcctcaggcaacagatgttcaag

SEQ ID NO: 3660390 - DNA, 25 bp, Homo sapien
tgaagttactttagcttgaagtttc

SEQ ID NO: 3660391 - DNA, 25 bp, Homo sapien
tgagattcgcttcttgataataaaa

SEQ ID NO: 3660392 - DNA, 25 bp, Homo sapien
gataaaaaatggagtagacagtgaa

SEQ ID NO: 3660393 - DNA, 25 bp, Homo sapien
aacataccatgtaggagaaatagga

SEQ ID NO: 3660394 - DNA, 25 bp, Homo sapien
caacctacacagtggcctgtctgga

SEQ ID NO: 3660395 - DNA, 25 bp, Homo sapien
gaatatgagcatataccaaacatca

SEQ ID NO: 3660396 - DNA, 25 bp, Homo sapien
tttctagcagctctagttgcaggca

SEQ ID NO: 3660397 - DNA, 25 bp, Homo sapien
catagacagtataaggaaaatggac

SEQ ID NO: 3660398 - DNA, 25 bp, Homo sapien
cattgtagcagaatacatatccatg

SEQ ID NO: 3660399 - DNA, 25 bp, Homo sapien
cagtggatgtctgtaacattgtagc

SEQ ID NO: 3660400 - DNA, 25 bp, Homo sapien
tattgaattcccagctatgagtgag

SEQ ID NO: 3660401 - DNA, 25 bp, Homo sapien
cattattgaattcccagctatgagt

SEQ ID NO: 3660402 - DNA, 25 bp, Homo sapien
ttctcattattgaattcccagctat

SEQ ID NO: 3660403 - DNA, 25 bp, Homo sapien
gtgttctcattattgaattcccagc

SEQ ID NO: 3660404 - DNA, 25 bp, Homo sapien
gcaaaatacccagaatggctgacat

SEQ ID NO: 3660405 - DNA, 25 bp, Homo sapien
cacttgtcatgtaatatgctggctc

SEQ ID NO: 3660406 - DNA, 25 bp, Homo sapien
tggtgctgccctcatagtaataatc

SEQ ID NO: 3660407 - DNA, 25 bp, Homo sapien
caccaatattggaggtcgtagctgg

SEQ ID NO: 3660408 - DNA, 25 bp, Homo sapien
aaccaatctctaaactgcttcccag

SEQ ID NO: 3660409 - DNA, 25 bp, Homo sapien
ttgagaaccaatctctaaactgctt

SEQ ID NO: 3660410 - DNA, 25 bp, Homo sapien
gaaccaatctctaaactgcttccca

SEQ ID NO: 3660411 - DNA, 25 bp, Homo sapien
gagaaccaatctctaaactgcttcc

SEQ ID NO: 3660412 - DNA, 25 bp, Homo sapien
aatgaaacccaatttgtgctatctc

SEQ ID NO: 3660413 - DNA, 25 bp, Homo sapien
tatatacccataactagcagactgg

SEQ ID NO: 3660414 - DNA, 25 bp, Homo sapien
tatgtttttgctggacacccctcct

SEQ ID NO: 3660415 - DNA, 25 bp, Homo sapien
caacaagatcatgacttatataccc

SEQ ID NO: 3660416 - DNA, 25 bp, Homo sapien
ttccacttgggcaattttatgtttc

SEQ ID NO: 3660417 - DNA, 25 bp, Homo sapien
aattgacgggtacattgctggaaga

SEQ ID NO: 3660418 - DNA, 25 bp, Homo sapien
tgaattattaggtcgctaattgacg

SEQ ID NO: 3660419 - DNA, 25 bp, Homo sapien
acgggtacattgctggaagattttc

SEQ ID NO: 3660420 - DNA, 25 bp, Homo sapien
ggtcgctaattgacgggtacattgc

SEQ ID NO: 3660421 - DNA, 25 bp, Homo sapien
tcaatcattgagttctttagctcta

SEQ ID NO: 3660422 - DNA, 25 bp, Homo sapien
tttccagttcaatcattgagttctt

SEQ ID NO: 3660423 - DNA, 25 bp, Homo sapien
aatcattgagttctttagctctaga

SEQ ID NO: 3660424 - DNA, 25 bp, Homo sapien
ttttccagttcaatcattgagttct

SEQ ID NO: 3660425 - DNA, 25 bp, Homo sapien
gcacctctcaagctttctatatcag

SEQ ID NO: 3660426 - DNA, 25 bp, Homo sapien
tcatcatttaataagcgtcttccca

SEQ ID NO: 3660427 - DNA, 25 bp, Homo sapien
atttaataagcgtcttcccaaagca

SEQ ID NO: 3660428 - DNA, 25 bp, Homo sapien
caaagcacctctcaagctttctata

SEQ ID NO: 3660429 - DNA, 25 bp, Homo sapien
gagactctttgatcgtgtcttgaat

SEQ ID NO: 3660430 - DNA, 25 bp, Homo sapien
cagggagactctttgatcgtgtctt

SEQ ID NO: 3660431 - DNA, 25 bp, Homo sapien
cttccaaatgcatctgtcaattgtt

SEQ ID NO: 3660432 - DNA, 25 bp, Homo sapien
catctgtcaattgttctatatcagg

SEQ ID NO: 3660433 - DNA, 25 bp, Homo sapien
taactgcgtcttaattgcatcattt

SEQ ID NO: 3660434 - DNA, 25 bp, Homo sapien
ctctcagttgtactatgcaatcgtt

SEQ ID NO: 3660435 - DNA, 25 bp, Homo sapien
tcatttattgtacctctctcagttg

SEQ ID NO: 3660436 - DNA, 25 bp, Homo sapien
tgtactatgcaatcgttcatcagtc

SEQ ID NO: 3660437 - DNA, 25 bp, Homo sapien
gactctttgactgtatgttgattag

SEQ ID NO: 3660438 - DNA, 25 bp, Homo sapien
gactgtatgttgattagatgcttta

SEQ ID NO: 3660439 - DNA, 25 bp, Homo sapien
tgactctttgactgtatgttgatta

SEQ ID NO: 3660440 - DNA, 25 bp, Homo sapien
ctttgactgtatgttgattagatgc

SEQ ID NO: 3660441 - DNA, 25 bp, Homo sapien
gaatagtgctgcattacataagggt

SEQ ID NO: 3660442 - DNA, 25 bp, Homo sapien
agcatctaacacatgagcacacaga

SEQ ID NO: 3660443 - DNA, 25 bp, Homo sapien
atcctccactctgcaaaaggcccca

SEQ ID NO: 3660444 - DNA, 25 bp, Homo sapien
tagtgctgcattacataagggtaaa

SEQ ID NO: 3660445 - DNA, 25 bp, Homo sapien
ggatttgagttaccgtccagtgtta

SEQ ID NO: 3660446 - DNA, 25 bp, Homo sapien
tggatttgagttaccgtccagtgtt

SEQ ID NO: 3660447 - DNA, 25 bp, Homo sapien
tgagttaccgtccagtgttatttta

SEQ ID NO: 3660448 - DNA, 25 bp, Homo sapien
atttgagttaccgtccagtgttatt

SEQ ID NO: 3660449 - DNA, 25 bp, Homo sapien
gcatctgctaagagttccttattag

SEQ ID NO: 3660450 - DNA, 25 bp, Homo sapien
tagcatctgctaagagttccttatt

SEQ ID NO: 3660451 - DNA, 25 bp, Homo sapien
tttattatacctcttccaatagcat

SEQ ID NO: 3660452 - DNA, 25 bp, Homo sapien
ttccaatagcatctgctaagagttc

SEQ ID NO: 3660453 - DNA, 25 bp, Homo sapien
tagttgtgcattgattgatcccttt

SEQ ID NO: 3660454 - DNA, 25 bp, Homo sapien
tccagtatcatctgctaagtgttcc

SEQ ID NO: 3660455 - DNA, 25 bp, Homo sapien
gaccctttagttgtgcattgattga

SEQ ID NO: 3660456 - DNA, 25 bp, Homo sapien
ttggtgaccctttagttgtgcattg

SEQ ID NO: 3660457 - DNA, 25 bp, Homo sapien
taattgtgtcgtggttgactccttc

SEQ ID NO: 3660458 - DNA, 25 bp, Homo sapien
taggcaaagaagttcttatcagtct

SEQ ID NO: 3660459 - DNA, 25 bp, Homo sapien
ggttgactccttcattagacctctt

SEQ ID NO: 3660460 - DNA, 25 bp, Homo sapien
acctcttccagtagcataggcaaag

SEQ ID NO: 3660461 - DNA, 25 bp, Homo sapien
tctgccaagaattccttatcagtct

SEQ ID NO: 3660462 - DNA, 25 bp, Homo sapien
gattggccctattattatacctctt

SEQ ID NO: 3660463 - DNA, 25 bp, Homo sapien
ctcggtgactcttcagttgtgtagt

SEQ ID NO: 3660464 - DNA, 25 bp, Homo sapien
gcatctgccaagaattccttatcag

SEQ ID NO: 3660465 - DNA, 25 bp, Homo sapien
aattgtgcactgattggtcccttta

SEQ ID NO: 3660466 - DNA, 25 bp, Homo sapien
attgtgcactgattggtccctttat

SEQ ID NO: 3660467 - DNA, 25 bp, Homo sapien
gttttacttgaaccaatggcatttg

SEQ ID NO: 3660468 - DNA, 25 bp, Homo sapien
gttgtgtctttatctcaccaattgt

SEQ ID NO: 3660469 - DNA, 25 bp, Homo sapien
gtctttatctcaccaattgttttac

SEQ ID NO: 3660470 - DNA, 25 bp, Homo sapien
catagtgagtccttagttgtgtctt

SEQ ID NO: 3660471 - DNA, 25 bp, Homo sapien
gggaatttacttggtgtaatgctcc

SEQ ID NO: 3660472 - DNA, 25 bp, Homo sapien
tcaaagggtgataaattgatcactt

SEQ ID NO: 3660473 - DNA, 25 bp, Homo sapien
ccttcttgacgttgtacggacatat

SEQ ID NO: 3660474 - DNA, 25 bp, Homo sapien
tcctagtaaagataccttcttgacg

SEQ ID NO: 3660475 - DNA, 25 bp, Homo sapien
tggatgtctttagaaaagcttggac

SEQ ID NO: 3660476 - DNA, 25 bp, Homo sapien
tgcagtcacatagggtgaagagtac

SEQ ID NO: 3660477 - DNA, 25 bp, Homo sapien
cttggaccagccctatatgttctat

SEQ ID NO: 3660478 - DNA, 25 bp, Homo sapien
aaattgcttttgaaggtgcagtcac

SEQ ID NO: 3660479 - DNA, 25 bp, Homo sapien
gcttaaggtaacaactttcgaatgc

SEQ ID NO: 3660480 - DNA, 25 bp, Homo sapien
ataggtaggttttccaactgtattg

SEQ ID NO: 3660481 - DNA, 25 bp, Homo sapien
actgtattggtcacagtaggcagag

SEQ ID NO: 3660482 - DNA, 25 bp, Homo sapien
ggttttccaactgtattggtcacag

SEQ ID NO: 3660483 - DNA, 25 bp, Homo sapien
tgttgctgactcatcctgggtgtta

SEQ ID NO: 3660484 - DNA, 25 bp, Homo sapien
tccagaggtttaggccccaatgagc

SEQ ID NO: 3660485 - DNA, 25 bp, Homo sapien
ccaggacacctgtggtgtaggtcca

SEQ ID NO: 3660486 - DNA, 25 bp, Homo sapien
gattctgaggcacttcccagtatct

SEQ ID NO: 3660487 - DNA, 25 bp, Homo sapien
agactaagattgcaatccctggttt

SEQ ID NO: 3660488 - DNA, 25 bp, Homo sapien
gactaagattgcaatccctggtttt

SEQ ID NO: 3660489 - DNA, 25 bp, Homo sapien
agtatgggtgtggtacagattttcg

SEQ ID NO: 3660490 - DNA, 25 bp, Homo sapien
gtgtggtacagattttcgggcagca

SEQ ID NO: 3660491 - DNA, 25 bp, Homo sapien
ggtgtggtacagattttcgggcagc

SEQ ID NO: 3660492 - DNA, 25 bp, Homo sapien
tcaaaagtatgggtgtggtacagat

SEQ ID NO: 3660493 - DNA, 25 bp, Homo sapien
gggcctaccctgttgatccactgta

SEQ ID NO: 3660494 - DNA, 25 bp, Homo sapien
tcaaaaggcttctatacttgcaatt

SEQ ID NO: 3660495 - DNA, 25 bp, Homo sapien
tttgtcatgttgcttatcttgctca

SEQ ID NO: 3660496 - DNA, 25 bp, Homo sapien
taagcaccatccacacgagtcagta

SEQ ID NO: 3660497 - DNA, 25 bp, Homo sapien
ttcttaccctcagcaacaaaaaggc

SEQ ID NO: 3660498 - DNA, 25 bp, Homo sapien
gattttacatcacaccagaaagcat

SEQ ID NO: 3660499 - DNA, 25 bp, Homo sapien
cgaatagaagtaagctggaacctca

SEQ ID NO: 3660500 - DNA, 25 bp, Homo sapien
gaaagcattacagggacactggcga

SEQ ID NO: 3660501 - DNA, 25 bp, Homo sapien
atagagatcattctcataaagcatt

SEQ ID NO: 3660502 - DNA, 25 bp, Homo sapien
ggtgtgtccacacttcatgggctta

SEQ ID NO: 3660503 - DNA, 25 bp, Homo sapien
taggaaccaactctgtgtaagaggt

SEQ ID NO: 3660504 - DNA, 25 bp, Homo sapien
atcttctgtggagctggaccctgag

SEQ ID NO: 3660505 - DNA, 25 bp, Homo sapien
tccacagcctcgatgggaagacagt

SEQ ID NO: 3660506 - DNA, 25 bp, Homo sapien
ccttattaaagaggactgagggagc

SEQ ID NO: 3660507 - DNA, 25 bp, Homo sapien
tgtttacaggccacccacttcatgg

SEQ ID NO: 3660508 - DNA, 25 bp, Homo sapien
gggtcctcggcaggcacccaatgtg

SEQ ID NO: 3660509 - DNA, 25 bp, Homo sapien
tgtgaacctggaaatgggtcctcgg

SEQ ID NO: 3660510 - DNA, 25 bp, Homo sapien
tctctgaccctcagaggtcaagtgg

SEQ ID NO: 3660511 - DNA, 25 bp, Homo sapien
tgcccacaaggccagtaccctcccc

SEQ ID NO: 3660512 - DNA, 25 bp, Homo sapien
tgaggtaggcacttccctcgctgcc

SEQ ID NO: 3660513 - DNA, 25 bp, Homo sapien
aggtcaagtgggacaccctggaaag

SEQ ID NO: 3660514 - DNA, 25 bp, Homo sapien
tacttaaatcggatgtcttgactct

SEQ ID NO: 3660515 - DNA, 25 bp, Homo sapien
taaatcggatgtcttgactctgatg

SEQ ID NO: 3660516 - DNA, 25 bp, Homo sapien
cctaaaatacttaaatcggatgtct

SEQ ID NO: 3660517 - DNA, 25 bp, Homo sapien
tcggatgtcttgactctgatgtatt

SEQ ID NO: 3660518 - DNA, 25 bp, Homo sapien
ggaaaatgagtactgcccgtgcaaa

SEQ ID NO: 3660519 - DNA, 25 bp, Homo sapien
cacagttaggtagctttagggcaat

SEQ ID NO: 3660520 - DNA, 25 bp, Homo sapien
tgccagggactgacaaaagacttga

SEQ ID NO: 3660521 - DNA, 25 bp, Homo sapien
taagagtgccgtaacaactgtggtc

SEQ ID NO: 3660522 - DNA, 25 bp, Homo sapien
cacaacaccagctaagctcaggaac

SEQ ID NO: 3660523 - DNA, 25 bp, Homo sapien
gctaagctcaggaacccttgcacaa

SEQ ID NO: 3660524 - DNA, 25 bp, Homo sapien
gaaaacagcgcatatctggaaattt

SEQ ID NO: 3660525 - DNA, 25 bp, Homo sapien
gaagtatttaatgaacttgttggaa

SEQ ID NO: 3660526 - DNA, 25 bp, Homo sapien
tgaccgtgaagaggagacaagcgtt

SEQ ID NO: 3660527 - DNA, 25 bp, Homo sapien
tattcaggacagtcttgtgctggac

SEQ ID NO: 3660528 - DNA, 25 bp, Homo sapien
gaaatggagaccagtgtagacaact

SEQ ID NO: 3660529 - DNA, 25 bp, Homo sapien
ggaggccacaccatctcggtttgtg

SEQ ID NO: 3660530 - DNA, 25 bp, Homo sapien
gagagtatctctccttacagaaaaa

SEQ ID NO: 3660531 - DNA, 25 bp, Homo sapien
ctcaggcaggtccaggtccttcagg

SEQ ID NO: 3660532 - DNA, 25 bp, Homo sapien
ttgttatttgagagagtatctctcc

SEQ ID NO: 3660533 - DNA, 25 bp, Homo sapien
accgcccccagcctgttgttatttg

SEQ ID NO: 3660534 - DNA, 25 bp, Homo sapien
gaaagcgttagctaacacattaatt

SEQ ID NO: 3660535 - DNA, 25 bp, Homo sapien
aaagcgttagctaacacattaattt

SEQ ID NO: 3660536 - DNA, 25 bp, Homo sapien
tgaaagcgttagctaacacattaat

SEQ ID NO: 3660537 - DNA, 25 bp, Homo sapien
atgaaagcgttagctaacacattaa

SEQ ID NO: 3660538 - DNA, 25 bp, Homo sapien
catatagggccagctgagtcatgac

SEQ ID NO: 3660539 - DNA, 25 bp, Homo sapien
tcatatagggccagctgagtcatga

SEQ ID NO: 3660540 - DNA, 25 bp, Homo sapien
gctcatatagggccagctgagtcat

SEQ ID NO: 3660541 - DNA, 25 bp, Homo sapien
cagctcatatagggccagctgagtc

SEQ ID NO: 3660542 - DNA, 25 bp, Homo sapien
atccccagtcagatcatcagtgccc

SEQ ID NO: 3660543 - DNA, 25 bp, Homo sapien
gaggatccccagtcagatcatcagt

SEQ ID NO: 3660544 - DNA, 25 bp, Homo sapien
agaggatccccagtcagatcatcag

SEQ ID NO: 3660545 - DNA, 25 bp, Homo sapien
ggatccccagtcagatcatcagtgc

SEQ ID NO: 3660546 - DNA, 25 bp, Homo sapien
tgggcttcataagcctttagtcttt

SEQ ID NO: 3660547 - DNA, 25 bp, Homo sapien
ttgggcttcataagcctttagtctt

SEQ ID NO: 3660548 - DNA, 25 bp, Homo sapien
ttagtcttttgataaccgtctctgg

SEQ ID NO: 3660549 - DNA, 25 bp, Homo sapien
ttttgataaccgtctctggtttatc

SEQ ID NO: 3660550 - DNA, 25 bp, Homo sapien
gtagaaaagcttggtaatattccag

SEQ ID NO: 3660551 - DNA, 25 bp, Homo sapien
tagaaaagcttggtaatattccagg

SEQ ID NO: 3660552 - DNA, 25 bp, Homo sapien
cccccaacgtattatctttaggcat

SEQ ID NO: 3660553 - DNA, 25 bp, Homo sapien
tctttgacaacttgccccaaagtaa

SEQ ID NO: 3660554 - DNA, 25 bp, Homo sapien
atctttgacaacttgccccaaagta

SEQ ID NO: 3660555 - DNA, 25 bp, Homo sapien
gaaaggcaaaaaagtccgcaggcat

SEQ ID NO: 3660556 - DNA, 25 bp, Homo sapien
ttctttcctcctcacagggaaaggc

SEQ ID NO: 3660557 - DNA, 25 bp, Homo sapien
gaacttctaattcctttgagtggca

SEQ ID NO: 3660558 - DNA, 25 bp, Homo sapien
tctctgaacttctaattcctttgag

SEQ ID NO: 3660559 - DNA, 25 bp, Homo sapien
cttctctgaacttctaattcctttg

SEQ ID NO: 3660560 - DNA, 25 bp, Homo sapien
tctgaacttctaattcctttgagtg

SEQ ID NO: 3660561 - DNA, 25 bp, Homo sapien
gggccaacatgccacatggttaact

SEQ ID NO: 3660562 - DNA, 25 bp, Homo sapien
gccacatggttaacttaggtgggta

SEQ ID NO: 3660563 - DNA, 25 bp, Homo sapien
caacatgccacatggttaacttagg

SEQ ID NO: 3660564 - DNA, 25 bp, Homo sapien
catggttaacttaggtgggtagaat

SEQ ID NO: 3660565 - DNA, 25 bp, Homo sapien
cggtccgcgagcctgagagcccggc

SEQ ID NO: 3660566 - DNA, 25 bp, Homo sapien
tccgcgagcctgagagcccggcctg

SEQ ID NO: 3660567 - DNA, 25 bp, Homo sapien
gagcctgagagcccggcctgtgtct

SEQ ID NO: 3660568 - DNA, 25 bp, Homo sapien
cccggtccgcgagcctgagagcccg

SEQ ID NO: 3660569 - DNA, 25 bp, Homo sapien
tgtttataaacgtcaagagtcgccg

SEQ ID NO: 3660570 - DNA, 25 bp, Homo sapien
tataaacgtcaagagtcgccggtcc

SEQ ID NO: 3660571 - DNA, 25 bp, Homo sapien
aagagtcgccggtccctgccgggca

SEQ ID NO: 3660572 - DNA, 25 bp, Homo sapien
aacgtcaagagtcgccggtccctgc

SEQ ID NO: 3660573 - DNA, 25 bp, Homo sapien
ttggagcagcgtcgagccagccgtc

SEQ ID NO: 3660574 - DNA, 25 bp, Homo sapien
gccagccgtcggcgcccgcgacggg

SEQ ID NO: 3660575 - DNA, 25 bp, Homo sapien
cttggagcagcgtcgagccagccgt

SEQ ID NO: 3660576 - DNA, 25 bp, Homo sapien
cggcgcccgcgacggggactggtct

SEQ ID NO: 3660577 - DNA, 25 bp, Homo sapien
agggtcgccggcctgggcgctgtca

SEQ ID NO: 3660578 - DNA, 25 bp, Homo sapien
gacgggtccggtgcctttgtctctc

SEQ ID NO: 3660579 - DNA, 25 bp, Homo sapien
ccgggctgggcaagcgcaggtggga

SEQ ID NO: 3660580 - DNA, 25 bp, Homo sapien
cagccgcgttccgaacgtgagggtc

SEQ ID NO: 3660581 - DNA, 25 bp, Homo sapien
ggcctccggtctcctgtgcgcggca

SEQ ID NO: 3660582 - DNA, 25 bp, Homo sapien
ggcagcacttaaagccgccggccgg

SEQ ID NO: 3660583 - DNA, 25 bp, Homo sapien
gccggcgggcctcgggtgtgggagc

SEQ ID NO: 3660584 - DNA, 25 bp, Homo sapien
cgccgggacctttgtgccgggcgtg

SEQ ID NO: 3660585 - DNA, 25 bp, Homo sapien
gaggaatgcgtttccggagggagag

SEQ ID NO: 3660586 - DNA, 25 bp, Homo sapien
cctcgggagcgggatcagacgcgca

SEQ ID NO: 3660587 - DNA, 25 bp, Homo sapien
gcggggccgcggctggtttcctgcc

SEQ ID NO: 3660588 - DNA, 25 bp, Homo sapien
ggatcagacgcgcagaggaggcggg

SEQ ID NO: 3660589 - DNA, 25 bp, Homo sapien
gacacaggcaagcacattatcactc

SEQ ID NO: 3660590 - DNA, 25 bp, Homo sapien
ggcacggcgactgtctcaacgcagt

SEQ ID NO: 3660591 - DNA, 25 bp, Homo sapien
tccgagatgcaggatctcccgggct

SEQ ID NO: 3660592 - DNA, 25 bp, Homo sapien
gctcgaaacgggacatcagtggaca

SEQ ID NO: 3660593 - DNA, 25 bp, Homo sapien
tcaccacccttcgtgacacccatgg

SEQ ID NO: 3660594 - DNA, 25 bp, Homo sapien
tctaaaacgttccccagtctcacca

SEQ ID NO: 3660595 - DNA, 25 bp, Homo sapien
tccagataaatctatcaaaagcagg

SEQ ID NO: 3660596 - DNA, 25 bp, Homo sapien
aaggtacctccagataaatctatca

SEQ ID NO: 3660597 - DNA, 25 bp, Homo sapien
tctatcaaaagcaggacgcaactca

SEQ ID NO: 3660598 - DNA, 25 bp, Homo sapien
gataaatctatcaaaagcaggacgc

SEQ ID NO: 3660599 - DNA, 25 bp, Homo sapien
tcttttcccaacagggtgctgcagc

SEQ ID NO: 3660600 - DNA, 25 bp, Homo sapien
tcaccaagcggaacccacagcattt

SEQ ID NO: 3660601 - DNA, 25 bp, Homo sapien
tttctgctaccaggatagcagcttg

SEQ ID NO: 3660602 - DNA, 25 bp, Homo sapien
gcaagagaaacacttctatttcata

SEQ ID NO: 3660603 - DNA, 25 bp, Homo sapien
ttcttagatgtgatcgcttcatttt

SEQ ID NO: 3660604 - DNA, 25 bp, Homo sapien
tcttagatgtgatcgcttcattttc

SEQ ID NO: 3660605 - DNA, 25 bp, Homo sapien
cttagatgtgatcgcttcattttct

SEQ ID NO: 3660606 - DNA, 25 bp, Homo sapien
tttcttagatgtgatcgcttcattt

SEQ ID NO: 3660607 - DNA, 25 bp, Homo sapien
gaagagcaagtagtagtatcaccag

SEQ ID NO: 3660608 - DNA, 25 bp, Homo sapien
tacacatgggaaggcaagacacatc

SEQ ID NO: 3660609 - DNA, 25 bp, Homo sapien
ccttagacatggaaaggtgagagct

SEQ ID NO: 3660610 - DNA, 25 bp, Homo sapien
gtatcaccagtgacaaaactaaagg

SEQ ID NO: 3660611 - DNA, 25 bp, Homo sapien
aaaatccaagtcccatttatcagcc

SEQ ID NO: 3660612 - DNA, 25 bp, Homo sapien
aatccaagtcccatttatcagccag

SEQ ID NO: 3660613 - DNA, 25 bp, Homo sapien
ccattgtcaatcaatttgctccaaa

SEQ ID NO: 3660614 - DNA, 25 bp, Homo sapien
aaatccaagtcccatttatcagcca

SEQ ID NO: 3660615 - DNA, 25 bp, Homo sapien
tatgtactgcaacgcattgggcatc

SEQ ID NO: 3660616 - DNA, 25 bp, Homo sapien
tgtaagctagagatcacacatcaac

SEQ ID NO: 3660617 - DNA, 25 bp, Homo sapien
gcagttccatctattctgtaagcta

SEQ ID NO: 3660618 - DNA, 25 bp, Homo sapien
aagccagtgttctgactataagaga

SEQ ID NO: 3660619 - DNA, 25 bp, Homo sapien
tggcacgagtcaccacggccaacta

SEQ ID NO: 3660620 - DNA, 25 bp, Homo sapien
tactggcacgagtcaccacggccaa

SEQ ID NO: 3660621 - DNA, 25 bp, Homo sapien
gcccggtcaaatgtggatactatca

SEQ ID NO: 3660622 - DNA, 25 bp, Homo sapien
aaattactttgttgaccagcctggc

SEQ ID NO: 3660623 - DNA, 25 bp, Homo sapien
aacatcgaagtttcttcttcaatga

SEQ ID NO: 3660624 - DNA, 25 bp, Homo sapien
cctccagtgtagtaaagctgatttt

SEQ ID NO: 3660625 - DNA, 25 bp, Homo sapien
ttcatgcaggtgaatacagaatgcc

SEQ ID NO: 3660626 - DNA, 25 bp, Homo sapien
tcagccagtagcttcgggctggctt

SEQ ID NO: 3660627 - DNA, 25 bp, Homo sapien
ctcggtcccacctccagtgtagtaa

SEQ ID NO: 3660628 - DNA, 25 bp, Homo sapien
agataaagatacgtagacgaccagg

SEQ ID NO: 3660629 - DNA, 25 bp, Homo sapien
aaacccacaaaactctcagtagata

SEQ ID NO: 3660630 - DNA, 25 bp, Homo sapien
caaaactctcagtagataaagatac

SEQ ID NO: 3660631 - DNA, 25 bp, Homo sapien
cagtagataaagatacgtagacgac

SEQ ID NO: 3660632 - DNA, 25 bp, Homo sapien
cagtggtatggtggaggcatgttcc

SEQ ID NO: 3660633 - DNA, 25 bp, Homo sapien
gtggaggcatgttccgcactcccct

SEQ ID NO: 3660634 - DNA, 25 bp, Homo sapien
gtatggtggaggcatgttccgcact

SEQ ID NO: 3660635 - DNA, 25 bp, Homo sapien
tgggcagtggtatggtggaggcatg

SEQ ID NO: 3660636 - DNA, 25 bp, Homo sapien
tcacctgagcccctagaagtacaca

SEQ ID NO: 3660637 - DNA, 25 bp, Homo sapien
gcccctagaagtacacaaagcaagc

SEQ ID NO: 3660638 - DNA, 25 bp, Homo sapien
tgagcccctagaagtacacaaagca

SEQ ID NO: 3660639 - DNA, 25 bp, Homo sapien
gaaggctgagccagagagacttgag

SEQ ID NO: 3660640 - DNA, 25 bp, Homo sapien
tacggaatagcttgggaactactga

SEQ ID NO: 3660641 - DNA, 25 bp, Homo sapien
gcttgcatgacacttggccctgggt

SEQ ID NO: 3660642 - DNA, 25 bp, Homo sapien
tacaatattaaagctggtacacagc

SEQ ID NO: 3660643 - DNA, 25 bp, Homo sapien
ttccaggtcctgaaagtctttagtc

SEQ ID NO: 3660644 - DNA, 25 bp, Homo sapien
taggcagcacatagaaagattctgg

SEQ ID NO: 3660645 - DNA, 25 bp, Homo sapien
tataggaggattatgagggcaccag

SEQ ID NO: 3660646 - DNA, 25 bp, Homo sapien
ggcaccaggatggagcagaattgct

SEQ ID NO: 3660647 - DNA, 25 bp, Homo sapien
gaagagagctggtttggactagcac

SEQ ID NO: 3660648 - DNA, 25 bp, Homo sapien
taagtagagttgacctgagtcccta

SEQ ID NO: 3660649 - DNA, 25 bp, Homo sapien
tggtcacagagtaaagagcgttccc

SEQ ID NO: 3660650 - DNA, 25 bp, Homo sapien
cagatttgggtataacagagccttc

SEQ ID NO: 3660651 - DNA, 25 bp, Homo sapien
gcttaagaagaatgcagtctctggg

SEQ ID NO: 3660652 - DNA, 25 bp, Homo sapien
tggtgttgtcgtcaccatctgggca

SEQ ID NO: 3660653 - DNA, 25 bp, Homo sapien
gaacagaagaacacgaggtttgcag

SEQ ID NO: 3660654 - DNA, 25 bp, Homo sapien
agttcccagtgggaataattctggg

SEQ ID NO: 3660655 - DNA, 25 bp, Homo sapien
ggtttgcagttgtacttggtgttgt

SEQ ID NO: 3660656 - DNA, 25 bp, Homo sapien
gtatcacaggatctatagaaagaca

SEQ ID NO: 3660657 - DNA, 25 bp, Homo sapien
gctatggaagtatcacaggatctat

SEQ ID NO: 3660658 - DNA, 25 bp, Homo sapien
gttcaggaagcccatactaatgaag

SEQ ID NO: 3660659 - DNA, 25 bp, Homo sapien
taatgaagacgagtgctatggaagt

SEQ ID NO: 3660660 - DNA, 25 bp, Homo sapien
cactctgcaaagaggaacttcacaa

SEQ ID NO: 3660661 - DNA, 25 bp, Homo sapien
tgcaaagaggaacttcacaaggaag

SEQ ID NO: 3660662 - DNA, 25 bp, Homo sapien
aagaggaacttcacaaggaagttag

SEQ ID NO: 3660663 - DNA, 25 bp, Homo sapien
tctgcaaagaggaacttcacaagga

SEQ ID NO: 3660664 - DNA, 25 bp, Homo sapien
tttgggaaacttgatatataacaga

SEQ ID NO: 3660665 - DNA, 25 bp, Homo sapien
tacaggaaattcttctaccaggcac

SEQ ID NO: 3660666 - DNA, 25 bp, Homo sapien
tcctggtaacaaatcggaatgcgat

SEQ ID NO: 3660667 - DNA, 25 bp, Homo sapien
tatataacagatctaagctcagtgc

SEQ ID NO: 3660668 - DNA, 25 bp, Homo sapien
cagccctgattgactacttccataa

SEQ ID NO: 3660669 - DNA, 25 bp, Homo sapien
tgtgggagtcctgcacaagccatag

SEQ ID NO: 3660670 - DNA, 25 bp, Homo sapien
tcaaaagcaggtcaacatccttagg

SEQ ID NO: 3660671 - DNA, 25 bp, Homo sapien
ttcattggccataggtgcaccgtgg

SEQ ID NO: 3660672 - DNA, 25 bp, Homo sapien
taacagtcctgggagcaacaaccat

SEQ ID NO: 3660673 - DNA, 25 bp, Homo sapien
aggatcgaagcagcagaccagggtc

SEQ ID NO: 3660674 - DNA, 25 bp, Homo sapien
tctccaagcggaaaatgatctcatc

SEQ ID NO: 3660675 - DNA, 25 bp, Homo sapien
caaccatggcattggctgctaggaa

SEQ ID NO: 3660676 - DNA, 25 bp, Homo sapien
tttgcaatgagtttctgagcttgac

SEQ ID NO: 3660677 - DNA, 25 bp, Homo sapien
ttttgcaatgagtttctgagcttga

SEQ ID NO: 3660678 - DNA, 25 bp, Homo sapien
ttgcaatgagtttctgagcttgact

SEQ ID NO: 3660679 - DNA, 25 bp, Homo sapien
tcccagaaagatcgttactaccagc

SEQ ID NO: 3660680 - DNA, 25 bp, Homo sapien
gagttctgtgcttggtagactttgg

SEQ ID NO: 3660681 - DNA, 25 bp, Homo sapien
tgctcacacccttggttggacttga

SEQ ID NO: 3660682 - DNA, 25 bp, Homo sapien
gaggaggactctagcgtcccagaaa

SEQ ID NO: 3660683 - DNA, 25 bp, Homo sapien
tgttggggttgctacaactgtgtcc

SEQ ID NO: 3660684 - DNA, 25 bp, Homo sapien
ggggttgctacaactgtgtccggaa

SEQ ID NO: 3660685 - DNA, 25 bp, Homo sapien
ttggggttgctacaactgtgtccgg

SEQ ID NO: 3660686 - DNA, 25 bp, Homo sapien
acactgttggggttgctacaactgt

SEQ ID NO: 3660687 - DNA, 25 bp, Homo sapien
ttgagagtagaggaaacagccaaag

SEQ ID NO: 3660688 - DNA, 25 bp, Homo sapien
tcctagaaaccacattctcaggccc

SEQ ID NO: 3660689 - DNA, 25 bp, Homo sapien
tcaggcttgagagtagaggaaacag

SEQ ID NO: 3660690 - DNA, 25 bp, Homo sapien
gcttgagagtagaggaaacagccaa

SEQ ID NO: 3660691 - DNA, 25 bp, Homo sapien
gaagcgtgtctaatgcacaggataa

SEQ ID NO: 3660692 - DNA, 25 bp, Homo sapien
ccaccccagcaaattaagcggatgc

SEQ ID NO: 3660693 - DNA, 25 bp, Homo sapien
cacttagaagcgtgtctaatgcaca

SEQ ID NO: 3660694 - DNA, 25 bp, Homo sapien
cggatgctaaaatcacttagaagcg

SEQ ID NO: 3660695 - DNA, 25 bp, Homo sapien
caaaacgctctgtattatattcata

SEQ ID NO: 3660696 - DNA, 25 bp, Homo sapien
ttcactagcaaaacgctctgtatta

SEQ ID NO: 3660697 - DNA, 25 bp, Homo sapien
agaagactgtgtgatctcccaacct

SEQ ID NO: 3660698 - DNA, 25 bp, Homo sapien
tagaagaagactgtgtgatctccca

SEQ ID NO: 3660699 - DNA, 25 bp, Homo sapien
gagagtaatggagtgttcttagctc

SEQ ID NO: 3660700 - DNA, 25 bp, Homo sapien
aaagaatgtcttgccttttgatggt

SEQ ID NO: 3660701 - DNA, 25 bp, Homo sapien
gcacactgatgcttgtgctctggaa

SEQ ID NO: 3660702 - DNA, 25 bp, Homo sapien
tgtgactctagagggccttctgcac

SEQ ID NO: 3660703 - DNA, 25 bp, Homo sapien
cttcatgggaagattgctcatgtga

SEQ ID NO: 3660704 - DNA, 25 bp, Homo sapien
catgggaagattgctcatgtgacat

SEQ ID NO: 3660705 - DNA, 25 bp, Homo sapien
tcatgggaagattgctcatgtgaca

SEQ ID NO: 3660706 - DNA, 25 bp, Homo sapien
ttcatgggaagattgctcatgtgac

SEQ ID NO: 3660707 - DNA, 25 bp, Homo sapien
gatgccatgaattagaacctgggct

SEQ ID NO: 3660708 - DNA, 25 bp, Homo sapien
tggcatagatgccatgaattagaac

SEQ ID NO: 3660709 - DNA, 25 bp, Homo sapien
gaattagaacctgggctaaatgaca

SEQ ID NO: 3660710 - DNA, 25 bp, Homo sapien
gccatgaattagaacctgggctaaa

SEQ ID NO: 3660711 - DNA, 25 bp, Homo sapien
cagatgtgttctgaccctagaagtg

SEQ ID NO: 3660712 - DNA, 25 bp, Homo sapien
gcttcataatcctgctccagatgtg

SEQ ID NO: 3660713 - DNA, 25 bp, Homo sapien
tctctagttgttggcgagtttgaca

SEQ ID NO: 3660714 - DNA, 25 bp, Homo sapien
cctagaagtgaacaccgagagcgtt

SEQ ID NO: 3660715 - DNA, 25 bp, Homo sapien
agagtcaggtttctgatgcctccat

SEQ ID NO: 3660716 - DNA, 25 bp, Homo sapien
ctggagagtcaggtttctgatgcct

SEQ ID NO: 3660717 - DNA, 25 bp, Homo sapien
gagagtcaggtttctgatgcctcca

SEQ ID NO: 3660718 - DNA, 25 bp, Homo sapien
tggagagtcaggtttctgatgcctc

SEQ ID NO: 3660719 - DNA, 25 bp, Homo sapien
agaaaaccagagtgtcgggggatgt

SEQ ID NO: 3660720 - DNA, 25 bp, Homo sapien
gagtgtcgggggatgtggctggcaa

SEQ ID NO: 3660721 - DNA, 25 bp, Homo sapien
acaagcctggggcattcccttcctt

SEQ ID NO: 3660722 - DNA, 25 bp, Homo sapien
agcctggggcattcccttccttgtc

SEQ ID NO: 3660723 - DNA, 25 bp, Homo sapien
cacacctggtgttagctcttgtcaa

SEQ ID NO: 3660724 - DNA, 25 bp, Homo sapien
gttcaccagggacacgagatgccat

SEQ ID NO: 3660725 - DNA, 25 bp, Homo sapien
gcagggtgtcttcgcttaaggtccc

SEQ ID NO: 3660726 - DNA, 25 bp, Homo sapien
ccatgggaattcaggtcaccaggaa

SEQ ID NO: 3660727 - DNA, 25 bp, Homo sapien
tagactctctggtgggtcaacgtca

SEQ ID NO: 3660728 - DNA, 25 bp, Homo sapien
tcaacgtcaggtaaacactggtagg

SEQ ID NO: 3660729 - DNA, 25 bp, Homo sapien
gctctgtacggcgtcccattgggaa

SEQ ID NO: 3660730 - DNA, 25 bp, Homo sapien
gaagtgggacgactcaaaatctcca

SEQ ID NO: 3660731 - DNA, 25 bp, Homo sapien
ctggataattgatgtatgagtaaag

SEQ ID NO: 3660732 - DNA, 25 bp, Homo sapien
aagtaagttagaggaaatgggacat

SEQ ID NO: 3660733 - DNA, 25 bp, Homo sapien
taagagagccatgttttgaaagtag

SEQ ID NO: 3660734 - DNA, 25 bp, Homo sapien
gaggaaatgggacataagagagcca

SEQ ID NO: 3660735 - DNA, 25 bp, Homo sapien
tggattacgactttggttcctttgc

SEQ ID NO: 3660736 - DNA, 25 bp, Homo sapien
ggaaagaaatcaagatcgtccccat

SEQ ID NO: 3660737 - DNA, 25 bp, Homo sapien
taaacagaacctcagacgctgggat

SEQ ID NO: 3660738 - DNA, 25 bp, Homo sapien
tcaaactcttcttctggattacgac

SEQ ID NO: 3660739 - DNA, 25 bp, Homo sapien
ttcctacccattcttctatatctct

SEQ ID NO: 3660740 - DNA, 25 bp, Homo sapien
tcctacccattcttctatatctctg

SEQ ID NO: 3660741 - DNA, 25 bp, Homo sapien
tagttttattactagccagcgttcc

SEQ ID NO: 3660742 - DNA, 25 bp, Homo sapien
ttccctcggattcacaccctgtcat

SEQ ID NO: 3660743 - DNA, 25 bp, Homo sapien
actagccagcgttccctcggattca

SEQ ID NO: 3660744 - DNA, 25 bp, Homo sapien
tccttcctgcaggcccctagtttta

SEQ ID NO: 3660745 - DNA, 25 bp, Homo sapien
caaggacagttgtattgcatcaaaa

SEQ ID NO: 3660746 - DNA, 25 bp, Homo sapien
ggttttcacacgcattgctgtgcag

SEQ ID NO: 3660747 - DNA, 25 bp, Homo sapien
taagcttccggataagaattgtgca

SEQ ID NO: 3660748 - DNA, 25 bp, Homo sapien
tacgagtgcttctaagaaaatcgca

SEQ ID NO: 3660749 - DNA, 25 bp, Homo sapien
tcctggcgtttgacatcaatgggac

SEQ ID NO: 3660750 - DNA, 25 bp, Homo sapien
tgctgcgcgtacattagaaagctgc

SEQ ID NO: 3660751 - DNA, 25 bp, Homo sapien
aagggcttttgcttcgcagagtgct

SEQ ID NO: 3660752 - DNA, 25 bp, Homo sapien
tttagcaaatggagtgccagatgga

SEQ ID NO: 3660753 - DNA, 25 bp, Homo sapien
aacacagttgtttaatgcggctgca

SEQ ID NO: 3660754 - DNA, 25 bp, Homo sapien
gctgcatttgcccacagtgtcagca

SEQ ID NO: 3660755 - DNA, 25 bp, Homo sapien
cacagttgtttaatgcggctgcatt

SEQ ID NO: 3660756 - DNA, 25 bp, Homo sapien
aaacacagttgtttaatgcggctgc

SEQ ID NO: 3660757 - DNA, 25 bp, Homo sapien
ctgagagaggcattcgctgtgcatc

SEQ ID NO: 3660758 - DNA, 25 bp, Homo sapien
aggcattcgctgtgcatctccctga

SEQ ID NO: 3660759 - DNA, 25 bp, Homo sapien
actgaaatggtaccgcccagcctct

SEQ ID NO: 3660760 - DNA, 25 bp, Homo sapien
aggctgctcttccaacgtctacgga

SEQ ID NO: 3660761 - DNA, 25 bp, Homo sapien
ttcctatccatcagggacagccagg

SEQ ID NO: 3660762 - DNA, 25 bp, Homo sapien
acaactgatacctttggatcttctg

SEQ ID NO: 3660763 - DNA, 25 bp, Homo sapien
ttctgtgacatgtagggccaagcca

SEQ ID NO: 3660764 - DNA, 25 bp, Homo sapien
tccaggaccgtcaggtcaccagaaa

SEQ ID NO: 3660765 - DNA, 25 bp, Homo sapien
ccatcgattctctcagtcggcacta

SEQ ID NO: 3660766 - DNA, 25 bp, Homo sapien
tctctcccatcgattctctcagtcg

SEQ ID NO: 3660767 - DNA, 25 bp, Homo sapien
gattctctcagtcggcactaagtgc

SEQ ID NO: 3660768 - DNA, 25 bp, Homo sapien
tctctcagtcggcactaagtgctca

SEQ ID NO: 3660769 - DNA, 25 bp, Homo sapien
attcagaggcactaaaagaggctgt

SEQ ID NO: 3660770 - DNA, 25 bp, Homo sapien
aaaagcctgtgcctgattcagaggc

SEQ ID NO: 3660771 - DNA, 25 bp, Homo sapien
agtccccagcagaacctcccatatc

SEQ ID NO: 3660772 - DNA, 25 bp, Homo sapien
gcagagggcacgtggcaccagtccc

SEQ ID NO: 3660773 - DNA, 25 bp, Homo sapien
gcaaatggttgaagagaccaaaaac

SEQ ID NO: 3660774 - DNA, 25 bp, Homo sapien
caaatggttgaagagaccaaaaaca

SEQ ID NO: 3660775 - DNA, 25 bp, Homo sapien
aaagcaaatggttgaagagaccaaa

SEQ ID NO: 3660776 - DNA, 25 bp, Homo sapien
gatgtcctggccatttcgtaaccaa

SEQ ID NO: 3660777 - DNA, 25 bp, Homo sapien
cgtaaccaatttagagggagcagac

SEQ ID NO: 3660778 - DNA, 25 bp, Homo sapien
tgggtccagaacttgtctcttgagc

SEQ ID NO: 3660779 - DNA, 25 bp, Homo sapien
gaagctggagcatcatcaagtggac

SEQ ID NO: 3660780 - DNA, 25 bp, Homo sapien
tgttacaaatgcagtcggcatccct

SEQ ID NO: 3660781 - DNA, 25 bp, Homo sapien
ttacaaatgcagtcggcatccctga

SEQ ID NO: 3660782 - DNA, 25 bp, Homo sapien
actcatagggtaactttgtgatctg

SEQ ID NO: 3660783 - DNA, 25 bp, Homo sapien
atccctgaaacactcatagggtaac

SEQ ID NO: 3660784 - DNA, 25 bp, Homo sapien
acatgctttcgttctactgctacag

SEQ ID NO: 3660785 - DNA, 25 bp, Homo sapien
agaaaaacatgctttcgttctactg

SEQ ID NO: 3660786 - DNA, 25 bp, Homo sapien
tgtcccacatttgatgtgtcctttg

SEQ ID NO: 3660787 - DNA, 25 bp, Homo sapien
gtgtcctttgttcaaataccactca

SEQ ID NO: 3660788 - DNA, 25 bp, Homo sapien
taataaacttgattgcaccacccca

SEQ ID NO: 3660789 - DNA, 25 bp, Homo sapien
tgggagctgaagcacgaagaactat

SEQ ID NO: 3660790 - DNA, 25 bp, Homo sapien
gaagaactatagatcccatgccctg

SEQ ID NO: 3660791 - DNA, 25 bp, Homo sapien
ggagagctcagtgcacagcctagta

SEQ ID NO: 3660792 - DNA, 25 bp, Homo sapien
tgcaattagacagttgcccatttca

SEQ ID NO: 3660793 - DNA, 25 bp, Homo sapien
tgaatatatacagcttgactaactg

SEQ ID NO: 3660794 - DNA, 25 bp, Homo sapien
ccctctctccgtaagtgcaattaga

SEQ ID NO: 3660795 - DNA, 25 bp, Homo sapien
caagacgcaaggaagaggtaaaggt

SEQ ID NO: 3660796 - DNA, 25 bp, Homo sapien
ggttggccagaagtatagcagcatc

SEQ ID NO: 3660797 - DNA, 25 bp, Homo sapien
tttggttggccagaagtatagcagc

SEQ ID NO: 3660798 - DNA, 25 bp, Homo sapien
ttctcagtttggttggccagaagta

SEQ ID NO: 3660799 - DNA, 25 bp, Homo sapien
ctcagtttggttggccagaagtata

SEQ ID NO: 3660800 - DNA, 25 bp, Homo sapien
taagagttgtgacacaagtaaattg

SEQ ID NO: 3660801 - DNA, 25 bp, Homo sapien
agagttgtgacacaagtaaattgtc

SEQ ID NO: 3660802 - DNA, 25 bp, Homo sapien
attaagagttgtgacacaagtaaat

SEQ ID NO: 3660803 - DNA, 25 bp, Homo sapien
gagttgtgacacaagtaaattgtct

SEQ ID NO: 3660804 - DNA, 25 bp, Homo sapien
ggggaggcggacaccataaagctct

SEQ ID NO: 3660805 - DNA, 25 bp, Homo sapien
agggggaggcggacaccataaagct

SEQ ID NO: 3660806 - DNA, 25 bp, Homo sapien
ggaggcggacaccataaagctctct

SEQ ID NO: 3660807 - DNA, 25 bp, Homo sapien
ctagggggaggcggacaccataaag

SEQ ID NO: 3660808 - DNA, 25 bp, Homo sapien
gagctggaagaccactgggaaaaac

SEQ ID NO: 3660809 - DNA, 25 bp, Homo sapien
agctggaagaccactgggaaaaact

SEQ ID NO: 3660810 - DNA, 25 bp, Homo sapien
cactgacagtcagcacgaaatcttg

SEQ ID NO: 3660811 - DNA, 25 bp, Homo sapien
ttgagttactctgactgaaaggatg

SEQ ID NO: 3660812 - DNA, 25 bp, Homo sapien
aagaaatcccgagtcctcactgaca

SEQ ID NO: 3660813 - DNA, 25 bp, Homo sapien
caaagaaatcccgagtcctcactga

SEQ ID NO: 3660814 - DNA, 25 bp, Homo sapien
tataaatcctgatgcctgggggtca

SEQ ID NO: 3660815 - DNA, 25 bp, Homo sapien
cccaagagaactttcttattttgct

SEQ ID NO: 3660816 - DNA, 25 bp, Homo sapien
aaatgacctttgatagaaatgttgg

SEQ ID NO: 3660817 - DNA, 25 bp, Homo sapien
ggctttcaagtgagacccaaaggaa

SEQ ID NO: 3660818 - DNA, 25 bp, Homo sapien
caatttcatgtttcttgaccctttt

SEQ ID NO: 3660819 - DNA, 25 bp, Homo sapien
tctctcttattgttctttcatatgg

SEQ ID NO: 3660820 - DNA, 25 bp, Homo sapien
catgtttcttgacccttttgtataa

SEQ ID NO: 3660821 - DNA, 25 bp, Homo sapien
ctctcttattgttctttcatatgga

SEQ ID NO: 3660822 - DNA, 25 bp, Homo sapien
caatcacgtgcagctcaagtggagt

SEQ ID NO: 3660823 - DNA, 25 bp, Homo sapien
caggtatcacagagttcacttcggc

SEQ ID NO: 3660824 - DNA, 25 bp, Homo sapien
aagacgggacccattcaggatcaca

SEQ ID NO: 3660825 - DNA, 25 bp, Homo sapien
cacttcggctgcatggctttgcaga

SEQ ID NO: 3660826 - DNA, 25 bp, Homo sapien
agcatctaataccagacttccctta

SEQ ID NO: 3660827 - DNA, 25 bp, Homo sapien
ttttaagttcaacggtccagatgcc

SEQ ID NO: 3660828 - DNA, 25 bp, Homo sapien
tgccacctcgtggactgcctaaagt

SEQ ID NO: 3660829 - DNA, 25 bp, Homo sapien
cctaaaggcccttcgtcactggaga

SEQ ID NO: 3660830 - DNA, 25 bp, Homo sapien
tgaagggtagtgaccaccagttggt

SEQ ID NO: 3660831 - DNA, 25 bp, Homo sapien
tgtggatgaagggtagtgaccacca

SEQ ID NO: 3660832 - DNA, 25 bp, Homo sapien
caccagttggttctctatgtccttt

SEQ ID NO: 3660833 - DNA, 25 bp, Homo sapien
ggtagtgaccaccagttggttctct

SEQ ID NO: 3660834 - DNA, 25 bp, Homo sapien
ctagaaggagagatgccacacagca

SEQ ID NO: 3660835 - DNA, 25 bp, Homo sapien
gcatgagccataaatattgctttcc

SEQ ID NO: 3660836 - DNA, 25 bp, Homo sapien
tctggtctccaagcatgagccataa

SEQ ID NO: 3660837 - DNA, 25 bp, Homo sapien
gagagatgccacacagcatctggtc

SEQ ID NO: 3660838 - DNA, 25 bp, Homo sapien
tgcgctcctcgctttcagtttctct

SEQ ID NO: 3660839 - DNA, 25 bp, Homo sapien
cacggtcatagacagcaccatacaa

SEQ ID NO: 3660840 - DNA, 25 bp, Homo sapien
gcggctgcgctcctcgctttcagtt

SEQ ID NO: 3660841 - DNA, 25 bp, Homo sapien
caatcaggtatcaaataaaatacga

SEQ ID NO: 3660842 - DNA, 25 bp, Homo sapien
caaggcactagggttttcaccctgt

SEQ ID NO: 3660843 - DNA, 25 bp, Homo sapien
tggttgcaaaaggtatcgtgggact

SEQ ID NO: 3660844 - DNA, 25 bp, Homo sapien
tcagagatgttgtgtgccaaatgtc

SEQ ID NO: 3660845 - DNA, 25 bp, Homo sapien
tccctgggtcaaaacgcagtttcaa

SEQ ID NO: 3660846 - DNA, 25 bp, Homo sapien
ggctggtttatgatgtcttgacaca

SEQ ID NO: 3660847 - DNA, 25 bp, Homo sapien
tgatctaccaggtctactagcccaa

SEQ ID NO: 3660848 - DNA, 25 bp, Homo sapien
acagctactgggcatggctcccact

SEQ ID NO: 3660849 - DNA, 25 bp, Homo sapien
gcatagatgtttcttggaccgtggt

SEQ ID NO: 3660850 - DNA, 25 bp, Homo sapien
gctgcaaatcaacaacttcctgctg

SEQ ID NO: 3660851 - DNA, 25 bp, Homo sapien
gctctgactgcatcagaaagtgtga

SEQ ID NO: 3660852 - DNA, 25 bp, Homo sapien
tctgttctgagaagcagtgagctct

SEQ ID NO: 3660853 - DNA, 25 bp, Homo sapien
gagttccttctgagtggatctgttc

SEQ ID NO: 3660854 - DNA, 25 bp, Homo sapien
taatatagtgactcaagccagaggc

SEQ ID NO: 3660855 - DNA, 25 bp, Homo sapien
tattcagcgatggtatttctcacac

SEQ ID NO: 3660856 - DNA, 25 bp, Homo sapien
ggaccaacctacagacaactagcag

SEQ ID NO: 3660857 - DNA, 25 bp, Homo sapien
tgcgaacatgcaacagcaacttgga

SEQ ID NO: 3660858 - DNA, 25 bp, Homo sapien
ttcaagatcgggtacagcaacaacg

SEQ ID NO: 3660859 - DNA, 25 bp, Homo sapien
tatttcttagcatggagtcgcccag

SEQ ID NO: 3660860 - DNA, 25 bp, Homo sapien
tccagccatgacattagaggaggtg

SEQ ID NO: 3660861 - DNA, 25 bp, Homo sapien
caacggctcggactggaagatgatc

SEQ ID NO: 3660862 - DNA, 25 bp, Homo sapien
gctccaacggggaagactggatcac

SEQ ID NO: 3660863 - DNA, 25 bp, Homo sapien
aagatcgacgttagctccaacgggg

SEQ ID NO: 3660864 - DNA, 25 bp, Homo sapien
cgttagctccaacggggaagactgg

SEQ ID NO: 3660865 - DNA, 25 bp, Homo sapien
tcgacgttagctccaacggggaaga

SEQ ID NO: 3660866 - DNA, 25 bp, Homo sapien
ctgggcatacaattgatggagcaaa

SEQ ID NO: 3660867 - DNA, 25 bp, Homo sapien
agctgggcatacaattgatggagca

SEQ ID NO: 3660868 - DNA, 25 bp, Homo sapien
aagctgggcatacaattgatggagc

SEQ ID NO: 3660869 - DNA, 25 bp, Homo sapien
gctgggcatacaattgatggagcaa

SEQ ID NO: 3660870 - DNA, 25 bp, Homo sapien
aacctgctgcatcgagtcccttttg

SEQ ID NO: 3660871 - DNA, 25 bp, Homo sapien
aaatgctggagtgttaacctgctgc

SEQ ID NO: 3660872 - DNA, 25 bp, Homo sapien
ttttggacaatgctacttgccagtt

SEQ ID NO: 3660873 - DNA, 25 bp, Homo sapien
tattcaaacagaaccagatgggact

SEQ ID NO: 3660874 - DNA, 25 bp, Homo sapien
cagaatgtagtgtgtcctggtgtcc

SEQ ID NO: 3660875 - DNA, 25 bp, Homo sapien
tacgggtttatcaagtaagagagga

SEQ ID NO: 3660876 - DNA, 25 bp, Homo sapien
gcatagagatgtaatcagccattct

SEQ ID NO: 3660877 - DNA, 25 bp, Homo sapien
cacaggtcggcgtatgtcttaaaaa

SEQ ID NO: 3660878 - DNA, 25 bp, Homo sapien
aaagatcctgaacgtagccattgac

SEQ ID NO: 3660879 - DNA, 25 bp, Homo sapien
gcacatcattagaacccaggccatt

SEQ ID NO: 3660880 - DNA, 25 bp, Homo sapien
cagtgtactgcatcttctagggaga

SEQ ID NO: 3660881 - DNA, 25 bp, Homo sapien
actccgtgtatcagtggtgcgatca

SEQ ID NO: 3660882 - DNA, 25 bp, Homo sapien
tgtatcttctcatgccaggacccag

SEQ ID NO: 3660883 - DNA, 25 bp, Homo sapien
gggtctgctctgtatcttctcatgc

SEQ ID NO: 3660884 - DNA, 25 bp, Homo sapien
atcttctcatgccaggacccagact

SEQ ID NO: 3660885 - DNA, 25 bp, Homo sapien
tctgtatcttctcatgccaggaccc

SEQ ID NO: 3660886 - DNA, 25 bp, Homo sapien
gactacatggcctctcacaaagcat

SEQ ID NO: 3660887 - DNA, 25 bp, Homo sapien
gcaactgtagcaattcttctgcgca

SEQ ID NO: 3660888 - DNA, 25 bp, Homo sapien
tgtgaacagaacagatttacatcat

SEQ ID NO: 3660889 - DNA, 25 bp, Homo sapien
catcattctttggagttagacacaa

SEQ ID NO: 3660890 - DNA, 25 bp, Homo sapien
gcaacatcgagagatgagaccctgt

SEQ ID NO: 3660891 - DNA, 25 bp, Homo sapien
ggtggtagtggcatgagcctagagt

SEQ ID NO: 3660892 - DNA, 25 bp, Homo sapien
ccatcttgggcaacatcgagagatg

SEQ ID NO: 3660893 - DNA, 25 bp, Homo sapien
agatggcctattttgtacgtttgaa

SEQ ID NO: 3660894 - DNA, 25 bp, Homo sapien
catcgttgcagttgtctcctgagac

SEQ ID NO: 3660895 - DNA, 25 bp, Homo sapien
ttaatttagagagccttaagctgtc

SEQ ID NO: 3660896 - DNA, 25 bp, Homo sapien
gatatacacaaagctggcacacagt

SEQ ID NO: 3660897 - DNA, 25 bp, Homo sapien
taatgcttagttccatcaatgtcag

SEQ ID NO: 3660898 - DNA, 25 bp, Homo sapien
cctgaactctgccagtggtgtgagc

SEQ ID NO: 3660899 - DNA, 25 bp, Homo sapien
cagcaaggtcatcccagacttctga

SEQ ID NO: 3660900 - DNA, 25 bp, Homo sapien
cagcttcggatgagactgcagccca

SEQ ID NO: 3660901 - DNA, 25 bp, Homo sapien
gacttctgacctgtagacctgtgag

SEQ ID NO: 3660902 - DNA, 25 bp, Homo sapien
cagcaaggtccggacccaaggatga

SEQ ID NO: 3660903 - DNA, 25 bp, Homo sapien
cagcacccatgctattgattgatat

SEQ ID NO: 3660904 - DNA, 25 bp, Homo sapien
attgattgatatcctagtcacaggc

SEQ ID NO: 3660905 - DNA, 25 bp, Homo sapien
gatatcctagtcacaggcagcaagg

SEQ ID NO: 3660906 - DNA, 25 bp, Homo sapien
gagacttgatgtggagcaaatttct

SEQ ID NO: 3660907 - DNA, 25 bp, Homo sapien
acaatttgaaatgcgtcaatgtcac

SEQ ID NO: 3660908 - DNA, 25 bp, Homo sapien
gccgctcttcgaggaacaatttgaa

SEQ ID NO: 3660909 - DNA, 25 bp, Homo sapien
tgtatctaacacacgctaatgtcag

SEQ ID NO: 3660910 - DNA, 25 bp, Homo sapien
ttagtgataacgataaaacgtagca

SEQ ID NO: 3660911 - DNA, 25 bp, Homo sapien
gaatgaattgtgtgtcgtgcactca

SEQ ID NO: 3660912 - DNA, 25 bp, Homo sapien
tgtgtgtcgtgcactcagattagtg

SEQ ID NO: 3660913 - DNA, 25 bp, Homo sapien
tcgtgcactcagattagtgataacg

SEQ ID NO: 3660914 - DNA, 25 bp, Homo sapien
taggagtgactctggtatctcgttt

SEQ ID NO: 3660915 - DNA, 25 bp, Homo sapien
tcttgatgtaataatcggaggtaat

SEQ ID NO: 3660916 - DNA, 25 bp, Homo sapien
agtttgcttcaatagcatttcccag

SEQ ID NO: 3660917 - DNA, 25 bp, Homo sapien
taattgaagcgtgcacaaaccacag

SEQ ID NO: 3660918 - DNA, 25 bp, Homo sapien
tggtatttgcgacctctttgggttg

SEQ ID NO: 3660919 - DNA, 25 bp, Homo sapien
tttgcgacctctttgggttgtcctg

SEQ ID NO: 3660920 - DNA, 25 bp, Homo sapien
tatttgcgacctctttgggttgtcc

SEQ ID NO: 3660921 - DNA, 25 bp, Homo sapien
ttagttggtatttgcgacctctttg

SEQ ID NO: 3660922 - DNA, 25 bp, Homo sapien
taggcctaaatgtacacagggtgtc

SEQ ID NO: 3660923 - DNA, 25 bp, Homo sapien
tcttgtccccttgaaagctcgttgg

SEQ ID NO: 3660924 - DNA, 25 bp, Homo sapien
tagagctcccacctgatgcagtgac

SEQ ID NO: 3660925 - DNA, 25 bp, Homo sapien
tcctggccgctgtccaaagtggagc

SEQ ID NO: 3660926 - DNA, 25 bp, Homo sapien
aaattctttctggaggatgttgacc

SEQ ID NO: 3660927 - DNA, 25 bp, Homo sapien
gttgaccacctggagaactgaccat

SEQ ID NO: 3660928 - DNA, 25 bp, Homo sapien
tgttgaccacctggagaactgacca

SEQ ID NO: 3660929 - DNA, 25 bp, Homo sapien
ttctttctggaggatgttgaccacc

SEQ ID NO: 3660930 - DNA, 25 bp, Homo sapien
gcaatcttatacataattggcaact

SEQ ID NO: 3660931 - DNA, 25 bp, Homo sapien
tctaatgcttcaaaacattggccat

SEQ ID NO: 3660932 - DNA, 25 bp, Homo sapien
cagtgttggggccttcttctctcct

SEQ ID NO: 3660933 - DNA, 25 bp, Homo sapien
gctcttctaatgcttcaaaacattg

SEQ ID NO: 3660934 - DNA, 25 bp, Homo sapien
cattcattcagagctctactaagtt

SEQ ID NO: 3660935 - DNA, 25 bp, Homo sapien
caattcatagatagcttaggaagtg

SEQ ID NO: 3660936 - DNA, 25 bp, Homo sapien
cacattcattcagagctctactaag

SEQ ID NO: 3660937 - DNA, 25 bp, Homo sapien
tatggttgaaacaattcatagatag

SEQ ID NO: 3660938 - DNA, 25 bp, Homo sapien
cttgagaggagggttctcctgctct

SEQ ID NO: 3660939 - DNA, 25 bp, Homo sapien
tggcagttcgttgcaccttgagagg

SEQ ID NO: 3660940 - DNA, 25 bp, Homo sapien
tgattgtaagagtcagtggcttggc

SEQ ID NO: 3660941 - DNA, 25 bp, Homo sapien
tcttctctggttgattggcctgtat

SEQ ID NO: 3660942 - DNA, 25 bp, Homo sapien
ttccaaatgcctcttgcctgggtgt

SEQ ID NO: 3660943 - DNA, 25 bp, Homo sapien
catttggatcaggttccaaatgcct

SEQ ID NO: 3660944 - DNA, 25 bp, Homo sapien
gatcaggttccaaatgcctcttgcc

SEQ ID NO: 3660945 - DNA, 25 bp, Homo sapien
caaatgcctcttgcctgggtgtttg

SEQ ID NO: 3660946 - DNA, 25 bp, Homo sapien
ttttcgcaacggtaagtgacaggca

SEQ ID NO: 3660947 - DNA, 25 bp, Homo sapien
tcttttctccaagacgggctgagga

SEQ ID NO: 3660948 - DNA, 25 bp, Homo sapien
ggatgcaggcgacttgagacacaaa

SEQ ID NO: 3660949 - DNA, 25 bp, Homo sapien
agaagcgttcctctcggatccaggc

SEQ ID NO: 3660950 - DNA, 25 bp, Homo sapien
cctggaaattggctttggtgtgtgt

SEQ ID NO: 3660951 - DNA, 25 bp, Homo sapien
ttggctttggtgtgtgttgccctac

SEQ ID NO: 3660952 - DNA, 25 bp, Homo sapien
caacgggtccagaaacaagccggat

SEQ ID NO: 3660953 - DNA, 25 bp, Homo sapien
tccgcggctccaacgggtccagaaa

SEQ ID NO: 3660954 - DNA, 25 bp, Homo sapien
ttccttcccgcggagatccctgcag

SEQ ID NO: 3660955 - DNA, 25 bp, Homo sapien
acgcgaccggggcgcagactcccag

SEQ ID NO: 3660956 - DNA, 25 bp, Homo sapien
ccttccttcccgcggagatccctgc

SEQ ID NO: 3660957 - DNA, 25 bp, Homo sapien
gaccggggcgcagactcccagcgcc

SEQ ID NO: 3660958 - DNA, 25 bp, Homo sapien
cgcgccccttcctccgacgcccgca

SEQ ID NO: 3660959 - DNA, 25 bp, Homo sapien
gcgccccttcctccgacgcccgcac

SEQ ID NO: 3660960 - DNA, 25 bp, Homo sapien
cagaggaacgggcaccaaatctcgg

SEQ ID NO: 3660961 - DNA, 25 bp, Homo sapien
gggaaacaatgaagcctccgcggcg

SEQ ID NO: 3660962 - DNA, 25 bp, Homo sapien
ggcaccaaatctcgggaaacaatga

SEQ ID NO: 3660963 - DNA, 25 bp, Homo sapien
acaatgaagcctccgcggcgcgcag

SEQ ID NO: 3660964 - DNA, 25 bp, Homo sapien
tgcagcacttctcggaaaaccctcg

SEQ ID NO: 3660965 - DNA, 25 bp, Homo sapien
tcggtgaccgcaacctgtttcttcc

SEQ ID NO: 3660966 - DNA, 25 bp, Homo sapien
ttctccggggcctgatcggtgaccg

SEQ ID NO: 3660967 - DNA, 25 bp, Homo sapien
ttttcgcatctacaaacgcttcctg

SEQ ID NO: 3660968 - DNA, 25 bp, Homo sapien
cctaaatctgatgatgccgctcgcc

SEQ ID NO: 3660969 - DNA, 25 bp, Homo sapien
ctggaccgaggtcgctccgggtcac

SEQ ID NO: 3660970 - DNA, 25 bp, Homo sapien
cctgtcaacctgccaggtcctgaga

SEQ ID NO: 3660971 - DNA, 25 bp, Homo sapien
gctcagagctatccaaacgggcgct

SEQ ID NO: 3660972 - DNA, 25 bp, Homo sapien
gagaaagctggcaaaagcgctcagc

SEQ ID NO: 3660973 - DNA, 25 bp, Homo sapien
gcctggcgggtctaggctggaaaat

SEQ ID NO: 3660974 - DNA, 25 bp, Homo sapien
gagccattcccttcgggaaagacaa

SEQ ID NO: 3660975 - DNA, 25 bp, Homo sapien
tgcacgatccggtggctttatttgc

SEQ ID NO: 3660976 - DNA, 25 bp, Homo sapien
gtttagctacatccagtccacgccc

SEQ ID NO: 3660977 - DNA, 25 bp, Homo sapien
gaatgtgagtcaaatctgagtatgt

SEQ ID NO: 3660978 - DNA, 25 bp, Homo sapien
gccaggctagatacaatagcacagt

SEQ ID NO: 3660979 - DNA, 25 bp, Homo sapien
tactaactctgtgaaatcacaaagg

SEQ ID NO: 3660980 - DNA, 25 bp, Homo sapien
aaggcaacgatttcctcattaccca

SEQ ID NO: 3660981 - DNA, 25 bp, Homo sapien
cttcaattaaggcaacgatttcctc

SEQ ID NO: 3660982 - DNA, 25 bp, Homo sapien
tgtagatgcgaccttcaattaaggc

SEQ ID NO: 3660983 - DNA, 25 bp, Homo sapien
ctggacctttgtagatgcgaccttc

SEQ ID NO: 3660984 - DNA, 25 bp, Homo sapien
aagcaattgctgtccacctttaccc

SEQ ID NO: 3660985 - DNA, 25 bp, Homo sapien
aattgctgtccacctttacccctca

SEQ ID NO: 3660986 - DNA, 25 bp, Homo sapien
gaagcaattgctgtccacctttacc

SEQ ID NO: 3660987 - DNA, 25 bp, Homo sapien
gcaattgctgtccacctttacccct

SEQ ID NO: 3660988 - DNA, 25 bp, Homo sapien
ttaataagatgagctccaactccca

SEQ ID NO: 3660989 - DNA, 25 bp, Homo sapien
aataagatgagctccaactcccaaa

SEQ ID NO: 3660990 - DNA, 25 bp, Homo sapien
taagatgagctccaactcccaaata

SEQ ID NO: 3660991 - DNA, 25 bp, Homo sapien
cttcattaataagatgagctccaac

SEQ ID NO: 3660992 - DNA, 25 bp, Homo sapien
ctctttttggattctgccacttttc

SEQ ID NO: 3660993 - DNA, 25 bp, Homo sapien
tccctctttttggattctgccactt

SEQ ID NO: 3660994 - DNA, 25 bp, Homo sapien
cttgcccaattcctcctatttctct

SEQ ID NO: 3660995 - DNA, 25 bp, Homo sapien
tccttccctctttttggattctgcc

SEQ ID NO: 3660996 - DNA, 25 bp, Homo sapien
tgaagaaggacctgtacatgaggaa

SEQ ID NO: 3660997 - DNA, 25 bp, Homo sapien
gaaggacctgtacatgaggaagctc

SEQ ID NO: 3660998 - DNA, 25 bp, Homo sapien
cctgtacatgaggaagctcaataaa

SEQ ID NO: 3660999 - DNA, 25 bp, Homo sapien
tgaatgaagaaggacctgtacatga

SEQ ID NO: 3661000 - DNA, 25 bp, Homo sapien
tttctgttcctttacacagtaggtg

SEQ ID NO: 3661001 - DNA, 25 bp, Homo sapien
ctgttcctttacacagtaggtgccc

SEQ ID NO: 3661002 - DNA, 25 bp, Homo sapien
tgtttctgttcctttacacagtagg

SEQ ID NO: 3661003 - DNA, 25 bp, Homo sapien
aatgtttctgttcctttacacagta

SEQ ID NO: 3661004 - DNA, 25 bp, Homo sapien
gactgacatccctgaagagcttagg

SEQ ID NO: 3661005 - DNA, 25 bp, Homo sapien
ttgactgacatccctgaagagctta

SEQ ID NO: 3661006 - DNA, 25 bp, Homo sapien
caggtgatgttgagggtgatgggat

SEQ ID NO: 3661007 - DNA, 25 bp, Homo sapien
agagcttagggtaaatcctgtttga

SEQ ID NO: 3661008 - DNA, 25 bp, Homo sapien
cattgctggttgcttctgatccatg

SEQ ID NO: 3661009 - DNA, 25 bp, Homo sapien
atggagaaacggcaagggtacaaag

SEQ ID NO: 3661010 - DNA, 25 bp, Homo sapien
ctcatggagaaacggcaagggtaca

SEQ ID NO: 3661011 - DNA, 25 bp, Homo sapien
aaagatttcaggagttcattgctgg

SEQ ID NO: 3661012 - DNA, 25 bp, Homo sapien
agcggccattgcctgccatccagaa

SEQ ID NO: 3661013 - DNA, 25 bp, Homo sapien
cattgcctgccatccagaaagtgat

SEQ ID NO: 3661014 - DNA, 25 bp, Homo sapien
cctgccatccagaaagtgatctggg

SEQ ID NO: 3661015 - DNA, 25 bp, Homo sapien
cttctagcggccattgcctgccatc

SEQ ID NO: 3661016 - DNA, 25 bp, Homo sapien
cacttgctctgtccgctctggtctg

SEQ ID NO: 3661017 - DNA, 25 bp, Homo sapien
agctttcagcaagggatggcaactg

SEQ ID NO: 3661018 - DNA, 25 bp, Homo sapien
gggatggcaactgccagaagtctcc

SEQ ID NO: 3661019 - DNA, 25 bp, Homo sapien
gtctggagacggctttattcctctc

SEQ ID NO: 3661020 - DNA, 25 bp, Homo sapien
ggtattcaacggcacaaagacttcc

SEQ ID NO: 3661021 - DNA, 25 bp, Homo sapien
ccatcaacgtcagaaggtcttggag

SEQ ID NO: 3661022 - DNA, 25 bp, Homo sapien
gagaccagatttggtattcaacggc

SEQ ID NO: 3661023 - DNA, 25 bp, Homo sapien
ttcggcactgtaatagagaccagat

SEQ ID NO: 3661024 - DNA, 25 bp, Homo sapien
cagctgcctcttcggggcacctggg

SEQ ID NO: 3661025 - DNA, 25 bp, Homo sapien
ctcttcggggcacctgggttccaag

SEQ ID NO: 3661026 - DNA, 25 bp, Homo sapien
ctgcctcttcggggcacctgggttc

SEQ ID NO: 3661027 - DNA, 25 bp, Homo sapien
ccagctgcctcttcggggcacctgg

SEQ ID NO: 3661028 - DNA, 25 bp, Homo sapien
tctcttagcagtaggtttctccatg

SEQ ID NO: 3661029 - DNA, 25 bp, Homo sapien
catgtgatgtcttgtcctgatggtt

SEQ ID NO: 3661030 - DNA, 25 bp, Homo sapien
tcttttaaggatcagcctaactccc

SEQ ID NO: 3661031 - DNA, 25 bp, Homo sapien
gatggtttattttgttggctgcctc

SEQ ID NO: 3661032 - DNA, 25 bp, Homo sapien
taagtatgtcaaatgaacccgaaag

SEQ ID NO: 3661033 - DNA, 25 bp, Homo sapien
gaaagccagcttgctttcgagccat

SEQ ID NO: 3661034 - DNA, 25 bp, Homo sapien
caaaaactaagtatgtcaaatgaac

SEQ ID NO: 3661035 - DNA, 25 bp, Homo sapien
aaatgaacccgaaagccagcttgct

SEQ ID NO: 3661036 - DNA, 25 bp, Homo sapien
ctcagggcattagaggacaccccag

SEQ ID NO: 3661037 - DNA, 25 bp, Homo sapien
gacaccccagagacatgaggagaag

SEQ ID NO: 3661038 - DNA, 25 bp, Homo sapien
aggacaccccagagacatgaggaga

SEQ ID NO: 3661039 - DNA, 25 bp, Homo sapien
ctcctcagggcattagaggacaccc

SEQ ID NO: 3661040 - DNA, 25 bp, Homo sapien
tatcatatctggactttggagggaa

SEQ ID NO: 3661041 - DNA, 25 bp, Homo sapien
ttccttgcagagagtggccatccag

SEQ ID NO: 3661042 - DNA, 25 bp, Homo sapien
tcagcccaagcacctctcagatgtg

SEQ ID NO: 3661043 - DNA, 25 bp, Homo sapien
cacttgttgtaggagctgtccctct

SEQ ID NO: 3661044 - DNA, 25 bp, Homo sapien
gaacctcgtcctaatgatgaatcag

SEQ ID NO: 3661045 - DNA, 25 bp, Homo sapien
gttcatgattcattggcagggtttt

SEQ ID NO: 3661046 - DNA, 25 bp, Homo sapien
tcccatgacggatgcgccagtgtgg

SEQ ID NO: 3661047 - DNA, 25 bp, Homo sapien
gcagggttttgacatagaaagttcc

SEQ ID NO: 3661048 - DNA, 25 bp, Homo sapien
gctcctgagataactctggcactca

SEQ ID NO: 3661049 - DNA, 25 bp, Homo sapien
tatcccaggattggtaacccagctc

SEQ ID NO: 3661050 - DNA, 25 bp, Homo sapien
tctgcaaatgtaatgcctgttctct

SEQ ID NO: 3661051 - DNA, 25 bp, Homo sapien
gggcgattgcagagggtatcccagg

SEQ ID NO: 3661052 - DNA, 25 bp, Homo sapien
gagtaaacggagtcatcccatgggt

SEQ ID NO: 3661053 - DNA, 25 bp, Homo sapien
cacaggtgtagaggcactgaaaaca

SEQ ID NO: 3661054 - DNA, 25 bp, Homo sapien
tgaatcaaccgaatgctctggaagg

SEQ ID NO: 3661055 - DNA, 25 bp, Homo sapien
tctggatgatacagccgtctgctaa

SEQ ID NO: 3661056 - DNA, 25 bp, Homo sapien
ttttgtctgtcaacagatccttcca

SEQ ID NO: 3661057 - DNA, 25 bp, Homo sapien
tttgtctgtcaacagatccttccat

SEQ ID NO: 3661058 - DNA, 25 bp, Homo sapien
gcttctacctcgtctttcactttga

SEQ ID NO: 3661059 - DNA, 25 bp, Homo sapien
ttgacaccaagggggtaaatcttca

SEQ ID NO: 3661060 - DNA, 25 bp, Homo sapien
cctcgtctttcactttgatcttcct

SEQ ID NO: 3661061 - DNA, 25 bp, Homo sapien
gctgacattagcttctacctcgtct

SEQ ID NO: 3661062 - DNA, 25 bp, Homo sapien
gtgcctttctggttctaaaacactc

SEQ ID NO: 3661063 - DNA, 25 bp, Homo sapien
atgtcacagtgcctttctggttcta

SEQ ID NO: 3661064 - DNA, 25 bp, Homo sapien
tctggttctaaaacactctcaggtt

SEQ ID NO: 3661065 - DNA, 25 bp, Homo sapien
tctaaaacactctcaggtttcgcca

SEQ ID NO: 3661066 - DNA, 25 bp, Homo sapien
ggattccatccctttgaagccatca

SEQ ID NO: 3661067 - DNA, 25 bp, Homo sapien
tggattccatccctttgaagccatc

SEQ ID NO: 3661068 - DNA, 25 bp, Homo sapien
aaatccccagacagttaacctgagg

SEQ ID NO: 3661069 - DNA, 25 bp, Homo sapien
tgatggaaggaatcccaaggagctt

SEQ ID NO: 3661070 - DNA, 25 bp, Homo sapien
agctttacgtctgtgttgtctctga

SEQ ID NO: 3661071 - DNA, 25 bp, Homo sapien
gccaaatccccagacagttaacctg

SEQ ID NO: 3661072 - DNA, 25 bp, Homo sapien
tacaatggcacgatgattcaggaga

SEQ ID NO: 3661073 - DNA, 25 bp, Homo sapien
catgtccagctgatgctttcaggat

SEQ ID NO: 3661074 - DNA, 25 bp, Homo sapien
caggcatcccagcattttcgaggtg

SEQ ID NO: 3661075 - DNA, 25 bp, Homo sapien
gaagaccttgtactcaccacaaatg

SEQ ID NO: 3661076 - DNA, 25 bp, Homo sapien
taatagtctggtcccaagagtgtcc

SEQ ID NO: 3661077 - DNA, 25 bp, Homo sapien
gtctaacatttggtaggatcacccc

SEQ ID NO: 3661078 - DNA, 25 bp, Homo sapien
gaaactagtaatagtctggtcccaa

SEQ ID NO: 3661079 - DNA, 25 bp, Homo sapien
caagtctaacatttggtaggatcac

SEQ ID NO: 3661080 - DNA, 25 bp, Homo sapien
ggagtggccagcattaggaactgtt

SEQ ID NO: 3661081 - DNA, 25 bp, Homo sapien
gcagtagatttggagtggccagcat

SEQ ID NO: 3661082 - DNA, 25 bp, Homo sapien
gctgtgtggcagtagatttggagtg

SEQ ID NO: 3661083 - DNA, 25 bp, Homo sapien
gtggccagcattaggaactgttcaa

SEQ ID NO: 3661084 - DNA, 25 bp, Homo sapien
gaaatgcgttaagggaacaggaata

SEQ ID NO: 3661085 - DNA, 25 bp, Homo sapien
gggtttaatgacctggtgtctgcca

SEQ ID NO: 3661086 - DNA, 25 bp, Homo sapien
gtgtctgccattggccacggtcctg

SEQ ID NO: 3661087 - DNA, 25 bp, Homo sapien
tcttgctgtgtcaagctgtaggaca

SEQ ID NO: 3661088 - DNA, 25 bp, Homo sapien
gaacataaggcacattccctctcca

SEQ ID NO: 3661089 - DNA, 25 bp, Homo sapien
agcaagcagaagctctaatgaccct

SEQ ID NO: 3661090 - DNA, 25 bp, Homo sapien
ctgtgcaagagagaacataaggcac

SEQ ID NO: 3661091 - DNA, 25 bp, Homo sapien
ccacaaataccattcagagcaagca

SEQ ID NO: 3661092 - DNA, 25 bp, Homo sapien
gtctgagaagggctctgttcttgtg

SEQ ID NO: 3661093 - DNA, 25 bp, Homo sapien
ctctgttcttgtgatattggtcatt

SEQ ID NO: 3661094 - DNA, 25 bp, Homo sapien
gttcttgtgatattggtcattgcca

SEQ ID NO: 3661095 - DNA, 25 bp, Homo sapien
gctgtctgagaagggctctgttctt

SEQ ID NO: 3661096 - DNA, 25 bp, Homo sapien
ggcaggaacttctagctaaccaggc

SEQ ID NO: 3661097 - DNA, 25 bp, Homo sapien
aatgagttacactcgcagaggtgcc

SEQ ID NO: 3661098 - DNA, 25 bp, Homo sapien
tgcaaaatacaagggcccaggagag

SEQ ID NO: 3661099 - DNA, 25 bp, Homo sapien
tatgaaaggaagcaccgttttgtcc

SEQ ID NO: 3661100 - DNA, 25 bp, Homo sapien
cctctccaccaaagtaacttctgga

SEQ ID NO: 3661101 - DNA, 25 bp, Homo sapien
ctcaggcgacttcccgctttgagct

SEQ ID NO: 3661102 - DNA, 25 bp, Homo sapien
tcctacagccctcaggcgacttccc

SEQ ID NO: 3661103 - DNA, 25 bp, Homo sapien
gacttcccgctttgagcttgcatcc

SEQ ID NO: 3661104 - DNA, 25 bp, Homo sapien
ttaagtgactctcccatgaaaccac

SEQ ID NO: 3661105 - DNA, 25 bp, Homo sapien
tgttctcttgctttccgccacctgg

SEQ ID NO: 3661106 - DNA, 25 bp, Homo sapien
gggatccacgatcccactcttggct

SEQ ID NO: 3661107 - DNA, 25 bp, Homo sapien
tctcccatgaaaccaccttgcttgt

SEQ ID NO: 3661108 - DNA, 25 bp, Homo sapien
tgaagaatcaacgaggactgagccc

SEQ ID NO: 3661109 - DNA, 25 bp, Homo sapien
catttagaggatgcttaatggattc

SEQ ID NO: 3661110 - DNA, 25 bp, Homo sapien
tgagcccgtgccaggtgaagaactg

SEQ ID NO: 3661111 - DNA, 25 bp, Homo sapien
gttactgacgggagctgaagaatca

SEQ ID NO: 3661112 - DNA, 25 bp, Homo sapien
ctgggtggcagtgagcctctgccag

SEQ ID NO: 3661113 - DNA, 25 bp, Homo sapien
gtaccagaatgaatggagactgacc

SEQ ID NO: 3661114 - DNA, 25 bp, Homo sapien
ggccaccagtcattctgcatgcctg

SEQ ID NO: 3661115 - DNA, 25 bp, Homo sapien
tggtaccagaatgaatggagactga

SEQ ID NO: 3661116 - DNA, 25 bp, Homo sapien
tatcatttgcaaaacactaactgcc

SEQ ID NO: 3661117 - DNA, 25 bp, Homo sapien
caaactacaatcatttgcagtatca

SEQ ID NO: 3661118 - DNA, 25 bp, Homo sapien
aatcatttgcagtatcatttgcaaa

SEQ ID NO: 3661119 - DNA, 25 bp, Homo sapien
ccttttctcataaacacaaactaca

SEQ ID NO: 3661120 - DNA, 25 bp, Homo sapien
tggatgacaggtaaagagtgcgatt

SEQ ID NO: 3661121 - DNA, 25 bp, Homo sapien
taaagagtgcgattttcctgccaaa

SEQ ID NO: 3661122 - DNA, 25 bp, Homo sapien
aaatcccccccatgggcgagaagct

SEQ ID NO: 3661123 - DNA, 25 bp, Homo sapien
ccccatgggcgagaagctatttgtg

SEQ ID NO: 3661124 - DNA, 25 bp, Homo sapien
taggaatgcaaggtagaggcaaccc

SEQ ID NO: 3661125 - DNA, 25 bp, Homo sapien
caagagactgtgctgaatcgggatg

SEQ ID NO: 3661126 - DNA, 25 bp, Homo sapien
ccttccaggtacaagggcagtgtct

SEQ ID NO: 3661127 - DNA, 25 bp, Homo sapien
catgctgtaagaccaaacccaggaa

SEQ ID NO: 3661128 - DNA, 25 bp, Homo sapien
ttccatgaatataggaacctgaatc

SEQ ID NO: 3661129 - DNA, 25 bp, Homo sapien
ttttgtttccatgaatataggaacc

SEQ ID NO: 3661130 - DNA, 25 bp, Homo sapien
tgtttccatgaatataggaacctga

SEQ ID NO: 3661131 - DNA, 25 bp, Homo sapien
tttttttgtttccatgaatatagga

SEQ ID NO: 3661132 - DNA, 25 bp, Homo sapien
gctttaaccagcaggcgttgtgcta

SEQ ID NO: 3661133 - DNA, 25 bp, Homo sapien
tgtgctacagctgactgtgaaggat

SEQ ID NO: 3661134 - DNA, 25 bp, Homo sapien
ggcgttgtgctacagctgactgtga

SEQ ID NO: 3661135 - DNA, 25 bp, Homo sapien
ccagcaggcgttgtgctacagctga

SEQ ID NO: 3661136 - DNA, 25 bp, Homo sapien
cacagactgctgtggtccactgtac

SEQ ID NO: 3661137 - DNA, 25 bp, Homo sapien
gagccacatggagaacaggtaggcc

SEQ ID NO: 3661138 - DNA, 25 bp, Homo sapien
gttccagacaatgaccacgactcca

SEQ ID NO: 3661139 - DNA, 25 bp, Homo sapien
aacaacaggagtaatcgttccagac

SEQ ID NO: 3661140 - DNA, 25 bp, Homo sapien
cattctaaattctgcaggtgatttt

SEQ ID NO: 3661141 - DNA, 25 bp, Homo sapien
ctggtgggtgttgtttagaatttgc

SEQ ID NO: 3661142 - DNA, 25 bp, Homo sapien
gcttcgctaattctggtgggtgttg

SEQ ID NO: 3661143 - DNA, 25 bp, Homo sapien
gatgaaatgttgcttcgctaattct

SEQ ID NO: 3661144 - DNA, 25 bp, Homo sapien
tgcaggagtctgatggatgtctaac

SEQ ID NO: 3661145 - DNA, 25 bp, Homo sapien
catagtaaaaagtccagcagggcaa

SEQ ID NO: 3661146 - DNA, 25 bp, Homo sapien
tagtgaccatcagcccagctttgac

SEQ ID NO: 3661147 - DNA, 25 bp, Homo sapien
gtaatagcatatcccatctctgagg

SEQ ID NO: 3661148 - DNA, 25 bp, Homo sapien
gaggcagaggagtaaagtaagacca

SEQ ID NO: 3661149 - DNA, 25 bp, Homo sapien
atggagacacttgcatctgctttgg

SEQ ID NO: 3661150 - DNA, 25 bp, Homo sapien
gacacttgcatctgctttggagctg

SEQ ID NO: 3661151 - DNA, 25 bp, Homo sapien
taaagtaagaccagggaaatggaga

SEQ ID NO: 3661152 - DNA, 25 bp, Homo sapien
tcctccttctgatcccaccacctcc

SEQ ID NO: 3661153 - DNA, 25 bp, Homo sapien
accacctcctcagtgtcccaccgag

SEQ ID NO: 3661154 - DNA, 25 bp, Homo sapien
tcctcagtgtcccaccgagatttcc

SEQ ID NO: 3661155 - DNA, 25 bp, Homo sapien
tccttctacctctatccacacttag

SEQ ID NO: 3661156 - DNA, 25 bp, Homo sapien
tggatcctagcatggacctcgactc

SEQ ID NO: 3661157 - DNA, 25 bp, Homo sapien
tttcatgtggatcctagcatggacc

SEQ ID NO: 3661158 - DNA, 25 bp, Homo sapien
tagtctttcatgtggatcctagcat

SEQ ID NO: 3661159 - DNA, 25 bp, Homo sapien
agtctgtggtagtctttcatgtgga

SEQ ID NO: 3661160 - DNA, 25 bp, Homo sapien
atcggaatcccctggtgcttcttgg

SEQ ID NO: 3661161 - DNA, 25 bp, Homo sapien
catcggaatcccctggtgcttcttg

SEQ ID NO: 3661162 - DNA, 25 bp, Homo sapien
taacatcggaatcccctggtgcttc

SEQ ID NO: 3661163 - DNA, 25 bp, Homo sapien
ttttaacatcggaatcccctggtgc

SEQ ID NO: 3661164 - DNA, 25 bp, Homo sapien
caaacaaaatttcagcttgggaaca

SEQ ID NO: 3661165 - DNA, 25 bp, Homo sapien
taagccctgtctctcaagggtttct

SEQ ID NO: 3661166 - DNA, 25 bp, Homo sapien
acttggcaaacaaaatttcagcttg

SEQ ID NO: 3661167 - DNA, 25 bp, Homo sapien
aactgcccaactgcatttaattggg

SEQ ID NO: 3661168 - DNA, 25 bp, Homo sapien
tgtgtgagactcacaccccacagct

SEQ ID NO: 3661169 - DNA, 25 bp, Homo sapien
agtgtcccagatactctgtacctcc

SEQ ID NO: 3661170 - DNA, 25 bp, Homo sapien
tgtgtccagtgtcccagatactctg

SEQ ID NO: 3661171 - DNA, 25 bp, Homo sapien
tctgagcatgcaaaactgatgctgc

SEQ ID NO: 3661172 - DNA, 25 bp, Homo sapien
agaacttggaacaaccatctctgag

SEQ ID NO: 3661173 - DNA, 25 bp, Homo sapien
cgtttttgtccgttgcggagctgtc

SEQ ID NO: 3661174 - DNA, 25 bp, Homo sapien
tgtcatttaaagtggccgccacctt

SEQ ID NO: 3661175 - DNA, 25 bp, Homo sapien
aacataatgaggagagcccgttttt

SEQ ID NO: 3661176 - DNA, 25 bp, Homo sapien
ataatgaggagagcccgtttttgtc

SEQ ID NO: 3661177 - DNA, 25 bp, Homo sapien
ctgtcagttctgaggaccgcagcac

SEQ ID NO: 3661178 - DNA, 25 bp, Homo sapien
accgtcccacgaagaaggaaagcag

SEQ ID NO: 3661179 - DNA, 25 bp, Homo sapien
gcagcaccgtcccacgaagaaggaa

SEQ ID NO: 3661180 - DNA, 25 bp, Homo sapien
tcagttctgaggaccgcagcaccgt

SEQ ID NO: 3661181 - DNA, 25 bp, Homo sapien
catgaatgcagacccgattccatgg

SEQ ID NO: 3661182 - DNA, 25 bp, Homo sapien
aatgcagacccgattccatggtttt

SEQ ID NO: 3661183 - DNA, 25 bp, Homo sapien
gaatgcagacccgattccatggttt

SEQ ID NO: 3661184 - DNA, 25 bp, Homo sapien
tgaatgcagacccgattccatggtt

SEQ ID NO: 3661185 - DNA, 25 bp, Homo sapien
ggccagtgctcaaaatattgccctt

SEQ ID NO: 3661186 - DNA, 25 bp, Homo sapien
aatattgcccttgtgaaggtggccc

SEQ ID NO: 3661187 - DNA, 25 bp, Homo sapien
gctcaaaatattgcccttgtgaagg

SEQ ID NO: 3661188 - DNA, 25 bp, Homo sapien
ttaaattggccagtgctcaaaatat

SEQ ID NO: 3661189 - DNA, 25 bp, Homo sapien
gataacccccaatcactttcagaaa

SEQ ID NO: 3661190 - DNA, 25 bp, Homo sapien
gatctaacatcatgagcatataaaa

SEQ ID NO: 3661191 - DNA, 25 bp, Homo sapien
ctagactggggagataacccccaat

SEQ ID NO: 3661192 - DNA, 25 bp, Homo sapien
tctaacatcatgagcatataaaaac

SEQ ID NO: 3661193 - DNA, 25 bp, Homo sapien
catgtccgcccatggaagtgcaggt

SEQ ID NO: 3661194 - DNA, 25 bp, Homo sapien
aaaaggattcttgcactgtggcggt

SEQ ID NO: 3661195 - DNA, 25 bp, Homo sapien
gaagtgcaggtgttcttgaaaagga

SEQ ID NO: 3661196 - DNA, 25 bp, Homo sapien
gcggtggaggcttctcgtatgtact

SEQ ID NO: 3661197 - DNA, 25 bp, Homo sapien
tgtgtaggcccattggatattctgt

SEQ ID NO: 3661198 - DNA, 25 bp, Homo sapien
gcacagctgcttgtgtaggcccatt

SEQ ID NO: 3661199 - DNA, 25 bp, Homo sapien
gtattgtacacatagcactgtggca

SEQ ID NO: 3661200 - DNA, 25 bp, Homo sapien
cactgtggcaaacttgcttgtttca

SEQ ID NO: 3661201 - DNA, 25 bp, Homo sapien
ctctgtgtgcgttgttacctgttcc

SEQ ID NO: 3661202 - DNA, 25 bp, Homo sapien
ttgttacctgttccctctttgaatc

SEQ ID NO: 3661203 - DNA, 25 bp, Homo sapien
tgtgtgcgttgttacctgttccctc

SEQ ID NO: 3661204 - DNA, 25 bp, Homo sapien
gcgttgttacctgttccctctttga

SEQ ID NO: 3661205 - DNA, 25 bp, Homo sapien
ccagtgacaaccaccggggccgctc

SEQ ID NO: 3661206 - DNA, 25 bp, Homo sapien
agtgacaaccaccggggccgctcat

SEQ ID NO: 3661207 - DNA, 25 bp, Homo sapien
cagtgacaaccaccggggccgctca

SEQ ID NO: 3661208 - DNA, 25 bp, Homo sapien
tctggagattcagagctatgccgtg

SEQ ID NO: 3661209 - DNA, 25 bp, Homo sapien
gctatgccgtggaagaccttgtcag

SEQ ID NO: 3661210 - DNA, 25 bp, Homo sapien
gattcagagctatgccgtggaagac

SEQ ID NO: 3661211 - DNA, 25 bp, Homo sapien
aagaccttgtcagagcaccaggcca

SEQ ID NO: 3661212 - DNA, 25 bp, Homo sapien
ctcgtcctgacaccgagatgggctg

SEQ ID NO: 3661213 - DNA, 25 bp, Homo sapien
tgtcacccagggcaaacaaaatgct

SEQ ID NO: 3661214 - DNA, 25 bp, Homo sapien
tcttagaagtttgcttgcgtgtggc

SEQ ID NO: 3661215 - DNA, 25 bp, Homo sapien
catggttcctgtaaccatgatgtca

SEQ ID NO: 3661216 - DNA, 25 bp, Homo sapien
tcacaaaagcgctttctctccttct

SEQ ID NO: 3661217 - DNA, 25 bp, Homo sapien
cacaaaagcgctttctctccttctg

SEQ ID NO: 3661218 - DNA, 25 bp, Homo sapien
acaaaagcgctttctctccttctgc

SEQ ID NO: 3661219 - DNA, 25 bp, Homo sapien
catttaaggcatatgggaaagcatt

SEQ ID NO: 3661220 - DNA, 25 bp, Homo sapien
tacctttcaaagtcagctcgcggag

SEQ ID NO: 3661221 - DNA, 25 bp, Homo sapien
gaagtacttgcaattcctgcccaac

SEQ ID NO: 3661222 - DNA, 25 bp, Homo sapien
ctcgcggagtttagccaagagctgt

SEQ ID NO: 3661223 - DNA, 25 bp, Homo sapien
caatgaggccgggtattttcagtgg

SEQ ID NO: 3661224 - DNA, 25 bp, Homo sapien
ctgacatatgttccttgcctagagg

SEQ ID NO: 3661225 - DNA, 25 bp, Homo sapien
gaacagcagacagagcctaaatatg

SEQ ID NO: 3661226 - DNA, 25 bp, Homo sapien
ccatgtaaaaggtaacttggcggtg

SEQ ID NO: 3661227 - DNA, 25 bp, Homo sapien
gaagaagcatgttcggaggtcccca

SEQ ID NO: 3661228 - DNA, 25 bp, Homo sapien
tgcgttatcttgtcaaccagggtgt

SEQ ID NO: 3661229 - DNA, 25 bp, Homo sapien
ccacgcctggtgtcttggaatttcg

SEQ ID NO: 3661230 - DNA, 25 bp, Homo sapien
cagggtgtcaattaaaccgggcttg

SEQ ID NO: 3661231 - DNA, 25 bp, Homo sapien
agcctggtagctttcatgtccacag

SEQ ID NO: 3661232 - DNA, 25 bp, Homo sapien
cctggtagctttcatgtccacagcc

SEQ ID NO: 3661233 - DNA, 25 bp, Homo sapien
tagcctggtagctttcatgtccaca

SEQ ID NO: 3661234 - DNA, 25 bp, Homo sapien
gcctggtagctttcatgtccacagc

SEQ ID NO: 3661235 - DNA, 25 bp, Homo sapien
actgaccactgcaatctttgggacc

SEQ ID NO: 3661236 - DNA, 25 bp, Homo sapien
tggaagggccttcctttagatgcat

SEQ ID NO: 3661237 - DNA, 25 bp, Homo sapien
agaagcattgtggttgcagtagcac

SEQ ID NO: 3661238 - DNA, 25 bp, Homo sapien
ttactgagtagcacactggaagggc

SEQ ID NO: 3661239 - DNA, 25 bp, Homo sapien
cagtccgaggaagaagctatagtaa

SEQ ID NO: 3661240 - DNA, 25 bp, Homo sapien
tcattcacccaagttcccaagggct

SEQ ID NO: 3661241 - DNA, 25 bp, Homo sapien
ttccaaggccaccataatatctgtc

SEQ ID NO: 3661242 - DNA, 25 bp, Homo sapien
gtcactctaatttcattcacccaag

SEQ ID NO: 3661243 - DNA, 25 bp, Homo sapien
gcgtggatggacgtaaatgcttgca

SEQ ID NO: 3661244 - DNA, 25 bp, Homo sapien
gcttgcattcctgtacagtttcttt

SEQ ID NO: 3661245 - DNA, 25 bp, Homo sapien
tcggatgcacacagaaggatctctt

SEQ ID NO: 3661246 - DNA, 25 bp, Homo sapien
cacaagctttgtacttcatcagaca

SEQ ID NO: 3661247 - DNA, 25 bp, Homo sapien
tcattccgaagctgcctgagcacaa

SEQ ID NO: 3661248 - DNA, 25 bp, Homo sapien
gctgcctgagcacaagggggcgaat

SEQ ID NO: 3661249 - DNA, 25 bp, Homo sapien
ttccgaagctgcctgagcacaaggg

SEQ ID NO: 3661250 - DNA, 25 bp, Homo sapien
ctgcctgagcacaagggggcgaatt

SEQ ID NO: 3661251 - DNA, 25 bp, Homo sapien
gggagctcagtctccattgtgttaa

SEQ ID NO: 3661252 - DNA, 25 bp, Homo sapien
gagacactgtatttgtcacagcaag

SEQ ID NO: 3661253 - DNA, 25 bp, Homo sapien
cacatcagagtcaataggcaggagc

SEQ ID NO: 3661254 - DNA, 25 bp, Homo sapien
ctcaaactgagtatgtagggtaggg

SEQ ID NO: 3661255 - DNA, 25 bp, Homo sapien
gccaagaggatcatacagttcaaga

SEQ ID NO: 3661256 - DNA, 25 bp, Homo sapien
aattaatttcgatgttgaagaagcc

SEQ ID NO: 3661257 - DNA, 25 bp, Homo sapien
cagttcaagaggcatgggtttattc

SEQ ID NO: 3661258 - DNA, 25 bp, Homo sapien
aacaagggatttcaaaccggagatg

SEQ ID NO: 3661259 - DNA, 25 bp, Homo sapien
tcagaattcggactggctccctgtg

SEQ ID NO: 3661260 - DNA, 25 bp, Homo sapien
gaaggactgcacctcgttagagctc

SEQ ID NO: 3661261 - DNA, 25 bp, Homo sapien
ttcgatggcatgctgatatggagag

SEQ ID NO: 3661262 - DNA, 25 bp, Homo sapien
cttcagaattcggactggctccctg

SEQ ID NO: 3661263 - DNA, 25 bp, Homo sapien
gctaaacttgggtacacagacacaa

SEQ ID NO: 3661264 - DNA, 25 bp, Homo sapien
tgtgtttacataagctcatgactcc

SEQ ID NO: 3661265 - DNA, 25 bp, Homo sapien
gagcaaattataacctagggctttc

SEQ ID NO: 3661266 - DNA, 25 bp, Homo sapien
tacgctagaggttttctagagcaaa

SEQ ID NO: 3661267 - DNA, 25 bp, Homo sapien
ggctgtgctgtgcattttagcatct

SEQ ID NO: 3661268 - DNA, 25 bp, Homo sapien
tgtgctgtgcattttagcatctgcc

SEQ ID NO: 3661269 - DNA, 25 bp, Homo sapien
tgccaggagaattacaatgtaaggc

SEQ ID NO: 3661270 - DNA, 25 bp, Homo sapien
ccaggagaattacaatgtaaggcat

SEQ ID NO: 3661271 - DNA, 25 bp, Homo sapien
tgtatctaagcaggtataagtggtt

SEQ ID NO: 3661272 - DNA, 25 bp, Homo sapien
aggatgtaagtaagcgtggtgtatc

SEQ ID NO: 3661273 - DNA, 25 bp, Homo sapien
gacaagaaagaaggccacggagatg

SEQ ID NO: 3661274 - DNA, 25 bp, Homo sapien
gatgggcaggagtcaaatgatgaaa

SEQ ID NO: 3661275 - DNA, 25 bp, Homo sapien
gaagacattcgggatgctcttgggt

SEQ ID NO: 3661276 - DNA, 25 bp, Homo sapien
gacttaggaataaactacccagcaa

SEQ ID NO: 3661277 - DNA, 25 bp, Homo sapien
ctgacttaggaataaactacccagc

SEQ ID NO: 3661278 - DNA, 25 bp, Homo sapien
accaggaagacattcgggatgctct

SEQ ID NO: 3661279 - DNA, 25 bp, Homo sapien
tttgcactggaggactcaccgtgtc

SEQ ID NO: 3661280 - DNA, 25 bp, Homo sapien
ccagagttttgcactggaggactca

SEQ ID NO: 3661281 - DNA, 25 bp, Homo sapien
ccgtgtcctcgctttgatgtcttga

SEQ ID NO: 3661282 - DNA, 25 bp, Homo sapien
tcagaagacctaggccaatccagag

SEQ ID NO: 3661283 - DNA, 25 bp, Homo sapien
cctgttggccaatatctgtagttac

SEQ ID NO: 3661284 - DNA, 25 bp, Homo sapien
cagaaatagagctacaagaagctgt

SEQ ID NO: 3661285 - DNA, 25 bp, Homo sapien
cattctccgggctgggtgattcttt

SEQ ID NO: 3661286 - DNA, 25 bp, Homo sapien
taaggattggagtgacctgttggcc

SEQ ID NO: 3661287 - DNA, 25 bp, Homo sapien
caacattttcttcaagcaagccctt

SEQ ID NO: 3661288 - DNA, 25 bp, Homo sapien
tttcttcaagcaagcccttaaccat

SEQ ID NO: 3661289 - DNA, 25 bp, Homo sapien
cattttcttcaagcaagcccttaac

SEQ ID NO: 3661290 - DNA, 25 bp, Homo sapien
ttttcttcaagcaagcccttaacca

SEQ ID NO: 3661291 - DNA, 25 bp, Homo sapien
tctttctcaatagagctggaatctc

SEQ ID NO: 3661292 - DNA, 25 bp, Homo sapien
ctgtgtactcttcctagcttggtct

SEQ ID NO: 3661293 - DNA, 25 bp, Homo sapien
tgccaaacaattgccctgttgcatg

SEQ ID NO: 3661294 - DNA, 25 bp, Homo sapien
aggccgcgtgattcgctgtgtactc

SEQ ID NO: 3661295 - DNA, 25 bp, Homo sapien
tcttgtgtagagcaggccttgggtc

SEQ ID NO: 3661296 - DNA, 25 bp, Homo sapien
tcatcaggatgtagcgataaagtgg

SEQ ID NO: 3661297 - DNA, 25 bp, Homo sapien
ggtgagtatccgttacagatggcca

SEQ ID NO: 3661298 - DNA, 25 bp, Homo sapien
gataaagtggcccttctcaggcaca

SEQ ID NO: 3661299 - DNA, 25 bp, Homo sapien
gctgtgttgcagagacaatgctcac

SEQ ID NO: 3661300 - DNA, 25 bp, Homo sapien
catttatctgtaaggtccactgcag

SEQ ID NO: 3661301 - DNA, 25 bp, Homo sapien
caagaatatgtgtcattcctaggtt

SEQ ID NO: 3661302 - DNA, 25 bp, Homo sapien
tttgacaagaatatgtgtcattcct

SEQ ID NO: 3661303 - DNA, 25 bp, Homo sapien
tgaggaagatgtgaaccaaatggtg

SEQ ID NO: 3661304 - DNA, 25 bp, Homo sapien
gaagatgtgaaccaaatggtgatgt

SEQ ID NO: 3661305 - DNA, 25 bp, Homo sapien
aatacacaccagttcttgttcaaca

SEQ ID NO: 3661306 - DNA, 25 bp, Homo sapien
agacttcagaccctttcctgagaga

SEQ ID NO: 3661307 - DNA, 25 bp, Homo sapien
aagatgcttgttggcccatattcag

SEQ ID NO: 3661308 - DNA, 25 bp, Homo sapien
agagccagcacgatgtgggaatgca

SEQ ID NO: 3661309 - DNA, 25 bp, Homo sapien
tctgtgtgttgtaagttgccctctg

SEQ ID NO: 3661310 - DNA, 25 bp, Homo sapien
ttttcagaatcaggtgaagactgga

SEQ ID NO: 3661311 - DNA, 25 bp, Homo sapien
catagcgtcccgtggtgtcattgca

SEQ ID NO: 3661312 - DNA, 25 bp, Homo sapien
tcctgagcaaattcctatcctgtgc

SEQ ID NO: 3661313 - DNA, 25 bp, Homo sapien
tgtcattgcacccataataacaggc

SEQ ID NO: 3661314 - DNA, 25 bp, Homo sapien
aactgggctattgctctcgtgcagc

SEQ ID NO: 3661315 - DNA, 25 bp, Homo sapien
gtttcatcttaatgagggctagttc

SEQ ID NO: 3661316 - DNA, 25 bp, Homo sapien
tcatcttaatgagggctagttctac

SEQ ID NO: 3661317 - DNA, 25 bp, Homo sapien
tgagggctagttctactcctattac

SEQ ID NO: 3661318 - DNA, 25 bp, Homo sapien
tcttaatgagggctagttctactcc

SEQ ID NO: 3661319 - DNA, 25 bp, Homo sapien
ctatcatgtggacggtttccaggcc

SEQ ID NO: 3661320 - DNA, 25 bp, Homo sapien
ggtgagtcctatgattgatttaggc

SEQ ID NO: 3661321 - DNA, 25 bp, Homo sapien
tggacggtttccaggccatgatgca

SEQ ID NO: 3661322 - DNA, 25 bp, Homo sapien
tgatttaggctatcatgtggacggt

SEQ ID NO: 3661323 - DNA, 25 bp, Homo sapien
tacatgctgataatgaacctgcaca

SEQ ID NO: 3661324 - DNA, 25 bp, Homo sapien
gcatcatgcaatacatgctgataat

SEQ ID NO: 3661325 - DNA, 25 bp, Homo sapien
tgctgataatgaacctgcacatgta

SEQ ID NO: 3661326 - DNA, 25 bp, Homo sapien
catgcaatacatgctgataatgaac

SEQ ID NO: 3661327 - DNA, 25 bp, Homo sapien
gaggtcgctgtgagcggatcacgcc

SEQ ID NO: 3661328 - DNA, 25 bp, Homo sapien
ggtcgctgtgagcggatcacgccat

SEQ ID NO: 3661329 - DNA, 25 bp, Homo sapien
cagaggtcgctgtgagcggatcacg

SEQ ID NO: 3661330 - DNA, 25 bp, Homo sapien
gcagaggtcgctgtgagcggatcac

SEQ ID NO: 3661331 - DNA, 25 bp, Homo sapien
gtttacgcctgttccttccaggtca

SEQ ID NO: 3661332 - DNA, 25 bp, Homo sapien
cgcctgttccttccaggtcactttt

SEQ ID NO: 3661333 - DNA, 25 bp, Homo sapien
tttacgcctgttccttccaggtcac

SEQ ID NO: 3661334 - DNA, 25 bp, Homo sapien
tacgcctgttccttccaggtcactt

SEQ ID NO: 3661335 - DNA, 25 bp, Homo sapien
ctggatgcaaatgcaaagcccaact

SEQ ID NO: 3661336 - DNA, 25 bp, Homo sapien
aaatgcaaagcccaactggatcctc

SEQ ID NO: 3661337 - DNA, 25 bp, Homo sapien
tgcaaagcccaactggatcctccat

SEQ ID NO: 3661338 - DNA, 25 bp, Homo sapien
gatgcaaatgcaaagcccaactgga

SEQ ID NO: 3661339 - DNA, 25 bp, Homo sapien
ggtcaatggaggtgtgacttagggc

SEQ ID NO: 3661340 - DNA, 25 bp, Homo sapien
gctgtctgtatttggcatcggttca

SEQ ID NO: 3661341 - DNA, 25 bp, Homo sapien
ttggcatcggttcagttctttaaaa

SEQ ID NO: 3661342 - DNA, 25 bp, Homo sapien
tttatcctctgatgtatcccgtctt

SEQ ID NO: 3661343 - DNA, 25 bp, Homo sapien
agagctctcgacatgacaatgtggc

SEQ ID NO: 3661344 - DNA, 25 bp, Homo sapien
ttcattccaagaatctctacccatt

SEQ ID NO: 3661345 - DNA, 25 bp, Homo sapien
ccattttacttccccagagctctcg

SEQ ID NO: 3661346 - DNA, 25 bp, Homo sapien
agctctcgacatgacaatgtggctt

SEQ ID NO: 3661347 - DNA, 25 bp, Homo sapien
gattggaataatgccagcacaggac

SEQ ID NO: 3661348 - DNA, 25 bp, Homo sapien
aactcgtcggattggaataatgcca

SEQ ID NO: 3661349 - DNA, 25 bp, Homo sapien
tggctttctgatgccccaactcgtc

SEQ ID NO: 3661350 - DNA, 25 bp, Homo sapien
tcttcccgtgggagttggtaatata

SEQ ID NO: 3661351 - DNA, 25 bp, Homo sapien
tacctccctttgtgcgatttgatgg

SEQ ID NO: 3661352 - DNA, 25 bp, Homo sapien
tgtccaccctgaaacacattgtgtg

SEQ ID NO: 3661353 - DNA, 25 bp, Homo sapien
gagtacaaccattcctgtgatcacg

SEQ ID NO: 3661354 - DNA, 25 bp, Homo sapien
tcacgaccggagagaaattgtccac

SEQ ID NO: 3661355 - DNA, 25 bp, Homo sapien
gggctctggttcataaccaaacgta

SEQ ID NO: 3661356 - DNA, 25 bp, Homo sapien
cattaagtgtggagctaaatagttc

SEQ ID NO: 3661357 - DNA, 25 bp, Homo sapien
aacgtattgatcagagcctgctgga

SEQ ID NO: 3661358 - DNA, 25 bp, Homo sapien
tgtgtatgccgaaatggagtttgcc

SEQ ID NO: 3661359 - DNA, 25 bp, Homo sapien
gaaaggcaactgagaagagctttgc

SEQ ID NO: 3661360 - DNA, 25 bp, Homo sapien
tattttacagtgtgcgtaggcccac

SEQ ID NO: 3661361 - DNA, 25 bp, Homo sapien
ccagaaatctggaataaggcttgca

SEQ ID NO: 3661362 - DNA, 25 bp, Homo sapien
gcagattgctgaacattctctgagt

SEQ ID NO: 3661363 - DNA, 25 bp, Homo sapien
cttcaaagagacccaggataaatgg

SEQ ID NO: 3661364 - DNA, 25 bp, Homo sapien
caaagagacccaggataaatggtcc

SEQ ID NO: 3661365 - DNA, 25 bp, Homo sapien
aagagacccaggataaatggtccat

SEQ ID NO: 3661366 - DNA, 25 bp, Homo sapien
tcaaagagacccaggataaatggtc

SEQ ID NO: 3661367 - DNA, 25 bp, Homo sapien
gaaaacagttgtagcttgagggcaa

SEQ ID NO: 3661368 - DNA, 25 bp, Homo sapien
gcgacctgatgtccgagcctgagaa

SEQ ID NO: 3661369 - DNA, 25 bp, Homo sapien
cctttgcaggaaatagacatgcttc

SEQ ID NO: 3661370 - DNA, 25 bp, Homo sapien
ttcagagggattgtcaagtggccag

SEQ ID NO: 3661371 - DNA, 25 bp, Homo sapien
gatcccttcaactttccttctcatc

SEQ ID NO: 3661372 - DNA, 25 bp, Homo sapien
catcctttgctgctggttcccccac

SEQ ID NO: 3661373 - DNA, 25 bp, Homo sapien
cttgatcccttcaactttccttctc

SEQ ID NO: 3661374 - DNA, 25 bp, Homo sapien
tcctttgctgctggttcccccacat

SEQ ID NO: 3661375 - DNA, 25 bp, Homo sapien
tcagggtggcggtcaggtctgcctg

SEQ ID NO: 3661376 - DNA, 25 bp, Homo sapien
gcctcagggtggcggtcaggtctgc

SEQ ID NO: 3661377 - DNA, 25 bp, Homo sapien
ctcagggtggcggtcaggtctgcct

SEQ ID NO: 3661378 - DNA, 25 bp, Homo sapien
gggtggcggtcaggtctgcctgctg

SEQ ID NO: 3661379 - DNA, 25 bp, Homo sapien
aactttgggctaccactgctgtggg

SEQ ID NO: 3661380 - DNA, 25 bp, Homo sapien
cttgttcttgaacatccacgtcctc

SEQ ID NO: 3661381 - DNA, 25 bp, Homo sapien
ggatgactcagaactttcctccaca

SEQ ID NO: 3661382 - DNA, 25 bp, Homo sapien
ggttgggcctctgacctagcaggaa

SEQ ID NO: 3661383 - DNA, 25 bp, Homo sapien
tacaccagccatgacgtacttatta

SEQ ID NO: 3661384 - DNA, 25 bp, Homo sapien
acgaggagcggccatgaatctgcaa

SEQ ID NO: 3661385 - DNA, 25 bp, Homo sapien
taagctctgcagatcttagacaaca

SEQ ID NO: 3661386 - DNA, 25 bp, Homo sapien
gacgtacttattattctcagctctg

SEQ ID NO: 3661387 - DNA, 25 bp, Homo sapien
aacgcgtgacaagtctttggccatg

SEQ ID NO: 3661388 - DNA, 25 bp, Homo sapien
gggtgagtcccttagccattctgaa

SEQ ID NO: 3661389 - DNA, 25 bp, Homo sapien
gatgagagtgcatgctcctccttaa

SEQ ID NO: 3661390 - DNA, 25 bp, Homo sapien
cacattccgatgtcttgactaggga

SEQ ID NO: 3661391 - DNA, 25 bp, Homo sapien
tcgaggagaagatctcagccgcgga

SEQ ID NO: 3661392 - DNA, 25 bp, Homo sapien
caggaccagatggctcgaggagaag

SEQ ID NO: 3661393 - DNA, 25 bp, Homo sapien
agaagatctcagccgcggaggctgc

SEQ ID NO: 3661394 - DNA, 25 bp, Homo sapien
gaccagatggctcgaggagaagatc

SEQ ID NO: 3661395 - DNA, 25 bp, Homo sapien
tgagcacactcatgtggggggttgg

SEQ ID NO: 3661396 - DNA, 25 bp, Homo sapien
tgaataaggtcatcaggttgtgggt

SEQ ID NO: 3661397 - DNA, 25 bp, Homo sapien
gaataaggtcatcaggttgtgggtg

SEQ ID NO: 3661398 - DNA, 25 bp, Homo sapien
gcaggggactcatggtggcacgcac

SEQ ID NO: 3661399 - DNA, 25 bp, Homo sapien
cagcaggggactcatggtggcacgc

SEQ ID NO: 3661400 - DNA, 25 bp, Homo sapien
caccacggggtgatggaaggaggca

SEQ ID NO: 3661401 - DNA, 25 bp, Homo sapien
gctggcccctcggcgggacaggaca

SEQ ID NO: 3661402 - DNA, 25 bp, Homo sapien
ctgatgggtctgaacctctccaggg

SEQ ID NO: 3661403 - DNA, 25 bp, Homo sapien
tgatgggtctgaacctctccaggga

SEQ ID NO: 3661404 - DNA, 25 bp, Homo sapien
gatgggtctgaacctctccagggac

SEQ ID NO: 3661405 - DNA, 25 bp, Homo sapien
atgggtctgaacctctccagggaca

SEQ ID NO: 3661406 - DNA, 25 bp, Homo sapien
gtccctccaccatctgtcatggtcc

SEQ ID NO: 3661407 - DNA, 25 bp, Homo sapien
gggagcctttcatctgccggtacac

SEQ ID NO: 3661408 - DNA, 25 bp, Homo sapien
cctccaccatctgtcatggtcctgg

SEQ ID NO: 3661409 - DNA, 25 bp, Homo sapien
agcctttcatctgccggtacacggt

SEQ ID NO: 3661410 - DNA, 25 bp, Homo sapien
ccagctggtatcagtctgatctcct

SEQ ID NO: 3661411 - DNA, 25 bp, Homo sapien
accagtgaagttttggatgttaaat

SEQ ID NO: 3661412 - DNA, 25 bp, Homo sapien
ttgaacttcagaagaccagctggta

SEQ ID NO: 3661413 - DNA, 25 bp, Homo sapien
cagcgcccgggcttgaacttcagaa

SEQ ID NO: 3661414 - DNA, 25 bp, Homo sapien
aacttgggcccaaggtcccatggca

SEQ ID NO: 3661415 - DNA, 25 bp, Homo sapien
tgggcttgggcactacaacttgggc

SEQ ID NO: 3661416 - DNA, 25 bp, Homo sapien
tggcagcacagacaagaccgaattg

SEQ ID NO: 3661417 - DNA, 25 bp, Homo sapien
gaccgaattgcatggagatttcctg

SEQ ID NO: 3661418 - DNA, 25 bp, Homo sapien
tcagccgcttttcatcatggacctg

SEQ ID NO: 3661419 - DNA, 25 bp, Homo sapien
ggtctgtgtctctaacacatcacag

SEQ ID NO: 3661420 - DNA, 25 bp, Homo sapien
tcccttggtctgtgtctctaacaca

SEQ ID NO: 3661421 - DNA, 25 bp, Homo sapien
aaattgccctggttgttgaaggaga

SEQ ID NO: 3661422 - DNA, 25 bp, Homo sapien
cttgtggccttgccgttcctcagca

SEQ ID NO: 3661423 - DNA, 25 bp, Homo sapien
ttgtggccttgccgttcctcagcat

SEQ ID NO: 3661424 - DNA, 25 bp, Homo sapien
agggagggagcctgctcttgtggcc

SEQ ID NO: 3661425 - DNA, 25 bp, Homo sapien
tcttgtggccttgccgttcctcagc

SEQ ID NO: 3661426 - DNA, 25 bp, Homo sapien
agtcaactacaggagggccgctgat

SEQ ID NO: 3661427 - DNA, 25 bp, Homo sapien
gctggcatagtcagcagcttccccg

SEQ ID NO: 3661428 - DNA, 25 bp, Homo sapien
gagaattctccatgggtgcctccaa

SEQ ID NO: 3661429 - DNA, 25 bp, Homo sapien
tgtctcagtcctgtttgaggcatag

SEQ ID NO: 3661430 - DNA, 25 bp, Homo sapien
gctgtggaggcctctttgagtcaag

SEQ ID NO: 3661431 - DNA, 25 bp, Homo sapien
cacgcaccacgttgtgccagcgaag

SEQ ID NO: 3661432 - DNA, 25 bp, Homo sapien
gaatcgggattttctgctaatctgg

SEQ ID NO: 3661433 - DNA, 25 bp, Homo sapien
tggccggaagtcctgattcagaact

SEQ ID NO: 3661434 - DNA, 25 bp, Homo sapien
taagggttcagggaagagtcctaga

SEQ ID NO: 3661435 - DNA, 25 bp, Homo sapien
aagagtcctagagtgagggcatctg

SEQ ID NO: 3661436 - DNA, 25 bp, Homo sapien
tagagtgagggcatctgtctcattc

SEQ ID NO: 3661437 - DNA, 25 bp, Homo sapien
gggcatctgtctcattctgcacccc

SEQ ID NO: 3661438 - DNA, 25 bp, Homo sapien
catacggtcttctagcgtggagccc

SEQ ID NO: 3661439 - DNA, 25 bp, Homo sapien
aggattgcggaaaacagctcacacg

SEQ ID NO: 3661440 - DNA, 25 bp, Homo sapien
cgtggagcccacattgcagcttttg

SEQ ID NO: 3661441 - DNA, 25 bp, Homo sapien
tcttcctgggaaggcggtgaactgt

SEQ ID NO: 3661442 - DNA, 25 bp, Homo sapien
agacaccggcgcactgcctgctttc

SEQ ID NO: 3661443 - DNA, 25 bp, Homo sapien
tccagccagttgtaggttcttttct

SEQ ID NO: 3661444 - DNA, 25 bp, Homo sapien
cacctccagccagttgtaggttctt

SEQ ID NO: 3661445 - DNA, 25 bp, Homo sapien
catcgtccctgcttccggtggagga

SEQ ID NO: 3661446 - DNA, 25 bp, Homo sapien
agaaggcccgcacctatcggcggcg

SEQ ID NO: 3661447 - DNA, 25 bp, Homo sapien
tgggcacttgattccagccagcaca

SEQ ID NO: 3661448 - DNA, 25 bp, Homo sapien
agcagctccgctcttagaaggcccg

SEQ ID NO: 3661449 - DNA, 25 bp, Homo sapien
cctgggcacttgattccagccagca

SEQ ID NO: 3661450 - DNA, 25 bp, Homo sapien
ttaatttaaagccagtccatagtct

SEQ ID NO: 3661451 - DNA, 25 bp, Homo sapien
cacgggcttccctgaaatgttcttg

SEQ ID NO: 3661452 - DNA, 25 bp, Homo sapien
cagcttctgagggacgaagaccgca

SEQ ID NO: 3661453 - DNA, 25 bp, Homo sapien
gggaacctgtcagcttgtcaatcct

SEQ ID NO: 3661454 - DNA, 25 bp, Homo sapien
ccctctcatctcctccattctgcat

SEQ ID NO: 3661455 - DNA, 25 bp, Homo sapien
tccctctcatctcctccattctgca

SEQ ID NO: 3661456 - DNA, 25 bp, Homo sapien
ctccctctcatctcctccattctgc

SEQ ID NO: 3661457 - DNA, 25 bp, Homo sapien
caggttgccccatggggtgccccat

SEQ ID NO: 3661458 - DNA, 25 bp, Homo sapien
tctgccacccaagaagccacggcct

SEQ ID NO: 3661459 - DNA, 25 bp, Homo sapien
actgcaggtgccctctgtggattca

SEQ ID NO: 3661460 - DNA, 25 bp, Homo sapien
tgcctaaggccctggtgtcctggag

SEQ ID NO: 3661461 - DNA, 25 bp, Homo sapien
gcctagaggtggctgtcatagctcc

SEQ ID NO: 3661462 - DNA, 25 bp, Homo sapien
tgtgcctagaggtggctgtcatagc

SEQ ID NO: 3661463 - DNA, 25 bp, Homo sapien
gaggtggctgtcatagctccaccca

SEQ ID NO: 3661464 - DNA, 25 bp, Homo sapien
tagaggtggctgtcatagctccacc

SEQ ID NO: 3661465 - DNA, 25 bp, Homo sapien
gaagaggctagacagccacagactc

SEQ ID NO: 3661466 - DNA, 25 bp, Homo sapien
gccacagactctcagcgtctggaag

SEQ ID NO: 3661467 - DNA, 25 bp, Homo sapien
atgcagcaggcccatctcccgtgat

SEQ ID NO: 3661468 - DNA, 25 bp, Homo sapien
gtgatcccacgcccctggagaagag

SEQ ID NO: 3661469 - DNA, 25 bp, Homo sapien
cacgggcgcttctcctccattgcgc

SEQ ID NO: 3661470 - DNA, 25 bp, Homo sapien
cgggcgcttctcctccattgcgcct

SEQ ID NO: 3661471 - DNA, 25 bp, Homo sapien
acgggcgcttctcctccattgcgcc

SEQ ID NO: 3661472 - DNA, 25 bp, Homo sapien
gccccactccggatgggtctgttta

SEQ ID NO: 3661473 - DNA, 25 bp, Homo sapien
ttctgaagaagataaccgctttttc

SEQ ID NO: 3661474 - DNA, 25 bp, Homo sapien
ccctttctgagctccgatttaaatc

SEQ ID NO: 3661475 - DNA, 25 bp, Homo sapien
gcacattgtatctgcgctggcctgc

SEQ ID NO: 3661476 - DNA, 25 bp, Homo sapien
ctcaaagtgggaagtttgcaaacac

SEQ ID NO: 3661477 - DNA, 25 bp, Homo sapien
tagtccattaagacaatatacagtc

SEQ ID NO: 3661478 - DNA, 25 bp, Homo sapien
tatacagtcttacagttggaagtct

SEQ ID NO: 3661479 - DNA, 25 bp, Homo sapien
gacatcattctcactcttagtccat

SEQ ID NO: 3661480 - DNA, 25 bp, Homo sapien
tctgtttcttaatcacgtgcggcgg

SEQ ID NO: 3661481 - DNA, 25 bp, Homo sapien
tgttaccagtgtacgcgcagtgacc

SEQ ID NO: 3661482 - DNA, 25 bp, Homo sapien
aacattttcgggtcccacagcggtg

SEQ ID NO: 3661483 - DNA, 25 bp, Homo sapien
gatgccgcgctcctaagtagttctg

SEQ ID NO: 3661484 - DNA, 25 bp, Homo sapien
tactcatgagttgtccgcggcttgg

SEQ ID NO: 3661485 - DNA, 25 bp, Homo sapien
tcacctgaagtggaggatgacgtgc

SEQ ID NO: 3661486 - DNA, 25 bp, Homo sapien
gagtcggtcatcctattacagaagc

SEQ ID NO: 3661487 - DNA, 25 bp, Homo sapien
aaataacggatgcttcatgtcgcgc

SEQ ID NO: 3661488 - DNA, 25 bp, Homo sapien
tcttccctagcaagtgtgcagatct

SEQ ID NO: 3661489 - DNA, 25 bp, Homo sapien
gaaccttgccttgtccaagccagga

SEQ ID NO: 3661490 - DNA, 25 bp, Homo sapien
ttcttttgtacgtttgctgagatcc

SEQ ID NO: 3661491 - DNA, 25 bp, Homo sapien
gcagatctctgccttgataacgcgt

SEQ ID NO: 3661492 - DNA, 25 bp, Homo sapien
taaagcgcctgtgatgttctcctga

SEQ ID NO: 3661493 - DNA, 25 bp, Homo sapien
cggatatgagcggttcgcaggcacc

SEQ ID NO: 3661494 - DNA, 25 bp, Homo sapien
tcctgactggcgtgggcttcctgcc

SEQ ID NO: 3661495 - DNA, 25 bp, Homo sapien
ggttcgcaggcaccagtctttaaag

SEQ ID NO: 3661496 - DNA, 25 bp, Homo sapien
ctctttagagagctcaagcaggcca

SEQ ID NO: 3661497 - DNA, 25 bp, Homo sapien
cacaagcgcattgggtgttgctcca

SEQ ID NO: 3661498 - DNA, 25 bp, Homo sapien
gtaaagtagctcacctcaggacaca

SEQ ID NO: 3661499 - DNA, 25 bp, Homo sapien
cagcaagacacgagggcagttgttt

SEQ ID NO: 3661500 - DNA, 25 bp, Homo sapien
ccagagagtcatttgcatagaggtc

SEQ ID NO: 3661501 - DNA, 25 bp, Homo sapien
tgcactgtcggtagcgatttctgaa

SEQ ID NO: 3661502 - DNA, 25 bp, Homo sapien
ggcatcagatgcactgtcggtagcg

SEQ ID NO: 3661503 - DNA, 25 bp, Homo sapien
cgatttctgaaagtccagagagtca

SEQ ID NO: 3661504 - DNA, 25 bp, Homo sapien
aagataaatgccgtgtctgtgttgc

SEQ ID NO: 3661505 - DNA, 25 bp, Homo sapien
gataaatgccgtgtctgtgttgcat

SEQ ID NO: 3661506 - DNA, 25 bp, Homo sapien
atgccgtgtctgtgttgcatataaa

SEQ ID NO: 3661507 - DNA, 25 bp, Homo sapien
taaatgccgtgtctgtgttgcatat

SEQ ID NO: 3661508 - DNA, 25 bp, Homo sapien
ctggcttctttctaccaaagtgact

SEQ ID NO: 3661509 - DNA, 25 bp, Homo sapien
gcttctttctaccaaagtgacttag

SEQ ID NO: 3661510 - DNA, 25 bp, Homo sapien
gcctcgagtaggaggtgtgggcact

SEQ ID NO: 3661511 - DNA, 25 bp, Homo sapien
cagaaatgaagcctcgagtaggagg

SEQ ID NO: 3661512 - DNA, 25 bp, Homo sapien
tatagaagatgttactgtgttcagt

SEQ ID NO: 3661513 - DNA, 25 bp, Homo sapien
taatatagaagatgttactgtgttc

SEQ ID NO: 3661514 - DNA, 25 bp, Homo sapien
tagaagatgttactgtgttcagttt

SEQ ID NO: 3661515 - DNA, 25 bp, Homo sapien
gaagatgttactgtgttcagtttta

SEQ ID NO: 3661516 - DNA, 25 bp, Homo sapien
gaagttgtgtcctcgtggcctgagc

SEQ ID NO: 3661517 - DNA, 25 bp, Homo sapien
ttcactggccctgcaattttacaca

SEQ ID NO: 3661518 - DNA, 25 bp, Homo sapien
gatgaaggtgatacgtaacccctgg

SEQ ID NO: 3661519 - DNA, 25 bp, Homo sapien
cacatgccgctcaactccttggaaa

SEQ ID NO: 3661520 - DNA, 25 bp, Homo sapien
gaggttgccactgcttatgtcctcc

SEQ ID NO: 3661521 - DNA, 25 bp, Homo sapien
ttttgaggttgccactgcttatgtc

SEQ ID NO: 3661522 - DNA, 25 bp, Homo sapien
ggttgccactgcttatgtcctcctc

SEQ ID NO: 3661523 - DNA, 25 bp, Homo sapien
tttgaggttgccactgcttatgtcc

SEQ ID NO: 3661524 - DNA, 25 bp, Homo sapien
accaggaaagtatcaacagcctcca

SEQ ID NO: 3661525 - DNA, 25 bp, Homo sapien
ggagcaccccgtagtttgtgatgtt

SEQ ID NO: 3661526 - DNA, 25 bp, Homo sapien
gaagcagctgctataggaaatctat

SEQ ID NO: 3661527 - DNA, 25 bp, Homo sapien
cagctgctataggaaatctatttcc

SEQ ID NO: 3661528 - DNA, 25 bp, Homo sapien
tcatggctgtcaagatgatttcctc

SEQ ID NO: 3661529 - DNA, 25 bp, Homo sapien
gggtcgggcagttgtaacacattcg

SEQ ID NO: 3661530 - DNA, 25 bp, Homo sapien
actaaaccgtttttcatggatgtgg

SEQ ID NO: 3661531 - DNA, 25 bp, Homo sapien
caatatcctggaatcactaaaccgt

SEQ ID NO: 3661532 - DNA, 25 bp, Homo sapien
cattgagatgcctgtgtcgaccact

SEQ ID NO: 3661533 - DNA, 25 bp, Homo sapien
aaaccatctgctcttatagccctgg

SEQ ID NO: 3661534 - DNA, 25 bp, Homo sapien
cattcattgagatgcctgtgtcgac

SEQ ID NO: 3661535 - DNA, 25 bp, Homo sapien
cgtctgcatgtgagcttttgttcca

SEQ ID NO: 3661536 - DNA, 25 bp, Homo sapien
aatatgctgaagatgtgcaatgaat

SEQ ID NO: 3661537 - DNA, 25 bp, Homo sapien
ggatttgctgaaaccgtcaccatag

SEQ ID NO: 3661538 - DNA, 25 bp, Homo sapien
tgaatgacatctgagacctgtagtc

SEQ ID NO: 3661539 - DNA, 25 bp, Homo sapien
gacctgtagtctggtttcatacccc

SEQ ID NO: 3661540 - DNA, 25 bp, Homo sapien
ctcggctccttgaggttcacaaaga

SEQ ID NO: 3661541 - DNA, 25 bp, Homo sapien
caaagactgatagctgggtggtaca

SEQ ID NO: 3661542 - DNA, 25 bp, Homo sapien
tttcctgaacgctcaccctgcatga

SEQ ID NO: 3661543 - DNA, 25 bp, Homo sapien
aatctgatggccctcggctccttga

SEQ ID NO: 3661544 - DNA, 25 bp, Homo sapien
tgagctgttacgtatactccacagg

SEQ ID NO: 3661545 - DNA, 25 bp, Homo sapien
aacaccttgagctgttacgtatact

SEQ ID NO: 3661546 - DNA, 25 bp, Homo sapien
tagaaaggtcataacaccttgagct

SEQ ID NO: 3661547 - DNA, 25 bp, Homo sapien
tgttacgtatactccacaggccagc

SEQ ID NO: 3661548 - DNA, 25 bp, Homo sapien
tatttccactttgtaccgccggatg

SEQ ID NO: 3661549 - DNA, 25 bp, Homo sapien
taatatctactatgtcaatcaggag

SEQ ID NO: 3661550 - DNA, 25 bp, Homo sapien
tgtaccgccggatgtatctcttctc

SEQ ID NO: 3661551 - DNA, 25 bp, Homo sapien
ttaatatctactatgtcaatcagga

SEQ ID NO: 3661552 - DNA, 25 bp, Homo sapien
cactcttgttgaatagtctgagcac

SEQ ID NO: 3661553 - DNA, 25 bp, Homo sapien
tcactcttgttgaatagtctgagca

SEQ ID NO: 3661554 - DNA, 25 bp, Homo sapien
gaagatctttgggataaccctggga

SEQ ID NO: 3661555 - DNA, 25 bp, Homo sapien
accagaaagagccttgggaagatct

SEQ ID NO: 3661556 - DNA, 25 bp, Homo sapien
tacacatggaagcaaaatagagcag

SEQ ID NO: 3661557 - DNA, 25 bp, Homo sapien
tacgtgatataccaaaaagtggcct

SEQ ID NO: 3661558 - DNA, 25 bp, Homo sapien
tcttcagggtgatcatctgtagctt

SEQ ID NO: 3661559 - DNA, 25 bp, Homo sapien
ggtgatcatctgtagcttgtttttt

SEQ ID NO: 3661560 - DNA, 25 bp, Homo sapien
atcttcagggtgatcatctgtagct

SEQ ID NO: 3661561 - DNA, 25 bp, Homo sapien
gatcatctgtagcttgttttttcat

SEQ ID NO: 3661562 - DNA, 25 bp, Homo sapien
acaaaaaggtcatgaaatgacagca

SEQ ID NO: 3661563 - DNA, 25 bp, Homo sapien
caaaaaggtcatgaaatgacagcag

SEQ ID NO: 3661564 - DNA, 25 bp, Homo sapien
agggactgatgcgttcgtaaaacaa

SEQ ID NO: 3661565 - DNA, 25 bp, Homo sapien
ctgatgcgttcgtaaaacaaaaagg

SEQ ID NO: 3661566 - DNA, 25 bp, Homo sapien
tctcccttcaccaccagatggatct

SEQ ID NO: 3661567 - DNA, 25 bp, Homo sapien
atttattactatcctggttatgcca

SEQ ID NO: 3661568 - DNA, 25 bp, Homo sapien
cataggtgagaaccacactctccct

SEQ ID NO: 3661569 - DNA, 25 bp, Homo sapien
tactatcctggttatgccagaaagc

SEQ ID NO: 3661570 - DNA, 25 bp, Homo sapien
ttttcggcagctgaataggcgcagg

SEQ ID NO: 3661571 - DNA, 25 bp, Homo sapien
cacagagggttactatgagttccca

SEQ ID NO: 3661572 - DNA, 25 bp, Homo sapien
gaaggcctgaacaattccgggccca

SEQ ID NO: 3661573 - DNA, 25 bp, Homo sapien
caatgagatgactaaagggaaggcc

SEQ ID NO: 3661574 - DNA, 25 bp, Homo sapien
gagggggagtttcagtatgcttaaa

SEQ ID NO: 3661575 - DNA, 25 bp, Homo sapien
ctgagggggagtttcagtatgctta

SEQ ID NO: 3661576 - DNA, 25 bp, Homo sapien
tgagggggagtttcagtatgcttaa

SEQ ID NO: 3661577 - DNA, 25 bp, Homo sapien
ggggagtttcagtatgcttaaaaca

SEQ ID NO: 3661578 - DNA, 25 bp, Homo sapien
gacacatgcacactcgagtgacacc

SEQ ID NO: 3661579 - DNA, 25 bp, Homo sapien
catgcacactcgagtgacacctggt

SEQ ID NO: 3661580 - DNA, 25 bp, Homo sapien
atgcacactcgagtgacacctggtc

SEQ ID NO: 3661581 - DNA, 25 bp, Homo sapien
cacatgcacactcgagtgacacctg

SEQ ID NO: 3661582 - DNA, 25 bp, Homo sapien
cttgccaatagtcggcattgttgga

SEQ ID NO: 3661583 - DNA, 25 bp, Homo sapien
gccaatagtcggcattgttggagca

SEQ ID NO: 3661584 - DNA, 25 bp, Homo sapien
gttccttgccaatagtcggcattgt

SEQ ID NO: 3661585 - DNA, 25 bp, Homo sapien
tccttgccaatagtcggcattgttg

SEQ ID NO: 3661586 - DNA, 25 bp, Homo sapien
cactgtgcagttcgtttcaggttct

SEQ ID NO: 3661587 - DNA, 25 bp, Homo sapien
tggccactgtgcagttcgtttcagg

SEQ ID NO: 3661588 - DNA, 25 bp, Homo sapien
tgtgaaacatcttgatggcccttca

SEQ ID NO: 3661589 - DNA, 25 bp, Homo sapien
tcttgtgaaacatcttgatggccct

SEQ ID NO: 3661590 - DNA, 25 bp, Homo sapien
gatgttgggaagtcattaaggcact

SEQ ID NO: 3661591 - DNA, 25 bp, Homo sapien
gattgttaaaagctatctgtatccg

SEQ ID NO: 3661592 - DNA, 25 bp, Homo sapien
gttctcccgacatcttctttggtga

SEQ ID NO: 3661593 - DNA, 25 bp, Homo sapien
tatccgctccactttttgcagtttg

SEQ ID NO: 3661594 - DNA, 25 bp, Homo sapien
tcctcctctgcgtgggtactatcag

SEQ ID NO: 3661595 - DNA, 25 bp, Homo sapien
ggtattcagtccatgcagtctcctc

SEQ ID NO: 3661596 - DNA, 25 bp, Homo sapien
cctccttgactgaataccctgggta

SEQ ID NO: 3661597 - DNA, 25 bp, Homo sapien
catttccaaggcgtagccctccttg

SEQ ID NO: 3661598 - DNA, 25 bp, Homo sapien
gtcagaataccaccaatttctgtgt

SEQ ID NO: 3661599 - DNA, 25 bp, Homo sapien
ccgattattaacaaaaggtccaatg

SEQ ID NO: 3661600 - DNA, 25 bp, Homo sapien
taacaaaaggtccaatgtatacacc

SEQ ID NO: 3661601 - DNA, 25 bp, Homo sapien
gatgaccgtacttttccgattatta

SEQ ID NO: 3661602 - DNA, 25 bp, Homo sapien
cattagaacctgctgatttgcagac

SEQ ID NO: 3661603 - DNA, 25 bp, Homo sapien
gaacctgctgatttgcagactcctt

SEQ ID NO: 3661604 - DNA, 25 bp, Homo sapien
ttagaacctgctgatttgcagactc

SEQ ID NO: 3661605 - DNA, 25 bp, Homo sapien
tagaacctgctgatttgcagactcc

SEQ ID NO: 3661606 - DNA, 25 bp, Homo sapien
ttcagacagtgaaatgacacgcctg

SEQ ID NO: 3661607 - DNA, 25 bp, Homo sapien
taaccggagacagtgaaaatagcat

SEQ ID NO: 3661608 - DNA, 25 bp, Homo sapien
tcatgtgtgcacgaagttcagcccg

SEQ ID NO: 3661609 - DNA, 25 bp, Homo sapien
cgcttctgttgtcattaaccggaga

SEQ ID NO: 3661610 - DNA, 25 bp, Homo sapien
aaaagcgctatcaagttgtcacgta

SEQ ID NO: 3661611 - DNA, 25 bp, Homo sapien
atcaacctcctcttcgctgattcat

SEQ ID NO: 3661612 - DNA, 25 bp, Homo sapien
tgtcacgtaccctttctaaggctcc

SEQ ID NO: 3661613 - DNA, 25 bp, Homo sapien
tctctcatcattgttgattaccaag

SEQ ID NO: 3661614 - DNA, 25 bp, Homo sapien
gatggcaacccgaattattatcttt

SEQ ID NO: 3661615 - DNA, 25 bp, Homo sapien
ggcagatggcaacccgaattattat

SEQ ID NO: 3661616 - DNA, 25 bp, Homo sapien
gtaggcagatggcaacccgaattat

SEQ ID NO: 3661617 - DNA, 25 bp, Homo sapien
aacctggatagccatttgattaagt

SEQ ID NO: 3661618 - DNA, 25 bp, Homo sapien
cttaaccacagttgagtcgtaaata

SEQ ID NO: 3661619 - DNA, 25 bp, Homo sapien
taaataatatttagtgctgtacatc

SEQ ID NO: 3661620 - DNA, 25 bp, Homo sapien
cgtaaataatatttagtgctgtaca

SEQ ID NO: 3661621 - DNA, 25 bp, Homo sapien
cagttgagtcgtaaataatatttag

SEQ ID NO: 3661622 - DNA, 25 bp, Homo sapien
agacaacacatctccgtgttctgac

SEQ ID NO: 3661623 - DNA, 25 bp, Homo sapien
gagacaacacatctccgtgttctga

SEQ ID NO: 3661624 - DNA, 25 bp, Homo sapien
ttacccttgcttgtgatggccagtg

SEQ ID NO: 3661625 - DNA, 25 bp, Homo sapien
ttcagttccaggattccgtcttgga

SEQ ID NO: 3661626 - DNA, 25 bp, Homo sapien
ccaggattccgtcttggataaacag

SEQ ID NO: 3661627 - DNA, 25 bp, Homo sapien
cttgcttgtgatggccagtgagcct

SEQ ID NO: 3661628 - DNA, 25 bp, Homo sapien
agcatgacggctgggcctctctcag

SEQ ID NO: 3661629 - DNA, 25 bp, Homo sapien
ggcacaaagcatgacggctgggcct

SEQ ID NO: 3661630 - DNA, 25 bp, Homo sapien
agctgaggaggcacaaagcatgacg

SEQ ID NO: 3661631 - DNA, 25 bp, Homo sapien
tcctggttagcagttttaaatagag

SEQ ID NO: 3661632 - DNA, 25 bp, Homo sapien
agaagtgcacttattgatttactca

SEQ ID NO: 3661633 - DNA, 25 bp, Homo sapien
cagagaagtgcacttattgatttac

SEQ ID NO: 3661634 - DNA, 25 bp, Homo sapien
aagtccagagaagtgcacttattga

SEQ ID NO: 3661635 - DNA, 25 bp, Homo sapien
ctgcaaagtccagagaagtgcactt

SEQ ID NO: 3661636 - DNA, 25 bp, Homo sapien
gcccttggaccatgtgcttacgaag

SEQ ID NO: 3661637 - DNA, 25 bp, Homo sapien
gttacttgtcgttctttcaactgca

SEQ ID NO: 3661638 - DNA, 25 bp, Homo sapien
cgaagtgttggttcaaggaatggaa

SEQ ID NO: 3661639 - DNA, 25 bp, Homo sapien
ttgttatcactaagcagatctttta

SEQ ID NO: 3661640 - DNA, 25 bp, Homo sapien
ctatttgtttggaaggagataatca

SEQ ID NO: 3661641 - DNA, 25 bp, Homo sapien
ggaaggagataatcatcgctctttg

SEQ ID NO: 3661642 - DNA, 25 bp, Homo sapien
agataatcatcgctctttgtgtagg

SEQ ID NO: 3661643 - DNA, 25 bp, Homo sapien
ttgtttggaaggagataatcatcgc

SEQ ID NO: 3661644 - DNA, 25 bp, Homo sapien
gttgtgtgcgtctgtctggatcaag

SEQ ID NO: 3661645 - DNA, 25 bp, Homo sapien
cgtctgtctggatcaagatggagct

SEQ ID NO: 3661646 - DNA, 25 bp, Homo sapien
tctggatcaagatggagctttgtat

SEQ ID NO: 3661647 - DNA, 25 bp, Homo sapien
gatggagctttgtattctgggaccc

SEQ ID NO: 3661648 - DNA, 25 bp, Homo sapien
tcatttaatccatctggcctctcca

SEQ ID NO: 3661649 - DNA, 25 bp, Homo sapien
ttagctatgtgtcccctggctgcat

SEQ ID NO: 3661650 - DNA, 25 bp, Homo sapien
tattgtctgtgctaagtgggcctca

SEQ ID NO: 3661651 - DNA, 25 bp, Homo sapien
ggttctttcttgtcccgatggtcca

SEQ ID NO: 3661652 - DNA, 25 bp, Homo sapien
tgtccaacatcttctattgtctgtg

SEQ ID NO: 3661653 - DNA, 25 bp, Homo sapien
gacaaatcttatgataaacccgcgg

SEQ ID NO: 3661654 - DNA, 25 bp, Homo sapien
caagctcgttggagagtctgcagac

SEQ ID NO: 3661655 - DNA, 25 bp, Homo sapien
tccacggccgcggataatcagaggc

SEQ ID NO: 3661656 - DNA, 25 bp, Homo sapien
tccctgggtctgaagaagtcaagct

SEQ ID NO: 3661657 - DNA, 25 bp, Homo sapien
aaaaccagcaacagggatagtcagc

SEQ ID NO: 3661658 - DNA, 25 bp, Homo sapien
cacattgtcatttgtaagcctggga

SEQ ID NO: 3661659 - DNA, 25 bp, Homo sapien
tatatgtggtgagtttaagaagacg

SEQ ID NO: 3661660 - DNA, 25 bp, Homo sapien
taatttaaccagcacatccatttcg

SEQ ID NO: 3661661 - DNA, 25 bp, Homo sapien
taccgagtgtgggttatcttgccgc

SEQ ID NO: 3661662 - DNA, 25 bp, Homo sapien
taatgcatactcacaacaaacggag

SEQ ID NO: 3661663 - DNA, 25 bp, Homo sapien
tcctttgggatagtgaccacaacat

SEQ ID NO: 3661664 - DNA, 25 bp, Homo sapien
taaaccccacagataaattcacatg

SEQ ID NO: 3661665 - DNA, 25 bp, Homo sapien
gaagcctggccctgataggtgctta

SEQ ID NO: 3661666 - DNA, 25 bp, Homo sapien
gttgttctcttagtaatccagcgca

SEQ ID NO: 3661667 - DNA, 25 bp, Homo sapien
tagatgctgtaggtgcaaagatgcc

SEQ ID NO: 3661668 - DNA, 25 bp, Homo sapien
actaaacactagagtcagggactga

SEQ ID NO: 3661669 - DNA, 25 bp, Homo sapien
tctctcaggtagcatttgcccattg

SEQ ID NO: 3661670 - DNA, 25 bp, Homo sapien
tagcatttgcccattgccatcacat

SEQ ID NO: 3661671 - DNA, 25 bp, Homo sapien
ggtctaccggccttctctctcaggt

SEQ ID NO: 3661672 - DNA, 25 bp, Homo sapien
cttgcaagagccttggtctaccggc

SEQ ID NO: 3661673 - DNA, 25 bp, Homo sapien
tgtattttgaagaattaatttgtgc

SEQ ID NO: 3661674 - DNA, 25 bp, Homo sapien
ctgtattttgaagaattaatttgtg

SEQ ID NO: 3661675 - DNA, 25 bp, Homo sapien
gtattttgaagaattaatttgtgca

SEQ ID NO: 3661676 - DNA, 25 bp, Homo sapien
agaaaacacagctgttgtcgtcttc

SEQ ID NO: 3661677 - DNA, 25 bp, Homo sapien
gaaaacacagctgttgtcgtcttct

SEQ ID NO: 3661678 - DNA, 25 bp, Homo sapien
tataatccttcctggcccttttgtc

SEQ ID NO: 3661679 - DNA, 25 bp, Homo sapien
tggcataacttgtgtattcttttca

SEQ ID NO: 3661680 - DNA, 25 bp, Homo sapien
ttcatattctaaatttcgtatttga

SEQ ID NO: 3661681 - DNA, 25 bp, Homo sapien
ttggcataacttgtgtattcttttc

SEQ ID NO: 3661682 - DNA, 25 bp, Homo sapien
ctttggcataacttgtgtattcttt

SEQ ID NO: 3661683 - DNA, 25 bp, Homo sapien
gtccccgctggcctgtatccagtgg

SEQ ID NO: 3661684 - DNA, 25 bp, Homo sapien
cgctggcctgtatccagtggtgtct

SEQ ID NO: 3661685 - DNA, 25 bp, Homo sapien
gtggtgtctgctgtatcaccgctga

SEQ ID NO: 3661686 - DNA, 25 bp, Homo sapien
ctgatcacactagccgtgggaaagc

SEQ ID NO: 3661687 - DNA, 25 bp, Homo sapien
ttgccacagacatcatatgctgtag

SEQ ID NO: 3661688 - DNA, 25 bp, Homo sapien
aataatcacatttgccacagacatc

SEQ ID NO: 3661689 - DNA, 25 bp, Homo sapien
agacatcatatgctgtaggtgtgac

SEQ ID NO: 3661690 - DNA, 25 bp, Homo sapien
gaaataatcacatttgccacagaca

SEQ ID NO: 3661691 - DNA, 25 bp, Homo sapien
ctgatgctgtggcagtacatttaga

SEQ ID NO: 3661692 - DNA, 25 bp, Homo sapien
gtggcagtacatttagatgataagg

SEQ ID NO: 3661693 - DNA, 25 bp, Homo sapien
cccagccggagtggctttttgacac

SEQ ID NO: 3661694 - DNA, 25 bp, Homo sapien
gctttttgacacctgatgctgtggc

SEQ ID NO: 3661695 - DNA, 25 bp, Homo sapien
cgctaccagggagcagcaaattaat

SEQ ID NO: 3661696 - DNA, 25 bp, Homo sapien
cctgaaagagattttctccatagcc

SEQ ID NO: 3661697 - DNA, 25 bp, Homo sapien
ttctccatagccaggataccgctac

SEQ ID NO: 3661698 - DNA, 25 bp, Homo sapien
aggataccgctaccagggagcagca

SEQ ID NO: 3661699 - DNA, 25 bp, Homo sapien
tccaggagagatttttgaccaatcc

SEQ ID NO: 3661700 - DNA, 25 bp, Homo sapien
ccgttttagtttgatcagacctgca

SEQ ID NO: 3661701 - DNA, 25 bp, Homo sapien
ggattccctggttggctctctggac

SEQ ID NO: 3661702 - DNA, 25 bp, Homo sapien
cttcagagaaatccgcgcccgtttt

SEQ ID NO: 3661703 - DNA, 25 bp, Homo sapien
tagctctaccctcccataaacaaaa

SEQ ID NO: 3661704 - DNA, 25 bp, Homo sapien
gtaaatatcactagctctaccctcc

SEQ ID NO: 3661705 - DNA, 25 bp, Homo sapien
gccctgagatcagagtttgggaatc

SEQ ID NO: 3661706 - DNA, 25 bp, Homo sapien
gaatcactgaatctagtttgtttcc

SEQ ID NO: 3661707 - DNA, 25 bp, Homo sapien
gcccaggtttaggtcatggctagat

SEQ ID NO: 3661708 - DNA, 25 bp, Homo sapien
tgaaaatgatgtaagcccgaggaat

SEQ ID NO: 3661709 - DNA, 25 bp, Homo sapien
ggctagattccttttacctcacaat

SEQ ID NO: 3661710 - DNA, 25 bp, Homo sapien
ccaacacctttggtatagagatctg

SEQ ID NO: 3661711 - DNA, 25 bp, Homo sapien
tccattgacttgacccagacagact

SEQ ID NO: 3661712 - DNA, 25 bp, Homo sapien
ctctttccattgacttgacccagac

SEQ ID NO: 3661713 - DNA, 25 bp, Homo sapien
ctttccattgacttgacccagacag

SEQ ID NO: 3661714 - DNA, 25 bp, Homo sapien
tttccattgacttgacccagacaga

SEQ ID NO: 3661715 - DNA, 25 bp, Homo sapien
tgtgaacacccattgtctccttggc

SEQ ID NO: 3661716 - DNA, 25 bp, Homo sapien
ctccttttgtagtactgctcttatt

SEQ ID NO: 3661717 - DNA, 25 bp, Homo sapien
ttccttctgtgtcattggctctctc

SEQ ID NO: 3661718 - DNA, 25 bp, Homo sapien
tctgggttggttggacttcgaatct

SEQ ID NO: 3661719 - DNA, 25 bp, Homo sapien
ttcactccctcggttggtgtgcagc

SEQ ID NO: 3661720 - DNA, 25 bp, Homo sapien
cttggatcattggtgccctgccgga

SEQ ID NO: 3661721 - DNA, 25 bp, Homo sapien
cccggtgactcttcctgtacttcat

SEQ ID NO: 3661722 - DNA, 25 bp, Homo sapien
ctagaaggctcctgtcccggtgact

SEQ ID NO: 3661723 - DNA, 25 bp, Homo sapien
cagctggtagttaattgcatgctat

SEQ ID NO: 3661724 - DNA, 25 bp, Homo sapien
gaagattgttcataaaccacattca

SEQ ID NO: 3661725 - DNA, 25 bp, Homo sapien
gagaaaagtatggcaagtttcccca

SEQ ID NO: 3661726 - DNA, 25 bp, Homo sapien
ttagggtgacattttaatgccagct

SEQ ID NO: 3661727 - DNA, 25 bp, Homo sapien
actgtttgatttgtttggacctggc

SEQ ID NO: 3661728 - DNA, 25 bp, Homo sapien
ttgaatttgggacgtgatagagacc

SEQ ID NO: 3661729 - DNA, 25 bp, Homo sapien
gaaatgcaactgtcgagctctgagt

SEQ ID NO: 3661730 - DNA, 25 bp, Homo sapien
tactgtttgcgaaaatatcggctac

SEQ ID NO: 3661731 - DNA, 25 bp, Homo sapien
ggtgtcatccaatgctctgctttaa

SEQ ID NO: 3661732 - DNA, 25 bp, Homo sapien
ctgtggtgtcatccaatgctctgct

SEQ ID NO: 3661733 - DNA, 25 bp, Homo sapien
tgtcatccaatgctctgctttaaga

SEQ ID NO: 3661734 - DNA, 25 bp, Homo sapien
tctgctttaagagaacctttgggga

SEQ ID NO: 3661735 - DNA, 25 bp, Homo sapien
gaaggtgctagaacaagtaactgct

SEQ ID NO: 3661736 - DNA, 25 bp, Homo sapien
tactgtgagttacctggtcaaccag

SEQ ID NO: 3661737 - DNA, 25 bp, Homo sapien
agttagccagccttgtcttgttgca

SEQ ID NO: 3661738 - DNA, 25 bp, Homo sapien
ggtcaaccagagaaaagtagatccc

SEQ ID NO: 3661739 - DNA, 25 bp, Homo sapien
tcaaggactggtagttaactcactg

SEQ ID NO: 3661740 - DNA, 25 bp, Homo sapien
gctactgcgcgcagccttataattt

SEQ ID NO: 3661741 - DNA, 25 bp, Homo sapien
caagtaggtaatgtgttccctcagc

SEQ ID NO: 3661742 - DNA, 25 bp, Homo sapien
tatatgcttaggctatctagctccc

SEQ ID NO: 3661743 - DNA, 25 bp, Homo sapien
taaggattctttgagtggacgttgg

SEQ ID NO: 3661744 - DNA, 25 bp, Homo sapien
tctgaaaagcaattagatgcaagtc

SEQ ID NO: 3661745 - DNA, 25 bp, Homo sapien
gtggttggtgaacagccttccactg

SEQ ID NO: 3661746 - DNA, 25 bp, Homo sapien
gagccttgagaaggacgtcctgctg

SEQ ID NO: 3661747 - DNA, 25 bp, Homo sapien
ggaacgctttcaggcatgacccttg

SEQ ID NO: 3661748 - DNA, 25 bp, Homo sapien
ctggtgttgggagaggtatccacac

SEQ ID NO: 3661749 - DNA, 25 bp, Homo sapien
ttgattgggtcagtttagctgcagg

SEQ ID NO: 3661750 - DNA, 25 bp, Homo sapien
gatggagtcatcttcggaatgtgct

SEQ ID NO: 3661751 - DNA, 25 bp, Homo sapien
gattggctgcgtgtcggacagtttt

SEQ ID NO: 3661752 - DNA, 25 bp, Homo sapien
tgaagacacctttgaccgtcaccgc

SEQ ID NO: 3661753 - DNA, 25 bp, Homo sapien
cgtcaccgccttactccaggatctg

SEQ ID NO: 3661754 - DNA, 25 bp, Homo sapien
tccaggatctggttatggagggatt

SEQ ID NO: 3661755 - DNA, 25 bp, Homo sapien
tgttttcaccctacagggccttaga

SEQ ID NO: 3661756 - DNA, 25 bp, Homo sapien
taagcactggcttactctctacttc

SEQ ID NO: 3661757 - DNA, 25 bp, Homo sapien
ttagggtaagtagtatatcagtcac

SEQ ID NO: 3661758 - DNA, 25 bp, Homo sapien
gccttagaccactagaacttaattc

SEQ ID NO: 3661759 - DNA, 25 bp, Homo sapien
tggaacgggtggaaagtggtgtgat

SEQ ID NO: 3661760 - DNA, 25 bp, Homo sapien
gtgcatgactccagcaggttggaaa

SEQ ID NO: 3661761 - DNA, 25 bp, Homo sapien
caggaatgtggaacgggtggaaagt

SEQ ID NO: 3661762 - DNA, 25 bp, Homo sapien
gtggtgtgatcttagatgtgtagag

SEQ ID NO: 3661763 - DNA, 25 bp, Homo sapien
tgtgagaaacgagatgactacccat

SEQ ID NO: 3661764 - DNA, 25 bp, Homo sapien
gcagtgtgagaaacgagatgactac

SEQ ID NO: 3661765 - DNA, 25 bp, Homo sapien
gaaacgagatgactacccatgctgg

SEQ ID NO: 3661766 - DNA, 25 bp, Homo sapien
aacgagatgactacccatgctggag

SEQ ID NO: 3661767 - DNA, 25 bp, Homo sapien
catgaaacgcagttcttcactgaag

SEQ ID NO: 3661768 - DNA, 25 bp, Homo sapien
tcacagatattagcgtgggagacgc

SEQ ID NO: 3661769 - DNA, 25 bp, Homo sapien
cgtgggagacgcatgcagtcatgaa

SEQ ID NO: 3661770 - DNA, 25 bp, Homo sapien
catgcagtcatgaaacgcagttctt

SEQ ID NO: 3661771 - DNA, 25 bp, Homo sapien
tggttgacatcagagcgggctgagc

SEQ ID NO: 3661772 - DNA, 25 bp, Homo sapien
gttgacatcagagcgggctgagcag

SEQ ID NO: 3661773 - DNA, 25 bp, Homo sapien
ggttgacatcagagcgggctgagca

SEQ ID NO: 3661774 - DNA, 25 bp, Homo sapien
ttgacatcagagcgggctgagcagc

SEQ ID NO: 3661775 - DNA, 25 bp, Homo sapien
tgtgcttgttgaggtctggtgaccc

SEQ ID NO: 3661776 - DNA, 25 bp, Homo sapien
gcagtgtgacctgggttgcatggga

SEQ ID NO: 3661777 - DNA, 25 bp, Homo sapien
agctgttgacatgtgcttgttgagg

SEQ ID NO: 3661778 - DNA, 25 bp, Homo sapien
tgagccctgagaagccggttcccca

SEQ ID NO: 3661779 - DNA, 25 bp, Homo sapien
ctgtaatgcgtggaatttttgtttg

SEQ ID NO: 3661780 - DNA, 25 bp, Homo sapien
tggtgtcgtgaaccactcctctctg

SEQ ID NO: 3661781 - DNA, 25 bp, Homo sapien
tcttgttcgtcatttttctctccac

SEQ ID NO: 3661782 - DNA, 25 bp, Homo sapien
ctgcaacattggctggtgtcgtgaa

SEQ ID NO: 3661783 - DNA, 25 bp, Homo sapien
ctgtgcggtaactgtctgggttcat

SEQ ID NO: 3661784 - DNA, 25 bp, Homo sapien
tctgggttcatgtgtcctgtgcttc

SEQ ID NO: 3661785 - DNA, 25 bp, Homo sapien
ggttcatgtgtcctgtgcttccaaa

SEQ ID NO: 3661786 - DNA, 25 bp, Homo sapien
gtaactgtctgggttcatgtgtcct

SEQ ID NO: 3661787 - DNA, 25 bp, Homo sapien
gaaattctcggagcctctgcgactg

SEQ ID NO: 3661788 - DNA, 25 bp, Homo sapien
cttctttagggctgctgtaccggca

SEQ ID NO: 3661789 - DNA, 25 bp, Homo sapien
gaattcaaatgcacgatccgggaaa

SEQ ID NO: 3661790 - DNA, 25 bp, Homo sapien
cattattactgaacgctgaaacccc

SEQ ID NO: 3661791 - DNA, 25 bp, Homo sapien
gccatgcgtggtgctccgccatgtg

SEQ ID NO: 3661792 - DNA, 25 bp, Homo sapien
ggtgctccgccatgtggagaactat

SEQ ID NO: 3661793 - DNA, 25 bp, Homo sapien
tgagctgttcccacgaggcgcatgc

SEQ ID NO: 3661794 - DNA, 25 bp, Homo sapien
catgtggagaactatgttgcctccc

SEQ ID NO: 3661795 - DNA, 25 bp, Homo sapien
cagggactgcggttggctgtagaaa

SEQ ID NO: 3661796 - DNA, 25 bp, Homo sapien
tcaccaattcctggtgtaaatccgt

SEQ ID NO: 3661797 - DNA, 25 bp, Homo sapien
ggcttcattgtccacacttcctgcc

SEQ ID NO: 3661798 - DNA, 25 bp, Homo sapien
agtagtctctgtctaggggacaccc

SEQ ID NO: 3661799 - DNA, 25 bp, Homo sapien
caggagttcagatgtagcacgggaa

SEQ ID NO: 3661800 - DNA, 25 bp, Homo sapien
aaaatgctggccgtgtgggtcagat

SEQ ID NO: 3661801 - DNA, 25 bp, Homo sapien
gcagtggcgtatgcttcttgtccca

SEQ ID NO: 3661802 - DNA, 25 bp, Homo sapien
gcaaagctcgggtctcttaccagca

SEQ ID NO: 3661803 - DNA, 25 bp, Homo sapien
tttgcactgtataaatgtcccgagg

SEQ ID NO: 3661804 - DNA, 25 bp, Homo sapien
gtttctgccccatgtaaaaagtgaa

SEQ ID NO: 3661805 - DNA, 25 bp, Homo sapien
tgtcaaaagctgaaaaccgctctgt

SEQ ID NO: 3661806 - DNA, 25 bp, Homo sapien
taaaaaactgagattcccatgatgc

SEQ ID NO: 3661807 - DNA, 25 bp, Homo sapien
ccttcacggttaggcctgcaggtca

SEQ ID NO: 3661808 - DNA, 25 bp, Homo sapien
ttgtcttaagtagctccctgcccag

SEQ ID NO: 3661809 - DNA, 25 bp, Homo sapien
tttaggcactccgagatgtcagccg

SEQ ID NO: 3661810 - DNA, 25 bp, Homo sapien
gctgcaggaccttctttccagtggg

SEQ ID NO: 3661811 - DNA, 25 bp, Homo sapien
acctccaaatggttttctattgtgg

SEQ ID NO: 3661812 - DNA, 25 bp, Homo sapien
cctccaaatggttttctattgtggt

SEQ ID NO: 3661813 - DNA, 25 bp, Homo sapien
ctccaaatggttttctattgtggtt

SEQ ID NO: 3661814 - DNA, 25 bp, Homo sapien
aacctccaaatggttttctattgtg

SEQ ID NO: 3661815 - DNA, 25 bp, Homo sapien
tagccgccaaatgctgctcagattc

SEQ ID NO: 3661816 - DNA, 25 bp, Homo sapien
aggccagagagatggtctttatacg

SEQ ID NO: 3661817 - DNA, 25 bp, Homo sapien
agttgggaggctagccgccaaatgc

SEQ ID NO: 3661818 - DNA, 25 bp, Homo sapien
cgtgataagagcacggataagccac

SEQ ID NO: 3661819 - DNA, 25 bp, Homo sapien
tggtgtcagctttcgtgaaggcgtc

SEQ ID NO: 3661820 - DNA, 25 bp, Homo sapien
tgcagctgcacagaggtgcgtgtgc

SEQ ID NO: 3661821 - DNA, 25 bp, Homo sapien
tgtgcacgcgctggctggtattggt

SEQ ID NO: 3661822 - DNA, 25 bp, Homo sapien
tgaggcttctcaagttctgaggaag

SEQ ID NO: 3661823 - DNA, 25 bp, Homo sapien
acacaacttcaggttgatgatgatc

SEQ ID NO: 3661824 - DNA, 25 bp, Homo sapien
ctgggaggttcaggtacacacaact

SEQ ID NO: 3661825 - DNA, 25 bp, Homo sapien
caacttcaggttgatgatgatccaa

SEQ ID NO: 3661826 - DNA, 25 bp, Homo sapien
gggaggttcaggtacacacaacttc

SEQ ID NO: 3661827 - DNA, 25 bp, Homo sapien
tgaggaggtagaaatgtattcttgt

SEQ ID NO: 3661828 - DNA, 25 bp, Homo sapien
gaggaggtagaaatgtattcttgtc

SEQ ID NO: 3661829 - DNA, 25 bp, Homo sapien
tagtaaaacttgatggccgccgatg

SEQ ID NO: 3661830 - DNA, 25 bp, Homo sapien
ttagtaaaacttgatggccgccgat

SEQ ID NO: 3661831 - DNA, 25 bp, Homo sapien
aaacttgatggccgccgatgtgttg

SEQ ID NO: 3661832 - DNA, 25 bp, Homo sapien
gtaaaacttgatggccgccgatgtg

SEQ ID NO: 3661833 - DNA, 25 bp, Homo sapien
tccggcctgtttgactggtgcagtt

SEQ ID NO: 3661834 - DNA, 25 bp, Homo sapien
cagttgaggcgtagctggtttccct

SEQ ID NO: 3661835 - DNA, 25 bp, Homo sapien
cagttttaatttggtgcagttgagg

SEQ ID NO: 3661836 - DNA, 25 bp, Homo sapien
gaacctggagtccacactgccggat

SEQ ID NO: 3661837 - DNA, 25 bp, Homo sapien
cttgaggttgagatgacactgcagt

SEQ ID NO: 3661838 - DNA, 25 bp, Homo sapien
actgcagttgcatttctgtaacagc

SEQ ID NO: 3661839 - DNA, 25 bp, Homo sapien
cactgcagttgcatttctgtaacag

SEQ ID NO: 3661840 - DNA, 25 bp, Homo sapien
ggttgagatgacactgcagttgcat

SEQ ID NO: 3661841 - DNA, 25 bp, Homo sapien
tcaagggcacagtcgaatgatgacc

SEQ ID NO: 3661842 - DNA, 25 bp, Homo sapien
gtagtgtcaacagggatctcttggc

SEQ ID NO: 3661843 - DNA, 25 bp, Homo sapien
gagatacttcttttcaagggcacag

SEQ ID NO: 3661844 - DNA, 25 bp, Homo sapien
gaccgtccactatcaggcattttgt

SEQ ID NO: 3661845 - DNA, 25 bp, Homo sapien
ctatactgcttgacttaatttctta

SEQ ID NO: 3661846 - DNA, 25 bp, Homo sapien
tatactgcttgacttaatttcttac

SEQ ID NO: 3661847 - DNA, 25 bp, Homo sapien
gagtcgccagtgtccatcgtttcca

SEQ ID NO: 3661848 - DNA, 25 bp, Homo sapien
aataacttggtgtgccgcgctgtgc

SEQ ID NO: 3661849 - DNA, 25 bp, Homo sapien
cctaaactgtgagtgtagtacccgg

SEQ ID NO: 3661850 - DNA, 25 bp, Homo sapien
ttctgttacaccaatcccaggctgg

SEQ ID NO: 3661851 - DNA, 25 bp, Homo sapien
tggcttataacatgttttctgggat

SEQ ID NO: 3661852 - DNA, 25 bp, Homo sapien
ctgagcagctgagatgagcacgcct

SEQ ID NO: 3661853 - DNA, 25 bp, Homo sapien
tgccatccttctttacaccttgact

SEQ ID NO: 3661854 - DNA, 25 bp, Homo sapien
tgtgcctttccatagagctagcgag

SEQ ID NO: 3661855 - DNA, 25 bp, Homo sapien
ttagatgactatggagacagctgct

SEQ ID NO: 3661856 - DNA, 25 bp, Homo sapien
tagatgactatggagacagctgctg

SEQ ID NO: 3661857 - DNA, 25 bp, Homo sapien
gctatgccaacatggctgtgtagtc

SEQ ID NO: 3661858 - DNA, 25 bp, Homo sapien
tgtgtccatgaaccatagctatgcc

SEQ ID NO: 3661859 - DNA, 25 bp, Homo sapien
tccctcttcaagtaggccctgctgt

SEQ ID NO: 3661860 - DNA, 25 bp, Homo sapien
gcatacagattagtcaccccaggtg

SEQ ID NO: 3661861 - DNA, 25 bp, Homo sapien
aatgattcctttcatagaggtccag

SEQ ID NO: 3661862 - DNA, 25 bp, Homo sapien
tgcagaggaactctgttacttgcaa

SEQ ID NO: 3661863 - DNA, 25 bp, Homo sapien
taaatgattcctttcatagaggtcc

SEQ ID NO: 3661864 - DNA, 25 bp, Homo sapien
gataaatgattcctttcatagaggt

SEQ ID NO: 3661865 - DNA, 25 bp, Homo sapien
agggacaggataaagggtgaatggg

SEQ ID NO: 3661866 - DNA, 25 bp, Homo sapien
gacaggataaagggtgaatgggggc

SEQ ID NO: 3661867 - DNA, 25 bp, Homo sapien
caggataaagggtgaatgggggcgt

SEQ ID NO: 3661868 - DNA, 25 bp, Homo sapien
tgagggacaggataaagggtgaatg

SEQ ID NO: 3661869 - DNA, 25 bp, Homo sapien
gaaggtattcatattgcaagttggg

SEQ ID NO: 3661870 - DNA, 25 bp, Homo sapien
tgggttcgttttcattgcaagggaa

SEQ ID NO: 3661871 - DNA, 25 bp, Homo sapien
tctgcaggtgaggacgaaggtattc

SEQ ID NO: 3661872 - DNA, 25 bp, Homo sapien
catattgcaagttgggttcgttttc

SEQ ID NO: 3661873 - DNA, 25 bp, Homo sapien
caaggtgagttttggcttgccctct

SEQ ID NO: 3661874 - DNA, 25 bp, Homo sapien
tggccaaggtgagttttggcttgcc

SEQ ID NO: 3661875 - DNA, 25 bp, Homo sapien
ctgggttggccaaggtgagttttgg

SEQ ID NO: 3661876 - DNA, 25 bp, Homo sapien
gccaaggtgagttttggcttgccct

SEQ ID NO: 3661877 - DNA, 25 bp, Homo sapien
ttccacactcttagatccatcggga

SEQ ID NO: 3661878 - DNA, 25 bp, Homo sapien
tacccactgttcgtacccttccaca

SEQ ID NO: 3661879 - DNA, 25 bp, Homo sapien
tctgtctaccagttcatcaggtaac

SEQ ID NO: 3661880 - DNA, 25 bp, Homo sapien
aggtaacaatactacccactgttcg

SEQ ID NO: 3661881 - DNA, 25 bp, Homo sapien
tttcagtgccaattccattgcttgt

SEQ ID NO: 3661882 - DNA, 25 bp, Homo sapien
cattgcttgtgtgtccatccaaaat

SEQ ID NO: 3661883 - DNA, 25 bp, Homo sapien
taaagacaagtttttgcaggaatgt

SEQ ID NO: 3661884 - DNA, 25 bp, Homo sapien
tccaaaataaagacaagtttttgca

SEQ ID NO: 3661885 - DNA, 25 bp, Homo sapien
cagggtattgccttttcgctggcta

SEQ ID NO: 3661886 - DNA, 25 bp, Homo sapien
ggaaccctgcaagtagttgagcccc

SEQ ID NO: 3661887 - DNA, 25 bp, Homo sapien
tacaggaactgtgtgtgattcgcaa

SEQ ID NO: 3661888 - DNA, 25 bp, Homo sapien
gagagctgggaatcttatgtctcca

SEQ ID NO: 3661889 - DNA, 25 bp, Homo sapien
cagcagataactgaatggatctcac

SEQ ID NO: 3661890 - DNA, 25 bp, Homo sapien
ccagcagataactgaatggatctca

SEQ ID NO: 3661891 - DNA, 25 bp, Homo sapien
cttccagcagataactgaatggatc

SEQ ID NO: 3661892 - DNA, 25 bp, Homo sapien
tccagcagataactgaatggatctc

SEQ ID NO: 3661893 - DNA, 25 bp, Homo sapien
agactgatgttcagggctctcctgc

SEQ ID NO: 3661894 - DNA, 25 bp, Homo sapien
gcagttacgttgttgtcacttgggc

SEQ ID NO: 3661895 - DNA, 25 bp, Homo sapien
cttgggctacagcatccagtagact

SEQ ID NO: 3661896 - DNA, 25 bp, Homo sapien
tccagcatttgctccgcagttacgt

SEQ ID NO: 3661897 - DNA, 25 bp, Homo sapien
caggaaatgactagttaatcttcac

SEQ ID NO: 3661898 - DNA, 25 bp, Homo sapien
tgattgtaagggactttcaacacat

SEQ ID NO: 3661899 - DNA, 25 bp, Homo sapien
taatcttcacttggttagtcatgct

SEQ ID NO: 3661900 - DNA, 25 bp, Homo sapien
tataaagtgtaagtagaggcaggca

SEQ ID NO: 3661901 - DNA, 25 bp, Homo sapien
cagtggtgcggattcaagtgatcta

SEQ ID NO: 3661902 - DNA, 25 bp, Homo sapien
gacagtggtgcggattcaagtgatc

SEQ ID NO: 3661903 - DNA, 25 bp, Homo sapien
cacagacagtggtgcggattcaagt

SEQ ID NO: 3661904 - DNA, 25 bp, Homo sapien
gtggtgcggattcaagtgatctatt

SEQ ID NO: 3661905 - DNA, 25 bp, Homo sapien
agttgtcttgtgctactgccatgga

SEQ ID NO: 3661906 - DNA, 25 bp, Homo sapien
gattcaaaagattcttgggtcgtga

SEQ ID NO: 3661907 - DNA, 25 bp, Homo sapien
tgttggaacgggcacagtgattgtc

SEQ ID NO: 3661908 - DNA, 25 bp, Homo sapien
gatgatagaaaaccgcattttgttg

SEQ ID NO: 3661909 - DNA, 25 bp, Homo sapien
tgtctgaatcagtaggaaaagaggg

SEQ ID NO: 3661910 - DNA, 25 bp, Homo sapien
tatgctgtgaagtctagatctcaaa

SEQ ID NO: 3661911 - DNA, 25 bp, Homo sapien
catgatatagaagaggctggtgaga

SEQ ID NO: 3661912 - DNA, 25 bp, Homo sapien
gccttaaaacagcttggtgtgaaag

SEQ ID NO: 3661913 - DNA, 25 bp, Homo sapien
agtggcaccgaccagcatgggaaga

SEQ ID NO: 3661914 - DNA, 25 bp, Homo sapien
tagatggctgcgctcctctgcacag

SEQ ID NO: 3661915 - DNA, 25 bp, Homo sapien
gaatccatacacaatgagggacaat

SEQ ID NO: 3661916 - DNA, 25 bp, Homo sapien
tctgtggtccatttgtagatggctg

SEQ ID NO: 3661917 - DNA, 25 bp, Homo sapien
taaaacgatgaggttggttgctagg

SEQ ID NO: 3661918 - DNA, 25 bp, Homo sapien
cagagggtcctagttgcccgagctc

SEQ ID NO: 3661919 - DNA, 25 bp, Homo sapien
taatctcccctcttatcagacagga

SEQ ID NO: 3661920 - DNA, 25 bp, Homo sapien
cccctgtgattgtgatgaccatctg

SEQ ID NO: 3661921 - DNA, 25 bp, Homo sapien
cttttctatcttttgtagatatagg

SEQ ID NO: 3661922 - DNA, 25 bp, Homo sapien
gtacactgcatcctccaactcttgg

SEQ ID NO: 3661923 - DNA, 25 bp, Homo sapien
tcttttgtagatatagggtctttct

SEQ ID NO: 3661924 - DNA, 25 bp, Homo sapien
tcatagtacactgcatcctccaact

SEQ ID NO: 3661925 - DNA, 25 bp, Homo sapien
tgtcatggtggtaacccccacgtcc

SEQ ID NO: 3661926 - DNA, 25 bp, Homo sapien
tggcttgtcatggtggtaaccccca

SEQ ID NO: 3661927 - DNA, 25 bp, Homo sapien
tgttccggacagcaaagtggcttgt

SEQ ID NO: 3661928 - DNA, 25 bp, Homo sapien
ttccggacagcaaagtggcttgtca

SEQ ID NO: 3661929 - DNA, 25 bp, Homo sapien
gcactctgggtgttgatgagtacaa

SEQ ID NO: 3661930 - DNA, 25 bp, Homo sapien
tctgggtgttgatgagtacaactga

SEQ ID NO: 3661931 - DNA, 25 bp, Homo sapien
agataaggaagataacatccactgt

SEQ ID NO: 3661932 - DNA, 25 bp, Homo sapien
acatccactgtgaagggcctgtggc

SEQ ID NO: 3661933 - DNA, 25 bp, Homo sapien
cagttgtgcatcaggtctgacaggt

SEQ ID NO: 3661934 - DNA, 25 bp, Homo sapien
ttagtatttaacagccagttgtgca

SEQ ID NO: 3661935 - DNA, 25 bp, Homo sapien
gccagttgtgcatcaggtctgacag

SEQ ID NO: 3661936 - DNA, 25 bp, Homo sapien
ttaacagccagttgtgcatcaggtc

SEQ ID NO: 3661937 - DNA, 25 bp, Homo sapien
caaagtaagcggaaatgcatccctt

SEQ ID NO: 3661938 - DNA, 25 bp, Homo sapien
tgcacatgtgggtgctccagcaggc

SEQ ID NO: 3661939 - DNA, 25 bp, Homo sapien
tcagcagtgcttagtgtcagccatg

SEQ ID NO: 3661940 - DNA, 25 bp, Homo sapien
taccgagcctgagctgagaagcgtg

SEQ ID NO: 3661941 - DNA, 25 bp, Homo sapien
tgttggcttcgagccggcttcctgg

SEQ ID NO: 3661942 - DNA, 25 bp, Homo sapien
ttggtgatgacgctgcccacagtgg

SEQ ID NO: 3661943 - DNA, 25 bp, Homo sapien
tgtctcttctcgtgagggctgaagc

SEQ ID NO: 3661944 - DNA, 25 bp, Homo sapien
gtcctctttatccagggctcggtgt

SEQ ID NO: 3661945 - DNA, 25 bp, Homo sapien
tcacgaggcgagcacgtgatgcatc

SEQ ID NO: 3661946 - DNA, 25 bp, Homo sapien
cgcatgtcacgaggcgagcacgtga

SEQ ID NO: 3661947 - DNA, 25 bp, Homo sapien
aggaacagggcgcatatctgagcaa

SEQ ID NO: 3661948 - DNA, 25 bp, Homo sapien
caagcgagcacctgggcgcatgtca

SEQ ID NO: 3661949 - DNA, 25 bp, Homo sapien
gtggagccagagagctccgcaaaga

SEQ ID NO: 3661950 - DNA, 25 bp, Homo sapien
gcaaagagcacgtgggcgcacgtcc

SEQ ID NO: 3661951 - DNA, 25 bp, Homo sapien
gttgggtggagccagagagctccgc

SEQ ID NO: 3661952 - DNA, 25 bp, Homo sapien
agagctccgcaaagagcacgtgggc

SEQ ID NO: 3661953 - DNA, 25 bp, Homo sapien
ctacagggaagagcctgtagactct

SEQ ID NO: 3661954 - DNA, 25 bp, Homo sapien
tacagggaagagcctgtagactcta

SEQ ID NO: 3661955 - DNA, 25 bp, Homo sapien
tgacaccagattgccagtgggcctg

SEQ ID NO: 3661956 - DNA, 25 bp, Homo sapien
gttgttggcaaatataagctcctgg

SEQ ID NO: 3661957 - DNA, 25 bp, Homo sapien
tgtgctgcctcatgaacctaaccat

SEQ ID NO: 3661958 - DNA, 25 bp, Homo sapien
tcctggttgtgctgcctcatgaacc

SEQ ID NO: 3661959 - DNA, 25 bp, Homo sapien
gacagtggtatcagaaaatggtagt

SEQ ID NO: 3661960 - DNA, 25 bp, Homo sapien
tgcctggccagtattaacattatta

SEQ ID NO: 3661961 - DNA, 25 bp, Homo sapien
taatggtaagcactcatggcacatg

SEQ ID NO: 3661962 - DNA, 25 bp, Homo sapien
gtttcacctggtttatcaggctggt

SEQ ID NO: 3661963 - DNA, 25 bp, Homo sapien
tgcccagcagggttatactctaaac

SEQ ID NO: 3661964 - DNA, 25 bp, Homo sapien
gcccagcagggttatactctaaact

SEQ ID NO: 3661965 - DNA, 25 bp, Homo sapien
cccagcagggttatactctaaactt

SEQ ID NO: 3661966 - DNA, 25 bp, Homo sapien
caagctgctagaggatctttctccc

SEQ ID NO: 3661967 - DNA, 25 bp, Homo sapien
ggtgtagctcctgtaccgactcaga

SEQ ID NO: 3661968 - DNA, 25 bp, Homo sapien
tccctccgggtgaaatgcttgaagc

SEQ ID NO: 3661969 - DNA, 25 bp, Homo sapien
gttttcaagtgtatccgtgcgccct

SEQ ID NO: 3661970 - DNA, 25 bp, Homo sapien
ggtctaggtgtgtgaatctgcagaa

SEQ ID NO: 3661971 - DNA, 25 bp, Homo sapien
tgcttgctaactgggtgaggcacct

SEQ ID NO: 3661972 - DNA, 25 bp, Homo sapien
agtgcttgctaactgggtgaggcac

SEQ ID NO: 3661973 - DNA, 25 bp, Homo sapien
taggtgtgtgaatctgcagaatgtc

SEQ ID NO: 3661974 - DNA, 25 bp, Homo sapien
taagactgaattcgtgcaattttca

SEQ ID NO: 3661975 - DNA, 25 bp, Homo sapien
tataagactgaattcgtgcaatttt

SEQ ID NO: 3661976 - DNA, 25 bp, Homo sapien
aaaatataagactgaattcgtgcaa

SEQ ID NO: 3661977 - DNA, 25 bp, Homo sapien
gactgaattcgtgcaattttcaaaa

SEQ ID NO: 3661978 - DNA, 25 bp, Homo sapien
gacacgcgtgattccaggtggacat

SEQ ID NO: 3661979 - DNA, 25 bp, Homo sapien
attgggaaccgcgttacatggaccg

SEQ ID NO: 3661980 - DNA, 25 bp, Homo sapien
tcttctgcgcttgcgacctgacacg

SEQ ID NO: 3661981 - DNA, 25 bp, Homo sapien
gaccgttctcatgagggcgcaggat

SEQ ID NO: 3661982 - DNA, 25 bp, Homo sapien
gagggccaccgctggcacttggcac

SEQ ID NO: 3661983 - DNA, 25 bp, Homo sapien
tggcacttggcactcgcttgcgagc

SEQ ID NO: 3661984 - DNA, 25 bp, Homo sapien
agggccaccgctggcacttggcact

SEQ ID NO: 3661985 - DNA, 25 bp, Homo sapien
gcactcgcttgcgagcatttactga

SEQ ID NO: 3661986 - DNA, 25 bp, Homo sapien
cgggccgggcatgcgagctgagcgg

SEQ ID NO: 3661987 - DNA, 25 bp, Homo sapien
ccgggccgggcatgcgagctgagcg

SEQ ID NO: 3661988 - DNA, 25 bp, Homo sapien
gccgaacaggtggccggaggctgcg

SEQ ID NO: 3661989 - DNA, 25 bp, Homo sapien
gccgggcatgcgagctgagcggccc

SEQ ID NO: 3661990 - DNA, 25 bp, Homo sapien
tatcagaattgcgatgtttaagttc

SEQ ID NO: 3661991 - DNA, 25 bp, Homo sapien
ctattaattcttgcgtttcaggcag

SEQ ID NO: 3661992 - DNA, 25 bp, Homo sapien
ctatttaagcgggtgggtcagcaga

SEQ ID NO: 3661993 - DNA, 25 bp, Homo sapien
ccccagagcagactattaattcttg

SEQ ID NO: 3661994 - DNA, 25 bp, Homo sapien
tttagaacgtctcaagcccgcatgt

SEQ ID NO: 3661995 - DNA, 25 bp, Homo sapien
gactgttcacggattcgcgttagga

SEQ ID NO: 3661996 - DNA, 25 bp, Homo sapien
tctgcgccgtcggaatagactgttc

SEQ ID NO: 3661997 - DNA, 25 bp, Homo sapien
gcatgtcactcatcgcggagtcgca

SEQ ID NO: 3661998 - DNA, 25 bp, Homo sapien
gtgctgacataccttccagcagtgt

SEQ ID NO: 3661999 - DNA, 25 bp, Homo sapien
tctgcagggatgggccttttctggc

SEQ ID NO: 3662000 - DNA, 25 bp, Homo sapien
tttttgcaaagtgggctctctcagc

SEQ ID NO: 3662001 - DNA, 25 bp, Homo sapien
tgacaccggggcttctagaagtggt

SEQ ID NO: 3662002 - DNA, 25 bp, Homo sapien
caagcttggtgttcaccctggagct

SEQ ID NO: 3662003 - DNA, 25 bp, Homo sapien
ctgggaaagtttctgagggacttag

SEQ ID NO: 3662004 - DNA, 25 bp, Homo sapien
ggtgccttggtctctagctgtggcc

SEQ ID NO: 3662005 - DNA, 25 bp, Homo sapien
agcttggtgttcaccctggagcttg

SEQ ID NO: 3662006 - DNA, 25 bp, Homo sapien
ttgcattgtgcttgcaaatgttctc

SEQ ID NO: 3662007 - DNA, 25 bp, Homo sapien
gacagcagctctccaacgtcgtttc

SEQ ID NO: 3662008 - DNA, 25 bp, Homo sapien
ggagattgcaattttactccgtgca

SEQ ID NO: 3662009 - DNA, 25 bp, Homo sapien
taaaactgatagatcctccctgcac

SEQ ID NO: 3662010 - DNA, 25 bp, Homo sapien
aagccatccaaagcactggtggtgg

SEQ ID NO: 3662011 - DNA, 25 bp, Homo sapien
agaaagccatccaaagcactggtgg

SEQ ID NO: 3662012 - DNA, 25 bp, Homo sapien
ggcgcacctctaattgggctccagt

SEQ ID NO: 3662013 - DNA, 25 bp, Homo sapien
gtggtggtgttcaggcgcacctcta

SEQ ID NO: 3662014 - DNA, 25 bp, Homo sapien
tccggaaccacagaccaccaagcat

SEQ ID NO: 3662015 - DNA, 25 bp, Homo sapien
aggaagctccggaaccacagaccac

SEQ ID NO: 3662016 - DNA, 25 bp, Homo sapien
cgaggaagctccggaaccacagacc

SEQ ID NO: 3662017 - DNA, 25 bp, Homo sapien
gctccggaaccacagaccaccaagc

SEQ ID NO: 3662018 - DNA, 25 bp, Homo sapien
gctggatagtctcttgattgacttc

SEQ ID NO: 3662019 - DNA, 25 bp, Homo sapien
cgctggatagtctcttgattgactt

SEQ ID NO: 3662020 - DNA, 25 bp, Homo sapien
ccgctggatagtctcttgattgact

SEQ ID NO: 3662021 - DNA, 25 bp, Homo sapien
ctggatagtctcttgattgacttcc

SEQ ID NO: 3662022 - DNA, 25 bp, Homo sapien
tgtgtaacacaagctggcactggac

SEQ ID NO: 3662023 - DNA, 25 bp, Homo sapien
agatttctgtgtaacacaagctggc

SEQ ID NO: 3662024 - DNA, 25 bp, Homo sapien
tctgtgtaacacaagctggcactgg

SEQ ID NO: 3662025 - DNA, 25 bp, Homo sapien
gtaacacaagctggcactggacgca

SEQ ID NO: 3662026 - DNA, 25 bp, Homo sapien
ttaagcagttaagttggtaaagatc

SEQ ID NO: 3662027 - DNA, 25 bp, Homo sapien
gcagttaagttggtaaagatcctgt

SEQ ID NO: 3662028 - DNA, 25 bp, Homo sapien
ccacagaagtgtcattcacgtttta

SEQ ID NO: 3662029 - DNA, 25 bp, Homo sapien
agagccacagaagtgtcattcacgt

SEQ ID NO: 3662030 - DNA, 25 bp, Homo sapien
gtaatgtcttagttatccaaatatg

SEQ ID NO: 3662031 - DNA, 25 bp, Homo sapien
gaaggagcacgcagataaatgtcca

SEQ ID NO: 3662032 - DNA, 25 bp, Homo sapien
aaaagtaggcttgaacatcctagta

SEQ ID NO: 3662033 - DNA, 25 bp, Homo sapien
ggcttgaacatcctagtaatgtctt

SEQ ID NO: 3662034 - DNA, 25 bp, Homo sapien
ctacacccacgctgactgtccaggt

SEQ ID NO: 3662035 - DNA, 25 bp, Homo sapien
tccagtttgcaggattcccttttgc

SEQ ID NO: 3662036 - DNA, 25 bp, Homo sapien
tcccttttgcagcatttggcggtca

SEQ ID NO: 3662037 - DNA, 25 bp, Homo sapien
ggttctgctcagatccactaagact

SEQ ID NO: 3662038 - DNA, 25 bp, Homo sapien
ccatttcttgtggatctgatcaatc

SEQ ID NO: 3662039 - DNA, 25 bp, Homo sapien
tctgatcaatcacagtatcctccat

SEQ ID NO: 3662040 - DNA, 25 bp, Homo sapien
tcccatttcttgtggatctgatcaa

SEQ ID NO: 3662041 - DNA, 25 bp, Homo sapien
catttcttgtggatctgatcaatca

SEQ ID NO: 3662042 - DNA, 25 bp, Homo sapien
aatacatatccagcaacgctaaggc

SEQ ID NO: 3662043 - DNA, 25 bp, Homo sapien
taaggcgtcttggaattttggtgga

SEQ ID NO: 3662044 - DNA, 25 bp, Homo sapien
tggtggaaaagatgatgcgagccat

SEQ ID NO: 3662045 - DNA, 25 bp, Homo sapien
cagcaacgctaaggcgtcttggaat

SEQ ID NO: 3662046 - DNA, 25 bp, Homo sapien
ccaacaggcgggctgcgtcaactgt

SEQ ID NO: 3662047 - DNA, 25 bp, Homo sapien
tgcgtcaactgtcgggcaccagcct

SEQ ID NO: 3662048 - DNA, 25 bp, Homo sapien
gtcctcttcgacatgctccgtgcat

SEQ ID NO: 3662049 - DNA, 25 bp, Homo sapien
gcaccagcctcgtcctcttcgacat

SEQ ID NO: 3662050 - DNA, 25 bp, Homo sapien
cactgatcgtgacgtgagatctgcc

SEQ ID NO: 3662051 - DNA, 25 bp, Homo sapien
tgcagaggccactgatcgtgacgtg

SEQ ID NO: 3662052 - DNA, 25 bp, Homo sapien
gacgtgagatctgccttcagtggct

SEQ ID NO: 3662053 - DNA, 25 bp, Homo sapien
tcacagagacgtgcagaggccactg

SEQ ID NO: 3662054 - DNA, 25 bp, Homo sapien
tgtgaaggtactgatggcctttccc

SEQ ID NO: 3662055 - DNA, 25 bp, Homo sapien
gaaggtactgatggcctttccctgt

SEQ ID NO: 3662056 - DNA, 25 bp, Homo sapien
caagtgacatgctccagtttgcttt

SEQ ID NO: 3662057 - DNA, 25 bp, Homo sapien
gtgacatgctccagtttgctttgga

SEQ ID NO: 3662058 - DNA, 25 bp, Homo sapien
gaaattggggagtggcggtggctgg

SEQ ID NO: 3662059 - DNA, 25 bp, Homo sapien
cggtggctggccgtgcggcatgtgc

SEQ ID NO: 3662060 - DNA, 25 bp, Homo sapien
tggccgtgcggcatgtgcgtcgcac

SEQ ID NO: 3662061 - DNA, 25 bp, Homo sapien
gtggctggccgtgcggcatgtgcgt

SEQ ID NO: 3662062 - DNA, 25 bp, Homo sapien
ggtccgggaatataggaagctctcc

SEQ ID NO: 3662063 - DNA, 25 bp, Homo sapien
taatacgcttctgcggctccagtaa

SEQ ID NO: 3662064 - DNA, 25 bp, Homo sapien
cagtaagaactctgctcattgaggc

SEQ ID NO: 3662065 - DNA, 25 bp, Homo sapien
tctggtcgccactgtatgatgtgga

SEQ ID NO: 3662066 - DNA, 25 bp, Homo sapien
gtatgtgtgctgccaaaatgagcac

SEQ ID NO: 3662067 - DNA, 25 bp, Homo sapien
tatgtgtgctgccaaaatgagcact

SEQ ID NO: 3662068 - DNA, 25 bp, Homo sapien
tagtatgtgtgctgccaaaatgagc

SEQ ID NO: 3662069 - DNA, 25 bp, Homo sapien
agtatgtgtgctgccaaaatgagca

SEQ ID NO: 3662070 - DNA, 25 bp, Homo sapien
gaacaccatgttctaatatcccctg

SEQ ID NO: 3662071 - DNA, 25 bp, Homo sapien
ggactgttattagaacaccatgttc

SEQ ID NO: 3662072 - DNA, 25 bp, Homo sapien
ctaatatcccctgcggagaccggag

SEQ ID NO: 3662073 - DNA, 25 bp, Homo sapien
cttcccgccaactgcaccctgatcc

SEQ ID NO: 3662074 - DNA, 25 bp, Homo sapien
cccagtgcccggagtggcctgctga

SEQ ID NO: 3662075 - DNA, 25 bp, Homo sapien
cccaggatgcctgtagaaagcattc

SEQ ID NO: 3662076 - DNA, 25 bp, Homo sapien
ttaacccagaaaagcagcggttcca

SEQ ID NO: 3662077 - DNA, 25 bp, Homo sapien
gcattccggttccaagcctgcttca

SEQ ID NO: 3662078 - DNA, 25 bp, Homo sapien
gaagctcctttcaagtcgtctgctg

SEQ ID NO: 3662079 - DNA, 25 bp, Homo sapien
gctcctttcaagtcgtctgctgaag

SEQ ID NO: 3662080 - DNA, 25 bp, Homo sapien
aggaagctcctttcaagtcgtctgc

SEQ ID NO: 3662081 - DNA, 25 bp, Homo sapien
cctttcaagtcgtctgctgaagaat

SEQ ID NO: 3662082 - DNA, 25 bp, Homo sapien
ttttctggatgctgactgacgacac

SEQ ID NO: 3662083 - DNA, 25 bp, Homo sapien
ttcagcggggtcagcttcagagcag

SEQ ID NO: 3662084 - DNA, 25 bp, Homo sapien
gctgactgacgacacctgtgattgt

SEQ ID NO: 3662085 - DNA, 25 bp, Homo sapien
tctcctctccgactcgtttttctgg

SEQ ID NO: 3662086 - DNA, 25 bp, Homo sapien
agtcaaagacaatagaatgactggt

SEQ ID NO: 3662087 - DNA, 25 bp, Homo sapien
aagtcaaagacaatagaatgactgg

SEQ ID NO: 3662088 - DNA, 25 bp, Homo sapien
caagtcaaagacaatagaatgactg

SEQ ID NO: 3662089 - DNA, 25 bp, Homo sapien
aataaatgtggtgccgaagtgagca

SEQ ID NO: 3662090 - DNA, 25 bp, Homo sapien
ataaatgtggtgccgaagtgagcat

SEQ ID NO: 3662091 - DNA, 25 bp, Homo sapien
tttgtcagatctacctactgtcagg

SEQ ID NO: 3662092 - DNA, 25 bp, Homo sapien
aatcctttgtcagatctacctactg

SEQ ID NO: 3662093 - DNA, 25 bp, Homo sapien
gatctacctactgtcaggaagccaa

SEQ ID NO: 3662094 - DNA, 25 bp, Homo sapien
tacctactgtcaggaagccaaatgg

SEQ ID NO: 3662095 - DNA, 25 bp, Homo sapien
catggctgttgtctccaatgtgtct

SEQ ID NO: 3662096 - DNA, 25 bp, Homo sapien
ctgttgagggccctgtgactaccat

SEQ ID NO: 3662097 - DNA, 25 bp, Homo sapien
ccaatgtgtcttccctgtacagtgt

SEQ ID NO: 3662098 - DNA, 25 bp, Homo sapien
ccctgtgactaccatggctgttgtc

SEQ ID NO: 3662099 - DNA, 25 bp, Homo sapien
aaaacggacacactggagtgaactg

SEQ ID NO: 3662100 - DNA, 25 bp, Homo sapien
tttgaaaacggacacactggagtga

SEQ ID NO: 3662101 - DNA, 25 bp, Homo sapien
ctttgaaaacggacacactggagtg

SEQ ID NO: 3662102 - DNA, 25 bp, Homo sapien
tgaaaacggacacactggagtgaac

SEQ ID NO: 3662103 - DNA, 25 bp, Homo sapien
gcctgcacctgggatccgcccacgc

SEQ ID NO: 3662104 - DNA, 25 bp, Homo sapien
tctgagtcctgcggctgccgctctg

SEQ ID NO: 3662105 - DNA, 25 bp, Homo sapien
gagtcctgcggctgccgctctgcct

SEQ ID NO: 3662106 - DNA, 25 bp, Homo sapien
tgggatccgcccacgcggctcggct

SEQ ID NO: 3662107 - DNA, 25 bp, Homo sapien
atgcgtggacccgtgctctcagtgc

SEQ ID NO: 3662108 - DNA, 25 bp, Homo sapien
actgaaagctccacgggcaaaggcc

SEQ ID NO: 3662109 - DNA, 25 bp, Homo sapien
aaggccagatgcaggataaccggat

SEQ ID NO: 3662110 - DNA, 25 bp, Homo sapien
ccaatgtgcatgttaccggaggcca

SEQ ID NO: 3662111 - DNA, 25 bp, Homo sapien
ttccctctgtagtccaacagcttta

SEQ ID NO: 3662112 - DNA, 25 bp, Homo sapien
gaaaagaggaccacgtgcttccctc

SEQ ID NO: 3662113 - DNA, 25 bp, Homo sapien
tgggggcacacgaaagtgaagtcca

SEQ ID NO: 3662114 - DNA, 25 bp, Homo sapien
tgtgggggcacacgaaagtgaagtc

SEQ ID NO: 3662115 - DNA, 25 bp, Homo sapien
gggggcacacgaaagtgaagtccaa

SEQ ID NO: 3662116 - DNA, 25 bp, Homo sapien
ctgtgggggcacacgaaagtgaagt

SEQ ID NO: 3662117 - DNA, 25 bp, Homo sapien
cccagcactttgcagctttcggaag

SEQ ID NO: 3662118 - DNA, 25 bp, Homo sapien
tgcagctttcggaagccctcagcat

SEQ ID NO: 3662119 - DNA, 25 bp, Homo sapien
ccctcagcatggtcgctgaatgcga

SEQ ID NO: 3662120 - DNA, 25 bp, Homo sapien
agccctcagcatggtcgctgaatgc

SEQ ID NO: 3662121 - DNA, 25 bp, Homo sapien
ttccgggggatgttgatccaagcca

SEQ ID NO: 3662122 - DNA, 25 bp, Homo sapien
ggtgtccagggactcaaagcctccc

SEQ ID NO: 3662123 - DNA, 25 bp, Homo sapien
tcagcaagcagaggggtgtccaggg

SEQ ID NO: 3662124 - DNA, 25 bp, Homo sapien
ctccttccgggggatgttgatccaa

SEQ ID NO: 3662125 - DNA, 25 bp, Homo sapien
caacacgccgtaattctcagacaac

SEQ ID NO: 3662126 - DNA, 25 bp, Homo sapien
taattctcagacaacttcaggtcac

SEQ ID NO: 3662127 - DNA, 25 bp, Homo sapien
cctgcagacaatgccctcgtctgtt

SEQ ID NO: 3662128 - DNA, 25 bp, Homo sapien
cgtctgttttcaacacgccgtaatt

SEQ ID NO: 3662129 - DNA, 25 bp, Homo sapien
cttgccatggatgataaagaggtcc

SEQ ID NO: 3662130 - DNA, 25 bp, Homo sapien
aagtgtcccacaggccaatcattaa

SEQ ID NO: 3662131 - DNA, 25 bp, Homo sapien
aatttccgggtgctcgtctgtgtac

SEQ ID NO: 3662132 - DNA, 25 bp, Homo sapien
caggacaaatttccgggtgctcgtc

SEQ ID NO: 3662133 - DNA, 25 bp, Homo sapien
agccagcaggacaaatttccgggtg

SEQ ID NO: 3662134 - DNA, 25 bp, Homo sapien
ctagttgtgtttggagaaatattcc

SEQ ID NO: 3662135 - DNA, 25 bp, Homo sapien
gttgtgtttggagaaatattccttg

SEQ ID NO: 3662136 - DNA, 25 bp, Homo sapien
agaaatattccttgctgtcattcac

SEQ ID NO: 3662137 - DNA, 25 bp, Homo sapien
gagaaatattccttgctgtcattca

SEQ ID NO: 3662138 - DNA, 25 bp, Homo sapien
tttcagtataggatgggtttttcca

SEQ ID NO: 3662139 - DNA, 25 bp, Homo sapien
tataggatgggtttttccagttgag

SEQ ID NO: 3662140 - DNA, 25 bp, Homo sapien
gagcactctccacctttcatctgtg

SEQ ID NO: 3662141 - DNA, 25 bp, Homo sapien
tcagtataggatgggtttttccagt

SEQ ID NO: 3662142 - DNA, 25 bp, Homo sapien
tttaatccatacttgatcacctggg

SEQ ID NO: 3662143 - DNA, 25 bp, Homo sapien
aagtagttctactgggttgtagcac

SEQ ID NO: 3662144 - DNA, 25 bp, Homo sapien
ggagttctcacttccacctacatta

SEQ ID NO: 3662145 - DNA, 25 bp, Homo sapien
agcacacttgagtctggtcacttcc

SEQ ID NO: 3662146 - DNA, 25 bp, Homo sapien
gagtctcccatgtcttctactttct

SEQ ID NO: 3662147 - DNA, 25 bp, Homo sapien
aatggagtctcccatgtcttctact

SEQ ID NO: 3662148 - DNA, 25 bp, Homo sapien
tggagtctcccatgtcttctacttt

SEQ ID NO: 3662149 - DNA, 25 bp, Homo sapien
aaaatggagtctcccatgtcttcta

SEQ ID NO: 3662150 - DNA, 25 bp, Homo sapien
cagagaccgctgttgtctgaggcat

SEQ ID NO: 3662151 - DNA, 25 bp, Homo sapien
gtttgttcctgctgacctgagctgt

SEQ ID NO: 3662152 - DNA, 25 bp, Homo sapien
ttgttcctgctgacctgagctgtgc

SEQ ID NO: 3662153 - DNA, 25 bp, Homo sapien
atggggctcagagaccgctgttgtc

SEQ ID NO: 3662154 - DNA, 25 bp, Homo sapien
ggggccaggtcccaagtcctgagct

SEQ ID NO: 3662155 - DNA, 25 bp, Homo sapien
tttctggaagggctctcgtttctga

SEQ ID NO: 3662156 - DNA, 25 bp, Homo sapien
aagtcacctttctgtcaccctcaag

SEQ ID NO: 3662157 - DNA, 25 bp, Homo sapien
gggctctcgtttctgaatgcctctg

SEQ ID NO: 3662158 - DNA, 25 bp, Homo sapien
tgcagtaactagtgcgagtgggcaa

SEQ ID NO: 3662159 - DNA, 25 bp, Homo sapien
actagtgcgagtgggcaaaacagct

SEQ ID NO: 3662160 - DNA, 25 bp, Homo sapien
ctggccgccctgctgtgcagtaact

SEQ ID NO: 3662161 - DNA, 25 bp, Homo sapien
cctgctgtgcagtaactagtgcgag

SEQ ID NO: 3662162 - DNA, 25 bp, Homo sapien
agtctggcacagagagagcttttca

SEQ ID NO: 3662163 - DNA, 25 bp, Homo sapien
cagtttctggtggtgtgctactcca

SEQ ID NO: 3662164 - DNA, 25 bp, Homo sapien
tagactagtaccctagctctgtggc

SEQ ID NO: 3662165 - DNA, 25 bp, Homo sapien
cacagacatcgcagagtgtgagcag

SEQ ID NO: 3662166 - DNA, 25 bp, Homo sapien
gagttggtgccatgtgccgtttata

SEQ ID NO: 3662167 - DNA, 25 bp, Homo sapien
gagctgcgagcgttaaggcatcaca

SEQ ID NO: 3662168 - DNA, 25 bp, Homo sapien
tactgtacgctccatagagctgcga

SEQ ID NO: 3662169 - DNA, 25 bp, Homo sapien
gaaagcacttgtattcactacgtta

SEQ ID NO: 3662170 - DNA, 25 bp, Homo sapien
ttcttgtacaggcatactttggaga

SEQ ID NO: 3662171 - DNA, 25 bp, Homo sapien
tcagctaatgaatcacaaaggcagg

SEQ ID NO: 3662172 - DNA, 25 bp, Homo sapien
taaacccagatcagtctgaatccaa

SEQ ID NO: 3662173 - DNA, 25 bp, Homo sapien
ccagaccaccacatgtaaagggaat

SEQ ID NO: 3662174 - DNA, 25 bp, Homo sapien
gctggtggtgcggccgccatcctac

SEQ ID NO: 3662175 - DNA, 25 bp, Homo sapien
acccgctccctttgcccattctctt

SEQ ID NO: 3662176 - DNA, 25 bp, Homo sapien
attcctgggattccttgagctctct

SEQ ID NO: 3662177 - DNA, 25 bp, Homo sapien
ctcttttggatatttggcttttctc

SEQ ID NO: 3662178 - DNA, 25 bp, Homo sapien
tcagtgggagttaggtggaatgggt

SEQ ID NO: 3662179 - DNA, 25 bp, Homo sapien
gaaaagataagcactttaggtagag

SEQ ID NO: 3662180 - DNA, 25 bp, Homo sapien
ctatcagtgggagttaggtggaatg

SEQ ID NO: 3662181 - DNA, 25 bp, Homo sapien
gtgtatgaatcaggctgatgtgttc

SEQ ID NO: 3662182 - DNA, 25 bp, Homo sapien
cattgtgcaccattggcagctttgg

SEQ ID NO: 3662183 - DNA, 25 bp, Homo sapien
tcattgtgcaccattggcagctttg

SEQ ID NO: 3662184 - DNA, 25 bp, Homo sapien
gaagcgccacaatccaacaatgaaa

SEQ ID NO: 3662185 - DNA, 25 bp, Homo sapien
acgtcagctgtgatgcggtagccgc

SEQ ID NO: 3662186 - DNA, 25 bp, Homo sapien
cggaccaaaagtagcgctgcagccg

SEQ ID NO: 3662187 - DNA, 25 bp, Homo sapien
tcactgattacggacgcgaggaggt

SEQ ID NO: 3662188 - DNA, 25 bp, Homo sapien
cgccgcaaagggatttacgtagcgg

SEQ ID NO: 3662189 - DNA, 25 bp, Homo sapien
gccgcaaagggatttacgtagcgga

SEQ ID NO: 3662190 - DNA, 25 bp, Homo sapien
ccgccgcaaagggatttacgtagcg

SEQ ID NO: 3662191 - DNA, 25 bp, Homo sapien
tcagggaggattttccaactcgtcc

SEQ ID NO: 3662192 - DNA, 25 bp, Homo sapien
tgagccgcacggctctctcagggag

SEQ ID NO: 3662193 - DNA, 25 bp, Homo sapien
agctgagcgcacgaagcgggcgtgg

SEQ ID NO: 3662194 - DNA, 25 bp, Homo sapien
tcgtcccaagttcgcgaggaggcag

SEQ ID NO: 3662195 - DNA, 25 bp, Homo sapien
aagatatttgtaatcaatgctttcc

SEQ ID NO: 3662196 - DNA, 25 bp, Homo sapien
taagatatttgtaatcaatgctttc

SEQ ID NO: 3662197 - DNA, 25 bp, Homo sapien
tattttttccttgcacatttgctca

SEQ ID NO: 3662198 - DNA, 25 bp, Homo sapien
atatattttttccttgcacatttgc

SEQ ID NO: 3662199 - DNA, 25 bp, Homo sapien
ttaatatattttttccttgcacatt

SEQ ID NO: 3662200 - DNA, 25 bp, Homo sapien
cttggatttgtcttaatatattttt

SEQ ID NO: 3662201 - DNA, 25 bp, Homo sapien
ttacagattaagccactgcacccgg

SEQ ID NO: 3662202 - DNA, 25 bp, Homo sapien
ggattacagattaagccactgcacc

SEQ ID NO: 3662203 - DNA, 25 bp, Homo sapien
ccaggctggtcttcttcccttttct

SEQ ID NO: 3662204 - DNA, 25 bp, Homo sapien
caggctggtcttcttcccttttctc

SEQ ID NO: 3662205 - DNA, 25 bp, Homo sapien
taatttagcactgggcactgtccac

SEQ ID NO: 3662206 - DNA, 25 bp, Homo sapien
ctgctgttccacacagttgctgcta

SEQ ID NO: 3662207 - DNA, 25 bp, Homo sapien
ggcactgtccactgtaacctcccat

SEQ ID NO: 3662208 - DNA, 25 bp, Homo sapien
catcaccacactggacaaagcagtt

SEQ ID NO: 3662209 - DNA, 25 bp, Homo sapien
tactgtctttgacttcctactgcct

SEQ ID NO: 3662210 - DNA, 25 bp, Homo sapien
tactgccttttgcattccagtagcc

SEQ ID NO: 3662211 - DNA, 25 bp, Homo sapien
gattctacagatccttcatctactg

SEQ ID NO: 3662212 - DNA, 25 bp, Homo sapien
cagtagccgttacccaaatccaatc

SEQ ID NO: 3662213 - DNA, 25 bp, Homo sapien
cagtctgagtctgcacatgagcaga

SEQ ID NO: 3662214 - DNA, 25 bp, Homo sapien
catcatgctgggattcaactgtttc

SEQ ID NO: 3662215 - DNA, 25 bp, Homo sapien
tgctctctgtcaaagaagctgttat

SEQ ID NO: 3662216 - DNA, 25 bp, Homo sapien
cagacttgctctctgtcaaagaagc

SEQ ID NO: 3662217 - DNA, 25 bp, Homo sapien
gaatctgcacctaattctcatttcc

SEQ ID NO: 3662218 - DNA, 25 bp, Homo sapien
gactttcaacggtgcctgcctattg

SEQ ID NO: 3662219 - DNA, 25 bp, Homo sapien
atatattttgactttcaacggtgcc

SEQ ID NO: 3662220 - DNA, 25 bp, Homo sapien
tcacaatcaaataagcaagaatggc

SEQ ID NO: 3662221 - DNA, 25 bp, Homo sapien
tgcagggaacgagtgggtgttggca

SEQ ID NO: 3662222 - DNA, 25 bp, Homo sapien
gcagggaacgagtgggtgttggcag

SEQ ID NO: 3662223 - DNA, 25 bp, Homo sapien
ctgcagggaacgagtgggtgttggc

SEQ ID NO: 3662224 - DNA, 25 bp, Homo sapien
gcctgtctctcagtgtaacaaaagg

SEQ ID NO: 3662225 - DNA, 25 bp, Homo sapien
gctagggagatacagctctacagaa

SEQ ID NO: 3662226 - DNA, 25 bp, Homo sapien
aacaaaaggtgttgctagggagata

SEQ ID NO: 3662227 - DNA, 25 bp, Homo sapien
tctcagtgtaacaaaaggtgttgct

SEQ ID NO: 3662228 - DNA, 25 bp, Homo sapien
agtcagtcacttttggcatacatca

SEQ ID NO: 3662229 - DNA, 25 bp, Homo sapien
aaatgagacaagtggcaagtaaata

SEQ ID NO: 3662230 - DNA, 25 bp, Homo sapien
cagaagagtcagtcacttttggcat

SEQ ID NO: 3662231 - DNA, 25 bp, Homo sapien
gaagagtcagtcacttttggcatac

SEQ ID NO: 3662232 - DNA, 25 bp, Homo sapien
aacatatggaaatttacaatcctca

SEQ ID NO: 3662233 - DNA, 25 bp, Homo sapien
tattcacaactaagtttaaatctaa

SEQ ID NO: 3662234 - DNA, 25 bp, Homo sapien
atatggaaatttacaatcctcaagt

SEQ ID NO: 3662235 - DNA, 25 bp, Homo sapien
ttattcacaactaagtttaaatcta

SEQ ID NO: 3662236 - DNA, 25 bp, Homo sapien
tctgcttacgccttttgttcccaca

SEQ ID NO: 3662237 - DNA, 25 bp, Homo sapien
cactgaacgttctgcttacgccttt

SEQ ID NO: 3662238 - DNA, 25 bp, Homo sapien
tgaacgttctgcttacgccttttgt

SEQ ID NO: 3662239 - DNA, 25 bp, Homo sapien
aacccactgaacgttctgcttacgc

SEQ ID NO: 3662240 - DNA, 25 bp, Homo sapien
aggccaggacaatcaaaacaaccag

SEQ ID NO: 3662241 - DNA, 25 bp, Homo sapien
gggcctgacagccaaaaccaagctc

SEQ ID NO: 3662242 - DNA, 25 bp, Homo sapien
caacagttgctaggtctctgatgat

SEQ ID NO: 3662243 - DNA, 25 bp, Homo sapien
aggggcctgacagccaaaaccaagc

SEQ ID NO: 3662244 - DNA, 25 bp, Homo sapien
ctctgatgattttcatagtatattc

SEQ ID NO: 3662245 - DNA, 25 bp, Homo sapien
cttaaaatacttcagcgacaagaag

SEQ ID NO: 3662246 - DNA, 25 bp, Homo sapien
cagaagtaagtaggagtaaaatgac

SEQ ID NO: 3662247 - DNA, 25 bp, Homo sapien
caagaaaagttcaaggtgtccactc

SEQ ID NO: 3662248 - DNA, 25 bp, Homo sapien
gccttcagagtagatcatacatttg

SEQ ID NO: 3662249 - DNA, 25 bp, Homo sapien
cagcagcagctatggagaattatac

SEQ ID NO: 3662250 - DNA, 25 bp, Homo sapien
agctttcagagtcgaggcctccagg

SEQ ID NO: 3662251 - DNA, 25 bp, Homo sapien
tctgaacaacattccctagcggctt

SEQ ID NO: 3662252 - DNA, 25 bp, Homo sapien
catcatagggttaacagagttcagc

SEQ ID NO: 3662253 - DNA, 25 bp, Homo sapien
cagtaggagtccctcagctaaggaa

SEQ ID NO: 3662254 - DNA, 25 bp, Homo sapien
tacatccttcctaggcctatgtggg

SEQ ID NO: 3662255 - DNA, 25 bp, Homo sapien
ggctgctttattccgagggactcct

SEQ ID NO: 3662256 - DNA, 25 bp, Homo sapien
ttcaatccccgatggcatgccaggg

SEQ ID NO: 3662257 - DNA, 25 bp, Homo sapien
tgcttctcggtctgtagcagctgca

SEQ ID NO: 3662258 - DNA, 25 bp, Homo sapien
cagcctgcttctcggtctgtagcag

SEQ ID NO: 3662259 - DNA, 25 bp, Homo sapien
gcctgcttctcggtctgtagcagct

SEQ ID NO: 3662260 - DNA, 25 bp, Homo sapien
agcagcctgcttctcggtctgtagc

SEQ ID NO: 3662261 - DNA, 25 bp, Homo sapien
tcagcccccggttcatctgcctgtg

SEQ ID NO: 3662262 - DNA, 25 bp, Homo sapien
cctgcttcagcccccggttcatctg

SEQ ID NO: 3662263 - DNA, 25 bp, Homo sapien
cttcagcccccggttcatctgcctg

SEQ ID NO: 3662264 - DNA, 25 bp, Homo sapien
agcccccggttcatctgcctgtggg

SEQ ID NO: 3662265 - DNA, 25 bp, Homo sapien
gctggaagtaggtctggagggtgat

SEQ ID NO: 3662266 - DNA, 25 bp, Homo sapien
ctgctggaagtaggtctggagggtg

SEQ ID NO: 3662267 - DNA, 25 bp, Homo sapien
ggaagtaggtctggagggtgatcat

SEQ ID NO: 3662268 - DNA, 25 bp, Homo sapien
ctggaagtaggtctggagggtgatc

SEQ ID NO: 3662269 - DNA, 25 bp, Homo sapien
gttttcacagatttctggccggatg

SEQ ID NO: 3662270 - DNA, 25 bp, Homo sapien
tcacagatttctggccggatgttgc

SEQ ID NO: 3662271 - DNA, 25 bp, Homo sapien
acagatttctggccggatgttgcag

SEQ ID NO: 3662272 - DNA, 25 bp, Homo sapien
ttttcacagatttctggccggatgt

SEQ ID NO: 3662273 - DNA, 25 bp, Homo sapien
cttccgggttcaagtttcaagtgat

SEQ ID NO: 3662274 - DNA, 25 bp, Homo sapien
tagcacctagtggactagctctgac

SEQ ID NO: 3662275 - DNA, 25 bp, Homo sapien
tgttgtaacacagcatttgattagc

SEQ ID NO: 3662276 - DNA, 25 bp, Homo sapien
taatagtgacacttataactgggaa

SEQ ID NO: 3662277 - DNA, 25 bp, Homo sapien
ggtaagatgatgcaattgacagcct

SEQ ID NO: 3662278 - DNA, 25 bp, Homo sapien
tgaaacatagattatgctgatgcca

SEQ ID NO: 3662279 - DNA, 25 bp, Homo sapien
ctgaaacatagattatgctgatgcc

SEQ ID NO: 3662280 - DNA, 25 bp, Homo sapien
cttccacatcccctgaagaataatc

SEQ ID NO: 3662281 - DNA, 25 bp, Homo sapien
agaataatcctcttctataggacgc

SEQ ID NO: 3662282 - DNA, 25 bp, Homo sapien
tttcttccacatcccctgaagaata

SEQ ID NO: 3662283 - DNA, 25 bp, Homo sapien
cctgaagaataatcctcttctatag

SEQ ID NO: 3662284 - DNA, 25 bp, Homo sapien
cctggatgacagagcgagactgtgc

SEQ ID NO: 3662285 - DNA, 25 bp, Homo sapien
ggatattcttcatggatacaccaaa

SEQ ID NO: 3662286 - DNA, 25 bp, Homo sapien
caggtttaactgaagatagccagat

SEQ ID NO: 3662287 - DNA, 25 bp, Homo sapien
cactgaatctgttgcagtatgttgc

SEQ ID NO: 3662288 - DNA, 25 bp, Homo sapien
tctgggcctcacaaagactcgtgtt

SEQ ID NO: 3662289 - DNA, 25 bp, Homo sapien
cccatacttcggtggctaagaatgt

SEQ ID NO: 3662290 - DNA, 25 bp, Homo sapien
atttattaaggaacacatgctcctt

SEQ ID NO: 3662291 - DNA, 25 bp, Homo sapien
catgctccttatcgcttttggtgcc

SEQ ID NO: 3662292 - DNA, 25 bp, Homo sapien
gggaggtggttactgtcctggaaca

SEQ ID NO: 3662293 - DNA, 25 bp, Homo sapien
taactgcactagagttacagctggg

SEQ ID NO: 3662294 - DNA, 25 bp, Homo sapien
gatgactgaataacccatggctgtg

SEQ ID NO: 3662295 - DNA, 25 bp, Homo sapien
tagtttggcccgaaggtaactgcac

SEQ ID NO: 3662296 - DNA, 25 bp, Homo sapien
tactccctggacatgtatagtttgg

SEQ ID NO: 3662297 - DNA, 25 bp, Homo sapien
cctactaaggtgattattcatgaaa

SEQ ID NO: 3662298 - DNA, 25 bp, Homo sapien
actaaggtgattattcatgaaaaca

SEQ ID NO: 3662299 - DNA, 25 bp, Homo sapien
tacctactaaggtgattattcatga

SEQ ID NO: 3662300 - DNA, 25 bp, Homo sapien
ctacctactaaggtgattattcatg

SEQ ID NO: 3662301 - DNA, 25 bp, Homo sapien
tatatacttcccgaagtacacggag

SEQ ID NO: 3662302 - DNA, 25 bp, Homo sapien
tactttgagggcctagggtagcaga

SEQ ID NO: 3662303 - DNA, 25 bp, Homo sapien
tacatgggaaattgatttggacaaa

SEQ ID NO: 3662304 - DNA, 25 bp, Homo sapien
tgtttttgctcatgaacgccccaca

SEQ ID NO: 3662305 - DNA, 25 bp, Homo sapien
gagggtcttcgtgaaaggatttctc

SEQ ID NO: 3662306 - DNA, 25 bp, Homo sapien
catctgtctctgcaattgctgctac

SEQ ID NO: 3662307 - DNA, 25 bp, Homo sapien
ctataagagggtcttcgtgaaagga

SEQ ID NO: 3662308 - DNA, 25 bp, Homo sapien
gtttatgagaatcaattacaccttc

SEQ ID NO: 3662309 - DNA, 25 bp, Homo sapien
gtagcaatactaggtggtgttcctt

SEQ ID NO: 3662310 - DNA, 25 bp, Homo sapien
tgtattgccccgtgctagtctgata

SEQ ID NO: 3662311 - DNA, 25 bp, Homo sapien
caccaggcacatcagaggacagttc

SEQ ID NO: 3662312 - DNA, 25 bp, Homo sapien
tatgctagttggtactgccatggta

SEQ ID NO: 3662313 - DNA, 25 bp, Homo sapien
cactgtatcatatcgaattgcagca

SEQ ID NO: 3662314 - DNA, 25 bp, Homo sapien
tagagaagacttaaagctagcactg

SEQ ID NO: 3662315 - DNA, 25 bp, Homo sapien
taaagctagcactgtatcatatcga

SEQ ID NO: 3662316 - DNA, 25 bp, Homo sapien
tcatatcgaattgcagcatacatac

SEQ ID NO: 3662317 - DNA, 25 bp, Homo sapien
tagagagtagtgaaacattgaaaac

SEQ ID NO: 3662318 - DNA, 25 bp, Homo sapien
tttcttctatattcggcagtcaaaa

SEQ ID NO: 3662319 - DNA, 25 bp, Homo sapien
atgtaattgtgggtaacaaaagcca

SEQ ID NO: 3662320 - DNA, 25 bp, Homo sapien
cagacatttatgttcgcatgcatca

SEQ ID NO: 3662321 - DNA, 25 bp, Homo sapien
ctagctcttgctttttacgtatcaa

SEQ ID NO: 3662322 - DNA, 25 bp, Homo sapien
aattaacggtccattaaaatgcaca

SEQ ID NO: 3662323 - DNA, 25 bp, Homo sapien
gctttttacgtatcaaacactcttc

SEQ ID NO: 3662324 - DNA, 25 bp, Homo sapien
tgctttaatcagagcaaaaagcaca

SEQ ID NO: 3662325 - DNA, 25 bp, Homo sapien
atcacatatattccagtacctaagt

SEQ ID NO: 3662326 - DNA, 25 bp, Homo sapien
cacatatattccagtacctaagtag

SEQ ID NO: 3662327 - DNA, 25 bp, Homo sapien
ttagtagtcaggacttaaattaaga

SEQ ID NO: 3662328 - DNA, 25 bp, Homo sapien
caggacttaaattaagacttgagtt

SEQ ID NO: 3662329 - DNA, 25 bp, Homo sapien
gttagaaatctggattgttccacct

SEQ ID NO: 3662330 - DNA, 25 bp, Homo sapien
gggttagaaatctggattgttccac

SEQ ID NO: 3662331 - DNA, 25 bp, Homo sapien
ggttagaaatctggattgttccacc

SEQ ID NO: 3662332 - DNA, 25 bp, Homo sapien
cttgaacaacaacctggctgcctgg

SEQ ID NO: 3662333 - DNA, 25 bp, Homo sapien
gaacaacaacctggctgcctgggac

SEQ ID NO: 3662334 - DNA, 25 bp, Homo sapien
gccatcagctgattgtgctgcgtac

SEQ ID NO: 3662335 - DNA, 25 bp, Homo sapien
tgtgtgccatcagctgattgtgctg

SEQ ID NO: 3662336 - DNA, 25 bp, Homo sapien
caccatctaccttcgatctatttca

SEQ ID NO: 3662337 - DNA, 25 bp, Homo sapien
tatagtaatccataggtattctaaa

SEQ ID NO: 3662338 - DNA, 25 bp, Homo sapien
tctaccttcgatctatttcaaaaaa

SEQ ID NO: 3662339 - DNA, 25 bp, Homo sapien
agtaatccataggtattctaaatgt

SEQ ID NO: 3662340 - DNA, 25 bp, Homo sapien
ttctatcatgctactctgaatttgg

SEQ ID NO: 3662341 - DNA, 25 bp, Homo sapien
ttttctatcatgctactctgaattt

SEQ ID NO: 3662342 - DNA, 25 bp, Homo sapien
tatcatgctactctgaatttggcct

SEQ ID NO: 3662343 - DNA, 25 bp, Homo sapien
ctatcatgctactctgaatttggcc

SEQ ID NO: 3662344 - DNA, 25 bp, Homo sapien
tcagagggatagcacccaggccagg

SEQ ID NO: 3662345 - DNA, 25 bp, Homo sapien
tgggtcagagggatagcacccaggc

SEQ ID NO: 3662346 - DNA, 25 bp, Homo sapien
gtcagagggatagcacccaggccag

SEQ ID NO: 3662347 - DNA, 25 bp, Homo sapien
ggtcagagggatagcacccaggcca

SEQ ID NO: 3662348 - DNA, 25 bp, Homo sapien
aagctgttccacaatagccagcttc

SEQ ID NO: 3662349 - DNA, 25 bp, Homo sapien
tccacaatagccagcttccggtggc

SEQ ID NO: 3662350 - DNA, 25 bp, Homo sapien
gctgttccacaatagccagcttccg

SEQ ID NO: 3662351 - DNA, 25 bp, Homo sapien
tgttccacaatagccagcttccggt

SEQ ID NO: 3662352 - DNA, 25 bp, Homo sapien
gtgaggaatgaagagtttagctgaa

SEQ ID NO: 3662353 - DNA, 25 bp, Homo sapien
actgtgaggaatgaagagtttagct

SEQ ID NO: 3662354 - DNA, 25 bp, Homo sapien
gctgaactttcaggaacaattccca

SEQ ID NO: 3662355 - DNA, 25 bp, Homo sapien
gctgcctctggcatgattaggagga

SEQ ID NO: 3662356 - DNA, 25 bp, Homo sapien
tcttatcaggcaatcggtatgtgtg

SEQ ID NO: 3662357 - DNA, 25 bp, Homo sapien
gaactcacagaaggttgcctaagcc

SEQ ID NO: 3662358 - DNA, 25 bp, Homo sapien
gatatgtgcctaaggaagtacagta

SEQ ID NO: 3662359 - DNA, 25 bp, Homo sapien
caatcggtatgtgtgaagaaggccc

SEQ ID NO: 3662360 - DNA, 25 bp, Homo sapien
tgggcttctgcagacagaactgtct

SEQ ID NO: 3662361 - DNA, 25 bp, Homo sapien
atgggcttctgcagacagaactgtc

SEQ ID NO: 3662362 - DNA, 25 bp, Homo sapien
tgcagacagaactgtcttgtttcct

SEQ ID NO: 3662363 - DNA, 25 bp, Homo sapien
cttctgcagacagaactgtcttgtt

SEQ ID NO: 3662364 - DNA, 25 bp, Homo sapien
ctgtgtcatctccagttacagccat

SEQ ID NO: 3662365 - DNA, 25 bp, Homo sapien
tcatgacgtgtttccctcttcaagc

SEQ ID NO: 3662366 - DNA, 25 bp, Homo sapien
tagttaactctaaatctgtcagcag

SEQ ID NO: 3662367 - DNA, 25 bp, Homo sapien
gcagcattttacaaagcggaaagga

SEQ ID NO: 3662368 - DNA, 25 bp, Homo sapien
cagaggcagtggtgagctagttaac

SEQ ID NO: 3662369 - DNA, 25 bp, Homo sapien
gctggccagacaactcctgagttct

SEQ ID NO: 3662370 - DNA, 25 bp, Homo sapien
tggccagacaactcctgagttctgt

SEQ ID NO: 3662371 - DNA, 25 bp, Homo sapien
taagctggccagacaactcctgagt

SEQ ID NO: 3662372 - DNA, 25 bp, Homo sapien
cactaagctggccagacaactcctg

SEQ ID NO: 3662373 - DNA, 25 bp, Homo sapien
gcctcagtaggaggctcgatcttac

SEQ ID NO: 3662374 - DNA, 25 bp, Homo sapien
caggcgcatgcagggacggcctcag

SEQ ID NO: 3662375 - DNA, 25 bp, Homo sapien
ggcgcatgcagggacggcctcagta

SEQ ID NO: 3662376 - DNA, 25 bp, Homo sapien
gacggcctcagtaggaggctcgatc

SEQ ID NO: 3662377 - DNA, 25 bp, Homo sapien
tgttcctatccacaaagagggctga

SEQ ID NO: 3662378 - DNA, 25 bp, Homo sapien
gttctgcagtctatagcatctctag

SEQ ID NO: 3662379 - DNA, 25 bp, Homo sapien
tactgtattacaaacaagaccactg

SEQ ID NO: 3662380 - DNA, 25 bp, Homo sapien
ggctgagacccattaacttcgaaga

SEQ ID NO: 3662381 - DNA, 25 bp, Homo sapien
gacttggggcaagttcagtttcctc

SEQ ID NO: 3662382 - DNA, 25 bp, Homo sapien
gaacaatagccagtgacgaatgaga

SEQ ID NO: 3662383 - DNA, 25 bp, Homo sapien
accaggttgacacatgcaggcagca

SEQ ID NO: 3662384 - DNA, 25 bp, Homo sapien
gagaagtttacatgacaccaggttg

SEQ ID NO: 3662385 - DNA, 25 bp, Homo sapien
aacaatagaacagctggtggtcacc

SEQ ID NO: 3662386 - DNA, 25 bp, Homo sapien
cagcagtaggagctcggatctggta

SEQ ID NO: 3662387 - DNA, 25 bp, Homo sapien
gggactgtgcaaacttccgggcgat

SEQ ID NO: 3662388 - DNA, 25 bp, Homo sapien
tctcgtttgcgtgttgcttcttctg

SEQ ID NO: 3662389 - DNA, 25 bp, Homo sapien
tcattagcctcagctctcgtttgcg

SEQ ID NO: 3662390 - DNA, 25 bp, Homo sapien
gaaaatgtcgaaaagtaacgcctca

SEQ ID NO: 3662391 - DNA, 25 bp, Homo sapien
gaaaatgagagctgactggaagtac

SEQ ID NO: 3662392 - DNA, 25 bp, Homo sapien
tatcctaagtggttagagccatgga

SEQ ID NO: 3662393 - DNA, 25 bp, Homo sapien
tggacatcacccttacaacataggg

SEQ ID NO: 3662394 - DNA, 25 bp, Homo sapien
tagccaggaacaatggactcaccct

SEQ ID NO: 3662395 - DNA, 25 bp, Homo sapien
gaactgcaggaaaagatcaacccct

SEQ ID NO: 3662396 - DNA, 25 bp, Homo sapien
taaagacctaatagcggtgttgcgg

SEQ ID NO: 3662397 - DNA, 25 bp, Homo sapien
taatagtgagctcggttttcaggct

SEQ ID NO: 3662398 - DNA, 25 bp, Homo sapien
ggagggatggcaaccacttccctta

SEQ ID NO: 3662399 - DNA, 25 bp, Homo sapien
tgcctttgaggtagatcacccttca

SEQ ID NO: 3662400 - DNA, 25 bp, Homo sapien
tatgtagaagacaccctttaattgg

SEQ ID NO: 3662401 - DNA, 25 bp, Homo sapien
gtcaaaaaagcctgcactgaaacag

SEQ ID NO: 3662402 - DNA, 25 bp, Homo sapien
tattggctagaaaacacacatggat

SEQ ID NO: 3662403 - DNA, 25 bp, Homo sapien
tgactgcaagacacagtttattggc

SEQ ID NO: 3662404 - DNA, 25 bp, Homo sapien
agtaactctgggcatatttcaagac

SEQ ID NO: 3662405 - DNA, 25 bp, Homo sapien
ttaaagcactataagcccaaaatga

SEQ ID NO: 3662406 - DNA, 25 bp, Homo sapien
cactggtaacaatgcccacaactgt

SEQ ID NO: 3662407 - DNA, 25 bp, Homo sapien
gttttcttagggcacacattccact

SEQ ID NO: 3662408 - DNA, 25 bp, Homo sapien
cccaagtggaatttctacaaacaca

SEQ ID NO: 3662409 - DNA, 25 bp, Homo sapien
caaaaggcacatactccgacataat

SEQ ID NO: 3662410 - DNA, 25 bp, Homo sapien
ttccaacacaatccacagtgggtca

SEQ ID NO: 3662411 - DNA, 25 bp, Homo sapien
caacagccaatcgatcctaggtaag

SEQ ID NO: 3662412 - DNA, 25 bp, Homo sapien
gcaacacaaggcaaatgactacagg

SEQ ID NO: 3662413 - DNA, 25 bp, Homo sapien
tacaggaacagccttccaacacaat

SEQ ID NO: 3662414 - DNA, 25 bp, Homo sapien
cctcaatgagagtcttgttttggtt

SEQ ID NO: 3662415 - DNA, 25 bp, Homo sapien
aaagatctttgagggccttgagttc

SEQ ID NO: 3662416 - DNA, 25 bp, Homo sapien
tttcttcttcctgcgacactcccgg

SEQ ID NO: 3662417 - DNA, 25 bp, Homo sapien
ttggttttcaagcacagccacacga

SEQ ID NO: 3662418 - DNA, 25 bp, Homo sapien
gacaaacagatcaaagtaagctcgg

SEQ ID NO: 3662419 - DNA, 25 bp, Homo sapien
taagctcggtaagtgtgatcacggc

SEQ ID NO: 3662420 - DNA, 25 bp, Homo sapien
caaactggattcttaagggtcacac

SEQ ID NO: 3662421 - DNA, 25 bp, Homo sapien
caataagtaggactgctgcatctcc

SEQ ID NO: 3662422 - DNA, 25 bp, Homo sapien
tttcgacgtcgacattctttggcag

SEQ ID NO: 3662423 - DNA, 25 bp, Homo sapien
gcaactcggctctccagacatttta

SEQ ID NO: 3662424 - DNA, 25 bp, Homo sapien
tgcaactcggctctccagacatttt

SEQ ID NO: 3662425 - DNA, 25 bp, Homo sapien
catattctttctttcgacgtcgaca

SEQ ID NO: 3662426 - DNA, 25 bp, Homo sapien
ttcctctataagcttcttgttctgg

SEQ ID NO: 3662427 - DNA, 25 bp, Homo sapien
taatctgttttgggagaacaaatgt

SEQ ID NO: 3662428 - DNA, 25 bp, Homo sapien
aggtttcaagttcctctataagctt

SEQ ID NO: 3662429 - DNA, 25 bp, Homo sapien
tgttttgggagaacaaatgtctttc

SEQ ID NO: 3662430 - DNA, 25 bp, Homo sapien
tgcataggacactattgatgacaca

SEQ ID NO: 3662431 - DNA, 25 bp, Homo sapien
tgatgacacatagaatgggagctgc

SEQ ID NO: 3662432 - DNA, 25 bp, Homo sapien
cgacttaactacgtacagtgaagca

SEQ ID NO: 3662433 - DNA, 25 bp, Homo sapien
caagtatgtggcattggaacaagcc

SEQ ID NO: 3662434 - DNA, 25 bp, Homo sapien
tgtagaaactgacttgtaccccgaa

SEQ ID NO: 3662435 - DNA, 25 bp, Homo sapien
tatgaaggccgaaacgctaacagcc

SEQ ID NO: 3662436 - DNA, 25 bp, Homo sapien
gtatgcaatgcgatcccaacaggct

SEQ ID NO: 3662437 - DNA, 25 bp, Homo sapien
taatgaacctcagctgaatgtgccg

SEQ ID NO: 3662438 - DNA, 25 bp, Homo sapien
aataatgccccttgtgtgtcatcac

SEQ ID NO: 3662439 - DNA, 25 bp, Homo sapien
ctggtgctctgtgtacagtgcacca

SEQ ID NO: 3662440 - DNA, 25 bp, Homo sapien
atcactaggtcatggccctcctcag

SEQ ID NO: 3662441 - DNA, 25 bp, Homo sapien
cagggtcatcctgcgtacactgtaa

SEQ ID NO: 3662442 - DNA, 25 bp, Homo sapien
ggtggcctcagtatgatcttcctgg

SEQ ID NO: 3662443 - DNA, 25 bp, Homo sapien
ctggtacgaggctcacatctctcct

SEQ ID NO: 3662444 - DNA, 25 bp, Homo sapien
gccaggcggctctcaacctggtggc

SEQ ID NO: 3662445 - DNA, 25 bp, Homo sapien
cagtatgatcttcctggtacgaggc

SEQ ID NO: 3662446 - DNA, 25 bp, Homo sapien
tcagctcttgatgttgtgaccggag

SEQ ID NO: 3662447 - DNA, 25 bp, Homo sapien
gggacaggttcactgcacgatttcc

SEQ ID NO: 3662448 - DNA, 25 bp, Homo sapien
ggcgatgacttctagtcccagttca

SEQ ID NO: 3662449 - DNA, 25 bp, Homo sapien
tagcaaaaagctctggggcgatgac

SEQ ID NO: 3662450 - DNA, 25 bp, Homo sapien
agcagttctcagactgaacgtgcac

SEQ ID NO: 3662451 - DNA, 25 bp, Homo sapien
gagcttgtttaacaggttctcaaac

SEQ ID NO: 3662452 - DNA, 25 bp, Homo sapien
cctagagagcttgtttaacaggttc

SEQ ID NO: 3662453 - DNA, 25 bp, Homo sapien
tgcacagaattacctagagagcttg

SEQ ID NO: 3662454 - DNA, 25 bp, Homo sapien
ccgggagcggcaccttcaggcgctt

SEQ ID NO: 3662455 - DNA, 25 bp, Homo sapien
cttcaggcgcttggcgtgggcctct

SEQ ID NO: 3662456 - DNA, 25 bp, Homo sapien
cagctctcaacgctggctgcacggt

SEQ ID NO: 3662457 - DNA, 25 bp, Homo sapien
ggtcaagacctagcgcacagggctc

SEQ ID NO: 3662458 - DNA, 25 bp, Homo sapien
cctcagttggactttgctgggacat

SEQ ID NO: 3662459 - DNA, 25 bp, Homo sapien
ggttcctctggcgtattctccagct

SEQ ID NO: 3662460 - DNA, 25 bp, Homo sapien
agctccttcggcgtgtgctctctcc

SEQ ID NO: 3662461 - DNA, 25 bp, Homo sapien
aggcccacggcatcctcagttggac

SEQ ID NO: 3662462 - DNA, 25 bp, Homo sapien
tatccacatatctcatcttctatac

SEQ ID NO: 3662463 - DNA, 25 bp, Homo sapien
ttatccacatatctcatcttctata

SEQ ID NO: 3662464 - DNA, 25 bp, Homo sapien
atccacatatctcatcttctataca

SEQ ID NO: 3662465 - DNA, 25 bp, Homo sapien
atggaacgttcatcatatgctgggc

SEQ ID NO: 3662466 - DNA, 25 bp, Homo sapien
cctgcaatggcagactaaacagtgt

SEQ ID NO: 3662467 - DNA, 25 bp, Homo sapien
ggattgaaatcacataccgggcttc

SEQ ID NO: 3662468 - DNA, 25 bp, Homo sapien
gagagactgaagtgcagcaccacat

SEQ ID NO: 3662469 - DNA, 25 bp, Homo sapien
gcacttcagcccgggtgacacccag

SEQ ID NO: 3662470 - DNA, 25 bp, Homo sapien
tcagcccgggtgacacccagattct

SEQ ID NO: 3662471 - DNA, 25 bp, Homo sapien
acttcagcccgggtgacacccagat

SEQ ID NO: 3662472 - DNA, 25 bp, Homo sapien
ttcagcccgggtgacacccagattc

SEQ ID NO: 3662473 - DNA, 25 bp, Homo sapien
ccttttaagcttaggtacatgatcc

SEQ ID NO: 3662474 - DNA, 25 bp, Homo sapien
caccgcacccatccaagttttacct

SEQ ID NO: 3662475 - DNA, 25 bp, Homo sapien
gactacaggaggcaagcactgcgat

SEQ ID NO: 3662476 - DNA, 25 bp, Homo sapien
tctttgactcccttcagatcatgta

SEQ ID NO: 3662477 - DNA, 25 bp, Homo sapien
ttgggaagcttctgtgtatacagtg

SEQ ID NO: 3662478 - DNA, 25 bp, Homo sapien
ctcctccaaagtgtagagttcatag

SEQ ID NO: 3662479 - DNA, 25 bp, Homo sapien
caaagtgtagagttcatagcttttc

SEQ ID NO: 3662480 - DNA, 25 bp, Homo sapien
tgtagagttcatagcttttccttgg

SEQ ID NO: 3662481 - DNA, 25 bp, Homo sapien
tgcttgctatggtactgggctggaa

SEQ ID NO: 3662482 - DNA, 25 bp, Homo sapien
atttcctggagactttaccttggca

SEQ ID NO: 3662483 - DNA, 25 bp, Homo sapien
tcacgtcttttggtatcagccccag

SEQ ID NO: 3662484 - DNA, 25 bp, Homo sapien
gataacaccttcaatgcccgttagg

SEQ ID NO: 3662485 - DNA, 25 bp, Homo sapien
accctactgaagcaggcggtcctgt

SEQ ID NO: 3662486 - DNA, 25 bp, Homo sapien
tcatactggagatcataaactcgca

SEQ ID NO: 3662487 - DNA, 25 bp, Homo sapien
aacgcactgcagctataattcgaca

SEQ ID NO: 3662488 - DNA, 25 bp, Homo sapien
ggagcagctcaatagaccctactga

SEQ ID NO: 3662489 - DNA, 25 bp, Homo sapien
cttaattgaatcaggaggagataac

SEQ ID NO: 3662490 - DNA, 25 bp, Homo sapien
tgcagtcttacatcagccatactcg

SEQ ID NO: 3662491 - DNA, 25 bp, Homo sapien
tcgtatccatgaaatatgagtcagt

SEQ ID NO: 3662492 - DNA, 25 bp, Homo sapien
gagtcagtcatttgcacaactccct

SEQ ID NO: 3662493 - DNA, 25 bp, Homo sapien
ttggtgtccgcttccccggcggctg

SEQ ID NO: 3662494 - DNA, 25 bp, Homo sapien
atccgcggcggaggagcgctcgggt

SEQ ID NO: 3662495 - DNA, 25 bp, Homo sapien
acggcgggactagccgacgagcggg

SEQ ID NO: 3662496 - DNA, 25 bp, Homo sapien
cctcggcaagaggttccggttcaag

SEQ ID NO: 3662497 - DNA, 25 bp, Homo sapien
tatgttctcccggtcgctgatgtgc

SEQ ID NO: 3662498 - DNA, 25 bp, Homo sapien
cgcagcacgaggtagtgttccccat

SEQ ID NO: 3662499 - DNA, 25 bp, Homo sapien
cgtgtctggccggtaggactccagc

SEQ ID NO: 3662500 - DNA, 25 bp, Homo sapien
cattcctccggagcttgggactgga

SEQ ID NO: 3662501 - DNA, 25 bp, Homo sapien
ttccgcggccgctcacttgggggta

SEQ ID NO: 3662502 - DNA, 25 bp, Homo sapien
gatgccgcgggcctgcaaagtttcc

SEQ ID NO: 3662503 - DNA, 25 bp, Homo sapien
gcgggcctgcaaagtttccgcggcc

SEQ ID NO: 3662504 - DNA, 25 bp, Homo sapien
taggcccgccgtgctcgatgccgcg

SEQ ID NO: 3662505 - DNA, 25 bp, Homo sapien
tgcattcaggtagtgccgggaaccc

SEQ ID NO: 3662506 - DNA, 25 bp, Homo sapien
cacaacttggcttcgggctgcattc

SEQ ID NO: 3662507 - DNA, 25 bp, Homo sapien
taggacaaacgcgtgcacaacttgg

SEQ ID NO: 3662508 - DNA, 25 bp, Homo sapien
cagctctggccgctccattaaggac

SEQ ID NO: 3662509 - DNA, 25 bp, Homo sapien
tcgaggttggagacaccgggattcc

SEQ ID NO: 3662510 - DNA, 25 bp, Homo sapien
tcgggcccatgcaaaaactgagact

SEQ ID NO: 3662511 - DNA, 25 bp, Homo sapien
tatttgactaatcctggaaccgcca

SEQ ID NO: 3662512 - DNA, 25 bp, Homo sapien
ttcataggactgcaattcgggccca

SEQ ID NO: 3662513 - DNA, 25 bp, Homo sapien
accatttagaagaaattacacgaag

SEQ ID NO: 3662514 - DNA, 25 bp, Homo sapien
tagaagaaattacacgaagacaaac

SEQ ID NO: 3662515 - DNA, 25 bp, Homo sapien
gaaattacacgaagacaaacgagaa

SEQ ID NO: 3662516 - DNA, 25 bp, Homo sapien
aatgtggcctttccacagtggagag

SEQ ID NO: 3662517 - DNA, 25 bp, Homo sapien
taagttcatctagtactttgtggct

SEQ ID NO: 3662518 - DNA, 25 bp, Homo sapien
ggatcctcatagtactacctcaatg

SEQ ID NO: 3662519 - DNA, 25 bp, Homo sapien
tttagcctcatttggatcctcatag

SEQ ID NO: 3662520 - DNA, 25 bp, Homo sapien
gaaaatcaatatgagtaccacattc

SEQ ID NO: 3662521 - DNA, 25 bp, Homo sapien
gaaacatatagctatattacataga

SEQ ID NO: 3662522 - DNA, 25 bp, Homo sapien
catagaactcccatgcagagtattt

SEQ ID NO: 3662523 - DNA, 25 bp, Homo sapien
caacagtcagaaggtctataatcag

SEQ ID NO: 3662524 - DNA, 25 bp, Homo sapien
cagagtatttcctagtcagccttca

SEQ ID NO: 3662525 - DNA, 25 bp, Homo sapien
gcaggcagcttcgtactgtgagtga

SEQ ID NO: 3662526 - DNA, 25 bp, Homo sapien
cttcagaagagaactcaaccaacag

SEQ ID NO: 3662527 - DNA, 25 bp, Homo sapien
gaagagaactcaaccaacagccaag

SEQ ID NO: 3662528 - DNA, 25 bp, Homo sapien
tgacgaagtcgtatcctcctgcttc

SEQ ID NO: 3662529 - DNA, 25 bp, Homo sapien
tcattttagctctactatgcttggg

SEQ ID NO: 3662530 - DNA, 25 bp, Homo sapien
tttagctctactatgcttgggaatc

SEQ ID NO: 3662531 - DNA, 25 bp, Homo sapien
ttaattcattttagctctactatgc

SEQ ID NO: 3662532 - DNA, 25 bp, Homo sapien
tagctctactatgcttgggaatccc

SEQ ID NO: 3662533 - DNA, 25 bp, Homo sapien
tgggactacaaggcaggagccaccg

SEQ ID NO: 3662534 - DNA, 25 bp, Homo sapien
aagtgctgggactacaaggcaggag

SEQ ID NO: 3662535 - DNA, 25 bp, Homo sapien
gtgctgggactacaaggcaggagcc

SEQ ID NO: 3662536 - DNA, 25 bp, Homo sapien
gctgggactacaaggcaggagccac

SEQ ID NO: 3662537 - DNA, 25 bp, Homo sapien
gaagtggtcataaatggcaccgact

SEQ ID NO: 3662538 - DNA, 25 bp, Homo sapien
catctggatctagctcctcaggagc

SEQ ID NO: 3662539 - DNA, 25 bp, Homo sapien
tggcctcaaataagggtccagaaca

SEQ ID NO: 3662540 - DNA, 25 bp, Homo sapien
cacccttcttggtatgctagacaag

SEQ ID NO: 3662541 - DNA, 25 bp, Homo sapien
aatttgcgataggtaatccaggagc

SEQ ID NO: 3662542 - DNA, 25 bp, Homo sapien
gtgacaatctcaaaacccatcaaag

SEQ ID NO: 3662543 - DNA, 25 bp, Homo sapien
gatttcaaccatccaaatagaagag

SEQ ID NO: 3662544 - DNA, 25 bp, Homo sapien
tcctcatgagatacagcaacaactc

SEQ ID NO: 3662545 - DNA, 25 bp, Homo sapien
gaagttcctcagagtaataggcagg

SEQ ID NO: 3662546 - DNA, 25 bp, Homo sapien
caagcaggacagatctccacgatgt

SEQ ID NO: 3662547 - DNA, 25 bp, Homo sapien
tactgcaaggtcatttcggcctgaa

SEQ ID NO: 3662548 - DNA, 25 bp, Homo sapien
gtttggccctggactacttccacag

SEQ ID NO: 3662549 - DNA, 25 bp, Homo sapien
gctcaacccaacactgctgggtggc

SEQ ID NO: 3662550 - DNA, 25 bp, Homo sapien
caggtgctcaacccaacactgctgg

SEQ ID NO: 3662551 - DNA, 25 bp, Homo sapien
ccatccaggtgctcaacccaacact

SEQ ID NO: 3662552 - DNA, 25 bp, Homo sapien
ctcaacccaacactgctgggtggca

SEQ ID NO: 3662553 - DNA, 25 bp, Homo sapien
ctcatatagcaaatgggaattaagg

SEQ ID NO: 3662554 - DNA, 25 bp, Homo sapien
tcaataggccaacattctaaatcag

SEQ ID NO: 3662555 - DNA, 25 bp, Homo sapien
ggccttcctgcaccacattatcttc

SEQ ID NO: 3662556 - DNA, 25 bp, Homo sapien
tcccacaagcttcgctttgttctca

SEQ ID NO: 3662557 - DNA, 25 bp, Homo sapien
gcaacatccctgcattcagggcctt

SEQ ID NO: 3662558 - DNA, 25 bp, Homo sapien
ccacggaagcaatttgtgaggaaag

SEQ ID NO: 3662559 - DNA, 25 bp, Homo sapien
cggaagcccacggaagcaatttgtg

SEQ ID NO: 3662560 - DNA, 25 bp, Homo sapien
gaagcccacggaagcaatttgtgag

SEQ ID NO: 3662561 - DNA, 25 bp, Homo sapien
tctcggaagcccacggaagcaattt

SEQ ID NO: 3662562 - DNA, 25 bp, Homo sapien
tagcagagctatgcagcctgaagac

SEQ ID NO: 3662563 - DNA, 25 bp, Homo sapien
caactctgcggtgactgtacagctc

SEQ ID NO: 3662564 - DNA, 25 bp, Homo sapien
tgggctaggctctgtaatggccaca

SEQ ID NO: 3662565 - DNA, 25 bp, Homo sapien
tatttgaactatgagctcctgaagg

SEQ ID NO: 3662566 - DNA, 25 bp, Homo sapien
cacaagggaggcaaaacgagctgca

SEQ ID NO: 3662567 - DNA, 25 bp, Homo sapien
ttcgccatgcactaaaagcctggag

SEQ ID NO: 3662568 - DNA, 25 bp, Homo sapien
gcctcttcacagagaatggatggaa

SEQ ID NO: 3662569 - DNA, 25 bp, Homo sapien
tctaaagccacagctcacctagtga

SEQ ID NO: 3662570 - DNA, 25 bp, Homo sapien
ggcccgtgatgaaacactttctcct

SEQ ID NO: 3662571 - DNA, 25 bp, Homo sapien
gtgatgaaacactttctcctgcttt

SEQ ID NO: 3662572 - DNA, 25 bp, Homo sapien
aggagagggcccgtgatgaaacact

SEQ ID NO: 3662573 - DNA, 25 bp, Homo sapien
tattcagaaggagagggcccgtgat

SEQ ID NO: 3662574 - DNA, 25 bp, Homo sapien
catcagatcccatggctcagggcaa

SEQ ID NO: 3662575 - DNA, 25 bp, Homo sapien
tcagggcaacgcttatgctggtaag

SEQ ID NO: 3662576 - DNA, 25 bp, Homo sapien
catgtaggttacaagccactagccc

SEQ ID NO: 3662577 - DNA, 25 bp, Homo sapien
tcttgcaaagagaccacgtgtcaat

SEQ ID NO: 3662578 - DNA, 25 bp, Homo sapien
catgcacatgtgagacatttggtgc

SEQ ID NO: 3662579 - DNA, 25 bp, Homo sapien
tcaacccatcatattactgtcaggc

SEQ ID NO: 3662580 - DNA, 25 bp, Homo sapien
gcacatgtgagacatttggtgccga

SEQ ID NO: 3662581 - DNA, 25 bp, Homo sapien
caacccatcatattactgtcaggcc

SEQ ID NO: 3662582 - DNA, 25 bp, Homo sapien
ataagctattacatagggtaaatct

SEQ ID NO: 3662583 - DNA, 25 bp, Homo sapien
aaaaggcctccttaatgtacttcat

SEQ ID NO: 3662584 - DNA, 25 bp, Homo sapien
ctggttgcaatacacaatctaacag

SEQ ID NO: 3662585 - DNA, 25 bp, Homo sapien
caatacacaatctaacagccattgg

SEQ ID NO: 3662586 - DNA, 25 bp, Homo sapien
cacaatctaacagccattggaggaa

SEQ ID NO: 3662587 - DNA, 25 bp, Homo sapien
agatgcgagacctgcctggtaaggc

SEQ ID NO: 3662588 - DNA, 25 bp, Homo sapien
tccccagcttggattaggatcagga

SEQ ID NO: 3662589 - DNA, 25 bp, Homo sapien
gaacaggatctgaaaaagggcagca

SEQ ID NO: 3662590 - DNA, 25 bp, Homo sapien
gctgtaactgttctgacctgggcac

SEQ ID NO: 3662591 - DNA, 25 bp, Homo sapien
agacctccagagagcacgcctccag

SEQ ID NO: 3662592 - DNA, 25 bp, Homo sapien
gaagtattggccctaacacagatgc

SEQ ID NO: 3662593 - DNA, 25 bp, Homo sapien
ttcttgaagtattggccctaacaca

SEQ ID NO: 3662594 - DNA, 25 bp, Homo sapien
cttttttctgttcacagctgttatt

SEQ ID NO: 3662595 - DNA, 25 bp, Homo sapien
gctaggctggatgtcccccctcctc

SEQ ID NO: 3662596 - DNA, 25 bp, Homo sapien
taaatcctcaacagctaggctggat

SEQ ID NO: 3662597 - DNA, 25 bp, Homo sapien
tcattaaatcctcaacagctaggct

SEQ ID NO: 3662598 - DNA, 25 bp, Homo sapien
ctgagaacactgacctcatacttcc

SEQ ID NO: 3662599 - DNA, 25 bp, Homo sapien
tcctcaactcccgatattcccatag

SEQ ID NO: 3662600 - DNA, 25 bp, Homo sapien
cttcagtgccactggagcctttttc

SEQ ID NO: 3662601 - DNA, 25 bp, Homo sapien
caactcccgatattcccatagccat

SEQ ID NO: 3662602 - DNA, 25 bp, Homo sapien
tcttcctcaactcccgatattccca

SEQ ID NO: 3662603 - DNA, 25 bp, Homo sapien
tctgaaaagttgagcctccaaatct

SEQ ID NO: 3662604 - DNA, 25 bp, Homo sapien
tcaagttctgaaaagttgagcctcc

SEQ ID NO: 3662605 - DNA, 25 bp, Homo sapien
cagtcaagttctgaaaagttgagcc

SEQ ID NO: 3662606 - DNA, 25 bp, Homo sapien
aagttctgaaaagttgagcctccaa

SEQ ID NO: 3662607 - DNA, 25 bp, Homo sapien
gaaatggtaccagctgaatgtcaca

SEQ ID NO: 3662608 - DNA, 25 bp, Homo sapien
aaatggtaccagctgaatgtcacac

SEQ ID NO: 3662609 - DNA, 25 bp, Homo sapien
ggctcaggtaatccgcggacctcag

SEQ ID NO: 3662610 - DNA, 25 bp, Homo sapien
gcgcccggcatctcatcactttttt

SEQ ID NO: 3662611 - DNA, 25 bp, Homo sapien
ctaaatctgctactaacagagccag

SEQ ID NO: 3662612 - DNA, 25 bp, Homo sapien
ggttagcggctgaataatcaaggat

SEQ ID NO: 3662613 - DNA, 25 bp, Homo sapien
gaacaaatgggacatgcaaagtctt

SEQ ID NO: 3662614 - DNA, 25 bp, Homo sapien
gaaattaactatggacgaatgtgaa

SEQ ID NO: 3662615 - DNA, 25 bp, Homo sapien
tatttctaaagtgaaagatgcctgt

SEQ ID NO: 3662616 - DNA, 25 bp, Homo sapien
gattttcagtcacacgatgatcaca

SEQ ID NO: 3662617 - DNA, 25 bp, Homo sapien
gatgcctgtgaaattcaaatggtac

SEQ ID NO: 3662618 - DNA, 25 bp, Homo sapien
tatgggcctcatccgccttcatgct

SEQ ID NO: 3662619 - DNA, 25 bp, Homo sapien
catgctacatgtcactggtttttaa

SEQ ID NO: 3662620 - DNA, 25 bp, Homo sapien
tctgcatcacattagcaatatgggc

SEQ ID NO: 3662621 - DNA, 25 bp, Homo sapien
caaagccacaatgaacgtccacatc

SEQ ID NO: 3662622 - DNA, 25 bp, Homo sapien
aaatccctgcttggcactcagggtc

SEQ ID NO: 3662623 - DNA, 25 bp, Homo sapien
tttccaaaaggcgatgtccaaatcc

SEQ ID NO: 3662624 - DNA, 25 bp, Homo sapien
agggtcccacaagtcactcctgggc

SEQ ID NO: 3662625 - DNA, 25 bp, Homo sapien
tcagggtcccacaagtcactcctgg

SEQ ID NO: 3662626 - DNA, 25 bp, Homo sapien
tcatgggtaaactcatctcctcctt

SEQ ID NO: 3662627 - DNA, 25 bp, Homo sapien
catgggtaaactcatctcctccttt

SEQ ID NO: 3662628 - DNA, 25 bp, Homo sapien
taattccaactatttctaataccca

SEQ ID NO: 3662629 - DNA, 25 bp, Homo sapien
atgggtaaactcatctcctccttta

SEQ ID NO: 3662630 - DNA, 25 bp, Homo sapien
attaaaatgcgagccgctggttccc

SEQ ID NO: 3662631 - DNA, 25 bp, Homo sapien
ccagatcacaattaaaatgcgagcc

SEQ ID NO: 3662632 - DNA, 25 bp, Homo sapien
tcccacagtgaaggcggtctccttc

SEQ ID NO: 3662633 - DNA, 25 bp, Homo sapien
gctgtacagaagtcaccagatcaca

SEQ ID NO: 3662634 - DNA, 25 bp, Homo sapien
taaccagctctgtctagtgccatac

SEQ ID NO: 3662635 - DNA, 25 bp, Homo sapien
caagtgcccaagtatacatgaagaa

SEQ ID NO: 3662636 - DNA, 25 bp, Homo sapien
cagaattggccctcacaaaagcacc

SEQ ID NO: 3662637 - DNA, 25 bp, Homo sapien
tctggtcagaggcacttggtaacat

SEQ ID NO: 3662638 - DNA, 25 bp, Homo sapien
tatgcagagaccaacaaacagtctt

SEQ ID NO: 3662639 - DNA, 25 bp, Homo sapien
gattatgcttggtttaagaaagacc

SEQ ID NO: 3662640 - DNA, 25 bp, Homo sapien
cctcagcagtcacttagagggaaag

SEQ ID NO: 3662641 - DNA, 25 bp, Homo sapien
ctcaagtgtggaatgcagtataaac

SEQ ID NO: 3662642 - DNA, 25 bp, Homo sapien
gcctccctatgctggctcagttaac

SEQ ID NO: 3662643 - DNA, 25 bp, Homo sapien
agggccctctagtagattccctgtg

SEQ ID NO: 3662644 - DNA, 25 bp, Homo sapien
gaggcagggccctctagtagattcc

SEQ ID NO: 3662645 - DNA, 25 bp, Homo sapien
gttaacagtgacctcatgaagagca

SEQ ID NO: 3662646 - DNA, 25 bp, Homo sapien
ctgggtttaacctatctgtgggata

SEQ ID NO: 3662647 - DNA, 25 bp, Homo sapien
gaagacccagttcggcggtggatat

SEQ ID NO: 3662648 - DNA, 25 bp, Homo sapien
cctccaggctcagtaagataaagat

SEQ ID NO: 3662649 - DNA, 25 bp, Homo sapien
gggccatgcactgggctaaggcaca

SEQ ID NO: 3662650 - DNA, 25 bp, Homo sapien
aaagtgagtttcaactgggaggcca

SEQ ID NO: 3662651 - DNA, 25 bp, Homo sapien
taagacctaaacagcactggatgga

SEQ ID NO: 3662652 - DNA, 25 bp, Homo sapien
gatgggctgtccacttaggtctaga

SEQ ID NO: 3662653 - DNA, 25 bp, Homo sapien
gcgccaaagcaagcctgtaaagtca

SEQ ID NO: 3662654 - DNA, 25 bp, Homo sapien
cattgagtctccactatatgctagg

SEQ ID NO: 3662655 - DNA, 25 bp, Homo sapien
ggttgtcagggccagtccattctgc

SEQ ID NO: 3662656 - DNA, 25 bp, Homo sapien
cacgagtatatactgagaggttgtc

SEQ ID NO: 3662657 - DNA, 25 bp, Homo sapien
gttttcaaagggctacagtcgatta

SEQ ID NO: 3662658 - DNA, 25 bp, Homo sapien
ttgtgctggcccgaggatgatctga

SEQ ID NO: 3662659 - DNA, 25 bp, Homo sapien
gatgatctgaaggattgaattccat

SEQ ID NO: 3662660 - DNA, 25 bp, Homo sapien
aggaatattgtgctggcccgaggat

SEQ ID NO: 3662661 - DNA, 25 bp, Homo sapien
cgtccgtctgagatttactgaggaa

SEQ ID NO: 3662662 - DNA, 25 bp, Homo sapien
tatctagtgcaaaggtgacgaggga

SEQ ID NO: 3662663 - DNA, 25 bp, Homo sapien
tctggaacaaccctgacttaggtca

SEQ ID NO: 3662664 - DNA, 25 bp, Homo sapien
gaagatacagttccctaagctaagt

SEQ ID NO: 3662665 - DNA, 25 bp, Homo sapien
caaccaaggtatgggaaatccactt

SEQ ID NO: 3662666 - DNA, 25 bp, Homo sapien
cacgaacgagccaaagacagctggg

SEQ ID NO: 3662667 - DNA, 25 bp, Homo sapien
ctgcacacacgaacgagccaaagac

SEQ ID NO: 3662668 - DNA, 25 bp, Homo sapien
acacacgaacgagccaaagacagct

SEQ ID NO: 3662669 - DNA, 25 bp, Homo sapien
gcacacacgaacgagccaaagacag

SEQ ID NO: 3662670 - DNA, 25 bp, Homo sapien
tctttggcaaactagggaagagccc

SEQ ID NO: 3662671 - DNA, 25 bp, Homo sapien
tacacttaagttgctatgggacact

SEQ ID NO: 3662672 - DNA, 25 bp, Homo sapien
caagccataggatgctggtactaaa

SEQ ID NO: 3662673 - DNA, 25 bp, Homo sapien
taaaatagaccgaccttccaatggc

SEQ ID NO: 3662674 - DNA, 25 bp, Homo sapien
tgcctctcctgcctaagtagctgag

SEQ ID NO: 3662675 - DNA, 25 bp, Homo sapien
tctgtgtcgtggtcccgtccttcca

SEQ ID NO: 3662676 - DNA, 25 bp, Homo sapien
accaacatacccacttgctcattta

SEQ ID NO: 3662677 - DNA, 25 bp, Homo sapien
tgaggactgggcctctgtgtcgtgg

SEQ ID NO: 3662678 - DNA, 25 bp, Homo sapien
ccaacatacccacttgctcatttat

SEQ ID NO: 3662679 - DNA, 25 bp, Homo sapien
aatgaagagactcttgcgtttttct

SEQ ID NO: 3662680 - DNA, 25 bp, Homo sapien
ttagctctttacactgtacagtcat

SEQ ID NO: 3662681 - DNA, 25 bp, Homo sapien
gtacagtcattatgaagaacacagg

SEQ ID NO: 3662682 - DNA, 25 bp, Homo sapien
ctgtacagtcattatgaagaacaca

SEQ ID NO: 3662683 - DNA, 25 bp, Homo sapien
acagttattttagctctttacactg

SEQ ID NO: 3662684 - DNA, 25 bp, Homo sapien
gaacacgcagactctactggaccca

SEQ ID NO: 3662685 - DNA, 25 bp, Homo sapien
cagaagaacacgcagactctactgg

SEQ ID NO: 3662686 - DNA, 25 bp, Homo sapien
aaatggaactgagctacaagagaaa

SEQ ID NO: 3662687 - DNA, 25 bp, Homo sapien
gactctactggacccacaaacaaca

SEQ ID NO: 3662688 - DNA, 25 bp, Homo sapien
tggaggaggttatttcccctgcagt

SEQ ID NO: 3662689 - DNA, 25 bp, Homo sapien
gctgttttgagccagttaaaggccc

SEQ ID NO: 3662690 - DNA, 25 bp, Homo sapien
ggtagaggtgaacactcgccttgtc

SEQ ID NO: 3662691 - DNA, 25 bp, Homo sapien
taattcaccctgattgaacctgctg

SEQ ID NO: 3662692 - DNA, 25 bp, Homo sapien
tttggtgtgctatcaccaggtggca

SEQ ID NO: 3662693 - DNA, 25 bp, Homo sapien
ccagtctggctttctcgtttcaaag

SEQ ID NO: 3662694 - DNA, 25 bp, Homo sapien
gcacctatggcaaacaagacaaagg

SEQ ID NO: 3662695 - DNA, 25 bp, Homo sapien
cactacacagaattcccagtctggc

SEQ ID NO: 3662696 - DNA, 25 bp, Homo sapien
ccaactgtgggaagtcgtctgcctc

SEQ ID NO: 3662697 - DNA, 25 bp, Homo sapien
cacgttccgaacacatgaagtgagg

SEQ ID NO: 3662698 - DNA, 25 bp, Homo sapien
gcagtgaaatgctgacacgttccga

SEQ ID NO: 3662699 - DNA, 25 bp, Homo sapien
cacagcagctgtgttacggcagaaa

SEQ ID NO: 3662700 - DNA, 25 bp, Homo sapien
gactgtgctatcatctaggaaaatg

SEQ ID NO: 3662701 - DNA, 25 bp, Homo sapien
tatcatctaggaaaatggtggagca

SEQ ID NO: 3662702 - DNA, 25 bp, Homo sapien
ggtttggttgactgactgtgctatc

SEQ ID NO: 3662703 - DNA, 25 bp, Homo sapien
ggagcaggaactgtatttccttgct

SEQ ID NO: 3662704 - DNA, 25 bp, Homo sapien
gagtttatgcccactagtcacttcc

SEQ ID NO: 3662705 - DNA, 25 bp, Homo sapien
gacagagctctgtgagtgctgccag

SEQ ID NO: 3662706 - DNA, 25 bp, Homo sapien
ttcccgtgcactccggtgctgagga

SEQ ID NO: 3662707 - DNA, 25 bp, Homo sapien
aagaggctgcattgccacttagatc

SEQ ID NO: 3662708 - DNA, 25 bp, Homo sapien
accctcactgtcaatctgtgcaaca

SEQ ID NO: 3662709 - DNA, 25 bp, Homo sapien
aggcatatccccttcgcagggccag

SEQ ID NO: 3662710 - DNA, 25 bp, Homo sapien
ctgtgcaacaaagcctgtgccttgt

SEQ ID NO: 3662711 - DNA, 25 bp, Homo sapien
tataggcttctatggtgaaggaccc

SEQ ID NO: 3662712 - DNA, 25 bp, Homo sapien
gcagtgaacggggtgccatccggcc

SEQ ID NO: 3662713 - DNA, 25 bp, Homo sapien
cagtgaacggggtgccatccggccc

SEQ ID NO: 3662714 - DNA, 25 bp, Homo sapien
ggcagtgaacggggtgccatccggc

SEQ ID NO: 3662715 - DNA, 25 bp, Homo sapien
tggcagtgaacggggtgccatccgg

SEQ ID NO: 3662716 - DNA, 25 bp, Homo sapien
acttcccctatttcagccacgaagc

SEQ ID NO: 3662717 - DNA, 25 bp, Homo sapien
atttcagccacgaagccccatccaa

SEQ ID NO: 3662718 - DNA, 25 bp, Homo sapien
gctgtgccggtcattgtttttactt

SEQ ID NO: 3662719 - DNA, 25 bp, Homo sapien
cctcagcttagctgtgccggtcatt

SEQ ID NO: 3662720 - DNA, 25 bp, Homo sapien
gtgataatatattgcaagagcgaca

SEQ ID NO: 3662721 - DNA, 25 bp, Homo sapien
tttgatgtgataatatattgcaaga

SEQ ID NO: 3662722 - DNA, 25 bp, Homo sapien
gatgtgataatatattgcaagagcg

SEQ ID NO: 3662723 - DNA, 25 bp, Homo sapien
gtttttgatgtgataatatattgca

SEQ ID NO: 3662724 - DNA, 25 bp, Homo sapien
aaaggccagcctagtatgagagcga

SEQ ID NO: 3662725 - DNA, 25 bp, Homo sapien
gataccagtatcaccttaaggagtt

SEQ ID NO: 3662726 - DNA, 25 bp, Homo sapien
ccagagcagtcagagtaggtgcttc

SEQ ID NO: 3662727 - DNA, 25 bp, Homo sapien
gggcatccctcctcatacctagaga

SEQ ID NO: 3662728 - DNA, 25 bp, Homo sapien
gggaccctccgtacctcacgagtga

SEQ ID NO: 3662729 - DNA, 25 bp, Homo sapien
ctgtgaacacagtaccgtgggccgc

SEQ ID NO: 3662730 - DNA, 25 bp, Homo sapien
aaagaggtagctttcactgtgaaca

SEQ ID NO: 3662731 - DNA, 25 bp, Homo sapien
caggctggtacgtgcacagaaccac

SEQ ID NO: 3662732 - DNA, 25 bp, Homo sapien
tgtcctcccaaagttctgggattac

SEQ ID NO: 3662733 - DNA, 25 bp, Homo sapien
aggagatccacctgctttgtcctcc

SEQ ID NO: 3662734 - DNA, 25 bp, Homo sapien
tcaggagatccacctgctttgtcct

SEQ ID NO: 3662735 - DNA, 25 bp, Homo sapien
cctcaggagatccacctgctttgtc

SEQ ID NO: 3662736 - DNA, 25 bp, Homo sapien
ctggtagggaaaataatagaaaatg

SEQ ID NO: 3662737 - DNA, 25 bp, Homo sapien
tggtagggaaaataatagaaaatga

SEQ ID NO: 3662738 - DNA, 25 bp, Homo sapien
ttcatcaaaaatatctaagagcatc

SEQ ID NO: 3662739 - DNA, 25 bp, Homo sapien
tcatcaaaaatatctaagagcatcc

SEQ ID NO: 3662740 - DNA, 25 bp, Homo sapien
tttcatcaaaaatatctaagagcat

SEQ ID NO: 3662741 - DNA, 25 bp, Homo sapien
cactgaacagtgtccgaacgaaccg

SEQ ID NO: 3662742 - DNA, 25 bp, Homo sapien
cagggtgacgatggcacattcagcc

SEQ ID NO: 3662743 - DNA, 25 bp, Homo sapien
agccgtcagctgagcagcactgaac

SEQ ID NO: 3662744 - DNA, 25 bp, Homo sapien
gaacgaaccggtaaatctgcttctg

SEQ ID NO: 3662745 - DNA, 25 bp, Homo sapien
gtgtggccatcctgagggcactcac

SEQ ID NO: 3662746 - DNA, 25 bp, Homo sapien
tgggtgtggccatcctgagggcact

SEQ ID NO: 3662747 - DNA, 25 bp, Homo sapien
gccctggaccacctcggctggggat

SEQ ID NO: 3662748 - DNA, 25 bp, Homo sapien
gatgggtgtggccatcctgagggca

SEQ ID NO: 3662749 - DNA, 25 bp, Homo sapien
aatctcttccgggatatctatcctc

SEQ ID NO: 3662750 - DNA, 25 bp, Homo sapien
aggagaacgacaacactgaagctta

SEQ ID NO: 3662751 - DNA, 25 bp, Homo sapien
gaagcttatgccacggtgtccacag

SEQ ID NO: 3662752 - DNA, 25 bp, Homo sapien
ggtgggggctacagaacaatcttca

SEQ ID NO: 3662753 - DNA, 25 bp, Homo sapien
catacaaactggtatcctggtcaac

SEQ ID NO: 3662754 - DNA, 25 bp, Homo sapien
gctgatgagcctcagcagacagcag

SEQ ID NO: 3662755 - DNA, 25 bp, Homo sapien
agggctgcacctaccacgaaggcct

SEQ ID NO: 3662756 - DNA, 25 bp, Homo sapien
gcagctgcgctgatgagcctcagca

SEQ ID NO: 3662757 - DNA, 25 bp, Homo sapien
gactccctgtcactaagtttagata

SEQ ID NO: 3662758 - DNA, 25 bp, Homo sapien
tcctgggcagtgatgtgcgctaaga

SEQ ID NO: 3662759 - DNA, 25 bp, Homo sapien
ggcatggcaactcttagactccctg

SEQ ID NO: 3662760 - DNA, 25 bp, Homo sapien
gctgtagaactatatgctgggtcct

SEQ ID NO: 3662761 - DNA, 25 bp, Homo sapien
ttgcttatattagcatcaccacaaa

SEQ ID NO: 3662762 - DNA, 25 bp, Homo sapien
tagacttttacatgtctgacagcac

SEQ ID NO: 3662763 - DNA, 25 bp, Homo sapien
tcaagtattatatgtaccgtgcaca

SEQ ID NO: 3662764 - DNA, 25 bp, Homo sapien
gatgttatgacgtcactaggcgaca

SEQ ID NO: 3662765 - DNA, 25 bp, Homo sapien
cagttgctatattgggagataaggc

SEQ ID NO: 3662766 - DNA, 25 bp, Homo sapien
tgctatattgggagataaggcattc

SEQ ID NO: 3662767 - DNA, 25 bp, Homo sapien
aaagcagttgctatattgggagata

SEQ ID NO: 3662768 - DNA, 25 bp, Homo sapien
agcagttgctatattgggagataag

SEQ ID NO: 3662769 - DNA, 25 bp, Homo sapien
gaagcaatcagacaacacaatacat

SEQ ID NO: 3662770 - DNA, 25 bp, Homo sapien
cattacggctaactgaagcaatcag

SEQ ID NO: 3662771 - DNA, 25 bp, Homo sapien
aggtgtgatattccattacggctaa

SEQ ID NO: 3662772 - DNA, 25 bp, Homo sapien
gatattccattacggctaactgaag

SEQ ID NO: 3662773 - DNA, 25 bp, Homo sapien
catctcatccccagtatgtgcagca

SEQ ID NO: 3662774 - DNA, 25 bp, Homo sapien
agggctccggcaggctcttgaaaga

SEQ ID NO: 3662775 - DNA, 25 bp, Homo sapien
tcctgcagggacgacaagggaccgc

SEQ ID NO: 3662776 - DNA, 25 bp, Homo sapien
gccggcagagcgtgctccctgaatg

SEQ ID NO: 3662777 - DNA, 25 bp, Homo sapien
cactgattgggagaggtctcttacg

SEQ ID NO: 3662778 - DNA, 25 bp, Homo sapien
ggtctcttacgggatgcgaatgcac

SEQ ID NO: 3662779 - DNA, 25 bp, Homo sapien
ggtaattaacactgattgggagagg

SEQ ID NO: 3662780 - DNA, 25 bp, Homo sapien
cttacgggatgcgaatgcacaaggc

SEQ ID NO: 3662781 - DNA, 25 bp, Homo sapien
ggaagacaagacaatgccagagcta

SEQ ID NO: 3662782 - DNA, 25 bp, Homo sapien
tgccagagctaagtgatttgttttc

SEQ ID NO: 3662783 - DNA, 25 bp, Homo sapien
gacaatgccagagctaagtgatttg

SEQ ID NO: 3662784 - DNA, 25 bp, Homo sapien
caagacaatgccagagctaagtgat

SEQ ID NO: 3662785 - DNA, 25 bp, Homo sapien
tggtcatcccacaccttggaggcca

SEQ ID NO: 3662786 - DNA, 25 bp, Homo sapien
tctatctctgcgtatgttaaaagtc

SEQ ID NO: 3662787 - DNA, 25 bp, Homo sapien
gcaggatcgcccctaaaacaatccg

SEQ ID NO: 3662788 - DNA, 25 bp, Homo sapien
aaacaatccgcttccagttggccgg

SEQ ID NO: 3662789 - DNA, 25 bp, Homo sapien
cctgttcatgctgcaagtgggagcc

SEQ ID NO: 3662790 - DNA, 25 bp, Homo sapien
gttcatgctgcaagtgggagcccca

SEQ ID NO: 3662791 - DNA, 25 bp, Homo sapien
cagggatgtgggtgtagactgagac

SEQ ID NO: 3662792 - DNA, 25 bp, Homo sapien
tagtgctatctgattgttttctaca

SEQ ID NO: 3662793 - DNA, 25 bp, Homo sapien
gatgtgggtgtagactgagacagag

SEQ ID NO: 3662794 - DNA, 25 bp, Homo sapien
ctgtaagtcaagtagtgctatctga

SEQ ID NO: 3662795 - DNA, 25 bp, Homo sapien
acacccctgcagtggtagttgtcac

SEQ ID NO: 3662796 - DNA, 25 bp, Homo sapien
aacccacatgcccacgagtctgcag

SEQ ID NO: 3662797 - DNA, 25 bp, Homo sapien
taggctgctgcggaatccagaaccc

SEQ ID NO: 3662798 - DNA, 25 bp, Homo sapien
tgcagtggtagttgtcacaggcact

SEQ ID NO: 3662799 - DNA, 25 bp, Homo sapien
tcaaagggtgccacaacaatgggtg

SEQ ID NO: 3662800 - DNA, 25 bp, Homo sapien
cctggggagtcagtaaccagaggca

SEQ ID NO: 3662801 - DNA, 25 bp, Homo sapien
agggtgccacaacaatgggtgcctg

SEQ ID NO: 3662802 - DNA, 25 bp, Homo sapien
aaagggtgccacaacaatgggtgcc

SEQ ID NO: 3662803 - DNA, 25 bp, Homo sapien
gtggacacacctagtcatggtcggg

SEQ ID NO: 3662804 - DNA, 25 bp, Homo sapien
catcatgtgacgtgctgttcagtgt

SEQ ID NO: 3662805 - DNA, 25 bp, Homo sapien
taagacctagtctaatttcattagg

SEQ ID NO: 3662806 - DNA, 25 bp, Homo sapien
ggtcatgtatcatctaacaggaggg

SEQ ID NO: 3662807 - DNA, 25 bp, Homo sapien
tccaaaggtacatggggagactccc

SEQ ID NO: 3662808 - DNA, 25 bp, Homo sapien
gactcccagtcaagttctcactgtt

SEQ ID NO: 3662809 - DNA, 25 bp, Homo sapien
ctgtccaaaggtacatggggagact

SEQ ID NO: 3662810 - DNA, 25 bp, Homo sapien
tacatggggagactcccagtcaagt

SEQ ID NO: 3662811 - DNA, 25 bp, Homo sapien
tctgactggtgctggtgactatcca

SEQ ID NO: 3662812 - DNA, 25 bp, Homo sapien
tggcctgtgatgctgtgaccactga

SEQ ID NO: 3662813 - DNA, 25 bp, Homo sapien
ggtgccctgactattctgcctgcaa

SEQ ID NO: 3662814 - DNA, 25 bp, Homo sapien
tgcctgaagctaacatctgactggt

SEQ ID NO: 3662815 - DNA, 25 bp, Homo sapien
gcaccatcctgtcctgagtgatgtc

SEQ ID NO: 3662816 - DNA, 25 bp, Homo sapien
ggctgttcccggtgactcatagcac

SEQ ID NO: 3662817 - DNA, 25 bp, Homo sapien
tgtcccgagacccctatggctgttc

SEQ ID NO: 3662818 - DNA, 25 bp, Homo sapien
tagcactcagctatgaaggactgag

SEQ ID NO: 3662819 - DNA, 25 bp, Homo sapien
agctgccacgtggagtccagtgagg

SEQ ID NO: 3662820 - DNA, 25 bp, Homo sapien
cgtggagtccagtgagggcccttcc

SEQ ID NO: 3662821 - DNA, 25 bp, Homo sapien
ggagtccagtgagggcccttccgca

SEQ ID NO: 3662822 - DNA, 25 bp, Homo sapien
ccacgtggagtccagtgagggccct

SEQ ID NO: 3662823 - DNA, 25 bp, Homo sapien
caggaagcgtttcagggcgaatcac

SEQ ID NO: 3662824 - DNA, 25 bp, Homo sapien
gcgtttcagggcgaatcacttcact

SEQ ID NO: 3662825 - DNA, 25 bp, Homo sapien
ggcgaatcacttcactgagatctaa

SEQ ID NO: 3662826 - DNA, 25 bp, Homo sapien
cagggcgaatcacttcactgagatc

SEQ ID NO: 3662827 - DNA, 25 bp, Homo sapien
aagaaactgtcgctctagctcgttc

SEQ ID NO: 3662828 - DNA, 25 bp, Homo sapien
ccaagggaaagctcaggttgttcgc

SEQ ID NO: 3662829 - DNA, 25 bp, Homo sapien
tctgccagagaacgaagatcaaaat

SEQ ID NO: 3662830 - DNA, 25 bp, Homo sapien
taatacttggcatagacactggaag

SEQ ID NO: 3662831 - DNA, 25 bp, Homo sapien
gatgtattggcaacactgcaccaca

SEQ ID NO: 3662832 - DNA, 25 bp, Homo sapien
cacaaaacgctgttttaaaccatct

SEQ ID NO: 3662833 - DNA, 25 bp, Homo sapien
accacatgcatctctggtactcaga

SEQ ID NO: 3662834 - DNA, 25 bp, Homo sapien
tctggtactcagatgatgtattggc

SEQ ID NO: 3662835 - DNA, 25 bp, Homo sapien
gcactgagtgacaacatcccacctg

SEQ ID NO: 3662836 - DNA, 25 bp, Homo sapien
ggacatgacagtgccatccaccact

SEQ ID NO: 3662837 - DNA, 25 bp, Homo sapien
aacatcccacctgggatgggcagtg

SEQ ID NO: 3662838 - DNA, 25 bp, Homo sapien
gtgggcagcacgaagacctcacaag

SEQ ID NO: 3662839 - DNA, 25 bp, Homo sapien
ccagtgctatgcatccagtcttttc

SEQ ID NO: 3662840 - DNA, 25 bp, Homo sapien
tcttttctatggtttacttcttgga

SEQ ID NO: 3662841 - DNA, 25 bp, Homo sapien
tctaaccagtgctatgcatccagtc

SEQ ID NO: 3662842 - DNA, 25 bp, Homo sapien
ttttatttctaaccagtgctatgca

SEQ ID NO: 3662843 - DNA, 25 bp, Homo sapien
ccatttttcctcgaatagatgataa

SEQ ID NO: 3662844 - DNA, 25 bp, Homo sapien
cacaacatttgccttcaggaagtcc

SEQ ID NO: 3662845 - DNA, 25 bp, Homo sapien
gcttgcgaaggtttcacaacatttg

SEQ ID NO: 3662846 - DNA, 25 bp, Homo sapien
ctcgaatagatgataactgggagac

SEQ ID NO: 3662847 - DNA, 25 bp, Homo sapien
agagggggctcatgctctcagggaa

SEQ ID NO: 3662848 - DNA, 25 bp, Homo sapien
cagggaccacagcacaggctgagag

SEQ ID NO: 3662849 - DNA, 25 bp, Homo sapien
gctctcagggaaagccagattctac

SEQ ID NO: 3662850 - DNA, 25 bp, Homo sapien
gtgacgagggggaccagggaccaca

SEQ ID NO: 3662851 - DNA, 25 bp, Homo sapien
ggagctccggcttgtctcattagca

SEQ ID NO: 3662852 - DNA, 25 bp, Homo sapien
gagctccggcttgtctcattagcac

SEQ ID NO: 3662853 - DNA, 25 bp, Homo sapien
aggagctccggcttgtctcattagc

SEQ ID NO: 3662854 - DNA, 25 bp, Homo sapien
ctgcaagcggggcaagaacagcacc

SEQ ID NO: 3662855 - DNA, 25 bp, Homo sapien
agctcggccgctggcggcaaagaca

SEQ ID NO: 3662856 - DNA, 25 bp, Homo sapien
gaccaccagctagggactccacaga

SEQ ID NO: 3662857 - DNA, 25 bp, Homo sapien
cagggctggcatgaagcacgggctt

SEQ ID NO: 3662858 - DNA, 25 bp, Homo sapien
ggcccgaccagggtcaacgctggct

SEQ ID NO: 3662859 - DNA, 25 bp, Homo sapien
acccacacgcgtgctgttttgaatc

SEQ ID NO: 3662860 - DNA, 25 bp, Homo sapien
gtcaacgctggctccccatctaggg

SEQ ID NO: 3662861 - DNA, 25 bp, Homo sapien
agtcggcccgaccagggtcaacgct

SEQ ID NO: 3662862 - DNA, 25 bp, Homo sapien
agaaagacagtgtgggtcagggcgg

SEQ ID NO: 3662863 - DNA, 25 bp, Homo sapien
gtcagggcgggccatatctgcgtcc

SEQ ID NO: 3662864 - DNA, 25 bp, Homo sapien
tttcccaagagcttacagtctgaga

SEQ ID NO: 3662865 - DNA, 25 bp, Homo sapien
ctggcagcagggagatacgaaggga

SEQ ID NO: 3662866 - DNA, 25 bp, Homo sapien
cgcggatcttcttaggtccttgtac

SEQ ID NO: 3662867 - DNA, 25 bp, Homo sapien
ccaccggggcagagtcaggttgtct

SEQ ID NO: 3662868 - DNA, 25 bp, Homo sapien
ccttgtacttgtcctcgcagaggcg

SEQ ID NO: 3662869 - DNA, 25 bp, Homo sapien
ggctgagcgcttcctcgcggatctt

SEQ ID NO: 3662870 - DNA, 25 bp, Homo sapien
tctgcgccatggtgggtacaaacta

SEQ ID NO: 3662871 - DNA, 25 bp, Homo sapien
gaaactaagggatggtgtggcctcc

SEQ ID NO: 3662872 - DNA, 25 bp, Homo sapien
tactatttatttggaagtctgcgcc

SEQ ID NO: 3662873 - DNA, 25 bp, Homo sapien
gaagtcttacaggacacactggccc

SEQ ID NO: 3662874 - DNA, 25 bp, Homo sapien
agaaaatcggaaggcacaagcaccc

SEQ ID NO: 3662875 - DNA, 25 bp, Homo sapien
caaagttttccaagctcacatggga

SEQ ID NO: 3662876 - DNA, 25 bp, Homo sapien
tactcggtagttccaggcacatgcc

SEQ ID NO: 3662877 - DNA, 25 bp, Homo sapien
ggatacttttggttcagcactacag

SEQ ID NO: 3662878 - DNA, 25 bp, Homo sapien
tacctatgtgtcaagtgattcatcc

SEQ ID NO: 3662879 - DNA, 25 bp, Homo sapien
gaggtagaatccagggcacaggcta

SEQ ID NO: 3662880 - DNA, 25 bp, Homo sapien
gagttttaaacatccttagtgcaag

SEQ ID NO: 3662881 - DNA, 25 bp, Homo sapien
actaaaatctacacttacagcggag

SEQ ID NO: 3662882 - DNA, 25 bp, Homo sapien
aattgtgtcgtttccttcatcctta

SEQ ID NO: 3662883 - DNA, 25 bp, Homo sapien
tcaaaaactacactaagacaatgtg

SEQ ID NO: 3662884 - DNA, 25 bp, Homo sapien
gtaacaaattgtgtcgtttccttca

SEQ ID NO: 3662885 - DNA, 25 bp, Homo sapien
tccattcaaaaactacactaagaca

SEQ ID NO: 3662886 - DNA, 25 bp, Homo sapien
aaaataacaggatccccagacacca

SEQ ID NO: 3662887 - DNA, 25 bp, Homo sapien
agctcattgtatgacaggcctgtgc

SEQ ID NO: 3662888 - DNA, 25 bp, Homo sapien
gggttccacggaggagctcattgta

SEQ ID NO: 3662889 - DNA, 25 bp, Homo sapien
gcatgcctctgacctgtgtatactg

SEQ ID NO: 3662890 - DNA, 25 bp, Homo sapien
atgcctctgacctgtgtatactggg

SEQ ID NO: 3662891 - DNA, 25 bp, Homo sapien
ccgaagggatgcgagggtcgccagg

SEQ ID NO: 3662892 - DNA, 25 bp, Homo sapien
gcgcagcagggtgcagtatccgggt

SEQ ID NO: 3662893 - DNA, 25 bp, Homo sapien
cagtatccgggttagggctgtttct

SEQ ID NO: 3662894 - DNA, 25 bp, Homo sapien
gcaggctccgaagggatgcgagggt

SEQ ID NO: 3662895 - DNA, 25 bp, Homo sapien
tgcacgccgggccacattgtactgg

SEQ ID NO: 3662896 - DNA, 25 bp, Homo sapien
gccctaactaggaatggtcctggga

SEQ ID NO: 3662897 - DNA, 25 bp, Homo sapien
ctgggacctcaaggagccctgcacg

SEQ ID NO: 3662898 - DNA, 25 bp, Homo sapien
cctgactgccactctaaagtgcaac

SEQ ID NO: 3662899 - DNA, 25 bp, Homo sapien
tttactatggtgtgagttagaaaca

SEQ ID NO: 3662900 - DNA, 25 bp, Homo sapien
tacgtcttatcagtcatctttacta

SEQ ID NO: 3662901 - DNA, 25 bp, Homo sapien
cgtcttatcagtcatctttactatg

SEQ ID NO: 3662902 - DNA, 25 bp, Homo sapien
acgtcttatcagtcatctttactat

SEQ ID NO: 3662903 - DNA, 25 bp, Homo sapien
tggtggaagcattcccaggcgtcgt

SEQ ID NO: 3662904 - DNA, 25 bp, Homo sapien
tgcactggccacaaacacactgttc

SEQ ID NO: 3662905 - DNA, 25 bp, Homo sapien
gcattcccaggcgtcgttttctctc

SEQ ID NO: 3662906 - DNA, 25 bp, Homo sapien
cctcgcaggctaaagtgacactacc

SEQ ID NO: 3662907 - DNA, 25 bp, Homo sapien
tcctgcagcctgtctgtaactcgtg

SEQ ID NO: 3662908 - DNA, 25 bp, Homo sapien
ctgcagcctgtctgtaactcgtgtc

SEQ ID NO: 3662909 - DNA, 25 bp, Homo sapien
tgcagcctgtctgtaactcgtgtca

SEQ ID NO: 3662910 - DNA, 25 bp, Homo sapien
gcagcctgtctgtaactcgtgtcac

SEQ ID NO: 3662911 - DNA, 25 bp, Homo sapien
tttttctcgatgatgggtgctccag

SEQ ID NO: 3662912 - DNA, 25 bp, Homo sapien
aagaatgatgtaccagcaaagatgc

SEQ ID NO: 3662913 - DNA, 25 bp, Homo sapien
tggagtgactttttctcgatgatgg

SEQ ID NO: 3662914 - DNA, 25 bp, Homo sapien
ccagcaaagatgcaggaggcttgga

SEQ ID NO: 3662915 - DNA, 25 bp, Homo sapien
tcacttagaacacctccactactgt

SEQ ID NO: 3662916 - DNA, 25 bp, Homo sapien
actccccttggataaagcgttctgc

SEQ ID NO: 3662917 - DNA, 25 bp, Homo sapien
ttagaacacctccactactgtctgt

SEQ ID NO: 3662918 - DNA, 25 bp, Homo sapien
ttatgctttggccaagactcccctt

SEQ ID NO: 3662919 - DNA, 25 bp, Homo sapien
tcacaaaaattggaggaggatccag

SEQ ID NO: 3662920 - DNA, 25 bp, Homo sapien
gatcaactagcgagaagagcagctg

SEQ ID NO: 3662921 - DNA, 25 bp, Homo sapien
ccaggaagggccaattcagaagaga

SEQ ID NO: 3662922 - DNA, 25 bp, Homo sapien
tcagaagagaaacgggtccctggga

SEQ ID NO: 3662923 - DNA, 25 bp, Homo sapien
tgggcatcaactcccgactctctgt

SEQ ID NO: 3662924 - DNA, 25 bp, Homo sapien
gtaagagcatcccagcaccgatggg

SEQ ID NO: 3662925 - DNA, 25 bp, Homo sapien
ctgaagctagctggaggtaagggaa

SEQ ID NO: 3662926 - DNA, 25 bp, Homo sapien
cagcaccgatgggaaggtttctgta

SEQ ID NO: 3662927 - DNA, 25 bp, Homo sapien
agaaagcaaaggtctgagccaggag

SEQ ID NO: 3662928 - DNA, 25 bp, Homo sapien
tgtgagctggagataagaaagcaaa

SEQ ID NO: 3662929 - DNA, 25 bp, Homo sapien
taactacataagacttaaaggtgtg

SEQ ID NO: 3662930 - DNA, 25 bp, Homo sapien
cataagacttaaaggtgtgagctgg

SEQ ID NO: 3662931 - DNA, 25 bp, Homo sapien
gttctccaaggaggcggataaatgt

SEQ ID NO: 3662932 - DNA, 25 bp, Homo sapien
ggagggctgtgttctccaaggaggc

SEQ ID NO: 3662933 - DNA, 25 bp, Homo sapien
gctgtgttctccaaggaggcggata

SEQ ID NO: 3662934 - DNA, 25 bp, Homo sapien
tgtgttctccaaggaggcggataaa

SEQ ID NO: 3662935 - DNA, 25 bp, Homo sapien
agaaaccctagcaagtccacgcctt

SEQ ID NO: 3662936 - DNA, 25 bp, Homo sapien
accatggtcacgttgcagtttaatg

SEQ ID NO: 3662937 - DNA, 25 bp, Homo sapien
tgtgatgatgagaaaccctagcaag

SEQ ID NO: 3662938 - DNA, 25 bp, Homo sapien
catggtcacgttgcagtttaatgtg

SEQ ID NO: 3662939 - DNA, 25 bp, Homo sapien
tctttggagtcagcaccccagtgtc

SEQ ID NO: 3662940 - DNA, 25 bp, Homo sapien
cagggttgcacacaaacacccctcc

SEQ ID NO: 3662941 - DNA, 25 bp, Homo sapien
cagcaccccagtgtcagcacaggat

SEQ ID NO: 3662942 - DNA, 25 bp, Homo sapien
ccctccacctgctttggtctttgga

SEQ ID NO: 3662943 - DNA, 25 bp, Homo sapien
tgattaacatttgttgttctgttcc

SEQ ID NO: 3662944 - DNA, 25 bp, Homo sapien
gcctcatcaccccgaatacactgcc

SEQ ID NO: 3662945 - DNA, 25 bp, Homo sapien
ggcctcatcaccccgaatacactgc

SEQ ID NO: 3662946 - DNA, 25 bp, Homo sapien
tccgcagcagcatcgtgaggacgaa

SEQ ID NO: 3662947 - DNA, 25 bp, Homo sapien
gaagacgtcgtagcaaacattggcg

SEQ ID NO: 3662948 - DNA, 25 bp, Homo sapien
tgctcgtcctggtagacgggtcgcc

SEQ ID NO: 3662949 - DNA, 25 bp, Homo sapien
ctggatcagccagaaccgcaggtga

SEQ ID NO: 3662950 - DNA, 25 bp, Homo sapien
ccgaatggccgcgggcagcgtctct

SEQ ID NO: 3662951 - DNA, 25 bp, Homo sapien
gcgagcgtggctcctcggtgcagga

SEQ ID NO: 3662952 - DNA, 25 bp, Homo sapien
agcgcggcgagcgtggctcctcggt

SEQ ID NO: 3662953 - DNA, 25 bp, Homo sapien
ggtgcaggacatagacgctgaagac

SEQ ID NO: 3662954 - DNA, 25 bp, Homo sapien
aaagtagtgcaaggccccgaaggct

SEQ ID NO: 3662955 - DNA, 25 bp, Homo sapien
tgtgggccgcgacacgtagcagtcc

SEQ ID NO: 3662956 - DNA, 25 bp, Homo sapien
gatgatgtagccggccgaaaagtcg

SEQ ID NO: 3662957 - DNA, 25 bp, Homo sapien
agggcgcgtgcaagggaacttcttc

SEQ ID NO: 3662958 - DNA, 25 bp, Homo sapien
gctccgctctgcttccggatggagg

SEQ ID NO: 3662959 - DNA, 25 bp, Homo sapien
gtcagtccggcgtccctccgcgtgg

SEQ ID NO: 3662960 - DNA, 25 bp, Homo sapien
gcgtccctccgcgtggcctgaggct

SEQ ID NO: 3662961 - DNA, 25 bp, Homo sapien
ccaggtcggcgaggcccagcagaaa

SEQ ID NO: 3662962 - DNA, 25 bp, Homo sapien
tccggaatcttcgtgtgccctgaca

SEQ ID NO: 3662963 - DNA, 25 bp, Homo sapien
gggctgtctgcccagcttttcgctg

SEQ ID NO: 3662964 - DNA, 25 bp, Homo sapien
ggctgctcctcggatcctgagcccc

SEQ ID NO: 3662965 - DNA, 25 bp, Homo sapien
ccagcttttcgctggcggaggatgt

SEQ ID NO: 3662966 - DNA, 25 bp, Homo sapien
ggagatatattctcaaacgatcctc

SEQ ID NO: 3662967 - DNA, 25 bp, Homo sapien
ggcaaggagatatattctcaaacga

SEQ ID NO: 3662968 - DNA, 25 bp, Homo sapien
ttgggcaaggagatatattctcaaa

SEQ ID NO: 3662969 - DNA, 25 bp, Homo sapien
ccggggcaccgccaggtgctgtttt

SEQ ID NO: 3662970 - DNA, 25 bp, Homo sapien
gccaaagtgagtatgcatcagcaca

SEQ ID NO: 3662971 - DNA, 25 bp, Homo sapien
gagtgtggccgacagaaccatctca

SEQ ID NO: 3662972 - DNA, 25 bp, Homo sapien
tctcctgtaatgtccgtgtgtcccc

SEQ ID NO: 3662973 - DNA, 25 bp, Homo sapien
cctgaggaccttcgttgagtgatga

SEQ ID NO: 3662974 - DNA, 25 bp, Homo sapien
cacactgaagtttaaggacccgcaa

SEQ ID NO: 3662975 - DNA, 25 bp, Homo sapien
gaagcgctccaaaattgcatcagtg

SEQ ID NO: 3662976 - DNA, 25 bp, Homo sapien
ccagaggacctgcaaacattttgta

SEQ ID NO: 3662977 - DNA, 25 bp, Homo sapien
ccgcaagacattcccgcacagtgat

SEQ ID NO: 3662978 - DNA, 25 bp, Homo sapien
ctgcaaatgtgctgtatagtctgaa

SEQ ID NO: 3662979 - DNA, 25 bp, Homo sapien
gagctaaatgaatagggttaatctg

SEQ ID NO: 3662980 - DNA, 25 bp, Homo sapien
ctctgcaaatgtgctgtatagtctg

SEQ ID NO: 3662981 - DNA, 25 bp, Homo sapien
atagggttaatctgtagggaacttg

SEQ ID NO: 3662982 - DNA, 25 bp, Homo sapien
gggtttgcagtcagatacacagatt

SEQ ID NO: 3662983 - DNA, 25 bp, Homo sapien
cagaacccgagatttggagccctcc

SEQ ID NO: 3662984 - DNA, 25 bp, Homo sapien
cacttgatgggctgaggttcccacc

SEQ ID NO: 3662985 - DNA, 25 bp, Homo sapien
gagccaagtgcagcgaagggacact

SEQ ID NO: 3662986 - DNA, 25 bp, Homo sapien
ttggcgctgctgcagcgctctagcg

SEQ ID NO: 3662987 - DNA, 25 bp, Homo sapien
gctgctgcagcgctctagcggcgct

SEQ ID NO: 3662988 - DNA, 25 bp, Homo sapien
tcaccgtgccgctgtgtaagggcat

SEQ ID NO: 3662989 - DNA, 25 bp, Homo sapien
ctggcatgccaagagatcaccgtgc

SEQ ID NO: 3662990 - DNA, 25 bp, Homo sapien
ccggcgcggcaagcggcccggccca

SEQ ID NO: 3662991 - DNA, 25 bp, Homo sapien
ggcgcggcaagcggcccggcccagc

SEQ ID NO: 3662992 - DNA, 25 bp, Homo sapien
gcggcaagcggcccggcccagccat

SEQ ID NO: 3662993 - DNA, 25 bp, Homo sapien
cgcggcaagcggcccggcccagcca

SEQ ID NO: 3662994 - DNA, 25 bp, Homo sapien
gactgcggccggagcgcggcgctga

SEQ ID NO: 3662995 - DNA, 25 bp, Homo sapien
cgccggagaaagagggcggcggcct

SEQ ID NO: 3662996 - DNA, 25 bp, Homo sapien
cgctgacttttccaggcggcggggg

SEQ ID NO: 3662997 - DNA, 25 bp, Homo sapien
tccgtctgtcccggcggcggacgga

SEQ ID NO: 3662998 - DNA, 25 bp, Homo sapien
ggttaccaaaactctccatccgcag

SEQ ID NO: 3662999 - DNA, 25 bp, Homo sapien
cagagagcgcgcacagcagtgcgga

SEQ ID NO: 3663000 - DNA, 25 bp, Homo sapien
ccaacactctgtctctgcggtcaat

SEQ ID NO: 3663001 - DNA, 25 bp, Homo sapien
tgcggtcaatcccaaggttaccaaa

SEQ ID NO: 3663002 - DNA, 25 bp, Homo sapien
tccggcctcgtgcagagagcagata

SEQ ID NO: 3663003 - DNA, 25 bp, Homo sapien
tggcccaagcggctgctaaaagcag

SEQ ID NO: 3663004 - DNA, 25 bp, Homo sapien
gcctgtgaacttgggatggatgaat

SEQ ID NO: 3663005 - DNA, 25 bp, Homo sapien
agagcagatacgtgtcgcggagtcc

SEQ ID NO: 3663006 - DNA, 25 bp, Homo sapien
ccagcaggctgtgagagttatttcc

SEQ ID NO: 3663007 - DNA, 25 bp, Homo sapien
tcagttacgctagcaaagaccagaa

SEQ ID NO: 3663008 - DNA, 25 bp, Homo sapien
gaatgaagccatcctatatgaccta

SEQ ID NO: 3663009 - DNA, 25 bp, Homo sapien
gcctactggatggtgagaacccaca

SEQ ID NO: 3663010 - DNA, 25 bp, Homo sapien
tcagaagtgagatttgaagtcttca

SEQ ID NO: 3663011 - DNA, 25 bp, Homo sapien
tgtctttcaacactaagtaccttac

SEQ ID NO: 3663012 - DNA, 25 bp, Homo sapien
tttagacagcatattgtttcatcag

SEQ ID NO: 3663013 - DNA, 25 bp, Homo sapien
ctaagtaccttacaattaactgaat

SEQ ID NO: 3663014 - DNA, 25 bp, Homo sapien
ggtttcagtgacaaattaattactg

SEQ ID NO: 3663015 - DNA, 25 bp, Homo sapien
ctataagtggagccggacccctcag

SEQ ID NO: 3663016 - DNA, 25 bp, Homo sapien
atgtatttccagtccgttcttcgta

SEQ ID NO: 3663017 - DNA, 25 bp, Homo sapien
tatttccagtccgttcttcgtatta

SEQ ID NO: 3663018 - DNA, 25 bp, Homo sapien
ttcagctctgcgaaattccttccct

SEQ ID NO: 3663019 - DNA, 25 bp, Homo sapien
agctctgcgaaattccttccctttt

SEQ ID NO: 3663020 - DNA, 25 bp, Homo sapien
tcagctctgcgaaattccttccctt

SEQ ID NO: 3663021 - DNA, 25 bp, Homo sapien
tcttcagctctgcgaaattccttcc

SEQ ID NO: 3663022 - DNA, 25 bp, Homo sapien
tgatagtggtttgctttttgataga

SEQ ID NO: 3663023 - DNA, 25 bp, Homo sapien
ccttgtgatagtggtttgctttttg

SEQ ID NO: 3663024 - DNA, 25 bp, Homo sapien
gtttgctttttgatagataagtttc

SEQ ID NO: 3663025 - DNA, 25 bp, Homo sapien
gtggtttgctttttgatagataagt

SEQ ID NO: 3663026 - DNA, 25 bp, Homo sapien
cattgatatctctgatcctgatgac

SEQ ID NO: 3663027 - DNA, 25 bp, Homo sapien
cattgaagatttgatgagagcaaag

SEQ ID NO: 3663028 - DNA, 25 bp, Homo sapien
tgaagatttgatgagagcaaagaag

SEQ ID NO: 3663029 - DNA, 25 bp, Homo sapien
ccattgaagatttgatgagagcaaa

SEQ ID NO: 3663030 - DNA, 25 bp, Homo sapien
attgaagatttgatgagagcaaaga

SEQ ID NO: 3663031 - DNA, 25 bp, Homo sapien
tgatgccatatttattaagagacac

SEQ ID NO: 3663032 - DNA, 25 bp, Homo sapien
tattaagagacacagcaatcaaagt

SEQ ID NO: 3663033 - DNA, 25 bp, Homo sapien
ttaagagacacagcaatcaaagtgt

SEQ ID NO: 3663034 - DNA, 25 bp, Homo sapien
atatttattaagagacacagcaatc

SEQ ID NO: 3663035 - DNA, 25 bp, Homo sapien
aagggcacgggaagtcacttgcttc

SEQ ID NO: 3663036 - DNA, 25 bp, Homo sapien
cacgggaagtcacttgcttctttga

SEQ ID NO: 3663037 - DNA, 25 bp, Homo sapien
gggcacgggaagtcacttgcttctt

SEQ ID NO: 3663038 - DNA, 25 bp, Homo sapien
ggcacgggaagtcacttgcttcttt

SEQ ID NO: 3663039 - DNA, 25 bp, Homo sapien
cagcatccgaagtcagcgccaggtg

SEQ ID NO: 3663040 - DNA, 25 bp, Homo sapien
tacagggcagcatccgaagtcagcg

SEQ ID NO: 3663041 - DNA, 25 bp, Homo sapien
agggcagcatccgaagtcagcgcca

SEQ ID NO: 3663042 - DNA, 25 bp, Homo sapien
gcagtggggatcagcagaggcccct

SEQ ID NO: 3663043 - DNA, 25 bp, Homo sapien
aaagctttcggaggaactcaggcct

SEQ ID NO: 3663044 - DNA, 25 bp, Homo sapien
cttctaggaaggcacacgctgtggg

SEQ ID NO: 3663045 - DNA, 25 bp, Homo sapien
ttcagcgaaggaagaagtctccggg

SEQ ID NO: 3663046 - DNA, 25 bp, Homo sapien
gctaaaccattcaggaagggcaaca

SEQ ID NO: 3663047 - DNA, 25 bp, Homo sapien
tagaagacgctttctctccattggg

SEQ ID NO: 3663048 - DNA, 25 bp, Homo sapien
ggtatttcaggtgtatctcccatag

SEQ ID NO: 3663049 - DNA, 25 bp, Homo sapien
gaattggcctgacactttaagcagc

SEQ ID NO: 3663050 - DNA, 25 bp, Homo sapien
tcccctttgtgatattagaagacgc

SEQ ID NO: 3663051 - DNA, 25 bp, Homo sapien
aaaatgctccaaataagaacagtgt

SEQ ID NO: 3663052 - DNA, 25 bp, Homo sapien
cattcgcagtatggagtctgaggtc

SEQ ID NO: 3663053 - DNA, 25 bp, Homo sapien
gaggtctaaggatgagtaaaatgct

SEQ ID NO: 3663054 - DNA, 25 bp, Homo sapien
tccaaataagaacagtgtaattaca

SEQ ID NO: 3663055 - DNA, 25 bp, Homo sapien
ttttagggcatgacaattttgcttt

SEQ ID NO: 3663056 - DNA, 25 bp, Homo sapien
agctatttggattttagggcatgac

SEQ ID NO: 3663057 - DNA, 25 bp, Homo sapien
ggaaagctatttggattttagggca

SEQ ID NO: 3663058 - DNA, 25 bp, Homo sapien
tagggcatgacaattttgctttgta

SEQ ID NO: 3663059 - DNA, 25 bp, Homo sapien
ttctggtatagttattcaccacagg

SEQ ID NO: 3663060 - DNA, 25 bp, Homo sapien
tattcaccacaggattgatgaaact

SEQ ID NO: 3663061 - DNA, 25 bp, Homo sapien
ggtatagttattcaccacaggattg

SEQ ID NO: 3663062 - DNA, 25 bp, Homo sapien
ccacaggattgatgaaacttatcaa

SEQ ID NO: 3663063 - DNA, 25 bp, Homo sapien
ctgcgtcagcacaaaaagctgtttt

SEQ ID NO: 3663064 - DNA, 25 bp, Homo sapien
cctgcgtcagcacaaaaagctgttt

SEQ ID NO: 3663065 - DNA, 25 bp, Homo sapien
tgcgtcagcacaaaaagctgttttc

SEQ ID NO: 3663066 - DNA, 25 bp, Homo sapien
agcagtaagctgtcccgttgctctc

SEQ ID NO: 3663067 - DNA, 25 bp, Homo sapien
gcagtaagctgtcccgttgctctcc

SEQ ID NO: 3663068 - DNA, 25 bp, Homo sapien
gtaagctgtcccgttgctctcctgt

SEQ ID NO: 3663069 - DNA, 25 bp, Homo sapien
gctgtcccgttgctctcctgtactt

SEQ ID NO: 3663070 - DNA, 25 bp, Homo sapien
ggaagagaatcagtgcacggggcag

SEQ ID NO: 3663071 - DNA, 25 bp, Homo sapien
aaggaagagaatcagtgcacggggc

SEQ ID NO: 3663072 - DNA, 25 bp, Homo sapien
aagagaatcagtgcacggggcagct

SEQ ID NO: 3663073 - DNA, 25 bp, Homo sapien
gaagagaatcagtgcacggggcagc

SEQ ID NO: 3663074 - DNA, 25 bp, Homo sapien
cagaaaagatcgttttcaaaagaag

SEQ ID NO: 3663075 - DNA, 25 bp, Homo sapien
ctgctgtaggtaacagttgctgtac

SEQ ID NO: 3663076 - DNA, 25 bp, Homo sapien
gctgtaggtaacagttgctgtactt

SEQ ID NO: 3663077 - DNA, 25 bp, Homo sapien
ggtaacagttgctgtacttaaagcc

SEQ ID NO: 3663078 - DNA, 25 bp, Homo sapien
gcaacattttgtcaccagaatctgc

SEQ ID NO: 3663079 - DNA, 25 bp, Homo sapien
gcactgcccaaggtacgtttcctgt

SEQ ID NO: 3663080 - DNA, 25 bp, Homo sapien
ctctcggtggacagcactgcccaag

SEQ ID NO: 3663081 - DNA, 25 bp, Homo sapien
aacttcaaataggtggagttcctgc

SEQ ID NO: 3663082 - DNA, 25 bp, Homo sapien
gccaggaaacactcttttcaatgca

SEQ ID NO: 3663083 - DNA, 25 bp, Homo sapien
gttagatccaaaccgagaaagctgg

SEQ ID NO: 3663084 - DNA, 25 bp, Homo sapien
tgttccggtccagttagatccaaac

SEQ ID NO: 3663085 - DNA, 25 bp, Homo sapien
acagccaggaaacactcttttcaat

SEQ ID NO: 3663086 - DNA, 25 bp, Homo sapien
taaaatgccaagagaagcttgccat

SEQ ID NO: 3663087 - DNA, 25 bp, Homo sapien
aatgccaagagaagcttgccatgac

SEQ ID NO: 3663088 - DNA, 25 bp, Homo sapien
ctaaaatgccaagagaagcttgcca

SEQ ID NO: 3663089 - DNA, 25 bp, Homo sapien
aaaatgccaagagaagcttgccatg

SEQ ID NO: 3663090 - DNA, 25 bp, Homo sapien
tcttgtacggggtcatttcctctaa

SEQ ID NO: 3663091 - DNA, 25 bp, Homo sapien
ttctcttgtgccgcaactcttgtac

SEQ ID NO: 3663092 - DNA, 25 bp, Homo sapien
tcttgtgccgcaactcttgtacggg

SEQ ID NO: 3663093 - DNA, 25 bp, Homo sapien
tgtacggggtcatttcctctaagga

SEQ ID NO: 3663094 - DNA, 25 bp, Homo sapien
tgctgataatctggtaaccccagcc

SEQ ID NO: 3663095 - DNA, 25 bp, Homo sapien
agccaagccaaggatgtcattctgt

SEQ ID NO: 3663096 - DNA, 25 bp, Homo sapien
cagccaagccaaggatgtcattctg

SEQ ID NO: 3663097 - DNA, 25 bp, Homo sapien
gataatctggtaaccccagccaagc

SEQ ID NO: 3663098 - DNA, 25 bp, Homo sapien
ctggaagtcaccaggactgagccag

SEQ ID NO: 3663099 - DNA, 25 bp, Homo sapien
acaggcagcaaggacggcagaggga

SEQ ID NO: 3663100 - DNA, 25 bp, Homo sapien
gggctgtaaactgaaatgcccagca

SEQ ID NO: 3663101 - DNA, 25 bp, Homo sapien
gactgagccaggacctacaggcagc

SEQ ID NO: 3663102 - DNA, 25 bp, Homo sapien
cagtttagcaaaaggtagacacgtg

SEQ ID NO: 3663103 - DNA, 25 bp, Homo sapien
gagaaacccgtctaatgtgtcttaa

SEQ ID NO: 3663104 - DNA, 25 bp, Homo sapien
ccagggacggttctacagtttagca

SEQ ID NO: 3663105 - DNA, 25 bp, Homo sapien
cacatagggccttgcgacattatca

SEQ ID NO: 3663106 - DNA, 25 bp, Homo sapien
tgacaaccagctgagagtgaaagcg

SEQ ID NO: 3663107 - DNA, 25 bp, Homo sapien
caggaatgtgacctggataggtgct

SEQ ID NO: 3663108 - DNA, 25 bp, Homo sapien
ttatcagccaacaccttagttgaca

SEQ ID NO: 3663109 - DNA, 25 bp, Homo sapien
cagttcatagctttgttatcagcca

SEQ ID NO: 3663110 - DNA, 25 bp, Homo sapien
tgcaatggtcccctctgcataatcc

SEQ ID NO: 3663111 - DNA, 25 bp, Homo sapien
caattgttgcatcaaaagccctgaa

SEQ ID NO: 3663112 - DNA, 25 bp, Homo sapien
ccatctttcaccacggtgtggttca

SEQ ID NO: 3663113 - DNA, 25 bp, Homo sapien
tgtggttcaggccaacttcatcaat

SEQ ID NO: 3663114 - DNA, 25 bp, Homo sapien
gtcctttcctttcctcagtgccctg

SEQ ID NO: 3663115 - DNA, 25 bp, Homo sapien
tttcctttcctcagtgccctgttca

SEQ ID NO: 3663116 - DNA, 25 bp, Homo sapien
cctttcctttcctcagtgccctgtt

SEQ ID NO: 3663117 - DNA, 25 bp, Homo sapien
cctttcctcagtgccctgttcacta

SEQ ID NO: 3663118 - DNA, 25 bp, Homo sapien
taactaaagaggcagatccaaagtc

SEQ ID NO: 3663119 - DNA, 25 bp, Homo sapien
aagtcatctcttccatgatctatgg

SEQ ID NO: 3663120 - DNA, 25 bp, Homo sapien
ggttttaactaaagaggcagatcca

SEQ ID NO: 3663121 - DNA, 25 bp, Homo sapien
catgatctatggcatggaacagtgg

SEQ ID NO: 3663122 - DNA, 25 bp, Homo sapien
ttgaacttcagtgatatcattagac

SEQ ID NO: 3663123 - DNA, 25 bp, Homo sapien
tctctcagctcgtcacacatctgca

SEQ ID NO: 3663124 - DNA, 25 bp, Homo sapien
cacatctgcacaggcgtgtctcgac
